United States Patent Application Publication US 2011/0183924 A1 - sequence listing, part 224

SEQ ID NO: 581403 - DNA, 613 bp, Homo sapiens
gggttcccaaaacactttcaggagtctgtgaggtcttctcttttccaacagcataactgtgtgaggccagattttctttatatgcttcatccaaaaaacatataacaatagaatgcagagaagatatgaggctccagctgtcttctgttaagccagatacttaaaatatttgcaaaatgtaaaacactgccattcttactttttttggttttagaaaatacaactttttcatttttataatgttactaatattaaataatgggtttattattgtttgctaaatgttaatattttattttctcagttctgacagtaaatatcaataaatacaacccatgtaaaggaaagctctttgttttttaattatttttaagagtataaaggggtcctggcaccaaaaaatttaagaaccactcctttagaccagttcataattgtatgggttagggtatgttttattgtcgcctgaccatttaattaataaaacctgttatcatctgtatctcccgtgtctttgttctgctctgtggaatgactagtaaagttagttgggcttggtatgtgcagccttccttccattcagctaagaatctattcagtagtttatttgtgc

SEQ ID NO: 581404 - DNA, 777 bp, Homo sapiens
  misc_feature (390)..(390): n is a, c, g, or t
  misc_feature (742)..(742): n is a, c, g, or t
caatatgccagcttcaatgcagtgtttgtgaattgtgccagtgtcagatctcaggagtcctgtgttgagagtgtgtgtctttcagctgtcgtgggatgctgcacttgtgtggcgcgaaagccaggcaggtctaccctcacatgccagcataagtgctggaaggtcacgcaacctcatatggaatggcgatgtgaggacctcctacctcccagatgcgggcgaccttgtgcctacccattcccttgggggaacctgaagtataatgcgtacattcacctctgcggggtgatatggctgggggtggtgtgccaagagagggaccatgtgcgcctccgtcaggctggctgtagggggcatcgcacgccactctggatgcatattgggtagtcntgctctatttagtcccgctcttccacgcgttcgtttcgtccctgctgatattcatttctccactcgatgacgcccaatgagcttgttcacatgcgttcgtttcgtccccctggggaatgtaattgccgtggacgtctgcgctgggtgactacgtagctgaagcctatgtaagcatgttgccacacccgtcgccctttatattcgcttggctacgcgctgtgcctcagcattttactgaggaccttccttagatcacaatactgacgggacgcgcttgcgatgttggctggctttggtgcctggtgggtcccgcgcgattttggggacgcgcccagggtggggagcgactccncttgaaggcccggaagtttgtggaccgccctgggc

SEQ ID NO: 581405 - DNA, 414 bp, Homo sapiens
ttactgaacaaatataaaaaataaagagaagtatgtgacgagaagtacttaaaatccaagcataatataatattaaatttgactgggggagggtctaaattgagagtgtgtgtcacatgcctatgtgtagaactaaagaataatttaaataaattatgacttatacaaatatgaatgaatgtatgcccaaaattccatttaactgattgattaatgagggaaccagtaagatgttacaactgattcaaatgagaagttaaagtatcacatacatttaaagtcaggaaagaagtgctaaatgaatttacaaaaaggtgcataaggctggacacggtggctcatggctgtaatcccagcaatttgggaggctgagataggcagatcacttgaggtcaagagtttgagaccagcctg

SEQ ID NO: 581406 - DNA, 416 bp, Homo sapiens
actggctgactgcgactgtttgatgccattagccgaaatcgccatcaactagctacagtttgcattgtatgcgatattcccaacattgccgtaaagcagtctagatggctgagtaacggtgattgaaccccggttgtgattatttgtctctaacaaaatgggacaaaagatgagaaaacctcgtagtatccgagtctggtacttataggatccccaacttttaagattataaattcaccatagtgaacaccctagtgacaacatttaaattaaatactggatagctgggcacaggtggtcacacccgttatcccagcacttagggacggcgaggcgtgtagatcacttgaggtcaagagttcaagaccgacctggtcaacatggtaaaagctcctctctaatataaatacaaaaat

SEQ ID NO: 581407 - DNA, 208 bp, Homo sapiens
gcaaaggtagcataatcacttgttccttaaatagggacctgtatgaatggctccacgagggttaagctgtctcttacctttaacagtgaaattgacctgcccgtgagaggccggactgacacagcaagacgagaggacttttggagctttatttattaatgcaaacgtccttacaaaccacagtcctaactaccaacctcgcattaaa

SEQ ID NO: 581408 - DNA, 220 bp, Homo sapiens
ctttgcaccttccattcagagtttgcagccagatctagggactcctcccctatcctctaccaaggaaaagattgctattgtcgtactcacctaccgaccctactccgggagtcttttgaggagttttctccacctaaccactttcaacatttcttttgtgattctcgactctttgcatgcctacccccgatcctttttccctatgtccagtatccctgga

SEQ ID NO: 581409 - DNA, 662 bp, Homo sapiens
  misc_feature (31)..(31): n is a, c, g, or t
  misc_feature (485)..(485): n is a, c, g, or t
cgaggatctatcttaacgccccaaactcacnaattctatagaaagctagcaaaaatagacaagatcttgcaaccatggtgaggtaaataccagtctatttatgggaaaatcacaccgatgaactcttaagtcatatcacagtttacttatttacttatggtgctgcctatgtggccgatgtgaaatggctagctagttagtggtggtgcacgctaatagtgtttcagtcggtgacgtcactcactctgagacggtgacgtcactcactctgagacctagaagtagttgttccccttgctctgcaagggccacggcttttgtggagtgatgggtaacgatgcttcgtgagtggctgtggttgatgtgtgcagagggtccctagttcaagcccaggttggagcgaggagagggacggaagctatactgttacacctactccagattacttgtttttatataagcaaaaaatatttcactttatattngtattttgttcagccaaggcagcagctactcttcatggtgtccacacaggaataaaacaattacatcataaaaagacaatatatcatacaagaacttattacattattactccattattgcacatttacagtatcacatttacaacactacaatatactgtgtgtgtgtgcgggggt

SEQ ID NO: 581410 - DNA, 329 bp, Homo sapiens
ttttctttgagacagaagtctctgttgcttgggctgcaatgcagtgatgcaatcttggctcactgcaacctccccctcctgggttcaagtgattctcgtgcttcagcctcccaagtacctgggactacaggtgtgcaccaccacaccaaggctaattttttgtgtatttttactagagacagggtttcaccatgttggccagcgtggtcttgaacgcctgacctcagatgatccacccaccttggcctcccaaagtgctgggattacaggcatgagccaccacggccagcccacaatgatattacaaacctattaaaaatgatacttag

SEQ ID NO: 581411 - DNA, 110 bp, Homo sapiens
ataaaatagtgacacatccttatactttattgcttttctgtcttattcaacctgggagaggccctgaatttgagtgtgctctctaatcaatagtggcatcgataaacacc

SEQ ID NO: 581412 - DNA, 596 bp, Homo sapiens
  misc_feature (18)..(18): n is a, c, g, or t
tacctactttccacaggnaaacgttccaagcttgtgatagccccttcaccctaaaaccaatatatactcttagtctataagagaaagcgctcctgaccgcaatcggccaagagcgcctctcaggttttaactaaagaaaacttgcctttaactgccagctgcattttgtgtttctttcctctttctttaactcttacaaggccgaggagagcagatcacctgaggtcaggagtttgagaccagactgggcaacatggcgaaaccccatctctactaaaaatataaaaattagccaggcgtagtggcgggcgcctgtgatcccagctactcaggaggctgaggcaggagaatcgcttgaaccccgtaggcagaggttgcagtgagccatgatgcactgcactccggcctgggtaagagagtgagactccgtctaaaacaaattaaaataaaataaaaaaggtgttttcagggttctgaagaggctcctgaggctcaaagtggcacagtggcttgctgaggtcattgggctggttaacagcaaggtcaggaagagagaggcctcaggtctcctgaccgtgtcctctttctaaagcatc

SEQ ID NO: 581413 - DNA, 138 bp, Homo sapiens
ggggggggggggtttttccaaaagcccccattcccacccccaggggggttgggcccccccaaagcacccccccggggggaggggttaaaggggggaaatttttttgatcttttttttaaaaaaaaggaaaaggggcca

SEQ ID NO: 581414 - DNA, 416 bp, Homo sapiens
  misc_feature (104)..(104): n is a, c, g, or t
  misc_feature (244)..(244): n is a, c, g, or t
tacctgaaacagctcagttaaaaacattttagaataaatgtctccccacagatccatgttgctgcctataaaaacactgctcaaatagtccccgatgagactgntgtctgaggtctctcagacatacaggtatccgaggtttctgctcatggtttttagtttcagccaaattttaagtacagactaatgattggtctccaaagttctccctttcaggaaacatatacataattcaatgataccnatgggtttaaatatttaagaatactgtggcagtgcttaacaaatacccacgtgttccccctacctcatctgtgtccttggggctgtgtgaccatctgtggccagtggtgatgaaggagtgaagggttccacttctagccagcgtcttcgcaaaccggaagggtcctctagag

SEQ ID NO: 581415 - DNA, 409 bp, Homo sapiens
ggagttcaagagcaacctgggcaacacacacacacacacacacacacacacacacacacacttctttccagctctgacacacacacacacacacacacacacacacacatttatttcttgcccgctgtgatattctagaatatagagagatggcacagggcacaatagagcgagtgattatatgtgtggaaatagggtcccagtgagggcgtgtagcgtagagtgtctagggagagagtgaagatgcttttcaattactatatccaagttagaggggtattcgtgtgattcgtgctagagaatctcgcgcgagaggggatatattccgtgctgtgctgagcagtgtgttatatatgtgtctatttactcatatattgtgatctattactctttagccagaatacgagat

SEQ ID NO: 581416 - DNA, 273 bp, Homo sapiens
ggctatcccgcatgaaggttaaagagcatcaggtggtgcgtaatgaagaacagaaggcggaacaagaagagggtaaggtggctcagcgagaggaacagttggaggagacaggtaatcagcacaatgatgtagaaatagaggaagccaggcagcaggcagcaggcaaaaggcaacatcgcgattgttcatcagtgatgcagcagaaagcacacaggcaggaggcacagcaacaacaaacaggcaaatcgcagcgttaagcatggcagcacagga

SEQ ID NO: 581417 - DNA, 792 bp, Homo sapiens
  misc_feature (792)..(792): n is a, c, g, or t
gaagtacaaaaaattggctgggcatggtggtatgcatctgtagtctcagctaattgggaggctgaggcaggagagtcacttgaacctcggaggtggaggttgcagtgagccaagatcatgccattgcactccaagccttggggaacaagaagtaaaaactccgtctccgaaaaaaaaaaaaaaacaaaacaaacaaaaaacacatttttggggcgcggccacggcgcctcagagaaaaaggtttttacaacccaattctgtttgtggggcgcgcgggggggccccagtgaggtgcatcggggaccacgggtgcaaaagcgggggtgggtccacaaagggagaaccttcggggacaagaacaaatggcggggggggttctccccaccaatattaaaaaaaaccggcccgggggcggaaccaccgcgggggggttcgtagaacaaaacctccaaaaaggggggcatccgggaaggaacactaaacgcggagtctcataacaaggggggggttcccaaggggagacccgcgaataaaaaaataagcccggcggcggtgagaagacagagcaacacacaaaacagagacagcagagactgacgacagacgacgaagacacgatcgaaacacgaccgcaagacaccgaagacatcagaacacacaacacgcaagcagccgaaaacgagagtgagcacgacaccgacaaccgagacaacagaagaccacgagacaacagatgagacccaagaccaaagcgacgaagagcacagccgacacgcacgacgcaactagagn

SEQ ID NO: 581418 - DNA, 295 bp, Homo sapiens
ccgcgctcggtactccgacggatacgcggatctgcccaagcgatcaccaatagcgctttggtcaaggacgagatcctcactgcggccctgtcttttgtggagccccagccactggcagtggtggcgagccatgctgccgatggcagtctgtggtcgtcggtactgtttggccggccggggtttgtgcgggctgtggatacgcatgaggtgcgcatcgatctgagtggtgcgcacctgataccgggagatccggtcctgcaaaatctccaggatgacccgagggtggggatgttga

SEQ ID NO: 581419 - DNA, 462 bp, Homo sapiens
atgtccattggcacattagtgatcttacgtagaagatgaggaaatcaggtctgcatagaaaatcctggagctaagcagtggcaatgcgcatttcctgtcctgtgctcaactcctaatttcccctgagagaagtgagtaaagctctctgtctagggtttcttcctctctaagtggaggatcatggtaccagaagcttgcattactgtgatcatgacagtgcttacaatcacaaagccttggggggtcttactaagataagctgccgcaagaaaatgagcatgaggaaatacttcatcttcaagttaaagccaaataggtgcattcattcctcttaatctataatttggcactgtagttggtagatctgtctcagaattttccagaaggatagtatcaaatgtgatttaaaccaagtaactataaagaatcataaaaacaggcaaggcccggtggcttaaagct

SEQ ID NO: 581420 - DNA, 340 bp, Homo sapiens
gtgagacagcgggtcccgacgtcacgtcactgtcctagttatcaatttgacatcggagttttgagggttcgagtttcactaggaggttggagtcggagggttccatcgaccctggtgttccacgttacggttggtacggaccccaaaaagacaaacaagacaagaaacaaaaagaaccaaaaggaaaaaaccctcctctaccccagagtggtgacactaacggatccgaccccaccttcccgtagtgaacacggccctccttcctccaacgtcactcgactctaacagcgggtgacgtgaggtcagtacccactgttctcactctttggtagagttttta

SEQ ID NO: 581421 - DNA, 134 bp, Homo sapiens
gaggatcccctgctgctccctcttcacattgcagacaagatccatcccagaggagcaggaattagaagcttatgtagatgatatagatattgatagtgatttccgaaaggatgatttttatttacttggtctcc

SEQ ID NO: 581422 - DNA, 236 bp, Homo sapiens
cggccgcctactactactaaattcgtggccgcgtcgaccataagccagggcttaacttgagggtgaagggtgggaggggggtgaggatcgaaaagttacctattaggtattatgcttattaccggggtgacaacataaattgtataccaagcccccatgacacagagtttacccgtataaaacctgcacatgtgcatatgtactccctgaacctaaaataaaagttgggaagaaag

SEQ ID NO: 581423 - DNA, 117 bp, Homo sapiens
  misc_feature (20)..(20): n is a, c, g, or t
ggtccgcttctgcttctgcnattctcctaattgatccagatattcgttgactttgtctatcctttttatactctcgtggacgcctctctgatctgcagtcactgcagcgacctttta

SEQ ID NO: 581424 - DNA, 358 bp, Homo sapiens
  misc_feature (261)..(261): n is a, c, g, or t
cgggcatccaaaaaggagtcctgggagaacgggcggaacgaacgagggcccccggactggaggctttagagctcccacgggaaaatggcttcccggaggtcaaaaaaaaaggaggccggcgagatttgaacccgtctcccgggggctgtaaatagtttgataaacgttcccccagtctaaaattaccctttatatttgctgaaaaccactcatcttttgtagtttaaaatttctattgttttggagccaactgtgagtttntaaaagtgtacaaagttgctcctgtgttcccgggtcatgttgagtaggaataaataaatttgatgctgccccctgaggctgcggggggtttttccca

SEQ ID NO: 581425 - DNA, 315 bp, Homo sapiens
tggtgcacaactagggtcagttttgcaggtggtaagccatttaccaagatagttgtaggtaaagaagggcagatttattagagaaattgtgaaaatatgttgcagtgggcagctcagcatagaaggggctacctgcaaagaggcaagggctggaggaaagttttatagggtcctgctgaagggtgctacgtgtggaatgtggacattgtgcccgcaggttgtttgtgattagctgtttctaacaattgttcatacaataattgttcattattgttctcaacttggggctctccccaacctggggacccttcctta

SEQ ID NO: 581426 - DNA, 924 bp, Homo sapiens
cccacgctgttacgaccatcgcgtcccgtaaatattatactagccattcaccatctcacttctaggactactagtatatcgctcacacctcatatcctcccatactatgcctataacgcgaataatactatcgctgttcattatacgcatactcatcagtgaagccctgcaagcacccactccctgcttagcctcgaatacttgtcgtccttatctgccgatgacgtagatctttgtcgcgcccgtgctgaaagctatgcggtgtcgcctgagtcccgtactagtcttcaagtctccaacacactatggttcctataagcgtagctgtacataaacgctataacccatagctcctatatatgctacaaacctaagtcgtcccaaaatattactacttaacctatccagctgatcatttgaccttatcctatataaaacacataagtctgacatcaagctatcaagtcagaccatcatggccttactctaaattaggcgattcattgcccgtctaactgattttgctatacccaagattcaacgtaactaacgcatatttgagcttggtttccccctaagccttttattaccttcctgtaaaccacccttttatcaaaaaatcgcccagcctccactcaattagttaacttttaacctattacttcatttgagctccccttcaattaactctattggagcatcgcctcgaaaacgacccaacttttaatccccacggtgaataccaaccttattgcacttaatataacccacttttccctaactcttcctccctaaatactacgatacctctcgcttagcaaaaatcatccatataaattttattaactcttattatcaacggggacaaccagaagaattaattccattattatgaactaattcttgacttctcgaaaacccaag

SEQ ID NO: 581427 - DNA, 106 bp, Homo sapiens
ccctatgtcttgccaccgaagaactggaagcgctcgcccgacgaagttcggtggcttatgggcttcaatcgtgacgtcatccaccgtcgatcgcgatcaagctcga

SEQ ID NO: 581428 - DNA, 600 bp, Homo sapiens
ccatgctgctctgaaaagcatctttgcatgtccctcatccgctcttgcttcgcgagccgctcgccggcgctctcgccgcggactcggaagttatcgcagatccctgaatttcgttcttaaatcccgtgcttgggatcacggtccccaacaatgtcaagacgcaggcgggtaaaacagttcgaaaatcaccacaaggcttacggacgaccacgcaatttgtgaaagacgcaaaactggaaaaaagacgcctggaaaaagggaaatcgctgacaatggggaaatggggacacacagacgggtcgccaattggtggtcgccacgacaacacggcacacacgttctgtcgagccgacaaagagcgggggcaggaaacacaccacggtgttcatggctagacaaccacgaacgtcgtgaacagtgtaaccagattcgaggaacactctgagtcacacgacacggggcaaagcgcggccgtgttagaacaatatgcttggctgtaaatcacagttgtgattaaccaaggaaaccaagaaacacggcagaagattgacatcagcagcgctttaaaacacacgaacgaccacaacgaaacacaaacaa

SEQ ID NO: 581429 - DNA, 955 bp, Homo sapiens
  misc_feature (22)..(22): n is a, c, g, or t
  misc_feature (624)..(624): n is a, c, g, or t
  misc_feature (662)..(662): n is a, c, g, or t
  misc_feature (667)..(667): n is a, c, g, or t
  misc_feature (677)..(678): n is a, c, g, or t
  misc_feature (682)..(682): n is a, c, g, or t
  misc_feature (693)..(693): n is a, c, g, or t
  misc_feature (700)..(700): n is a, c, g, or t
  misc_feature (711)..(711): n is a, c, g, or t
  misc_feature (718)..(718): n is a, c, g, or t
  misc_feature (727)..(727): n is a, c, g, or t
  misc_feature (729)..(729): n is a, c, g, or t
  misc_feature (734)..(734): n is a, c, g, or t
  misc_feature (739)..(740): n is a, c, g, or t
  misc_feature (744)..(744): n is a, c, g, or t
  misc_feature (746)..(747): n is a, c, g, or t
  misc_feature (759)..(759): n is a, c, g, or t
  misc_feature (762)..(762): n is a, c, g, or t
  misc_feature (769)..(769): n is a, c, g, or t
  misc_feature (778)..(778): n is a, c, g, or t
  misc_feature (783)..(783): n is a, c, g, or t
  misc_feature (955)..(955): n is a, c, g, or t
tgtggggttatctgataggatngcaccaggtccctcagagcgtgggctggctgctcactgtcgaaaagcacaggtaccctctcgtgacttctctggccagctcaactgggtggtgacaaattacaagccttccaacctctgacgtacatcccaagggacagacagcatggcagcctgcgggaagaccaataaatcccacgtcatcttcaagaaggtctctcgggacaagtcggtgaccatctacctggggaagagagactatgtagaccacgtcagccaagtagagcctgtagatggtgttgtgctggtggaccctgagcttgtgaaggggaagaaggtgtatgtcaccctgacctgcgccttccgctatggccaggaggacattgatgtgatgggcctgaccttccgcagggacctgtatttttctcgggtccaggtataccctcctgttggggccatgagtgtcctcacccaactccaagagagcctgctcaagaaactgggagacaacacgtacccctttctgctcacgtttcctgactacctaccctgttcagtgatgttgcagcagctccccaggatgtaggcaagagctgtggggttgactttgaggttaagcattgnctcagacatcacagatctgaggaggacagatccccaanaaagntctggcggtnntgtncggaagtgagnatgccanctgagatggtncccaccngtgtgagcncnggagnctcannttgnanncctgaactcttngtncccaggnaagaaattncgggngccacccggatggaccggcacaaccgcaaggggggacacatctcgggacaacacgggggccacaggtaataaccggccgaaacaaaagaaacatcgacagggtggaaaagaggggagagaagacacacagacgcgggttagatatcacgaccgcacaaaaaaagaaagccgn

SEQ ID NO: 581430 - DNA, 480 bp, Homo sapiens
ggggcacggatctccacgcgtcgatcagtcatctcaagcgggaaaaggcataatgggctaacgttcctctctggcgactgcccactcatcctaaccctactcctaatcagataacctattccccgcgagcaagctcaattacgatatatacaccaacaaagagggtgcaaccagataggtactactaatcaacgcggaggtatcatacaaaggcgcgggaccaataggagtcgcgtcccgaatcaaccctgagccctctccttcataaagttattcagcttcctacactattaaagtttaccacaagcaccaccccatcatactctttcagccacagcaccaatcctacctccatcgctaaccccactaaaacactcaccaagacctcaagccctgacccccatgcctcaggatactcctcaatagccgtcgctgtagtatatccaaagacaaccatcattccccctaaataaattaaaa

SEQ ID NO: 581431 - DNA, 493 bp, Homo sapiens
caatatactatatcatgctgttcctcgttgatatggatccatcaataaatatacaataaaccagaggaggggtgtgctctgaaaggtcaatgtaacaataacagtggtcttggtacagcagaaaattgaacaagtggctatccttggaaaattcaaaacaaatgatttacacaaagacatttctataacataagggtgaagggaccaggtaatccttatccctaagtacatttggcgtttcccagataagtcaactgtttcctctctcccactcctctgatacaactagttttgattgagtgtgggctacaaaatcaattctgggtgtggtaatgaatctcattatcaaacttccggaagggttcggctagaaaagccaattctacctggcttgaaatatggatgcgaagatgtctggggtctctttggatttttcactcagagctaatttcaggggaagtctacaggagcggggaaacttttgactttccgt

SEQ ID NO: 581432 - DNA, 161 bp, Homo sapiens
cttcgtttattgctaaaggtacactgctgttcccgtgtgggtgtggctaggctaagcgttttgagcgtgcattgctgtcgtgctcttatgcttgtcccttttgtatcgtggtagatttagacgggtgagctcactgagtacggggtatgcttgccatgtgt

SEQ ID NO: 581433 - DNA, 237 bp, Homo sapiens
agggtcccccccaaagccaaactttggggtgggttttttccctttaaaaaaattgtataaaaccggaaaggggggggggtgagcctggggtccccttttataaaaaaaaagccttttgtttttaaaaaaggaaagtttaattttcccctatggttgggggggaaaatttaaagctgggattttttttaaaaaagttaaacccttaattttttataaaaaacttttttgggtttttga

SEQ ID NO: 581434 - DNA, 115 bp, Homo sapiens
atcatcggcattgcactgcagggcccaagactgggccgcgactagaaggtgaatgggatggagatctcgttggactgcgatggtagcttgggtatggagggcctccagggtcagt

SEQ ID NO: 581435 - DNA, 739 bp, Homo sapiens
ctaaaagtgctgtcatccctcaaacctgcagtgccccatacgcgagccatcagcgatcacaacagcgagcggcagcctccacggcagctatcgctcggaccgctgtcgtctgcttccagagacagcatcaccgctggagcacatcctgcagactctctttggaaagaagaaatcattcgacccgtacgccatgagagcctcccggtgtccacgcgcagggtctcccccaggagtcccaaaatgcacagcagaggacggggtgccggtcaccttccgttgtatagatccgatcgtccagcagttcggtcagttctcaaagagataaggctctagaggacgaggaggacgacagggcccagtaacgacccgtggaggacggagtactgagccggaagagggccttcgaccacttcagcctagttgggaagcccgagggccggcgccgaccgcgaggggtggaacagggcgctccttgaaagcatgctgcagcctgagcgggcgaccagagtgtcggccgtagtgacctccgacggattggaagacccactcctatacggacaagaccggcgcaaggggtgaccgttggtcgaatgaacccgtggccccaaagcagggcattggtggtagcccgagcggttggcaggaaggggggacaactcccggctggccaagaacgggcccttccctggatgcacggttttcccctgggtggccttggggaacacgcccatccccttga

SEQ ID NO: 581436 - DNA, 187 bp, Homo sapiens
  misc_feature (19)..(19): n is a, c, g, or t
  misc_feature (116)..(116): n is a, c, g, or t
tttattgtttgtataaatnatttattataaattaaattatctttataggcatgatggtgcatgactgtagtcccagctacttgggaggttgaagtaggagaattacttgagtccanacggtcaaggctgcagtgagcagtgattgtgccactgcattccaggcgttttagccaggatggtctcgatc

SEQ ID NO: 581437 - DNA, 101 bp, Homo sapiens
acagtctatcatcactcaggatcttgaatctgatcgggaagatgccagtcgatacagcagctcggagagatgcagagtcagtccctcagaactgctctacc

SEQ ID NO: 581438 - DNA, 539 bp, Homo sapiens
  misc_feature (510)..(510): n is a, c, g, or t
atggaccgggatgaggttgtgggtgagccgcacagggccagggggtggaggatgataccttcaggatgctaccagtgctgtccgcagagagggcctgctcgatgcccatcagcagtggggtcacgtgtggccacccactcttcgtggggggcagcctcacctgagtcaccatctgcgggacagcctcgtgcagagccagatcggaacactcaaaagagtgccgatagtccttcagccggagcagggagtcctgcaaaagaagcaggtggggctgcctctcaggaatgggagtcatacactccgggtgtggggccgggtcaaacccaggggtgcacaaggtggggcggagcagatgcacaacagccttgtagtcgcctgcttcatacagccgttgaatctcctccagggactggcaccgttccagcgacttcaggttcttatcaatctcctccagggaaaccacagagtcattatggaggtcgagcagccggatgacaatgtctcttcgtncagccccttgctccagcgggatgggggtg

SEQ ID NO: 581439 - DNA, 1029 bp, Homo sapiens
ggagcacaagattccttccctcttcagcagaagatcttgagtatgctctttgatgctcttgatcaggcagttgacacatcacagaggtcactctggggaccgttatatgaagcctacagtaaagtctgtcgcatacagcaggtggcggcatgatggaccagtcagagtgtttgtcactttcacgggctcttggtaagccaggggcattttcaggattcaaagagaaacaaggaaacccgtttgaccaacaggtgctttctctcaagcatcgcacagagcaacagaaatagcacacatgctctgcaacagatcaacagcttctacattggcacacatatccttcaacaaaaacaacacccacagggcgcgagcccgaaccaagagcgaggaataactccccctcgagagagaggcacccccacggcctacaaaccgccgcatcacccgcaacacctcactcatgcgcaccacacaaaacgcgggaactcccacctcactagcgggccagccccagcaacacacaacccacaggacctacggaccacccgggcgcacccgacaacgatccacaaccccaaagggcaccacggcggaacaagcggacgacaccacaaaccggggccaatcagccctccgcgcaacaacccaagcgagaacatcaaagcgcgagcacccccgcacacaccaatacgagagaggcgggtgcaacgcaccacaatacaactggggcaacaccaaccccaaacgcccacacacagacacgacacattgacaaaacccgcaccccccgaaaaaggcgcccacaccccgcccaccagaaccacctacaccaacaccacgccgacacaacccacaccaggcagcggcaaacaccgcccacagacacccccccggacaacaacaccccgcaccatgacaccccgcgcccccgacaaccacaccgcaccacacggcccacacacaccccggaaccaaccactcgaacgcaacagcaccgcgccaaacacactaccaccaccacacacaaca

SEQ ID NO: 581440 - DNA, 124 bp, Homo sapiens
ccccccccccccccttttttttaaaaaaaaagggccttggcttgggttggagctgtcccccccccagtaagggggtttacaaatgttttcccctgggccccccaataaaaagaccccttggtta

SEQ ID NO: 581441 - DNA, 1327 bp, Homo sapiens
  misc_feature (308)..(308): n is a, c, g, or t
  misc_feature (389)..(389): n is a, c, g, or t
gagcagcaatatggctgtcgatgggtgtatggggtggctggctggcggctggagaacggagactcccccgagccacctgcgccggacatggcccgtagtcgtaggctatgtgcaaactggttggactggcaggccggacgtgccggtcagtcgacggtcgtgcctggcaggacaggcaggccggcaggagggcatgactaacgctcttgagaagtgaggtacggccaatatccaacgctgaatccgatctcagacctaaaacgcgtcctcctcactcctcctccatcctcttcctcttcttccttctntccgaccttcctacttacctaccttcgtcctacgggtaccacgagccgccagatggatgtgattggctgctacagttcatncctcggtagatcgcattggcagtgttgcgcgctagtcgatcaggtcccgtggagccaagctgccagtgtagtgtgctgcttctacctaggttctccctccattgcgtgactttctttccgcgcgggcctcttcagtcattcctttgctctgcgcaggacagctcaaggtacgctgtaggatcgctgtggttgctgcactaccttggcggtggtgcaaggaacgaaagggccacaccacctattggggggtccccccggggcatagatggcacaggctccagacacgtcgcggcgaatggcatagggagcgcgcgatgtacctggtcttggagagcccggcgggttatattaatctgcctgtgcaagcgatctgtcaccatgggcgctcgaaggttggctaagatgttcggtccgcgcttttagctcattctctggtgccagacgcccactcgtggaacttcgagtggctcgggcgaacaggctctccgaaggtgttatgggcttgctaagggcttcactgcgcttgggtcctgtacggtcggtggtcccctaggaagaattgtctttcccctttcccccaacaagcgccacctggggctgggacgataggtgtgggaccccggaaccacgctgacttaggaaaaaaccttggcatgaactacaccaccacccgaacacccgaccccttggcgcaaccacaacacaacccacaccccgacgagacacacccgcgcgagcggcgacccaaacgctgcgcgcgcagtgccaccacaaaccggcgcgactaaggagcgcgccccacctgcgcccaagccggcggtcccggaaccccacagcccctctgccaacccgcgcgggccccaccccgcgccgccgccccccacaagtcggccagcaccccaccaccacccaccacgcccacgccaacccgtgctagt

SEQ ID NO: 581442 - DNA, 173 bp, Homo sapiens
gaagtgtttctagggtgatcgtgtgagaaaccacatattaacagtagagaatagacgtagacatacgagcatattatcacctccgatacacataatcatcgctatccccaccggcgtcaaagtctttagactgactcgaccacaactccacggacagcaataatgaaatgatc

SEQ ID NO: 581443 - DNA, 104 bp, Homo sapiens
cacagtgagcacatctcacggctcccctagtgctgcccgctggcgggagcctgctggatacctgcagctaggaataatagaaatagaacctgcggtcctatatc

SEQ ID NO: 581444 - DNA, 101 bp, Homo sapiens
ccattgatgggaagttcagcaagatcagcaacaaaccaagaaaaaaatgatccttgcgtgcagaatatctgaaaagagaaatttttcctacaaaactcttg

SEQ ID NO: 581445 - DNA, 166 bp, Homo sapiens
gctcttggggaagggagaaggatttcttaaaccccggagcgaggttctgcttacccgaggccgctgtctgttccggaagaaccccccggttaaaggcaaccttcaatcatgtctgtaccaagaggcaaaaaaaccttcaactgtaaggactttggggggataaagc

SEQ ID NO: 581446 - DNA, 406 bp, Homo sapiens
gcagagagtagacatgtgactgttctagaggccagataactgtgtaagccaatggtattgacaggtcactcgatggcaggctagggtcccatcgaccggttataagcgaagcgggagtccgagcgcgctacgaccatcggtaacaggtccgtgagggtcccctgtgagcagggcgcgtgcactctgggggttcacacgacggtcgccgcgcggaccgcggcagtgcgcgtccgccccgagggcggcgccccttacaggtcctagtcggagtcgctgtagtccagactgttcctcggttggcagctactgagatgctctcgatgcagcgacaggctctgcatgatgcgacgcaggcagtacaggctctgcaggaacgacttagtgaaattgtcctcgtacatggggg

SEQ ID NO: 581447 - DNA, 121 bp, Homo sapiens
ctctagagtatccctgtcatttagtccactgtaggatatgaatgaagagtcagactggaaactgctgaatcaatggacctaaattgacaatggacctaaatggacaatggacctaaatgga

SEQ ID NO: 581448 - DNA, 2077 bp, Homo sapiens
aactttacgcgtagggtagacatggagagttagcatttcatatagccttaggacagagtttgttcatccctattttgatggcacggctactttatcttactgtgtttcctctgtgtccaagtatttattaatattttttaagattttcaagtcaaaatggcaatttgagtatatgtatgtagcctgacttcagaatcgggagagacttttcaaccttgagctacccactggcagcgtgagagaaggtgataggatgtcataggctcagcttacacaagtaagcatgcacaagtgtgtaaataggcaaaaacccctttccagattgcaacatttttcccagtcctgagttcagccctttctcaccaacataacaatctatatttcttttaacttttattttaggtttgggggtacatgtgaaggtttgttacataggtaaacatgtgtcatgggggcttgttgtacagattatttcatcacccaggtattaagcccagtacccaatagttatctcttttgctcctctccctcctcctaccttccccactcacgtagactccagtgtctgttgtttctgtctttgtgttcataagttcttattatttagctcccacttgtaagtgagaacatgcagtatttggttttctgttcctgctttagtttgctaaggataatggcctccagctccatccatgttcctgcaaaagacatgatctcattcttttttatggctgcatagtattccatggtgtatatgtaccacattttctttatctaatctataacctacatttcaaaatgaacactgcaggataatatccagaggacagaaaaggaaatgtgtgatggttacctttggggttatatctttctgtcatccagttatcccatctttctcctggggaccttgggttccagtggcataaagtcctagtccatcaggcaatgactaaagcacagatcgggatccttcgcagcaactttaggaagggtgccaagttcagagtccagaaaaaaaaagggaaacctacaactcatactcagcttccacacaccatgaatgaccccactaggcaaagagatgagttgcttcttgtttcagtattattccataacaaaccatccaaaaacctaatgacttaaactataatttgctatttttcctcacattttttgggtcgattgggctcagttggatagttctcatttagagtctctcatgaagctgcagtcagatggcggctggggctggaatcactggaaggttgattggacatcccagagggcttcttcactcctttgaccgccttcattgtacctcaacaggcctccctgcagtaggccagccaggatttcttacatggaggctcagggcaccaaaaacaggaagcagaaactgtcaggcctcagaggcaggctcaaagctagcacatcactttcattatattcaaaacaatcacagccaaccgagattcaagggagtagaggcatagacccctcctcgccacagcacatgtgtactacagggggaaaagatggcagccacctttgcagataagctaccaccaccacaaacaggaagcaagaattatttgggttggaagattttccttctgcccagagagccctgaaagagcaccctctgtgctactcttgggtggcccagtgattaaagagcaaagtttgtgcaaatataattgtgtaaaacgttggagaaaagtaacttaataaactcacaaccacccttggacttcaataaagcaagcagatgaaaaagtaaataaaagatatagaggctttaattaaatcgaatcaaaaaatgattaatggatatttaacagcacccttcaaataaataattcatattattttcttaacttgtaaaaatcaactataacttaggccacaaagaaaacctgaaaaaagagagaacatataatttttagagtccacatataccaccaaaaataaaaataaaaatctacaatttagcaataagggattaaactcttgcttcaaaaaagcacttagacaccactgcactccagcctaggcgacagaccgagagcttgtctcc

SEQ ID NO: 581449 - DNA, 128 bp, Homo sapiens
tagatcttgcccagcagacaacaacggagccatcgtgaaggctttccatctggagaagggggtggcagagatatgttttagaaagatggcctagctgggtgcggtggctcacgcctgtaatcccagca

SEQ ID NO: 581450 - DNA, 280 bp, Homo sapiens
ctgctctccacccggacacttctgagaaggccaaagatgttctgtttgatcagctgcatggggctgactatcctctgagcactatggctcgggcaaattggccagaaagatgtccaacgcttggatgtcatacttgccactgaagttcctaaggacagcctgtgcaatgtcttgcggggaaggctttctatttgaagcctttgctgcagcaaagaaccatattgctagaggctgtcgtagtccacgacgcccgaaagaattccttgtccttactcgtaca

SEQ ID NO: 581451 - DNA, 471 bp, Homo sapiens
  misc_feature (7)..(7): n is a, c, g, or t
  misc_feature (18)..(18): n is a, c, g, or t
  misc_feature (118)..(118): n is a, c, g, or t
  misc_feature (133)..(133): n is a, c, g, or t
ccccccnaaacctatatnaataaatatttaaccaaagccccccaaacctaataataaaatggattggaaatggggaacaaatccccttggtgccagaaagaatttccaaaataatttnatggtaggatacctncccccacttagtgggctcctgcatagtgaccttcccttgcagagtataatatggaaaggggggaaaagagtaactttacagtggagaaatctgacagacacccagctcagcccaggtgattgaggttaacatcatccatgataagcccttttgatagcatgtatccttgatagcatcacatcatacagaatgtgataagaatggcactttacctctgtggtcctcctccccagaactcagaacccaagtctgatcaggagaaaaacatcacacaaattccaattgagaagcattctttaaaatacctaaccagtacttctcaaaactttcaaggccat

SEQ ID NO: 581452 - DNA, 103 bp, Homo sapiens
gctccacctataccaccagacaacacttagccaaaccatttcacaccaagattaaaggattagggggtgaggaaacttgacaacctgtggcggaataacatat

SEQ ID NO: 581453 - DNA, 335 bp, Homo sapiens
tgtcacagcacatccaccaacaggtaaacggctaaaggaaacacccgagaagaaacttgcaataaagattgtaaagcagacatttgcatttctgattgatgggaagctttaatatttgggcagcgccgagtttaatttacagaagagtttttgttgggaaagtggctctaatgttggggaatttgacacaagggccacatgtggggccttgttcaagccaagtgacatcccaaaatagagttttacttgaaaactttacatcagccaaagatgttttgtttgcataaaggaagtaggggtcagagggggtatttcactacaggaaaagcctttag

SEQ ID NO: 581454 - DNA, 444 bp, Homo sapiens
  misc_feature (1)..(1): n is a, c, g, or t
  misc_feature (70)..(70): n is a, c, g, or t
  misc_feature (106)..(106): n is a, c, g, or t
  misc_feature (141)..(141): n is a, c, g, or t
  misc_feature (298)..(298): n is a, c, g, or t
naatagttggtgttatgcacaagttttagaaacactaagacgtgtagcaatttttaagcgttcttagatnggaaaacttaagaggttttgatgcaatggtatgcantggttagattgggcctttagaaggcttcctacgtntctatcggagaatcaagtcaaaacgtagttttgaatcatggttgcactcacgcgagtttcttacgtactctttatccgaaagagatcaaaccaaatgtagttctaccaataaatctagtgtatctagcaaattttaggtttttgatagattttaagnttgttttagaaaaagttcaattaaacaattaaagttagccccatatgggtaaacccatgtgggtatgtcccttgtggggatgcttcctgggggtatgccccctgtggggatgcttcctgggggtatgcccataaaagcacacaatt

SEQ ID NO: 581455 - DNA, 999 bp, Homo sapiens
  misc_feature (6)..(6): n is a, c, g, or t
  misc_feature (10)..(10): n is a, c, g, or t
  misc_feature (15)..(15): n is a, c, g, or t
  misc_feature (33)..(33): n is a, c, g, or t
  misc_feature (60)..(60): n is a, c, g, or t
  misc_feature (71)..(71): n is a, c, g, or t
  misc_feature (79)..(79): n is a, c, g, or t
  misc_feature (100)..(101): n is a, c, g, or t
  misc_feature (241)..(241): n is a, c, g, or t
  misc_feature (248)..(248): n is a, c, g, or t
  misc_feature (296)..(296): n is a, c, g, or t
  misc_feature (743)..(743): n is a, c, g, or t
  misc_feature (778)..(778): n is a, c, g, or t
acatgncatngcgangaccgacattctttcttntacatctatatctcacaccgccgtacnagacagctagnagtttgtncgtcagagacagagcctaagnntaaaatgtagagtaaggctagagagaagtagtatatcgaaatgtcctgacgtggcagttatagctagcctctctagaaggacgaagaaggatagaactggagtgcactatatatgaggattagacagagctagatggaancaaaaanagatagcaattttctaggagagcgaattggataattagtcctgagatntcgaagcgatggaaaatgaatctccatatactaatgttcagcgctgaaatacaacgaactcttttcatcctagccaggtgcgtcaactctcatacatcgactgtataattctatactcttacaacacatagatctctttccactactaaggtcgttatacatcttatacttatctcatctcaagatcagtacttgccgtcacctcgtattaatacttgcgcgagcagctccggtatctctccgagagcagaacttgatcacattgatccccattaccctgcctaggtccggtctcattcctctacatgctgactcatgagcagatcctatatgctctcgcccctatgaggctagcggtctgtaatatcgcggcgttattcactttcactaatttaagaaacggaggagcataagcccaaattagaaagagtgaccaatcagtgtgcnaatcttcaccaagggaacttttttttttttatagntgactctcctgaatccattgttttatactcaatctcagccctccttaaatcaccccagtactcacactcccttcctcaatcctatatgtcctcctaatcttactctcctctattcttcttttctgcttctcacatctgtcctatgccgcttacgttccgccttcatgctcaatagttttctccccctaatcttattctatcttctctaccccccttccgtc

SEQ ID NO: 581456 - DNA, 400 bp, Homo sapiens
ctagtgtagggagccaaaggcttgagggtcgtgaccaactcagcattccactgaaggctatatgatcaaacagccaactgtttatcatgattgcaaaatgtgggcaaactcgcttctgcacctgccaccaggaggtttgctgagggcaattactccctggtgctgtgctccttgaggttatctactggaacctctggagactactgttcaaagaatgcagtcatacaagcctacactaagtcaagcagcttactgacaaccacccctttctccctatctcctttactcagtaaatacgaaggggtatagaagctcagggcccttgttccctagaagaaatgagccccctgaccccttcttccatatgtactcagcctacactagtggagggtaccgagct

SEQ ID NO: 581457 - DNA, 120 bp, Homo sapiens
tggctaagcaagacaaattcctgtccttgtgccgctatgagctgcccactgatgacgacacttatgaggagcacagacgagataaggctcgaaaacagcagcagcaaccccgagctggtg

SEQ ID NO: 581458 - DNA, 384 bp, Homo sapiens
aggttacgtactgtaccccaaactgtattggtatattatgctacatcgttagtggatagtcagtaagtgttaaagcaactgtttacatttctgggtactgtttgttattctacttaattgtttttattaagacaggaaaatgatgagtcgatggctgcagtaattgaacaacatcgaaatcctttggtatttttcccccaaatatagaagcgttcactattaagaaaggcacaatgacacagttttcaagatttaggagcatcacttgtgcagaacacttcaccagccttcacaatctgtattatatgatggacagaaaatttcttggccctccaaaattataattgctttattatatacttattcttaaactataatcatatt

SEQ ID NO: 581459 - DNA, 403 bp, Homo sapiens
cacgagggcgacactcacatccacttccccttgatcaacgacatagaagttgtctccttcattccctgtaacaaaagaagaaagtcaacagatacaaagtacatccagacatacaagttacagtttctcttgcaaacgactttcgcaacactgttgcagagaccctcgaagcaacatcctgggtgctaccaattctttttaatgacaagattatacaaacattgagataacttgttaaagagcctgttcttaagtttcattagtgaactttctctaaacaatgagaggtgtttttctttttgtttgttttttgttttttttgagacggagtcaggctctcggctcactgcaacctccacctcccaggttcaagcgattctcctgcctcagcctctggagtacc

SEQ ID NO: 581460 - DNA, 1543 bp, Homo sapiens
ctgagtatttggtgcttttgcctgtgtgttctttttgctaggtgtgtgtgtctcgtgttttgtcgtgtgtgtagctcgtatgttggcccctttgctcgtgtttctgatcatttttcttacatagggtttgtttctcctagttgtcgcccgttgttacgttggggggtattgtttttctctaccgctgttctaattggtcaatcctccgcggggggtggctccggatcgtcccctttactgagagtgccgtggttttttccgttgtggttgcctcgtttctcccaggtttggggtgctgtcgtctcttgtttagtgatctcgtcctggcgccccgttcataggggtgatggcttctacacgtttgttgccccgtgggggtgtgttttcttggggtccatgggtgccctatgggggtatgttttcccatgcgggcgaccccttgtggatgggtccccatagcctccttgtgtggcccctgttgttgtgtgctccccgtgtggcgtttttggtgggttcccccaagctctctttgtgtggaccttgtgtggtcgtggcccttgatatggtgcccccctttggtggttgcgccccgtgcccatttgattgcccccttcgtttttggggccccgcgtgtatgcctgccctcggggggtttcctgtgggtgagaatgtgtagggattggtggtgagaagatgtggtgggcccctttatagatggtgtttggttgtaattgttgttgtggcgccccggtgtatctctccccatgttttagcgtagtatctcccgcccgtttttgagtattttccgcgcctttgggcccactaagtggtgttttgttgtatggtttccctcctccacgcgctatttctggggtggccccccacgtggtagtagtgtttgattgatgtcccttctgtgcccctattggccccttcgtcgcgttatagctctgttgttggcctctctgacacttgtgtgaggtgtccacacagtgataggatatgtttgtgaaagggccacatgtggtgtggcttacccctctgtaagaggggtcccacacctctggtgtaccccacatggagagaaaaggggagttttctctcgggcactatccacacactctcccacaggctgtccacgggcctcgtcttccccctcggcgccacccctctgcacgcccctcgtctttggggtgtgttccctcagttctctctgggagcactccctcgggccacccacagggtctctggggtaattgggagagagatagtgtgtttgtttagggggagaggggagaatgagaacccatggatggggttcttggtataattggggaaaaacgtttgctgggtcttgaatttgttgggggaaacacccttatgcccaatggagcgccccggtcccctcgccaagaaagtgtgtgaaggacgcccccttatttggggattttatctctaggggcccggtttctaggcattttaaaaaccccctttcttttctttttgcttccgttaatagaagttaagtatatttacttgttta

SEQ ID NO: 581461 - DNA, 845 bp, Homo sapiens
  misc_feature (308)..(308): n is a, c, g, or t
  misc_feature (386)..(386): n is a, c, g, or t
cttccctacctctatacagttctgataacagaccagcctttattagtcaaatcagccaagcagctttctcaggctcttagtattcatgctagaataccttctcatatccccttacagtccctctcatcttcacacgaacaagtagacatcgttgactataacggtctttttaaatacacacagcctacaccaagcatcaaccaccaatcttcaaatacaggtactgcatccatgcttttattcaacttttcgtattactcaagaacttacctggccatgtacctcacgaatttgttatcacatagagntaccacagtaccagttatacacgactcgctagtatatgaatcgactactctctgtttacttgatgtgctcccatgatncttcagattcagacaactcagacccaaactttagaactgttgactcccccaaaaatattcttttgtctatacctcataactgattcatttctttgtccttacgttccacttacctcctcctaattccatcactatctacttaataactcacgtccaagatcagcagcgccgtgacttctttgttttaaaccacctagcctgagtttacaacttggttttctatcatgcccattcatacagctagattgtcttcattagagtgcttatcccgccaataactgggcaactcctcaaatgcctctttaaacgttacactcacaatatatctttatgtcttggatcgggtaccttattgctagatatctgccatttagcgtcaacttctcttactctcagatgtgtcctgaggctcctcacccaattctttatgaaccttttacttccctgtttgtcttacct

SEQ ID NO: 581462 - DNA, 141 bp, Homo sapiens
catgtcaacttttggctccccaaccagtaggttggcagtaaggcagggtcccctttctccctgaaaaaattgtgaatatttccaaatggattttctattgttactctggttctttgttttaaaataaaaattttgaatgta

SEQ ID NO: 581463 - DNA, 103 bp, Homo sapiens
ggtatattgaatgaatgtaaaaatttcacttcacagtgaacatgaaaccttcacacagtgtaatggtttagattcttttttttaaatttaacctctggcccct

SEQ ID NO: 581464 - DNA, 950 bp, Homo sapiens
  misc_feature (357)..(357): n is a, c, g, or t
  misc_feature (418)..(418): n is a, c, g, or t
agcggccttttcctccctgtcgccaccgaggtcgcacgcgtgaaacttctccgccgtctccgccgcactacgccgccgcgcatgcgctactgtcgtccgtccataccgtgctggctgccctagtgggtgcaaacgtccatccgcccaggcgccgaaggcacatctaagaagatcattgtggcatcgagcctggtgtgggtatcagaggccggtacggacgagccgtgcttcaatcacatggattatcacgctgagcatgaataggaaatagagagcacttgaacgtaaccgtcgattggtgactcccacgtggctactttggcaaggacgtctgaccaagattggtagcacttagcntagtgctgggggactcgtgatcaccgtcatcctggcatgtccctccaaggttctcttgacnaggcccctggcaatagtcgtagagttcattgctcccctgcattgccacgtcgaagaaggaggacagaagagattgatgaccgaaggcagggacggtcgtgaaagcaggtccagcatgcatgacaatggcgcattttgagccttttcctgcagttcaaagttccttgggctcccccctgcgaagaattaaaagcctttttggtacacgattcaaaagagaaaggacgaggagagaaaactctctcgtaaagcccctgtgacccgggcgccattaagggggccccatagaaaactcgtatccgaagggagtggagtaagcgccccgtgatataccgcaagcgcactatattgcggttcgccccctttttgacgtgagaggggggtaaaaagtttggccaagaacccttgtgcgccagttagagcatcagtgggggcccaattaaggcattcgtgttacccttcgtgtgtagcaaactttggttacatctccgggatcattggaagtttccaccgcaacattgggggagaccaaa

SEQ ID NO: 581465 - DNA, 328 bp, Homo sapiens
taaattcgcggccgcgtcgacattgaatgcatgcgcgccttagctggtttcatcatgcgcggacgtatgcaggccatgctcgtcgtggccggatctgcggcattgccgctgttgttctggttgagtgccgccgccgggtgccttgtgctcctgcggcgcggttcggacgcccttggcgtcattggtctgggtgtgttgtcggtgctgctgttctggcacttcaacatccagaaagaccccacggcccttctggtgctgctcgggtcttgcagcctggcgctggttttacgcgccggctactcctggaaccgcgtgctgctggtcgacg

SEQ ID NO: 581466 - DNA, 243 bp, Homo sapiens
  misc_feature (12)..(12): n is a, c, g, or t
cccccctcggcnatcgagctcctgtgcttcttccaggccctcgggccagcgcacctcggccagcggcttggcgaggtgacgcttgaagagtgcggccagcgcgccgggctgtctctgcgggtgagcaggtaggccgcgagcgcgggcggcagggtcttcgacgcgcagtcgccagaagtcctgcacggcttcgagcagcaacacgcggtcgtcctggagcaggatttgccgaggtgccagcgt

SEQ ID NO: 581467 - DNA, 106 bp, Homo sapiens
  misc_feature (1)..(1): n is a, c, g, or t
nggacaaagttatcttccacatgtttgacgtgggtggccagcgcgaggaacgctgcaagtggatccagtgcttcaacgatgtgactgccatcatcttcgtggcggc

SEQ ID NO: 581468 - DNA, 390 bp, Homo sapiens
  misc_feature (320)..(320): n is a, c, g, or t
  misc_feature (348)..(348): n is a, c, g, or t
  misc_feature (376)..(376): n is a, c, g, or t
ttctagaactagtggatctcgcgggcgggaccaatctgctggacctgatgaagctggaaattgaaacgcccacccaccttatcgatgtgaacggcctcgggctcgataagattgaagtgaccgacgcgggtgggctgcgcatcggcgcactggtacggaacaccgacctggcggctcacgagcgcgtgcgtcgtgattacgcggtactctcccgcgccctgctcgctggcgcgtctggtcagttacgtaatcaggcaaccaccgcagtaatctgctccagcgcacggctgcccctatttttacgacaccaatcagccctncaataagcgcctccccgggagcggctcnggcgcttgaaggcttagcgtcagcacgnggtggtaggcgtaa

SEQ ID NO: 581469 - DNA, 452 bp, Homo sapiens
gatccctaaccatggaaaaaatagaaacctagcggtgctgaaactggagaggctactctctgtcttccgggcaggaattcccaggttctcagctggctggaagaattgttgacatttgcttttggtagttgtttcttaaaggataacagtaaacattccaatgtccaagatctggttagtcttccactttattgcttgggatgcttctttggtgtgggttaaggtagggggcggcttgttgcttgatttctgaatggtcatcaatactttaggtcacctgcggatggtgaaagtgccgtcaggagccccgcgggtgtctcacgaacaggtcttcggtgggtgggtggaccacagggtctccagtgggggttcaaccgggcttgggctctttggcatcttgtgaaggagcgttaggaaggacgcgggcgacgccggtaattgtagggacgccc

SEQ ID NO: 581470 - DNA, 237 bp, Homo sapiens
tgaggtttttaaaatcaaaggattttaaaatctttatggctcgaaaataaaaacctcccagtggggaggctataatttgatttctctagactctagtggaagacctttggaaaggccatgcccaccgggcttggactgctagaagccctttatgtttcctttttgggggaaatggatttatgggggggctttaaacaaatagcaatacttataggctgaaataaaatggaacttcca

SEQ ID NO: 581471 - DNA, 128 bp, Homo sapiens
cgtttctccatcagcaacagcatctcctaagtcaaagtcatccccagcacgggtttctggggattgcaggggtttctgttttcatgtcaggaagggcatcggataaatcgaaaccaccacgacgacga

SEQ ID NO: 581472 - DNA, 710 bp, Homo sapiens
tcatcatctttagacttaaggaataaccaatgggtcagtgaagactacaccagtgctgagggcttcttggttcctggagacatgcccagctacagcaaacacagggaaacacgaagtgtgggcatgcgtggaagattgggtcttgaacttggtggggtgggtaagtgatgatccccacgacttggagcagcaggaaaaagtttgtgtctgagtgaagtgctgggccgcccagatgggacagccctgccctggagcttgtcgcctgtggatgtggaatgggaaacaagccccctccctcagtgctgaggaaaaggcacttggctggggtctacctcctgccctactccccatcctgtgggagagacggggtccttgcctccttgcccctttcagcctgcccagaagcctggtcctgggttcagcctctggaagaagcttttgccgaactcataggtgctgatcatgatgtgcacatggatgtgtggtgcagccttgatgatccgaggaagtgaagcctgcaaagagtcccttgtgtgccctgactccggcccggatcctccgcagcagaagccaggtgtgagtccacatgcagggggtgtccactctcacagcctccatcgctcccagagctgacctggccgtatgttctttaccacggtcacgggtaagtcagacactgaagcacgtccctgagatgcacagcaaaagta

SEQ ID NO: 581473 - DNA, 804 bp, Homo sapiens
ctggaggttgtgtcaagatttaagtctttatgggaggaatagcaagaggctatgaacacaaaagcttgttcatgaatatccatagcagcatgtccttaacaggcaaaaagtggcaacagcccaaaagtccatcacctggatatgttgtgaatggataaacaaaaagtggtctatgtagaccatggagtattggccataaaaaggaataaactactaatacatgctacaacatggatgagccttgaaaacattatgctaattaagagaagccagacacaaaagactgcatattgcatggttccattcagatgaaatatccagaacaggcaaatctacggagacagaaaagtaggttagttgttgccaggagcgagggaaatggggaaatggtgagtgattattaatggctgcggggtttctttcggggtaataaaaatgttctggaataagatagtggtggtggttgcacaactttgtgaatattaagggtactctcatacactttgaagtggtaaatcttatgaatttcatggtgggatgaatttatattctcagtttttataaaggaaggctaatgatgggtgacgaaggcgtgggctgcatttgctattgtccacgacgttcccttttgcacatgacttgttgggatgcctcgttggggcacggcttgggggttggacggtggggggaccctagcagttgatgttgcacgagacccttgccttttgccgctcccaagaaagggacagtcactttgccgacttaatggggggttacacagtggacaccaggggaccacatgag

SEQ ID NO: 581474 - DNA, 324 bp, Homo sapiens
  misc_feature (226)..(226): n is a, c, g, or t
  misc_feature (229)..(229): n is a, c, g, or t
aattgggaaagtatcttatctaatcaggcatgtctgtaaaatacagaaaaattatgggtgttaaaagaaattgataagaattcatctttggtggcaatctctggttttgagatttagttcatgggacttcagattagtatttggtggatggaacgcatgtgtttactgtcagtctctcctgcaacaccattacaggcatggtaaatatgagaagaggcaacagtanagnagaggcatcagcaaatttttggaagatgaaaagcaaatagacctgtggcatctgccttactataacagagtcgacgcggccgcgaatttagtagt

SEQ ID NO: 581475 - DNA, 1098 bp, Homo sapiens
  misc_feature (791)..(791): n is a, c, g, or t
agcgggggagaaagaggctccggggagatagcggaccattgagggctggccctcttttgaagcggttgttcgtctctttccgccagtggctctcccgagtatcacgcagagggcgggtcccgtgtagcgcgaggcggtgcagggcgggtaaggggagtggttggcatggttgcggcatgtcacgggactacgcagagcagctagtggtcgcttgtcagcgcagggccgtctggcagactatgggatgaccccggggtcgccacaatgatatagaatcttgtccctccgagctggccctgtaggcatctagaagtgcaacaagcggatgagcactgaagacgacattactagtttgtcagtgtaaggaccatcgagaacctgttcttgaatacatcgtatctggttctgttgtgtgatgatgaaataccctagcgacctattatagtgatattctgtttccttagaatgtcaaaaagagagggtagatttatatggatttattgaaatgtgaagaacggtgaaatacagacacgggagatatatcaatgcaagtgagcaataaatcactggagatagtctaaggcgaaaggaaccaggatttcggaggtatattgaacaatgcagatcattgaaggaaacagtccatctactttcatcatagaaagaaatacgattaatcctggtggttccagatatgttggaatgaaaaaaccagccatttaatggttttacagaagcgaatacagaatgggtttgtagatagaagaaggggcaaattagggatgtaaagngatgggtcacggcagaatacggggcatcttggggagttgaaaagcagaaaaaaggagtgttcccttgtggttccaaggggcatgggagattggactaatatttaggaagcgcgtaaatggggaggtgagtaaaagacatgttatgcgaagcatgtttctatgacagagaaagaataaggggggaacataagggtttgttaacaaaggagcacggaggtagaatagcaggaagtgagatagcgcaggacacacaatggaactgaaaaacgagggagattaggggataaagacagaaagatcaaaatat

SEQ ID NO: 581476 - DNA, 708 bp, Homo sapiens
  misc_feature (6)..(6): n is a, c, g, or t
  misc_feature (366)..(366): n is a, c, g, or t
  misc_feature (376)..(376): n is a, c, g, or t
  misc_feature (393)..(393): n is a, c, g, or t
  misc_feature (410)..(410): n is a, c, g, or t
  misc_feature (414)..(414): n is a, c, g, or t
  misc_feature (419)..(419): n is a, c, g, or t
  misc_feature (437)..(437): n is a, c, g, or t
  misc_feature (474)..(474): n is a, c, g, or t
  misc_feature (476)..(476): n is a, c, g, or t
  misc_feature (480)..(480): n is a, c, g, or t
  misc_feature (519)..(519): n is a, c, g, or t
  misc_feature (578)..(578): n is a, c, g, or t
  misc_feature (685)..(685): n is a, c, g, or t
cacttngcagcaagacaatggatgatgtgggaggtgccaggcccctgggttggcataatttggagtatggttgagacagggctggagagaggcatcttagaggtggcccccaaatccgcaatcgggagaaaaaggcaagaatcgactagagattgtcaggataaagggaggcactgcccacccctgctatgtctgtctgcccccacaggggcttctttaatacctggggttccctgggtgatgaatgtcctcctaccctggcaaggggccatacctgtcgccgtggccccataggcaaccctgataaaagagtatcatttccaagggggctttggtttctgggtggccccacctcgtcagtggggnagatggcacngaaatgctaactaaaanagccatggaagtcaccngggngctcngaaaagaaacccctaacntggaaagcatgcgctcctgcagcaccctttgtaatangnggcnatggtggatggctgccccgtgctggggcccttccggatnggtgaagacctgagacacgtccccgcattccggaggcgtgccgcgtgtaaccccaaacnacgctacattctgggcgtctaccgctggccccggctatatcttggcgggccccgctgggtgcctggcatcacgtggtacctaccaggggcggggcgagtggctccanctgaggagatcggtggtggcgtc

SEQ ID NO: 581477 - DNA, 132 bp, Homo sapiens
  misc_feature (2)..(2): n is a, c, g, or t
  misc_feature (89)..(89): n is a, c, g, or t
tntgttccacctcgtctcctcgaaataatctccctgtcccactttgtataaatgtggtctcggctcgtccctggtaattcttcgtccgnacctcgtcccaggtcgagtctgctcaaggtggaacgtaaccca

SEQ ID NO: 581478 - DNA, 171 bp, Homo sapiens
cgtgagactggtggcattacaattgtgctgtccaggagtcccgttgtggcgcagtggttaacaaatccgactaggaaccatgaggttgtgggtttggtccctggccttgctcccgtgggttaaggatctggcattgccatgagctgtggtgtagttcgcagacgtggctcg

SEQ ID NO: 581479 - DNA, 403 bp, Homo sapiens
taaaaaaggggtgaaaaaaaacaaagagggtaggtcataaccggtgaacatagcgttgtatcacatccggttaatgtaagggtttttcagaaatagggtgtgaatattttaaaatgtttctctttcagggtgtcagtttttctctcagaatagagtattctgtcacattgaatccaaaacagagagtaagctttctgacatttgtccacctgttgctctgtaattttttggatcccgtaaaatgccagaaatcaagccaggtcgtgggtgatcaaccctgtaattccagcactatgtatggacaaaagggtttaagagcgtacgcctaggagtagaccccagtctgggctcccatatagagacctgggctgcactatacaaaaaaaataaaactggcgactat

SEQ ID NO: 581480 - DNA, 351 bp, Homo sapiens
ttagccaggagtggtggctcatgcctgtaatcccagcactttgggaggccaaggtgggcagatcacttaaggtcgggagtttgagataagcctggccaacagagtgaaaccccatctctactaaacatgcaaaaattggccgggtgcggtggtgggtgcttgtaattccagctattcgggaggctgaggcaggagaatcgcttgatcccgggaggcggaggttcccgtgagccaacatcgcgccattgcactccagcctgggcaacaagagcaaaactccgtctcaaaaaagaaaaaaaaagctcccccgagtgctgccgcttgtgtggatgggtacttggtggttcttag

SEQ ID NO: 581481 - DNA, 523 bp, Homo sapiens
gaatgtatcagaatttcattccttttggagactgaataatattatgctgtgtagatagatacatcacatttagcttatccactcatccatctatggacagttaggttgcttccacctttaggctattatgaataatgctattacaaacatgggtatacaaatatctgttcaaatccctgctttcagttcttttaaatagatactcagaagtggaattgctggatcaaatggtaatcctgtttaattttgaagaaccatcataccattttccacagtggctataccagtttcacatttcccaccagcaatgcactagagttccaatttctctagcatcttcaagaaacattcggtagctttctgggtcttagtcatcgtcaccctataactggccatcctaattggttatccaggtgcgtatattcattggaagtcccggattctggcacttcccttacatgacttaggcaatatctaaggcatcgttattcatggtggcttatttcggccatttactcttcct

SEQ ID NO: 581482 - DNA, 1304 bp, Homo sapiens
cgatgatcaggactgggcttgctctgacagtccactagcatgggggtgtgctcaccaatggtgagcagatgagatgctccgaggtgctctctcatccgtgatgcatcagttgcctatccctggactggactcagtctttggagagcatggaaccatgggaagcgtcatcagcattcgaacgatcgtgtgggagcgtgtgcaacggaagcgtgactagatgcttgtgctcaaggttccgctggacgcgactctgggtccgccatacacataggcatcgccgttctactgagaagtggttagctacctggttacagacgggcgtgagtgactcctgctggtcaagactcatgggactctgcgacaaggcgttaaggaagcgtgtgtatagacctttgacagctggcataacaagttctgaggtaaaagtcactgatcttctgacctacgcagtggtacctagcactggcatcttgggggcacggatgtccagatctacatctgcaaacgagggacggagagttcttcacttttacagagcatagcgggctgtagcacaggggtggcctatcggggatgacgccaaggtacatcgcatgctaacaggcagtgggacagaggcctcaaagtactacaggctgtaggccctggcccttctgactggaagctgggcctcatctcagctagaggggtagaacttggggtctgcggggccggggtggcgggggcccctgattgggggccggcagggggctctgtggccggttggcgcattccccatctctgttgccacctgggttctcgatcattggtgggcccatgacgcaaaccagttgccgttgcgtgggccgcagccgctcgttcgcgtggtccatttccaggggccccgagtgggaagtccgcttgtgggattgtgacagaccctggtccccctcttgcttggcgtccagcggtcgtcggtacccgcgggcctattcccttctctgtgcgtgtgcactggcgtgtggcgggtgggcgatgtgtcacctccaatttcgtgtgtgtgttcctgcgttgaaaatgaggagtgctggcccatctgcgtctgttgatcgtattgtgcatctgctttcgtgcgctagttgctctgtgcattgtttgcacgctagaaaatcgggtgctgagcgtgccggcgtgtgctcgcttctatgctcttttgctgcggctgcctatgttttcatgcgcggtgtccgagggcatgtgcgtgattgctcctgtgtactcccctccgatcagatcttcgcgctctatacctgctcggtttcgtt

SEQ ID NO: 581483 - DNA, 325 bp, Homo sapiens
gatcctcctcacggggctattgccccactcattgcatcccggctcacgcacagagttgcttagtggtatcattctctgagtaacagcgccccattgcacgaccacatcatgttctgggatataacaagatagtcaatgcgttggaggaataataacaggggcaatatatatgcgctcatgctgtcatgttgtgttgcgtttagtcggggtccccgcactaggtataatagtaccaccctatgtgcggctgttctataagagaaacatatgatgggcgatgatttgcacaccaggacaaaaaaaaaggtaaacagacacacaaaac

SEQ ID NO: 581484 - DNA, 253 bp, Homo sapiens
ggcagtcatcttagtgcagatcatggtgctttattaacaaattcatgtattcctttcccattcctttaatacaaaaaaattttattcaatcatcagttactttcatctgacatttcactaaggtatagttttcataatgtcaagcgttattctatcagtcattcaatgtgggtcacgtaagtttatcctccttgtgccaaacacccacttgaaggatatgaataaaagatgtctccaggtgaatacaacaacc

SEQ ID NO: 581485 - DNA, 1468 bp, Homo sapiens
taaattttttcaccaaaaagcagctggaaatcacaaaaggcagctgccgctccgaggggtctcaaatccattaaaacccaccacagaaacaattaacaacaatcgagaagaagaagaaaagaggaaagaggaacacaagcgtccaactattggcgcattgggtatataactccacgaggttatcccagagagcttccctcttgtggaattgtgagaaggcacaacattattattgtggacaaaacacctgtggtttctctcaattacaacagcgcgacagggagaagccttcagtgtgcgcctccctgtgcgcaaacaaagaggccgggctctctgtggtgcccaagtctcgaagaaccgtggtgcggagtgtgcaaccaagacaagactctctcctcgaaggacgatggagggaattcaccgcgtgggcccctctttttcgcaactcccaaatatcaacccgcttgtccgagagacaaaattctcagacagagacgctataccaagagacacagcgtgggggtcctctcgtgaggcgtgggagtgtgaccccctataattcacccacccgaggggcaacgaaaggggggaccttggggggcccatattaaaataccccgagggacaacacgcgtgtggcgaggcccccgagagagcaaatataaacccccgtggcgtggggcaattcccctatactctttgcctataccaaaccctcttctggggtgggtgcggagaccagaagagggccgccccaatattatcccctaaaagcggaattcttttggggtggcccaaccacactcatactacatacaaaagatggcccccaagcagcgtggataacccccttatccttatcaccatgagggcttttccggggcagcttgctcgttggtggtcacagccaaacttgcgtgtcctaaaggcctcaaagaacgtaatattcgtccccaaaagacattctcccgccatttattcctttggcaacagagcaacgattcgtatcccgaattggcacaagaaccgtttgttaacgcacaaccacactgacggtggctctctccacatccacgcggtggggtcccgggccacacaagagcggcgctccataaagacaaacatctttgtctcccccccaaacagcaaaccgttggcgccaaaagaaagaactaggggggcacaaaggcccgacaccccctgttctaatcacccgtgcggtgcaaacaagagcgcggccgacgacgagaaaaacacccctcgggggacgcggcacacacacaaacacccttacataatactactacaaccaaaccagcagagccatagcgcaacatcacaccgtcgtccacaaggacacccgaccgaaatgtacgaccatctcactacacgtacgcacacacacggagcaaccgacccatactacggtgcgcagccccacaagcgactggagcgcgccaacacatga

SEQ ID NO: 581486 - DNA, 656 bp, Homo sapiens
  misc_feature (399)..(399): n is a, c, g, or t
gctcccgagtaagcgccggcggagcgtcctcgctattgagcgcgagcccagcgcctcgtgaggccgacccgcgctgagttggtcagcggctcttctgctctggcggtgcaaactagctaatgagtgcgaacttgagcctacggccactaagggacagcatgttgcgtgtttgccgccaagcgacacttgaatcgacttgctgtacaacgccagggagtgtctagcgcaggcatccacaaggacgcgagcgtgggccacttgctgcgacgcttgtcacgaggatcggcagcgagaccgtctgttgtcctagtcggccgtgaactaaacgaatggtcgaaactgtggggcgttgggatcacaccagagcgactagtccccatgattgtttacgccctcctnctacagagtcctcgtctttgggctgttcccatctcaatcgagcgtgggccttgtgggctgggcatttgtagcgagttaatgctcagcgagcaaagatgtgtcaactgttgctattcactgatggaatccaatctccatttgcgctcagtttagcgagttcctcgatggaacctcgcaaggaatgttgtggattccccaagtgacccattgaggctccgataaacgagaaaggtctgtctttgtcattgcgtgctgga

SEQ ID NO: 581487 - DNA, 84 bp, Homo sapiens
  misc_feature (65)..(65): n is a, c, g, or t
  misc_feature (73)..(73): n is a, c, g, or t
cacatggggccccaaagcactgcaggccaagcagggcaaccccacacccttgacataaaagcatnttgaagcnttaaaaaaaaa

SEQ ID NO: 581488 - DNA, 194 bp, Homo sapiens
ttttcaccccgaagtagtccttgccagtcacatacaatctcagagggtcctgtaccttcctttcccatcagaccaagccgagcgccatcaagactcatgggcctcccagtgcacagagttttcggattgacgcgcagccagcgactccactgctgcagtaagaccccgcccagccattggagcccatgcggccg

SEQ ID NO: 581489 - DNA, 179 bp, Homo sapiens
cctggagggcgaggaggagaggctgaagctgtccccccaagccatcctcgcgcgtcaccgtctccaagagccacctcgagcagcagcggcagtttgtccgtcaccgggcgcctgggccgcagtacgcggaagcggctggaggtggaggagcccttgggcagcggcccaagcgtcctggg

SEQ ID NO: 581490 - DNA, 127 bp, Homo sapiens
gaagcgtgtctcacagtggagactgagagtagctccctcgggtatctatccgagctcttcttcctccacatcacagcagcgaccacagggtccagtgaccacagctccaaggacaacaaggcagcaa

SEQ ID NO: 581491 - DNA, 414 bp, Homo sapiens
acagacagcatagagaataacagacagaacacccatccagtacagaatacagactgacccgtgagacaaagaagacacgtgctcattaggcactgtgggggtagcctgagcacacataccgatcccgaaacaacttcaccaacacatacaacatgaaaagtcctctacttatccgccttcactagcaaggacgagggcacctaaacgtgtacactccaacacactggacataccccaaccatctcctcccaagaacgtcacagatgctcagagacaaaatggtacaaagtgtgagggcatcagcctgctggctcagaacacctcgaggctgctgatgctcctgctctccctctccctcctccaggccacggatttcatgtccctgtgactggtggggcccatggaggagacagg

SEQ ID NO: 581492 - DNA, 291 bp, Homo sapiens
cctcctgggttcaagctgggggatcttgccttagcctcctgagtaggtgggattacaggtgcccgccaccacgcccagctaatttgtgtatttttaatagagacggggttcaccatgttggccagtctggtctcaaacacctgacctcagttgatccacccgcctcgtcatcgcaaagtgctgggattataggcgtgagccacggcacctggtgcatggtcagttgcaagtacattaaccatgctggttggcaactgtccctgaaatagctgtcgccgtcccaaagcacag

SEQ ID NO: 581493 - DNA, 423 bp, Homo sapiens
cacatacggttatatattcccaaagtgctttccgatttataacttgtttgggatattatatttttcaatgcaaggctgcttgatgagtatgactcagttgtcaggttaaatgtacaactaatcaataatacatttttaagttttccaatgattatttgcatttgtataactaaagagaaaaaaatactggtaggacaaaatggttcttcttggttctcacacaagctatgagtcattcactctcacgtacttatgaagtctcacttattcctgcaaacagaaaaggtaagttgatgtatgattcccatgaatactgctgagttccacttcaacagattaaagtcctggctcatgatcaattctggggaattaattcaataagttttgtttaacatacaacactgctatctgttctgctgatgc

SEQ ID NO: 581494 - DNA, 190 bp, Homo sapiens
tagagtgtactcaagacgtaggactttaatcgtgaacaaacgaacctttaatagcggctgcaccatcgggatgtcctgatccaacatcgaggtcgtaaaccctatgttgatatggactctagaataggattgcgctgttatccctagggtaacttgttccgttagtcctacgtcttgattgacactcttt

SEQ ID NO: 581495 - DNA, 875 bp, Homo sapiens
gccttctcgacgtggacatggatggctcctcgggtacatactggccagtgaactcagaccaggccgtgctgagcttgatttgggctggctctgaccttcggcttcagggcaccgaggtgacaccttggtgcagccaccgccccccgacagccccagtatcaaggatgaggcccgcaggatgatccgttccgcccagcaggtggtggccgtggtgatggacatgttcactgatgtggacctgctcagcgaagtgctggaggcgcggccgtcgggtcccagtctacatcctgctggatgagatgaacgcgcacacttcctggacatggccgacaagtgccgtgtcaacctgcaccacgtggatttcctgcgcgtacggactgtggcgggccccacctactactgccgcactgggaagtccttcaagggccacgtcaaggagaagttcctgctggtggactgtgccgtggtgatgagtgggagctacagcttcatgtggtcctttgagaagatccaccgcagcctggcgcacgtgttccaaggagagctggtctccagcttcgacgaggagttccgcatcctcttcgcgcagtccgagccgcttgtgccctcggccgcggccctggcccgcatggacgcctatgccctggctccgtatgccggggccgggcctctcgtgggcgtccctggggtcggggcgccaacccccttctccttccctaaacgagcgcacctcctgttcccgccaccccgggaagagggcctgggcttcccctccttcctcgacccggaccgccacttcctgtcggccttccgccgggaggagccgccgcggatgccggggggcgcgctggaaccgcacgcggggctgcggccgc

SEQ ID NO: 581496 - DNA, 370 bp, Homo sapiens
accggatcttaaacacgaattcatcctctgctgtgatggaacagaatgatggcctcagcaggaccaccccaacaaggaggcagcagcaacaagtccaccacctactcagagaaagccacaaggaccaccccaacagtgaggccatcccctacctcctcaaggaaggccacaaggaccaccccaacaggtaggccatcccctgtcctcctcgaggaaggccacaaggaccaccccaacagagaggccatcagcaaggtcctcccccaacgtcgtcctgaaaagccccagggaccacctccccaaggtggccgcccacaaaggacctccacaaggcgccagtctcctacagtaatctaggattccaatgacg

SEQ ID NO: 581497 - DNA, 364 bp, Homo sapiens
  misc_feature (330)..(330): n is a, c, g, or t
acacgatctttgcagataaatttgattttccctgtaaatgattatttatgagataaaacataaactaaaaatgattcatttccatcaagtgcaaagtttagctgcaaaatcataacattcttccttatatgtcacacaggtgaaattaatggcctgagaaatgtacagactgctcaacctggtttacgatgccatatagtacctatgtgtactcggctagtgagaccccacgttatgccatggtaaaccacgcttgcacgctttcttaatctctgtataggtagaaatacattgcatgattcatgtaacattaattgatcatatttacangcttgatgtttaattagagtttctttaccctctt

SEQ ID NO: 581498 - DNA, 109 bp, Homo sapiens
ctccacacagcaacttaggctttcctgaaattgccaagcctggtgcctttccaaaggactatcagggcctgtggtggagccagacagaagccacaggatatgtgccctg

SEQ ID NO: 581499 - DNA, 102 bp, Homo sapiens
gtctctgtacacagctctggccctggccttctgatttgcacagtgatgttaactgacctggcaccttcctcaaacaggtgattttgtcctcatcctaccaaa

SEQ ID NO: 581500 - DNA, 227 bp, Homo sapiens
ctctgtgggccaacgtcttccctgaacgtggtcctttctagccatgtttacttcttccaagtaaaacgaataagtccttttctgcctgggcttggggaggcttgcagatcttgccatcggtcggtctgagccttttcactattcccataagtgccccgttcgcgtctccgctattgtgctaatattccgctttccccttctgcaatcatgcgtttgcgaataagggt

SEQ ID NO: 581501 - DNA, 317 bp, Homo sapiens
gatcgagctcggcccctatttttatttctttttgcattgacatgtatatttgtgatgatggtcttatggaagatcgttgttgagctagaaacatgtccttcaccagtggaattcttagaagctttcctgtggtgacttcgctgggtgctaatagaccatgatcgtattgctctgtatataatggtacaaattttgttttataacactcagtcttaatagaatgggaatattttatcttactaacgtagtcattagctggccactctctgtgtccattggaccttatagggtaaagggagggcagtgcgtatttgaag

SEQ ID NO: 581502 - DNA, 403 bp, Homo sapiens
cagatttcaaactggacatttaattttcttgttgtttcttttaaagtgagtgtttgcttggtaataaaaattctagtatcatctctcaccctctcaaaaattacatgattgacttatccccaaaaccagaatattattttggtttagaataacaccacagggattatataatgacagaattattttgaattttgccttcaagtatgaccacggccatggtttctttaaggttaatagggacaagttcttctgcaggtacaagcccacattcctttcataaaaatgtgaaagatcttcagttttgacagcattttttagcttttacatcacattgtgaaacataatggcacacaatctttgtaaatagtgcaacatcaaataataaaggcaacaatcaaaatca

SEQ ID NO: 581503 - DNA, 373 bp, Homo sapiens
gggtagcagcaatcgtcacagggtagggagtgaaaaatagtaccactgtattggaaagacatttggtattatctagaaatattgaatgtgtacctacctacgtatgatgtagaacttgtattcctaaggtccatatcctagaaaatccttgtgcatgctcactgggtatcactgacaagaatgttcataagtgaaatttgtagtagcaagaactggacatgccacatatccttcaggagtagaacagaatatggcaaggaaaaatgaattgcagaacaatacatatatttcaggaaacttctatcgaattaaaaagaacaaggtctagggctgggcgtggtagctcatgcctataatcccagcactttgggag

SEQ ID NO: 581504 - DNA, 476 bp, Homo sapiens
gtgttaggagcagtgttatattcccagctcagagatgattgtgtgctgggaaatgcttatattcattatttcccaactaatgcatttggacatatgtattccagtttttcaaagacactacccaaagcttctttacatttgcattggttatatttaatatttcttaagctaagatcactgattatccacacgttattagaaatctttggttacagtgaggcttaacctgggctaaagtctcctaaatgggactacacttagatccgccctatttcacctttggactaacgttgactaaatggctcctagagttacccacagagggagcttactatgatgagagctactgtggggaaacatagtattcaacagagaaatggaagaatacaagtagcaatgttccttgtcttcaataacatttgagggaaaggaatctagaaatcctaaagcttagtcagggtgcctaaggtaagaca

SEQ ID NO: 581505 - DNA, 120 bp, Homo sapiens
acgcttgaagcgcacacacacaggcaccggagccggcaggccatcacagtggctggtgagcgtttccacatggtgcagaatgtgtccatggccgtccaccacatctgcaaggaacccacg

SEQ ID NO: 581506 - DNA, 162 bp, Homo sapiens
cccgggctcagtagccagagcctcaaggctacggtgagggttttgacttctgcgcagaagtggggagcccctgcaaggatttgggcagagaagaaacaaaatctgatttatacaacgtttaaaaattactctgcctgctgtgttgagaagtgcgcctgggtg

SEQ ID NO: 581507 - DNA, 354 bp, Homo sapiens
taaagacggagtcttgctctgtcgtccaggctggagagcagtggcgccatctcggctcatgcaacctacgcctcccgggttcaagcgattctcctgcctcagcctcccgagtagctggcattataggtgcctgccattgcacccggctcattttttgtatttttagtagaggcagggtttcaccatgttggccaggctggtctcgaaatcccaacctcaagtgatccacctaccttggcctcctaaagtgctgggattacaggcgtgagccaccgtccatggcctatttccctctttcatcttttaaaataattttctgaacatttaagctttttatttcctcttgtcacaatt

SEQ ID NO: 581508 - DNA, 240 bp, Homo sapiens
agggaagggggatcgttggaagtagcaagaagtaggagagaatcttggcaataagacgagaaacccgaaagaatcagaaagaagtctcatgttgagtagctgaaacattgggtgaccagaaagaaggtcggtgtaagtcaaggaagagttaggtgttgcttgatcaaagggctaagagaagcgggtctttgtaagttgatgtcagtcaggatcaaggaaaagcccttgaagttgcccggg

SEQ ID NO: 581509 - DNA, 180 bp, Homo sapiens
gcaaaggctgactctgcctcgggacacagcgaggtcccaagggacagcctgaactccctgctcatagtagtggccaactaactttggtggactgtgcaacgctactcctggctctaataccatctctgggcttaagatgagagacctggcactcttgagcatgcctaatactctccttga

SEQ ID NO: 581510 - DNA, 750 bp, Homo sapiens
atcgcggccgtggacggaaccgtcgccgaggccgagtagctcgcggagtcatggccgaggatatggagtgtatgcccgtcaccaagttgatccgcttgctcaagcacatgaggataaaggctctggcggagaaatatctgtgcttgctgcccattacggaatcagagatcattgaatgcttactgtgacgctctctcacggatgaggcttagaaggttaagccagagcgccagagctgttacggacagagacatgaccttcacggcatttgctgctatcgaactctacaatgtgcaagtagaactggatgatacagagtccatgcaggtgcaccatgaccttggtgaccagaacatagtgatcgcccctgttcaccagctcgggctacatgagctactcttgtgacctcagccaacgctgacctgctgatcgtcagtgcctcagctgatgccgtcgctgatattgtcatgcacactagcactatgacgagtgcatttaacgtagcattgccagatatagtcaacgagctgtctataatcactactgctagcacattggcctgcattacccaggttgtggactgacaccctggagcatcttactgcttgcaccactctggagcttcttcgacactgaaccacaatttacagctgcccatgcctgacgacccggcaacaccttgacccacgcatccctatccgctcattgcctgatccgctttagcgctcccgctttactctctcctcctcg

SEQ ID NO: 581511 - DNA, 682 bp, Homo sapiens
ccccggtggaatgcctcaccagagcagcgtgtagcagttccctgtggaggattaacacagtggctgaacaccgggaaggaactggcacttggagtccggacatctgaaacttgtagactgggagctgtacatggatgggagcagcttcaccaacccctgcaaagtgactctgaagaagacgacaagccctgctccagtcacacccggaagctgactggtccacgcacagtgaagcatgaggaaactcatcgcgggactaattttccttaaaatttagacttgcacagtaaggacttcaactgaccttcctcagactgagaactgtttccagtatatacatcaagtcactgagagaacatcacaccctgaagccagagactaacactgcaggactcagcagttgcttccttcagcctaagcacagcagccacagccctttctggctccattgctgtggtgtccctcatcttgctccctggtgggtctcttgtccatgaccctgaagacactggaggccaagagagactatttaagaaacacctgagggcatcagaccaaatttccccaaagtcctcggaatctttactgccatgctgaatgccatatattccaagtgatccaacctgggtccccagaaggagggcagactttggtgtttaacaaattgccccttttatcacca

SEQ ID NO: 581512 - DNA, 863 bp, Homo sapiens
  misc_feature (38)..(38): n is a, c, g, or t
  misc_feature (78)..(78): n is a, c, g, or t
gcgggtcattgccattaaatagagacctcaaacaccgnctgctaaaaatacccgactggaggagcataaaagcgcagncgagcccagcgccccgcacttttctgagcagacgtccagagcagagtcagccagcatgaccgagcgccgcgtccccttctcgctcctgcggggccccagctgggaccccttccgcgactggtacccgcatagccgcctcttcgaccaggccttcgggctgccccggctgccggaggagtggtcgcagtggttaggcggcagcagctggccaggctacgtgcgccccctgccccccgccgccatcgagagccccgcagtggccgcgcccgcctacagccgcgcgctcagccggcaactcagcagcggggtctcggagatccggcacactgcggaccgctggcgcgtgtccctggatgtcaaccacttcgccccggacgagctgacggtcaagaccaaggatggcgtggtggagatcaccggcaagcacgaggagcggcaggacgagcatggctacatctcccggtgcttcacgcggaaatacacgctgccccccggtgtggaccccacccaagtttcctcctccctgtcccctgagggcacactgaccgtggaggcccccatgcccaagctagccacgcagtccaacgagatcaccatcccagtcaccttcgagtcgcgggcccagcttgggggcccagaagctgcaaaatccgatgagactgccgccaagtaaagccttagcccggatgcccacccctgctgccgccactggctgtgcctcccccgccacctgtgtgttcttttgatacatttatcttctgtttttttcaaataaagttcaaagc

SEQ ID NO: 581513 - DNA, 157 bp, Homo sapiens
  misc_feature (97)..(97): n is a, c, g, or t
cttaaggatccatccccggttctgggtagcgcggtctacgatctgtttcgtgacacgatgcggtagatctctgcaaagggggtacagggggacgtgnggtgagccagcacgtgccctggcctgcccgatggggaaccccctccctgcagtgactcca

SEQ ID NO: 581514 - DNA, 786 bp, Homo sapiens
  misc_feature (21)..(23): n is a, c, g, or t
ggctaggtagaggctgggtgnnnatcggccgagggtccagagcagagtcagccagcatgaccgagcgccgcgtccccttctcgctcctgcggggccccagctgggaccccttccgcgactggtacccgcatagccgcctcttcgaccaggccttcgggctgccccggctgccggaggagtggtcgcagtggttaggcggcagcagctggccaggctacgtgcgccccctgccccccgccgccatcgagagccccgcagtggccgcgcccgcctacagccgcgcgctcagccggcaactcagcagcggggtctcggagatccggcacactgcggaccgctggcgcgtgtccctggatgtcaaccacttcgccccggacgagctgacggtcaagaccaaggatggcgtggtggagatcaccggcaagcacgaggagcggcaggacgagcatggctacatctcccggtgcttcacgcggaaatacacgctgccccccggtgtggaccccacccaagtttcctcctccctgtcccctgagggcacactgaccgtggaggcccccatgcccaagctagccacgcagtccaacgagatcaccatcccagtcaccttcgagtcgcgggcccagcttgggggcccagaagctgcaaaatccgatgagactgccgccaagtaaagccttagcccggatgcccacccctgctgccgccactggctgtgcctcccccgccacctgtgtgttcttttgatacatttatcttctgtttttttcaaataaagttcaaagc

SEQ ID NO: 581515 - DNA, 1250 bp, Homo sapiens
  misc_feature (38)..(38): n is a, c, g, or t
  misc_feature (78)..(78): n is a, c, g, or t
gcgggtcattgccattaaatagagacctcaaacaccgnctgctaaaaatacccgactggaggagcataaaagcgcagncgagcccagcgccccgcacttttctgagcagacgtccagagcagagtcagccagcatgaccgagcgccgcgtccccttctcgctcctgcggggccccagctgggaccccttccgcgactggtacccgcatagccgcctcttcgaccaggccttcgggctgccccggctgccggaggagtggtcgcagtggttaggcggcagcagctggccaggctacgtgcgccccctgccccccgccgccatcgagagccccgcagtggccgcgcccgcctacagccgcgcgctcagccggcaactcagcagcggggtctcggagatccggcacactgcggaccgctggcgcgtgtccctggatgtcaaccacttcgccccggacgagctgacggtcaagaccaaggatggcgtggtggagatcaccggcaagcacgaggagcggcaggacgagcatggctacatctcccggtgcttcacgcggaaatacacgctgccccccggtgtggaccccacccaagtttcctcctccctgtcccctgagggcacactgaccgtggaggcccccatgcccaagctagccacgcagtccaacgagatcaccatcccagtcaccttcgagtcgcgggcccagcttgggggcccagaagctgcaaaatccgatgagactgccgccaagtaaagccttagcccggatgcccacccctgctgccgccactggctgtgcctcccccgccacctgtgtgttcttttgatacatttatcttctgtttttttcaaataaagttcaaagcaccacctgaaaaaaagaaacaaaagagggggcggtactaaaaatattcctgaaagggggaccaaaactttaacgcagataccacaggctatcgtgtggaacagaagtgggctccactaaagtgaaggcggacatataagggaatagcgacctcgcctgttgtttaaacaaggatttgtgttacttgggaaagagatggtaagcataagaatcagtggtgaaaggaacccttaaatacgatgtgaggtaacagtaatggggcgaaaatagtaaaaaagttaaaggactacgggtaatatgacactttagctgtaaaatgtgttaacaagctagaaattgtataggataagaaaattggaacagagatataagtttgaacattttacag

SEQ ID NO: 581516 - DNA, 218 bp, Homo sapiens
ttttttggcctgttaacgcttcaactggggaacggtgcagtggctcatgccataatcccagcactgcggaggatcgtttgagcccaggagcttgagaccagcctgggaaacagtgcgagaccgtttctacaaaagtaaaagttagctgggtatggtggcagtgcgtacggtcccagctactcgggaggctgaggtgggaaaactgcttgaacgtcgac

SEQ ID NO: 581517 - DNA, 225 bp, Homo sapiens
aaaggaaagtttggtggtgcaaagggtcgctaaagtgcccggactttctggttcaggtcgaggcgacgaaccagcggaacagcaggttgtagttgagttgttcgtgcagttgctgttcgttggggactgagtacaggagttgcagcagcaggatctgcaagacggtctggggggcgatctgggtgccgggttgggcctggagcaggtcgcgatggaggtcgagga

SEQ ID NO: 581518 - DNA, 934 bp, Homo sapiens
  misc_feature (38)..(38): n is a, c, g, or t
  misc_feature (78)..(78): n is a, c, g, or t
  misc_feature (756)..(756): n is a, c, g, or t
  misc_feature (783)..(783): n is a, c, g, or t
gcgggtcattgccattaaatagagacctcaaacaccgnctgctaaaaatacccgactggaggagcataaaagcgcagncgagcccagcgccccgcacttttctgagcagacgtccagagcagagtcagccagcatgaccgagcgccgcgtccccttctcgctcctgcggggccccagctgggaccccttccgcgactggtacccgcatagccgcctcttcgaccaggccttcgggctgccccggctgccggaggagtggtcgcagtggttaggcggcagcagctggccaggctacgtgcgccccctgccccccgccgccatcgagagccccgcagtggccgcgcccgcctacagccgcgcgctcagccggcaactcagcagcggggtctcggagatccggcacactgcggaccgctggcgcgtgtccctggatgtcaaccacttcgccccggacgagctgacggtcaagaccaaggatggcgtggtggagatcaccggcaagcacgaggagcggcaggacgagcatggctacatctcccggtgcttcacgcggaaatacacgctgccccccggtgtggaccccacccaagtttcctcctccctgtcccctgagggcacactgaccgtggaggcccccatgcccaagctagccacgcagtccaacgagatcaccatcccagtcaccttcgagtcgcgggcccagcttgggggcccagaagctgccacgcagtccaacgagatcaccatcccagtcancttcgagtcgcgggcccagcttggggnccagaagctgcaaaatccgatgagactgccgccaagtaaagccttagcccggatgcccacccctgctgccgccactggctgtgcctcccccgccacctgtgtgttcttttgatacatttatcttctgtttttttcaaataaagttcaaagc

SEQ ID NO: 581519 - DNA, 1321 bp, Homo sapiens
  misc_feature (38)..(38): n is a, c, g, or t
  misc_feature (78)..(78): n is a, c, g, or t
gcgggtcattgccattaaatagagacctcaaacaccgnctgctaaaaatacccgactggaggagcataaaagcgcagncgagcccagcgccccgcacttttctgagcagacgtccagagcagagtcagccagcatgaccgagcgccgcgtccccttctcgctcctgcggggccccagctgggaccccttccgcgactggtacccgcatagccgcctcttcgaccaggccttcgggctgccccggctgccggaggagtggtcgcagtggttaggcggcagcagctggccaggctacgtgcgccccctgccccccgccgccatcgagagccccgcagtggccgcgcccgcctacagccgcgcgctcagccggcaactcagcagcggggtctcggagatccggcacactgcggaccgctggcgcgtgtccctggatgtcaaccacttcgccccggacgagctgacggtcaagaccaaggatggcgtggtggagatcaccggcaagcacgaggagcggcaggacgagcatggctacatctcccggtgcttcacgcggaaatacacgctgccccccggtgtggaccccacccaagtttcctcctccctgtcccctgagggcacactgaccgtggaggcccccatgcccaagctagccacgcagtccaacgagatcaccatcccagtcaccttccgcgactggtacccgcatagccgcctcttcgaccaggcttcgggctgccccggctgccggaggagtggtcgcagtggttaggcggcagcagctggccagaagctgcaaaatccgatgagactgccgccaagtaaagccttagcccggatgcccacccctgctgccgccactggctgtgcctcccccgccacctgtgtgttcttttgatacatttatcttctgtttttttcaaataaagttcaaagcaccacctgaaaaaaagaaacaaaagagggggcggtactaaaaatattcctgaaagggggaccaaaactttaacgcagataccacaggctatcgtgtggaacagaagtgggctccactaaagtgaaggcggacatataagggaatagcgacctcgcctgttgtttaaacaaggatttgtgttacttgggaaagagatggtaagcataagaatcagtggtgaaaggaacccttaaatacgatgtgaggtaacagtaatggggcgaaaatagtaaaaaagttaaaggactacgggtaatatgacactttagctgtaaaatgtgttaacaagctagaaattgtataggataagaaaattggaacagagatataagtttgaacattttacag

SEQ ID NO: 581520 - DNA, 195 bp, Homo sapiens
cctacggagctatgtgaagggcagggctcccgacagattgagggggtggggaaaaccaaaataaacgtccaataaattgtgtaggaggagtccagcttaggaccgggccagacgccaggccaaggctcggggacaggggcctactgcagagttcagagagatcaatgtgtggcaacaacgagcaacctgaggagc

SEQ ID NO: 581521 - DNA, 210 bp, Homo sapiens
aggagaattgcttgaacccgggaggcagaggttgcagtgagccaaatttacgccactgcactccagcctgggcaaccaaatgagactccatctcaaaaaaaaaaaaaaaaggaacccttaaaggaaagccctctcatattcaggggtgggaagactaaatttgggggaatattaatattggaaatatcctccccaaaataggctatagat

SEQ ID NO: 581522 - DNA, 232 bp, Homo sapiens
tggatcctcggccactgtagggaggcaggagggaaagtgcagacaacgatacaccagaaagccccagggacagcgccagtcctcccacgaaaagcctgcccatagcccagggcggtgtaacacccgtgatcccctcctgtagtgtccacagtccaggtcccacaatgatgattactcctaggatgctgcccgacagtcctcaccagtcgtagccactgagaccctggcctct

SEQ ID NO: 581523 - DNA, 578 bp, Homo sapiens
gactttctctccccaacatctcctgtcaccacatactctctctccaatctccacccgcggtatctctctttccctctcccaccaacaccacaggagagcactcctctcacttcctccccaaagggccccccttcttgggcacaaatgcgcactttgtagcgtgcccccttctctccatcgtctacgtcaatctcaccgcgaggctgggcacagaaagtattggcttctcacacctgtcagggccaattctgcgtctaacactgggtgaactccgaatgttttaacaccctgcacccaatattggtgtgtgcacctggaggatggaggtccggccagtgaggcagggcttccgtcaaggtgacctcatcaaccatgtcaatggggaaccatgtgcatggcactggtgcacacggaggtggtggagcatgatcctgaagagtggaaacaaggtggccatttcggacaactcccctggagacacatccattagatgggccactcggaagggcagctacaaggccaagatggcccgaaggagcaagaggaccccggcaaggatgggcaaaaaaaaataaaaa

SEQ ID NO: 581524 - DNA, 171 bp, Homo sapiens
cttcagatttccattacaacgaaagatgcgacggattttaaaccacacctaaaagaaaagaagtggtggcgaataaattgtagactctcccaactcatcatcgcacatatattatacaatgcaaattactaccactccttggagaatattcaatgaatcgcctttacccgt

SEQ ID NO: 581525 - DNA, 916 bp, Homo sapiens
tggagaaaaagtctcactgttttggcccaggctggggtgcaggggtgcaatctgtggctcactgcaacctcagcctcccgagtagccgggattacaggtgcatgccaacatgcccatctctactaaaaatacaaaattagccgggcgtggtggcatgcgcctataatctcagctactggggaggctgaggcaggagaatggcttgaacccaggaggcggaggttgcggtgagttgagatcgtgccattgcactccggcctgggcaacaacagcaaaactccgtctcaaaaaaaaaaaaaaaaaattgccccctcaaagtctctatcgtgggcccctgtggttgcaaagttgcctcctgaattaaaagggaaggggaaaaagatttagctggaaccgagtgggaaaaagatgctgagggcggggcgctggccagacagtgccccacaagggctacagggtgcctcaacgccctattggggcagaggcgtcgggggaggggggcagcggcgtttcgcccccttaaaaatatgggggccaaacggcactgatgttattcgacccgtgaccctgccctgcgtactaaagaaattatttcccggctggtaataataatcccgggtataacggaccatgtgggacttttcaaaggactcgcttggcccccaatgtccactggtaccctggggtgatggtccccctaaaatttctgggcataaattcgggggggacaaagcggcatccggtttaaccatatgccttggcaacgtaaactttctccgggaaaaaaaagggggcgcaaatcccgggccaatcgccctttgaaaggcacaggggatacagcgcgggacacggacgcagtcttcaccctcgggtgaccaacacaattctacctggcagattaacatacgatacaagc

SEQ ID NO: 581526 - DNA, 393 bp, Homo sapiens
taggcaagaagggtggccggtagggtatgtgtgctttcttggccttcctatttcctttcaaagaaatctctggtaaattacaaaacggtgaatggggtggccaaaaacggtggcccttcgttagatgcttcaaacagggtaaatcctataggggacccggtccacctcggccctagcatggaagatttacttcctcctcttcagagctgacattggtccggcgcactactcttatctttatcggcctaggtgtcagagggggcttagtaaaaaaggaacctggagaaacaaaacaaaacagaaaaccggggaagaggcgttcacaaagaacagacggtcagatttcggtcgggtatcaaacaactggaatacagctctagctgaggaccatcg

SEQ ID NO: 581527 - DNA, 104 bp, Homo sapiens
ctgtgtgatcagcagtgtgggaagaatttcacagagaaatgtctctgagggctggtaatggtctaagaagaattcatagaggaagcaggtagcctgggcaacat

SEQ ID NO: 581528 - DNA, 798 bp, Homo sapiens
  misc_feature (103)..(103): n is a, c, g, or t
  misc_feature (796)..(796): n is a, c, g, or t
gggccgagcacattctctgttagctgcaggcggatgcgtctcgattgtgtcaagaagataacatcgcccctctcggaaagaaacctggtcacttactcccctncactggctaccaaggtatttatggatggaccaagaaactgcccccaagccccgaaggtcctcccccaattctacacccccttctcccctaatacacgctttctttactcccccccccacagaccctccgaaacacctcacaaccctgcccaccgccccagtcgcacgcccccacacgcggcaagaaccgccaatacatcaccctccgtgcaatccttgaccacctgtcaagccccccctcaccttaaccgcccatcccccccaccctgccctctccccaccaccacacataaaccgaccttcactcccccattacccaaccgccccacgcgcgggcaccccaaccacacaccctatcccccgcccctgcccatctctaccacatctcccctccttcaccatatctcgcctccattcacccctcccctctcccgccccctctcccgcacccgctctactccaacgaccgccccgcctcggcaacgcacttcttactgattccctcactccgtgccgcccccctcttcatacacaccaccgacacacacttaccacactcacggcgctgtcgccccgccctctctagctactcactctccaaccccgctcagactgacaagcgatccctcgcccgccctcgccgcctcgctcccaccccaatccctccaccctcgcgagcaccccacctcgcaanat

SEQ ID NO: 581529 - DNA, 220 bp, Homo sapiens
gaggatctgaagcatcctaacagtaatatcaagctctgttggattgaggcagtcagggaggacttagggcaggaggactggtcagggaggagacttagggcaagaagactggtcagggacgagttatggcagaggactggtcagggaggagacttagcgcaggcggactggtcagggaagatacttagcgcacgaagactggtcagggaagacttcgcgc

SEQ ID NO: 581530 - DNA, 125 bp, Homo sapiens
cactatgcccagctctatggttttaattgtaattctctgataattattgatgttgaacattttgtcatatatttttgggcaattttttttcttcttttaaaaattttgtttttagccataaggcc

SEQ ID NO: 581531 - DNA, 156 bp, Homo sapiens
aaaaccactaaaataccctgcaaatcatcaccagaactaggaagacaccgcaacaaggctcaaagagacgggcccagggacacggtgcccagaaagtaggaggtgaaggagggagctgtttagcagtttggcaaggctcacacaaaccctcaaggg

SEQ ID NO: 581532 - DNA, 215 bp, Homo sapiens
  misc_feature (31)..(31): n is a, c, g, or t
  misc_feature (40)..(40): n is a, c, g, or t
  misc_feature (49)..(49): n is a, c, g, or t
  misc_feature (101)..(101): n is a, c, g, or t
  misc_feature (125)..(125): n is a, c, g, or t
  misc_feature (160)..(160): n is a, c, g, or t
atgggttgataggtgcagcaaaccccatggnatacatttncctatgtancaaacctgcacatcctgcacatgtgcccagagacttaaaataaaaattaaantttgctaaaaattattaccacaantaaacaataagtatttgagatgataaatatattantaggcttgatttggtattccataatgtttgcatatatcaaaacatcacattctac

SEQ ID NO: 581533 - DNA, 146 bp, Homo sapiens
agcgagcgctaggtattgggttatggcaggggttttatattgatattgttgtgatgaaattgagtggcccctaagatagaggagacacctccaggtgtaagcggtggtggttatgactttggttacaatggagacttctacagggc

SEQ ID NO: 581534 - DNA, 148 bp, Homo sapiens
gttggttttgcattaaatgacggcgctgcccacgggcagcacgaaccttctgcagagtcaggctccagagccttgcagctggcggagctggaggagggtgtgtcactgaagttggaggtggcagggcccaggggtctctggctgaggt

SEQ ID NO: 581535 - DNA, 639 bp, Homo sapiens
  misc_feature (271)..(271): n is a, c, g, or t
  misc_feature (278)..(278): n is a, c, g, or t
agcggattgagtccaggacaggcagaaggcgtcgagggggctgccctaaggctccacggcatgtgcctgtgattgctgggacgatcgagcggttcccaagatcgaagccgtgaaggactcaagactagacatcatccttctaggaggtcactgtagcagcgagcattgtcgaaataaacgtattcagaatgatgcatacaccgtagagagaaagagaatgatggagactgaagtaacaaggtgttctcgaaggggccttgcgtcgcgtaanttctcgnagatagctcagtgacctcgctaatctccgaggatggtcttgtatgtaagaggaagagtgtcatacagaagctgtgtctagtaccattcatccgcagccaactgggattcagaggtctgcgagagacaagctgagagagtgtttcacaaataatggtcatcttgataaagcaggagtctatttgaatggaaaccatgctccagacagaaagtatgtggatagtgaagatcaagtgacatatccatgaatttgatcatccagaaaataaatgcaatactccactcaattttggcagaacatgtacaacacagtgcaagtattctaatatcctaagaaaaagagagaaaacctcgtgcagggct

SEQ ID NO: 581536 - DNA, 847 bp, Homo sapiens
  misc_feature (847)..(847): n is a, c, g, or t
gtgtgtgtgtgtgtgtgagagtgtgtgtgtgcacgtttccctgcctgagcactgagcacacctccgcacaggcaactgtgccaccacctcatggtctcccagtagccactatgaggagggcagaggccaccgctttagcccagcaggacgagggcctcgtgacccgtggggggagcagagcagggtctgtgtgcctcgtgacccctgggggtgggcagagcagggtctgtgtgcctcgtgacccctgtgggggtgggcagagcagggtctgtgtgcttcgtgacccctggggggtgggcagagcagggtctgtgtgcagggttccttgccaggcacgtggcagcactgaggagctggcattgtgggtggctcggacgccctgaccccgtgttgatgtttttggtgcagccctgcccgctgtggccttagggtgacccatgtgaccacagcccatggtcgggcaacatgcacaagggaggccacttccaggcctaggggggttagacttgtggtttcttggcacctggaggagacttggcagcctgtcgggtgccaccattggtccgggggctgaggcctcccacagaagaccccgtgaaggccccggtccttggaccaaggggcctggcccgtggttgcaaccttgaagccacaggacaccagcaatgctggccctgaaaccgggggagttaacccgtggagcgattttaaagctgctacgttgcgcgtattggtacaggatattgatgtctgatcacgctggggtacgccctgactgtgcgtctcgtggcctaggtagcatagcttggacacaggccaagccaatttccattggcccgcttagccn

SEQ ID NO: 581537 - DNA, 691 bp, Homo sapiens
  misc_feature (64)..(64): n is a, c, g, or t
agcgactgagaagcccagtctgcgccctcaggatgactgagtgggaagcagccacaccagcggngcaagagacccctgacatcaagctctttgggaaatggagcactgatgacgtgcagatcaacgatatttctctgcaggattacattgctgtgaaggagaagtatgccaagtacctgccccacagtgccggacggtatgctgccaagcgcttccgcaaagcacaatgtcccatcgtggagcgccttactaactccatgatgatgcatggtcgtaacaacggcaagaagctcatgactgtgcgaattgtcaagcatgcctttgagatcatccacctgctcactggtgagaaccctctgcaggtcctggtgaatgctatcatcaacagtggcccccgagaagactcaacacgcattgggcgggccggtacagtgagacgacaggctgtggatgtgtccccactgcgtcgagtgaatcaggccatctggctgctgtgcacaggggctcgtgaggctgctttccggaacatcaagaccatcgccgagtgccttgcagatgagctcattaatgctgccaagggctcctccaattcctatgccatcaagaagaaagatgaactggagcgtgtggccaagtctaaccgctgatttcccagctgctgcctaataaactgtgtcctttggaacaacta

SEQ ID NO: 581538 - DNA, 128 bp, Homo sapiens
cttgagcacatgagtcacctgagcagcttggataaaccctctttgtacatataatatttgctgggtgtggtggtacatatttctagtcccaatctactagggcagctcagaggaggggcagctcccgc

SEQ ID NO: 581539 - DNA, 254 bp, Homo sapiens
ggtcgacgcaatcagtgttgcagtgttaagatgttgaagcctggcacaatggctcacacctgtaatcccagcatttttggaggctgaggcgggaggatcacttgagcccaggagttcaaactagacttgacaacatcgggagaccccatctctagaaacaattaagaaaagagaatagctaggtgtggtggcacatgcctaggaggctgaggtgggagggttgcttgagcccagaaggtcagggccacagtgag

SEQ ID NO: 581540 - DNA, 291 bp, Homo sapiens
atccgacgagtacaccgactacggcggactaatcttcaactccttacatacttctccccattattcctatgaaccaggcgacctgcgactccttaacgttcacgatctagtattactcccgattgaagcccccattcgtattataattacatcacaagtacgtctttgcatctctttagacttgtccccacagttatgccttacaaaacagtataccacttcccggtacgctctaaagccagatccacctttcaccggcttcactgaccggtgggttatactacgtgtcta

SEQ ID NO: 581541 - DNA, 347 bp, Homo sapiens
tatttaaaattttgcttttaggcgaggcatggtggctcaagcctataatcccagccctttgggaggccaaggcaggcagatcatttgaggtcaggagtttaagaccagcctggccaacatggtgaaacctgaaaccccatctctaccaaaaaaataaaaaaatttagccaggtgtggtggtgcatgcctgtaatcccagctacttgggaggctgaggcaggagaatcgaacccaggaggcaaaggctgcagtgagccgagatcatgcctttgcactccagtttgggcaacccagtgagaccctgtttcaaaaataaataaaatgaaaaaattgcttttaaatcatga

SEQ ID NO: 581542 - DNA, 587 bp, Homo sapiens
gaggctgaggtcaaataataatgctgagtaagccacaccaataaaaaatttgttttttaagacggagtcccactccgttacccaggctggaatgcagtggcgtaatctcagctcactcactgcaacctccacctcccaggttcaagcgactctcctgcctcagcttcctgagtagctgtgaccacaggcacacaacaccatgcatggctaattttggtatttttagtacagatggggtttcaacatgttggccaggctggtctcgaactcctgacctcaggtgaactgcccgccttggcctcccaaagtgctggaattacaggcgtgtgttaccatgctctgccaaaaaaaaaaattttttttttggagagggtgtctggtcctggtggcccaggctggattgcgagggctcaatctcagctcatggcaacctccgccgagaaagctctctaatggtcttggcccctagctacggatagggcacccacggggcaggaaacttacggcgtatggaagagaaattcccagcttcctatccgggctacaggcagggcccatgctatggcctggagccccttttgaccttc

SEQ ID NO: 581543 - DNA, 528 bp, Homo sapiens
  misc_feature (210)..(210): n is a, c, g, or t
tggacctaagtagacagcaaaaatggcgggggtcgcaggaatctgactcaactgcccacctggctggcagggactctttgtaatagcgtatcgttgtagcgttgagttcgtgggctcgtttcgcttggtgctacgtgacggaccgagggtccgagctgttcgtagagccgggtaattagaaggcctagagcggcctgaaaaatggttgtnttggtgatgacacctgggggtccttccatctctggggcccactctcttctgtcttcccatgggaagtgccactgggatcctctgcctgtcctctgaatacaagctgactgacattgactgtgtctgtggaaaatgggagctcttgttgtggagagcatagtaaattttcagagaacttgaagccaaaaggatttaaaaccgctgctctaaagaaaagaaaactggaggctgggcgcagtggctcacgcctataatcccagaggctgaggcaggcggatcacctgaggtcaggagttaagatcagcctgaccagcatgg

SEQ ID NO: 581544 - DNA, 468 bp, Homo sapiens
  misc_feature (97)..(97): n is a, c, g, or t
aaaatgaaggcactcattgcagcactgcttttgatcacattgcagtattcgtgtgccgtgagtcccactgactgcagtgctgttgagccggaggagnaaagctctagacctgatcaataaaaggcgacgggatggctaccttttccaattgctgcggattgctgatgcccacttggacagagtggaaaatacaactgtatattacttagtcttagatgtgcaagaatcggactgttcggtcctatccagggaaatactgggaatgactgtgagccacctgattccagacgtccatcttgaaatagtgatcggacaatgtaaggtaatagctacaagacattcccatggaatctcaggacctcagagtgatttgactttaactgcaccacagttctgtctcttcaggcactggccaataccaaagatagtcccggtcctcatagattttcttttgagggttacttgagg

SEQ ID NO: 581545 - DNA, 854 bp, Homo sapiens
ggctatgccccgcccctccccagccccagacacggaccccgaggtcacacaagcctccctggctgctacccctcaccccacccttcaaaactaagctgctgcgaatcacctgcctgcctccacaccccactctcagtgccactggcaagcactccctactccctcaaccctgcacagactggcctgcccccactcccgcacaccccgtcccttctgcccagcccggacatccactccggccctccccaacgcaaggatgtcccccgtccaagaacaccaacgccgcggcccctccactcctccacaacccctgcctgcctacccccacccacgccaccaaccgggcctcctccacccaccgacccaccagctgcacgcacaccctcgtccccaggcccctccagccaaaacccacggagcctccactcgcatctctcccaaagtgcgtgcatcgactccacacacacgacccagctcggagccagttccaagggcaaggcatctccgagctccgctctcgacccgacgctcgcgcgcgatgcccaccgcatcctgctacaagcccaagccgccgcgcccaccgtgaatgcagcgaccccctcgcgcgcacagcaaaaccaccccaccacaaagcccagaacggtgccttcacactgctccgctcgcgcgcacaaccccaccaagaagtcgcatgcacgctgcacacctccgcgccgccgctctcgccactttcgaacgactctcccctgcccacactcgctcccacagacagtcggccacacgaaaccgcaacggcacacaggcacactatccaccgacctcacttggcaccggcgctccgcgcgctccgaccc

SEQ ID NO: 581546 - DNA, 877 bp, Homo sapiens
cgcggtggctcacgcctgtaatcccagcacttgggaggcggatggatcacgaggtcaggagatcgagaccatcctggctaacatggtgaaacgccgtctctactaaaaatacaaaaatttagccgggtgtggtggcgggtgcctgtagtcccagctactcaggaggctgaggcaggagatggtgtgaacccaggaggcagagctggcagtgagccgagattgcgccactgactctagcctgggcaacagagcaagactccgtctcaaaaataaataaataaaaataaataaattaaataaataaacaaaccagtaaaagatatatcccacacaggtgtagtctgaaccaaagctgtccctatctaagtgaatacaaaagagtactgaactgagaaagccttttgctggttttgggaaatgtctttaatgtggacagagaaactctaagactctctttcctatagcatatatcaatgagctatgtgccaaaaagtttgttaaatactaaaaggtagccaggaaaattacaatgcatttccctcaggaaagaattctaaagcgggcgcggtggtcacaactgtaatccagacttggagggctgaggggggcagaataaggagggtcaggagcatggaagagcattcctagcgaaaggtgaaaacccattttatttaaaattcaaaaaacaaagagaagaattttaaagagggtaggtctaggtggtacaaagttccacttgcgagggcaggaggccagaggaaggggtaaaggcacatagtacacgaaggttttttgaaaaatggagggagggggaagaaaccaaaagagaaatgtgggaacagaggcattaaaaaattgaagggagagggatgaagaa

SEQ ID NO: 581547 - DNA, 149 bp, Homo sapiens
atcattgatcaatgatatggtttggattactgccccgcccaaatctcttgtccaattataatccccagcattggaggaggggcccggtgggaggtgattggatcatgggcatggacttcccccttgctgttttcgtgataatgaattct

SEQ ID NO: 581548 - DNA, 220 bp, Homo sapiens
aggcgggctgtctagaggatcccaaaagtatccctatcaccagactgaaccctttatgatacaaagtaaagaacgggaagaatgggtggcaaggtggctccgtggaaaagctcacccagcacaggtgccctgagctcggagccttggtttctggtccctgggcgcgatttatatttaatcaaatttttatatagaatacacatgagaaatagaaaatata

SEQ ID NO: 581549 - DNA, 1443 bp, Homo sapiens
acccgatgagggaaccgagcgcagaacgcctgaacgcaggcatcgatacttgccttattctgacagccctagtatggctcccgtgtccccatactcatcggcgactaacttgtagcagtcacaacaccgcgtagtgctcagcgtaaaccagttctactaactcagctcgtcgactggccgcgaaggaacgtatcaacagcatcctggagactcaacacatcattaaagtatgactaagcttataacaacgaatcagcatatatatgagtaggtgagcatgcatcaccttgcattatacagtgcacgtcacacatgtaataagacattcccgtaaaaaggccacaatggtcccgaaggcccgcacaatgccgcttagcggtacgaatcagtgacgtattgtcacagtctagtaagcatctatgatacacctttaggtggcggggcataagtcgtgtcattaaagtaacggtcgcgtgcaatccagctttctactttcgtactagaacgcacactctttgaaacgaagagagcaactacttatgtcgcataatactccgccttatacgcttttgtttacctgtaagttcactccgtattgaaaagggccacatataagatagtattacacaacatacaggccatacacatgtacgtgcgcccgtatacgggattcgaaaaagggcatgggagacacgtatacgagacctacgtcgtgccatgtatgtgcagctataccttgcttacaaactgtacatgactcaacatataagtccgcattcggatacgattgcatcgaggcacatatatacctacaattacccaaacaacccacccgcgttgaagaggcctgtctacccagagacagccaaggttcactttcctgcagtgaacctccagacgcgcaacgtggaccgttttaacagttcgcgtcaatttagcgtaatctcctgctccttaggccacaaaatcttcgaagaacgttaccggaatccggccacattccacccagggtccggccagtgccaatagagtccccttcttacctctacatggcgagcttttcagaaggacagtccataacttgaccccaacgtcaatatgaggcccttctttctggactggaccttcctaaggcaaaggccttcggtgtaaagccttcgcccttttaccccgccccaaattaatttacaaacccgtaactggggggaagaaaacttcttcctaggtggacactaaattaaacacaaacggttgccttacccttggaatccaaacattactgtgagctcatttcctagctgtgacaagggggacttcaaacgagttaacgtacagatcctatcaagcgccttaaataagatgcgcccttcgttacacttaatgtcagccacatacatccaaaatgggggtgctgacatacaaccacgacgcaacatttaagga

SEQ ID NO: 581550 - DNA, 138 bp, Homo sapiens
aaagatgcactgaagtctctgcttagatagcttagtggtcaggtaatgattaaacaaatttctttaaatttctgttaaatttcttaaacattctgttcacactgcctggaagcagtgagtatcccagtttttgctttg

SEQ ID NO: 581551 - DNA, 125 bp, Homo sapiens
aggcatatatggcaggcaggggcatatcgctcacgcatgcaggcatggcatagtcaatagggccaaggcagccctcctcagtttgttcgggcaggcatcggcagcaattgtgtcaggcagcaatc

SEQ ID NO: 581552 - DNA, 261 bp, Homo sapiens
  misc_feature (100)..(100): n is a, c, g, or t
gtgtatctcagggaccctgctctctcctctacacatgcgcacgcaaacacacactcacacacacacacacaatgacacggggtggtctggtctaatatantgtgtctgaattcagagggcaaacattaacagccaagttttgttttttttgagagagagtctcactctgctgcccaggctggagtgccgtggcacaatcttggctcattgcaacctctgcctcctggattcaagcaattcatctgcctcagcctcctgagt

SEQ ID NO: 581553 - DNA, 377 bp, Homo sapiens
gagagaaaacgagcaaagggtaggaacagggtagaagagagcgaagacgaagatggacaagccgaagaggacgctgaagaaaacaagacgaaaaaagacacggacaaggaggagataggcggattaagggagtagggaaatagtggaagagagccataggaactgagagagtgaaggagacaagcgcagagcgaaacggagagggagagaaggaaaaggagaagagaacaagggaatggggccagaggagggggcaaggaagcgatggcagaagaaggatgatggaaatgagagatgaaaggaagacagatctattaggggtactcctcctagtgccaatggctagaaatctcaattcaatcctgcttctttaaaat

SEQ ID NO: 581554 - DNA, 91 bp, Homo sapiens
aatctgcttgcctttcctgaaagtttttggggcttaagattccagactttgattcattaaactatagtcacccgtgtcctgtgaaaaaaaa

SEQ ID NO: 581555 - DNA, 389 bp, Homo sapiens
acctcatggaggcacccacgttaatccacactcagtagtaaaatgccggaagtctctgtgaaagtctactgaaagtgcttaacccggaagcaacttgaacgtaggtgaagtgatctccgcctcacagagctgaggtttaacgggacattaggaggactatgagacaacagtcgtggttacataggaactcatttgtgcatttgaatatgaggatgagtgagagagaggatttccatgtgacttttgggatttaagtacctggtagggtcatttcactgagataaggaatatgagcaggttattagaaatggaagtaatcttaaaagattttctagatagtctgatattcctaaatcattaggtaatgaaaccgaggggctgtcaaggtt

SEQ ID NO: 581556 - DNA, 822 bp, Homo sapiens
ccaggaggagcgcgcgggcacagggtgccgctgaccgaggtcgtgcaaagactccagaattggaggcatgatgaagactctgctgctgttgtgtggggctgtctgctgtacctgggagtagtggtgcactgtcctgggggaccaggacggtctcagactaatgagctccaggaaagtgtccaatcagggaagtgaggtacgtggataaggaaatgcaacaatgctggcaaccggggtgaaacagatagaaggactctcagtggacaaatacacaaacggaagagcgcaagacactggtcagcaacctagaagaagccacgaagaagaaacgaggatgccctacatgagaccagggaatcagagacgaaagctgacggagctcccaggagtgtgcgacttgagaaccatgtagggccctcggggcaagtagttgtacagccctgcctgagacagatctgcgtgaggttgctgacgtcgacgcgtgcttgcaggaaagtggctcaggccttggttggccagtcagcttggaggagttcctgaacgagtagctcgcccttcttacttactggatgaatggtgaacgtcatccgagtccctgctggagaacgaccggctagcatgatcgcacatgctggatgtggtgcaggagcacttgcagccgcgcgtccaagcgtcatagacagagctcttccaggacaggttcttcaccggggagccccaggatacctaccaatactggccttcagacctgcccaccggagggctcgacttctcttttcccagtccgaatcggcggagtggatgcccttctctcgtaagagc

SEQ ID NO: 581557 - DNA, 142 bp, Homo sapiens
tgctacctaggaccgcccacagagagagtagagagagcgatgaacaggttagagtaggactagaattgtctgtcacacgcaatgttcgagagcaaggcgtcgagcctgaagaacacagtatgatattgtaatgcgatatgga

SEQ ID NO: 581558 - DNA, 397 bp, Homo sapiens
tatgcagatagtcatatttcatgtagtccaacagtcactctttacactttcatggattccaattaataaatggtatatatatttagctaacattatcaggagtgaaaagaaaaagaggaaggaagaaacccctctcaggcaatccatgtacagccacccgcaaccaacgcaaatgtaatacattcgttaagcacaagatgacaagcacagcagcatggccagaccaccacagcatgcacactgtgcaaagttccgttttcgttaagcaacatgcaaaggcacagccaggcactatctataattcacttcacttgcaagcaacatcattcagccacacaagttccattccaattcccagcacaaacactccatggcatgcagcactcacattccagca

SEQ ID NO: 581559 - DNA, 486 bp, Homo sapiens
  misc_feature (29)..(29): n is a, c, g, or t
  misc_feature (99)..(99): n is a, c, g, or t
  misc_feature (156)..(156): n is a, c, g, or t
  misc_feature (161)..(161): n is a, c, g, or t
  misc_feature (164)..(164): n is a, c, g, or t
  misc_feature (188)..(188): n is a, c, g, or t
  misc_feature (229)..(229): n is a, c, g, or t
  misc_feature (294)..(294): n is a, c, g, or t
  misc_feature (380)..(380): n is a, c, g, or t
  misc_feature (382)..(382): n is a, c, g, or t
  misc_feature (429)..(429): n is a, c, g, or t
  misc_feature (435)..(435): n is a, c, g, or t
  misc_feature (459)..(459): n is a, c, g, or t
tccccacccctcccagaaaaatgccatantttatggaggaaaaacacagtccaaggcagccgggggcctcagcccatcttcttccagatggtgagttanggggtgagcactcccgccacatagatggtcacggtctgccacgtgggcgtcccaaanttggngangaggccgtcccaaccaccctggtnttggatccagcccaacagccgctcccggaggaagttcaatntccagcccatgatggttcttatcagttccggcaccttggtgcacagggccttgagcaccagtttnctggcaaagtagaaaagggcgacaacccggccccagttgaagttgccgttagaaaacatgttagctgccacttggaaaaagacctntnggggggagttttttttcacggcggcaattatcctctgcagctccatnttactnttcatttcgtccccgatgcgcttnaaaaatttgctcagcttcttggtggac

SEQ ID NO: 581560 - DNA, 513 bp, Homo sapiens
  misc_feature (65)..(65): n is a, c, g, or t
  misc_feature (114)..(114): n is a, c, g, or t
  misc_feature (129)..(129): n is a, c, g, or t
  misc_feature (131)..(131): n is a, c, g, or t
  misc_feature (198)..(198): n is a, c, g, or t
  misc_feature (201)..(201): n is a, c, g, or t
  misc_feature (229)..(229): n is a, c, g, or t
  misc_feature (239)..(239): n is a, c, g, or t
  misc_feature (246)..(246): n is a, c, g, or t
  misc_feature (248)..(248): n is a, c, g, or t
  misc_feature (250)..(250): n is a, c, g, or t
  misc_feature (254)..(254): n is a, c, g, or t
  misc_feature (273)..(273): n is a, c, g, or t
  misc_feature (306)..(306): n is a, c, g, or t
  misc_feature (315)..(315): n is a, c, g, or t
  misc_feature (317)..(318): n is a, c, g, or t
  misc_feature (322)..(323): n is a, c, g, or t
  misc_feature (331)..(331): n is a, c, g, or t
  misc_feature (346)..(346): n is a, c, g, or t
  misc_feature (394)..(394): n is a, c, g, or t
  misc_feature (488)..(488): n is a, c, g, or t
gcgagaggagggcgaggcagtgccaggagagggcagctctgaactgctggctgggacagctcagnaggaacagatgaaaggaagtcttctgaggcagtgggctcgacgccagtngcctcctcgggtaanangggccacgcagtaaccaccgcgggaccagggctggtgagcagccaagtacgcaaagttccagcggcngcngatcaacacactgaaagctgtcttgcancgacccggangccttgntnantcanatagacatccgaattccangacattgaaccgcgtgagtatgaagcggagctnacaaaacantnnattnnataataanactttcataaaatanattcacgactaaaagaggataaatgcggagagtatagcaaaacccganacatgaatacagaacacgtagatacactcgaaagagcggcttcatacatgttgcatagaatatacaagctttaatgggagacgaaaaagttttnggagaagaagcatcgcgtaacctta

SEQ ID NO: 581561 - DNA, 95 bp, Homo sapiens
  misc_feature (20)..(20): n is a, c, g, or t
tgtttcagggattctttagncttagcaaggtcttcttttaacttgttgtattgctgcacatcaaagtgctgttgctttgatttcttgtggaagaa

SEQ ID NO: 581562 - DNA, 175 bp, Homo sapiens
tgcggtagtatcagtgcagaggtttggaatcagaacaacctaagttggaatcctgtctctagccaggcaagttgcataacctctcttggtgtttccgtctctgtagaatggggcttatagttgctatacctaacctacacgttatgtcactttatgcagggccaagtgtgataca

SEQ ID NO: 581563 - DNA, 192 bp, Homo sapiens
ccggggggggggggggggggaccccaaggggttttttttttttggggccaagggcccggcgggcccccccggggggggggggggggccccccccttttccccccgtttttggggtttttccgccccggcccccggttttgggcccttcccccgggttccttggcggggggccataaggggttttgtttccca

SEQ ID NO: 581564 - DNA, 164 bp, Homo sapiens
tggagcgatgaattgacggaaggtgaggaccctacgtgttatgcttatctagtttacaaaaaatagtagcatagttaaactagataccagaactagaagttctcttaactcaaataccataatttttccaagtcagaagcagaaacgagaagggtgtagtcttt

SEQ ID NO: 581565 - DNA, 392 bp, Homo sapiens
  misc_feature (4)..(4): n is a, c, g, or t
  misc_feature (12)..(12): n is a, c, g, or t
  misc_feature (165)..(165): n is a, c, g, or t
  misc_feature (303)..(303): n is a, c, g, or t
cccnaccctagngggtccaaggctgatataattaaaagtcctgatgttttgtcctcaaaaagacccaatatgaccctagttggagtaccgtatatataaatgtgtatgtgtatgtagcattcctatattcacaagcctttaagtgatttttcctaggaattaatnagaagtaaaggcccaggcacagtggctgcacttgtaatcttagtgctttgggaggctgaggcaggaggattgcttggggtcaggagtttaagaccagcctgggtagcatagctagactctatcgctacaaaaaaatgnaaatatttagctggccgtggtgccacatgcctttagtcccagttacgtcactccatacactccagcctgggtgacagagtaagaccctg

SEQ ID NO: 581566 - DNA, 826 bp, Homo sapiens
ctctgtacccactcccacctaagattcctacccctgtgtgctagctggtgactcttgatctggccaggccagcaacaaatacttgagactaggcagcgatggggtggtgcgcaggcctgcctagaggccctgggctccagggaactgagactagggctgtatcattcatgagtgcctgattcacagctcccgctagtgctatgacctggcctccatcggcctcggcgcttgccttatgagcaccgttaacccacgccaaggggctaggcagggtttcgcggggcctggcccaaggtctccagcagagcagtaacatcttcccaggttgggttgccacagacacccatgctcctggaggcccccagcccagtgcccatcttggttgtctacccctgtctgccttggcaggcctagactcagcgcctccttgtccggtcagcctgggggtccctcgggcacggatgccaccacatgggggccggtttagtgcagcctggtcgagaacgctgactgggggccggggatgctcacgcgggccctgcaggtgtcttcgccacaagaggcgtgcttttccgtgccctggctccacccttgtcgggctttggctcattttccttgccgcgtgtcacgaccatccacgggcagtgacctccgtgccttgcccctcctcagagccggtggcctgtggtgtgggacccctagcctgggccgtgacccgtgcccattgcctcattctccaaggctcatcagcgggtttcagcaggaacttttcctcacgggttgtggcctggacgtgcgagggcctgtctggcggctgtggttcccc

SEQ ID NO: 581567 - DNA, 605 bp, Homo sapiens
  misc_feature (355)..(355): n is a, c, g, or t
  misc_feature (600)..(600): n is a, c, g, or t
gtaatgtcatgattcatcctctcttcagtgagactgagcctgatgtgttaacaaataggtgaagaaagtcttgtgctgtattcctaatcaaaagacttaatatattgaagtaacacttttttagtaagcaagatacctttttatttcaattcacagaatggaatttttttgtttcatgtctcagatttattttgtatttcttttttaacactctacatttcccttgttttttaactcatgcacatgtgctctttgtacagttttaaaaagtgtaataaaatctgacatgtcaatgtggctagttttatttttcttagttttgcattatgtgtatggccctgaagtagttggactntgcaaaagggcgaagaaaggatatttgcgacatacagtgtaaaagtgtcacgagcacattgtggtattatttcttatcaatgaaagtcatcgttatttcttcgtgattggttctagaacatgttcataacatactcttatttgtcgaaatgcacaaagaatgatcttaaaccattcaaaatataatcgtttccctcttgcggttcgagccacatttcaatataaaatagaagctaaaattaaaanaaaaa

SEQ ID NO: 581568 - DNA, 254 bp, Homo sapiens
  misc_feature (57)..(57): n is a, c, g, or t
  misc_feature (123)..(123): n is a, c, g, or t
gaagaccgtcacgtctgcgtccaacaatgagacctactgccggtccttctaccccgngcacagcatcaaggagtggctgatcggcatggagctggtctccgttgtcttgggctttccgggggntttcccttctccattatcgcctgtcttctacttccctgctggccaaggccatcttgggggtccaggtgcccggggaggccaaggagcgggaaggtcattttttctcgggggggggttccctgtttctgggc

SEQ ID NO: 581569 - DNA, 160 bp, Homo sapiens
tatacaaagatcatagtcccccctaatcagcttatgagtagaagccagaatacactgtagccatttaaattgtcagacattatagctcttataaggtatgcaccgaagttcaagccataaatacatacattaggttcaaagccttacaagtatgctacgc

SEQ ID NO: 581570 - DNA, 309 bp, Homo sapiens
actagtccacggtggctggggttagaggtctgagccaccgcacccagccaacttggtcattttagagatagcagcatatgccttatcgtggtcctgaggcatggtggctggaggtcaagtctatgcagttagctacgatgggccacggaaagattctaaacttcttgtagccaaccgtggactagtactagtccacggttggctagtctcaaactcctgacctcgggtgatccacccacctcagcctcctaaagtgctgggattacagatgtgagccactgcacccagccaaccgtggactagtgggta

SEQ ID NO: 581571 - DNA, 112 bp, Homo sapiens
aaagccttcatttttgacctccccttacttgaataaattgaaatatgaagtttgcattttctgaacctggccttagtgattgagtatctatgtaataattataatataatcg

SEQ ID NO: 581572 - DNA, 1667 bp, Homo sapiens
cacctgtcagagtgacgtgatatggggtaaggaggtgcttttttaaaatcgttcatagacttctgtaaaatgcaagattaaattgaaacgttattgataacagtcgattctttcgaagaaaaaaaaaaaaaaaaagaaaaaacaaaaaattttgtgtgggcgccgtttgggcgccctctggaaaagaggtttttttaaaaccatttcgtgttggggggcgggggcccccaaggtgggtaaagtggaaagtggggcaaacagcagggtgtctccctaagaggaggaagcactgggggaacatagagacaaaagagcggggcgggtctctcaccgcaccaaatataaaaaaaaccgccggggggagcacccccgacgccgcggttgctggacaccaatacctccagaaaagcggaggcacacagagaggagcaaataacagggggagtcaactccaacaagggcgagccctaacagagaaaggctcgagcagtaaaacaaaaaattaagagcgccccggagcaggaggggaggagaaaaacaagaacagacagcaagacaaaaaagaaaaacgaacaatgaagagagaacacgaaaggagagagaagaaacgagagacgaaccaagcgaagagagaagacagaaacataaggacagaagagaacaaaaacgaagacaaacagaacaagccagcagacagcgagacacaacaagcgagaaaaccaaaaatagaacaaaaggaacgacaaggaaacaaaaacagaggagagaagggaagggagaagacaaaaacagaaaagaaaaaaaggagaaaaagaaatggaagaagagacaaagaagaaacaaagaaagaaggagagagaagaaaagagcaaaagagagaagaaaggaaaaagaacgacgaggaggcagaagcaaaagagaagagaagaagggcaaaagagagagacagagagaaaaagggacgaaagacggaagacacagagagaaagaaaacagaagaaagaagagaaagaaggaagggaaaaaggggaagaacagaaaggagaaaagaaggggaggaagagagaagaggaaagaagaggaaagggaagagggaaggagaaggagaaggaagaaaggggaagccgggcggacagaagggaaagggaggtaagggcggaaggaaagcaagcgaagccaagagacgggaggaggacgggaacagaggaggcacgcgagcgagagcgaggaagcagatgcagggacggggggagcgagagaagaagaggagcaggagaggaagagcccggaggacagacgagaagaaagacaaagaacacgcgacagaaagagcgaagaaaggaaagctggggaggaacaggaggaggatagcagcgagggccagcgagaggcaggaggagaggagggcaggcaagagaaagacgaagagaacgagacaggaacagagagaaggcagacgcagggacaaaggacgagacgaagcgggcagagcagagaacacaagaaacgaccggcgccgacagaagcagcgcgggggcaacacggagcggacaacacagcaccaaaccacaacagtccacacccgcagcacccaagaacgagagcgcgctgcggcgcctgagccagagacgggagcgcccacagacggcgcacacgcagacgaaaca

SEQ ID NO: 581573 - DNA, 395 bp, Homo sapiens
catctttcctgttgctccgcagctcagcaccttgcttgcatctttcataatattggccacaatttctcattggtcaacccgtctgtttgattttttttttctgtctgtctctctcactagacaaagtacaaaggggcagggatcgtgtctgtcttatttatcgtggtatcccctcagctctgagccagctaccacagtaccttgtaaatgcctagtcaatatcagtggaataaatgattaggtgttaacctcaattgtccagcactggggttcaattcatgtccaatatttcagacttagcatagtgaaacttccaacaagcctgtttttagttcctgttggttggaagtataagctgagggtgatcctctagaacactatgacgtaactcggat

SEQ ID NO: 581574 - DNA, 527 bp, Homo sapiens
tttatttgtttttccccaagttttttttccccccggggggggggggttttgtttcccggggggtgtaaattggggggggttttggggccccccttttcccggttttttgggaaaattttccccttccccggggggggtttggggccccccccgttttttaacgggttttaatggggcccccgggtcccccctttttgtgggggccccccccgttccccttgggggtttccccccggagtcccggcctttttcccgggggggttttttggggggtaaattgccccggttttgggggggtttcccccttttttttccccctggggggttttttttttttaacctcccccccccgggggggcccgggcttggtcccccggttggtttttggattccccccggggggggttttcttttttacctttttttcccgggccccccccggggggcccccccttttttttccccttttgtttttttttttgcccttgggtttgtttttttttgaaaaacccccctttcccggggga

SEQ ID NO: 581575 - DNA, 338 bp, Homo sapiens
  misc_feature (1)..(1): n is a, c, g, or t
ntctgactctgcttccgagtagctggattgcagacacgtgcagcacacccggctataggcgtgtatatagcagagatggggtttcaccatgttgtccaggctggtctcacactcctgacctcaagtgatctgcccagctcggtctcctaaagtgctgggattacaggtgtaagccaccatgcccagacgctacttgtgttttttccctcaagacatcacagttatcttccccaaacaaaacaagtatgattgtatttgccagaaaatatactgagtaagcagaacaagatccattactaaatcaagcctcagcccatacctgggcagccccctcagga

SEQ ID NO: 581576 - DNA, 117 bp, Homo sapiens
atgatagtgcagcgagctgcagcagccgtttcgtgggccccgcagcctccagggcctacggccgccgcacaggatagctggatggctcagtcatgaggcttttagacttgtttcaag

SEQ ID NO: 581577 - DNA, 874 bp, Homo sapiens
  misc_feature (11)..(11): n is a, c, g, or t
  misc_feature (88)..(88): n is a, c, g, or t
  misc_feature (108)..(108): n is a, c, g, or t
  misc_feature (137)..(137): n is a, c, g, or t
  misc_feature (164)..(164): n is a, c, g, or t
  misc_feature (169)..(169): n is a, c, g, or t
  misc_feature (173)..(173): n is a, c, g, or t
  misc_feature (187)..(187): n is a, c, g, or t
  misc_feature (226)..(226): n is a, c, g, or t
  misc_feature (228)..(228): n is a, c, g, or t
  misc_feature (263)..(264): n is a, c, g, or t
  misc_feature (288)..(288): n is a, c, g, or t
  misc_feature (295)..(295): n is a, c, g, or t
  misc_feature (299)..(299): n is a, c, g, or t
  misc_feature (301)..(301): n is a, c, g, or t
  misc_feature (309)..(309): n is a, c, g, or t
  misc_feature (319)..(319): n is a, c, g, or t
  misc_feature (412)..(412): n is a, c, g, or t
  misc_feature (414)..(414): n is a, c, g, or t
  misc_feature (454)..(454): n is a, c, g, or t
  misc_feature (476)..(476): n is a, c, g, or t
  misc_feature (507)..(507): n is a, c, g, or t
  misc_feature (550)..(550): n is a, c, g, or t
  misc_feature (626)..(626): n is a, c, g, or t
  misc_feature (648)..(648): n is a, c, g, or t
  misc_feature (674)..(674): n is a, c, g, or t
  misc_feature (683)..(683): n is a, c, g, or t
  misc_feature (727)..(727): n is a, c, g, or t
  misc_feature (736)..(736): n is a, c, g, or t
  misc_feature (747)..(747): n is a, c, g, or t
  misc_feature (758)..(758): n is a, c, g, or t
  misc_feature (768)..(768): n is a, c, g, or t
  misc_feature (773)..(773): n is a, c, g, or t
  misc_feature (782)..(782): n is a, c, g, or t
  misc_feature (788)..(788): n is a, c, g, or t
  misc_feature (796)..(796): n is a, c, g, or t
  misc_feature (863)..(863): n is a, c, g, or t
gggtcctgcgnagggggcgggccccacccacagggtctccctggactgggggggggtgggggtcaggcagtgggcaggggcctgagcnaggctcccaatctgcctggngcccaaagcctgggcacagtggctcagcnactcagcgttgagcgtctgtgccgggnaaatnagcntctgcaggaggaanaaggggagaaaaaagagcccggaccacgtggtgaagaangnatgggccccggaaaaaaaaaaaaaaaaagagaaanngggggggggggggggggtgggggnggggggngggngntgggaggngagggcaggngcttggcccccagcctggcccagcaccatcccgcgccctcacctgaagcggccaccagggggcccgcggccctggccagagcacctaggctgngnagtgtaaccatgaccgtgcccttctgaactggtgagaaanagaaaaaaaaaaaggaggaaangaagggaaaaaaaaggagagaggaaaaggantagagaagaagaaaaaggaaaagaaaagggaagagaacgaaancagaagatgaggaggaaggcgggcacagcagcaggagggcccgcttcacggcagccacttccccgccaggttgganccgccgggcataggcaccctgnatggtggccatggtgaggccgatgangaaaacatnttccctgctgtaggctactgaactggaagcgctagtgtgtgaanaaaaaaaangtgtccccccngcccgagaacnggaagaggtngaggnagttgactnggcccnggcggcgncggctgctgagcctgtctccagagggtgggtcctggccacgagcgacaccgagaagcgccaggggcnagggggctgag

SEQ ID NO: 581578 - DNA, 474 bp, Homo sapiens
  misc_feature (4)..(4): n is a, c, g, or t
  misc_feature (39)..(39): n is a, c, g, or t
  misc_feature (57)..(57): n is a, c, g, or t
  misc_feature (117)..(117): n is a, c, g, or t
  misc_feature (123)..(123): n is a, c, g, or t
  misc_feature (136)..(136): n is a, c, g, or t
  misc_feature (142)..(142): n is a, c, g, or t
  misc_feature (162)..(162): n is a, c, g, or t
  misc_feature (185)..(185): n is a, c, g, or t
caanaaaaaggtggtggttctggcatccactgagttttnccaagggacttatagtcngattattttgaataggaagcccgtttagcagcataacctttcatgtccagattttgaaanctgtgnagctagcctgagntcctgnataaccagactggggaactnggtagttagtctggaatgtgggncgtccagtatgctctggaggtccttggactgctgctggaggataactgaggggcatacccagctggcaaagtatgttcctgagcggaggagcctccatttgcaagcctttctcatgcagctccaagtgaggcgaattcctagaatcctagcaccagcagcgactcagctctccagactcctctcagaaaggcataggtgctgcactactccactagactaaagtcagggagaaaaagcacctggactttgaggcagtttaggttttgtttcctgagtctttagatttcc

SEQ ID NO: 581579 - DNA, 803 bp, Homo sapiens
agggtacataagggccgagatatatcgaaggattttgctcagcggtactttgctagagttagtcttgggtattccccggccccccccttccccccggagggacagggtcgtgcccactcgaatcgtccaagttaatatgagccattgtatgggtttgaaacacagggtggatgaagccttcagagactttatatttggaaaagggatagtccgtatgtttataattttattaccgggactgatatttataaaattttgataaactgtaccatagctgctgcataggtttcaagtacatgttggaccagtaaggattgggggagttgttttttaatggtcaccttaaagccagctgctataagaaatagttggaactcaaattttgcatctggtcataaccctcataagccatttatccatattgccagataatattttcccatccattatttaaaaaccagggacttttaggcttctgaagatcatagtggacccgagccaaattaaagttccagtttgtgtgcaccaatatcattgcccagacattcattggaatagctttgtttgatagatagtatagttcatatctccagctttatatttccagatagcttaactggggccaatagaagtctaacattccagggtgaactttttcatgtttaatctcaggctaaaagtaaatgatatttgtaaagtttggattaaattctgtttactcattttgagttagtatgaaaaaaagtgattgtatgtttaagaattgaaattgttcattttgtgataaatgattaattcccaga

SEQ ID NO: 581580 - DNA, 330 bp, Homo sapiens
  misc_feature (26)..(26): n is a, c, g, or t
  misc_feature (43)..(43): n is a, c, g, or t
  misc_feature (124)..(124): n is a, c, g, or t
  misc_feature (130)..(130): n is a, c, g, or t
  misc_feature (140)..(140): n is a, c, g, or t
  misc_feature (221)..(221): n is a, c, g, or t
  misc_feature (269)..(269): n is a, c, g, or t
cgtgatgattatagacacaattatcntactctcttccatcaanttttataaaagccccgtacctttcccactgaaatttcaaatttgccgctcaaaaccatcattttcttcttttttgtgaaanttttantggagcgaantcttattctcacttttttgtgctaaccactttgatttttcccccatttttattgagtccatttccgtggcgaatccaaagngctttctagtacacattctcaatgttttctacaaggctatttctcagnattttattataattaccatctttttcaaaattttaactttgatgaaaataaagtgttaatc

SEQ ID NO: 581581 - DNA, 653 bp, Homo sapiens
ggcactcactagtcaacacaagatctgcgtatcactcaggaatacagtcccgtggcagtccttcacagttcctagttcttatcattatcaatctgagcggcactgaataggccaaaaggtcatcgaggtttagttttggcagacatggcagctatggtagtgcacgatcatgcattatggtgaatccgggtttagaccctctcagcacgtggaagtgtgagtcactacacttccaatcctgtcgttttgccacaggcaacagatactgattatctgttaacatgctaacgtgcgtttggtaacagatcatccaatggtcattatgcaacgtatattaataaggcacccaggtttatgtggccacttctagtgatatatcgaaacaactgggatttagtgcagtcacagagatactattactatgagtcatagaagattagtgcgccaaaggatattcaatccatagaattagcaagcaatcgacagcaagttcgacgtattcaactccaagaaacttgcatacatactttgcagggcaacgttatctttgtccctgtcacatcctgtccgtaaacattatgctatacgtattctcacttagtcctggtaggtagcgtctatccttagtcgtgtaactgatctttaatacgcta

SEQ ID NO: 581582 - DNA, 933 bp, Homo sapiens
gtgggaggtgtctggtaaggtcatggtgggaagggagatgagagaggagatatggcagatgtgaggatatggggccctagatgtgaggaaggaagactagatgaatgttcttgaatagctgtgggatgttgtgtgcaaaaggtggattgatcaggatctcagggttatgtctaggaagggaataagatgaaactagaatgtcaggcaaaagcgtgtctgtgcaaactgtaggactccttcctaacttcctgtgaatcaaatggctgagctattcagtccagtcacgcaggctggcagcggagtggttgagtgtgctcgcgagggccagtgccacattggctgcgataggaatttcagggtagcattagccatcgtggagcgatgctacttatccagggactccctcctggtccttcctgtgtcactttcacatagtgtgcacatgttaccccatggcatgtcccaacagggccaggcccagtcacagctgggcttccacaggtcagaatatgggacaggacatggtcagggagaggaccctgtgagttggtgacatatatgtggcagagatggtagtgttcagctgcttcagcagtgtccccaacatcccaatagggtgggggcctgtgggccagaggactccatgacagtagccattggagtcccacctgtgccaggtcagagccaccggcaggttcagaagtggtcagcccagttaaagggtgggagtctggagccagacagccaagccccttccaatctaccggtcactggtcatcctcacaacaggcaggggtgaatctcaactcttgctgttatgtggggtgtgccgaatcacccctttagcaatcattcattaggccaatttattggcctcgggaatgtcaaggaaccccttggacacaaaaaggggactacgggaaatctcccccg

SEQ ID NO: 581583 - DNA, 153 bp, Homo sapiens
aacgaatggtcctcagctgacttaaacaagattatcctggagtatctaggagagcccatgtaattacaagcattctttaaaactggaagagggaagtagaaggttaagaaccagagacggtgggcacaatggctcatgcctgtaatcccagca

SEQ ID NO: 581584 - DNA, 1011 bp, Homo sapiens
  misc_feature (1)..(1): n is a, c, g, or t
  misc_feature (77)..(77): n is a, c, g, or t
  misc_feature (81)..(81): n is a, c, g, or t
  misc_feature (83)..(83): n is a, c, g, or t
  misc_feature (97)..(97): n is a, c, g, or t
  misc_feature (99)..(99): n is a, c, g, or t
  misc_feature (111)..(111): n is a, c, g, or t
  misc_feature (132)..(132): n is a, c, g, or t
  misc_feature (143)..(143): n is a, c, g, or t
  misc_feature (154)..(154): n is a, c, g, or t
  misc_feature (196)..(196): n is a, c, g, or t
  misc_feature (204)..(204): n is a, c, g, or t
  misc_feature (214)..(214): n is a, c, g, or t
  misc_feature (240)..(240): n is a, c, g, or t
  misc_feature (321)..(321): n is a, c, g, or t
  misc_feature (328)..(328): n is a, c, g, or t
  misc_feature (365)..(365): n is a, c, g, or t
  misc_feature (472)..(472): n is a, c, g, or t
  misc_feature (489)..(489): n is a, c, g, or t
  misc_feature (531)..(531): n is a, c, g, or t
  misc_feature (571)..(571): n is a, c, g, or t
  misc_feature (625)..(625): n is a, c, g, or t
  misc_feature (643)..(643): n is a, c, g, or t
  misc_feature (790)..(790): n is a, c, g, or t
  misc_feature (864)..(864): n is a, c, g, or t
  misc_feature (881)..(881): n is a, c, g, or t
  misc_feature (903)..(903): n is a, c, g, or t
  misc_feature (931)..(931): n is a, c, g, or t
  misc_feature (964)..(964): n is a, c, g, or t
naagagcaactgaaaagcagcctgcggtatatggcatcatcacaccaccggtgggtattttaatcctccccctgccncccncntccccccccccccncnccccggcccgcntccccccccgcccccctgccncgccggccgcntcccgcccccncccccccccccccgcccgcccccccccccccgtccccccccncccccccncccccccccncccccgccccccccccccccccgccnccccccccccgcgccgtccccctccccgcccgccccccgcccccacccccgcgccccccccccctccccctccgcgccctncgcctcncccgcccgccccccctccccgcccccccccccccccncccccccccccccccccgccccccccccgccgccccgccccccgccgcccccccccccgcccccccccccccccccgccccccccccccccccccctcccccccccnccccccccccccccccngcccccccccccggcggccccccctctccccccccccggccnccccccccccacccccccacacccgcgcccccccacgccngcgcccccgcccccggccgccccccctattttgaacaaggaagtggcataagcnactcagtgtgtgcccctnagggtgggagctcttccccctaccactccccaccccaaggcatcattttggagagaaaagtgtcttctatctggctagctgtgttatctaggattgcaccttcttacacggcaggcgcggcatcacgtccagatgggcatctaaggnactgcatttcgggagatgaaactttcatttgggactcaactgtatgcatgaactaacacagggccatggacccnccagtcttgattgagtnacagaaaatgaaggtgactctntacacttccaagttgctttctagatctnttcattacaaaatattctgatcaaataatcttncaaggtaagataaactagcctcaggctatctcttaaagcacagagaa

SEQ ID NO: 581585 - DNA, 570 bp, Homo sapiens
ttaatgatgttaaacatttttatcttattttttctacctttgcaagggcaaaaaacatgttttaatgggtaatgttaaatcattcacctttattctaacctggtcaaaaaaaaaactttttactttttttctaaggaggaagggcctactggtcctgaaagataccatgccgccttgcctgggttatttgggtaaaagatacaatattgctgacaaccaattgtttcaggtctacgaaacaggtgggagctacttactacatatttttcggacgaccctttcctggtttggagaaaatctcaactcaagccagggaaagaagggaatccaattttttctctccctttctccttttcttctctctcctttttcgcaaatactttccccctttccttttaagggggtcccggggggggggtttttttggtttttctcttttccctttaatattcccctcttccccacttttttttcttttttacccttttctttggcccctaatttcttggacttttttacaggacccagaagaacagttttctattggccttggggctcccaaagaacctg

SEQ ID NO: 581586 - DNA, 697 bp, Homo sapiens
ctggtgggcgagccctggaccctgagcaagacctgcagtgaagcggatatcctcaccgtacaattactgtcacgaagtttgagatgcatcgaatgatgagaccgagactggaggcccgtgttgccgctagagatcgccgtccacagtcaaccttgtgtcacgtgagagccctgacagccctcaaacaagccctgtcgtgcagggttcacctacctgaccatgtacgggcgaggaggtggagctgtgcgagccggggccggctactatccttgtggcgtgggagaacaaggacatctacgcggcagccatccggagcctgcggctgcgtggagctgcagaatgtgctggagtgccgtgacggaccggtgctgggccgtgcacatggagcgtcgctatacatcgcccgcatgacaagattgctggacacagtgctcaagcaccactcggaatatggagctgcggaccatgtggtcatccccatacatcaacctcgagttccttcaaggtccgctacaagcacatgtaccaaggtggcggcttgcatggagacggaccagcaacatcgagtccttctggggggccctggtagatgttcacaccaggaggagctgtgcaagagtcatcaagtttgcctgcaaccaggagcgcatcccgttcatctgcccgtggaaatattgaggtccgaaaatgccgatgt

SEQ ID NO: 581587 - DNA, 113 bp, Homo sapiens
  misc_feature (86)..(86): n is a, c, g, or t
  misc_feature (110)..(110): n is a, c, g, or t
attcgaatcatccgtccttgacttggaacttggacgtgatatacggaaagagtgtctagttatagacataagaataaccttagagntataaggagactctaattaaaccnggt

SEQ ID NO: 581588 - DNA, 426 bp, Homo sapiens
ccaaatcttagagcacaagtagtcagttaaatactggggcaaactaaatcccaatcacactgccatctttatcaaaaccaaccctgaaacatgcacttaagtggaacagaagcccaggaactgctacccagcttttcccaataaaagaggggaaataacacctgggcctaaagaccaaacatattgtcaaaacacaggagaaatgccaaattcttatatctgacttacgtaggtaagccaggtagaacaagagaaaatggatttaaactagaaaattacactacttggagtctgactataagaatctgctagactacaaaatgagttgggttgaaagagataagggaattttccccccagagtctttaaaaggcagagaatgaaataatgaccttttcagctacctttctgacctcttattcctga

SEQ ID NO: 581589 - DNA, 770 bp, Homo sapiens
gaggaacgagatggcggttctctggatgctgagtgccgtatgcggtgccctaggaggtccgagctctgttgcttcgaactccagatgtttcagacctgctcatatctcagctgtttcttcatagtacctgacctatcccatgtaggtggtgtggagttgctatgctaggcagtgcacttgtcaccagagccacccattctggcttccaataggctgctctctctccatcgtggactatgcgagcgggtttgtcagtgttttgctccgtgggtctgcttccggctgcttatttgactccttgctctgcgatggaagtattccctggcttgcagccctcactcttcatggtcgctggaggccttgagatcggatgcttgttacgtgactatgttcttggggagtgccttgtagacagttgccaagagcagggtcttgtggcagctttcatgctttaacctttgctgcggctttgctatttcaacctatctcgactgtgggctatctgcgaaatctgattgccatgctgtgcgaagctctgtacgctttgttgacttcatactttgaatgaattgatgtatgcctctttgcctctgcttatgtcatgccattagagctcacgaatagaggaagcaacataccagataacgtccattggtgcgacgagagcttctttctcttcaatcagcaaggattatatccagaagtttaatctttgcaggaaacaggtttgagaggaattatatcttaagttgatgaacactgagtcctat

SEQ ID NO: 581590 - DNA, 771 bp, Homo sapiens
gacagcggacaccaggactccaaaatggcgtcagttggtgagtgtccggcccagtaccagtgaaggacaagaaacttctggaggtcaaactgggggagctgccaaggtggatcttgatgcgggacttcagctctagtggcatttccggagcgttcaaagaggttactaccgtactacaacaagtacatcaatgtgaagaaggggagcatctcgggattaccatgtgctggcatgctacgtgctcttaagctactccttttcctacaagcatctcaagcacgagcggtccgaaaataccactgaagaggacacactctgaacccccaaccaaggacttggccgagccctctcggtgaggaaacacaatctcaatcggttgtgaatcctttcatatcctaataggaataaactccaaataaaatatgactggtacgtgttacaaaaaaaaaaataatacaaaaaaaaaaaagttttggggggcttcgctgagagaaggttttctaaacaccatcgggtggggggcgccagccccaagaagatatcgacacagtggcgcaaccgggttcccaagcgcaaccctgcgaccatagacaaaagggggtggctccaccaaaaaaaaaaccggggcggagcacgcgagcggtctgtgaacacgcaagatggggtcgggcgcccaagcggattcaacacagagccagagaccaaatcacgcaccccggggtgggtagaaatcgacgacaacaagaaagcaacaagaaagagaaacaagat

SEQ ID NO: 581591 - DNA, 353 bp, Homo sapiens
actcttatccgaaaggcacatgaggagagggcctgcccgcctgacactgggcctgaggacagtgcgaccgatgatgctagcaggacgcactttaatgcttatagctctccctgctcgcagtgagcgaggtggtggtgtacttgatggtggaactgccgcctccaacagagctgaggccacccccaatggctctgccactgctggaactgaacgccacctccaacgccaagaccactgccattggagtagctgcttcctccacccaggcctaagccactgccgacaccactggcaccgccatagccactggagacggtggactgcaccacagagatgttgcctttcggagaaga

SEQ ID NO: 581592 - DNA, 102 bp, Homo sapiens
cttcggatggagcatcggtattactattcgtctgagagaatgtgataatgcctgtgttctttttgccgtctctgttcttatgtttataatcagttcaatgct

SEQ ID NO: 581593 - DNA, 800 bp, Homo sapiens
  misc_feature (20)..(20): n is a, c, g, or t
  misc_feature (83)..(83): n is a, c, g, or t
  misc_feature (85)..(85): n is a, c, g, or t
  misc_feature (103)..(103): n is a, c, g, or t
  misc_feature (106)..(106): n is a, c, g, or t
  misc_feature (108)..(108): n is a, c, g, or t
  misc_feature (118)..(118): n is a, c, g, or t
  misc_feature (126)..(126): n is a, c, g, or t
  misc_feature (209)..(209): n is a, c, g, or t
  misc_feature (223)..(223): n is a, c, g, or t
  misc_feature (233)..(233): n is a, c, g, or t
  misc_feature (275)..(275): n is a, c, g, or t
  misc_feature (288)..(288): n is a, c, g, or t
  misc_feature (298)..(298): n is a, c, g, or t
  misc_feature (310)..(310): n is a, c, g, or t
  misc_feature (327)..(327): n is a, c, g, or t
  misc_feature (371)..(374): n is a, c, g, or t
  misc_feature (378)..(378): n is a, c, g, or t
  misc_feature (390)..(390): n is a, c, g, or t
  misc_feature (401)..(401): n is a, c, g, or t
  misc_feature (418)..(418): n is a, c, g, or t
  misc_feature (429)..(429): n is a, c, g, or t
  misc_feature (432)..(432): n is a, c, g, or t
  misc_feature (434)..(434): n is a, c, g, or t
  misc_feature (451)..(451): n is a, c, g, or t
  misc_feature (609)..(609): n is a, c, g, or t
  misc_feature (614)..(614): n is a, c, g, or t
  misc_feature (635)..(635): n is a, c, g, or t
  misc_feature (645)..(645): n is a, c, g, or t
  misc_feature (650)..(650): n is a, c, g, or t
  misc_feature (790)..(790): n is a, c, g, or t
aatagctctatacacatttnaaaacacacatgtaggagacagttaagatctattcagtctgtgataatgtctagaactcattnanattcatcaaacccctgcnatnanctccaaaaanccttaacnaaaaacagctgaatcactcatcaaaccatcagtgtcttcctcggcagaatcaagggttggccagaaagagtaaatattctgcncctccacaaaatanaactaaaatncaattctcctgcatctgacaatacaaggctggacagtatganctgcatgactgtnaaccaatgangcttctcttggnctcatttgtaaaaaggngattaactctgtagtcccgcctatattgcatggtctccagatannnnaatnttgtggtaagtntaaattaaaanctcctctcctttaaaangggaacaccangangngagagtaagaaaagganaaggaaaaggctctttccagtgaccaacacgctgaatttgatgaaaatccataagaggttatgctaaactgagaagcataagggtggatctaccattgccacctcctctttgtagcaaaaaaaatcttaacacggccccctcccagctgttgcactgnggtgnctaagggtacattttgagggngtagctccangtacntttccattttctctgtgccttcacatacatcttatggttatgaacagcacccttcatccatccacggaagcgattaaaaaaagggtgggatggaaaaattaacccaacaatattagatcaatacgtgtattttaagtgtncataatgtga

SEQ ID NO: 581594 - DNA, 204 bp, Homo sapiens
attaaaggccccaagttatgccaagaattcagttatgctataaattacataaggtggtcgttatataattaactgcctttgttttgcttttgtaagtttccttattaaaatctcgctcagtttttgttcaaggctcagctttttggatgtggattcattgggccagagcatacctttaaataaatatcctcctttattgactca

SEQ ID NO: 581595 - DNA, 87 bp, Homo sapiens
ctcacacatccctcccctagggggaggcccagggccacgccacggggctctctctgtcccctccctggccccttctgtcgtcttctc

SEQ ID NO: 581596 - DNA, 158 bp, Homo sapiens
ttttttttatagtctaataaaattttattgagaactagtaagtcaaatactttacagaacatagaatacatatgacccagccttccattaatgacacataacatggggtagttctgaatcaacagttgcttatatagagaacgtcgctacgctcattt

SEQ ID NO: 581597 - DNA, 470 bp, Homo sapiens
tgccaggggtaagagcttggttgaagggctaaaagactagaaactactgaagatgcccttcttactgtcagtaaagctgctggagacaaaagaagttgttctcgctgctagagtggtaatttgagaatcatcagtattcctatgtgacaatccaaaattactggttttcatttgacttgtaaatgacacccatcatccatctgcccacaaacctggccaaatgtgatacaacctgaaaacctgatggactaaaggagtactatttaacaattgattgcctttgcactttattcaggttgtttcttaaattttggtagacagatccatttgtatatgtgtgtgttatatctagtttatggctatagagaaggtttaaaatactacagtgtccttccctcaaggttaaattagaagctgcctgccttttagttgtttcttgcctttaataaaatgttatcagttcccccaga

SEQ ID NO: 581598 - DNA, 837 bp, Homo sapiens
attctgtctcccaggtggaggagtcagcgtattaccttgactttgccgaagtcctaggcacgcccagtgccctcagagtctcattttgaatccaggcacttagggatgctattttcccacatcaaacatgcttcctcccagccaaagaattctggtgacaggtagtgaagataattgtgtcactcctgcttacaggaatgacaaagcgaaagcaaatgaggagaatgaatgaagtaaagaccaccacaaggaagagagacgtgatggcatccttaagaatgatcttgataaaggaatggtggctgatggggtccatctcctaaaccagccagccttagctagactcccgtaggagcatatgccactagcgagaagagctgcgaccttgcaggggaagacacaagagatcctggagtggtagaaacaaatggggtaatgatgacagtcttcgaggtcttgagagtaacgcagaagcgagaagagcaagtgtcattgtcttcatctttatgaaagatgggttccctgcgttaacgactttctcgcgatatgattaagatttcacattgatgttccaggaaagaaaagtacgattatgcggcttgacaaacataaatttgacgtctagaaacaggtggcaaggacagagataggtttagtccactatccaagaagacctgtaacatggggtacagtcgagagtgaatggtcgtaccagtcataacaagaatgttacctgggagaagtctctgcgtgtctacctgtaactgaggggggtgtaaccatccttgtggaagcgtccactttgatcgacgattgcgttagtcactctgtgcttac

SEQ ID NO: 581599 - DNA, 155 bp, Homo sapiens
tcctctcatataggtttcccatggctttgtgaatggatcatgtgtctctaggtataaagctgacatcatcttgccacccggcttacctccaccagatcttccccatgtatctgtctccactctttctacctcgcagctgcgttttcacttccaaa

SEQ ID NO: 581600 - DNA, 255 bp, Homo sapiens
agggtgtatcatgggtattgagaagccccgtagacagtgccatgagtgctgaggagtgataccgatgtcggaggcaggaggaaaaagaagaccctgagaaaggctgaggtacactattagagaacaggaagctagagaacaagaacgctttcttcgagaataaaactgtgcctaacaagcagaggcctcaagaccgaagcgaaggtgcgtgcaaggtagagaagctgattcctgtatctgcccaaaagccaatgg

SEQ ID NO: 581601 - DNA, 912 bp, Homo sapiens
  misc_feature (912)..(912): n is a, c, g, or t
taaacccctttttattaattggaaaattataaaaatatttttaaaccaatttctataaaaaagtcccattttgggggggggttttctaaacccaaggtgtgtgtttgtgtgtgggtgtgttaaaggtaaaatttttgtgtggggggattaaaacaatattgtgtgggaaaattttgtgagccacacatatatgatgatgacgcgtgtaaactctcgcgggaaaacccgcgtgtgggtgtctacacaaaatttttgtgccgccagaaaatatgcccggggaaaagtgtgggtaagagcgagaaacttcaaaattcctctctgagagaggtcttttgtgagaggagggtataaaatataaacacaccgcgcaaaaagtgtgtgtgttatataccgcgccggtgtcttatatattctatatttgtgtgtcttctggggagtgttttctcatatatataacactatatgggggaaccccgcgacgggtgtatatgtgaataatcctctgttgagatggcccgacaatcataaactagcgagtgtatgttgtttttatagagacagtgtgggagacaatatctctaggaggggggaatattatagcagcggcgtggtgatacaatccccgctggtgaaggggggccccaaagtgtgccccctctcctcctattataatgtgggggggggggggatataagggggggacaactaaggggcggtggacgagtctgtggtgaataacaaaaaggggggcgtctcatataaaaacacacactattctcctgcggtggacaacaacaaaaaaaaacacacaactcttctctgcgagagaggcatatataaacaacaatgtgcggggtactcttatctaccccgcatatcttaccaaagagaggcccacttttctgagcgacn

SEQ ID NO: 581602 - DNA, 204 bp, Homo sapiens
ctacacgatgcagcagtccttggatcagtactgaactcagttccatccgtaaaatatgtaaaggtaagtggcagctgctctatttaatgaaagcagtttcaccgtgattttagttagactacaaatttgacttgtgatacattagaacaacaatggaacgtcatttttttttaagagagtaaagatttttaattcgtgtgattg

SEQ ID NO: 581603 - DNA, 233 bp, Homo sapiens
gtgggccatgcccataatcccagcttcttgggaggctgaggcataagaattgcttgaacctgggagatggaggttgcagtgagctgatgatcgcatcactgcactacagcctgggtgatagagcaagactgtctgaaaaaaagaaaaaataaataagagaactgaagtttattcagtaccatgagattggggttggttaggatgggctttaccgaggtgggtcagaacataat

SEQ ID NO: 581604 - DNA, 280 bp, Homo sapiens
gcacgagagcaatctccacgtctctattaacctctctgtcaacccggcacagatcatgctcataaggtaagggttatgtcggagctcctggaatcttaacccgcctgtccacatgtgtttgagaactatgtggcagatagtccggtgtgttgcaagcgcagtcgagttggctttgtcgcaacacaggtgtaccggaagagcatgagacgactggcccctatgctatccacataccggtgatatactgtggtggttttacattcacaggcctgacagtttg

SEQ ID NO: 581605 - DNA, 708 bp, Homo sapiens
  misc_feature (234)..(234): n is a, c, g, or t
ccatttagaatgttttggtattttaaccccctatagctctagtttaaaaaaacaaaatcaaaaaactcgcgtttgttattttttattttttttccataaagttgtaaaacgccaaaaaagtgttttgttacaaaaaaaatcttttaacgcggtattaaaatacccttcatcaagggaatttttgagttccgtgcttcaagagtattgagtctttgaatgttggggtggtctctnggcattcgacaagcaatgcttctctcatagtgtaatagcttggcaaacccacgcggtagattatttcccgaaggtgttcattttgtctcaactgttaaatatcagcacatgatgcgggtgtattgaccttcaattacattgttcagatgaataatataatcaaaatcttttgctatctttgcacagatccatgatagatagcgctattagacacaggtgttcgtagagttgccctttttcagggcaaagaggcgaattgtatgattgttagatggcaatagtcattagaaacatacaaaaatgatgtctttaagtgtagtgttgtggcagttttgtaacatggtccgtccaagtttatgcccgcatcgaatggcagctgaatgtttctacctttgagctctggtctctctcggaattagatgtttagacagaatgagcatctctgatgttttctccataaaaaattattaagtt

SEQ ID NO: 581606 - DNA, 259 bp, Homo sapiens
tgcaatgggacgctgattccgatgacgcccggcgacaacggcgccatcagcaaaaatggctccacctatgccaattattcgattccgctgtcacagtgcaacactgtgaccattccggcgatcacctcttcacgaatctatttgagcgtgggtagcccgatgtatctgcgcagtgccgggaacccggtctatggatacgtcggcccggatatcaataaccctgcagacccaaatatcgacgtgactttcgactttatcg

SEQ ID NO: 581607 - DNA, 322 bp, Homo sapiens
cacgagggccatgatcgaagcgtgtgcgctcaatcccagcggcgcgtgagacggcggacctggggcatatcgaacacgtcgaaataagggctggtgccgggcgcatagtcttcggcgtatttgtagccgccatcgcaccagggattgccataatagccgtaggggccattgttaggcttgcagtcgcgtgcgacctcgcgatcgcgaaccggcttgcgcttgccgtgggcaaatgcgtcgggcggcgtcatggcgaaggcggcaatgccaagcgcggggattgtcagcatcggtttcaaggtcatggggctcggctcctgtc

SEQ ID NO: 581608 - DNA, 119 bp, Homo sapiens
ggctgcatatggtacgatgttgcattcaacttttaataaaccgtctgacagttttccaaagtggttgtaccgttttgctttttgtttttttggggccagggttttgtttattttcttgt

SEQ ID NO: 581609 - DNA, 445 bp, Homo sapiens
ttgagtatggcacgtgttaaataacagctaggtatagatgtagaggagagcttatagccacgggacaccaccatggagggcctggcctttggcggtggacagtctgtggctgggtgggaacgtcaggagtggggcctgcctctttgctgggaatgccgtgcactcccagcccacttgccccatgccagcactcgaggcaggacttcgcaggtgagcagtaacggaaatcagccccgtttattcctcccagcacctgccttatccaactccccacgctgtggctgagtcccagcctgctatggaagcatcactggactcccattgaactctgtgcagattcgctgttcgtagacatggtacctgatggacaccaagctacgtacagcttcaaggccccttctttctttgctaataaaaaataaaaaataaaaacataatacacgtt

SEQ ID NO: 581610 - DNA, 711 bp, Homo sapiens
  misc_feature (263)..(263): n is a, c, g, or t
ttgagtatggcacgtgttaaataacagctaggtatagatgtagaggagagcttatagccacgggacaccaccatggagggcctggcctttggcggtggacagtctgtggctgggtgggaacgtcaggagtggggcctgcctctttgctgggaatgccgtgcactcccagcccacttgccccatgccagcactcgaggcaggtgaggcccagccatgggtataaggtgctcccagggcgggattatgctcaaggaggcaggggntccatgtttctgctcctctcccattactaacgggtgtctgctttaggtttgatctccctcccttctgcccctctcctggtaaagggatgaataatgaaggccttccttgggaagtctgagatggattaccccaaggaggctcgaacatgggaggacatgcgagaactattgtcacatgagttttctttctatcctgtctgcaggacttcgcaggtgagcagtaacggaaatcagccccgtttattcctcccagcacctgccttatccaactccccacgctgtggctgagtcccagcctgctatggaagcatcactggactcccattgaactctgtgcagattcgctgttcgtagacatggtacctgatggacaccaagctacgtacagcttcaaggccccttctttctttgctaataaaaaataaaaaataaaaacataatacacgtt

SEQ ID NO: 581611 - DNA, 765 bp, Homo sapiens
tgcattaccttttaaaagaatgcgatattgataccgatgcttacttttttttttttactactgggttattccttccagaaagtatagcccgcctttctatagcatagttctctttagggtgggaatgattcctataagatttctcattattaaatcatggcttttttcaagatgggaatcaatcttggatttaatctaagctggatattctcattggttagaagaacaacctacatgctagagagagaggaggaaatatacccacgaccacacagccagttagtatccagtgggggcgggacctccagccagggtgtccgtgcctcagggtagttaacatgatatttagaaacggtaaactttttaaaagaaactatttaattaatatattcctattaaaacattttaagggtaaccacattaaacaagggttaattttccccattccaaagtaaatgctaagcatgtttattactgaagcagtactcctggatttagtcatatgacattctgaagttcaattaaacctcatggcgactaaaaggtggtcttcctgggaatacggcggaggatttgagcgatgggaatatagaagtaaagcgcttgctttaagcactgggagccccatcttatagctattagatgtacgaaaagagaattgccccttctaaactaattaagggaagtgttctatccccagcagatttcggaaacggacctttttgattccacttcagacctactaacatctcaagcctaattaaa

SEQ ID NO: 581612 - DNA, 289 bp, Homo sapiens
tcgaatcgacggtttctcagcctgtgcacaagagcaaactccgtctcacacaaaaaagaaatattaatatgagttcgagaccagcctgacaacatggagaaacccattctttggtaaaagtaccaacaattgggccggggatggtggcgcatgcctgtaattccacctatttgggggcttgaggcaggagaatcactttgaaactgtgaggcggagagttgggggtgagccggagagcatgccattggactgtggggctgtgggataagagcgagaaaattcggtctca

SEQ ID NO: 581613 - DNA, 199 bp, Homo sapiens
tagctatggggtttaccatattggccaggatggtctcgatctcctgacctttcgctctgcccgcctcaacgtccctgaatgctgtgattacagatatgaggcaccatgcctggcccttcgcctgactaattttttgtctttccagttgacacggggttgcgccgtgttggcagagtatggtctagatctcctgacctcg

SEQ ID NO: 581614 - DNA, 1286 bp, Homo sapiens
ctactgctgtctctgtctttgtggttgttggcgcgcgcgggttatggtacttcggctgctgtgccgcgaccggtggctgtgtgttgtaactcacccggccggtgggctcggccggctctggtagtgtgtcgtcgtccttttatggtggctgccgccagtgagccccccgcctcctttcttttgttgttggttgcgccccgtgctgctcttctctctcgctggggaggatgtcggtgtcgtctgttttttgttgggcgccccgcgatgggtggcccctcttttttggggtgtttccctcccccgcgtggtgcaccgctcctgtgtttgttgggggttggtgcccccgccccctccttttgtttccctcccccgtgccttgggttggcatcccctgcggggggctgttttgcctcgccgctctccccgtcgtgttgtttgctcaccgttttttgtgctcccgcgggggagtattgttctccgcctccccttgtgtaaataactacgacgcgggcgccgttgtttttggtgggggcgcgcccccccctcttggtggtgggggtgtgtagaggtgtttgcggcgccctcccttctgtggtttcccgaccgacagagttttgtgttctgtacgctcccccgctggggggtcgtttcttttttgttagtacccttcttttccgatcagtgctctctcgtgcgtcgtctgggtgccgctcgttcttgggcgcgtgggtgggggggtggttgtctctttgtggggggggtgtgttgctctttttgggggccgccgccctccccttctttgtgtggtgccctcggtgcgcgcgacgccctgtcttttttggcgtcgggtcgttcgcgctcactcctggctgtatagagttggttgtttgtggtgttgtttctcccgccgccgccgttgttgcccccctcctgggtgatattttgcccccctctcgtcgacaagaaagatgggtttctctccccctctctctctgaatatattttgtttccaccctggcgcccccctttgcgcgcacattttttgtttttttttttttttctttcttgggggccctctctctccgtttcgcccccccttttctctttttataaaaccgccccgttttctctctctcttctgcgattttttttgttgccacacacacatctttttttgtcggtacaattttcctccgcttgtttaccccgcccgattatttttttttcttttttttttttaaagagagagagagagaaaaaaaaaaaaagaggaggagtttccccca

SEQ ID NO: 581615 - DNA, 341 bp, Homo sapiens
  misc_feature (95)..(95): n is a, c, g, or t
agccccggcccttcccccgttttgaaaatgtgtaaccgacagtttgcttgggccacagccttttcaccttggtattgcatgcacgcaatgctaantgccccttttccgttttgggcaccccaagttttccccgacccccgggtcccaggtatgttcccccctccacctgccccactcaccacttttgttagtttcaaacacctccacgcccacttggttttttccctttgcccacaaaagggggggcacaagggacgagtttattttagttgggaggagcagggtaagggtgggggacccaggatttcccctcccttttccaaataaaaattagggtttta

SEQ ID NO: 581616 - DNA, 329 bp, Homo sapiens
taagagcacgaagtttggaaatcccctctcggtaatttcacttcaagatacagctgtatttgtagtagagcatccaaggtttgccaacaaatagtcaggaatcctttgggaagtaccagcctagagctcatgtaaagagtttccgtatcgataagcctcctctcataggccagaatctggactgaatagccggtatctctgatctccacgtggaaggttcctgggttcacacgcaactgtaattccgtcaaataatactgtcagaatcacttctaaaagacattgtcggaactggacacacgcactgagacttcctgagcatagcactt

SEQ ID NO: 581617 - DNA, 326 bp, Homo sapiens
cccttaggtcctaaaatagaaaattgtaaagggtaaatctcagggcttgaaaattgttgaggcaatctctaatgatggcaagatctagctctgttaggacttctaagcagtattctttagtatactctgctataggacagaaccatttgcaaggaaaggatgttaattcgggtctctctctccctcttgcaatatggtgccatttttgatctcagagccatcgtgcctcatttctaacaccttgtcttcaatagtctttttttcttcttctgcttcaggtgcctaaaaattagctctcttatcctctctctctcttctactcttct

SEQ ID NO: 581618 - DNA, 216 bp, Homo sapiens
ggtggacgctcgccctaagaccagggcgcccggctcaccacatcccgccaccgccgaactagaggtctcagccaggacacttagggaagaactcaacctagctcgaatcacagatgacaggatcctgtgtgcaccaagtcctggggactcccacgtgagcaagctcattcaccgactaacgcagcagctcagccagggtagcaggggccagggcaa

SEQ ID NO: 581619 - DNA, 693 bp, Homo sapiens
  misc_feature (46)..(46): n is a, c, g, or t
  misc_feature (66)..(66): n is a, c, g, or t
  misc_feature (125)..(125): n is a, c, g, or t
  misc_feature (137)..(137): n is a, c, g, or t
  misc_feature (153)..(153): n is a, c, g, or t
  misc_feature (164)..(164): n is a, c, g, or t
  misc_feature (175)..(175): n is a, c, g, or t
  misc_feature (183)..(183): n is a, c, g, or t
  misc_feature (189)..(189): n is a, c, g, or t
  misc_feature (193)..(193): n is a, c, g, or t
  misc_feature (205)..(205): n is a, c, g, or t
  misc_feature (211)..(211): n is a, c, g, or t
  misc_feature (238)..(238): n is a, c, g, or t
  misc_feature (294)..(294): n is a, c, g, or t
  misc_feature (322)..(322): n is a, c, g, or t
  misc_feature (390)..(390): n is a, c, g, or t
  misc_feature (401)..(402): n is a, c, g, or t
  misc_feature (430)..(430): n is a, c, g, or t
  misc_feature (432)..(432): n is a, c, g, or t
  misc_feature (444)..(444): n is a, c, g, or t
  misc_feature (572)..(572): n is a, c, g, or t
  misc_feature (646)..(646): n is a, c, g, or t
ccggtgtcccgacggcggctcaagttagagttgctgggttttgctnagattggtgtgggaagagcntgcctgtggggagcggccactccatactgctgaggcctcaggactgctgctcagcttgnccgttacctgangaggcggcggacggcnccctgaccggncaccatgtggnccttctcngaattnccangccgcgctgatnaatttnatcgtctcgctgctgggatttttggcnacagtcacccttatcccggcctttctggggcctacttcattgtctgcgcgcctctntggtcaggaccttaacaaaaccagccgnctagcagtattccagaatcccagggagtgatcagcggtgctgttttccttatcatcttctttttcttnatcctttttcnnttcctgaactgctttgtgtaaggagcantntaaggcattccnccaccatgaatttgtggccctgatatgtgtcctcctttccatctgttgcatgatcttcctgggctttgcggatgatgtactgtaatctgcgctggtctgctatatagctgctgctatcctacagctgncctcactacctctcctcatggtctatttcaccaactttggcaacacgaccattgtggtgcccaagcccttccgnccgatacttggcctgcatctggacttgggaatcctgtactatgtcta

SEQ ID NO: 581620 - DNA, 100 bp, Homo sapiens
tgtacctggagactggttttctcccagttcctggcagcacccaaacatcttgccttcctaattatgtgaattgtgaataaatggccctctagtagctcca

SEQ ID NO: 581621 - DNA, 871 bp, Homo sapiens
ggaactggtattaagcagtaatattgcaggggttataaaattggcttttgaaaattcatggggatttttgtgttctacccctttgtttcctttgcttgcatgcttaggaaaaatcattggctaagtcaatcaagagaacctgagattaaagccaatattttaggtaaaaatgggatccttaatttctggaaaactgagttctttctagcttatacattatgcccagaaggcagtgaagtcttacagaaacggcaaaatcttactaaaggtaacttactgtagaacattccaaatgaacaacaattcattgaagtacatttgaaaatgagggctctcagtaaagtctcttttggctaagaatgggtttggcactatggcatgttaaccgctattccctttggattaatctgtcttacacttttttctgacagatatgggtgacaggataaggcatttacaggaccatgggatatggggagctttttcctccccaaaaggggaaacttgagacctgatgggactgctggaaaagatccctttgctactgacaagtggctgcctgaacttttcagtgtcactgcagtgggtaggtctttatctggcctccttgagctattcaccttccccaacctgccacaggcaatacttttctctctctacttttcctttcctatcttttctgttacacagggcaaccatcttgcccagaaaccacgtgttgaaattcctaagtcagaggttggattaaagatgatggggggtctcatctgagggcaatttaagccttgtcagttgatatgggagttaagcagaatgggtaatgtctacgttcatcatacatatttggtctgggcagaacaaaaaaagataa

SEQ ID NO: 581622 - DNA, 364 bp, Homo sapiens
tagatcgagctcggtacctggattatagtgaggagttagtgggtgcagcgcacagcatggcacatgtatacatatgtaactaacctgcacaatgtgcacatgtaccctaaaacttaaagtataataataataaaaaaaaaaaagaaaaaaaaaaaaaaaaaaacagttccaaacaatttaattgattttttccagggggccagccatcagttggaaaagccaagaattatattggagtttctgatttaaaagtgctcagatgctagggtgtctaaagctttcaggtgaaacacggcttttaacattattcaaacattattcacacgcaaattaggaaaaaaagaaaaaagtttcgtgcccaaga

SEQ ID NO: 581623 - DNA, 845 bp, Homo sapiens
acgcctagctttgaagaaggcaaacatggtcatcaagttctcagacgaaaaagaatgagccctaagtctgagactttactgaagagcaaaaagcagtgagattcggggaagcttttgatattttcgaatgcgggattggaacgtggcaacgcaactagatggttgagagaactgaaggtggcaatgagggccggttgggcctgtatgagctcgcaagaaagagaagaggagtttaatgaaaagtgatagggtgaaattgaataaggaagggactaggagatagatgaactttggctgaatttgtaggctggtgaatgtacccaaggaaaaatggttgaaaatgatactatgcagaagaaatcatgaaatgtcttgcaagctctttgatgatgatgaaagggggaatgatttcgttcaaaaactctgagagatgcgtggcaaggaagttgggtgggaacctgaggtgatgaggagctgtgggtaaatgatgtgatgacgctggatcgaggatggagatggagagggtcagtgatgctatagttcctgcagcagtcaatgatggaagagccacccatcatattaagattccagggtcttcctaagtcgtagcctgcaacagcacttgtgtggactagatttgatggtgcctgaccatggtgtgaaaatctaggctattgatgaccaccgaatttcacaccgtagggacctcccagttatcaatttaaatagtgacctggagcttttataagcgttggaaagtgtcttggatattcacagtcctttgtcaagggacctgggaataccgtagtgtcaaaagcaagaaggcgcagaacggaaagacacga

SEQ ID NO: 581624 - DNA, 748 bp, Homo sapiens
  misc_feature (123)..(123): n is a, c, g, or t
  misc_feature (128)..(128): n is a, c, g, or t
  misc_feature (142)..(142): n is a, c, g, or t
  misc_feature (153)..(153): n is a, c, g, or t
  misc_feature (252)..(252): n is a, c, g, or t
  misc_feature (700)..(700): n is a, c, g, or t
  misc_feature (706)..(706): n is a, c, g, or t
  misc_feature (728)..(728): n is a, c, g, or t
  misc_feature (730)..(730): n is a, c, g, or t
  misc_feature (734)..(734): n is a, c, g, or t
gaccgcccccaggtgtcaggctcaaggtacaggcccagcacgactacagcggccacggacacacgacgagctgcagctcaaggctggtgatgtggtgctggtgatccccttccagaagccctnaagancaggatgaaggctngctcatgggcntgaaggagagcgactggaaccagcacaaggagctggagaagtgccgtggcgtcttccccgagaacttcactgagagggtcccatgacggcggggcccangcagcctccgggcgtgtgaagaacacctcctgcccgaaaaatgtgtggttcttttttttgttgttgttttcgtgttttcatcttttgaagagcaaacgggaagatcaagaggagaccccccaggcagaggggcgttctcccaaagattaggtcgttttccaagagagccgcgtcccggcaagtccggcggaattcaccagtgttcctgaagctgctgtgtcctctagttgagtttctggcgcccctgcctgtgcccgcatgtgtgcctggccgcagggcggggctgggggctgccgagccaccatgcttgcctgaagcttcggccgcgccacccgggcaagggtcctcttttcctggcagctgctgtgggtggggcccagacaccagcctagcctggctctgccccgcagacggtctgtgtgctgtttgaaaataaatcttagtgttncaaacnaaatgaaacaaaaaaaaaatgncnccanctctcaaaaccaaa

SEQ ID NO: 581625 - DNA, 871 bp, Homo sapiens
ttggtcaacctaactgaagacataaattgcgccccgcgctccatgtcataacagttgtggctatctcgcactcaccaagtgcccccgctttttcagacgacccaactgttgttctccacaacacacgccctatggcaattcgagcccgcgccactaaagcatctttttgtttatacgttacgcccccgactcggagacatctccccactacacttatgtcccttcatctacggcgactacgtatcccacgtatatgggggctaacgccctaactcgctacgctttccctccatgagaatctttcctcgtctattggaatagtcgacgcacagtatcttactccgccaccacacacaacactatgtgtcttgaaggacgttatcttcccgcaacaacctatctatttgatccccaggcgaaccgcccgcccttctgtaatctcacgcctctctgcggaggagaagttgcatctacacgggttggatgtccaccgcacacacgctatggtcttaatgctgctcaacataattaaactatgtctcactctctctcctctcacggctacgtccactcactctcacagttttgttcgcccgctccaacgcgtacatcctcgcctccgtcctacacacagtgttctccccacccacccccgacaactgcggtgggactcgcccctcaccccacccccctagttctcacacacacagaacctcccttcttctccccactcggtaccacccccaccgctctttcttttaccttaccgcctcctcacgccgactcaccctctcacgctactcgctcctctctcctccccaccccgcctcctctgtcacgcctcggccttcttctcctctcttgattgata

SEQ ID NO: 581626 - DNA, 171 bp, Homo sapiens
gtaactgtggtgttacgtcaaacacccacaatccccacacaatcatagacacacatgccacacataaagacacttcccacaaaagcagtccctcaacacataaacccacacacctatggaccaaacacctcacctacaaatccctgtaaacatccacagacacattcccac

SEQ ID NO: 581627 - DNA, 197 bp, Homo sapiens
tttgctcgacatctagcaggatccccgttaactacgtacaaccaacgcccagtatcatacaaagcccccgcaccaataggatcctcccgaatcaaccctgcactctgaccaatcaataatttccacacttcaggcccaccctggccagtggtgtcaccctgcatcctctctgacctgaaggtgctgatttatacacg

SEQ ID NO: 581628 - DNA, 467 bp, Homo sapiens
ggaccgcgccaaggcgccaatactgacgttgtaacctggagccggaggacacgcgaggacgccagagccgaaaccggttccagggcactcggccgttctaaggctcgaactcgccacccaagaccacgcagagcttgcgaaaacggggctgagccggcgcggcgcatgcgcgggcggcgtcccgcgcaccacagggtcctgaacacccgcagttcccggggcagggccgcgtccggaagtccgtggaacggatcttccgatccttgttctttgattcgttaccaaccttccacttccgtagacagttcttcccgccttccgccgtctgctaggcgtgtcgccgcaggaggtgcgcgcccgccctgttttgtttccgggggaatctacttctctgaaggacgctcgggacttccgtttgttcccctcagcttctaattggctacttttatgaatatattagggcacga

SEQ ID NO: 581629 - DNA, 511 bp, Homo sapiens
aacgatggtctcagctggccggaaggtggctcatgcctgtaatcccagcactttgggaggccgaggtgggtggatcacctgaggtcgggagttcgagaccagcctgaccaacatggagaaaccccgtctctactaaaaatagaaaaactagcccggcgtggtggcgcgtgtctgtaatcccagttacttgggaggctgaggcaggaggatcacttgaacctgggaggtggaggtcgcagtgtgctaagattgcaccattgcactcaagcctgggcgacaagagcaagactctgtctcaaaaaaaaaaaggtcagccggacacgggggtatgcacctgtcgttccagctacttgggaggctgaggcgcaagaatggttggagtctgcagaagttgcagtgagcggcgctcacgccatggtaccccagccggggcaacagagcaagactccatctcaaaaaaaagaagaggaagagtttaatatttatataatagtatagctgaggaccatcg

SEQ ID NO: 581630 - DNA, 1437 bp, Homo sapiens
gagacacgtgaaatgccccggctgagtccttcagttgtttgggtgaaacgcatacccgacactaaacacacaaacaaaaaaaaaaaaagacttcccgtccgccagtctccaggaaaacgtgaaacccccttcagaattacccgtggcaaacattgtgtaattccccttcgctgttgtcatgtgactggagcggtcatacgcgtcggcacgcacagacacagaccgtggtcctaaaacttctccatattagaaagacacacactggtgtacgcggctcattgactcactggttatccccagcatccccaacgcatgacatgcgccagatcttctccctcaaaccaccatctaagactgcattctggtacaccccaaaacattaaatgggcgacaatgtgcccgtggtaccccacaggagcccttccttacaaacgcatggccctctccttagtcctacctgagccgctgcccatttggttccttggttttgcgcctccccactagcctccacgagacccgcccttccctggcacgctcccccagcactgtgctcgcccccctccatctccgcacctccgacggtccccccccaatcaacccttcacgcctactacataacccgggctcaagggcctgcacggtgctccaaagctccatgccagcacccattttcgagagcgctctcacgtcccgaataccctcgcttacatcgcccccataacacgggcgcgatcgtggcacacagctgtgagtgcctctcaaccaacgtcagtgcttgccactccccaactagtgctcccccctccaaccactcttgtccccacacacgctgcacaccctcgtcacagtctcgatccatctagcctcccttcaccaaccttaacctcttcgctcaacccgacttctacccccctcactcgtctgcacatcatactcccacaccactcgacaaaccatagtctctaccgctacactatcatttcgctgagtacaaactccaactcctccctccttcctcccacacactatcctcacttctaccatcccctcactctctcctatatctcgcctcctcccatctcccccccacccaccatccccccccccccttcctatgtctccctactacaccttccccccgtcctcactccccctctacaactcactccctccctcacctgatccacccatccaccacctacccaacaactccccacccacaacttcctactcccttgacatcctcaccatcaactctcacatcacactaccatctctccacctcatcctcctctctccacagcaaccacaccaaccacccactccccacaaccacacacctccatcccccacctgcacactctccatctacacctcatccccaccctctcctcttcaaccctccactcctataaccaaacacacctactcactcat

SEQ ID NO: 581631 - DNA, 101 bp, Homo sapiens
gaagagaaaaccttgtagagagagtaaaaaatttaccaccatagtaggcctaaaggagccaccaattaagaaggcgttcaagctgaacaccatcactaaaa

SEQ ID NO: 581632 - DNA, 510 bp, Homo sapiens
ggcgccggcgtgtcatccaccttacttcccaatacatgcaggacgggccggcacagcatcctgacaggtagagatgtccagcctcttctggatggcctccggggacgggaaactcaggggggcgggcagtggccatctgtcccttagccaatgaactcatatcttatggctgctcccataactcaccacaaacgggtgggcttaaaataatacacatttaatccattacagttctgggaggccagaagtctggaaatgggatcttatgggggctagaatcagggggccagcggggttgcatacctcctagaagctccaggggagaatctggtgtcccggccttttccagttcctagaggccacctggtatgcgtggggtggcagttccttcttccattttcaaaaccagcagagtaacatcctcagatctctctgactctgacctcggcttcggtggtcaaatccttctccctctcctacagaccctggtggttacaagggaccctgagt

SEQ ID NO: 581633 - DNA, 518 bp, Homo sapiens
aacccttttttattgtcattttttgtggtgcccagggttgtatgatttttgaccaggcccacgctagagcgcaatggtgcaatcttgggtcaccacaacctccacctccggagtgcaagtgattctcctgcctcagcctcttgagtagctgggattgagggcatgggtcactacactcagcttattgcaaatgcttacaagagcaaacttggtgcagcccacaggccagggggggcagcaccctggaaacgactgtgaaagtgaaccccccaaatgtttaccagggttgagtgggggaggcaccgactgttttttacccacatggtgtgaaggtttatggaaggccttccatgtggaaacatgcagcacactcccatatctgctaaaccgttgcattaggcccctttttccactaaagttttccctttcttaacccggcagaggaacatttcgggccatgggaatctgtaaagaactcagttttaatttccaagggcccctgggaggaatatttagag

SEQ ID NO: 581634 - DNA, 184 bp, Homo sapiens
tgaccgagatcgcgccattggacttccagcctgggggacaagagcgaaactctgtctcaaaaaagagaacagaaattttccctacttaggacaagaacagaagacaatttaacgaaaaactaccgggtgtgagtctcaacttctccttgggtggcacttggaatgaatatctggtgcacattcc

SEQ ID NO: 581635 - DNA, 125 bp, Homo sapiens
cacctatcacgttccctagctgaacggaccaggctttgtacttctcgcactcattccctactgctgcacgcgcactgagcagctgactccatgagcgctgctttttgaaacgcctagccactaaa

SEQ ID NO: 581636 - DNA, 758 bp, Homo sapiens
  misc_feature (403)..(403): n is a, c, g, or t
gtgccttccatgtgccaaccccaacagtgagtgagatctggctggcagcctgtgaatgctggagtcctgagaatgatgagtatgatgctgtggccctggagtgctgctggccaatggctgctggagcagtgcccccacctgccctgtggtgttcattgaatgtcttgtgaatgcttggatgttgtgtgttgcaatgacatacactcatgtggcatgcccaactgatcttgtgctgagtgatgtgccctgctggcactactgatgtgacttccctcaatgcttgtgtgattgacttgaatgtgtgtgcagatctgatgtgcatgcatgaatgtgatgatagattgtgagaatgtgctgctggtgaatgcctaataaaccatgggtgtttgaatgaagttgtccnccactccatcactccctgttgtggcctattattggctactactacgttgccttgtgcatgtgatgcaatcgatttgtgtgcatcgctatacctctgatgcactgtggcccatttttggaaaatgtctctgtcttgaatgaacccaaatgaaccctgggcttgtggtttggatgtcctgtgctgtgcttggagtaacctgtgctggtggcttgaatgaacatctgcaaatacactacataggccaatgtgcgctgcaagtgagtgccccaactcctggtatccctgtggtcttgagtgccatcttcctcgaggcaaggccccagaggaggaccaatgagcgttggatgccctgaaa

SEQ ID NO: 581637 - DNA, 874 bp, Homo sapiens
  misc_feature (470)..(470): n is a, c, g, or t
  misc_feature (557)..(557): n is a, c, g, or t
gccagaattatgaaagacaacaatatagataaatgtgaatcataagacgaacagttaacaagtctgatacgaaaatagtaggcccgatccagcctgggcaacatggtgaagaccctgtcgtctacagaagagaataaaaaagagaatgtcacgactgggggcttgcgaccttataggttcccagctattctcaagtgaggcttgaggcaggaggattcattgggaggcccccaaggcaggctagagggctgtgctagtggagccaagtggatgggccaccaattgtggtgacgtcccgagccgggggtgggacgaggagctaagaagccttggagttcactcaacaaaaatacaagaataaatacaagaagacaagaaaacacaatactgtgagcgagcgaggtggcgacagtgactgcacgccagaagaaaaaatagtcttttatgttgtgaataaacagtcgtgctgngtggggagcgggcggggagaggacaccacacagggtttgtagcgttagagagagagccataggaggggtgcacacatacatgtaggngatgttaacggaccgcaggaggagaccaagcgctgtgggtagatagaaaagggataatacgtgagaggagtggaggtgttgatcttccaactacatacagattaaaaagaactagcgcacggagtgagagggatccagcggcgaggagggagttttttcttgaggaatataatcgccataggatatagcgagggtttgaacgagggagagagagcagtaccagaggggagcgtatctatctatacaacatagaggagggagcgtataccaagggggacgaaatcggatcggattacaacatatatatttaaggcacc

SEQ ID NO: 581638 - DNA, 565 bp, Homo sapiens
caatccaatccaagggttcccaaatcgcccgcacatccaaactcctaaacctaaactttgatctaaactgcaattccgtattcgccggaggtttaataaatccgcgcaatcttcgcgggaggaaggaggggaggaagataagaaggagctctaaggccctaaggactatgtaccgcgataaacctactaataaacgtaagtatcctcgctctcaccgtctaacgagtcataagccctctacgccaagccgttagagcgtttaccggaagaaggcctggaaggagtgttagcatctctgttctaccccgactaagacgttacgactccgaaggagtaggtgcgtaacttaacgttttctgtaattgcggaaaactactactactactaaaggtcttccttacttgtagagccggagatatatccgctagaggagtcggtaggtcgccaaactataaacgtaactgtctgcggtataacgatcctatacctcgtcgctactcctatcgccgtagttctatccgaccgacgaagtacgacctttacctttacctctcttaccgtgatt

SEQ ID NO: 581639 - DNA, 425 bp, Homo sapiens
  misc_feature (57)..(57): n is a, c, g, or t
  misc_feature (92)..(92): n is a, c, g, or t
  misc_feature (153)..(153): n is a, c, g, or t
  misc_feature (355)..(355): n is a, c, g, or t
  misc_feature (376)..(376): n is a, c, g, or t
cccggaagggtcacgtggcctcgaagtagccctagactgcgggttgcgcgcaaaggnggagttctgtataaggttatataatagatcacttncaactagaaacccgaaacttgccccgcttgaagcacgcactgaatgtataggaagctccgntctgtatgtttctgggtacgtcccaaattgcgtcgcttactgtaggaagcaagtccttaatctctccccacacctccggctcgaggccctctgtggtctggtgtctgatgcatgtctgtctgtccgtcggtcctgctcctcactccgagtactgtatgtaaacctccgaagtccggagttatacaagtaccccagaatctancaaacaatagcgcactaaaancttactaccttaccttcgacctttcggctgcctcgggggtagcctggtc

SEQ ID NO: 581640 - DNA, 357 bp, Homo sapiens
gagagagagcactagtctcgagtttagggggttcctctttgtagagactggggctatgagtacatgtagacccagcctggtctggaaactcctgggctcacgcaatatctcccacctttgcctcccaaattgctgggggattaaccgcgctgtattcaccatgcccagcctaggatcaggtggagtcaaatcgggtcatcgctgggagacatgggaaaagccagtgttaggcggcatcccatgtgtctgtagcgaacggggtctagtggggttggattggttacgccttggacggactaaaagaaccctctgcaggaacagtcttggacacccagcacaaccggcacgcccggcacc

SEQ ID NO: 581641 - DNA, 174 bp, Homo sapiens
ttggggcgcgtgccagaagtactcgtcgagccaggagatgtcggtggtcgtgacgtccgcggtatcgatggggccagcagggaggcgagggtcatactggtcctagggcaaagagcagttccggagtatacgttagggcgcgcgatacgttaccgcccgttacctcgtgagaat

SEQ ID NO: 581642 - DNA, 399 bp, Homo sapiens
  misc_feature (210)..(210): n is a, c, g, or t
actcgagaatcagggacgtcaattttcagctgagctaaattccaaatccattcttacaagaaaaagtattagtttatatagcacctacttatatataaaatataaattggaaaaatgcttttaaatgggtaactccaagcttttggtttacccagttatgttccaactgcgtgggtaggtgaagcagttttaacaccaacttcttccccncaatttttttttttattttttttacaacttcagagctacagaataacccagaatgaaggggcagctagggccagaatggcacgggtgctatataaaggaggttaaggggtgagaaaagtcaaccgtgaaagtgaggttcccggggtatacatggaccacgggggtaccggaggctcgaattcggaaatc

SEQ ID NO: 581643 - DNA, 386 bp, Homo sapiens
ggtgcaatttcgcctcgtggcagcctcgacctcctggactcaagcaatcctcctgcctcagcctcccaagtagctgtaactacaggtgtgtgccagaccccagctagtgtgtgtgtgtatacaccacacacatatatagtagagacagcatcttgagatgttgctcaggctggtctcaaactcctggcctcaaacagtcctcccaccttggcctcccaaagtgttgggattacaggcatgagcaccgtgcctggccttagcctgtgttttgtgaacaggtgagttccctgtccccagaaggatttcagcagggatagcattcctcacgggactgagtccatgtggtgcaatcagagaaaagagtcactcacagctggagttggtca

SEQ ID NO: 581644 - DNA, 207 bp, Homo sapiens
acagcttatcagacttctctcagaccaaggactatgaagttgatgctctctgaagtctctcaacaaacagattgagacccttcttactcctgaaggctctagaaagaaccagctcgcaaatgctgtgaattgagactcagccacccagagtggagcagtggttactacttggattgaccctaaacaaggatgcactacgtgatgcta

SEQ ID NO: 581645 - DNA, 252 bp, Homo sapiens
acgcattaaggaagatatgtctgcccaataaacaaaacatcagcagaactatcatatactgagcacaaaaatcaggctgataacaaacagcaacatgcaacataaaacaagacacaactataaacggaagacaactcgtgctgagctattaaacaaccagtctaaactatcaagttcttgtgcaacctagcacagacactaagtgcggctatcaagatccaagacccctaccaagggttaagcttgtggctg

SEQ ID NO: 581646 - DNA, 203 bp, Homo sapiens
gccgcccaccacaaaccttgcaccaattcccctctccctacccgggaccggcgagtcttcttggaaattaacaagtgacaagggagggcagtgccttgcaaaaaacaggcgcatagaaaatggcttatttctttgaacagctcttttcgcttaatccatctcttgaaaaataaagtagttttgaaaaggttctgctttaaaaa

SEQ ID NO: 581647 - DNA, 495 bp, Homo sapiens
aatgtaaattgtattacctattagaggttttgtttgtttgtttagtgtcagggtctctctctgttgcccagactggagtgcagtggcgtgaccatggctcactgcagcctccaacttctggggttcttacaagtgatcctccctcttcagcctcctgaatagctaggactataggcactggctttataatttttatttttaaagatgggggtctcggtatgttgcccaggctggtcttgaacacctggcctcctgcaatcctgcctcagcctcccaggtagctgggattctaggcatgagtcatcacacctagctagaaaatttttgagacttgttttacgtccaggtgtggccacttttttttccttttttttttttttgagacacggtcttgctctgtcgccgggctggagtgcagtgagccgagattgtgccactgcacttcaacctaggcgacagagtgagacaccatctcaaaaagaaaaaaaaagaaag

SEQ ID NO: 581648 - DNA, 161 bp, Homo sapiens
ttcaatctctacacgatacacgggaaacttgatgaacagagaccagaaagagtaaaaccttttatgacagtgtggtgcagacatcaatatcaagcacatccttgcccatttacacaacactaccaggttcttgattgagtgaaacacatgacatccatgta

SEQ ID NO: 581649 - DNA, 443 bp, Homo sapiens
cgtagtttctctgaatctatgtaagaatgcaagtcatcatgatggaaatgcgtgtctcggtgtcatctagagtcgaactgtcagattgcacccatgtggtcagctcccagttgaccgcgtcatcgaccagtatcccattatgtgtatctcacagcctttgtagtagtcccacaactacaaaatttaagattgtcaaaaaaaatattgaaatatgaaggcgaatatgttgttccacttttttttccccaccctttttgaactttcctgtttcggttttggaagtttctattgacacatcctcaagctgggggttccttcctcagctgtgtgcagtctaccagtaagcatcaaaagcattcttcatttctctaacagcattttttttttctgagacagagtctcgctctgtttgcccaggctggagtgcagtggcatgatctcag

SEQ ID NO: 581650 - DNA, 171 bp, Homo sapiens
ctaccaaacgtctcttaggacttggtacgttccaaatatacattcacaaatggttcccctttaagcttactgaaccatatacttcatttctgagtaacttagaggacctattacagaacacgctttgtacaatacagcatcactactgagaagggctcgcggactggtcat

SEQ ID NO: 581651 - DNA, 659 bp, Homo sapiens
ccccttggaaaataaacaagtcccccgttctcattaaaagttatcccgtttgtttccctccccaaataggtgtcccaccgggaccaaatgttctcccggggtgggaaaaacccagggttttttgaacggcctttctcaagaagccacctccgtgtattgagtataagtggccatcgttagagttttaaatgaagagtccattccaccaactctgtcttgggcatttgccgaaggcattaccagtttccagggtgcaagtgaagggcctctggtttgctcgaaaagacaaattcatttttcaagagtcactttcttgggtctttggctgtgcccgcccaaataagccggtgtctatgttcgtgttcaagggtttgtacttgcatcgagggagtgatcagaaataattaatggcgggtagtcagagtgacgcgctgactcccctagaggctgggacgtgggtagggatttagcatgctggaaataactggcagtaatcatacgaagacactgtccccagctaccaggtacgccaaacctcggcattttttgtgttattttctgactgctggattctgtagtaaggtgacatagctatgacctgtgttcaatatcatcgctgtggttaccgttgatttggtaaattttggttttggtcctca

SEQ ID NO: 581652 - DNA, 169 bp, Homo sapiens
cagcgacgacagcagcgtgtgcagctcgtcgttgtcctgcacgtcgaagatgctgacgttggcgtagcggccgacgacgcgccacaggctcttccacttgccgtcgcgttgcagctgctgcgccagggccttttcgtcggccttgagcttgtcggcttgagccgccggc

SEQ ID NO: 581653 - DNA, 224 bp, Homo sapiens
  misc_feature (77)..(77): n is a, c, g, or t
gcacagcagtcaggacggcaacagacttgttctcagtgtactcttatctcgtggcactcttgtctgcataatcggcncagtcttgcatgcgtctcgggtccgatactgctccagtgcaggtctggtgtgctgtacttggatggcgtgaacggtggagaagatggtgataccaaactctccctgtgcatctggcagttgggtcttgagcgcgcaaccggactatc

SEQ ID NO: 581654 - DNA, 208 bp, Homo sapiens
tgctggatgtgaatgaagcccgccatcttagtgcctcctgcaaagagagtggaagtgtccgaggactttggcagtgggacaggaaatcacatcctgacaatgcccagagagccagacacatttatggaacagacaatcacatatcggatttggagcgacactgccaactggactggacgcattaatccggtacactggatgccaatat

SEQ ID NO: 581655 - DNA, 113 bp, Homo sapiens
catatgcagcatggaggagggaaaacctctgcctgggttgcgaccactgtctccttttcaactggagttgggctctgaggggtctggaccgtctctttaacaggctctgagct

SEQ ID NO: 581656 - DNA, 492 bp, Homo sapiens
gcagcagatgtcacaacctgaccgggctgcacataggagacagaacaccaggctctatattcatcgcgcggcttggcccatggtggccatggccagcaggcatgggtggcaaacagagcggatacaacggaggtatggcgcatgacgatcccggtcctagtaggtagttatcaacagagagacttcctgctggcttacagccaggcagacatcactgatcccacacacagcaagtgcacttcccagagtgatgcctctgctgtcctacgaccttatggggcgctgcacttgcagtaaatgcgtcaattctgactgaccttgtaggcaacggaggcacgggtcgcagttcattgctgtaagacggcaacgcttgcaaacgtagtctgtatcctacggtccaggcggatggaatcacggcgacgtaaggaaacgtcgccgttattgaaccttacttgccgctgacgctaacgccgtagacggagttcaagccaa

SEQ ID NO: 581657 - DNA, 738 bp, Homo sapiens
ccagcgcgtgggccccccgtctgctccaggccgcgcgtgggcctgagtgcgggctgggtggcgctggcctgcgggccgggcggcgagctggtgggcgcgggcgtggcctggctgcagtccacgggccgggagacgggtgtgcaggtgtacaacagcctcatccgggaggaaggaaccccgtaatcgtggcgcacgccgaagccgtctcctggtatagctgtggaccaagtgtatatgagtcatgcgcaccttggccatgcttgctcgatagtgttagagttggatatcattcgaaggatcctaaccaaggcttatcggatgcagctatagtcatggtggatgggtattacgagatgtagatgattaagaatcatcaaacagagccaatgagatgaagtatttcccgccgcttcccgtcggccagctctttatgaggaagacgttcaaggcaggagcatggcgagccctgtaaggttctcccacaccacggtggtacctgagggtaaccgagaacatattccgtcagagtaatttcttgtcattgaagcgacatcatgtgctcgtagggaaccgcttagtatcgaacggccaaagaggcaatggtcgtacttcgagtctgacagtctaggaggcagaacacagtatggcaacgattggatcggcagtggctcccgtgggtccaagtcgggcagatgccaagcggcacctcctgacaaaggcgtcattgcccagtgactc

SEQ ID NO: 581658 - DNA, 296 bp, Homo sapiens
attggctactgccatctcctcgctttcccatcaatcatccatgtcagcctatggagcaacacaatgatcatcctagcaggacaggctagctgccattcttaggctgggcccggtgtttcacttttgtgattcccagcactcttgggaggccgaggcacgcagagatgacctgacgtcatcgttgctgcctacgttgtacaacatggtgaaaccccatctcgactaaaaatacagaaattagccaggcatggtggcaaacacctgtaatcccggctacttgttcggttgagcggaga

SEQ ID NO: 581659 - DNA, 115 bp, Homo sapiens
ggatttgctggtgcagtacaactaggcttaatagggactcgaattcgagctcgaattcgagggaacattcaccatcattgatcattttctgggccataaaacacacctcaacaaa

SEQ ID NO: 581660 - DNA, 966 bp, Homo sapiens
  misc_feature (966)..(966): n is a, c, g, or t
gtgacgccggtgcagcgtggggggcccgggggccctggtggccctgtggatggggaaccgcggtggcttccgctggaggtttcggactagtggcatccggggccggggtcgcggccgtggacggggccggggccgatggccgcggagctcgcggaggcaaggccgagtaataaggagtggatgcccgtcatcatagttgtggccgcattggtcaacggatcatgaagatcaagtccctggcagcgagatctatctcttctccctgcctattaagtgatatcagacgatcattgatttcttcctggggtgcctctcctcaacggattgagcgttttgaagatatatagccaagtcgcatgaatgcgagacccgtgcccggccagcgcacccagtgttcaaggcattcgttgctatcgtgggacctacaagtggcctcaccggatcaggtcgtgtgagtgttaatgtgctccactggagagtgtgcaccgtcatccgtgtggccatcgatcctgtgccaagctctcacatctggcccccgttatgcgcagaggctactgggggaacaagactcggcaagccccacactgttccttgcaaggtgacatggccgtttgtggctcttgtgctggtacgcctcatccctggacccaggggcactggcatcgtctccgcacctgtgcctaagaagctgctcatgatggctggtaatcgatgactgctacacctcagcccggggcttgcactgccaccctggggcaaccttcgcccaggccacctttgatgccatttctaagaacctacagttaccttgacccccgaactctggaagggagactgtggttcaccaagtctccctatcaggagttcactgaccactcgtctagaaccacaacagagtctccggcaggcggactcaaggttccagtgtggctacacatagggttttatccacagaaagtaagtgan

SEQ ID NO: 581661 - DNA, 515 bp, Homo sapiens
caggatacgtgcaatctggatagggagagcgaaagctagaccgaaatcaaagaaatgaatgttcaaaaagcgaaacttgttaccgaattaacaaacctaataaagatatgtacttctatgcatatacaaaaagtagatttaattctccaaaaagctacagtgatctctgagaagatcgcattagaatcagattatatggcagcatcttcacaactccgtcttcagaagcacattttcattgaattggatgaaaatagacagagattattgcagaaatgcaaggaacttatgaaaagagctaggcaagtatgtaacctgggtgcagagcagactcttcctcaagaataccagacacaagtacccaccattccaaatggacacaactcctcactccccatggttttccaagaccttccaaacacattgaatgaaattgatgctttgttgactgaagaaagatcaaaaaattcccccttcacgggactgaatcctacaattgtacgggaatatgcaaa

SEQ ID NO: 581662 - DNA, 163 bp, Homo sapiens
gctaagtttataagaagggcaagacttgtaggccctaatctatgctgtgctagtgctattgggcaagagctgacacaggccaccgaacaccaggcgctctaaacccaccgcatccacctcctagaatttagtccttcagaagcactcccttgtctgtgcaacg

SEQ ID NO: 581663 - DNA, 236 bp, Homo sapiens
cactattgattggtccacttgggctgttaggagttcagtaataggtgttgtgggattaaacaaggtagtgcttgtagaacccgagcgcttgctaaatagagtgggctggtttaaggcctactatgggtgtaaaatcttttacgtctctctacaaggattgaatcgctagtgtccaaagagctgttcctctttgcgactaaccacgtcaagtatcacaatggcggtttcatagaggt

SEQ ID NO: 581664 - DNA, 162 bp, Homo sapiens
  misc_feature (115)..(115): n is a, c, g, or t
  misc_feature (133)..(133): n is a, c, g, or t
tcaggtatgtgactaactcttctatgcccagagctggaaggcggggtcccctaactccctgggtgcccacctgcccacttcaaccatttgtggccccttcctttccttacatcantttagatgctgttccagnggctccatcgccttctccctgttttctcc

SEQ ID NO: 581665 - DNA, 211 bp, Homo sapiens
gaagacgacagaagggggagtccgccgccaacgcgcaggtgctagcggccccttcgccctgcagcccctttgcttttactccgtccaaagttaacatgtcactgaaaaacgagccacgggtaaatacctctgcactgcagaaaattgctgctgacatgagtaatatcatagaaaatctggacacgcgggaactccactttgagggagagga

SEQ ID NO: 581666 - DNA, 331 bp, Homo sapiens
  misc_feature (33)..(33): n is a, c, g, or t
  misc_feature (38)..(38): n is a, c, g, or t
  misc_feature (46)..(46): n is a, c, g, or t
  misc_feature (60)..(60): n is a, c, g, or t
  misc_feature (64)..(64): n is a, c, g, or t
  misc_feature (101)..(101): n is a, c, g, or t
  misc_feature (103)..(105): n is a, c, g, or t
  misc_feature (109)..(109): n is a, c, g, or t
  misc_feature (112)..(112): n is a, c, g, or t
  misc_feature (116)..(116): n is a, c, g, or t
  misc_feature (231)..(231): n is a, c, g, or t
  misc_feature (234)..(234): n is a, c, g, or t
  misc_feature (238)..(238): n is a, c, g, or t
  misc_feature (280)..(280): n is a, c, g, or t
  misc_feature (296)..(296): n is a, c, g, or t
  misc_feature (301)..(301): n is a, c, g, or t
  misc_feature (321)..(321): n is a, c, g, or t
ctcgtgcgaagcaaattggcaggtaatatttcntaccnaaatttantttttttactttgnttgngaattataatgatatgccccttttctttttaaatcantnnnaaantantganacacagtgaatttgtagagtgggggtatttgacatattttacagggtggagtgtactatatactattacctttgaatgtgtttgcagagctagtgtatgtgtttgctctacaagnatnattngctgttacataacaccccaaattaactcccaaattaaaacanagttgtgctgtcaatncctcnatactgctttaccttttttncctggatatc

SEQ ID NO: 581667 - DNA, 371 bp, Homo sapiens
gcgcatccattaccgtgcgttatcatcttctttctaatgcatacggctttaaacttttactttctacctttttgaatgctatacttttttgtaaaattttaattaggttaatgcattgacattgttcacacattcaaacgatggaaagggtgagtgtggaggtttggttaccccactttttccagccatgctgttgcccttctgcagaggcttctagacattttcagatgaatgagaatcctttcagaaataagtctctgcaaactccagcacacccatagtgctagggtgggtcttagtacaatgtctgcagggtaagcacactgttttgcactccaccacaattcacttccacaatatttcatagcaga

SEQ ID NO: 581668 - DNA, 440 bp, Homo sapiens
  misc_feature (207)..(207): n is a, c, g, or t
  misc_feature (227)..(227): n is a, c, g, or t
  misc_feature (240)..(240): n is a, c, g, or t
  misc_feature (245)..(245): n is a, c, g, or t
  misc_feature (286)..(286): n is a, c, g, or t
  misc_feature (290)..(290): n is a, c, g, or t
  misc_feature (292)..(292): n is a, c, g, or t
  misc_feature (296)..(296): n is a, c, g, or t
  misc_feature (314)..(314): n is a, c, g, or t
  misc_feature (321)..(321): n is a, c, g, or t
  misc_feature (328)..(328): n is a, c, g, or t
  misc_feature (331)..(331): n is a, c, g, or t
  misc_feature (335)..(335): n is a, c, g, or t
  misc_feature (339)..(339): n is a, c, g, or t
  misc_feature (367)..(367): n is a, c, g, or t
aacgtcctggggagccggggcgtatcaaagagccttctctctgggacaaatcaaatggcaggaagggtccatacagaaaagaacgtctctgaggtccttgcgtttttaataaaatggtaagagtctttcgtgtggggcctcccagctgggcaagccttgattggccaggagtccaggtgcccgaggtgtgacctcagcccctcgccntgagcaggggcgctgggcanaagcctaggcccncaganaggcccgtccgccccatcacacgctcatggtcatccctggngagnantggnccgccgcggtcacggtcntgctctngccgccncgnccgncggngcctgccgccagccctccgcccgacccnccgcggggggggagtcgacgcagtcgctaacgctttcgctcgggaacgggtgcaggaaggtgccggcggccgc

SEQ ID NO: 581669 - DNA, 454 bp, Homo sapiens
atcatctacagatccccatcatggcgtcctggagctactatatgtttctgtggcctccttctgtcgtatcttgtatactgttgtataagcaaagatcatatagtctgttacccttcatactgacagtcctttcacttatcttaaaacagctttcacatcttgccttaatctgtgtttacattgtattcatgtttggaaaagtcagcgcttaaattataaaggtagaacaatttcatggttttagtttcattagagaaaactatttggtttattgtctttaaacaacagaagtcacttttatacattggttcttgagattcagttctaatctgctggtgtgaaagtagcacaaattactgatctaatattgaatgctttggatactgacctaaaagtcaggtaagtatcttttccagaacttagttgtcttttattttccttttttacattttta

SEQ ID NO: 581670 - DNA, 506 bp, Homo sapiens
acactgattcctttctatgctcatgatactttcaccaagatagactgggttctgggatataaaacacgcgatatgacctctaaacttaatgaaacgagactggaagtcagtaatagtatccatagggaattctaaaatttggttattgaacaatacacttctaaaaaatctgtggttcagagaagaaatcaaaagggaaggtaaaatgtttcaaaataaataataataatataacagcaaaactggtgggaaatggctaacagtgctcggagtgaaataatacagctttcaatgtgtctattaaaaaaattggggagatggggagttactcctgaagggtatgcagttcctttctggagtgataaaaacattctaagattgattatagtgatgattgcatagctatgagtatattaaaaaactactgaaatgtagactaaatgggtgaattatatgaataatcataattactaattatgtgatttgtgtctcgttaaagctgtcaa

SEQ ID NO: 581671 - DNA, 665 bp, Homo sapiens
  misc_feature (318)..(318): n is a, c, g, or t
agcggggtgttgcagacagagccgcgtcgggtgtgcgccgctgcctgcttgttgcactctggtcttacgtcggtcaaccagcagcaggcaacgatcgaagggtccatgatcgcgagcatccggactcgccgtccatcttcaggagatgatacacgagaaaaataaaatatactctgagggaagattgtacctgccagaatgagcacagagtatttctttaacgaagacgatttgtcaagaactcaatcaaaatatgaacggttaaccaaccgtgtaacgagattgtgaagtgtagctgcacccagcaagagtagtggnaccagcagctgtcttagtagcttgagagcgaaggtactagcatggaaccgtggtgcccgagggcgccgcatccataacaggatgtcctcgctgtcacgtggcagcactaggccatgaatcacatgtccgtactatctcttgtccctaggacatccttgtccaagagatacctgttcaatagacctagttggacgcgtagtctagggaagtttccaagatgcgaagaggttgaactagggcgtctcctgcatgcgtgtgcgcaggaagactgtaccgtgttgacttgagttcatagcctgagtcatgaagtgagtttgactagtggttattgcctgaatgccgatcga

SEQ ID NO: 581672 - DNA, 152 bp, Homo sapiens
tcctatactctccatcagatgacatctaagatctgaattccgcagatatgatgccaggctggcagagaaagatgatacagttttcgccagatagcgggtttctatacattgacctttgttggttataagtatactgatgggagtaagatgcg

SEQ ID NO: 581673 - DNA, 1020 bp, Homo sapiens
  misc_feature (22)..(22): n is a, c, g, or t
  misc_feature (65)..(65): n is a, c, g, or t
  misc_feature (195)..(195): n is a, c, g, or t
  misc_feature (201)..(201): n is a, c, g, or t
  misc_feature (212)..(212): n is a, c, g, or t
  misc_feature (254)..(254): n is a, c, g, or t
  misc_feature (263)..(263): n is a, c, g, or t
  misc_feature (293)..(293): n is a, c, g, or t
  misc_feature (301)..(301): n is a, c, g, or t
  misc_feature (307)..(307): n is a, c, g, or t
  misc_feature (345)..(345): n is a, c, g, or t
  misc_feature (396)..(396): n is a, c, g, or t
  misc_feature (400)..(400): n is a, c, g, or t
  misc_feature (441)..(441): n is a, c, g, or t
  misc_feature (492)..(492): n is a, c, g, or t
  misc_feature (546)..(546): n is a, c, g, or t
  misc_feature (577)..(577): n is a, c, g, or t
  misc_feature (591)..(591): n is a, c, g, or t
  misc_feature (606)..(606): n is a, c, g, or t
  misc_feature (610)..(611): n is a, c, g, or t
  misc_feature (681)..(681): n is a, c, g, or t
  misc_feature (796)..(796): n is a, c, g, or t
  misc_feature (798)..(798): n is a, c, g, or t
  misc_feature (832)..(832): n is a, c, g, or t
  misc_feature (840)..(841): n is a, c, g, or t
  misc_feature (906)..(906): n is a, c, g, or t
  misc_feature (967)..(967): n is a, c, g, or t
ctctcaatactacatcctgctnatctgacggacgcttgtgaccgacatgccgacacacgggagcnatttgcgtcctcacgcctgcccatgtccatcatcatcgtgggcgtggcaacgccgacttcaccgacatgcaggtcctgtacggcgacgacggcgtcctgcgctccccacggggtgagcccgcgctccggnacatcntacagttcgtncccttccgggagctcaagaacgcatcccctgcggcgctggcnaagtgcgtnctggccgaggtcccgaagcaggtggttgantactacanccacanaggcctccccccaagaagcctgggcttccctgccgganatgccagcccaggctgcacaccttgatatatgtggagggcgtaggttgggngcantgaggaatggttccgtacagcctctgtctgcaacatgcttngggtcccttaagctccctccgacctcccagaagcctccagtccccaccagnccccactccctatgtcctcctgggatctctgctggcttgtggcccttctctggngcccccaaggccgaagggtgacaaaatacangcccccatgcctgnccctgcctgagccangtgnnttgatggatgtatatcatgagggacttggagttagctgggtagttcatccacgggatgacctctgccccnatgagattgtgtctgtgtatctgtgggtgtctctgctttgcgtctaactcttttgtgggggagggccagcaaggcagtcccccacgcccgagaaagcctgggggacccagacacntntccccacagtcaaagcctggggacccagacatcntttccccnnagtcagcctcctgtccctgctggtgcccccacacccacctaccctgtgctttttgccgtcgggcntctgcaccgtggttccatgggttctgcgggggtctgcgggggttctgcctggcctgtttgngtttctgccggttggggctctcaggagtaattaaagtgttcaccccttttcct

SEQ ID NO: 581674 - DNA, 692 bp, Homo sapiens
  misc_feature (323)..(323): n is a, c, g, or t
  misc_feature (346)..(346): n is a, c, g, or t
  misc_feature (358)..(359): n is a, c, g, or t
  misc_feature (368)..(368): n is a, c, g, or t
tcttaaaatattccttgattgtgctgtgtcaaagcatcagaatgggacaaagctgattctggagaaaggatgtacttgctgcccttcagagcctgagctccacccatgctggataagtcagaatgctggcactggaagggcccttaatggacagctcgtccaactccctcatcttacagatggagaaactgaggtccggagaaactgaggcccagataggagcaagacttgcatgcctagatccttcttgtgtgcctcttcctactgcaagctgagacccaggtccctggtttggctgtcgtggctgcttgtaaagtgaaggngcttctgtgactgaatgactccnacaaatgtccanntccctaatnctttcctcaccaaagaagatggcccttggggacagcagcacttgctgagcaggagcatgagtcaggtgaccacctcattccagtttgctcaggactcgccctgttttagcactgaaagtctcacagcggctgggcatggtggctcacgcctataatcccagcacttgggaaggccgaggccggtggatcacttgaggtcaggagttcaagaccagcctggccaacatggcaaacctcgtttctactaaaatacaaaaattagctgggcgtattggagatgcctgttatcccagtactcggaggcgagggcagaaaacccttgaa

SEQ ID NO: 581675 - DNA, 129 bp, Homo sapiens
gaagaagacttgatagaagacttgtaaattagtcaaaaaaggcctatcatgaccccatgctgaaactctccatgtaatgacagaacaacgagttgaatcaacattgtttggaacactggtactctctag

SEQ ID NO: 581676 - DNA, 427 bp, Homo sapiens
  misc_feature (20)..(20): n is a, c, g, or t
  misc_feature (74)..(75): n is a, c, g, or t
  misc_feature (77)..(77): n is a, c, g, or t
  misc_feature (267)..(267): n is a, c, g, or t
  misc_feature (279)..(279): n is a, c, g, or t
  misc_feature (286)..(286): n is a, c, g, or t
  misc_feature (381)..(381): n is a, c, g, or t
  misc_feature (386)..(386): n is a, c, g, or t
  misc_feature (416)..(416): n is a, c, g, or t
ccctgctcctggccccttgncggccagggatgtttctggccatgggtcgctcccgccggacagcggcaccgagnncntctctagcccggcagatgaaggcgacggcggcgccgaccttggatgagattcaccgcgagctgcgcctcagggatccgcacgaccccagcccgacccaaacgccgagttcgaccccgacctgccagggggcgacctgcaccgttgtctggcctgcgcgaggtacttcatcgattccaccaacctgaaganccacttccgatncaaagancacaagaaaaggctgaagcagctgagcttcgagccctacagtcaggaagaggcggagagggcagcgggtatgggattctatgtgccccccaggcngcttngcagtgccacgggaagtttccattgaggtnccttgagatgg

SEQ ID NO: 581677 - DNA, 102 bp, Homo sapiens
gcatcatgaactgcctcctcctccctaagctggtccagtgtgtggatgcctttgaagaaaagcgccaacatgtcatgctctgagatcggtaggaggggagtc

SEQ ID NO: 581678 - DNA, 542 bp, Homo sapiens
atgatttatcataactcttgtggctgctccatggagaatatgcaacacagtgagagaaacaaggtcatttcatgactttaatgaagagaaggacatcccagtccatggatgtccacatgatgtatgcagccctgtgatcttggacattcctatcaattacagactgtcattaactataattgtggcactgatgacattgatacccacactgcataggatttggcgcacagaaaagagcgggtgagaaaaggtgttggcctatacccatactcactcccaatggacagcaaatttagctaggtgaccttgatcctggaacattggaatggagcccaatcaacactgtttctaatggaactccatagatctggccaatgcagaatgcctggtttcaggaaatctcgatccaaaggagggaaatggaaaaaagctgaacattggtggaggaggcctaggctacagggagcggcctggccttagctctgagaacatggatcgaggaaataacaatgtaatgagcaaatataaggcctacaagcctt

SEQ ID NO: 581679 - DNA, 179 bp, Homo sapiens
ggtctcaccacatgggtcatggtgggtctcgaactctggaccttgtgatccaccctcctgggcctctcaaagggcggggattacaggtgtgagccatcgtacccggcctcgccttattttatttttcaattttttaagagacaggttctcactatgtggcccagacgggtccaactccg

SEQ ID NO: 581680 - DNA, 445 bp, Homo sapiens
agcggggggaagtctgagtggcgctcgcggcggccgcgccagtcgcgtcccccacccaaccccacccaacggctcgggggcaggagtaagccgcggacgccgactgggccccagggcggtcatctggggccaggggtcccgcagcccagcgtttcccgaccgacacccatcatccgacacagcgacccgcggcaccttattacctccacctggcccaagggatccagtcaggttcggacccagaaaaggacgggcctgtgccggacgcacgggatggggggcaaggcacatacaacgtcctgcatggacggtcatagccgggtcccggcgacggttcacaaaaaaagaccgcccattacgggcataggccaagcagaagcaaacagaggggcagcaggcaacgtgcaaccggcaagggcaagataccaacccaagtgtaccatac

SEQ ID NO: 581681 - DNA, 1272 bp, Homo sapiens
gcctgtacgctgcttcagttgtggcaagatcgtactgacaagcaagtgggaggcttacctggggctggctgcaggtccgagtacaccgagggggagtgcgctggatgccctgggtgcttgaagcgctactgcttggcggcgggcatgcgtgctggcccacgatggaccgtgatcgagaagctgctcaaattatgcgagccccatggcatgaagctgacgccacgcgtggaacctgacgtaccggcgttgtgctgagcactatgggtcccgtgagtcgatgcatggcacccggaagttacacgaggtcgtgatggacatccgggagtcgtgggcgtatatggtcctggactcgcagtagtagtgtgatattcccatagcgctccactctggcatagggaaccatccatggtaaagatggtttctgtcgagcaacccaaaataataataccatagaaagacacaagcatcggtagtgcacctcgtaaatgttatgagtgtggtctggattcccaagaggcgggtaaatttgtagctagttgtgccctcgagttggccccagttggcgtggttgcgcagtagatccctggagctgttttgcatgcgcgatatgcgagaaaggagtggagtatgaatatcttgcgcgcgggaaatgttccaggataatatagagagaacgaccttaggagtactttccagattatgttgaggcataagaaggtctccgaggggttgtataaatgccggtgggtatatttttagcgagagaactttgggggagaaaaaattgttaagagcaaggagcgccaaattcttttttatttccaagagggctacaagagatgttggtttggaaaaagccaaagccgcgccaagaagattccccatggagacagcgcgggaggttaaagttgattcccagatggggagttggaaaaacggttaaagtttaggggggagggtggggagacgcataagacgttgtcaaaaagaaggggggcgaaaaagcggttaactggcgaaaggtgatgagggtgaggacaaaggtggagcgaaaaatgggaaagtgcgattataagaggagaatgcggaagcaacaattttcaagcgtatgggagatgggatgaggggaaggaaggagggcttgggcttgtcattgtgttatagagggaacccccaggatgattgagacgagtgagggggagagtttggccgtttcagttggagcacttgggagattgacgatttggagatcgaagaaggaaagcattaaaa

SEQ ID NO: 581682 - DNA, 307 bp, Homo sapiens
ctaatatgaagcaactacttaaaaaaaaaaaattgggaccaggcacggtggctcatgcctggggggccgaggcaggaggatcacttgagcgcaggagttcgagaccagcctgagcaatataacaagacctcgcctctacagataattaaaaaaaaaaattacctgggcatagtggcacacgcctgtggtctcagttgctcgggagaccgaggtgggaggatcgcttgggtgtggacagtcgaggcttcagtgagccatgatcgtgccactgcactccagcctgggtgacagagcgaggcctcatctc

SEQ ID NO: 581683 - DNA, 228 bp, Homo sapiens
tctggtcttgagccgtcgtatataccacggcttgactgtgcctgcagctctaaaccggaaagagtgatcggcaagatcaagcagttgaccagcggcggatacttccgcgttgatcagatcgccagcttggtaatcgccgtcttcaagaggtaactccatgacagtacgaccagctgcaacgtaagcttaagcgaagtgacctgcttgagcagcagtcacgcgcgaaga

SEQ ID NO: 581684 - DNA, 244 bp, Homo sapiens
gtaacccaggctatcatccatagtagaacctttttgagccctggatacgaaccttacaaaccctgcaacagctatatcaactacatgtatgtaatattctaaatacttagctgtcattttcaaccaatgttcaccagcatcttcatccaagtaaactctaccttaaaaaaaccactatctttgctagtacataagaagcaattatacatccatcaggtttcatccatgaaattataacaattag

SEQ ID NO: 581685 - DNA, 571 bp, Homo sapiens
gaaggagactgcccattagggtccacagtaatgctctttaatgctcgttctgcggaagtttgttttccctagaaatacccacgccatggttgttcctccgtcccgacttgctttcccgtgccccctcaggatgtgccagctcgaccaatcgtcccactacaggaggggtagttcctctggaaaaactcccccatgcggtcaccccctcaagggagaaccacttgactgactttgccctctcggtgggctacgggccacgggaggagccaaaccactaatcagttcactgggttccttgaaacccgcacagtaggccagctgttgactgctctaaggcttacagtgtacaaagtctttagatttctcaaacaggtgggcaatcattattgaatactgttctgtgaaccctgactgctagttctgaggacactggtggctgcgctatgtgtggccatcctccatgtcccattcctgtagcctgctctgcgttagacagacggacagacgatcacgccaagggagtgtcctcacgctgtcgccgcgcgctaacttcgaagatgtgaaactcaga

SEQ ID NO: 581686 - DNA, 537 bp, Homo sapiens
gcggagttggacatcgggcagcactgccaggtggagcattgccggcagcgagattttcttccatttgtgtgtgatgattgttcaggattattttgccttgaccacagaggcagggagtctcatggttgtcctaaggtgactttaatcattgagagactgaggacagatcaccatacatcttacccatgctctctcagagactgtgctgagagagaccttgtggcagttatatgtccttattgtgagaggagtttgcccctgagacaccgtcatcagtaagatcatgagtgtgaaaacttggaaatccaaagcctcgaatggctcccactcagaaacttgttaaagacattattgatcccaagacaggagacacagcaagtaacgatggaaaggtgccaaaaatagtgaacagctgcaaggttgcattatgaaattaagatgcatgctgatggcgatagtcatcccacagacagagagatttactttcaggtttcttccctaagggggcaagagagagcaaccattgttctttgcacc

SEQ ID NO: 581687 - DNA, 144 bp, Homo sapiens
caaggatggtcctcagctgagggtgagaggcaagaccagccgggcaacatggtgaaaccccatctctactaaaaaaaaatcttaaaataacccaggagaggtggcacacatctgtagtcccagctactcaggcaggtaaggtag

SEQ ID NO: 581688 - DNA, 84 bp, Homo sapiens
gagaataatggccggttggcccgggacgagtggaatgattaatgatgttttgcagcagttttctacgtctgaaattttttatgt

SEQ ID NO: 581689 - DNA, 154 bp, Homo sapiens
gactggagacaaactcacagaccgcgacattattgtgttgcagcggggcggtaccggtttcgcgggctccggagtgaagctgcaagcggaaaaatcccggccggtaatgcaggcctgagtgtgtgcgggagaccaaataaaccggtttgggtgg

SEQ ID NO: 581690 - DNA, 360 bp, Homo sapiens
  misc_feature (1)..(1): n is a, c, g, or t
nagaggtcgtatgcacgaggatgattccaggttcgtcgcaggcctccatcaccactttgtcagcagcagaaccggagggaggcggaatgtacggcacaacaatccttttaggtctggctacgttaacctgggaaggggagaaggcatcagagctgatagaaacttcagtcagtttctcaacccattccttcttctctggctcagtgagtaactcagggacttcctcaaacagtgccttccactttatcaaatcttcatcctcgccaatggttccagtcacatattgatcgatggcattggagatttctgctctcttcactcctgttttaaacttcatcgaacctctgggtaccgagctcg

SEQ ID NO: 581691 - DNA, 231 bp, Homo sapiens
gctctagaggatccagtaaagccaatcccccgaccatcgacaccaaaatcagagattgctcaagtcccttatgtaaaatggcatagtatttgcatgtaacctatgcacatcctcatgtatactttaaaccatctctaggttggttataatacctaatacaatttaaatgttaaataaattgttatactgtattttaacattttatttttaattgttgtatttttttattgt

SEQ ID NO: 581692 - DNA, 780 bp, Homo sapiens
tatcatgtctcgttaaatagccccagatatagtctgtgcagtccagtctgccatgcacagaggagaaattacagcacaatcacctgaaagagatgaggactattcatgaatttgtgaacttgtcaaaaggggaacgggaaaaacatctgtctgtagtaacttacactcaatagaacatatagtaactgacagattgacccatatatgaagatttattactctgctagggattatatgaaactaacctggtttatataaaggctttagttctgagaatatatggttggaaatgctgataatttatttgttattaagagctgttgtgacgtggaggaaacgtagttgtgaataaatgtataaaatgtatgcttggattgagtaatcagggacaaaatttatagttcataagtcatgacacagtattcgctcttttctctgaatgtctacatagagattcatcactgcagattacagaaagttcagtgtatactacaaagtctaattaaagataaaactcttttccaaaaaataaaaactgggtctctataaacactgtgtggacgcctcagcagccctaagagttttctacaccattttgtggagggcgtcgacccctcaagattgcagaagcgacagactgcgcgcaaagcacgccgtgtggcacacgttgtggactcacacgaataaaacagcccggggaaccggtgttcgacacatccctagggttccaggcggccgctgggatcgccacgggacgaggagcattgataccgccgtggg

SEQ ID NO: 581693 - DNA, 880 bp, Homo sapiens
  misc_feature (343)..(343): n is a, c, g, or t
ggtgggtgcctgtagtcccagctgcttgggaggctgaggcaggagaatggcgtgaacccaggaggcagagcttgcagtgagctgagatcgcgccactgcactccagcctgggcaacagagcgagactctgtctcaaaaaaaaaaaaacaaaaattagtacctgattgccggggttaggagagacacttgatagtgtattattttaatttcagaaatagttatccggggacctattgtgagcgtttgacgtttgagcccagtcttgaaaagggcatttataaacaattgatattaaagtgatctaagttgttcattagatttacgtgagagttaaaactttaancttcccttttgacatttgacttattgcattaggattattgtttacttattaattcctcctgtgacattaatttggtccttatagtaaagacaggcacaataattgtgaggagaaatattacgcaccttatttaattaggatttggggctcctcagactcttttaacttactttacacttctcttcaaggcagggtaagattcattttcctcgtggggctttcattaattcctttgcctttgtaaagaaggggcgcttggacccaaattggaacatttttaaggaattcttcctttcgtggcttgtgacagaatttctagtgaatttcacatattttactgggtgtcttgtgattaaccagagaatttactagggttgagactcagcgcaagggttttgggaaacaattacggacaaagatttgttctttccacgattttacaaaggttggtggagtagaaggtggtatttgggaaaaaatgaatttgccccggattgtgcctctttaaagcagggaaaactttgggcgattttgacg

SEQ ID NO: 581694 - DNA, 160 bp, Homo sapiens
ttgtcccacacctgctggatgaccagccctaaaggagaagggggagctgttagcgcatgttcagcagcgtggtatcgtaggctcccactttgtctccagtcttgatcagctgcacatcactcaggattacaatggtgcccctaaagattgcttgtcgggg

SEQ ID NO: 581695 - DNA, 227 bp, Homo sapiens
  misc_feature (59)..(59): n is a, c, g, or t
accacccacttccaccccctgtagtgttcccacccttggattggtggcccccaccttgngggaggcctccccatgtgcctgcgccaaaagacagacaaagaaggctgcaggagtcttttgttgttcagcagggggctttgccctccctccttcctttttgcttttaatagccttggtacatggtacacccccccccacctcctgcaattaaacagtagcttcgccca

SEQ ID NO: 581696 - DNA, 799 bp, Homo sapiens
ggcatggctggtgtgtgctcgcctttgcggctgtgtgtgccctgtcgctgcggatgtcggcgccgccatgcagcgccggtggcccggcctgatgacggcggctgtgcctgacatgcgatgccgtgacacagaccccgaggaggagcgcatctgaggctatgcgcctggggtctgtgtggtgctggcttgtgctgctggtgcccctcgcctgcctgccccctgctgctgctctgctgcttgtgaagctgcctgccctgagctgctggtggagatcttctgctgtctgcttgcctgtggcactggacctacccagcttggcccaggtctgcacgaggctgggctgaggtgtgtctgttggccgggcagtggccccccgtgtgatgtcccatgccaatgccctgcccagcccagggcatgatgtgcggccagcaatgggcccagatgggacacctggtgagtgattggtggctgatgcctggtgtgattgcctgtagctgctgtgcctgagcaagcctgcccagtgtgtgtgcatggggcatgcctgttctgtgcttgccctgtgggcgtgagctccaggaatgaggactacccccgaacctgcagtgatgtgtttttatgtgcacaggcctcatcgctgggccacgtgcttcaccagccctgaacgcaaccccggggtcttcatccttcttctgatgaggaccgcttcgggtacgtcttggctggagctgaatccttcagcctgtacaggcgggtcaagccacttccgggacggcagatatgcgtacccaaagcctcgatg

SEQ ID NO: 581697 - DNA, 139 bp, Homo sapiens
ggaacattcatggctgaggaaacaagtgcaaaggtcctgaggtatggctggagcagagtcagcaaaggcaagagtgatagcatgatgaatgcctgcactccagtgcaagggttgtatatgaccagtggtgatggactcg

SEQ ID NO: 581698 - DNA, 308 bp, Homo sapiens
ctatgcaattaatgggccacattatgcccaaagaataagtgctgccctttgtctcaaaagatgagatgactgacctgacttcaataagctttgtatatttgattgtctggtgggacttagagcagtggtcgaagtctttttcaatgtagtgaactcatacacaggttcaaatgaaatgagataatttattccctgtagatgctgctgatatgaggtaatactaactattttaaaaggaactgacatcaagtaatgggaacttagctagtaagagaccattcactcttgacctcataacaatgaatggt

SEQ ID NO: 581699 - DNA, 101 bp, Homo sapiens
tagaggatccccctgctatgcattcttcttaagaccaacacactctccatattacaccccgtattctccatgattaataaatgtctgatggctcactgggt

SEQ ID NO: 581700 - DNA, 742 bp, Homo sapiens
gggcctgtaaaaactatgatggtgacgtgcagtcggactctgtggcccaagggtatggttctctcggcatgatgaccagtgtgctggtttgtccagatggtaagtacagtgaggaagcagaggctgcccagcgggtactgtaatcccgtcactaccgcatgtaccaggaacggacaggaggacgtccaccaatcccatggcttccatttgtgcctggagcatagggtgaagcccacagtagcagatagcttgtataacaatgaatagagcttgccttcgtttgcaacatgctttggacggatacgtctctattgagacgagtgaggcgtggcttcatgaccaagtgacttggcatgcttgctttaaaggtttacccaatgtgcaacgttcatgagctgacttgaagtacattcgaggttcatggatcaacttggagaaaaccttgaagatcaaagctagctcaggccaaactttaagttcatacctgagctaagaaggataattgtcttattggtaactaggtctacaggttgtacattctgttctgtgttgacactcaaggtagtaaagggctcacaatcagatctgtgctcaattggttgtagaacgccagagtgtatctttctctatgaagttctacagccgtttggtcttatatatacagttatggccgaccttcgctgaacattggcaaggcgactttgttacaatttcctatttgatttctagtaccaggcctagg

SEQ ID NO: 581701 - DNA, 214 bp, Homo sapiens
ctttccagcaccatccatgttaaggggcagtgagagcacccacattgtttatgcccgtgggagatgggcagggtaggctccacccatgcatccatcccataccaagggtggtttgacatcctcaaaagcatccgccagggcgtatggaacacagtgagcaaatttttcagttagttttttgaatcaccaggaaaaggagcagaaaaaaaaaaaa

SEQ ID NO: 581702 - DNA, 162 bp, Homo sapiens
acatcttacagcggaccccaggtaccgatccgtggggccccttgctctggactccagtatctgtcgtcgcaggtcgctccctatgtgcctatgtcccttgctcggggccatggagacactgcgtgccagtacggtggcgcctcttgtctgaagagagggggt

SEQ ID NO: 581703 - DNA, 406 bp, Homo sapiens
ctagaggatccacccgcatctggggcttggttgaaggagctgattaacagcgagcacgccattgtaccatttcatccagaagctgccctctgagcttcaaggcagcttactgagcgacaaggccaacaagaggctggcctatttgacttaccaggatatccgtgctgtttgcgactttaaggagcagaccgtgattgccgtccaggcccctccgtcggacgaggactgtaagtgcccgacagggatctggggcctacctgtcgatatatctcaggatctcccgatggcccatctaagtctacctctgcccagagcaggtgccggagccggtacgtccttccgaggagcctctcccctctaccttcatcctctgcccgcgccctgtctctgacatgctcagctgcgg

SEQ ID NO: 581704 - DNA, 1648 bp, Homo sapiens
taaccataaaaggggcctattttttttacaacccaaacggcccccctttgtccaatggggggcaaaaaatacccatggtggtccaacactctcagctttggcttgggttttaaaatactgggggaaaataacccaacaaaaaaagtggtgttatttttctctctctattgtggtttctctctttcttctctctactttacgcggggagtgtgagatcccccgagggcccttctcgagaattcacttcgtggggagacacaactctgtggactattattcgcgtgtgtgagagcgccaacgacacacaacgccctgtgggagagagctttacacctcagcaaaataagagggcatgtgataacagacactcctccagcggtataattctccgcgagagagacaaacgcgccccagagagtccactcttctctgtctctatataaatctctctctctctctattctccccaccacacctcgcgcgcgttatatttctgtgtctgtgtagagagagacccatatatatatatagaggggggcgcccctttctctgtcgagaaaggagcgcgcgccggcgctcctctatcttctttctcgctgtgtgtagtgtctgtagtgtgagtatcatcgtgctataatatatcatatgtgtgggcgccaaacaaacgctctttctctcccacaaagatataaaaaaagagctgtgtggggccgcccccccacgcggggggggggggcctcccccttctctcgtagagacataataaaggggcgcagtcctcacactatatattcactctccaaacccaccacacaagagcaaaacagtagtatatcactgcttctctactatgtgtggagaaaaaaatctcttctgctgcgggagagagagagagagagagagacgcgttgggcggggggaggagagcgacacctcctactccaaaagaaaaccatgtggtggggtgtctctcttacccccacacgagttgggttgtgtggcgggagcgtgagagagggagggaggggcaatcctctctgaagaaacaactgggtgcgagacacggcggcggcgctcaaaataaacaaaagagggtggccccccatcaccaaaactcacgccccgatagacatcccctaagaaagaagccgactataagttatagtcggcagacaacaactaacattacgagcaaacaaacggaggggaggggaggcaccacactataacgaggcggcacgacaccgagagaccgcgccccctcccatatttagttggtcgtgcgggcggacaactaactatatgatggtgccgaaaggaaacaggagcggagagcgacgccataacattcatcgagtggtgcgaagtaaaaacaaaccgctgtgtttgtacgcaaggacaactacactcgcttgtggacaaaaacaaaccccctttcgtggttgaactagcaggaaaactactatgagatgtagattaagcactacacacggacggaaaactatgaagtaacgacccccgcccgccgcacgaacgaaacaccagcagcgatacccgaagaggaggtacaccctactagagagagtgggctgctccgccgcacacatctagttggggggatgggctcctcctatactaaatcccccct

SEQ ID NO: 581705 - DNA, 347 bp, Homo sapiens
  misc_feature (23)..(23): n is a, c, g, or t
  misc_feature (100)..(100): n is a, c, g, or t
  misc_feature (117)..(117): n is a, c, g, or t
  misc_feature (131)..(131): n is a, c, g, or t
  misc_feature (136)..(136): n is a, c, g, or t
  misc_feature (337)..(337): n is a, c, g, or t
catcccttggaggaccatgcctncaaccatggggggcatatcctaacatggtgccaggatccagaaaccagggaggggagcccacttggaggatgctcgncgtcttctcctccactntgggtcatacaganagganggagactaagaggaagcttctattctcacttctatcctgcctcagcctccagagtagctgggactaaaggcgcccaccaccatgcctggctaatttttgtatttttggtagagacggggtttcaccatgttggccaggatggtctcgacctcctgacctcgtggatccgcccgccttcagccttcccaaagtgctgggatnacaggtgtga

SEQ ID NO: 581706 - DNA, 270 bp, Homo sapiens
gggaggaaacccccccccagggaaccctttaaacccctttcccccccaaccccggtggttttgttttaaaataaaaatggggaaaaggttgggtttttttagccccgaatttttttgtttgtttttttgccatttcccccccctcttggcccaagcttctcttttagtagttttttttgggaaattgtccccccccccttaaaacccgggggggggggattttttaattttccccccaaaaatttaattaaaaaacctaatttggtttta

SEQ ID NO: 581707 - DNA, 1872 bp, Homo sapiens
  misc_feature (462)..(462): n is a, c, g, or t
  misc_feature (505)..(505): n is a, c, g, or t
cctgggacccgaaacccagacctctcccctacccgaacaccggccccggactccaccgcaggacccgggatccggcccagtcccgatctcgaccagaccgaccatggtcgtaccctatcaattacgccgacctgttcctgcggcagttgccgagcgaatggaggccagaaatgttctatgaaaactagccgaccatatccatgaggtatgaaatctcatgacgcgtatgattcagatgccgcgaggtatgctgacatagctctcgatgtcgtgaatcacgaatccattttgtcctagagtcgctcaaatgtcttgccttaatgcaccgaacgattccacacggaagctgatgtactatgctcgcgggaaccaacacggggaccttcgtagtttgttcctccatgatttcgctcatttttggatacacataatccagaagtaagaggagcacagagtataatngaaccttcttgcgaagcatataatagaccgcatttgcttttgnagacagatgagcgtctgtgagtgcaagttagtaacagagaacgaaccatccctctctaagaacaataatataagtttatccctaagtctggcactaagctttggcaagtatgagtgcgtactctaaggaactcttgagaacaacaacatagtacacgcttttgagagagaacaaattctaacatgacgatacgataaggtagacatgagaatgttccactgcgcctcaccaaaggaaagaggaacgaaaagccttagacccctcccgttgggttggtgtagctttgcgagcattagaataccaaatgctttcaaggccgaaggcccccgctttgtcaaaggcctagggcaaaggcttttgtgattttgggcattttcgctccaacttctttgggagtaaagtaataaaaggacctttgggcttttgcttgccaccccccattatgatttggtccttaggcctataattttccaaaagttcttgttgtaaaccccggacacaccctctgagaattggaggtctgtccgcccttggggagacgttagaggagacacagaccccttgtaaacttaaccttgggtcaaaggctttaggtgaaattgtgggataaccaaaaggagcgaacacaccagagcccaaaaagagggcggggaactccacgtgggggcggaagaaaacaacaccccatccttgggtgttagctccgcaccccccaatttagtttttgcccacgtccccttggtttaaccactttacgtggacactcataaccattattcctccagagcgcgcttttatacccaaggcatcaacacgggtttcactccctcctcacaggacataggggccaaaaagctccttcgtctccacaaaccctttggaaaacaacagcgggccctggatcaaagaaagtcctgtttaagacccaccgccttgttacccgcctttggttggaatacccaccaggcagagtgctgctagcaaaaaatccccccccgattctattgtcacgcggcgctcatcacacggggagaaaccccctggcttccagcttgttgagaaaccgatggagtgacgaacagttgtgtgatctcaccccgaacgagtgtagaggtgaccccctgataaaaccactgacaacaggaactggtcgaaccaacatagacaaggcgcccgcggcaccaccaaaagtaagtctctggtcatcacgggtaatcacgataaaccaggcgccataatacgacaccttgctgaaagacagaagctcagcaacacaagcagcgcgccacacctatgaacatattaactacggcatcacacagcagctaccactcaccacacacccagcgacgacagatccaccgtac

SEQ ID NO: 581708 - DNA, 126 bp, Homo sapiens
aactattctccgcgttttcttttcttagagtttcactttcctggtcaagcttacggatggttctgaaactcttagtgatgttctttttgaggaacaccacttccaagattctgcgggactgccctt

SEQ ID NO: 581709 - DNA, 342 bp, Homo sapiens
  misc_feature (128)..(128): n is a, c, g, or t
  misc_feature (239)..(239): n is a, c, g, or t
  misc_feature (282)..(282): n is a, c, g, or t
agggggagatcatgggactagaggattaactggacgttgcagcttcaccttacacctggagactcctaagccctccatctccagcagcgaacttaaatcccgagggagaccatggacggctgtgagcnttaactctgtgaccctagagactccagaacgcaaggctacctagtggtggcatgacatggtcacgagcctcccgtatgaactcacaggcttgagagctgtccgagaaccanacagtgaaccctctttctacttggagtgtacacaaagtatacngtgcgaggaccctatgaactgtgaacatagcggaaccccagtgacgtgcccagccgcagt

SEQ ID NO: 581710 - DNA, 932 bp, Homo sapiens
  misc_feature (1)..(1): n is a, c, g, or t
  misc_feature (103)..(103): n is a, c, g, or t
  misc_feature (519)..(519): n is a, c, g, or t
ncgacgccgcgagagggtgtctctgctgtgtggttcgagtgggcatagtgtgtagttgttgctggctgtggccgtgttcctccggatgtgcggctggggcatnttcgtccgtcgggaccgttccgctcgggttagcccgcccgggtttttaacaccccttggcgtcttttccctccactgccgtcccccgtttttggcgggaccccccacatctctgttgccaacctttacgaggtttcctgtccggctccgggcaattcccggttttccctttttgccctgcggggcagaccacgcccacctgttgttgaaccgcggtcccttccgcccccgtgcccgcccgggagtctcccggatctttacgccgcacacccctcccccagtttgttcactcctgagggccgctccccaagccccgcgtctttgcggagccaacagtttcatcagccgccctgtggggacaccctcgccctccctggggaccctctcctcttccaggcgggttgcgccgcggccccncttaactgcgaagagtcccttaacggttggcgtgggatttcacggcgtctcttcattccgcacctgaggggatcacctctctcgttccccctggtcgtgtaacgccaccactccctggcgcaccgccctttcacttgtctcataaacctgcgtctggcgtaggtcctaaaacaaggaccaatctctagcgacgacggggggccccagggttttctatgaagccgcgtccctcgtgagaacgcccacgctcgccctttgttctaccctctattgggtgtgaccgggcgcgctccgcggcgtccccctcggctgggcttggcacagaacagttcttccggcgcttaatttgggaacctttaaggggggaaaaccaacaaaaaaaaggtttccttttgaacccccgaacaaaaaca

SEQ ID NO: 581711 - DNA, 221 bp, Homo sapiens
tgtatgaccatcatagagtgccctttctcgctgagggatatcatcctctttgagaactaccctcccccttccctacaccccagaggcatacacatcccagatcaacaggacaggtaatgatcagcgctgcccatgtcccagaactcagtttgatgcccgcaaaatgcatgataccgaggctgggagcggtggctcacacctgtattcccagcactttggga

SEQ ID NO: 581712 - DNA, 190 bp, Homo sapiens
tatgcttgggtcactaaaattagaatagtgctgtttctgagatgtatccaaactggatgggcatatttgtttggcaatgtacaaaggactgtgggcctcgagagagcacagggcctcctccagggagcagctcttagcctttaggccacgacaggggctgttcatgtgacatgccccacaaggcgacatg

SEQ ID NO: 581713 - DNA, 481 bp, Homo sapiens
aattccattcctagcgtacaaggaagatccaaatggtcacaagcacatgaaaagatacttaacattattggtcattagggaaatgcaaagcaaaaccataatgaaataccacttcacacccaccaagaaatcgaaaccctcatacattactggtggtagtgtaaagtggtgtaactgcttgggaaaacagtcgggcagttcctcaaaaggttaaacatagaattagcgtatgacccagcgatttcactcctaggtaaatacccaagagaaatgaaaatatatgtccactcaaaaactggcattcaagtgttcatagcagcattatttatactagccagcagtggaaacgatccaaatgtctatcaagtgtggaacagataagcgaagtgtggtgtatttatataatataacatgcttgggcaataaaaagtcgtgaagtactgagatatgctacgctggaatggaatgggggtaccgagct

SEQ ID NO: 581714 - DNA, 274 bp, Homo sapiens
  misc_feature (68)..(68): n is a, c, g, or t
ggtgaataatagctcttcaaggcttgcaataaaaaatgggcttccacaaaactacattgcaaaaaatntggagaaaaaacacggatgtggaagaggtataaaaaagtgtgaagagggcacgagccctctaaagagattttgttcgtgtgagaaaagtaactcagagtctgacgctgttagtgtaattgggaaagtgtggagttatattctctaagtgggagggggatttacagatactctcactactctggggacctctaggagaatatagagt

SEQ ID NO: 581715 - DNA, 372 bp, Homo sapiens
ttttttttgaagggacagggtctcgctgtgttgccagagttggtcttgaacttcctgggctcaactgatcctcctgcctcagccttccaaaatgctggtattacaggtgtgtggcactgcacctggccagctttattttaaggcactaataataaagggtatgaaaaaagctaggaataagtcagatctttccagaaataaaagacaattttaaaaaacatcagttaacctgtctggcctatttcaacatctaaagaggatagagaatgtaaaagttttcatgcctacctgattcagctcttttccattctcccaaacacttatttccatgtctcagatttacatttcctcaaaaggcagtagagatttgga

SEQ ID NO: 581716 - DNA, 140 bp, Homo sapiens
gccatcatacatacatccttatgcatatcttctccagacagtgaacaacaggcagtcgggggaggcatctggacaccacacacatcatcagtctgattctccttcttctgtggttaacaaacagctcggatccatgtcac

SEQ ID NO: 581717 - DNA, 177 bp, Homo sapiens
ccggagtacgggggaactgtgtcagatcaaaactgaagggtcagcctgatggtactgctatggaatttttaaataagggagggttgtccagctttgatcctttgtaagattttgtgactgtcacctgagaagaggggagtttctgcttcttccctgcctctgcctggccccgctaaa

SEQ ID NO: 581718 - DNA, 257 bp, Homo sapiens
tgtctgcggtcgactctggcaggatcccctccctgtccagcctggtcctgccctccatatcaaaagacgactggccagagagaaaagcttgggaatggctttgaggtacacgatcaaagacgtctgcagaaatgggaaacgcaaagggttgaagagagggatggatgctattgatcgacatctcagaagatcctctgactgccttatggagaatggactggaaggttctagaacagaacagggaagctggtgaggga

SEQ ID NO: 581719 - DNA, 108 bp, Homo sapiens
agcccctgtgtaagaaacatgctcattctgtgaattttttgaaagtcagcagttcaggagaagagaaggaattttaagagaaaaaggaaatttaaaattactaattac

SEQ ID NO: 581720 - DNA, 124 bp, Homo sapiens
gcttttcattaacgaacgaggcagttcattaacccagcatggttagatctaatgcttattgctggcagcgtccacctgtccggagattctgttcagatctttttgtcccttctgtcgtcttctc

SEQ ID NO: 581721 - DNA, 197 bp, Homo sapiens
cttgactgacggggctggtgcagtggaaagggctctcagtccctctgtggggggggtggggctgcctcccgaggggctcaggagttcgagaccagcctggccaatatggtgaacccccgtctctactaaaaatacaaaattagcggggagtggtttggcacacctgtaatccgggtgcttgtgggaggccagggcag

SEQ ID NO: 581722 - DNA, 266 bp, Homo sapiens
gtctcggaatgcatcatccaggttctgcagagcaagcatcccggggactttggtgcttgatgcccaggggccattgaacaaggccctggagctgttccggaggacataggcctccaactacaaggagctgggcttccagggctaggccctaccgctccaacccctaccatctgggcccgggtcaagagagacggggtctgatctcgtgtagccatatagagtttgctcttagtgtctctttgtcagtagagtcggcaggaggatct

SEQ ID NO: 581723 - DNA, 381 bp, Homo sapiens
atctatacttctccggtatttccattggccatggcaccatggatccctcttccaacatatccttaacaccactcattaaaacattatcttccaggcagatttggggtcccaccacgtgggctgctccactggccattttaaaagcaaaaggcttctcagggcaagctttggagatcccacacttatatcggggaggcttggtagaacgtgcagctgtgtccaaggctgatctggcaaatagatttcctaaactggcatccatttttatttcaaatactggagaaataacataaaaggtcagtaaaaccatggccacagttaccaccaacttggcagcaccggttaccctcaggttggactaaaggtgctgaagggtaccga

SEQ ID NO: 581724 - DNA, 343 bp, Homo sapiens
taagcttgatctatcacgacacatacaaacgaaaacaagggataaaaaaggatattccatatcaatagaaaccaaaaaaagaatagctatacttatatcagatgaaataaatttcaaacaaaaactatacaaagagacaaagaagtcactacataatgatatgtatgtgctgatatccaattcagcaagaggatataaccattttcaatatatatgcactcaatactgaagcactcagatatataaagcaaatattaatagagctaaagagagagagaccccaaaacaataacagctatagacttcaacaccctacttttagcattagacaatcttacagacc

SEQ ID NO: 581725 - DNA, 343 bp, Homo sapiens
gaggattccgtgcgggggtggtgactcacgcctgtaatcccagtacttgggaggccaaggcaggcatatcaacttgaggccaggagttaaagagcagcctggctaacatggtgaaaccccatctctactaaaaatacaaaaaattagccgagcacggtggtgcatgcctgtaatcccagctacttgggaggctgaggcacgagattccttgaacccaagaggttgaggctatgttgagctgagatcacaccactgtactccagcctggatgacagagtggagactctgtttcaaaaaaacagaaaagaaaatatagtttgattcttcatttttttaaatttgc

SEQ ID NO: 581726 - DNA, 840 bp, Homo sapiens
tacagtgttcaggtattatttgaatggaaagacacccaaaaaaaaaaatgtgctccgactagggggaaaacagtagttccgattttttcccattattttcatttaattttctggttgccctagcttccccccctattttggtgtcttttattaactagtgcatggtcttattaaatcttcacctggtatttaatggcacggcactgtcgtgctctcacgttggactctggtgtactctccgatactttctaacttctcgaggtttcggttggctttttggacactagttgtaagttacttggttatagatggtatcctttaccccttcttaatattttacagcagtacgtatctttcggtaacgtgagactgcagagttggtattcctatatgtgaaggattacaacctcaaaaagttatcctgccattcgagtgctcagaactgaatgtttctgcagatcttgtggcattggtctctagtgtgatcatatcaaaggtgtcaattaagacagagttctgttaatctaatcaagtttgctcgtaagttgtgcattacgcagtataaaaaggctaatatatacctatatggtcttgccaacagttttaaagcctctgcatacatggatactacaatatgcttgacattctaggtcttaatagacttttaacatcataattgagagtttaacacggtagaatccttgggtacaggtggactatttgaaattagcagggcccaaaatataattttctgaatattttctactggtgtataagtgtgaacagggcattttcaccattttagtgggaataccaatatttcaaaaaaaattcatcatg

SEQ ID NO: 581727 - DNA, 404 bp, Homo sapiens
gagtgctctcattgctctcactggttttaaggaggtgcctggttcattctcctcacaggatagcaatgtcagcactgatgtggttatccccattttacagatgaggtcattgaggtgcagacattaattacttgcctcagggttactcagggacaggaggagccaagagtcaagcccagggctttctgtccttccacttgattcaaagccttatggtggtgtctcaggagattttaaggaacttttgccctaactgttaaaaaattctgttcaggccaggcatggtggctcatgtctgtaatcccagcactttgggaggcctaggcgggaggatcagttgagtccaggagtttgagaccagcatggtcaacatatcgagaccctgtttctctcttaaaaaaaaa

SEQ ID NO: 581728 - DNA, 890 bp, Homo sapiens
gaaagagaaacaggtagttgtaaccttctttgtagaatataggctagtatactacttatataactaacactgtcctagcctatgatctgtcaggtgcaaggtactctggtgagtctatgcacttcaggaactcaatctccgtgagacacgcatattctgtgtagggtcaactcagcaatctgagagcgatggagctgcttattatatagaagaataggtctacaacctactaataatgcctcaagttccatagcaggtagtggcagaaattacagtgctgtggtttcatgtcaagtgaaccgttaaatagatataactcgcggtaagtaagtcgcgcagctttaaattgtcattcgtatgagccatacatgtgacaccataatgagtgcttagccgccctaggaacgttagagtgttgaggttgactcttctttgtgatatcaactttcggaaattttgccttgagatcagcttgttccacttcccttgagaaaagaatagctaggtatatcgcgattattctctaaggaaaagagcataaagctgtgaattccgagcagagataacatgtgctaggaatgagcatagaatctccaatgtgtgtctaaaaacctatcccggtctttctgtacagcgtagtgtctcctggataatagataggatgcgtacactaattcacccggtgtcttgcggtcacccactggtatttccttcactttaaggccccatgggtaatcctaggggtctgaccgtacccactaatggcaattgggtatatcgagagcccttgatgccaatggaggtacagcttgtgggaggattggcagtgaacctggtactcatctgggaccttgaggcgtccgggttctcacttcgccagctgccccttt

SEQ ID NO: 581729 - DNA, 344 bp, Homo sapiens
cgtcagtagccatgaaccacacacagtgacgcctctagaacacgtggttagtgcaactgaggcaaggaatttttaatcttatgtgattttaatggggcttaacttaacccagcgcgcatgtggttacggtagtgggctagcacagccctagagcctgaagaaagcaaaccaaagaacaccagctgggtcccaaacagaaggcagaaagggtagaaccatccagctcaactatgccagccccatcagaaggcaccaggcacagggcacgagaaaaaggcaaaaacccacccagccacatgcaacttcactcactcaaccagccagcaacatcaaacgggaaacac

SEQ ID NO: 581730 - DNA, 760 bp, Homo sapiens
  misc_feature (721)..(721): n is a, c, g, or t
atgatttggcgtgtttgctgcccggggtctctgtttttcgccatcgggtgcctatcccgcttgtgtttgccgctccgtcctccgtgctgtgttggtcacagccggcggtgggccttctggtggcgcgcgttgccgggttgtccaaccattggggccgttttgccccacacccaggggggtccactcccccgatgccgccccgatttcccgggactcccctgtgcctcccgtcgcttctgcccgcagactcccttgcactattgcgttttctttcccgcggcttgactagctcagtttttttccccaaaccccctgttcgggcctatcccgcgattcccccacgccttatttcgggatatccctccgtggtcattcacccccactgtgaaacatctcctcctactcatccctcgtagggccaccaccactttgctctcacaccccgcccgaacatttgaataatctttcgcacacagttgtcaggaccccacttccgctctcgaacacgcctcaaatcgcctcacatagagtaagaaaaacccccctcctcataagccacgcggaggcgccgaatctggaggtgaacccccccacgcactactcccacccctcttcgtggtgaaccgccggaatcaagtaataatgctcttcgccaataagaggtgagaggtgatccggccccccgcgccgagctcggtgtgtctagagcccgcacccgccngtgcgccgctcctagacatctgtttcacaatagactgac

SEQ ID NO: 581731 - DNA, 385 bp, Homo sapiens
tgggaagttggacccagagtgaaatgactggtcaaaggtcacatgacagaggttcccaaactttcttggttcatggcaaacacagggcaaaagaaatactcaagaatttcttttaaattttttttcttttttttttggagacggggtttggttcttgtggcccaggggggggggcgggggcccgattttggttaattgcaacctcggcctccggggttcaggggtttttcttacttaagcttccggcttaagcttccaaggtggcggggtttacaggcatgccccccaacgctgggttaatttggtttttgaggtagagccggggtttaacggggttagccaggttggccctgaactcttgacctaagatgacccgcccacctgg

SEQ ID NO: 581732 - DNA, 248 bp, Homo sapiens
tgtaaggtactctcgaggattctcagactagtcaaagatactaaataatacaggtactccatgagtataaaaacacatgaacctggcaggtgcagtggtccccctgtaatcccagcactttgggaggacgcaggaggatctcctgaggccaggtgttcaagatcaacctgggcaacatagtgagcaccctgttcctactagaaaattcaaaacttagctggaaatggtcgcacatgcacctgtgtcta

SEQ ID NO: 581733 - DNA, 514 bp, Homo sapiens
  misc_feature (103)..(103): n is a, c, g, or t
gggacttgattggtggtctagaatggtacatgttgtttattgtcactagtttgccaggaaggacatgtgattccacgagttggaggcatggatgctctgggcnccgggccgcaccctgtgacttggggcaagtgtgcttcatgggaaggcgtgtgagtaagggtgctctctcgttggaagcatccttgtctcatccctaatcctgccatctaggctgataagaagttaatgccaggaaaagaaaatgtgtgtctttcgccaactccgtctgctgggtggagctcccatctgtaatccagccccaggccagatggcttccctcaccgctgtataacagaagcacacaatgtatacacaatgtatacacaatgtataatctgcataaaaaccatgcatcttcccggagcaccgatcttactccatgacaactcacggaagcattgttttctatattaaaatgaataagtatgttatacatagtgaaatattggcattaaaaaagagttaataaaaa

SEQ ID NO: 581734 - DNA, 2054 bp, Homo sapiens
gctacttctctcttggcatcaaatatgtctttaactgtacatctcagatggctggcaggccatgccatttatacagccatggtggtcacacaatttgttcacaagcacagatgaacaatcaccaccatcagctatcattattacagctcaattcatttcccttgaaacagcaaacaaccgaacattccctgcctcatcaaagctcgttggcatccttgtaccaatgcaaacgtctctcacacaattcacatggcccatgccagcccttggcacacacaaccacagacacgtttattccccgaaggcatttggctccaattctcacccgttcagcccacagaccggctggacaaataggttcatcaaggcggcaattcaaccctttggcaaccctagaacctttaaaggtaacttcattcaactttccttcccagccccaccttagcaccacagttgtatccattagatgtcgtaagttgtgtgagggcccggaggcgcttcctataccacctaccttaacaacgttaacttcataagggcaacacgttaactttaacttttgtaacagcccccggagcactagttaaacggaggccccaatttcatggaacaatggcccccaagagtcactttggcgcaggcaaacatgggggaggctggtaccacaacgttgacccgacactttgaattatcattgtgaccatagacccgggcacttatttgaccccttccagccaggaaactgcaacggcacaaccagataagcatcccccacaaagttcttatagccgccccagtaattctcgcccaacgcgcttctcccgcattcgcggctcacacggtggaacataccaacaggggcttacaccgcggcttacactttcctacagttaaaggatgtcacctacttaaccgggcaacacaaacactcacctcaggcgcccgttacaaacgcacatgccattcgcgacgggcaccttctcggctagtgccacccagatacatgacgccgtttagtcgtacaccggtttccgaaacaccaaaaaatggggggcacaacattggaggacggcccacataaatacatggactatacgaccattgggggggacatgggacacagttctcacaggggcattatgttatggggatataaacacagggcgcaccgattagtacacaattaatacggcaccttcttgatacgcaagcaaaagtgccatctaccagcgcatttacaacaagatttctccaccagccacaacggggcccgaaaccacaccggagcagaggaacaccatgagggcaaccagcaactaaccaggcagggccaatcaccacagctggagacacaccgaacccacaaagcgagatgcggacaccacaggaggcaccccaccaggcctcagagagaacaccccccaacctggcaccataaccacccagatcagacacgctcaccaactcacacggccacaccagacacacgtgagggcatccagaggcaccactcaacaccacaacgagtacgacaacacggagacacactagagcatacggcccccaccgcccaccacacagccgccccaccaccaacacagacgaaaccacagcgctaaccacacctcacgacgacaaacaagccagccgagacaaacgacctaccccgatcactccacacaggacagctagcatcaacgacagtcagacacccatgacgccacgcaacgattcagacaccaatgggagcacccatgacgcacgacaccgtccaacacagccaatctagacgagagaggcagataaacgcggcacaacagcaaaaaaccctcatgccgcagccacgaaactctcgcaccgcaaacacaaaccacccaaacacgatgacacaccgaccacacacacgcgaaaaaaacagaggaccaccaacagcacgcacaacccaaaggaccacgactacacaagctcatgacgaacaaacaagtgacacaacacatcacaaggccaccacactgcgccgagcacacacccactgtacacagggagataagcag

SEQ ID NO: 581735 - DNA, 135 bp, Homo sapiens
tttaacttaataatataccttatttaatctaataattctggtcccttatctgaaatgcttgggtcagaagtgtttttggatgttggattttttcagactttggaatatttgcatatatttaatatctttgggatc

SEQ ID NO: 581736 - DNA, 811 bp, Homo sapiens
gaagcctttagctaaatgtgtacacttgaaggtctcagattttgccctcaagtgtgccttgtttctccttgtctcttagcgacatatgcagctgctgttattagttccgaatgtctgaggacaagccacaagattacaagaaacggctttcagattgagctgacctagctctctcttcagaacagagccaatggcttggaatgaggtagggaaatgtgagctagttatttatctggtagtctccatagaagcaggtatggcagcttgtgcgttatcctcgtcaaaacacttagtacacattcattggcattgatgtttccctggcttgagtagttgcttcttatatgcgtgtctaggcaagctgcatctgaggaagaactagtcatacaagactttacaagagtcgtgtccaggaatcatgacagagataagttgtgttatttgaaagagttatatgttgcatcgagggaagaaagagtgaaaacatggttagccagtatttacaaggaaaagatgttaacataaacgggattgttagggaacagaaggacagaggataaaaagccgggttaacgaagaacgagaaattcaggtagtatgaacacacaaacacgcttgtcacttaaagacagaatatcgctacagtgagaatatacacaggcaatggaaattatgtaccttcacgaccatatggctacatacacgagacacaggggtgggatacacgtgagaaaaagttgtgtgcctaacaaaaacaagatagaaccaatgccctggaatatataaattccaacagataatagcgagaacc

SEQ ID NO: 581737 - DNA, 1055 bp, Homo sapiens
ggctgaagggatcatggtgcagtacgagactgtgtggccgcgctgcctgtgcgcctccgtgggtctgccctgtgcctgctgcttctgtggctggtgtgctgtgtgcctgcgctgtgtcctggtgctgcctggactggctgctggtgtgctgctggtggtcctggtgcgctgacacgaggcatgcgagctggtgcctggagaacattggacatgtggcggctgcagcgcttcgcggatccagcaacccagcaccttggactcagcaggcgctgcatagcccgtgccccgtgcactcagctgtgtgcagcaagttacacagtcagagagctaggcccctgcaggcccgtgctctatcacctcatgtgtggcacaggcctgggcaagtgacacaaagggaccaactgtagtgacctccgtatctaggctgactgtgagactcaggatgtctcagtgccccaacggcagggacatgctactatggcgtacccatgtgagcctcaaggagtgcttcacctacaagggccaggactccacgctgggcttgagcctgaattgacggggtgccggcggagttgcgacagaagtaatggtgcatgtgctgaagctgcagggtgccgatgccctaacgtgcaacaccaatgtaccacagtccatgttcagctatgacttgcagtaaccacctcttttggccagaccgtgaacccatgggacagtcgtccaaaagcccaggggaatcctcagggggtgacaggggcctcatcgggtctaggagctccaccatgggcataagagcacctgatatcgagcagggcagcatccggatacacctcatacatatctagaggacatctgagagccctacagacccgcagtgaaacgcgcgaccacaagagtgggcctacagggcacgggcacagagcaacgcaaggacacagagcacacggagggacccaagacccgagaggacagaccagaccggcgccggcaccacgcgagcacggaagacaccagtgacccgagaggacccggacccaccaaaagaggcacgcaagaca

SEQ ID NO: 581738 - DNA, 629 bp, Homo sapiens
gtgcccttccatacaaatgtcaagatggaggagtcagtcattcaggaaccacaaccctatatgtagtcaagtctaatatgagatgtattaactaagtatttctttactagccatgttcaagagtgtatatgtgatgaaagaatacaagagagttgggtaggatatagcatgctatgagtgataactatgctatggagcctggtgccaacttgtatccccagttcagttgaatttacaaggacctacaagatggtcatgtttgtcttggaatgtgctgaccccaattttagtgtttctttctttattctcaaatcagtaattattcagttgattgtttatactatataatgaagtacaaaaacattttggtcccgtatgtttaagtaacagtctgtgccaacttcctcttggtcgtaaggtgctccctttgaatatctggtgaactgtgtcagagcggagagcggggtggtggctaaggaacgagggtcagaaagaagctagagggaggtcacggacgaagggtaacagggagcgatgcaagccagcaatctaccctggtcccccaggatcaggatatctgtcctgttgcctttgcgctccccactggtttcccttagccttcacggtgc

SEQ ID NO: 581739 - DNA, 206 bp, Homo sapiens
  misc_feature (29)..(29): n is a, c, g, or t
  misc_feature (140)..(140): n is a, c, g, or t
  misc_feature (152)..(152): n is a, c, g, or t
ctcgtggtccgcccatcttggcctccggnagtgctgggatttacaggcatgacccaccgcgcctggcctggaaaacttaacacaatgtaaatgctatataaatagttgtgatactgtattgttttgtattacatattttnggggtattttgnctctgccagtagttggatctatgggagatggacctgtagatacagagggccact

SEQ ID NO: 581740 - DNA, 741 bp, Homo sapiens
gtatgggtttcctggaactttgggggatcattataaaaatactagggtaaaaaagcaaccttagtaatcccagcaatttgggaggccgaggcgggtggatcatgaggtcaggaatttgagaccagcctgaccaacatggtgaaaccctgtctctactaaaaatacaaaaaagtagccgggcgcggtggcgggcgcctgtagtcccagctactcgggaggctgaggcaggagaatggcgtgaacccgggaagcggagcttgcaatgaaccgagattgcgccactgcagtccgcagtccggcctgggcgacagagcgagactccgtctcaaaaaaaaaaaaaaaaaacaaacaaaaaagcaaaacaacaaagagggggtgcgggggggaggggagaagaggcaaaggaggggggcacaaatgcccacaagagggtgcaccccgacatatagaggggaacgagatacgaacagcgtgttatatacaggcgctaataacaaaagggtctcacaggagcatcacaacaaacacggtggaaaacaagccgcgtcaagagatgaaccccactgataataaagagataattatattgtgttaaagaaaaggcctcttattagtgcggggagacaaccaagtaggtggtgtatatacaacaagacagcaaaagaaacaaaagaaaaggcatttccgcccgttatactaacacaaaccgggtgatgagcagaacactcatatatataaccc

SEQ ID NO: 581741 - DNA, 273 bp, Homo sapiens
atctagacgtaacacaggcaaatggcacagatgcttctgtttgttagcctcccagagctcatctttattatcctttatgactaatctttgatctttaatattatactttcagtgagttctgtgcattgttctagcaaattattgaacatgccgggaactattgctatatctgtatttttagcttgtctgactaactactatcactggatggttcgcatcaaaattcgtattatcagtatccttcattattggtgttacaccaattgaatggtg

SEQ ID NO: 581742 - DNA, 235 bp, Homo sapiens
attcgagctcgccaccctgtcttcgtacgttcaatcaaaccagtttgttctagttcaacaagcacctttattaaatctctgaatgagtcggcactatttaaacctaacgcatcttgaaaatctgatactgacatgggttcgtagtcaggttgtttaatcatttcttcgatggattgttttaaattcattatgcccctcctttctaattatcttgtttatttttattctgaccaat

SEQ ID NO: 581743 - DNA, 463 bp, Homo sapiens
cttcggctctaccttacctctcggctctaccttgaatcacgcgcactcaccgtatgtgtctcgagctctaccttgactctcggcactacctagtctctcggctctacctatgtctctcgagatctaccttgtctctctctcaacaaggcaaatctgagacttattggactcaaagagcgaagctgcagagagacaacaaggtagaaagtttattcaacgtgctcataacagcagatattcaagataacacagagccggccttcagcattctatcagatcaatttaacaaagacgttcacattgcttaacacctcaagcagaaattctaaagttgaaaaatggaattgacaaacttgaagaatgtgtcacgtgtttcactagcagaatcaatcaagcagaagaaggcattagtgagcttgaagactggatctttagaaatgcagtcagaccaggtagagccgag

SEQ ID NO: 581744 - DNA, 161 bp, Homo sapiens
tcaggcgctgttggggaatttcacacaaacgtcaactgctggatagatttgctggaattccctcacgttcatttcccaacaagagcagagatttctcaggaaagtcactactgggttaggtctacactatatggcagtttgttccactccaaatgatggta

SEQ ID NO: 581745 - DNA, 355 bp, Homo sapiens
aagcttacgagattagcacgtacagggtggtatggccgtaaactattttggatacccattatcttgaggtattctcagtgaacccttcaaaacaggtctcacaagcctcatcttgcaccatgacgagactgaggccttgtataggctaaaattgacccaagtcacccggctgacagatggcaggcctacggttctgattcagtccattgcattccgggggcctgtgcttgttccacccggccacactgcctgtcatcactacacatgtctttcttgcaggctggtctattgcattaccgtcccgccatctgtcaaaaatgggcctggaacggagaggcctctgcctattctgccc

SEQ ID NO: 581746 - DNA, 873 bp, Homo sapiens
  misc_feature (28)..(28): n is a, c, g, or t
  misc_feature (92)..(93): n is a, c, g, or t
  misc_feature (101)..(102): n is a, c, g, or t
  misc_feature (134)..(136): n is a, c, g, or t
  misc_feature (139)..(140): n is a, c, g, or t
  misc_feature (193)..(193): n is a, c, g, or t
  misc_feature (213)..(213): n is a, c, g, or t
  misc_feature (216)..(216): n is a, c, g, or t
  misc_feature (222)..(222): n is a, c, g, or t
  misc_feature (256)..(256): n is a, c, g, or t
  misc_feature (263)..(263): n is a, c, g, or t
  misc_feature (296)..(296): n is a, c, g, or t
  misc_feature (308)..(308): n is a, c, g, or t
  misc_feature (311)..(311): n is a, c, g, or t
  misc_feature (313)..(314): n is a, c, g, or t
  misc_feature (317)..(318): n is a, c, g, or t
  misc_feature (320)..(320): n is a, c, g, or t
  misc_feature (323)..(323): n is a, c, g, or t
  misc_feature (325)..(325): n is a, c, g, or t
  misc_feature (347)..(347): n is a, c, g, or t
  misc_feature (349)..(349): n is a, c, g, or t
  misc_feature (372)..(372): n is a, c, g, or t
  misc_feature (376)..(376): n is a, c, g, or t
  misc_feature (381)..(381): n is a, c, g, or t
  misc_feature (430)..(430): n is a, c, g, or t
  misc_feature (432)..(432): n is a, c, g, or t
  misc_feature (442)..(442): n is a, c, g, or t
  misc_feature (453)..(453): n is a, c, g, or t
  misc_feature (468)..(468): n is a, c, g, or t
  misc_feature (507)..(507): n is a, c, g, or t
  misc_feature (511)..(511): n is a, c, g, or t
  misc_feature (523)..(523): n is a, c, g, or t
  misc_feature (544)..(544): n is a, c, g, or t
  misc_feature (603)..(603): n is a, c, g, or t
  misc_feature (630)..(630): n is a, c, g, or t
  misc_feature (871)..(871): n is a, c, g, or t
cccactccccaccccacctaccttttanccgctcctgactcaacgagagtttcagcagctaccaatctaagctaacccactctaattaggtnntcccctgnnctcccccctccctgctctagcagttgccatgnnnggnncccaccagggggccgcggctggggccagccctccgctgacctctctccatttntcccagggcctcccgctgcnggnctggtntccctccaacccacttcccacaagtttccagggnatgttanttcctccaccctggttttttttttccagcatcntttgttcctccnttntnntgnngnttntncactttcctccctaaaggttcntntagctccctggcccctttttttntgcncacanctcccacccctgctggggccccaggtcagcgcgcggccgcgcgcgcgtngnttcccgctgngtggcggatgnaggtcggagctcttnggagaaggccttttccgcagtcaaccgcacttgtaaggncgcncgccactgtggnaccggtgatgctgcagaagcntggaggagcggcagaagcccttgccgcacacggcgcacctgtagggccgctcgcccgtntgggagcgctggtgctggatgagagtngaggagcgattgaaggtcttgccgcagtcggggcagctgtaggtgcggcctggcaggtgggtgcgggcgtggatggccagcaccgagctctggccaaagcgcttgccgcactcagggcacttgaagggcttctcccgggcgtggctgcgggcatgggggataagggccgaccgctgggagaagctcttgccgcagatgccacagctgaagggcctctgaccggtgtgcaccctctgatggntg

SEQ ID NO: 581747 - DNA, 170 bp, Homo sapiens
gtgttatgtgctaggtacagcgtctgagctgcatgttgcgtgttgatgcttgtccgttttgatcgtggtgatttagagggtgaactcactggaacggggatgcttgattgttgtaatcttactaagagctaatagaaaggccaggaccaaacctataccacgacacagtg

SEQ ID NO: 581748 - DNA, 303 bp, Homo sapiens
  misc_feature (3)..(3): n is a, c, g, or t
  misc_feature (190)..(190): n is a, c, g, or t
  misc_feature (202)..(202): n is a, c, g, or t
tcnccacccccagttttccctgaaaaagataaaacctcctggattcaaccaggcagttttgtcagcaggggcccgggcccccaggcaggggtggggtttttttaaaggaggggcccaaagccctttgggggggaccctcccttgagcctgtttaaggggccagcccttagggatttaaggttaaggcccntgggaagggaanccccccctgttcctttggaggaggggccctcccccctcattgggccatggggttgaaattcaccccgtttgcccagtaaaagcctttttgcagcgggtgga

SEQ ID NO: 581749 - DNA, 671 bp, Homo sapiens
catggttccttctgtggcaggacagaacaacaaagcgctataatactaaggtcacgagaagtgtcagcctcaactgatatttattagtaataaggacttgcctcaactccctctttctggagtgaagcatccgaaggaatagttgaagtacccctgggcttctcttaacatttaagcaagctgtttttatagcagctcttaataataaagcccaaatctcaagcggtgcttgaaggggagggaaagggggaaagcgggcaaccacttttccctagcttatccagaagcctgttaaaagcaaggtctccccacaagcaacttctctgccacatcgccagcccgtgccttttgatctagcacagacccttcaaccctacacctcgatgcagccagtagcttggatccttgtggtcatgatccataatcggtttcaaggtaacgatggactagaggtacttggagggttgaaatatattagaaaaggccataaatttgcctgcaaattgttaactgaagggtattaaaaccacagctaatagctctattataatacttatcagtgactaaaaccaattaaccagtagtggagaataactgtcaaaactgtatgtgggttgaaatgtattgtgatggagaaatggattagtgatagaagtttggtgaatgcaatc

SEQ ID NO: 581750 - DNA, 170 bp, Homo sapiens
gagctgccccccagtagaccttgtgaaaacgcgccaggtcgtcacgggtgccaagtttcacttcgacgccaaatttggcagcttttttgatattgcgtcgccacagctgattcatgcccttgaggagctcatcctcggatttctgagtgccgtcttcgtggcgcaacgaa

SEQ ID NO: 581751 - DNA, 242 bp, Homo sapiens
gcttaggctagcaacttgcctgaagtgccttgagtcagtcacttcacttctctgggcttccgtttaaccgtggggtacagctggaggttgaattttcacgggcacattcccacatccgtgattggcacacctctggggcatcgacctgaggacgggcacaaggaaaagcacaatgaatatcctgggcaagcatatagatgacggaccaggcacagacgcggcagctctcgtcacgctgacag

SEQ ID NO: 581752 - DNA, 554 bp, Homo sapiens
  misc_feature (193)..(193): n is a, c, g, or t
  misc_feature (293)..(294): n is a, c, g, or t
  misc_feature (334)..(334): n is a, c, g, or t
agcagcttactccagagatcaagtccaaggccatggctatctcaagcactggttaccagagacagttgaagctacaaacactatgatggctcctacagcacctttggggaagccgagtatggcgaaggaacgccagggcataacaacccttgggcgtcacagagccccttggtggtttccttggacaagaccnttctgtggcgcccaaaaggccgtccgaatagcccttaacctatgtccgtgttcagaagtcggaaatgtgagaagaaggcccgaagccaagccacaggttnngtaaacaccccgccgaaaaaaggcccccgccccctttccnaaaattttaacatggggggcccatattcccgtttccgcccgcccaaaaggccaaagggcgtccccaaggggccaacaaaagagggggggaaaaacccacaaataaaccttttgggggggccccatttggggaattattgttccaacaggccggggcaaaagggggccccctttttccccctttgtgggcgggaggatccaccctgtccacttccaaagca

SEQ ID NO: 581753 - DNA, 224 bp, Homo sapiens
tcggcgtatgatggctggcggagcatggctcacatcttgtaatccccactttgagaggcagaggtgggaggatcacaaggtcaggagttcaagaccagcctgtgcaacatggtgaaaccctgtctctactaaaaatgcaaaattagtcaggcattgtgggttgtgcctgtaatcccagctacttgggaggctgtggcaggagaatcgctagaacctgtggggct

SEQ ID NO: 581754 - DNA, 327 bp, Homo sapiens
cacaaacaattacattgaacattgaagtttggaactacttcttcgacatatcagcaaacacactgtaaactctaacgacccacagatcacagtgaacagtttgaaacaaggctgtaccatggcagtcatgcaaagcatgggacagatagaaatacacggcagtgcaactgtgaggataactttccattttttccctcggagagcaacagtttacggggcagaggtgatatgttctgccttttgaagattactggcacacgttcagctttttcacctctctaatcgactggaagcagccagccgatcactagtcctccatccccctcg

SEQ ID NO: 581755 - DNA, 868 bp, Homo sapiens
  misc_feature (868)..(868): n is a, c, g, or t
tcgaactcgtgaatgacacgtctgtatgattggaaggtcaaatgtcctcaaagttgaccaggacagcgcttgagcacaaactgcatctccaggatacctcaaagagaaagaaggagctccgagcttgcatttctacttaagcttttccttcttgaagataacttgtccctttgacccaccatttgtcagggttgtgtcttccaagtccttctcctggagggtatgttctggcggcggaggggccatctcgcatggtaacttctctgccgaaaatcgagggcctggatggcgagctgcctactccatagagtcagctgatcatgctacgacttcaggtgccacactggtgaaggggaaagcacgagctgcagtttggagccaacaaatctcaatacagtctgacaagagcacagcagtcctacaagtccttggtgcaggatccacgaagaaaaacggttggtacaccgacccccaaaatgaagacggctaagcccgtggagtatcatccttcctgccctccccaggcaccactggaccaattacctttgaatgctgtatttggatctcacgctgcctctgtggttccctccctcatttttcctggacgtgatagctctgcctatgcaggacaatgatggctagttctaaacgctaaggacatagaaatgggcaaaacacagaactgtttcagtactcaagactgagcttacagaacaacaaacagctggtggaaccttgctagcaggcattcttataaagagaaaactttcgagcctccttatattgctggaaaactcagtgggcccagatagaggctccttaccttatgcatgggttttacttaatttttctattatggtccctggtn

SEQ ID NO: 581756 - DNA, 401 bp, Homo sapiens
  misc_feature (58)..(58): n is a, c, g, or t
cggctaccatttaggttggacgagctggaactgtggctgaaatctgcttagtaccagngtaggcttggacgctcaatccataggtaccatcctggagtctggggctacgggggcctgccttgcactgagtttcactgaggtgggcctggtgttgggttctgaggcaaaatcttttgcttactgccctcttcctcccctaagcaaagggtatctttctccacgtgctgcctgaggttgcaggctgggggcagtaatataggtcatgtaaaactgttctttctactctcttcaatgtgttttttctgatttctctgctacatccaggggcggtcatctctcacctggtttccttagcttttattaaagtatttttgtgcaagaatagttgttcaatttatgtt

SEQ ID NO: 581757 - DNA, 368 bp, Homo sapiens
  misc_feature (90)..(90): n is a, c, g, or t
  misc_feature (97)..(97): n is a, c, g, or t
  misc_feature (109)..(109): n is a, c, g, or t
  misc_feature (111)..(111): n is a, c, g, or t
  misc_feature (116)..(116): n is a, c, g, or t
  misc_feature (138)..(138): n is a, c, g, or t
ccgtgtgcgtcttctggctgatgtgcatgtgtcggctgaaccccgggatctacccgcagcaagtgtgacgccccgaagttcaggcaaccntcgcctntgggaccccgcntngcctntgagacaccccccaaccccgcntttgagatgcccgccccgcctccgagaccccgcctccacctccgagacccctttctccgagaccccgccccccgcctccgagaccccgcctcacctctgagaccccgcccccgccagcagctcagcccctcctgtctcttgcccctggttttgtgggtctgccctgagctgtgcctgtgtgctccagcctcttcctatgtgtgtaacttcaataaaaccaagcaaagcca

SEQ ID NO: 581758 - DNA, 305 bp, Homo sapiens
cgcctccgtggcgccgcctccacctccgagacgccgcctccacctccgagacccctttctctgagacccctgcctctgaagccccgccccccgcctccgagaccccgcctccacctccgagacccctttctccgagaccccgccccccgcctccgagaccccgcctcacctctgagaccccgcccccgccagcagctcagcccctcctgtctcttgcccctggttttgtgggtctgccctgagctgtgcctgtgtgctccagcctcttcctatgtgtgtaacttcaataaaaccaagcaaagcca

SEQ ID NO: 581759 - DNA, 124 bp, Homo sapiens
catactttcttactcatttcttttctctgcagttgtttgatgacagtaagacgtttagtaaagtcacaggcattgtgaattatgacaaattttatttgtctgcccaagatggtaaacactctta

SEQ ID NO: 581760 - DNA, 252 bp, Homo sapiens
tagcctcaacttccaaagtgctaggattacaggtttgagtcaccacacccagcctataacgtatgtataaagacaaagcacaacattaaaaaaaaaaaaaaaaaggggtgggaccctggacaacataccaaattcctgtctcaccaacaacaccaaaaatgttaaatcagctgggtgtggtggcaaaatcctgtagctctagctatccgagaggctgaggactacggatgtgtgccccaaaagtggataatt

SEQ ID NO: 581761 - DNA, 513 bp, Homo sapiens
gacgtatagaagttctgtggttagaaatagttatggtgccctacatttccggagtatctggtttactcctctcatgtttaatcagctttatgggggtaatgctacttctcaccctcctctgtgtcatatttccataagggccttgttgtgaggattaaataatataacagatataaaactttagtccccatgtaactggtatctggtcagaattccaggtggctcaatttgatagtggatttgtgacacaggcactaagcttggtagagaacttctgcaaggcagggaatcctaatccagaaagtatttagcttaaagaaaatagaaactaccgttatctctataactattcttctgccttagcatggagagataagccattcccagtaacaattttacttaactaatatcagaagaaaaagtctcgaatttttagtatggctttgcctggatcttcgcagtagcaagtaaaaacagcaataattgatgccattggaaaatgtagattaaggt

SEQ ID NO: 581762 - DNA, 370 bp, Homo sapiens
  misc_feature (47)..(47): n is a, c, g, or t
ttgggggggggcccccttgcaaaagcaggaatttttggtggttattnccgcccctccccggggtccccctatgatgcctttggcaggatcagattgggtcctgctcctttcccccttgaagtccccccgtttgggttcccccgggccgatatggtgattgttggttaaaagacttgggccccagtcataggcttttttcggtttttttgtcccccccgggggcttttttgaggggaagccttttgtccttgaagtttttttgaaatatgtaagaattgatgggggttttgccccccttaatgtgaaataaattgaatttaatgttggatcctttccggccttcccttaataaagcccctgttaagcccta

SEQ ID NO: 581763 - DNA, 203 bp, Homo sapiens
tgttggtgtttcctatttggactgttgctggccgtacgcccctttgcattccctactgtcagtggcagctaggactgttcccatccttctggaatgggggcagcttccttatcccctgccctgatcccctctccattaaagcccctgtgccctcagcactggcctgccatatgctgttagcgggctctatagctgtcgcctcg

SEQ ID NO: 581764 - DNA, 369 bp, Homo sapiens
cggggtcgactactactactaaattcgcggccgcgtcgactcctccacttaatctataaaattaactaaaatttcccaagctgcctgtcaaagcagtgttaaaatcattaagttggtaaacgagacataataaagatattacatgtaggaacttagaaacacgttaaactaaaagcaggctaaagatgaatggggactggctacagatcagtcaccatacataatctcctacagtggtctgcagagccagtccttgagcatgggcaaaagaatctcagaatacggaacagttcatgaagacctggtcaggacagaaatgcctctttcctttcacaggtgactgcctcctttctcgtcgacgcggccgcg

SEQ ID NO: 581765 - DNA, 188 bp, Homo sapiens
cacgagggttttccacccccctgcagcacctaagatggtgggggagagggggttataataaagcatctgaatacagttttcaggacctcaagcacacttcctagagacttgtttctgagacagttctttgccctcacttccctgctatctgcgaaagaatagaggagtattcattcagcctgtgcact

SEQ ID NO: 581766 - DNA, 173 bp, Homo sapiens
cacgaggacatgggaccaaataaggaaagagggacctccagaatgtcaactgggagctcttggggaaccttaataccaaaaggaggaaagttacccagtggcagggcaagatcacaaagccaacaagcactcactaacccccagccatgctcagccctcaccaatttcatttg

SEQ ID NO: 581767 - DNA, 364 bp, Homo sapiens
  misc_feature (225)..(225): n is a, c, g, or t
  misc_feature (252)..(252): n is a, c, g, or t
cctcctgccactcccctgcgatttataagggaattttaatttttatagtgaatctcaagggatcatcccatccttgaccacagggacaagaggggccccctcgccccagccccaccccacatggagctcagggggaagcagggaggggttcccaaaaaagacctgcggaggctaggagtggttcttgatgctcacctgaagcccctatgacgctagcttaagganggcgctcctgggcccccaatacccctngagttgcgcgcgtagcgcacccctgcagtccagcgtgcatccaccccgacgacgccccgtgctgtgttacctgccctgcccatggcctcaataaactctctgcttggtgtga

SEQ ID NO: 581768 - DNA, 1817 bp, Homo sapiens
  misc_feature (250)..(250): n is a, c, g, or t
  misc_feature (708)..(708): n is a, c, g, or t
  misc_feature (815)..(815): n is a, c, g, or t
cccaggctggttgctgaagtctcgttagttcaccatccgacctcggctgtccgaggggacgctaggggccagcacgagcctacgaccaccagtccgtttatccgtttcgtcccgtcgccgttaagagcaggatgacaggagagggacatgtctcggggattatgccagcgatgtcaaacctcggctgagggtggatagctccattggctgtcatgagatggcgtgtagaaccgatcgaccggtccctccntgccatcgaagttgttgactggtccgaccggaaggcagggagccaatcgaagcaccatttcatcactgcgtcgtcctagttcacgacgatcaacgcctgatggtgcgagacgtccccaaacgggggagagagcccggtccgtggttccaatcgccttccaaccataacgcgactgaatcgagtacggagtcgagtttggagagcctacccaaagagatcccatggctttatcgaaacacgcgcgcggtcttttgctaatacctaagctggaagagaacccacttagcaacgtgcacgtagttccatcttcgccaaggacgagcgtatgggggccccgttgcgttgtcgcaacctgtgtgagggaaacgcccccgcgtgggggggcccacgcccatgggaacccgtgttggcaaacgccctctcctcatatgcccgcagaccaaggaggggtaaccaantatgagtatcccaccccgttcccacaatagggtaagtcgaaggacgttggggctttgaatacacttgtcctattcccatggagggaagaatccccataataacaaancaatgcatttgttggtcggtgccaattgcacacaaagggtcgagttctcactggcgggaccattttgcgtgggaacacccaccgagggaaggccaaggtgcctgtcctggttaacaaattccaccatataaaacataccggaaatatttgtgccgttcgataaagactaaatctaccctttgtaagcaacatgcgctgaggaggaggcggcgccctatatgagtcccaatattaggtcacaaacaggttaggaaaaccaccctttgtgttggcccgcgacacaaggtgcgttggcacttgagaacaattggaggggcccccgcccatccatcaaaggaaatcctaccaaggcggaacatggtggaccccgcagaaaggcttcatggtcaccgaggaagccaacttgtggtgggcggtgggtaccaccaacccagtgtttttatggcgcgaagacgggacactcgaagagtgtgcacggcaagctaacacccgttggtagagacgtgtgggtcgcagcagaaccaataaacacggaggcgaggcaccacatattgtttcataaaatggagcaaatattaaaccacgcgcgggacaaacagtgtgacacatcaggtatgacgaactcaatcaggagcggacacataacagacgaggggggacacaaaccacgggggaaatagtagcggacacaaagtgacagagaaaacacacaacaagtaaccttgtagtaggccccgacaccctatgcggggacggaaaaaacaacacaaccaccaagaaagagaggagagaaaaagagcaaagaagaggagcccaaaaaaaaccacaaagagaagggggagtgagcagaacacaaacgacgaaaaaagaaacacaatgcagagagaagacaagaaaaaaagaaacgaagaagaaaaagaaaagaatgaagtggaagaaacaagaacaagacaagcacgaaaaggaaagacgcagacaacacaaagaagataaaaagaaaag

SEQ ID NO: 581769 - DNA, 167 bp, Homo sapiens
tcagtccccgcataactggcttattgccccaatgggccattatcgaagaattcacaaaaaacaatagcctcgtcatcccgcaccatcatagtgtaccatcatccctccttgacctctacttctacctacgcctattgttacaccagccccacggtgcgttggcccta

SEQ ID NO: 581770 - DNA, 984 bp, Homo sapiens
  misc_feature (34)..(34): n is a, c, g, or t
  misc_feature (65)..(65): n is a, c, g, or t
  misc_feature (67)..(67): n is a, c, g, or t
  misc_feature (242)..(242): n is a, c, g, or t
  misc_feature (263)..(263): n is a, c, g, or t
  misc_feature (269)..(269): n is a, c, g, or t
  misc_feature (288)..(288): n is a, c, g, or t
  misc_feature (296)..(296): n is a, c, g, or t
  misc_feature (307)..(307): n is a, c, g, or t
  misc_feature (339)..(339): n is a, c, g, or t
  misc_feature (341)..(341): n is a, c, g, or t
  misc_feature (345)..(345): n is a, c, g, or t
  misc_feature (376)..(376): n is a, c, g, or t
  misc_feature (390)..(390): n is a, c, g, or t
  misc_feature (401)..(401): n is a, c, g, or t
  misc_feature (427)..(427): n is a, c, g, or t
  misc_feature (436)..(436): n is a, c, g, or t
  misc_feature (455)..(455): n is a, c, g, or t
  misc_feature (468)..(468): n is a, c, g, or t
  misc_feature (472)..(473): n is a, c, g, or t
  misc_feature (476)..(476): n is a, c, g, or t
  misc_feature (489)..(489): n is a, c, g, or t
  misc_feature (494)..(494): n is a, c, g, or t
  misc_feature (496)..(496): n is a, c, g, or t
  misc_feature (807)..(807): n is a, c, g, or t
atccttgcatcgggcagcccacactgaggatatnaatgcttgcacgctgaccacgtccccgaggntncctgtcttctagttgactttgcacctgtcttcaggctgccaggggaggaggagaagccagcaggcaccacttttctgctccctttctccagaggcagaacacatgttttcagagaagctgctgctaaggaccttctagactgctcacagggccttaacttcatgttgccttcttntctatccctttgggccctggnagaagnaagccatttgcagtgctgntgtgtccngctccctcccnacattccccatgctcaaggcccagccttctgnanatgngcaagtggatgttgatggtagtacaaaaagnagggcccagccccngctgttggcgncatgagtatttagaggaagtaaggtngcaggcagnccagccctgatgtggaaanacatgggattttngaanncancttctggaggaangcatntnacaggcggcactttcttcaaagagtggtgcagccccaaacattttgcacataaggcaccaaacagcccaggactgccgaaactctggccgcccgaaggagcctgctttggtactatggaacttttcttaggggacacgtcctcctttcacagcttctaaggtgtccagtgcattgggatggttttccaggcaaggcactcggccaatccgcatctcagccctctcagggagcagtcttccatcatgctgaattttgtcttccaggagctgcccctatggggcggggccgcagggccagccttgtttctctnacaaacaacaaacagccttgtttctctagtcacatcatgtgtatacaaggaagccaggaatacaggttttcttgatgatttgggttttaattttgtttttattgcacctgacaaaatacagttatctgatggtccctcaattatgttattttaataaaataaattaaatttaggtgt

SEQ ID NO: 581771 - DNA, 368 bp, Homo sapiens
gcccaggtagatttcccgggttcatgcggctgaacttgggcgcatgctgcccgcggcaaacagccaaccgccgagggccaccgggccgatcagcgcggcagcaacaaggtgatcaggatcggctgcaccgccagcagcgcgattttgcccgaatgcagcaggtactggcccatggcatcggggttgagcagcacttcgcgcggcaagctgaagttgtgcttcatcatctccagcaggtccagcgccaggccaccgccgtagatcagcaaggcgccggcgccggcgatcatggtggcgaaggtgtagagctctttggagcgcgcgatctcgcccttttccctggagtcctttttacgtttctccgtggg

SEQ ID NO: 581772 - DNA, 1017 bp, Homo sapiens
  misc_feature (34)..(34): n is a, c, g, or t
  misc_feature (65)..(65): n is a, c, g, or t
  misc_feature (67)..(67): n is a, c, g, or t
  misc_feature (242)..(242): n is a, c, g, or t
  misc_feature (263)..(263): n is a, c, g, or t
  misc_feature (269)..(269): n is a, c, g, or t
  misc_feature (288)..(288): n is a, c, g, or t
  misc_feature (296)..(296): n is a, c, g, or t
  misc_feature (307)..(307): n is a, c, g, or t
  misc_feature (339)..(339): n is a, c, g, or t
  misc_feature (341)..(341): n is a, c, g, or t
  misc_feature (345)..(345): n is a, c, g, or t
  misc_feature (376)..(376): n is a, c, g, or t
  misc_feature (390)..(390): n is a, c, g, or t
  misc_feature (401)..(401): n is a, c, g, or t
  misc_feature (427)..(427): n is a, c, g, or t
  misc_feature (436)..(436): n is a, c, g, or t
  misc_feature (455)..(455): n is a, c, g, or t
  misc_feature (468)..(468): n is a, c, g, or t
  misc_feature (472)..(473): n is a, c, g, or t
  misc_feature (476)..(476): n is a, c, g, or t
  misc_feature (489)..(489): n is a, c, g, or t
  misc_feature (494)..(494): n is a, c, g, or t
  misc_feature (496)..(496): n is a, c, g, or t
  misc_feature (807)..(807): n is a, c, g, or t
atccttgcatcgggcagcccacactgaggatatnaatgcttgcacgctgaccacgtccccgaggntncctgtcttctagttgactttgcacctgtcttcaggctgccaggggaggaggagaagccagcaggcaccacttttctgctccctttctccagaggcagaacacatgttttcagagaagctgctgctaaggaccttctagactgctcacagggccttaacttcatgttgccttcttntctatccctttgggccctggnagaagnaagccatttgcagtgctgntgtgtccngctccctcccnacattccccatgctcaaggcccagccttctgnanatgngcaagtggatgttgatggtagtacaaaaagnagggcccagccccngctgttggcgncatgagtatttagaggaagtaaggtngcaggcagnccagccctgatgtggaaanacatgggattttngaanncancttctggaggaangcatntnacaggcggcactttcttcaaagagtggtgcagccccaaacattttgcacataaggcaccaaacagcccaggactgccgaaactctggccgcccgaaggagcctgctttggtactatggaacttttcttaggggacacgtcctcctttcacagcttctaaggtgtccagtgcattgggatggttttccaggcaaggcactcggccaatccgcatctcagccctctcagggagcagtcttccatcatgctgaattttgtcttccaggagctgcccctatggggcggggccgcagggccagccttgtttctctnacaaacaagggccagccttgtttctctaacaaacaaacaaacaaacagccttgtttctctagtcacatcatgtgtatacaaggaagccaggaatacaggttttcttgatgatttgggttttaattttgtttttattgcacctgacaaaatacagttatctgatggtccctcaattatgttattttaataaaataaattaaatttaggtgt

SEQ ID NO: 581773 - DNA, 347 bp, Homo sapiens
gccctgtcccatctgcggccacgctactcgctcctctcccaacaactcttttcgtgttgacaaaagtgacaattgtagggcaggcacagtggctcacgcctgtaatcccagcactttgggaggccaaggcgggtggattacctccatctgtttagtagaaatgggcaaaaccccatctctactaaaaatacaagaattagctgggcgcggtggcgtgtgcctgtaatcccagctatttgtgaggctgaggcaggagaatcgcttgagcccgggaagcagaggttgcagtgaactgagatagtgatagtgccactgcaattcagcctgggtgacatagagagactcca

SEQ ID NO: 581774 - DNA, 639 bp, Homo sapiens
  misc_feature (1)..(1): n is a, c, g, or t
  misc_feature (62)..(62): n is a, c, g, or t
  misc_feature (81)..(81): n is a, c, g, or t
  misc_feature (117)..(117): n is a, c, g, or t
  misc_feature (119)..(119): n is a, c, g, or t
  misc_feature (131)..(131): n is a, c, g, or t
  misc_feature (134)..(135): n is a, c, g, or t
  misc_feature (139)..(139): n is a, c, g, or t
  misc_feature (144)..(144): n is a, c, g, or t
  misc_feature (146)..(146): n is a, c, g, or t
  misc_feature (153)..(153): n is a, c, g, or t
  misc_feature (162)..(162): n is a, c, g, or t
  misc_feature (164)..(164): n is a, c, g, or t
  misc_feature (166)..(166): n is a, c, g, or t
  misc_feature (174)..(174): n is a, c, g, or t
  misc_feature (207)..(207): n is a, c, g, or t
  misc_feature (212)..(212): n is a, c, g, or t
  misc_feature (215)..(215): n is a, c, g, or t
  misc_feature (222)..(222): n is a, c, g, or t
  misc_feature (224)..(224): n is a, c, g, or t
  misc_feature (233)..(233): n is a, c, g, or t
  misc_feature (272)..(272): n is a, c, g, or t
  misc_feature (277)..(277): n is a, c, g, or t
  misc_feature (279)..(279): n is a, c, g, or t
  misc_feature (285)..(285): n is a, c, g, or t
  misc_feature (292)..(292): n is a, c, g, or t
  misc_feature (294)..(294): n is a, c, g, or t
  misc_feature (301)..(302): n is a, c, g, or t
  misc_feature (310)..(310): n is a, c, g, or t
  misc_feature (315)..(315): n is a, c, g, or t
  misc_feature (321)..(321): n is a, c, g, or t
  misc_feature (328)..(328): n is a, c, g, or t
  misc_feature (331)..(331): n is a, c, g, or t
  misc_feature (335)..(336): n is a, c, g, or t
  misc_feature (340)..(340): n is a, c, g, or t
  misc_feature (348)..(349): n is a, c, g, or t
  misc_feature (355)..(355): n is a, c, g, or t
  misc_feature (373)..(374): n is a, c, g, or t
  misc_feature (379)..(379): n is a, c, g, or t
  misc_feature (387)..(387): n is a, c, g, or t
  misc_feature (390)..(390): n is a, c, g, or t
  misc_feature (394)..(396): n is a, c, g, or t
  misc_feature (401)..(401): n is a, c, g, or t
  misc_feature (411)..(411): n is a, c, g, or t
  misc_feature (434)..(434): n is a, c, g, or t
nctgacttttgggactgagggactgtttttttggacgacttacttactttactacttacctnacactttactgacttgacnggactgggttactttttctcgcgcttttcttttttncntgctgttgtttnttnnttgntttgngnttgtttngtttgttgntntnttttttgntgtggctcgctttttgcgctcattgcggcccgntgggnttngttggtntngtgtttggngggtccttctggttgttttttcgtctttccgttttgttnttttngngttggnggtttgngntgttgtnntttttggntttgntttttnttttttnggnttgnnttgngtgttggnntggtgntgtgatgggtgtgatttnngagtnttggcatnatngctnnnttttntgcttccatnatctgcccctatttttcttttcntcagggccagccttgtttctctaacaaacaaacaaacaaacagccttgtttctctagtcacatcatgtgtatacaaggaagccaggaatacaggttttcttgatgatttgggttttaattttgtttttattgcacctgacaaaatacagttatctgatggtccctcaattatgttattttaataaaataaattaaatttaggtgt

SEQ ID NO: 581775 - DNA, 205 bp, Homo sapiens
aaaaaaaaaaaaaaattttaaaaaataatttttaggggggacccattttttttaggttttcccccgaacttagggagggggggggggttgttttttttttttggaaaaaaaccttttaattttttttttttaaggcccttccaaaatttgggaatgggggggggcccaaatttttaaagggttttgtttttccttttttttccca

SEQ ID NO: 581776 - DNA, 622 bp, Homo sapiens
  misc_feature (32)..(32): n is a, c, g, or t
  misc_feature (73)..(73): n is a, c, g, or t
  misc_feature (88)..(88): n is a, c, g, or t
  misc_feature (101)..(101): n is a, c, g, or t
  misc_feature (122)..(122): n is a, c, g, or t
  misc_feature (135)..(135): n is a, c, g, or t
  misc_feature (269)..(269): n is a, c, g, or t
  misc_feature (295)..(295): n is a, c, g, or t
  misc_feature (367)..(367): n is a, c, g, or t
  misc_feature (369)..(369): n is a, c, g, or t
  misc_feature (373)..(373): n is a, c, g, or t
  misc_feature (379)..(379): n is a, c, g, or t
  misc_feature (398)..(399): n is a, c, g, or t
  misc_feature (403)..(403): n is a, c, g, or t
  misc_feature (410)..(410): n is a, c, g, or t
  misc_feature (417)..(419): n is a, c, g, or t
gggggggagcgcgcggggggggcgcgggcgcnggggagcgcggggggaggggtgtggcggggggggggggggngcgggggggggggcngggggcgcggcgntgggcgaggcggcggggcggncgcgcgcgcgcgnggcggggggcgcggggcggggtggggggggggggtggggggggggcggggggggggggggggggcgggggcgcgcggggggcggcgggcgtgggtggggggtgggcgcggggggcgggtggggggtgggtggtngggcggggcggggcggcacgtgcggngcgcggggcgcggcgggcggcgggcgcgcggcggcgggggggcgaggtgcgttgcgcgggggggtggcgggngntgtngggcgngtgcgcgggggggcgtgcnngctngtggggngggggcnnnagggccagccttgtttctctaacaaacaaacaaacaaacagccttgtttctctagtcacatcatgtgtatacaaggaagccaggaatacaggttttcttgatgatttgggttttaattttgtttttattgcacctgacaaaatacagttatctgatggtccctcaattatgttattttaataaaataaattaaatttaggtgt

SEQ ID NO: 581777 - DNA, 805 bp, Homo sapiens
catgattaaatgtctttgcttccaatagagaacaccacgagacttatgtgggacgcctaccttcttcacaggaggacacagctgagtctgaaggacgagaaacactgacacatcagctgcctctcccagcagccgccatgagaagattgctacctgcaagcagagtgtcctctcaacccgtgctgaggctggcagacagtgctgagtgacttctgggcaggcctgctctgtgggctctaagattcctgctttgccctccctctcaggcgcaccgacaactactgctcagtgccagacactgcaccatgtggcaacacgtggcagtgatgattagtcacaaaatcacgtttatgttcattctaatgaaactgccattgcaaaattgtaactgagacagtgaaagaagtctgacctaaccaccttcatcttgcttctaacctccaagctggactttgttaattcctcgggactcattgttgggaggaactcagtctatagcttccagtttaatacacagcacatcacagatctttcccaaaacaacccctttttgcctgaatccagactgtttttgtaggataacacattactcgaaaaatacaattctgggttaggagtcccccagctggaaatgactcattccgaccctcctcattggtgctgtggatccactctgtgctaggcctccatcactgttcgaatttctgcaccctgcctcggtgaccctttgacctcccaaaccgttattcggttttcttattgtgcccccccagagttgccaatgaaaacactgtcttattccttg

SEQ ID NO: 581778 - DNA, 1241 bp, Homo sapiens
  misc_feature (127)..(127): n is a, c, g, or t
atggcggtatcgcttgcgattatggctgactaagtgaggtgaagcagcagattgtagacattcacaagcaagcattattcactcattgtgaccaaagcatgcgtgcatgtgagactatcacccaacnaacgtgcacatgtgggcaacgtgatcaacgcaagcatctcgctctagcggccagcaagtccaccaccagcaccatccatgccagttgacctgtgcaccactgcattgccatggggcaggtcaccatcgctttgagttgtgtcaatagtgcgatcataattgcacgtgcaccaatgcacagtaatcctagtagccaatttgcattgcgtcacagcatgagccatagcaaatgcacgactcagtacctcgtagcacaccacatcaacacttcattcatgcacatgcacattgcccgtggtgttagatattagcataacagggcattgggcgatattagatgagtaatcatttaaggttagcgtaggcgatctacacgcatatctgtccctatatagttgcattgcaccccacaccgctctgtgcgcgcatcagatgtcgcatatcaggcattagcacaggcatatataaagcattcgcacacattgcatctccgtgcacacaggcaaggcatcatactgcatagaattgcattgtgtacctagctgacaccatacttgagactgacgattgcgtgtactcacacatgacatgtgcgctatcgacacaagcagagtggacagcgtgtgttccagaactaatgtttagtcacaacgttttggttgcttgcacttagggatcgagtgtaatctcctgactctttaaatcaattccgttaactgttacaacccttacttgttgtctcagacatggtcgatcttatcccttaacatgttataaataaacacgtactgggggtaggcatttgctacttctagcgtacactacaaatatccgcccgacgaataagcctatcatgactgtattcagaacctagtactgtacgtgcacgatatcacacgttgtcaatccatcaggatatgtaagtccagtacacactggtcgccactggtgtcattactggcgggcaatctactccacagtcgcttatgccactctaacatggtgtgaccttaacgttgtctcggtaggggacaacctgtgattcaccatcaggacaatcatattagcacgtatgtaattaccagacggtctaccctacagcacactgcatagcc

SEQ ID NO: 581779 - DNA, 397 bp, Homo sapiens
  misc_feature (283)..(283): n is a, c, g, or t
  misc_feature (302)..(302): n is a, c, g, or t
  misc_feature (322)..(322): n is a, c, g, or t
agatttcttgtgtaatacctgacaaacaggcaaccaaagcaaaagtggacaaatgggatcacatcaagttaaaaatcttctgcattgcaaaggaaataacaaagtgaagagacaacccatagaatgtgagataatatttgcaaactatccatctgtattaggccatttttgaagtactacaaagaaatacttgagactgagtaatttataaagaagaggtttaattgggctcacggttttgcaggctgtacagggaaggcatgggtgcttaacatctggatcnggcttgtagggggagggcntcagggaagtttcccaaccntgggtgggaagggggaaaaggggggattaagttttcttcacctgggccaggttgccagggggccaaaggaggagg

SEQ ID NO: 581780 - DNA, 269 bp, Homo sapiens
gacgttactcccctaactattggaatttcttgttcagaaccctgtgcagcttcagttttaatagttactgtccagattattttctgttgtggttgtggtagtggtagctctcattccctaacagctgttagtgccaagtattttctcaatctttttcaaggattctacttacacctatattagacaaactaagttgcctcgaagttcattgatgatctattctttttttgtgtgtgtggtataactaaataattcacttgttttttggt

SEQ ID NO: 581781 - DNA, 126 bp, Homo sapiens
agctgaacgaatcccaagtagaataaatccaacagaaattccacactaaaacacttgagttatacttctgagaactattaaataaaaacaaaaaaaaattaactgagcagggttaggtctacctgg

SEQ ID NO: 581782 - DNA, 217 bp, Homo sapiens
ggtacttagaggatcccaggcaaagctcctacctgtttgcagagcacctggcgaaaggattcatagctctgtcaccaggcaggagtgcagtgggcaatctcagcttactgcatgctcactttctggggctcaagcgaatcttacatttcaggcttctcgagtagctggaacacaaagcgtaatgcgccacgtctggctaattttttggcattttttg

SEQ ID NO: 581783 - DNA, 528 bp, Homo sapiens
  misc_feature (6)..(6): n is a, c, g, or t
  misc_feature (42)..(42): n is a, c, g, or t
  misc_feature (56)..(56): n is a, c, g, or t
  misc_feature (68)..(68): n is a, c, g, or t
  misc_feature (104)..(104): n is a, c, g, or t
  misc_feature (114)..(114): n is a, c, g, or t
  misc_feature (117)..(117): n is a, c, g, or t
  misc_feature (130)..(131): n is a, c, g, or t
  misc_feature (136)..(136): n is a, c, g, or t
  misc_feature (145)..(145): n is a, c, g, or t
  misc_feature (150)..(150): n is a, c, g, or t
  misc_feature (159)..(159): n is a, c, g, or t
  misc_feature (163)..(163): n is a, c, g, or t
  misc_feature (345)..(345): n is a, c, g, or t
  misc_feature (356)..(357): n is a, c, g, or t
agggcncggcaatcctcatcccactatcttgataattgaagncgggttcccatgtnccagctgtcccnaccctcactaaccaaccacctccttacctcccaatnctggattacngtntgacccctcctcnngctgnccgttctgncttgntcatccctnctanccctccagactccagtgtaacctctctttcagattttacctgcccacctctgactctttttttgcacagaatcggatttatcttcctcaattcacacagcagctcatagatacaattagttcactattcatagagatagaccaagttaaggctatatatgttctgtcatataatatcatccnatatatacatnnagagatatatacacatttattaaattgcttaagtcagttcactgtgtagattgttatattcttgagatgaaaggctaggtctcatgatttttgtgttctgactgcctagtagtacactagtaggtagtattggtaggtagatactacataaatttttaagaaaactcgtgc

SEQ ID NO: 581784 - DNA, 399 bp, Homo sapiens
  misc_feature (40)..(40): n is a, c, g, or t
ggtagggcaaccgcccaaccttaaaaccggaagtaatggnaaccccatggagagtaccaatgatgggttacccagaggccaggaaaggtagtgggggatttaggggatgggacaaggaatgacctaatgggtacaaataaatagttacaaagaatgaataagattgaatatttgatagcacaatggggtaactaaattcaataataaatttaattgtacatttttaaataatcaagagtatacttggattctttgtaacactatggataaatgcttgaggtgaaggagatcgcatttactctgaagtaattattacacattgtgtatctgtatcaaaatatctcatataacccataaacatatacatctgtccatgtacccacaaaaaataaaaaaaaa

SEQ ID NO: 581785 - DNA, 209 bp, Homo sapiens
gtcaagacagtgccatggtgcccaccaccatgcccatctctactaaaatacgaaaaaattagccaggcgtagtggtgcacacctatagtcccagctacttgggaagctgaggcaggagaatcacttggaacccaggaggtggagattgcagtgagccgagattgcgccactacattccagcctgggcgagagtgagactcgtcccatgg

SEQ ID NO: 581786 - DNA, 1405 bp, Homo sapiens
cctgacgccgcccctatccgaggctaaatcggctgcgtacctctcggaacgcgccgacagaaggggtcctggtgacgagtcccgcgattctctccttgaataccactcgccagcacactgccgccctctgaccgacgcaccctgcacaccacgcaccctctcctgtgccaggaactatgctacataccagcaacatgccctaccaatatccagcacatgaccccggagcagaagacgtgacgctgtctgacactcgctcaacacgcatcgatggcaacctggccacaggcgcatcctgtgctgcacgatgagtccacatgggacagacatatgccaaactgtgctgtatgtccactcgcgccccgccgaaccaccgaggaagaacacggaccgcacacataacacgccagcaagacagctgacacgcctgcaccgaaccgacgatgaacaccccagacaaatacagagcggagttgaacatacctacattaccacagacgaccccaacaccataccatgaccggcaacgcctgaacgcgcccagcaccacaatcacaacccacacacaaccacaagtaccaacaagacgagagatgatcgaagagccaaacaacgcaacaaagccacggcaccacagcaacacacccctgacagacgcaccacaaccgaaccacagaaccccaacacaccacaagagaaaagcacaataagagaacagaccaaagacaccagccaccgcacaccccaacgacaccaagaggacaaagacactcaacacaaccgcacgcacacgcaccaacaacacaccacaccgaagaagcctccaaaccaccacgagaggcacccacacccccaccccacacaaacacctacaaccgagaacaattggacaccacaagaccacaaattgaatcaaggaacactgatcaaatgtaccacgatcatcacgtccaatgcaaacaaagtgtaaccactgataccacaaatcttaagaactacactaagcgtaccacaccactgtaattgatgaagctcacctcacaaagcaaaacacgccaactgacaactagatacccctactataaagcgaataaatataaacaccaccgactcatcagaagtcacccactcattcagattagaactacacatatcatcataaaacatacattgtacacatataaccataaccacaatcacctaccatcaataacatataaaacataatgactacaaccccataaccacaacacaaccacacaacaatagaaaacaatacaatactattacatcaccataccataataacaatatatcgacatacataaaaaactcatactataccaacactaatctaatcacaaaaaccaattaataacaatatcctcacatgtacatccaatat

SEQ ID NO: 581787 - DNA, 937 bp, Homo sapiens
  misc_feature (45)..(45): n is a, c, g, or t
  misc_feature (110)..(110): n is a, c, g, or t
  misc_feature (112)..(112): n is a, c, g, or t
  misc_feature (121)..(122): n is a, c, g, or t
  misc_feature (124)..(125): n is a, c, g, or t
  misc_feature (128)..(129): n is a, c, g, or t
  misc_feature (132)..(133): n is a, c, g, or t
  misc_feature (143)..(143): n is a, c, g, or t
  misc_feature (146)..(147): n is a, c, g, or t
  misc_feature (167)..(167): n is a, c, g, or t
  misc_feature (181)..(181): n is a, c, g, or t
  misc_feature (185)..(185): n is a, c, g, or t
  misc_feature (187)..(187): n is a, c, g, or t
  misc_feature (222)..(222): n is a, c, g, or t
  misc_feature (229)..(229): n is a, c, g, or t
  misc_feature (236)..(236): n is a, c, g, or t
  misc_feature (247)..(247): n is a, c, g, or t
  misc_feature (257)..(257): n is a, c, g, or t
  misc_feature (261)..(261): n is a, c, g, or t
  misc_feature (326)..(326): n is a, c, g, or t
  misc_feature (332)..(333): n is a, c, g, or t
  misc_feature (346)..(346): n is a, c, g, or t
  misc_feature (356)..(356): n is a, c, g, or t
  misc_feature (365)..(365): n is a, c, g, or t
  misc_feature (404)..(404): n is a, c, g, or t
  misc_feature (407)..(407): n is a, c, g, or t
  misc_feature (455)..(455): n is a, c, g, or t
  misc_feature (681)..(681): n is a, c, g, or t
  misc_feature (843)..(843): n is a, c, g, or t
  misc_feature (932)..(932): n is a, c, g, or t
attttttttaatgatgaaaaaaaaaatatttatttcttttatttntttataatatataaattatatttgtttgaagaagttgttttatttattttgacagaaagtaagangnaacttttgnngnnttnnttnntttttctgtnggnngccttaagctttctaaattngggacatctaagcnaggngnagggaaaagggggtttcgcaaaatcactcgggggnggggggnggggggnttgttaatcangccctagggngggngattaactgcttgtacaattacgtttcacttttaattaattgtgcttaaggctttaattaaattngggggnncccttcttagagnagctcgtacngaggaaggngcatgggctgaatgatgtcacggcagtggttgaacacanggnggatgttctcagtgtccacagcgcaggtgaaatgagggtagcagtagngacgcccatctccactggcagtgctgatcctcagaaactcatctcgaatgaagtacttggcccgggtcacgcgtgggtcctctccgggctcgggagtagcatcctcaggagtagtgtagcgagcaaattctggaaagtagtcctcaatcttcgatttcccagcaaggactttctcagcgagcagatcttgcttgttgaggaacaggatcacagagatggtgcgcancattctgttgttccagatgctcttgaagaggttcagagcctcctgcaggcggttggtctggttgtcctcccggatgaccatgttgtagctgctgctggccaccacgaagatgatggcagtcacatcgttgaagcactggatccacttgcggcgttcatcgcnctggccacccacgtcaaacatgtggaagttgactttgtccacctggaacttggtctcaaagattccagaagtcaggacacggcagcganagggt

SEQ ID NO: 581788 - DNA, 389 bp, Homo sapiens
gcgtcgactcaagatggagtcttgccctgtcacccaggctggagtgcagtggtgcaatctcagctgctgcaacctccgtctcccaggttcaagcaattctctgcctcagccttcctagtagctgggattacaggtgcccaccaccacaccaggctaatatatttccttgtacttttagtagagttggggtttcaccatcttggccaggctggtcttgaactcctgacctcgtgatacacctgcctcagcctcccaaagtgctgggattacaggcatgagccaccacacctggctggtgcaaagaaactttaaaagtggcatgggctgggtgcggtggctcatgcctgtaatcccagcacattgagaggctcagacaggcagatcgtcga

SEQ ID NO: 581789 - DNA, 103 bp, Homo sapiens
ttttatactaggagatgaatgtaatggtattacatttttaatttcagtttccttatattcattgtatcctatataaaaattgactgatctttatgtgtttact

SEQ ID NO: 581790 - DNA, 377 bp, Homo sapiens
ggacttaccaatatgctgtccataggagccgctctgtgcaggggtctcttcgtgcatgttggggtggatcagcttccgtaccctcctatctaccgcatgcagtgctgtcaagcattgctgactgggcagtatattgtttagaatgaaagacatcataggtcaacacgaatcacataagacacacaagagcaggatttagcttcagttcatttaatttcctattctcttctccttcttttccctccctcttctttatggataagtgagaattcccaccccctcattttttatgcgatgataacaggaagattaattaagatggcagtatctaaaaatggtagattcttttaatgtaaaagaaaaggctatctctgatt

SEQ ID NO: 581791 - DNA, 1421 bp, Homo sapiens
  misc_feature (1421)..(1421): n is a, c, g, or t
gtcctgctgagtctcccctgaacagcagctgcagcagccaatggccccgccctgggtgccctgccatggtgcttcactgctggctgcccagcctggtggtgcttctgtggtgctccctgctttgtccactgtgctgagtggtctcctgctggtacgcctggcctgcatgaatgccctcgatggcaccctgccccactggtgtgcttggtgccctgtcttgggtgcactgctctactcatgccatgtggtgtactgtgctcctaacactggtacttggaaatgaggcttgggagtgcttcacatgatgaatgtgcttgtggttacccactggtgcctctacacttgggcagactggcccgtgaacctgtggcactggcaccaccacatactatctatataggtagcaccgaacaaatagggactggagcctatgagataggcatactccattggctggctacagatatgggagacagcgctgatgcaggaccaacataaaccatatgtgacacttggatacccgagcggttgcaggcacacaggcgtagagacactgacccagcctcattgcgtcataagccgcacatacccagtgtgcccctagtgccttaggcccattacagacaggagccgaaccactcggaggacatacaccttaggaccgggttatattatggtcctcggtggcggcacccaaaacgccgaatttggggcgcattggcgacccagattgaggcggtgcgacaccgaggaggccttgcggcccttaggacaaccaagacaagagttggcacaggtagtgcgccactaggggcccacacgaccacaacaggggacaacctttaggccacatcgaactttggaacgaaaccacaagaggacaagagaggattagcacgcgaaatgtaccacaagcggagccctatatgggatgcaggaaattatgatataagcagctttcgggatgacacacagggattatcaaagacaggacacctcttgatggccaagttaggaaaccccccgaagccattgtgagagatgaaacctcctatggagcctaaaagagttacaccgtaggaaaccacaactgaggtgggtcagcccctagttattatgcacgtcaccgcgccacaaaacggagagggtcggagagattcacaggcgaccaacaaagtcaacaaaagtgcccatcttttacgcagaaggacaaacgagcgcgactatcgagatgagcgccaccaaccataaccacccacatttgcgtgaagcaatgccccgacacataccaaagacacccacacaggatgggcagtagaggtacacgacagtgcatcgtgactaactccccaatatcggcaagtaggcaccattcatctaccacgttttgagcccaagttatgacctacttattatcaacn

SEQ ID NO: 581792 - DNA, 117 bp, Homo sapiens
tgcagtcactatttcttagaaacctttgtggctccttcccagtgactctggaattaaagcccagactctgtttttttgctcagcttatcaatttagcactgtcccttccacctttgg

SEQ ID NO: 581793 - DNA, 334 bp, Homo sapiens
agatatcggcatgtaagtggcatccagcaactggcgcaatggagctttgtcagtggacatgagcttcccagagcttcggcggactgggatgccggccaggccaggtgcagtcactgtgccagcgtcgtcaagcatgtctgcacacagcactgtggcaccagtgcacactcttccacccacccagggggcatgcagcagctgcccagctccaattcttgccccagagagttggctgacaccacaagccccagcaccccatcattgcatggcttgggtcgcagtctccttggttcgtaggcccaggttcaagcatggctccatggcccaatgcagg

SEQ ID NO: 581794 - DNA, 427 bp, Homo sapiens
gaagggccacattttaaatttattttttagtttttgttttttgacaacaaatgattgatgaaataatgcaacacccttaaattccacaaaatgggatggtttttccaacctcctgtggatatggtgcgtgatcaatctattatttaggattaatacaagttcatgctttttgggttatggggaaacaacattaaagaatccagtttacattggttgaaccacaagtataataatccttgaatgtgatcaaacctattgaagacaccggtttaaatccattattttgagacttaacggcgaactgtggcccatccatctccatcagtgtcatttttagcccgacggagagattccctatctttttcagctctccatgaggccttatttttttaaccttcagttggtcggtctcggcctctttcttggc

SEQ ID NO: 581795 - DNA, 934 bp, Homo sapiens
gcggggcaggaggcacgcgcgcgggtgatggcgaggtcgctcggtgcagctgttgcggggccatggcggggaccgcgctcaagagagctgattgggcgagtacaaacagattaacactgaagtccgtccggaaggaacttgtagcaggccccattgaactgaagagaacttttcttgaatgggaggcattgatcatgggcccgagaagacacctgcgtttgagttgaggtgtattgcctgccatcctgaggtttcccactttgattacccggttaagtcccccaaagatgagattgtacctggtgatgatgttgtcagtcccaacgatctaccctgatgggagagtctgcatttccatcctccacgcgccaggcgatgagcccatgggctacgagagctagctgcggtagcggtggagtcctgtgcagagtgtggagaagatcctgctgtgcggtgcgtcgagcatgctggcgagagccctactgcacgaatagtggagctaaggtggatgcgtccatacatgtggagcgatgagcgggagcagtgctataaggattgccaagcagatcgtccagaagtctctgggactgtgagacctggtctcgcacaggcgcgcagcagcagtcgcgagcagctcagccattctcccccgggacacttagtgacagtgatgctctgtgctaggtaccaaacgaggcagacttgcaagaagccatgggcatcttgtagtgatcgacaacctttcctaattcagaccaggccttctctccttgaaatggattgccttcaagtgtccgcaactactcggccagtttacatggcaagtttaaacaagaattcctccacaaaggggttccacggctagattattcagagctggtccagaaattaccttctccccggcgagaacccagccagttcacggttccctgcg

SEQ ID NO: 581796 - DNA, 760 bp, Homo sapiens
  misc_feature (415)..(415): n is a, c, g, or t
  misc_feature (508)..(508): n is a, c, g, or t
  misc_feature (533)..(533): n is a, c, g, or t
  misc_feature (685)..(685): n is a, c, g, or t
  misc_feature (705)..(705): n is a, c, g, or t
gtgacatttggcaatacctgaagacagttttgactgtcactgtttggggtgggcaggagtgccactgaaatgtagtgggtaaaagccaaggatgctgctcaacatcctgcaactcacaggacattcccacacagtatagaattgtctggtccacgatgtcagtatgccgagatgagaaaccctactctagcaccttcatctcggcagatgccttcttttctttacagagaaatagcagctagcttttgggaactccctcatcttttctatttcaaacacaaaacacgtttttcggcactgagcctcatatgttgatatgatagagcgatgatacccttctcctggctgaggcttactgtaccacccatgcgttggacttcaaaacctctcattttctctgtgacatcatactatntttatccattatgtggtcatgtgtattcaaatgtgccttttatattcgcccttttgactttaaaacatacaatttcttaactatgacaaacanaaccaaaagactttcttttctttangtacttgcctgttcttctcctttttacaggcacatttgttcaagtgggtggtaatgataccaggtgtctacaattcgtcaacacttaatcactggccaaacaacttccagtttgctttctggccctaccgactcattttatttaagatcttnctttggcttcacgttggagnagcattcaacaccggttatttcttcctgctttttgaacaactttcccttgtttcg

SEQ ID NO: 581797 - DNA, 362 bp, Homo sapiens
cactggtgctgactttccagccagcgatcctgggctatttgtgcgcaacgggcatggtgacgttcctgggcaacgattaggcgtagtcctcaggctagtcaccctttgcgcgttggcctccagggtttattgcaggcttttactgaccggccgcctgcaccgccagaggccgcacagcatcagccgggtgcagttccagcgagcacacattgatcaggttacgaagtttttcgccgatcacctgggcccggtgccagctcaggccatccatcacgatatcgatcgccagcaggtcgtcttcgcgctgcacgttcacctggcgaggaaccaggaactgcagggcaaaatagttgagcacccgt

SEQ ID NO: 581798 - DNA, 362 bp, Homo sapiens
tggctccaccatttcttaaactgctaagaatgcctcatagcggttgatatagaactcccgctatccttgtggggtctggaatctggatatgtggtaggcagaggatacctatacgaccagtccccagtaaaagtccagggcactgagtctctagtgagcttccctggaagcaagcatcacacacgtgtagtcacacctcctaggtagaggaataatgcacgtactgttgtgactctactagtgcctgcttacccctggacttccaccccatgtagcttataacttaacctgatattattccttgtactctatcattgcaatacatcacggccatgaataccactatcttgctgagtcccata

SEQ ID NO: 581799 - DNA, 669 bp, Homo sapiens
agcgggtttgggtccggcgtggaaatgtatgtcctccgtcggtttttccgctacgtcttctccaccgaacggcgagatatttaggggagttcattccctagagtaactgcattatatgcatcctttcatgacgaagttgctgccgtggagaagactggtaggagactcgaggaacagggagaagccgagccgagatgcgtcgcacgggctaggaagcgtgtccgtgcattagtggtgttagcgtttcgcctgccggggcagttgaggcttgacgtgatcctggcgtggcttactaagataaggacgtactggtcactgctagtacaggaatatgtcgagtaacactagggcgccccagcaatggggcacctctttgctagattatcggtatctcttgatgatgggaaaatgcgtgccacctgagtcaataacgttgcgtgcgtcatggcatctagtacagacgttcagggattacattaagacctgtgtaccatgcactgggtgactgtggggatcatgttgtccatgactgaaccagcaagacacattgcgatttatcgtggcaaacccattgggtaaccataaaagtatacctcttcgtcctacgtggtctacccagtgtggctttagacaccgtaccagtcgtgctcagcttcaccgtgagggatc

SEQ ID NO: 581800 - DNA, 901 bp, Homo sapiens
aggacgaggaggaagatgaggaagatgaagaggatgaggaggaggaggcaagatcacgaagatgacgatgaatgaagaagatgatgatgatgaataagttggttctagcgcagtccaatgagtaatctgggtctatagagagcatttaagccccccctgtacacaagcttcactccttttaaagaaggaagcatctctgagaatgtagagcgcggtgtaccgagtttgttctttaagactgtagcagtgtctctattggtactagtgaacacactaccgagatgtgtctctagaatagccctgtcctggggggtattcttcacatagccagctaactcttgctgggtacagtatggagggtcgtaacattggcatggcaatttaacagcaggttcttgttgtgtgcacatggcacatgttagttatatagtggggatggtagttcctggcatctgcagtggtctctgatgcagttatacgaagataattgtgtatctcgtaaactgaataccactctgtaatttgcaaaaaacaaagaacgtggtgccgctggtgagagaggacattcctgattgctgctagactagaatacaatgtcttcaatacgatgtggtccgccctttgcaataggtctgaagcatactcctccttgcaggggaacgcataggaccaataaggcttcttggcggccattctgggaattcgccatggaattcctgtagcacgtggtttcaacccctttcaactaatcgtccggcacatacgacaggttgtttgttctaaccacccccccgggcatatccaaagggggggggtaacagctatggcccggaaatacggcgcacaacagtaattcaaagatcgccagacttgttcgggaaaaaactcaatagtgcattac

SEQ ID NO: 581801 - DNA, 867 bp, Homo sapiens
gaaaagatcagtgcacaaggaacttgggctggttaggtcccagccgacgcacatctgcatacgtgggctcagtggtgttcggcagtagaatgacatgccgttactccctgcacattccctcatggcatcccatcaacatagcttcatgacaactggaatactgcttgaggattcctcattgtccttgagtaatggggactcatggatgtcgaaccacagtggtaaatccaatttggaccccgtgatggaagtgtcgcagttgatcaagtagtcgcgtccttgtatacggtagtccgtatgtcaggggaatgtggctcgtagaacgtgtacggtcacggtcgcctcatgaaagatgtgtagcaggtggctctcaggcaaaaatagccaaggtctggatcatccatgtggcagctttgcatagggagaggatagctccgaactggaactgaactgccttctctgcacgcttgaccaaagcagtgatgagggcggccagtacctgcggtgtgcgtggtaggtttaaagaacaagggaactgttttctgctgagtgtttcctttgtccttgggctgctcgagctggacagtaggtaaccactgttatacaaaggaccagcccaatttctctggctaggttcggagttcgttgcataccctagctgtgagtgccttatggtctggaaagttgggtgtcgtcataatagccacagctaggaccatttctctctgtcattatgacattgtcccttgtattacattaaaagagaatgtctttgatcactagagtctggacgggttggataattaccactgtgagattcttaaagattattgcttcataactactaaaaaagtcatgtaagagacc

SEQ ID NO: 581802 - DNA, 226 bp, Homo sapiens
gcatgcagattgaaatactctcgagactcaggtcgtgggctgtgagctcctccaggacacattatgacacgtcatgccttctgtactagctgccaccaaatatcaatcttgtggcctgggtccctgttccactaaactactaccaaatactactctgtccctgttagtacaaactgccgcgtatgatcatggtctttcaacgagttccccttacccgagccaggcg

SEQ ID NO: 581803 - DNA, 564 bp, Homo sapiens
gtcgtatactttgaccagcgtaagtacgacaccagtgtggtccacatgcttgaaatcccatcttctactaaaggggacaaaaattagctagggttcggtggcgtacacctattatcccagctactcaggaggctgagccgaggagaatcacttgaacctgggaggcggggttgcagtgagcaagattgcgccattcactccagcctgggcaacagtgcgggactctgtctcagatcaaacaagaaaagaaaattctctcaaagaattaaacagaaatacaaagatggaaaatatgagagacaagataacagttaaaagatctgactaatgacaattaagtagagaacatagtgacttctagctctaaaatggtggtgtagaagcacactggcttcactcactctgccctgccaccacagaaaaccaagaacatacagcactaagatgatcaccagcgacatccaagaactcagatcatagacggagacagttcccaggggcacagagaaattaaagaactccaggcatgctgtaagaatcggacttccgtatctaacacacccg

SEQ ID NO: 581804 - DNA, 292 bp, Homo sapiens
tcaacccagtcaacataaatgatctctaaaactctattatttcaaaactaataactcaaaagaacaaggcgtgtttcataccccactagaacaatcttttcttccaaatgcactttccaatacacttatcatgttatgacccatctcctctatataaatgcatatgggttttaattaaatgtcctttaaagtatacttaaggaaggtgaccgacggtgtgtactcacttcaggaccctgttcatctaatcactctactctcattttactgctaactccaccttcaaacctta

SEQ ID NO: 581805 - DNA, 427 bp, Homo sapiens
  misc_feature (68)..(68): n is a, c, g, or t
  misc_feature (257)..(257): n is a, c, g, or t
  misc_feature (328)..(328): n is a, c, g, or t
  misc_feature (361)..(361): n is a, c, g, or t
  misc_feature (385)..(385): n is a, c, g, or t
  misc_feature (411)..(411): n is a, c, g, or t
gatatggtttgtgtgcccacccaaatctcatctagaactgtagtttccataatccccacgtcgtggangggacctggtgggaggtaatcgaaccatgggggtggttacctccatgctgtccttatgatggtgagttctcatgagatctgatggttttataagggacttttcccccctttgctctgcacttttccatgctgccaccacgtgaagaaggatgtgtttgcttctccttccaccatgatttaagttttctnaggcctctccagccatgctgaactgtgagtcaattaaacctctttcctttaaaaattacccagtcccaggnatgtcttcattagcaacctcagagcagattagncacaattccacaacttggagaatnggtgttcaagtttcactctggccttnaacaacccaaaattta

SEQ ID NO: 581806 - DNA, 909 bp, Homo sapiens
tacctcgtttatttctagtggtctctagtagtgcagctacggtggtgtcatcaggtgtactatcgtccgcgtgtgctgtcacgcaaaggtgtgttgtcgacttcgtaggccttatgctgaatgagtcggtgcccttggcttccctaatatgctgcgaatccccggcatgcagcaaccatggacgccatgtcaaggatcattccgagggggagctgagtacgctgctgggtaaccgtgtggatttgttgatacctccgatctgcaggaattaggtgagatgggcttacaaggatcgggaaaagaagttgggcaaatcctgcggttagacaataccatctgaaggagaacgtggatatgcgttgactgagctgcctaaatgtttcatgaacgaggttctttagtcgctgagacagcccctgatttgggctgaggagactctctcacctatcgtgtggatcttacttcacatcagtctagtgacagtttgtgtgctcggatgtacatctgttactgagacaaggttctcaattttttatagaaaaggcggtatgcccttggatggtgtcatgcctgtatgccaggacagtatgtttaggctgaaggccggtggtatcgcaagctccagggaatggccagatgctcgaaggttgactggatgtggctgcagttgctactcactgatctgggaaaccatgtcttatttgttcctgccattgtcccataaatatcagcaatactagagaaggggaggcctatttgtttgtggctgcgccactcgggactggccaccagtgccgcagtaacggctgatatttacacaggagagaggcaagatatacgggggcccaaggacaaactattggaatcgtgagttttgaacatatttgttgtgtagaacgtgaacactct

SEQ ID NO: 581807 - DNA, 530 bp, Homo sapiens
ggattctaccttatactcctcctcccttgcttgggtgacagtatgaagaccagagaaggaaagaaaagatggaaaggtggctgggcatggtgattcccacccgtaatcccagcactttgggaggccaaggcggtcagatcacttaagatcaggagttcaagaccagcctggtcaacatggtgaaacctcgtctgtactaaaaatacaaaaattagccaggcgtggtggcgcacgcacgcctgtaatcccagctactcagaaggccgaggcacgaaaatcgcttgaacccaggatgcggaggctgcagtgagctgagatcatgccactgcactccagcctggatgacagagtgagactctatctcaaaaagaaagaaagagagagagagagagagagagacagaaagatagatagatagaaagaaggaaagacagaaagaaagaaagagagacagaaagacagaagagaggaaggaaggaaggatagagagatagaaagtggggggggaatatgcatgtcttgaggcccta

SEQ ID NO: 581808 - DNA, 205 bp, Homo sapiens
ttctctcaagactcacgtctcatctgattagcacggacaggatggcccattgggtcttggcttccctcccatcttctcaagcagtgtccttgttgagccatttggatccttggctccaggtggcccctcagtctggactctaccacttgggtctccagatatactggtacgtccttgtgggtcaggatatttctggaagttactc

SEQ ID NO: 581809 - DNA, 381 bp, Homo sapiens
  misc_feature (1)..(1): n is a, c, g, or t
nggtcggtacctgcgtactgggcgatgtatcacagctacctttgtttttttttaaaaagctacaaaacccagtgagcagtccaaccaatactgaacagttctggtttctgcaggtcatcgggtggtctaactcgattttctctttcatcatctgtatctttcttcctttttccagcttccccagcttcttcctccttttcatcctcatcctcatctacatctgtttcctgaagtccaatttcttgttccccctcatggattcactattcgttgttcctcatgccccttgtacttcttcatctgcagtcatcttctttcattcaagcctcttgttctctcagccactccttcattcgtccatgttgtccctcattcttctcc

SEQ ID NO: 581810 - DNA, 305 bp, Homo sapiens
  misc_feature (134)..(135): n is a, c, g, or t
  misc_feature (153)..(153): n is a, c, g, or t
caccccccctcccaccccccccccgagaaaaaggctcaatttttaaaacaatttgcgggcctatgtaaaaaagggatgggattttttttctttttcccttttgtcacccaccgggaagagaaaaattggccagnntgaacgcaaatgcatttncacattcaaaaataactgcaggcctcctagtggctctctacatgatcataaatgaaacaagttttaaaagaaagattaatgctgacttgtgaaggtgtcaaacaagaagcggtgagatggagatggaatgttagaaagattgcacgtcgatg

SEQ ID NO: 581811 - DNA, 271 bp, Homo sapiens
tatattggtggcatgtgaaggcagagcatactaggcagaagtattagcaagtgccaaggcctaagaagtgctaacaactctagtaggagagtgaaaggtcaaaaagtgggcgaaggacatgaacagacacttctcacaagaagacatttatgcagccaaaaaacacatgaagaaatgctcatcatcactgaccatcagagaaatgcaaatcaacaccactatgagactatcatctcacaccagttcgaagggccatcatcaaaacgtcagg

SEQ ID NO: 581812 - DNA, 418 bp, Homo sapiens
ctgtcttatgctgggtcaaaggtggccttatcgctacagccttgaattgctcactgttggcttactaagggcccatatgctggtacagatctcacttccacagcctggacctgagagggctatcactgccacaagccattgtcctgtgaccttgggattctgacgtggtagaatacttcgtaagccaatgttactctgcacttcctgtccggacactactctttcaatcaacggttattctacaaccgcacgatgtcagagttggcaagcacgcgatacctggacaacactgcgggaaactactcaggctctggggacggccggcctagctgactgaacgatagctcttaccgatgatctcagcatccagaccttgcctaccatactgaatatctttgacaatcgatgtcggctgtgc

SEQ ID NO: 581813 - DNA, 284 bp, Homo sapiens
cactacaggacgaacctgatctcttatactagtatccttcatcatttttatttgcacaactaacctcctcggactcctgtctcactcatttacaccaaacacccaaactatctataaacctcagacaatgggcatccccctttatgaagcggggcgccagctgattaatagggctattcggctcttaaggaatttaacaattgcccctaagccccacttttttacccacaaggggacaaccttacaacccccttattccccacactagtttatttattcgaaaa

SEQ ID NO: 581814 - DNA, 145 bp, Homo sapiens
cacgaggggtgatgaaccatttatcccaacggatcttataaatgcagttgtgactgtggttgctgacactgccgaatgtctggcactaatttcagcgcaggaacatgtcattggtagaggattctgctcagcatgtggcgtttct

SEQ ID NO: 581815 - DNA, 125 bp, Homo sapiens
caatgctttcgtgcggaagttgctgtgcgcataatgtttgcgcgtggcggatgtgacggctttagttaataatataatttgataccccgctttgctagggagtagcagcgcaataccaaaaggtt

SEQ ID NO: 581816 - DNA, 550 bp, Homo sapiens
  misc_feature (110)..(110): n is a, c, g, or t
  misc_feature (218)..(218): n is a, c, g, or t
gccccccccgccccaggaaaaaaaaagaatatcccccccgggggaggggggtggttttggggggccccccccgccccggggggccccaaaattcccccccgttttggggnaagagggctctcccgcgcgtttttttatattccccacaaagaaggggggaggtggtgtttgtttcccgggggtgccccccgccccccccatttggggggtttttttcnaatttcccccaggagggggggggagggggtttttttccaccccggggcccccttttgggaagggggcccccccccccaaaggggggggtctcccccgggggccccccccaaaggggggggggaggggggggccgggggggttttccccccctcccccccccggggggggcccccccggtataaggttccccctttaaaaaggggggggccccccccccccccccccccccaaccctttttttttttttttttccttttgggggggggggggttttttgggggggggtcccccccgggttttttttatgggggaaaagggttttcccccccta

SEQ ID NO: 581817 - DNA, 488 bp, Homo sapiens
  misc_feature (166)..(166): n is a, c, g, or t
  misc_feature (193)..(194): n is a, c, g, or t
  misc_feature (201)..(201): n is a, c, g, or t
  misc_feature (204)..(205): n is a, c, g, or t
  misc_feature (215)..(215): n is a, c, g, or t
  misc_feature (246)..(246): n is a, c, g, or t
  misc_feature (251)..(251): n is a, c, g, or t
  misc_feature (262)..(263): n is a, c, g, or t
  misc_feature (271)..(271): n is a, c, g, or t
  misc_feature (282)..(282): n is a, c, g, or t
  misc_feature (284)..(284): n is a, c, g, or t
agaaagaggaggaggagctcgtttctctcaaagacaggatcgagagacgtcgggcagagcgggccgagcagcagcgcattccggaatgagcgggagaaggagcggcagaaccgcctggctgaagagagggctcgacgagaggaggaggagaacaggaggaaggctnaggataggcccgaagaagaaggctttnncaacatnatnnattttggggntacatcagaagcaggccagacagagcggaangtggnagaggcagacnnagcggganagagaagagantntgctagaggaggaaggctctccaattccaccgtaaatagaactaccttaggagaagccaagggctttgcagacaactatatctttgggcggaaaagcttcccctatgaaaggcatcacggaagatatgcaatcctcttgaaagggcactgacctaagccccttccccggggcgaaatacccggccaaaaatccccccccttaaa

SEQ ID NO: 581818 - DNA, 481 bp, Homo sapiens
attccgacagtttttaacacaaatcatcatatacatacaactctctctttcagattcagagaatgtgagttacaaatcagccaaaaaagaaagcaaaaaacaatgaagataagggaggagggagtgtatatggcagcaaaaggaggaagccagctggttagctggccttttaacaaggtatcagggaattaggcccaaggccattaatcctacagttttcactcctctgccaactctcacggcttacattaccgagccattatccagaggatgtacggctgcgaagagggagcggaacgggcgccttctccgcgagtatgaacaggaacgcctacgacgggaaggataacatcgccctgaacgaggacctgagctccttggaccgcgggggacaaccgcgggtcagatcacccagcgcaagtaggaggcggcccgtgtggcggaccaactgagagcctacctggaggggcctgtgcagaga

SEQ ID NO: 581819 - DNA, 540 bp, Homo sapiens
caacagtcatcaacagacattaattgaactcctgatgtgtgccaggccaggcaccaaggaggagcacacagaggtattaaataaagtcctggcccttgaggaacttctggatgatctgaggaaaaaaaagtaggtgggcaaaagcatctgtcaaacccaggcttctcccctatctctgtggtctcaggaaatgggaaagccaaaaagggggacccatgaacaagggtccaagacatacatgcacaggctacacatgtacaaaacatgtgcaaagtccacgcaactacaggacacgtgtacagacacaaggtgcatatgtgtcacatgtgggtgggattcaagtgcaaagcccatatgtgcataagccatgtgactatggcacaagaactccaatctcccaagtcaggctggagaaaaagggggaaaaaccccaagggccccttaaagccccttcaaaggctgaaggcagggaacctggccactcttggggcccgagaaaaaaaattccttccaaaaaaaactggcgaaagggaaagacaa

SEQ ID NO: 581820 - DNA, 359 bp, Homo sapiens
  misc_feature (1)..(3): n is a, c, g, or t
  misc_feature (44)..(44): n is a, c, g, or t
  misc_feature (59)..(59): n is a, c, g, or t
  misc_feature (61)..(61): n is a, c, g, or t
  misc_feature (72)..(72): n is a, c, g, or t
  misc_feature (89)..(89): n is a, c, g, or t
  misc_feature (104)..(104): n is a, c, g, or t
  misc_feature (126)..(126): n is a, c, g, or t
  misc_feature (152)..(152): n is a, c, g, or t
  misc_feature (178)..(178): n is a, c, g, or t
  misc_feature (194)..(194): n is a, c, g, or t
  misc_feature (197)..(197): n is a, c, g, or t
  misc_feature (199)..(199): n is a, c, g, or t
  misc_feature (221)..(221): n is a, c, g, or t
  misc_feature (234)..(235): n is a, c, g, or t
  misc_feature (251)..(251): n is a, c, g, or t
  misc_feature (323)..(323): n is a, c, g, or t
  misc_feature (343)..(344): n is a, c, g, or t
nnngagaggaatgacgatgatgaagaggaggcagcccgggaaangcgccgccgagcccnanaggaacggctncggcagaagcaggaggnagaatccttgggaanaggtgaaccgaccaggtggagntgaaatgccccagaacagtgtgcctnaacgaggaggcccaagaccaaccacncatctaaacactcaantgngnaaggggaatgtatgaggaccgncattcctggaagnnacctggactacggcgntgaggaaagacgccaaaaacgcccttcaggaggtctactggagcggcagaaggagttcgacccaacaataancagatgcaagtctgtcgctnncaagcagaagaatgc

SEQ ID NO: 581821 - DNA, 817 bp, Homo sapiens
  misc_feature (2)..(2): n is a, c, g, or t
  misc_feature (123)..(123): n is a, c, g, or t
  misc_feature (126)..(127): n is a, c, g, or t
  misc_feature (154)..(154): n is a, c, g, or t
  misc_feature (232)..(232): n is a, c, g, or t
  misc_feature (267)..(267): n is a, c, g, or t
  misc_feature (307)..(307): n is a, c, g, or t
  misc_feature (341)..(341): n is a, c, g, or t
  misc_feature (345)..(345): n is a, c, g, or t
  misc_feature (356)..(356): n is a, c, g, or t
  misc_feature (376)..(376): n is a, c, g, or t
  misc_feature (399)..(399): n is a, c, g, or t
  misc_feature (411)..(411): n is a, c, g, or t
  misc_feature (429)..(429): n is a, c, g, or t
  misc_feature (440)..(440): n is a, c, g, or t
  misc_feature (445)..(445): n is a, c, g, or t
  misc_feature (450)..(450): n is a, c, g, or t
  misc_feature (457)..(457): n is a, c, g, or t
  misc_feature (469)..(469): n is a, c, g, or t
  misc_feature (485)..(485): n is a, c, g, or t
  misc_feature (490)..(490): n is a, c, g, or t
  misc_feature (494)..(494): n is a, c, g, or t
  misc_feature (541)..(541): n is a, c, g, or t
  misc_feature (544)..(544): n is a, c, g, or t
tngattgcgagaaatcctccagaatttgcctttgtggaattcgaagatcctagagatgcagaagatgcagtacgagaactggatggaaaggtgatttgtggctcccgagtgagggttgaactntcnncaggcatgcctcggagatcacgttttnatagaccacctgcccgacgtccctttgatccaaatgatagatgctatgagtgtggcgaaaagggacattatgcttatnattgtcatcgtgacagccggcgaagaagaagcagntcacggtctagatcacattctcgatccagaggaaggcganattcttgtcacgcagcaggagcaggggacgaagncagntcagctctccncgacgatcagatctatctcnctcgtagatcaagatcagccacncagagatctagntctggttctataaaggancgaggtaccancccgncgggncagatcnagatccggtctntttcacgaccagagcngccgnccanagcccagccctccatctccaaaaagaagtcgttccccatcaggaagnccncgcagaagtgcaagtcctgaaagaatggactgaagctctcaagttcaccctttagggaaaagttattttgtttacattattataagggatttgtgatgtctgtaaagtgtaacctaggaaagataattcaaccatctaatcaaaatggatctggattactatgtaaattcacagcagtaagataatataaattttgttgaatgtattaacatcatatggtctgaaaatgtgggtttttatttggcacatttaaataaaatgtttctaactagc

SEQ ID NO: 581822 - DNA, 589 bp, Homo sapiens
tcagactctcctcgttcgcgcagtcagctcggctccttccagcaaccatgtctgacaaacccgatatggctgagatcgagaaattcgataagtcgaagttgaagaaaacagaaacgcaagagaaaaatcctctgccttcaaaagaaacaattgaacaagagaagcaagctggcgaatcgtaatgaggcgagcgcgccaatatgcactgtacattccacgagcattgccttcttattttacttcttttagctgtttaactttgtaagatgcaaagaggttggatcaagtttaaatgactgtgctgcccctttcacatcaaagaatcagaactactgagcaggaaggcctcccctgcctctcccacccatctgatggtctggctagcagagagggaaaagaacttgcatgttggtgaaggaaaaagctgggtgggagatgatgaaatagagaggaaaattcaagatggtcaaagatgtcctgcaggatgtaaaatgcagtttaatcagagtgccatttttttttgttcaaacaattttaattattggaatgcacaatttttttaatatgcaaataaagttttaaaacctga

SEQ ID NO: 581823 - DNA, 780 bp, Homo sapiens
  misc_feature (2)..(2): n is a, c, g, or t
  misc_feature (123)..(123): n is a, c, g, or t
  misc_feature (126)..(127): n is a, c, g, or t
  misc_feature (154)..(154): n is a, c, g, or t
  misc_feature (232)..(232): n is a, c, g, or t
  misc_feature (267)..(267): n is a, c, g, or t
  misc_feature (307)..(307): n is a, c, g, or t
  misc_feature (341)..(341): n is a, c, g, or t
  misc_feature (345)..(345): n is a, c, g, or t
  misc_feature (356)..(356): n is a, c, g, or t
  misc_feature (376)..(376): n is a, c, g, or t
  misc_feature (399)..(399): n is a, c, g, or t
  misc_feature (411)..(411): n is a, c, g, or t
  misc_feature (429)..(429): n is a, c, g, or t
  misc_feature (440)..(440): n is a, c, g, or t
  misc_feature (445)..(445): n is a, c, g, or t
  misc_feature (450)..(450): n is a, c, g, or t
  misc_feature (457)..(457): n is a, c, g, or t
  misc_feature (469)..(469): n is a, c, g, or t
  misc_feature (504)..(504): n is a, c, g, or t
  misc_feature (507)..(507): n is a, c, g, or t
tngattgcgagaaatcctccagaatttgcctttgtggaattcgaagatcctagagatgcagaagatgcagtacgagaactggatggaaaggtgatttgtggctcccgagtgagggttgaactntcnncaggcatgcctcggagatcacgttttnatagaccacctgcccgacgtccctttgatccaaatgatagatgctatgagtgtggcgaaaagggacattatgcttatnattgtcatcgtgacagccggcgaagaagaagcagntcacggtctagatcacattctcgatccagaggaaggcganattcttgtcacgcagcaggagcaggggacgaagncagntcagctctccncgacgatcagatctatctcnctcgtagatcaagatcagccacncagagatctagntctggttctataaaggancgaggtaccancccgncgggncagatcnagatccggtctntttcacgaccagagcgtcgttccccatcaggaagnccncgcagaagtgcaagtcctgaaagaatggactgaagctctcaagttcaccctttagggaaaagttattttgtttacattattataagggatttgtgatgtctgtaaagtgtaacctaggaaagataattcaaccatctaatcaaaatggatctggattactatgtaaattcacagcagtaagataatataaattttgttgaatgtattaacatcatatggtctgaaaatgtgggtttttatttggcacatttaaataaaatgtttctaactagc

SEQ ID NO: 581824 - DNA, 427 bp, Homo sapiens
  misc_feature (23)..(23): n is a, c, g, or t
  misc_feature (137)..(137): n is a, c, g, or t
  misc_feature (251)..(251): n is a, c, g, or t
caaagattgttaggcaggcaagngctttccccgccagggttagagagattatctagcagtgcaaaaagaccatggactaaaaaggaatgagataatgccccttgcagagacatggatgaagctggaagccatcatcntcagcaaactaacacaggaacagaaaaccaagtaccgcatgttctcattcataagtgggaactgaactatgagaacatagggacacagagagagtaacagcacacatcggggcntattggggtgggggtgagggtgaggggaggggaagtatcaggacaaatagctaatgcatgcagggcttaacactagggtgacgagttgataggtgaagcaaaccaccatgccacacatacagttatgtaacaaacctgtaagttctgcacatgtatcccggaatttaaagtaaaat

SEQ ID NO: 581825 - DNA, 568 bp, Homo sapiens
  misc_feature (12)..(12): n is a, c, g, or t
  misc_feature (117)..(117): n is a, c, g, or t
  misc_feature (122)..(122): n is a, c, g, or t
  misc_feature (130)..(130): n is a, c, g, or t
  misc_feature (133)..(133): n is a, c, g, or t
  misc_feature (135)..(135): n is a, c, g, or t
  misc_feature (137)..(138): n is a, c, g, or t
  misc_feature (149)..(149): n is a, c, g, or t
  misc_feature (166)..(166): n is a, c, g, or t
  misc_feature (188)..(188): n is a, c, g, or t
  misc_feature (196)..(196): n is a, c, g, or t
  misc_feature (205)..(205): n is a, c, g, or t
  misc_feature (215)..(217): n is a, c, g, or t
  misc_feature (229)..(230): n is a, c, g, or t
  misc_feature (233)..(233): n is a, c, g, or t
  misc_feature (237)..(237): n is a, c, g, or t
  misc_feature (240)..(240): n is a, c, g, or t
  misc_feature (259)..(259): n is a, c, g, or t
  misc_feature (292)..(292): n is a, c, g, or t
  misc_feature (295)..(295): n is a, c, g, or t
ccccctcccgcncccccccccccccccccccccccccccccccccccccccccccccgccccgggccccccccccccccccccccccccccccccccccccgccccctccccccccntaganccagaccngcntncnnccgggggtctngggcgggggcggggagnggggcggggggtggcccacccncaacgagnacaagaccnagaccccggnnnatttcccgaccnngangccnccnaccaaagccccgacccccncccccaaaaagaagtcgttccccatcaggaagnccncgcagaagtgcaagtcctgaaagaatggactgaagctctcaagttcaccctttagggaaaagttattttgtttacattattataagggatttgtgatgtctgtaaagtgtaacctaggaaagataattcaaccatctaatcaaaatggatctggattactatgtaaattcacagcagtaagataatataaattttgttgaatgtattaacatcatatggtctgaaaatgtgggtttttatttggcacatttaaataaaatgtttctaactagc

SEQ ID NO: 581826 - DNA, 313 bp, Homo sapiens
ctaagtatcagtattgtgtctcaattctctaacaactattcttttaatgacagcttaaatcttcatcctaatagtgatttttaattaaaatataactataatgaactaacataataaatatttctttgaatcaggtagctagcacctttgacgttttccaaaataagcacgtctccccagtgtgttcattgtgatgtggtgtaaaagatccacatttaacatacttgaactacttggacttagatgacatcactctgaagtatattaccaaaatgttaattgagataagctgaaaatagttttagtttactca

SEQ ID NO: 581827 - DNA, 414 bp, Homo sapiens
aatatttacgagggagttacaacttttttttgctaagcctttgaatttcttccaatgaagaagttaccataatgtgacccagtgtctcaacgaaattagtaggatctgaaatagcagaggagagaccagttctctttaagcggtgtgttgactttacaccagctttacatttgattctatatgccctgaattggggggcatcttcaatgtatttggaatttttaaatctggcaggccagaaatccaatggcccatttaaggaaaattgtaacctagaaaactgaaattcgtataaaccataatcaagccaaataacagagatcttctgattcaacctttaaaagatatccctatcttatctatctatctatcatctatccagtggtaagaaatttcttcactggagtaaataaa

SEQ ID NO: 581828 - DNA, 85 bp, Homo sapiens
tagaaataatcacgagggttgggtttgctttggaaaatgcctgtctctctacttgaatgataaagaattaaattagaaaaaaaaa

SEQ ID NO: 581829 - DNA, 341 bp, Homo sapiens
cgttctgagatggagtctagcccttgtcgcccaggctggagtgcaatggtgcgatctcagctcactgcaacctccacctcccaggttcaagcgattctcctgcttcagcctcccaagtagctggaattacaggcatgtgcaccatgccggctaatttttgtatttttagtagagacaggttttcaccatgttggccaggatggtcccaatctcttgaccttgtgatccgcccgccttggctcccaaagtgctggattacaggtgtgagccaccgaggcaagcctgcaagaatgtcttttttatcatgggggggctattctctctacgactacctcagggcc

SEQ ID NO: 581830 - DNA, 343 bp, Homo sapiens
  misc_feature (54)..(54): n is a, c, g, or t
ttcccagcccccacggcagtgtcccaggggcaggatcccgtgattcccgggaanccaaatgggcgtgtgttacagtgtgctcttttagccttaccatcagctgacggcttaagtgttaaccagctcaatagaccctctgcctttttgcaagcgcagagggtcagtgtgacagtttctgtatctcagctcttgtctcacctcccagaagaatcaggtcacacatggacttgaaggatgcctggtgtctggagtttatacgggtacaggatagggggtcatggagggccaaaagacgggcctgtctaattgcaggaaaacaaactcagggctcccactgattcta

SEQ ID NO: 581831 - DNA, 1232 bp, Homo sapiens
  misc_feature (575)..(575): n is a, c, g, or t
  misc_feature (685)..(685): n is a, c, g, or t
tggtggctcacgcctataatcccagcactttgggaggccaagtctgacagattgcttgagtccaggaattccaagaccagcctgggcaacatggtgaaaccccatctctactaaaacacaaaagaaattagctgggagtggtggatcgcgccactgtactccagcactccagcctgggtgacagagcaagactccatctctccaaaaaataaataaataaataaataaataaataaaatttaaaaacatacaaacaaacaaaaaaaacagctacttaagaggctgaggtggggggatcacctgagactggaaggtagaggctgcagtgagccaagattgcaccactgcactacagcctgggtgaccaagtgagaccctgtctcaaaaaatgcatagcatcagccatatcccagtacagacattatgataaactacggggcttttcttttcttgagacaggctctccctctgtggcccagactggagtgcaatggtgcgatgtgggctcactgcaatctccaccttccagggtcaagcgatttcccaccccagccttctcagtagctgggactaanggcacaagccatcacaggccaacttaattttggatttttagtagagactggtttcaccaatgtggtcaggatggtccaaactcctgacccaagtgatccgcccaactggnctcccacagaggctgggatgcagtgttgaaccgcgaacccgttgggcgtttcttttcttggtggtttttcttcggttaagaggtgcatctgctacaataaacaggtttttaaaatctgtttccaataaacttctgggagaccctaacttcacccatttaatctccttggctctgaaaaggattttatcttcaactctcggtttttttaagacgggatcaatttttcatacatccacctggttatacttctcacactcttcactgaacatgtgctctttgtttaataccgcttcaacatacctacaactctttctcccggagggcccttctgtactggcctctttgcgtctcatacatctcctcctgatttctacatataattgtttcataatactcgtgtggcttgcctccagaacctttctcatctctcttaacataatgttactttttctctcaacttctatatcacagcctctcacgtcgtaactgtctcttgctcatctttgtggtcctccttgtccattatcggtctcctgttctgtctccg

SEQ ID NO: 581832 - DNA, 769 bp, Homo sapiens
  misc_feature (295)..(295): n is a, c, g, or t
  misc_feature (305)..(305): n is a, c, g, or t
  misc_feature (320)..(320): n is a, c, g, or t
  misc_feature (348)..(348): n is a, c, g, or t
  misc_feature (363)..(363): n is a, c, g, or t
  misc_feature (366)..(366): n is a, c, g, or t
  misc_feature (415)..(416): n is a, c, g, or t
  misc_feature (454)..(454): n is a, c, g, or t
  misc_feature (480)..(480): n is a, c, g, or t
  misc_feature (485)..(485): n is a, c, g, or t
  misc_feature (494)..(494): n is a, c, g, or t
  misc_feature (505)..(506): n is a, c, g, or t
  misc_feature (525)..(526): n is a, c, g, or t
  misc_feature (556)..(556): n is a, c, g, or t
  misc_feature (568)..(568): n is a, c, g, or t
  misc_feature (593)..(593): n is a, c, g, or t
agcggggatgggaactggaaatctgagctcacagtgacgtggcccttaggagacccagagccaatgcgtggattagtccctcatcctagttgcagtctggtagttgtcgctggccgtgtgacggctcgctgttgccctgaaggcaggcgagccagctgcccaggaaaggtggaaagtggtagaagctgacccctgagccctggcaggtctttaagtgcgtttgtgcagccgatttcaaggctaagagagaaagactgcctctgatccctgaaggaagaaaaaaaaaaaaaaaacnggaaaaaaantcaacattggaaaantgtccccaaggaaaacaaagttgtgganaaggccccagtgcanaantgaagcccccgtttaggagggtggtgaataccaggagccgggaggaaanngttaagggggttggggctccaccttgccccggggtttngggagaggatgtgcccaatagggctngtcgnataacatgnatatgatagannggagatggagatgatatgnnacgggttcagggaggagatgagagagctanggaggaaaattngggaacttcagtggaggtacagtcngcgcattcttataggggaccctcctcaccatgatcatcatgatgagtttggccttatgccttgaatctggaggttaactactcataaaatcccgggtttctaaatttcgcattttttccgggtgtacctttaatgtgaacccttgtggcattcttctgcaattttctgatgggaga

SEQ ID NO: 581833 - DNA, 879 bp, Homo sapiens
ggcggactgcggcgcacttccgtagaggtggacatggcgtgcggattcgccgcgctatagttgcaagctttccagaagtgtgaatcttccaccagaaaaacttgatcacatcaatatctgcagttccaatttcccaaaaagaagaagtagctgatttacagcttctgtggattcttttatgggaaaaagacaatgaccattcaagaccagatattcacgttcaggccaagagatagcagagaagctaagatgtgatccagtgttgagtgacaatccagtactggtcaacaggcctgtaaatttcaaaaataaacagagagctcttaacaaagacagtgctacaacacgtacttgaagatgggtcaacacatctggcattacacagagtgaacttttctctggaacttccccagaagacgatgtggttgaacttcagttcacctatgttgccaaaaaattccatgtgggacatttgcgttctaccatcatagggaaaattttatagcaaatctcaaaagaagcttaggacatcaagtaataagaataaattaccttggcgatgcggcatgcagtttgggtcttctgggaacctgttccagatgtttgctataagaaaaaagtgagttcaaatcctctaaagcatctcttagacgtttatgtacaagttaataaagaagaggcgatgataaagtgaggcaaagcagcaaggagtcttcaagattggactgggatgtggcacacttactgggaaattcggattgccttaaaggattcggttaacggtggggttttgcgaaccggaacatttcgggaatcagcgtaatgggaggaggctagaaaaagagggtggtctggggccccattgaagagagagtgtac

SEQ ID NO: 581834 - DNA, 245 bp, Homo sapiens
  misc_feature (36)..(36): n is a, c, g, or t
  misc_feature (52)..(52): n is a, c, g, or t
  misc_feature (74)..(74): n is a, c, g, or t
  misc_feature (90)..(90): n is a, c, g, or t
  misc_feature (95)..(97): n is a, c, g, or t
  misc_feature (99)..(100): n is a, c, g, or t
  misc_feature (104)..(104): n is a, c, g, or t
  misc_feature (130)..(130): n is a, c, g, or t
  misc_feature (143)..(143): n is a, c, g, or t
  misc_feature (190)..(190): n is a, c, g, or t
  misc_feature (198)..(198): n is a, c, g, or t
  misc_feature (202)..(202): n is a, c, g, or t
  misc_feature (204)..(204): n is a, c, g, or t
  misc_feature (243)..(243): n is a, c, g, or t
gggaggtggagcttttgagtgagcggagattgcgcnactgcactccaggccngggcaacagagtgagactctgntctcaaaaaaaaaatnaggcnnngnngtgnatggcgccacacctgttaatcccagnctacttgggagtnctgtaggcaggagaatcgcttgaactcgggaggcggaggttgcagtnagccaggntcgntncactgcactccagcctgggtgacagagtgagactccatntc

SEQ ID NO: 581835 - DNA, 329 bp, Homo sapiens
  misc_feature (61)..(61): n is a, c, g, or t
  misc_feature (64)..(64): n is a, c, g, or t
  misc_feature (167)..(167): n is a, c, g, or t
  misc_feature (175)..(175): n is a, c, g, or t
  misc_feature (178)..(178): n is a, c, g, or t
  misc_feature (199)..(199): n is a, c, g, or t
  misc_feature (205)..(205): n is a, c, g, or t
  misc_feature (279)..(279): n is a, c, g, or t
  misc_feature (292)..(292): n is a, c, g, or t
  misc_feature (312)..(312): n is a, c, g, or t
  misc_feature (328)..(328): n is a, c, g, or t
ggagaagatgctgctgtccctggtgctccacacgtactccatgcgctacctgctgcccagngtngtgctcctgggcacggtgcctacctacgtgttggcctggggggtctggaggatgctctccgactttctgcccgaccgattataccaagcgctggacgaccggntgtactgngtntaccagagcatggtgctcttnttcttngagaattacaccggggtccagatattgctatatggagatttgccaaaaaataaagaaaatataatatatttagnaaataattaaagnacggttgaatggattgttgntgacatcttggccatna

SEQ ID NO: 581836 - DNA, 87 bp, Homo sapiens
ctgggagcaaacacgtttatgagtgtgtcggaatcccgtgcttaaaaaacgctcctaaattatttttctagtcttaaaaaaaaaaaa

SEQ ID NO: 581837 - DNA, 306 bp, Homo sapiens
  misc_feature (5)..(5): n is a, c, g, or t
ggtantagctcaagtgaagaagtgatgtgggcgggcaccgtgctcacatctgggttccagcactttgggaggccaagttgggcggatcatctgaggtcaggagttcaagaccatgcctggccaacatggtgaagccctgtctctactgaaaatacaaaaattggccaggcatggtggcgcacacctgtggtcccagctgctcgggaggctgaggcgggagaatcgcttgaacccgggaggcggaggttgccgtgggctaggatggcgccattgcactccagcctgggcaagaaaagcgagactccg

SEQ ID NO: 581838 - DNA, 133 bp, Homo sapiens
tacccgttggcgaatttggtgctaataaagcaataaggtttttcaaaagaaattgtaacatctttggaaacactgtctggttctaagttcccgactgcctttatttcccacatggaagttcatgcacgatgga

SEQ ID NO: 581839 - DNA, 244 bp, Homo sapiens
tacaagagcttgaagacagataaaaagaaaatgtcccatctgagggagagagagagaagaatttgaaaaatgaactgagcttcacctcagatctgtgggacaagaccaaaggtttctcatacatgagaactggagtctcagatggagaagaggaggagaatgaggaagaaagaatacttcaatactggctgaaaagtttctgttgtagtgcaaaacataagctgaaacaagcagttcagtaaac

SEQ ID NO: 581840 - DNA, 750 bp, Homo sapiens
ggaactaagtaataggtgcgagaccgggttttatttccgtcatgggccctgggtatggctgtctaaagcatccggcgcagtgatcctgaagctcacgaagggcaagttcccattccactttgtgggggtcgtcgcgtgtgctggaggatgcttaaatggcagaggcaagcccagactccagacggacatgcggataaggccctgcttgcggaagatggaaggcatttacgctgacatcccatgtgcggcgtccggagtccagtgcacacgtgcagtgagctgtaccaggagtggctggaggggatcaactcccccaaggcccgagaggtgctgcataccacgtaccagagccaggagctgtggcacacaacagcctggacatcaagtggtgaagtcagggccagggccttccagcttgctcttgggggccatgagccaaatgagcctctcagtagagggaggggcttgcctgagttggagtattaaagacacttaagagaaaaagcataaaaaactaaaaaacattcgagaggaaatcaaaatgtagaggagtgaggggaaacaaaagagggaaacttgaacaaggggaacaaggtggaaatataggtgtgttcacatgagacacaaggattctgttagtaccaaaagggtggatcaaatattggacgggagaaacccaaatatagagaaggaagactataaatgcggaaaagacaggtataacccgtgattaatgaactgggaaaaggg

SEQ ID NO: 581841 - DNA, 174 bp, Homo sapiens
ccaggcaggacgcagggccaatgaatttacgctgtgaaggtctgtccatgtgcagcgggaagcaacggggcaggggtgaataaaggtctccattcctcaagcaagagagacggacatctggtcctgatgtccccaacactgttcatcagtgtttctcctgggcccactaggatg

SEQ ID NO: 581842 - DNA, 133 bp, Homo sapiens
ccagaacttctcagactgtggcatgccatagcatttgggaaaagtgcaattgaatttctagagaatgcatattagaagtatggagcccctatttagggtttaccatggtaggcaagacatttactttaccttc

SEQ ID NO: 581843 - DNA, 142 bp, Homo sapiens
ctcggcgcagcagtgtggcagcgggactcaacccagaactgagcagaatcggaagagccagacggaggcttaggacgctgtatgcagagctgcgcgggagaacgagcggcttcgggagcgcctgacctgagaccacgctgcg

SEQ ID NO: 581844 - DNA, 580 bp, Homo sapiens
ggatgtaataaccacacaaatagggttataatacattcttcagggaaaaaaatttttggtccatattttctaaaaaaaaacacacacacttccctctttggcaaaagaggttaaatctcccatagttaactcacaaaagaaactcaaataaaaactactgagcatgaggtacagctgatgtctggactgttctggaattacagacgcctccttgaggggaaaatcatttcttataaaatgagatcagtttccaacagtttcatgtcagtagaaaagctcgaattagacttggtcagaatcacttttgcatgaacaagttccaaataactttgtttttcagaagacagcggaaagtcccaaaaatgtgctactttctgagaaagtcatggaaaatgtgggcgtttgaacttagcaataattttaaatctgaggtacgaaaacattttacacaggcatttacacctgtatttctgtgcccaccttatggtcaccggagcttgggccgacctcttttgattcccccttgaaatggagaccaaaggaaacgggcccccgcttgagggggggggtcctttgccgg

SEQ ID NO: 581845 - DNA, 790 bp, Homo sapiens
  misc_feature (71)..(71): n is a, c, g, or t
  misc_feature (95)..(95): n is a, c, g, or t
  misc_feature (100)..(100): n is a, c, g, or t
  misc_feature (109)..(109): n is a, c, g, or t
  misc_feature (116)..(116): n is a, c, g, or t
  misc_feature (122)..(122): n is a, c, g, or t
  misc_feature (270)..(270): n is a, c, g, or t
actggggatgagatgggagggtgctattcgggatgaaactgttctgcctcagatcatcaggcattggattntcataaggagtgcacaaccctganccctntcatgcacngttcacnataggnttcacactcttgtgagaatctaatgctgtagctgatctgacaggaggcagagctcaggtggtaatgcttgctcactcactgctcgcctcctgctgtgtggcctggttcctagcaggccatggagtggtactggtccatggcccagggnttggggacccctgccttacaccacatggcgtgctccataatacacaaaccatcctaataacatagactgactctatacttacttgcctcaataacattaagacacaccttagaccacataaaaatgttagataacatacagaaaaaaacacataaataacagacatgccctataacacttacactcgcctcatagcactcagtctcctgtgacagctggatttacccccaaaatacctagacctaccccaaagcacccagacatgccccacataaccagaaacatcacatatcactcaaacaccttccaacaatcagacttgcctggcaacccagactgtcctacaatacacagtaatggcccacagccaagagacttctcacaacttacagactggccacaaaaagcatctttttgctttcacaacatcaagactttccacacagcacatagaaacaatggacattcattcagtcttacagcctagaaacctgtacacgcacaatgctgctgaagggac

SEQ ID NO: 581846 - DNA, 330 bp, Homo sapiens
  misc_feature (297)..(297): n is a, c, g, or t
cccgcctcagcctccggagtagctgggattacccccaaaatacctagacctaccccaaagcacccagacatgccccacataaccagaaacatcacatatcactcaaacaccttccaacaatcagacttgcctggcaacccagactgtcctacaatacacagtaatggcccacagccaagagacttctcacaacttacagactggccacaaaaagcatctttttgctttcacaacatcaagactttccacacagcacatagaaacaatggacagagttcagaccccagagtgtagtgntatgcctcatacatccggtcgcctatcgtcgca

SEQ ID NO: 581847 - DNA, 225 bp, Homo sapiens
ctgttaactggatgtgccacgcggagcagaacggacgagtcactctttgactccttggaatcaagtatggacactggctcacagcaaacgtgcttgggaggtggggtagcaacctgaccagctcgggcctgaacaccattgaacggtattcggaagggcttggcacaggatatgacgacgtgtgcatagggcatggcgctgggatgccagaaatggcgcaacatg

SEQ ID NO: 581848 - DNA, 117 bp, Homo sapiens
ggtttttttcccccccccccccccccaaaaggggaaaaagggtttttttttcccccccccctttttttttcccccccctttttttgcccggggccatttaaaaaggggggcccggga

SEQ ID NO: 581849 - DNA, 330 bp, Homo sapiens
  misc_feature (5)..(5): n is a, c, g, or t
gcaangacctcctctcacaaaaatcatagatatgtagagagatagataccataatcagcgtcgtgactatacctacgaccctgcagtcccattcagaagtcgctcgtattagggcccggagtgatggatcaccgtaatggacttagtcaactcgcggtgagccatctctagccatctgtctctgccaatgtggacccttctagatgaccattgaggctgtgtgctcctaaagatgtgcgagtcatcacaacgtgactcaggggtgagaaatcgtgtgcgtatgtacggagagacaaaggtgctgagcctgatggctcatcggctttgact

SEQ ID NO: 581850 - DNA, 128 bp, Homo sapiens
aactgctctggatgcgcggtaacaagagtaacaataaaccagacagtcagaacttactgtgcactgcctctgtgccaggtgctttgaaacctaaatgcgctctccactccgcagcctgacgtaacatg

SEQ ID NO: 581851 - DNA, 1270 bp, Homo sapiens
ccacgcgtccggtttacaaccaatgttttacaaaaaggaaaggggtaaagaaaggggcaaagccagaatcctattgacgaaacaaatggcaaaacaatgggataaatcttggcatgtccgtgcccaccgtcaagagcgtgccaccaagtatatgtgccatctaagtatcagcacttttataaacaatggccctctcatatcttcctctactcattagttctcttcatagtttttaggttccaagaattccccgttttattaaccacacttactatttgctcaaattttccagtatgaaaaattctatagaagaaaatgtgtgccggaaagattatttggtatatgaagcttaattcgcattcttacgcattaaacccacggtaaattacacgcgagagagatttggacgtagtgagtgatcgggaggtggtaaataatagtcttaagattagaaaatgtcttagagggaccacattattagaagcgttcatcttggagatccattgtatcaggtgtacacacttgtggcttgcttaaacacttgttgaacatctattactgtcgcggagcacaggtgaaaatcccctgatgctgagtacaataccgcgggggggaagacaaactgtgggggagatcaacacataacctccaagtgaacagaaagccaagggtttacaactcccacagtttggtagaactaacacacgatggccgagcacaaacatcaacaacaatctataaacaggctactacaattcggtgcaccaacaaccacgcagggaagaacgccaccctgcaatacccctagacaccaagccggaccacacgcaacgagcacggcacaccaggtacgcgcacggaccccacctcaagaaagatcggaccatatctacaacgacagcacaaaaaaacaaaaaaacagaaacgcggacaacacaactcgacgaaaccaccgcccccaaagagagatccccaaaacaatgaggcgccaccacgcgcaaaacacgtgcagcccaacacaaaccgtgccgaacaaaaaaggcgcacccccaaaaatactagcgagcggacgtcatcaaaagcgacacggcgctctacagcaccgtggtctaaaacgaccgcacacccacttgcaactggaaaaaacataatatacagagagagacacccctgcagagacagagaaagcaggagacatccatagggaggagaacacaaattggagacaaacaccaccacacgcagcacagacgaaaaacaatgacaagct

SEQ ID NO: 581852 - DNA, 1080 bp, Homo sapiens
aaaaaagagaatagtgtagagacccagtgccttggattggggaaaacaggaatgtgtttggaaagtgggaatgttacagagatccagacaccaaggtgggcagcacagcatgcatccaaggtggcaagtaagcacacagctcacagacataccccaagccatctagggggagcagcaacccagaacaccaattacagtccatgcaaattcaccagtggggtggggcaaatcaagggccatgagcacagcagcatgcacagcatgcttcacaggcacacaacccagacatagcttcacccaaggcacagcacagcctccagtggcagcatcacagcagcagcacaggcatttgtggtgtgttgcatcccagtgcactccattgtgttggtgtgcacaaacctggatagacaccacaagtcagccacaagttgcacaatatattcatcagcagcacatttacgcagcatcactaaatgtattgcggcagcacatccaagacacacctgggcatttgggcagagctgcacaccatcaggaagccagcacacattccatggccatcacagacaagcacagcagacaggcaagccagaagcacaaggcatcggccactgctgcaggccatggccaccacaatcatccctagggccaaccctgcagaggctgcagcatccccaggcacaccaaattcaacaacaggggtggcaaacctagcataggtagggcaagaaccttcacagcacgccacattgcacgccccaactctcagccagccacagcagtgcaataggtccaccatggaaccattctccaggttccgactcagcgcgccaggccagccagcaagggtctcacacagagttggcaagggattgaaattaacacaggaaacagaccccccaggggacaaccctacggcgagacagcggacgaccaacctcccacgagggctcccaggatacaagcggaacacactaggcaactctacagccggggacaccacgactcccaccattaccccaccacggccgggcacacgcacatccacgggacacccactcaacacagcaggggccgaac

SEQ ID NO: 581853 - DNA, 574 bp, Homo sapiens
atgcattgtcttccccatgatgttacctttcattggatggtgactccctgcacatacccccaaaggtgtccatgtcctaatcttggaacctgtggatatgttacattatgtggcaaaggagattttgcatgtgtgattaagggaaagatcttgagatggggagattctcctgcatgacccaggtaggcccaatgtaattacaaggatctttaaaagaggaaggtaggaggtcacagtcagggagagagagcaggattctggctttgaaggtggaggaaggggccacaagccaagaaatgcaggtggcctctagagctgggaaaggcaatgggtggattcccccttggagcctccagaaggaacacagccctgctgactccttggtcttagcccagcgagacccgttttggaaatcagacctgcataattgcaagatggtaaatttgtgttgttgtaagccactaggtttgtggggccatcctggcctcagtgatgcttatttgggagtgtgtttttttcctattactgctctaatcttttaaattagatctgaagagatgctctaatttttttt

SEQ ID NO: 581854 - DNA, 194 bp, Homo sapiens
atccttctttttaaggactgaatgatataccatatgtgtatatatgccacattttctattatctagttcatccactgattgaaactgaggtagattccataactatgactagttgcaacataatgctagcaataaaacatggagattgtagcatatctaccttggacatcactaatttacagataccttatgga

SEQ ID NO: 581855 - DNA, 946 bp, Homo sapiens
  misc_feature (44)..(44): n is a, c, g, or t
atccctgaagctgacagcattcgggcgagatgtctcgctccgtngccttagctgtgctcgcgcaactctctctttctggcctggaggctatcccaggtactccaaagattcaggttctactcacgtcatccagcagcagaatggaaagtccaaatttcctgaatgcgctatgtgtctgggtttcatcccatcccgactattgcatgttgacttcactgcaccgacatgcagcagagactcggaccaccaggtggcgcatccagacttgtccttccagcaaaggactgtccttctatctctggtacttacacttgatattcacccccaattgaacaacacgatgagtcatgcctggccgttgtgaacccatgtgactttgtgtcaacagcccaaagaatagtacaaggtgggatcgagaaatgtaggcagcatcatggaggttgtgaaagatgccgattttggattgggatggaatccaaattctgtgtgtgggtttaacggttggatatgctgatcacactttacattttatgccacaaaatgtcagggtcataataatgtaaccattgacatgaatcttcttaataattctacttggagtgtggtctccatgttgatgtatcttgagcaggtggctccaccagttagctctagggagggtggcacttagaggtggcagcagagacttctctcttccaatcacattttggtcagattgacttttcattcttgatcaaagtgtaagataggtagggggctagtcacttcattcaatacttgctaaatgtgggacattaacatcatggcggtcatggactggtcatgtgacttgcatcaggccttaattacatgaagaggggggacggtttggcacgttacaatggaaaaaaaatggggcgcgaaaaatgcgggaaaagtcaagaggacacgagacgtcataatatat

SEQ ID NO: 581856 - DNA, 271 bp, Homo sapiens
  misc_feature (261)..(261): n is a, c, g, or t
gagtacagtctacatggaagtcttttttggctttttgttttggtttgtttttttgagacgagatctggccctgttgctcaggctggagtgcagtggcgcagtcatagctcactgcagcctcaaactcctgacttcaaggcatcctcccacctcagcttctcaaagttctgggattacaggcatgagctaccatgctcacgtctggaagttcttttttgaaaaagcacaaggtctctacttagatttctatccacacagccnatttagtgta

SEQ ID NO: 581857 - DNA, 511 bp, Homo sapiens
  misc_feature (20)..(20): n is a, c, g, or t
  misc_feature (136)..(136): n is a, c, g, or t
cggagccccacgtggtgganggagattctgcggggagcttgtcagagctccagcagctgcctctgggggcccagcctgctgtgtccccagtggagtgaagtagctgtgagaaaggcagttctggcaaatttcaggngaaattaaaaggccgttgactgtaggcgagcacattcactttagatgtgttccagaaggggactgctttattcgtcggtctgcctattcacacagccatgcgttccaagtaaggaaaaataccaaacatgttgattttttagcttattcaaatatttatattttctctagttacttttctgaagtattttggctcatttattttctgataaacagctgctgcacagatttgctttggggtggggggcagggtaaggctggggtgcactttctaaatagatctctttcttccaaggtgattgacaaacggcattccttacagatcagtacacaccaaagtagagacaattgtattccagtgattggcactttcttc

SEQ ID NO: 581858 - DNA, 197 bp, Homo sapiens
ctagagtatcccacggtcgcgcagagagaatgctggcggtcctcacctggctagaggagataccgaagcctactgtggtactgaagactttctgggttctttccattctgcataatccagagtagggtcctaaggaggaaggtgacttcttctcctgtttgtcgttgacctggaactgttttggcactctggcggta

SEQ ID NO: 581859 - DNA, 345 bp, Homo sapiens
cattgaatacacctggttcttaagagtccgataggttggaatacacataatgtccggaccaacccattccagcctcaaagacagccgattcttttttaccatccctttcagtggtacacatcccagtggccagtagttgcaaatctcagaatgttatattcacactgaatacaaatgtcttaaatgtgtatgtacttcagaaggttcttttctttggcaaatccaatgatatattctgtggctcttgctgtgtgtgcataaagttgggaaagtcctcgggaaatggaaagtctgggacacacatcatctctgtgaaagagttgaaaaagtctgatgtgtaaacgc

SEQ ID NO: 581860 - DNA, 1065 bp, Homo sapiens
ggagaagatggaggacggcaaggttgaaggtcacccttcatgttagcccacattacttccccctcctgtaagaaatgccatcggtgccgtgagcaccaggaggaagagtggaggaggccgttcagactgtccgtgctgtcaaggcgaggaggaatcgtgcggctagtccgtcaagggagctggtgacgctgcgggtcgccagaagtccgcgcctggctgggggttccacacggcacgcgcgactatggtcctggcatgatggaacatggccaaggagcagacgagagcggggccactcttcctaggatgagcgtggcgctggaagcgtgtaagcccctgggggagcaggagcgtgcggtgattctggagctgaagcgtgcggagtgcgagcgccggggccgtgcccttcgacgggcctgcagtccggtgcctgggacatgcgctactacagtgaaccaggtggaggagacgcgctactgcgtggaccagaacctggtcaaggagtacttccccgtgcaggtggtcacgcacgggctgctgggcatctaccaggagctcctggggctggccttccaccacgaggagggcgccagtgcctggcatgaggacgtgcggctctacaccgagagggacgcggcctcgggggaggtggtcggcaagttctacctggacctgtacccgcgggacaggaaagtacgggcacagcggactggatttggctgcagcccggctgactgcggcaggatgggagccaggcagatcggcatcgcggacatggtggcaaatttcacaagcccaagcgaggcgcctcgctggtggcagatgagaggtggagactaattcctgagttgggcacgtgatgaaccaggtcttggtcacggggggaggttcgcaagtttagaggggagaccagtaggagcggagcatgtagagaggcaggaaaatgctgagacacgtgggtggagactaagacatgtatgaagatgatgaaatcacgcaagagaaagaccagagacttggaagatatatagggagaggaacaaaggtataataagagaactacag

SEQ ID NO: 581861 - DNA, 759 bp, Homo sapiens
  misc_feature (759)..(759): n is a, c, g, or t
cctggagtctgcgaaggcgggaccggttccccggccacagtgggggtgtgcaaacccgagagaactgggttgcaaattcgtgaagaatcagcatcatgttggcagctgagtattggagccaggagcctgccatgaggtttgagaacagagtgctgttttagagctggcagcagcatctcagcccaagagaaggttatattcccagaggatgtcagtcccaaggaccagtagctgccatcagttggattctgaaaactaactggcatcaacactgggtgtagaaacatgcttgccttatgtatcagaggacatgctcagcagatccaagagatatattggcaactttttctagaaaaggcacatgggtatcattcattacatttttgagttttttgggtttgatatttatttttttggaaacagtctggcggtatggcccaggtgggaggggggggggcccaatcacagtcatggatcctcaataacccgaggccttaagaatccttcccaccttggtagttgggactacaggctcacagcaccacctgggctggaaaattttttttgggtggacgcacggattctctatgtggcccagggggtctcaggctcgtgggctcagatgggtccttctggcctcagttccaagaggacaggccatttgtactttgtgtcctttgccataattgccaacaagaggtctatacctttaatgattgcttcataaattggatgggggggacacgtcttaaacggggn

SEQ ID NO: 581862 - DNA, 166 bp, Homo sapiens
gcccaaacccacggtcctacactaccagacctgcattaaaaatttcggttggggcgacctcggtaacgataacccacaccgtccgagctcgtacatgcgaagacttcaccagtcaacagcgaactactatactcgacttgatccaatacacttgaccaacagcaac

SEQ ID NO: 581863 - DNA, 866 bp, Homo sapiens
  misc_feature (3)..(3): n is a, c, g, or t
  misc_feature (65)..(66): n is a, c, g, or t
  misc_feature (69)..(69): n is a, c, g, or t
  misc_feature (74)..(74): n is a, c, g, or t
  misc_feature (96)..(96): n is a, c, g, or t
  misc_feature (116)..(116): n is a, c, g, or t
  misc_feature (122)..(122): n is a, c, g, or t
  misc_feature (149)..(149): n is a, c, g, or t
  misc_feature (158)..(158): n is a, c, g, or t
  misc_feature (170)..(170): n is a, c, g, or t
  misc_feature (175)..(175): n is a, c, g, or t
  misc_feature (208)..(208): n is a, c, g, or t
  misc_feature (226)..(226): n is a, c, g, or t
  misc_feature (232)..(232): n is a, c, g, or t
  misc_feature (287)..(287): n is a, c, g, or t
  misc_feature (296)..(296): n is a, c, g, or t
  misc_feature (298)..(298): n is a, c, g, or t
  misc_feature (364)..(364): n is a, c, g, or t
  misc_feature (375)..(375): n is a, c, g, or t
  misc_feature (381)..(381): n is a, c, g, or t
  misc_feature (422)..(422): n is a, c, g, or t
  misc_feature (429)..(430): n is a, c, g, or t
  misc_feature (434)..(434): n is a, c, g, or t
  misc_feature (450)..(450): n is a, c, g, or t
  misc_feature (452)..(452): n is a, c, g, or t
  misc_feature (488)..(488): n is a, c, g, or t
  misc_feature (547)..(547): n is a, c, g, or t
  misc_feature (551)..(551): n is a, c, g, or t
  misc_feature (573)..(573): n is a, c, g, or t
  misc_feature (575)..(575): n is a, c, g, or t
  misc_feature (628)..(628): n is a, c, g, or t
  misc_feature (669)..(669): n is a, c, g, or t
  misc_feature (688)..(688): n is a, c, g, or t
  misc_feature (779)..(779): n is a, c, g, or t
  misc_feature (847)..(847): n is a, c, g, or t
aangtgctgggtgctaggtccaggtacaaaacgggaaaggcagagaggatgagcaggaaaaaaanncanggatntcgccccaacccatcacccacncctccggccatactgcccancagcancttccccagcagctccagcgtggccanaaagctgtngtgtgtggcctncaaanccctgggggccagctggctgcagcgcattcatncccagtgaaagtgaactntggtgnaccgggcctcccaaaaatgctgcaaacatagctcagcaaggctgaccctctcaanattgtgcancnctccatgctggcccccagggtgtccaggtggaagaccaaggcagtctgacaggctaggcccccgangcggaacgcanaccganctcaacagaggcagcatttccagttgcttgtgccagcaagntcccacnnagtngaggagccagcgatgnancagaccacagcacccacaccattccacagtcccaantcgggagcagaaacgccgtggtccagcaggatattatgaaacaggctgctgtgcacccntgcntacccagccttgtaggtgagtnanaaatgcctgccgtccacacgggtccccggcacggctagcacgtcccgcagaangtgcgcggtgtggggacgctgctcggaagggggctgctgtnggagccgccgcagggctgngtgcagccaggccagggccgcggccagccagtaggtggcagccaggagcagaaagagttgcggccacgagaaggtgggcagcagcgccacngcgcgcccccagctagcgcggcccccagcttgtacgcgaccacctgcacggtattgcccggcccagtncggccggctcagcagctga

SEQ ID NO: 581864 - DNA, 356 bp, Homo sapiens
  misc_feature (356)..(356): n is a, c, g, or t
tgcgccagagcgtggagtgcgacatcaacggctgggcggtgctggatgagctcactctgtctaagactgactggagaatgagatcgaggagcctgaaatgaagagctagctaacatgaaggaggaacaggaggagggatgagggattaggcaccagggggcggccaggtcacgtgggattgtgcaccccaggttggctggaccgggctggagataagggcgtaagccggaaaggaaccgggtgtggatggccccgagtggcgcggggttacacgggtaccacaaagaagtgcgcgcccggatagccacaaggagggggatagtcaaagagagaggcgaagagttcccgcctcgtgn

SEQ ID NO: 581865 - DNA, 222 bp, Homo sapiens
cccttggggcaaaaggtttttttgaacttaaaaccttattccccccattggatggaggccaaataaaaggccccctagttttcttaatccccttccctggccgggttgggcaggcccgggggtgagccccctccaacccaccccccgctttcctcccggcttcaaaattttatggtaatttttttgggtttttcccggtttttaaaaaggggttggggggga

SEQ ID NO: 581866 - DNA, 672 bp, Homo sapiens
ggccttagaaaccggccccggatcgcgagccggagccggagccggggccggccgggctgctgaggcccgagcggcaggagcgcagcgcggagcgctgagccaggcgcccagtcgcgagaagctgccgccgcctctgcccgcccggcgccgcagccccgggcggtccatggggcgggcacgggtcgctgcaggcgccggcagccctggagggcagccgcttaggcgctgcgctcttgtccccgcaggtcgcagccaggcggggggcgcgcccagcccggaccctggagcgcccgcgggtccccactccatggacgccttcaaggggggcatgagcctggagcggtgccggaggggctccggcgcgccgcagcacccatgacatggggccgcttccacctggccgggccgcgaccccggaagccgtcgaagaatccgccagcgagtcgtcgtgacaccggagctgccagagaaggagcgcggcggggaacctcaacaacatcaacaaactcaccgggtcctcgctcaactcggccagcccaggattcgggcacccaggtggagccggaccggccccggcgcgccgtgattagagccctcggtggcacgcgccccgagccctatatcaggccacggtcgcgactgggggtcgtgtgggcctgaggaaggtggggc

SEQ ID NO: 581867 - DNA, 121 bp, Homo sapiens
acacctctatccctgtgtctacgaatagcttagtctttacatacattaggggaattttttcaaaagtctgtaatgttggacaacagatatattacttgctattgaaacttctaaaactagg

SEQ ID NO: 581868 - DNA, 212 bp, Homo sapiens
ggtacgtacggatgtgggggctccctgggggtgaggggggctgctgcagaccttctgtagccctgagtcttcgtgggtggtcatggctctccagccccatgcctggaaacactgcccttgttatcagaaggagatgctctgccctttcctttgagatggagtcctgtcaccctagagtcgggaagttgctattcagcaaggtctagacctga

SEQ ID NO: 581869 - DNA, 614 bp, Homo sapiens
gtccttctgtagaccacggtgcttctgggcctgctgggccttctgtccctataggtcctcctgtgcccgtcggtccctctgtcaaagatggtgctaatggaatccctgtgcccattgggcctcctggtccccgtggacgatcaggcgaaaccggccctgctgtgcctcctggaaatcctggaccccctgtgcctctcaggtccccctggccctggcatcgacatgtccgcctttgctggcttaagcccgagagagaagggccccgaccccctgcagtacatgcgggccgaccaggcagccgcgggcctgagacagcatgacgcccaggtggatgcgcacacttaagtgccttaacaaccagattgagagcattcgcagacccgagggcttccgcaagaaccctgtttgcacctgtagagacctgctctgtcaccctgagtggaagagtggagactactggattgacctcaaccaaggctgtaccttggacgccatgaaggttttctgcaacatggagactggcgagacttgcgtgtaccccaatccagcacacgtgttccagaagaactggtggagccaccagagccaggcaatttggtccaacactgcacgtc

SEQ ID NO: 581870 - DNA, 295 bp, Homo sapiens
tccccaaatgggggggggggggggcggggggggggttttttataacagcgctcttttttttacccccccatttcccggggggcccccccccccgttttttttccccctttaagaacccggggggggttcccccccccggttttttttttggggcggggggggggttccttttttccccggggaaccgtttttccccttgggccttttttgggggcccttttgacccgtttttttccaaaaacggggggggggcggggcggggttttccggggtttttttcccccccgggccccca

SEQ ID NO: 581871 - DNA, 429 bp, Homo sapiens
  misc_feature (25)..(25): n is a, c, g, or t
  misc_feature (49)..(49): n is a, c, g, or t
  misc_feature (74)..(74): n is a, c, g, or t
  misc_feature (96)..(96): n is a, c, g, or t
  misc_feature (124)..(124): n is a, c, g, or t
  misc_feature (131)..(132): n is a, c, g, or t
  misc_feature (135)..(135): n is a, c, g, or t
  misc_feature (145)..(146): n is a, c, g, or t
  misc_feature (149)..(149): n is a, c, g, or t
  misc_feature (169)..(169): n is a, c, g, or t
  misc_feature (175)..(175): n is a, c, g, or t
  misc_feature (216)..(217): n is a, c, g, or t
  misc_feature (228)..(228): n is a, c, g, or t
  misc_feature (233)..(233): n is a, c, g, or t
  misc_feature (237)..(237): n is a, c, g, or t
  misc_feature (253)..(253): n is a, c, g, or t
  misc_feature (260)..(260): n is a, c, g, or t
  misc_feature (283)..(283): n is a, c, g, or t
  misc_feature (296)..(296): n is a, c, g, or t
  misc_feature (300)..(300): n is a, c, g, or t
  misc_feature (322)..(322): n is a, c, g, or t
  misc_feature (329)..(329): n is a, c, g, or t
  misc_feature (352)..(352): n is a, c, g, or t
  misc_feature (360)..(360): n is a, c, g, or t
  misc_feature (364)..(364): n is a, c, g, or t
  misc_feature (396)..(396): n is a, c, g, or t
ggagtagaaggtatgattgacacanccttctgacttgaaatagagcagngggtaactcatccaaaggggatacnccttaatatcatggattgaatncattcatttaactttttctcttctgaanccccacnnccngtatagtaannganttttattttaaaagcatganctaaangttggaggcctctattacagtgatctaccatgggaaataannatccttaaaangcttnaaangatagtccagtacaangggcagncagtgcctcactctcaagatgtncagatgtgtgaanggcncatggagaatagtcttccaacncaggagncaatagccacaaagctcaagaanctgaaacncaangggatgagtggtaactgacaatagccctgaangaagctaaccatcacttgtcagtggacaaggct

SEQ ID NO: 581872 - DNA, 152 bp, Homo sapiens
  misc_feature (1)..(1): n is a, c, g, or t
ntcgatccgttactcctgttagtccattattgacattacagtagttaacgggatctgactgctttttctgaggtcactggtaaccttggagaaaaaaagtagattcaaaggggtggtgtggatgtgcactgggggattggtgggaaaatcag

SEQ ID NO: 581873 - DNA, 290 bp, Homo sapiens
actgttgcgagcttagctttgttacagaacacactgaggtagggtgcggtggtcacatctgtaatctcagcagtttgggagggcaaggcaggcgcatcagctgcaggtcaagacgcttgagaccagcctggtcgaaatgatgaaaccccatctatactatacatacaagaattagctgggcgtggtggcacacgcccgtaatcgcagctactcaggagtctgaggcactagaatcacttgaacccaggaggcggaggctgcagtgatgctgagattacgccactgcattc

SEQ ID NO: 581874 - DNA, 202 bp, Homo sapiens
tgtcagacgtgactatgtggcatgggtggtatccagcagcagggttctaggcaattgggagagtagcaggcgtgtcagctacttaacatcacatttcgatattatacaagtgttagaactgcactgctgtatattgtggtgctgagttatcattcctgtttctagtgttttctgtccacctatttagagggattgggggcta

SEQ ID NO: 581875 - DNA, 154 bp, Homo sapiens
ccgatacaatagtgataaagtgaaatagtacaatcgataacttactgttatctaaccaacagaaatgtagtgggaacttactaccattcacccattaaagactttagaaagtaataactgcccccagatagagtaaccagtctaattgtatgca

SEQ ID NO: 581876 - DNA, 415 bp, Homo sapiens
  misc_feature (63)..(63): n is a, c, g, or t
  misc_feature (86)..(86): n is a, c, g, or t
  misc_feature (91)..(91): n is a, c, g, or t
  misc_feature (144)..(144): n is a, c, g, or t
  misc_feature (230)..(230): n is a, c, g, or t
  misc_feature (350)..(350): n is a, c, g, or t
  misc_feature (366)..(366): n is a, c, g, or t
  misc_feature (396)..(396): n is a, c, g, or t
  misc_feature (409)..(409): n is a, c, g, or t
gtcatcatcctgctgcagcatgccctagcaacagccaacctgcaccatcatgggcacttcaantgcattttagtccccttcctttnctatnaagctgctgtgtgctgtgggatatgtgtgcctagatgttccttgcctgtgttnagggaggtgataaacatttgttccatgttatataggtgggaaaggggtcagcactactaaattgtgcaagacatcatctgttctgncatttattgaggaatgtgaatatgaaacaaggctgcaagtattctataaatgttcactgttattaggatattgtatgtctttgtgtccttttatttatgaatttttggaaattatgaagnaagagttcatgtggtnagtgtttaaccggtgtaggggaaatggaantgataggaataanttaagg

SEQ ID NO: 581877 - DNA, 442 bp, Homo sapiens
  misc_feature (167)..(167): n is a, c, g, or t
  misc_feature (360)..(360): n is a, c, g, or t
  misc_feature (380)..(380): n is a, c, g, or t
  misc_feature (437)..(437): n is a, c, g, or t
actttggcagggtgataagttcattcccgtgaaatagatagctgtgcagatggataacgacaatgcctttacgacggttctccccaggactgaaagcccagtttgccttcggcatggtctttttgttcgttcagcccgatgccagcgctgctgacataagtgcgcanaaataggtggggtgattattccgcagccttcagtcaggcgcttcaggacggcatgagcgtcccgctctatattcatctcgccggtagccagggtcgccaggacgatcagcgaatcggcagcgcttttatctggctggacgatggacagctacgcatccggaaaatacagctggagagagtaagataacgccanttcagcgaacaactcgacancagctgatggctctggccaacgcccgttcaatgaggccttaccatcccctgacttanaacgg

SEQ ID NO: 581878 - DNA, 1350 bp, Homo sapiens
  misc_feature (957)..(957): n is a, c, g, or t
gggatgctgtaggcgcggagggccggagacgctgcagacccgcgacccggagcagctcggaggcggtgaataatagctcttcaagtctgcaataaaaaatggcctccaacaaaactacattgcaaaaaatgggaaaaaaacagaatggaaagagtaacaaaagttgaagaggcagagcctgaagaatttgtcgtggaacaaagtactagatcgacgtgtagtgaatgggaaagtggaatatttcctgaagtggaagggatttacagatgctgacaatacttgggaacctgaagaaaatttagattgtccagaattgacttgaagcgtttcttaactctcagaaagctggcaaagacacaagatggtaccaaaaacgaaaatctttatctgacagtgaatctgatgacagcaaatcaaagaagaaaagagatgctgctgacaaaccaagaggatttgccagaggtcttgatcctgaaagaataattggtgccacagacagcagtggagaattgatgtttctcatgaaatggaaagattcagatgaggcagacttggtgctggcgaaagaggcaaatatgaagtgtcctcaaattgtaattgctttttatgaagagagactaacttggcattcttgtccagaagatgaagctcaataattgttcacattggtcttttatatatatttatatatatatataaaaattgggtcttagattttgatttactagtgtgacaaaataactacatcctaatgaaaatcaagtttgatatgtgtgtttggaaagtagcgttggaagagatgttgggggttttgtgcatccatagcactggttactttgaacaaataaataaaagctttctgtagtagcttcctttatcagaaaagaacatttgataccatggtatatcatttcctcttcattaacagaacagcttttctacaatgttgggggaaantgtccatagtcattactcagtcaaaactttgtgttctcataagcctaaggaccattctagatttatacgtgtcgtgtgtgtgtgtgtgtctccataaaatgcatatgtaacattttttgtgtttaagcattcacccaaaaaaaaaatcacaggtaaacccatgtttcctgaagatgccatttattccaaggcaacaatacgagataatcccttcaagttaaactgtgcacaatttcccctgaaacccatactatctcaagtgacatcacgttactcctaggataggacaactcttacattggcttctccaaccgtgcctactactcgccggggctcattgtgcaaatcctaacaggaaacttttccgggcatcaccgggggtccccaatcagg

SEQ ID NO: 581879 - DNA, 420 bp, Homo sapiens
catctctacagaagacttttttttaatcaggatcccttgagcccaagagatcaaggccacagtgagctatgatcacatcactgcattccaacgtgggcaatagagactctctcaaaaaatagggcctggcgcagtggttcatgcctgtgatcccagcactttgggaggccgaggtgggtgaatcacctgaggttgggagttcgagaccagcctgaccaacatggagaaaccccctctctgctaaaaatgcaaaattagccaggcgtggtggcacatgcctgtaatcccagctactcgggaggctggggtgggagggttgcttgaacccaggaggcagaggttgtggtgagctgaggtcgcaccactgcactccagcatgggcaacaagagtgaaactccatctcaaataaataaataaat

SEQ ID NO: 581880 - DNA, 971 bp, Homo sapiens
agcggatcggtccgtcctgcttccagctgctgcagagcggccttcgccgccaaagcatccagcagccccctgctcaggcccagcatggcgagcgccgagccagatccccacggaaggctcctgcagcgaacctgacccatttcatctatgactacaacacggatgcatactgtgggcatgactctggctaccgtcttgttcctgctgggtatcctcactcgtcatctactcaagaaggtgaagtgcaggcaaggcggactccagtgtctgagagcccagacctggcggaagtcctgtacagtctgagcttccctcttcagcccctggtggcggcggcgtgttgcaccttcccgaggtaatctccgcttgccgcacctgtcctgagctgctgggcagcctgcacgtgaccgtggtgcgacggctggttgggtgaccctagccgacagcgcctggtggacgcgctccccgcgtagatggaggccagtcaccatgcaccccaaggttggaggccgttgcaagctgctgtacctctccaggccttgtcccgtgacgattctgcggagagccctgtttgcatccggatacccaaggggctcaagggcttgagctccggggatcgcggaagatcgatccgcggacccctgtcaatcacgaagcattcccttgctcctcggtccttccatggagacgggggcgaatggataaccccaaacattagccaacttaggtaaccctgggtgcctaacccccctttactgttgcgcgtgtggtgctgcgtggtgcagcacgcccgtgtggctggtcggcctattatgtcctaggctcattctactgtccatctatctgacgggggaatgcgggtcagggggccacgggaacggggcttgagttcccccatttagggactaagttgagcattagtcatatgcaagtaaagtcggacctgcgttccaaatgcctttcgtcaatcc

SEQ ID NO: 581881 - DNA, 147 bp, Homo sapiens
cgaatttcggcaatatgttcagcatggctggggcggccctctttcttcccttcctacccctgctaccggctcagttactgctcaataccttgctatatgatttgtctcaacttgcaattcctaaggactatgtcggggtaccgagct

SEQ ID NO: 581882 - DNA, 1667 bp, Homo sapiens
ggccaaggccggccttcgcgggcgactgatacacgccctcgagtgccagtctataccacttctcatcgtggggcgcctccacggacaccgatgggcgctgatgtgatgggcatggagttcagaaggattcctatgtgggcgcacgaggacccagagcaagagaggcactcctcaccctgtaagtacacccagtcgaagcacggcatcgatcagccaacatggtacgacatggagaaaatctggcaccaggagccattctaccaatgacgctgcgctgtggattcccagcaggtagcaccactcgtgcatgcatgaaccagaggcaccctctctgatatgcctcaaggtgccaatccagcagactgaaggatgacctcacggatcagtagtactagaggaatcttgacaagcagcgccctagggacaatagttacctgttagcttactaccaagaggcatagtagcatatacacccttgttagccgtcactactagagaccacgttaaccaaactagggaccactacgatcgcattggaactaccggtgtagaacggggatcaactccaaaccacataggttagcccacaatcttacatacgacacgagaggtaatagccacttaccacactacaatggcccagtacacattagcggttcttaggagcactcctagggactatggagccagaggggtaacttcgcacctgggcacttaaacactacaattgatacgatttcctaccagcccgaatccatggcgctgacttaaaacgtgcctttgaagccccagcactaccgctgaccggaagtccgggtgaatacatctccatggtacgtgtgaacaatttacgcgtgacgcacaacgcttggtggcttagtcggttcggccaccgttgtgaaatctcggagccgcaggaaggcagtgggcccaacgggcagtgcttatccaaggcctatcgcatcccagtggaaggagaagaaaggcctacactgaaaggccattgacccatagcacctagccacaagggggtacaaataccacaccaagatatgggggacactgagcagcctagtgggtacccagccttggccccccattgcagcgtctagactgctattaccacgagcgccattactcccattaccagattggagacaactatggaacgagctacctagtgattggcacaacgtccagagcgcaccagcattcaccgtatatacgtaatccacaatcaacttcagcagctcgtgaaccggttgtagccatatacaataacagacagagccttggacgagccacaacaacgtcggccagtgaatagcgcggtgacccaaccgcattgatcccgcgtcgacatgtgacgcaacggacatgcacacgtgagaacacagttcgcggggccgcgacgattcaaaactagactcacaaatagtgcccatcttgtctgcatgttgttcggttgttgttagggtggtaccctacggaagtcatgcaccattccgagaatatgtcgactagcaagatgatcacacggtccacacaacagcaaatggtgcggaaatcagaatgacgaactcacgtcgccacgaggtcggtcgaatgtcagctatgcaacagacgggactgccggtcttactgcttacactcgagagcagaggcag

SEQ ID NO: 581883 - DNA, 360 bp, Homo sapiens
  misc_feature (89)..(89): n is a, c, g, or t
  misc_feature (97)..(97): n is a, c, g, or t
tgagtctagaggaccccctgggtactcataatgcatgtggacttaggtccaaggtctccagagggtgaaagctgggagtctggtcaatngtcctacngagacagcacagccaacctagctagcaacattggtataagtctgaacaatatatactcatagaatacagtcaaagatacacaatctgaacacagcttcatggggtgtgcactctaaacagtagttgcaatgtataagaatgagcacttacttctctgctatctagatctgaactccttggcttctttacttcagtacaagccccagcctaggcaaagccagttacataaaagttggctcaggagtctaagagcttaacctaaa

SEQ ID NO: 581884 - DNA, 759 bp, Homo sapiens
  misc_feature (25)..(25): n is a, c, g, or t
  misc_feature (28)..(28): n is a, c, g, or t
  misc_feature (31)..(32): n is a, c, g, or t
  misc_feature (35)..(37): n is a, c, g, or t
  misc_feature (40)..(41): n is a, c, g, or t
  misc_feature (43)..(43): n is a, c, g, or t
  misc_feature (51)..(51): n is a, c, g, or t
  misc_feature (55)..(55): n is a, c, g, or t
  misc_feature (81)..(81): n is a, c, g, or t
  misc_feature (95)..(95): n is a, c, g, or t
  misc_feature (108)..(108): n is a, c, g, or t
  misc_feature (130)..(131): n is a, c, g, or t
  misc_feature (133)..(133): n is a, c, g, or t
  misc_feature (156)..(156): n is a, c, g, or t
  misc_feature (164)..(164): n is a, c, g, or t
  misc_feature (191)..(191): n is a, c, g, or t
  misc_feature (195)..(195): n is a, c, g, or t
  misc_feature (240)..(240): n is a, c, g, or t
  misc_feature (284)..(284): n is a, c, g, or t
  misc_feature (456)..(456): n is a, c, g, or t
  misc_feature (530)..(530): n is a, c, g, or t
  misc_feature (536)..(536): n is a, c, g, or t
  misc_feature (539)..(539): n is a, c, g, or t
gagctcggtaccctccgacgtggcntcnatnngcnnnganngnaccactgnacancagcctggacaacagagcgaggcccngtctcttaaaaagnaaagaaaaaaacntgtttttctaagttctgtgagnngntctagtaaataattaaactcaanaagagggncatgggaaaccctgatttctaactggntggncaaaatacaggtgacaacctaggacttgcaactggcatctgaagngagagtggtcttgtgggactgagcccctaacctgtgggttctgngctaactctaggtagtgtcagaatggaattgtgggatacgcggttggtatccagagagttggagaactggtgtagaaactctgcacacacatttggtcagaagtctgtgagtagagagaaacgtgttgcgggaagtcagggaccccaaacggagggaccggctgaagccacngcagaagaacataaattgtgaagatttcatggacatttattagttccccaaattaatacttctataatttcttnggcctntcnttactgcaatctctgaacataaattgtgaagatttcatggacacttatcacttccctaatcaatacccttgtgatttcctatgcctgtctttactttaatctcttaatccggtcatcttcgtaagctgaggatgaatgtccctgcaggaccctgtgataattgcgttaactgcacaagttgtttaaacagtatgaaacctgggcaccttaaaaaaaaaaa

SEQ ID NO: 581885 - DNA, 577 bp, Homo sapiens
  misc_feature (102)..(102): n is a, c, g, or t
  misc_feature (274)..(274): n is a, c, g, or t
  misc_feature (348)..(348): n is a, c, g, or t
  misc_feature (354)..(354): n is a, c, g, or t
  misc_feature (357)..(357): n is a, c, g, or t
attttgtgtcgtaataatgatgacataactagtcactagcttggtgattctttgtcgtgactgtggtcttgtgggactgagcccctaacctgtgggttctgngctaactctaggtagtgtcagaatggaattgtgggatacgcggttggtatccagagagttggagaactggtgtagaaactctgcacacacatttggtcagaagtctgtgagtagagagaaacgtgttgcgggaagtcagggaccccaaacggagggaccggctgaagccacngcagaagaacataaattgtgaagatttcatggacatttattagttccccaaattaatacttctataatttcttnggcctntcnttactgcaatctctgaacataaattgtgaagatttcatggacacttatcacttccctaatcaatacccttgtgatttcctatgcctgtctttactttaatctcttaatccggtcatcttcgtaagctgaggatgaatgtccctgcaggaccctgtgataattgcgttaactgcacaagttgtttaaacagtatgaaacctgggcaccttaaaaaaaaaaa

SEQ ID NO: 581886 - DNA, 179 bp, Homo sapiens
atttggggggggggggccgggttttaaaccccgggaacccccccctttcccgttttttttggtagggtgggggggccccccgggggccctttaaggcggggtttttttttggggggggggtttccttttttttttggaaaaaattttttcttttttgggaataaaatgttaaaccctga

SEQ ID NO: 581887 - DNA, 126 bp, Homo sapiens
cctagggatccttattagaaatttgtatatacaatgtgtgtatttatgtgtgtgtgtctcatattggggttccagctatataaagcagatactaacaaacactgaataaacacaaagagagcaata

SEQ ID NO: 581888 - DNA, 224 bp, Homo sapiens
tctccagtgttggccatggctcaatcatccgtacccaatgaggtctccgtaaaagccccaagaagacagatttagagagcgttcggagaacagaactcgtggctttgcaaagtgtcacgaatggagagaacttggaagctccacgccccttatatacctcaccttatgcatctcgtcagctgtatcttgtgtgatatccatgttaataacccagtatacggaga

SEQ ID NO: 581889 - DNA, 387 bp, Homo sapiens
cggagcccggtcaccggggccgcggggtggaggggagcttaaaatgcaggtctgggcggggcccgctggctcacgcctgtaattccagcacttcaacactttgggaggccgaggcgggcggatcacccgaggtcaggagttcgaaaccggcctggccaacatggcgaaaccccatcactggtaaaaatacaaaaatcatttagccgtgctggcgcgtgcctgtagtcccagctactcaagaggctgaggcaggagaatcgcttgaacccgggaggcggaggttgcagtgagccgagatcgtgccactgcactccagcgtgggtgacagagcgagacaacgtcaaagaaagaaagaaaagaaagaaaatataaagagctgacagccta

SEQ ID NO: 581890 - DNA, 504 bp, Homo sapiens
ccgtgggatatgcgtcgatacctgtcactgagtttagggagaggtctttaaacagaagaagtttgagtaatttaaatgatgatgggaaggagctaaaagtgggggataggttaaagatacaggaaagtgggaggaagaactgacaagtgaggttccagagagggcaggagaagaggagattcccatagggggattaacactttcttttcttttttctttctaagacagggtctcactctgtcgcccaggctggagtacagtggcacaatcttggctcactgtagtgtagacttcccaggctcaagggatttctcccaccccagactcccaagtagctggaactacgggtgtgcaccaccaccacacctggctaatgtttctttttttggtagacacagagtctcactatttagcactgattggtctccaactcctgacctcaagcgatcctcctgcctaggcttcccaaattgctgggattacaggcatgagccacaatgcctg

SEQ ID NO: 581891 - DNA, 245 bp, Homo sapiens
accagcctgaccaggttagagaaacgtcgtctctactgaaaatacaacattagccaggcgtggtggcgcaggcctgtgatcccagctaatctctacccgggaggcggaggttgcagtgagccgagatcgggccattgcactccagcctgggcaacaagagtgaaactcagtctcaaaaaaaaaaacacaagaacaaaaccagagtctgtggtcccagcactgtgtccaagtgcgtgtgaggggat

SEQ ID NO: 581892 - DNA, 401 bp, Homo sapiens
attatgatgaaaccctgtctctactaaaaatacaaaaattagctggcctatggtggcgggtgcctgtagtcccagctacttgggaggctgagacaggagaattgcttgaacccaggaggcagaggttgcagtgagctgagatcgtgccactgcactccagcctgggctacagagcgagactccatctcaaaaaaaaaaaaaaaaaaagagaaagaaatagaattaaaccaaattgacagtttaactgtgttgagtacgaaaaacttgtgtttggaaaggaaatagtgataggggtaaaggtagaatcttagagactttcctagaagacatgggatacttaccttggaatctggcaacagttggtgaagaatcaggcgtagcccgggagcaaggtaaccgag

SEQ ID NO: 581893 - DNA, 1450 bp, Homo sapiens
  misc_feature (474)..(474): n is a, c, g, or t
  misc_feature (574)..(574): n is a, c, g, or t
  misc_feature (898)..(898): n is a, c, g, or t
  misc_feature (1134)..(1134): n is a, c, g, or t
  misc_feature (1136)..(1136): n is a, c, g, or t
aggaggtgtgttttttagtgaggtcccccctttttatgtgggcccgccccgccgcggcgcgggggggacgcacccgcgcgcggaaggttttattttgtactcccccgcagccgtagttggttgtttgtctgagccgtacggccgtccccccgctacgccagggtgggtgtgttgtgtactcgcctcgcccctgcgccgtgtgttgtatatgtgtgggtcccccccccctctcttcggtttgtggggcgccgcctctcctcatttgttgttttagttgagggggggggtgggcgaccgaccgccgcggctgtgtattatagtggggaccacaagccaccgagcttgttgttgggtgtgacggcccaccccggccagaatatatgccccccccccggcggcggtccttcggcgggtgtatgacccccccgccggcgtttctcctccggccgcgggatgagttttttcttccccccngcccggcggtatgtattattatgctctgtgcttctgccggagtggcctcccccacccacggcggccgtcttctcccgccccgtcgttcgttatgatcagnggtgtgcgccacacgacgatcgttggttcttacaaaaagaggcgggtcttcccagccgcggcgcggcccccaccacccagctgctggtggtgtggtaagagaacagcgcggcgtcgtagatgatatggttggtttaagataaacacccgcggtcgtgtttgtagaataaagcaggagaggctttcctgttagcacaacccaccccgccgcgtgagattccccatggtggaaagacactcgtaagaaatcccccccctgttggtgagaatacccgcgccccaccatatatgtagaagagagagagagagagagtgtgagaatatntatatgtgggacacacacagcactgtgtgaaaagagagggcgtctacatatagatgtgttctcctctatagcgcacgcctctcttgagcgccccgcgctctttctctcaacaaagatgtatatatgttagagatatttaagagatatgttctctcgagagagatatatattgtgatgatatttttagtaatatatctctctatagaggtgtatagagatagtttgtgagagatatnanaatgtgcgcccacagatccctgctgtgtgtgaccacacccttgtgtgtgtttataatttgtgagacatccctcttctcacactttaattcttgagaggagaaaatatcaccaccacacgcgggttttctctcttgcgccctctaaaaaaatatatatacaccactttcccttatataacacccaccatcataatatttaggaccctcataacatcttttatataaagaaaaaggtgtttttcccaaaatttttttgaaatatcttgggtgtaatatcccaagcctagcccttttcccccctttggagccccaca

SEQ ID NO: 581894 - DNA, 869 bp, Homo sapiens
cgtgtggggggcgggggcgggggggggcgggggggggtggcggcgggggggtgtgtggtggtggttggtgcgtcgcgtgtggagttggttgtgtggggtccgcgcggcgtgtgtggtggtgcgtcgtggggccgggctggggggcgcgggtgcgggcgtggctctggtgtgtcggggttcggctgtggcgggggtggctgtgggggtctgcctccgctcgtggtgggctctctgcgacggctgcgggtggggccgcaccccgtgtgtggtgatgtggcggtcaatcgttgctgcgggtggtcgtctcccgtggggttacgtggggggggggcgggggtgtgtggtggggcggcgttgaggcgtggggttgcgccgccggtggttgctgcgcgaggtgtgccgctgggcgggccgcgtgggcgagggtcggcccgggtggcgtgcgtgtgccgccgtgcgggggtgggtatggtgcgccgcggatggggtaggcccgcccgctctttgggttatgtaggtaggtggtgtcgcagtgtccaccagccggctgttttggtgtgcacgcagctcgcgggcggggcggggtgccccacccggttgtgtggtgccggtgatcaccgcggtggcgcctgtgcccgcgggcgtgggtgtgccggcggcgcagctggtgacgcgggtgtcgccgcgccgcggggtggtgtgtggccggcggaacgtggctttggagccatctgctgggccgcacgaccgccgtgttggaggccccctgtgtcggaggagggttggatcccgccgagaatttttgggtgagggtggggccgaggttgtgctcgccccccccccccctttgccccccctgtggggcccca

SEQ ID NO: 581895 - DNA, 826 bp, Homo sapiens
gggtgcaccggtgcgtctgcaaggcataatcgaggcatgggaggagctgcggttgtaacactctacaagatgggttgtcactggaagccgcagttcttttataactcatcagattgaagcgagttgcatgcagcgtctggtcagtgagggattataaggtagaatcttgtatgtaatggagattgagaagaatagttgaatgagataagaagggtgacgtgtacaattcacaatgggtgactcagactgttctggatataatgactggtaaaatgtatcctcagtcggtcttctttaaaggctaaatggaaagtcactggcaagatgggtctcgctatgaagtttagagaatcttcaggttcaggaaggcaaggctaagctctgaagaattcccttgggtacttgttgaagatcaagatgagatttttagatatgtatccatacattttatggtcggaatttatgactgatagagtacatattggcataatagcgtgggaagagatggtggcttaatgggtgtgaccgatcctgttttgctatgtctgggtgaatagagcctgagggtatactagcggatttgtggaatgtgcattctgatgtgcattacgaagtcatgatggtgatatggtctggggtaacaagattgcagataattcggaagagtaaatcaaagactatgtaagacaaaagtttgttgttcaaagggtattaggatactgggaagatcaaggtacagttcctggagagattgaacagcaaaaggggcgaatgggggccccgaaacaggtaaggttaaggaaaattatggggtaaaagttcccaa

SEQ ID NO: 581896 - DNA, 281 bp, Homo sapiens
gagctagtatgagaggagtaacactaaattgaaaaggacacttttataccaaccagcgaaagcagatgtcaaaggggatatggccaggtgcggtcgctcacgcctttaatcccagcactttgggggcagacgcggggagatagcgtgattctaggagttcaaccccagcctgggcaacatgcggagaccccgtaccgtctctacaaaaacattaaacggaaaaattagctgggcatggtggtgtacccctgtagttgcagctacactagaggctgaggtgg

SEQ ID NO: 581897 - DNA, 871 bp, Homo sapiens
cgggtgcagtagtaccgtagactattctctacaatccacaaagacttcgtaacattatacctcatgattcggcgctatgagcggtggagtcctaggcacagttcataccgcctccttatgcgagccgagcggggccagccaggcaaccttctaggtaacgacgatatctatcaacgttctctgtcatcagctccattgctactttcgttaccataagtcttctccatagataatacgccagtcataagtcgagaggacttggtcacacctggactagatccgcccgtaactaatctggtgggcccccgactatgggctgtttccccgtaatgacatatcatagcactaatgcattctgcattcctttacctacctctctgttcctatttccgtgcatcagctgtcatggctatagtggagagaccggatgtcaggagctagtgggatcgcatccagttcataccaccgtcacctaagtcaggagaatgtaatccctacgccaggaaggctcatccgattagtaccttaattcaatcttctccattagatccttagtcaggttgttcatcgggctaatcttaggggggccatcaaatttcaattcacagactaattgatccactgtaagtaaccccatgtacaataaaccgcaattacctaaagtgccggacttctgtcgtgaatgatccagtccctaattcacaggtagtactaacttctacgtaattaactctcccaaggtcctaaggctagttggggagtcaacttataactgaattaaataggagcgcaaggcttctatataacactctttcttgcgggaccccgacggcggaggggaaaccccaattttattatcgaggacttatgg

SEQ ID NO: 581898 - DNA, 271 bp, Homo sapiens
ataggaatctatatccaggtataggagggatctcttcgggacggacagtagaacgggggtggtgcttcaagattctcagcttcactctcactagatgcactcttctggctttcctttcgctttttcttttctttctggtgtttccgggaatttttccggatgtttcttttttcttttcttggatttctcttcagtagcactttcggaatcagaggaatcagaagaggacggaggaaaagagtgctaggctgaaggggtccggagctcgatt

SEQ ID NO: 581899 - DNA, 307 bp, Homo sapiens
ctcgaatcgacggtttctcattattatccttgaaaggattttaatctgccctggtgatacaaaatttctctcttttttttttgggttcagaaagtgtttaatagtgcaaattcccaagacttttctctatcatgtttttttttggtttatttgtttcattggtttctattccctttctatttttcttttctcattattatccttgtaagggtattttaatctgcccgggtgatacaaaatttctctctttttttttgggtccaaaaggtgtctattattgcaattccccaaaatttttctctatctc

SEQ ID NO: 581900 - DNA, 781 bp, Homo sapiens
  misc_feature (204)..(204): n is a, c, g, or t
ggactgtgagacctggcctcgcacaggacgcacacacaccgtccaatcagctcagcattctcccccgtgcacacttagatgagcagtgatgctctgtgctggtaccagaacaaggcagacgttgcaatgaagccacgggcatcctttattcttttcttgtccaaacctttctcccatacttgtccagaagcatggctgtcctcntgtcagtgaaatgtgtatgacgttaagtggtcagatgtatgtgcactcagacctatacgtgcaggcttattactaggtatgccctcgagcaagagggccctctcgagaggtagcattgagtcgagaggcgtgtctagccagctactcttctcctccgactgtacacgccgagcagtgtcagtggtcttccgtggtggtttatccctgccctcctcgtgggagctgattgcagggcgcgtttagtaacctgtcgcagagcttccgaggggtacgatgtggaatacccatgaagcggctctttctgcaagaactggggccctgtagtctgcagcacgggggatacgggcccggtcacccttttcggggtccctcctggtcccctgttgggcccctatgatggagtcgcccttacttgcctttctgcctctcattattttacaggcagatgcttggcttataatctaattacgtctttcccatttgttatattttaccaagccatcacactttgaaaatactctcccgggaatggtttcgggggggggaattacgtacgccctgggggacttcggaaggg

SEQ ID NO: 581901 - DNA, 992 bp, Homo sapiens
cttccatgtcatccttcaggtgctctatcttcccggaaggcttaccggaagcagttctgggtccggtacgcgtgcatgacagaagaggtggacagaaacgagcggggaaccgatgggaaagcctagataagaaggaacgagaagctacagtgtagagagaggcgctacggtggagcgcccgcagcgcggatcctgccacgaagacgaccgcgcacgtctataagtagtgcataccgagattgagtaacatagcaatagacaattctgcggcaacaatccatcgatagtaacacacaaccacgcaagtatgttcccactcgctaagcaccacaaataacacagcgaaaagcaggaacctacgcaagtggacagccatatagcgcacaaagccctgccacatcgatcgacaaagacaggacgccagacacgagttggcgccccacgtgaggtcaaccgctactgctcccatatcacaaaaacgcaacacgacccagacacagacagctatagagctcacgaacagacacaatgagctccaaaggtccgttaaacaaatacgtggctgcacaaaacataatgataacagcgatcaattggactgacacagcacatcatgtcgacaaagactaactcaataggagctggccaacacgagccgcgcacggacgctgcacccatcaattcctcacaaacgcaaactcatctgtccagctcagataaacaaccgcgctatactaacacctcacgacagttccaagccacaccctacggcgcgtacagcgcaatcaaacaagactacttacaatccgaagtacaatcaatgcatatcacggcaaacccgcaacgcaacgactagtcccagaccacgtcaacaatcgaacgaaaccaaagagtaccaatacatatctgtactccaacactacacagaagatcatccgacctgccagcctcccacccaccctacaatctcaccaccatcaccagcagctcac

SEQ ID NO: 581902 - DNA, 1046 bp, Homo sapiens
  misc_feature (519)..(519): n is a, c, g, or t
gtcctcccctcagcctgcaccagaggtctcatatgttaccccaggagttctcagaggattgggttggcctctaacatgttccttgttaattcttgttctgtaacatgcaattcaagaagctaggggaaaaatatctcatgcacttaaataatggtcttcaatttaatttaaaaatattttgacaatatttaatttgtgcttatgtggtgtttggtgtgagtgcagatattgcactgtgtcacctctggatctctgctcagaagcagaacaagtgatgacctaaatgtcaaaatcactgctcgttttcatttggtgaacttcaaactctgttctttttggtcacctgtggaatgaatgcaagcatgattttggcaggaacatttgtacatattctgccgtagataatgtggttctgatggttgttgtgtattttcagtatcactggatccctcagtcttcaccgttttataaacgtataagattaggatgaacttttgaatttacttggtaggaaaaaangtaggacattattgccatattgtatgtcttaatatttaacttattcggaaatatattccacactgttacatacattttccatggtagaaaggaagttcagtcagtcctgtggaatgaaaccatctcctaaaattcagcatttgcagcattctaaaagcctgtgtaggtacaaggacattgattttgtattcagaattcaagttaactatcttttaaattcgtggttgatgtaagtaataaaaaacattcttaaagttgagggttataagagagattatttctgtggtctaaaggttaaaaagccaacaacctgttaccaattatttcagctttttttgttttaataagtgtgacaacttaaaacttgtttctatttaaagtgaaatgtatctttcaactgtttagttacccagctgtttaatattccagtcttcccaaagtgaaaagatttgtatacaaatgttttctatgatttaataaaaatatatggcacaccttttgtttaaaaaggcaaacatttgtaaaaa

SEQ ID NO: 581903 - DNA, 385 bp, Homo sapiens
gaggctagacatatgacacgtgaaagttcagaaagggtttaaaagaaaaaaaaaaaaaaaaaccttgccccaagacttccccacaataaggaggaaagagggttggaccccaggtgcctactaccaatcccagcgggttaaacgggcgctccccctgaaatgaataatttttacaaatatgcctgtgtttgtgacaaacgaattggcaagatagggtttggaattgtgatctgcttgatttacgagcaaggccataattacactccgtgtatcccccctgtgtcattggggtacatgaccagttaaaaaccattggccctgtggtgttactctttcccaacacaaggtgaggacgtgctttcctgcaagagtataacgaggcctg

SEQ ID NO: 581904 - DNA, 124 bp, Homo sapiens
ttagtttttttaaaaaatattttaaacatatgtaaaaaattaagtggcaaagaactgggaaaggttaagacctgcttccaaagcctgaataatggggaaataaaattgttttccgatttctcca

SEQ ID NO: 581905 - DNA, 308 bp, Homo sapiens
gatgaggtattagctagtcagagaggctgaggcaggagaatggtgtgtggggtgaacccgggtgtaggcggagcattgcagttgagcagagatgatgccgatgaggtcgagcctgggtgacagagcaagactccatctcaaaaaaaaaagaggctgctgaaatcgggcagcgctttaaaaattccgggcccaggtaatttcggtaactccgggggcacccgtgggctacgtggcccttcctaggggcccggcaattaacccttcgttcctcagattaacgcattgggcccagggtctcttacattctc

SEQ ID NO: 581906 - DNA, 195 bp, Homo sapiens
tatccattatggctaacaaggatgatcatcttaacatgtgcttataggtcatagtatactataccatatggagaaatgtctatttaagtcctatgcccattttacaattgggttgtctctttcgttgttgagttgtaagagttctgtatatattctgggtattaatcctgtatgtgattagcaagtatttcctcc

SEQ ID NO: 581907 - DNA, 123 bp, Homo sapiens
gttgagggacaagcagcgggggaggaaagtagggccagctgtcagcccaatgagaggatgatgcaggctgcagtatcccctgccctgtctatcctggtgtgcataggagatcacgagctggct

SEQ ID NO: 581908 - DNA, 178 bp, Homo sapiens
  misc_feature (14)..(14): n is a, c, g, or t
  misc_feature (75)..(75): n is a, c, g, or t
  misc_feature (104)..(104): n is a, c, g, or t
ccggatcctcccgntcagctggcggtctgggctgctctggggcagtcattcggtccactgctctgcatcgcgggngccgggaattttccgagtccgagcgggtntgctgcttttgctcagaggacatccatgaccctaatgggtctttttgttcaagataaagtgattttttgccttt

SEQ ID NO: 581909 - DNA, 828 bp, Homo sapiens
cctgtgagtggttaacccgaacttcagccgctgtgatagcggctcccagtatacagggtaaagtgtggccagtgcgcgctcctcccccaattggggggctgcccaccccccgccccccttttgcaacccgcggttcccccgaattataatggagggccccgttgtctattgagacggtctttatgataagacggaaagctctctgcttggtagcaaaagtgctgaattccgtcgacacagataacatgtgagcaacgcccgccgggagacaaaccccccatggctgcagccaagcttgtcgttgacacaattcttctgccaagctgtccaaccgcacaagaggcggtccgctcagaagacacacccgccctggcgggccccattcttgtatgcgtattataaagttctcttgttccgcctcgcgttgcgcgagtggcgccaaccacactctcggttggcggagcagatcagcgcaggagtattactgccccatgttctctgggcgggactcactaagaataaagttgttttggtctccctaaatgttcacgcgagagtaacaaaaaaagacaaagtggataagggaacagtacataagagcaaaattcacagatggctcgtcgcgccatatgtgcaacgacgccgccaacaaccgggcgcgcagacaccgcggtggtgtgcatccacgactggacggccgccacgccccttggggcggtcggagcagcgcggcaaacagcctcctcgcgcggcccacgggctgaacaagccgcccccgcgccgaccttggggaaccccccattcggggaaaaaaaccacatagaacga

SEQ ID NO: 581910 - DNA, 175 bp, Homo sapiens
ggggaaaaaaaaaaatgggccaacccccccaacttacctttcttctaaaaaggtggggttgggcaaatttttaatttttgtaaaggaagattttttaactggcctactttaaaaaaaaaattggaatttatgggccctaatttggataaattaaaaaaggatgtcccttttgtta

SEQ ID NO: 581911 - DNA, 764 bp, Homo sapiens
  misc_feature (131)..(131): n is a, c, g, or t
  misc_feature (330)..(330): n is a, c, g, or t
  misc_feature (423)..(423): n is a, c, g, or t
  misc_feature (510)..(510): n is a, c, g, or t
  misc_feature (512)..(512): n is a, c, g, or t
  misc_feature (648)..(649): n is a, c, g, or t
ggtgaataggcccccttcactcctggtgcccatgagtccgcggtccacagtgctggcatgtaggagggctaacggagaggagggaagtccatcaagattgaatggcttctattactcccgaggtcgttagncccaggccacacaggtaggcactggagaggaagtgagttcccatgttgaatcgcacgacatacggctacgcttttagtgcaagaaaacatttaacgacgccagtagacaagtgctcatctaaacacatgcctgcccactaacgtgcacacctccgaacaagcactgacgcggcatagagaacgtggatggtatgcccanacggagaggcctaggcatggatacacgcagaagagttatgcagaatccaaggtctagtatacatttggactattcatgcgtgtgcatccttcnagacccatttgccgtgtttcgacgctccttctgggcacgcgactcgagaaccggggatacacgcgtcaaagtgtacgtcttgtgccntngcgcatgcattcgtgcgcgttgcgaacgccgtcaacacttgcgtagggcacgttaagcctgtggttcacgcgcatgcgcttggcatcgcagggacggcgtgccacacggggccaaggtggacttgcacgcgggggnncccgcaagtgcatgttggttcaggcaggaatgcgtgggagaccggccctgatgtgttggcagcaggaggggaaagcgcaggccagggaaaaggtaagcacaccataggcctcggt

SEQ ID NO: 581912 - DNA, 163 bp, Homo sapiens
  misc_feature (127)..(127): n is a, c, g, or t
  misc_feature (138)..(138): n is a, c, g, or t
  misc_feature (157)..(157): n is a, c, g, or t
agcaagtgcaattaacagtatcgtgtatatcatatcagctcccatgtctccattatttggactcttggtggataaaacaggcaagaacatcatctgggtcctgtatgcggtggccgccaccctcgtntcccacatgangctggccttcacctttagnaaccca

SEQ ID NO: 581913 - DNA, 143 bp, Homo sapiens
cgggtggtaaaatgcctctttattggtgctggaggtgttcatgagggagctggccatgggaccctcgtcgggacccttgccgtcagctactttcgcctgcgggggatagtttgtcccaagggcaccccttctgtcgtcttctc

SEQ ID NO: 581914 - DNA, 352 bp, Homo sapiens
actgacagcttcatgaaactgtccaccaagatcaagcagagaaaataattaatttcatgggaataaatgaactaatgaggataatattttcataattttttatttgaaattttgctgattctttaaatgtcttgtttcccagatttcaggaaactttttttcttttaagctatccacagcttacagcaatttgataaaatatacttttgtgaacaaaaattgagacatttacattttctccctatgtggtcgctccagacttgggaaactattcatgaatatttatattgtatggtaatatagttattgcacaagttcaataaaaatctgctctttgtataacagaaaaaaa

SEQ ID NO: 581915 - DNA, 373 bp, Homo sapiens
aggcgatctagaggatcccgaggtagcccaactggcccctcctccacacggggattacaattaaatgtaagattggggcagggacacaaacacaaaccatatcagagtatgtgaaccatccttgcatccctgggatgaatcccacttgattacaatgaatgatcttttaaatatgtagttgaattgggtttaaggatttggcatctctgttcaaagatactggcctgtagttttcttttttggtggcgtcttggtctggtttgggtaccagggaaatactggcccttgggaatgaattgggaagtattctcttcttagctttggtgatataattcttctttaaatgttgggtagagttcagcagtgaagccat

SEQ ID NO: 581916 - DNA, 606 bp, Homo sapiens
tttcgataaactgtgatggaaatttgcggatgttatccattgtctcttgaaatgtacttaaacctgggttataaaagaacaggaataagaaaaatgctaggccaccgatcggtaaattaacatagaagcaccatctccatgtgacgctggaggtgaaaactcctccaaggaaaggcccaacaacagatgcaatagcaaacgaacaactcaaaacagcaattagtatgcctctctgcgactcctctaccagggttgaaccaatgacgaacgataaactttgaataccacaaccgccgactccagcaataactctaccaccaatgagcatactcattgaatttgctaaagcagagatcagcgacccgatttcaaaaatgacaatagcaaatagcatggtctccttgaatccgataggtgtggcaattcttccccatatcaacgccaacagagcgtttggtaagctatacccggtaaataaccacccgatctcagagtacgatccaaactgtttagctacttcttcaatgattgtagaaactatcatgatatccaaggctgccagaaacagcgacaaagccaatgctatcaaagatgcgtacaagataa

SEQ ID NO: 581917 - DNA, 114 bp, Homo sapiens
ccggggtactcactgcaggctgccggtgccatatcctgcttggcccgctgcaggcgggttccagctcctcctgcttggcccgagcatccttgagcgccagttccccgcgctcct

SEQ ID NO: 581918 - DNA, 167 bp, Homo sapiens
tacaaaaagtacaaaaaattagccagacgtggtggtgcgtgcttgcattcccagctacgtgggaggttgacgtgggaagatcgcttaagcccagaaggtcaaggttgcagtgagctgaaatcgcaccactgcactccagcctgggttacaaagtgagaccctgtctc

SEQ ID NO: 581919 - DNA, 121 bp, Homo sapiens
tccattccaccaacatttatcatgtccctgtcacatgcagccacagttgcggcatctgggctcaggtgtgagcaagacaggaaaggtcctgccttgtggggcctgtctgctgccagccgac

SEQ ID NO: 581920 - DNA, 315 bp, Homo sapiens
  misc_feature (2)..(2): n is a, c, g, or t
gngaacggaagtgaattgtagatgtctttagtggcttttcctgagttggcggcacaacttcatagcggagtgtgtcagccaactctaaagaacgctccccacatgttaagaatggtaagctggtccatatgtgcctacatacagagttccacaagacacatggctaaggaaaaaggcaactcgcaaaacaatacatatagtctgacctgtgtatgtagtaaacacacatatatgctaataagtagtaaaaaggctgagaagaggagccgcatcttgggtaacagcggctaactggaaaggggacagacggtattt

SEQ ID NO: 581921 - DNA, 389 bp, Homo sapiens
taacagtgaggcaagggtaggccagcttctgcatgctggatgaaaatcatggcttctcacatcaattacaaggcctgcatttccccagatcgttccaagtttggcgattgctgtcggtgcctcagacacatatgcacaatggttacaactcagggctccagcactcagctaacaagagacgacgctgacctcctgggcacgaacgtttagcacatgctcaactcctctattgtgcacacaggaaggtggcctgaagatgcaccgcaagacagctgggaggtgcatgctgtactgtcagcctctctgtggaggcattcgtgcagtgccagctcacagggaggtgaagggggatatcggacccagcgagggagtcgctggttagggatgtc

SEQ ID NO: 581922 - DNA, 238 bp, Homo sapiens
gctgaggtgcgtctttgcgatcgcacctcgaaacgctcctagacgttgactccgttggagcggctcattggcgacgcacgatgcggggacctctagcggtgctcttgtgtgtgtgctcgatgtgcgtggtcctttgacgtcgcttcgtcactgactaaaacccatgccgccgtgggaggctgatttctcacacactggctggccctctcattctcactcctccttgggccccgaggtg

SEQ ID NO: 581923 - DNA, 193 bp, Homo sapiens
gatctttatccccaagtgcaggttccaaaaatatgctcagtgctagcagaaatcattcaggaagcttcttgaagagccctctctttattatcttagtctagactttcagcttgtcccagctactgtcaggcagcttcggcttcccaaggtcactagcaaattctgcttaatgctaatatccttggttttccat

SEQ ID NO: 581924 - DNA, 328 bp, Homo sapiens
gaaactctttacgtatgataaggtcttctcattgcttatgtgttctagttcaatgatgatccagtagtttctcactcgctcagagcaggttatctcagtgtccttgtctagacttctgaccccagcagtgtcacacaccagcacgtggaggtgctgttcactcgttggccttaaagagcccgctctcatcgcagtcaggatcataaagcccatcattgttctggagggccccttcaggttttgctcttctcccaagttttgagccattcatttctgccttcatcaccaaacatttggcagccagctttgagcaaatgacagtattttg

SEQ ID NO: 581925 - DNA, 419 bp, Homo sapiens
  misc_feature (330)..(330): n is a, c, g, or t
  misc_feature (335)..(335): n is a, c, g, or t
  misc_feature (382)..(382): n is a, c, g, or t
  misc_feature (411)..(411): n is a, c, g, or t
aataatcaaaccatcaaggcagatgcattggttgagttgctgttcatggacttcctggttgaacaaaatggtcttgccattcttagcaaagaaatacctcagcatgtggcaactcatggatgtggccagtaagtgctgtgagaagtgaacaaagaatagaaaattaagcactgtgcccagcctattttagtacttcatcatattatgttaaagagcttgtctcctacactgggactgtgatttccctattcattaaggaacttcgggtatgggtttttgtggcatcttaacagcttaatactttgataatgttttgtgtggcccaactcntgtgnttaaacactattctaggggactccaggtaaatgttttggcattgganttggagttttgtgtttaggggagttgttnttagggga

SEQ ID NO: 581926 - DNA, 513 bp, Homo sapiens
ttctcataatcgagaagtccagagtggtaaaatcacatcatggagccattgggccaatgttacttctgtacttttgcccaatcatccttaccctgtgggtatcatcctcattcttgtcacctcagggtcataagatggctgttacctcctctatcacatccgcatttcagacagggtagaagggaagagaaaatggcaaaccatacttgccagctcagtcagcccttgtttttatgaacttttcaggaagccccacccagtagcttctgcctacacttcattacctagaaccatattatattacttggccacttctccctccaaggaacactgagaaatgaagttctttatctgggcacattgttgtcctgaacaaatcagggttctgttagaagaacaaattggagagtagataggtgaacgatacagtaaaatttcattaaacaacattattcacgtttcctaactgcaggtgatttgcctgcctcggccttccaaagtgctgggattaca

SEQ ID NO: 581927 - DNA, 546 bp, Homo sapiens
  misc_feature (526)..(526): n is a, c, g, or t
tctataactggagattgccctaaacacaaccacaacaatctgatttagtttgagacactttatgcctgtaattgcgactgcttactaatgctgacaatactcaaaaactaaaaactacaaggaatatccttacaagaaatcttgtattttacagaagagatatagtaagagtgtgattattctcaatgccttatcagagctatgcagtactgcatggacatttacctacttgacaaactttcttatagatcattaacaccgagaagatagatgtaaaaaggcaaaattatagagcaatgcttggctagaagcaactgtcaatcaaagattactcaagcggccgggcgcggtggctcacacctgtaatcccagcattttgggagactgaggctggtgaacattgtcaccctaaagaagtgataaatgttgaaagtgatggatatggtaattaccccagtttcatcattatactatgtatacatgcattgaaacatcacattgtaccccataaatatgtacaattatnatgtgtcaattataaataaa

SEQ ID NO: 581928 - DNA, 164 bp, Homo sapiens
tacccgactagccgacggggagggaggaaggagaaggcatgtaatgtacaaagaattcgggtgtttccaggcaagacacaaaggtttcggtggggtgatgaggtgagtggggccatgagcaccgtcctgggaggggacaggctccactgtcgggctagtcgggg

SEQ ID NO: 581929 - DNA, 1256 bp, Homo sapiens
  misc_feature (4)..(4): n is a, c, g, or t
tatnctctcccccatggagcgcgcgcccacgacaggcaggggggagggagctaggcctttctcatcgctgtgtctgttgtgtcgtgcttgtgtttggttcgagctgctttggttgctgccccctgttttgtagtctgctgtgtctgggtgcttgctctttactcgttatgctgtgcacctttttttttatgagtggtgttgttcactactgcgtgttggtgtgtagtggtgtgcgtgcacgaaccttgtttgttccacctcgtgttttggtcgtggtgtggcttccttcgtttgtgttgtctcgctcggggtcgttttgttttctgggcctttctttgcgtgtccgactatgtgcgtgctttcttctcttcctcgtgtttgtggtccccacgcagtcacgttctcgcggcgccgttgtgtggccctcttcggtggcacgcgcctccccctctgtgtgtgttctcgcggcgcggggctgctttcttcttttggtgtttctctccccgcctcgcgactggtttagtcggctcgcccctggtgtgatttgttgtgttttcgccgccctgggtgtcttgcctttgtgtgcgatggtcgcctttgcccgcgggtcttgtgtgttgcctggttggtattttctccgtcttgtatgaggtgtggttctttttggctcggtatttccctccctcgccttgtttggttttttggtgtagtgccagttttccaccgtccgttacgttgtgatgataactttgtcggtggacccgcccccccctcttttatccatccggcaggtggggttttacgctctctcactttgtgcttatgccctccgtgtctcttatctctgtgttccgccaagacttcccttctctgtctcccgctgccgggggtctctcctctcactctcgtttttccgtccccgccccgcccctaatgaccgcgctcctcgctcacttttgcgcccccccccaccccggcgtgggacgcgcgccctccgcctcctctccaccggtatcaccgccgcagtctagcctcctctctctgcacccgcgcggagtagcacaccccctcgcccggtgctttgtggcccctacgcttttggcccccactcttattgtctctctctcttgtctctctcactcactcacctccctcactctctcttcatccccgtggattttctctctctctcttcttaatatcaatatttaaataaaaataaaaagacaaacacaccccacaatatcaaacaaaca

SEQ ID NO: 581930 - DNA, 116 bp, Homo sapiens
gacagtgaatacgctactacgcactgaaccgcatcgagttgacctcatcatgaagacctgctttagcccaccagagtgattggactctcagtgactcgcagcacgtaggagggcat

SEQ ID NO: 581931 - DNA, 319 bp, Homo sapiens
tccgtcgtggcttcactgggtatggtgttgcacacctgtacccaacttcttggaaggcagtagaatcgcttgagcccaggatcggagactgtagtgagctgagatcacgccactgcactctctctcaaatatatatatatatgtatgtatgcatatatatatatgacttttaagtgtacaattcagtgatttttagtgcaaccaaattcacaaagttgtgcagctatcatcactattgaatttgaaaacattttcttcaacccctgaaggaaaccccacactcactagcagccactccccattcttcctcccccgaccc

SEQ ID NO: 581932 - DNA, 695 bp, Homo sapiens
  misc_feature (346)..(346): n is a, c, g, or t
  misc_feature (428)..(428): n is a, c, g, or t
gggccgggtttccttttaacaaggaagtcccccaagggggattgctgttgtaatactcgagtgtctcatcggctttgtgctcattgaccctgggggcgtcaatggggtttgacatcgttcgcgccgcatcacctgcccgggttacttggggggaaccaccggaaaggggggaaaaaggcctcctatttgaggcccgtcggatttagtgcatggtagactgcccgtggagtgcgccctggacatgcgtcacttcggggtcctggccgccaggcgctgtagccgtggaagtattccaggccattggcggtggtgagctgctcgccgggcgaaatgtggtcttctttgngcgactagtcccggctcaggcacaggggaggatatgtcgaagggaagccaggggaggatcgacgagggaagccaaggggaangagaattcgctcgagggaagccaggggaggatcgcgagggaagccaggggaggatcagcgagcggaaagtccaagaggaggattcgcgaggggagccaggggaggatcgcgagggaagccaggggcagagctggggctcgggaagaggcgacgtaggggcttcagcttcactaggaatggacacagggtcgggggcctcgactccccacccgaggcaggaggacagggtggtgtcctgagtgggtcagatacacaggccagggacaa

SEQ ID NO: 581933 - DNA, 1018 bp, Homo sapiens
  misc_feature (167)..(167): n is a, c, g, or t
  misc_feature (357)..(357): n is a, c, g, or t
  misc_feature (376)..(376): n is a, c, g, or t
  misc_feature (378)..(378): n is a, c, g, or t
  misc_feature (387)..(387): n is a, c, g, or t
  misc_feature (469)..(469): n is a, c, g, or t
  misc_feature (472)..(473): n is a, c, g, or t
  misc_feature (514)..(514): n is a, c, g, or t
  misc_feature (517)..(517): n is a, c, g, or t
  misc_feature (531)..(532): n is a, c, g, or t
  misc_feature (538)..(538): n is a, c, g, or t
  misc_feature (571)..(571): n is a, c, g, or t
  misc_feature (613)..(613): n is a, c, g, or t
  misc_feature (626)..(626): n is a, c, g, or t
  misc_feature (726)..(726): n is a, c, g, or t
  misc_feature (737)..(737): n is a, c, g, or t
  misc_feature (827)..(827): n is a, c, g, or t
  misc_feature (833)..(833): n is a, c, g, or t
  misc_feature (888)..(888): n is a, c, g, or t
  misc_feature (899)..(899): n is a, c, g, or t
  misc_feature (926)..(926): n is a, c, g, or t
  misc_feature (1003)..(1003): n is a, c, g, or t
ggcggggagaatggtccagccctgcgttcggatctgacggcgcggatgcgtcggggcgccccgaggagctgtgggaggcctgtggtgggggccgctgagcgcttccgggcccggactggcacggagctggtgctgctgacctgcggccccgcctgccaccaccccgncccgggcccctgtgcctatgctgcccatggtcgaggagccctggcggaggcagccgcgccgttgcctccacgacatcggcactggcccacagggcttgccactgctgctcggcctcctgcgcccccaccagcaccacagccacccagtcccacacccagcccaccccggcctaccctggccagagagganaacgaggaggacgaggatnancccacaganacagagacctccgggtgagcagctgggcattagtgataatggagggctctttgtgatggatgaggacgccaccctccagganctnncccccttctgtgagtcagaccccgagagtacagattattgnagnctgagcgaggaganncccgcnggcccccccaccttttcagtgcccccatctctnagccctacccacacagcagtacgccaagtccctgcctgtgtntgttcccgtctgnggcttcaaggagaataggacataggtcgcggtcatcagatgaggagaatgggccgccctcttcgcccgacctggaccgcatcgcgtcgagcatgcgcgcnctggtgctgcnagaggccgaggacacccaggtcttcgggggacctgccacggccgcggcttaacaccagcgacttccagaagctgaagcggaaatattgangtccanggagggagcgcccgggccgcgtccgccccgtccacactacgccccgcccactccngggcctgctantctgaggcgatcgggaccggctcttgngtctccattccaagattgtccgctctgcaatcccgcgtcttcagccagactgcgggcgagagggattgtccgttccnattggttttgttttt

SEQ ID NO: 581934 - DNA, 500 bp, Homo sapiens
aggccggactctcacacggtatcctaggctagagtgtagtggcttagtcaagctgatgcagcttgaactcctgggctcaagcagtactcccatttcagcctcccaagttgcggggaccacaagcacatgccatgccatcatgtgtggctaattttcaaaaatttgttttctgtagagatggggtctcactgtgttgctcaggctggaagtgtaactgttatgtacttctctcaaaacgagtctggactgctgtcgggaggaacagaaggcttgggtgcttcggatggtggcctgaaaatcttctaagaagataacttcgcagtacgggactcggaacgaaggcctatgggggtatagagctagtatgcaaagtgcagtgattcactcgctgataattatcttctagtgagcttaaacctcttacatcttcaaaaatttcgcctgataccggaactaattcaaaattcacctctacatcattgtctgcatagaagccttag

SEQ ID NO: 581935 - DNA, 356 bp, Homo sapiens
gcattctgcaggtcgacctgagcatccccattacgctcctagactggcaagactagtaaagcgtgtgtctctgccaggttcttgatgcagcgtcatcactaccagatcccgtggcgctgcttctccacccagcacaagctgtatgatcgtgcaccaggattcccatcccagctccccaggccagagctactgtcatgacttctgaacgccgggtgatctctcacttgccaaggcatcaacgaccactgtgacccaaatatcagccaggggtatagtccagtgggaaaagtttgaaggatttcctcaggtgtatcgagttcgcattctaaatgagtaaccgacacccaagaatgagt

SEQ ID NO: 581936 - DNA, 231 bp, Homo sapiens
taaaaagggaaaaattttccccaagggggccattttttggggtttccccccccccccaaaaagggggttttgttttttcccccccccccccccgggtttaaaaaaagggggggggggttctttttggccctctctttttttttggggggtttttttttggggggggggccttttttttaaaaaacccccccctgggggggggtttaaaaaaaaagggctttttccccccca

SEQ ID NO: 581937 - DNA, 269 bp, Homo sapiens
ccgaggctgcggaccggcagtcactgttggagaaacatatgcgcaagccctgcccggatcctgcaccagttcaacttatagttcaggttgtggaacaggctgccaaaccttcagttaatgaacaaaaccaagttcaacctgcgcctgataacaagagaaatcttattttaaaactacttgctcttaaagtggctgcacatttgaagtgggacttacacatattatagaaaagtttgtctgttccagtattgaatatgctactaaatgaa

SEQ ID NO: 581938 - DNA, 391 bp, Homo sapiens
gaagtttggaaaaatatgctatttaattataatgttccctaggctgctgtaaacagaagtgaatcagacttttctccagctccctttcaaaataataaattatttgtcccaaatatcccctgatgggggacttttttattcttatggaaatagtgaattcccccaactatgatgaactatgttctttgctatttcttcccaatattttttaaggttttttttaaaaagccttagaaagttccatattggtttaggggctaaaattgggttgatgctgtttccccccctaattacatagttttaatcctttggccataattttaaaaacttcctttgttttgattttgaatccagtgaaaatctttttgcaataaactattttagttaaata

SEQ ID NO: 581939 - DNA, 726 bp, Homo sapiens
tatggagaagggggaattttttttttaatgagagattaatgtgtagcagagggtgttaacaactgtgcatggatgagctagatcgtggacatgcggtcaagatgatatatgaggccgcattaacggctgattttagaaaacgttgtattacttaagctttggctcgagaagggactaattttcataaggggaagggtgcgagattatgctagctacttggtgctgactttgctgatggttacatgcccggatgtaatagagaaaaatatactattattctggatagatctagaatcctctgggccttaagtgggttgcctgccttatccgtggagtaggaagatatgggggttatttttgtattaaagagggccaagaagaacacgggttttttggccttggagggagaatcaaaacattaaaggagtggttttaggaggtaagtaggcacaagcttactggtgggactctcatgaaggggggtcgatgttgttgttgttgcaatgatggtatgttttgtggagccgggatgatgtggtggtataccgaacatttggtatgggttttatagtgtggagtatgagtgtgatgttgttgtatcgaggtttattaaagcgtatcttattatgtatttctgccagtaataatggaatatgataactttgcgcagcacagtttacctgatttggagaggtctccggatatataggattggttgatctcagc

SEQ ID NO: 581940 - DNA, 243 bp, Homo sapiens
tcaaactgcgcccggacgacacagtccgtgtctccattttcgcataacattcctttcccgtctcgctctccaatagggtctttgatgtctgccactttcattcgcctccagatctgccaggcgaggcaggggacaataacagatggcgtacaccatggggcccagcacggggcccctgcccgcctcatcgacgcccaggacgcaatgctccttgcggcacaccgcggtcgcactctgtgaggc

SEQ ID NO: 581941 - DNA, 847 bp, Homo sapiens
taggtgcttgccctgtcctgtggtgatcactctgtcgctctttcgccctgctgtgcttcgttgcgccgctttgtttccacgctcctcggcgcgtatcgctttcccccgctgtcagtatatccgttccgcgcgggtcctccccgcgatttcttccgtgcgtcttctcgtactcgcggtcctccctcgtatttcggggacttggcacggaacatggggccccttctttccggaagcccccggccgcccctttcattggcacctcctcgccgcaacttcctgtgctctgttggtcttccaccctttctttcgtcccccagagggtcccgctgtgatgatatatagcgggggtccctcagggatgcaccctctgtgcttcccctccgaacttccattctgttcagttattcccctttctgggccttccctttgagaggcggccactctccccctcgcatcgactacccttattccctggctctcgtctgccccgtggttacgcccctctttgctagcgttatttcggagtttccgtgaatttataccctataaatactctttccccgtgccacatccacgcatttcttagttccccctttcgggaaaatgaccacgcgccaacttttttatctctctattatgaccacttagttccttcctttattccccaccccctttcctattacaacccggagcagtatccctccactccccttttaccaagtatatgattgtttgctgttgttcttataaataacacctcccttctgttatcgacaatgatagaatttgggggtcaccccatcttcccttctttcgacctagaaaaccccccccctcacatagtcaa

SEQ ID NO: 581942 - DNA, 300 bp, Homo sapiens
aaaaaaaaaacaaaaaaaaaaaaaaaaaaaaaaaaaaaaaaaaaaaaaaattttaaaaaaattcttaggcccgcagccgtgccgggggctcttaagaatgtccttaatcccgggggccgaggattccgacttccccatccacaacctgccctacggggtcttctcgaccagaggcgacccaagaccgaggatagggggggccattggcgaccagatcctggacctaagcatcatcaagcacctttttactggccctgccctttccaaacaccaggatgtcttcaatcagcctacactaaa

SEQ ID NO: 581943 - DNA, 151 bp, Homo sapiens
accaggaagtcccgacgtggtgaccttcgtgcgcgcagtggggcaacgaaggcgcggggtcagcgcgtcggacgtggccaaggtccgcaaggacgtgggcgcggccaaggcgccggtcaggtaggcggccttgccggcaggcggcaagcct

SEQ ID NO: 581944 - DNA, 369 bp, Homo sapiens
tatggcatcttctccaatagaaggctgtttgcctacactgaaaatctgatcttaggaaggccttctggagaacttgctgcagcttccacatcagcagttgctgcttcatcctgcacttttgttatggagatggcttccttccttcaatctcaggatttaacctctgctagcttccaacttttcttctgcagcttcctcacctctatcagaatttgctgaggccttgttctggattaggctttgtctaaagggaatgctgtggctggctagatcttctatccagaccactaaaactttctgcatgtcagctttgcagctctgccaagctctgtggtgcacactggggtaaagtcccgaggaggagaagca

SEQ ID NO: 581945 - DNA, 475 bp, Homo sapiens
  misc_feature (234)..(234): n is a, c, g, or t
acaaaccacatccataactctcctcatccttgtagtagtttcgtgagaggtgagaaaacaagtagacacaaagaactgtttcctccagaggccacaatgtgattaaagaaaacatattagatatatgcatacaccttcctatgtttagagtccttaatgaccttgttttaagacaattattttcataaaattactaaaaataatttgatgttacattataaatggataaaatcnctgaaaaaaaaatcaaatctagtttcatcttgatttcctactttgtccatccatgaagacatataaaatgagtccaataggaacaagcaaacaacttctttcttggactctaatttgaggcattgttaacacagtgatgttcatttattctatacatggaaaaggtgatgtctaaaaaattcacatgtccatattttactactgacttgtacattaaaaaatatttttttaaaaaacaaaa

SEQ ID NO: 581946 - DNA, 194 bp, Homo sapiens
tgacatttaagctttacctggtccccatgtgatgtgatcaaatgcttgaaatttaacccttttcccttgggttttaaactgaaagccgactctgctctgtgttaaaaatatgaaatggggtttgatactgttttagaccttatggagagatttaattatttgtaataaaaaatttgctgccgtctgaaaactga

SEQ ID NO: 581947 - DNA, 368 bp, Homo sapiens
  misc_feature (21)..(21): n is a, c, g, or t
  misc_feature (68)..(68): n is a, c, g, or t
  misc_feature (152)..(152): n is a, c, g, or t
ggttatttatttgatgtgaancctttttaaaatatagacatttacagcctgtatgtttctctttgagnccctgctttaggtacatccccataaattttgatttttaaaattcactcactttcggaggccgaggcgggcggatcacgaggtcnggagatcgagacccatccctggctaacacagtgaaaccccgtctctactaaaaatacaaaaaattagccgggcgtggtggcaggcgcctgtattcccagttacttgggaggctgaggcaggagaattgtgtgaacccgggaggcggagcttgcagtgagccgagattgcgccactgccctccagcctgggtgagagagcgagactccatctcaaag

SEQ ID NO: 581948 - DNA, 243 bp, Homo sapiens
cgaggacttgcggaatcgtcgtcgtggctgtgcgatttgtgtcaacttggcttgtaggtctgcttgaggatctgccagtccggcggctgccgcttccagcctccccatcagcgtttggatgcttcctctaggtccttaggaggtgatagtcatcgctgtccgaggttgtcatacaccaggttgtttggcgaacatactcctgaggaaccgcacggtctccagccaggaccacgacgaatccgg

SEQ ID NO: 581949 - DNA, 179 bp, Homo sapiens
gctttgtttttggacaaaaaagtctaacattttttgcccaacagaatatatatttaatgaaaagaaaagatacataaatgggtgaatttccagtttttttttaattattttaatccccaacattttcctgaaaaaaacattcccttaaacatgctgtggaataaaatggattgtgatga

SEQ ID NO: 581950 - DNA, 237 bp, Homo sapiens
cctctaccccctcctcatacccatccctcaaaacgtaacagcctaaaaaaaggaagccatcaaagaggactcctaaaatttgtgataaggatactgaagaggcaggtgtgtggatgaagggctcaattttctttagcaggtggggcactggtagtttgaccatgctccagtaaatatatggaaaacacaaattggacttttgttgtcgaggtcgacgcggccgcgaatttagtagta

SEQ ID NO: 581951 - DNA, 344 bp, Homo sapiens
ggaacatgttaaaaaaaaaaaaagccaggccgaggtgtggctcacgcttgtaatcccagcatttggaggccgaggggggtggatcaccgaggtcggagatcgagaccatcctgtctaccatggtgaaacgccgtctaaaagttaaaaataactgggacggtgatggcgaaaagacttgttttgttcccagctactccgggaagagatgaggctgggaagacatcgctttgagccgggggagaacacgacatttgctagttggagcccggaagaatttatgccaggtgtacctcaagacctggggttgaccagaagttgaactactgtctgtgtgttcacaccac

SEQ ID NO: 581952 - DNA, 257 bp, Homo sapiens
  misc_feature (38)..(38): n is a, c, g, or t
  misc_feature (88)..(88): n is a, c, g, or t
aggcccaaagttagtttccaaaactagttaataaatcnatttttcttcctttcctttttttgcacagaagctggtaatttagggcccncgtggtgaaccactttatatgaaaattttttggacttggtttacttgggttggtataaaacattaaatttaagttccttgaaccctgtggatcccctaatgggtatgaatgactgaggctttgtaaattaagggacgtttgtgtgaataaagttatttgatggggtcca

SEQ ID NO: 581953 - DNA, 400 bp, Homo sapiens
cgccaattacaaaccacagctcgaacgtctacaactacacatgtccaatgagccactagcggagatgaggctctttaagtaaatttagtataccatccagtattcgaattacattagccacattgtcaagtgtacaaatcacaggtggtaagtggctactgtactgggcaacatacataatagaacatatacataaataggaagtagtcttgggcagtgctgctctatcaatcctaccttccactcaactcccatacaacttactatggtccattatggatacttactacctaatggcagctcttccaaaatagctagcttatacacactctggtttcatgcacaatattcggattcatatatacaacaggccaagaggccttcaggctaatgccagtgc

SEQ ID NO: 581954 - DNA, 734 bp, Homo sapiens
  misc_feature (696)..(696): n is a, c, g, or t
gtaagccgagatcatgccactgcactccagccttgggtgacagagagagacaccatcttaagaagtaatagattgaatgtgtgctcacttcagcagcacataaactgaaattggaataatactgagaagatgagcatggctcctgtgcaaggatgacatgcaaattcatgaagtgttccatatttctccagaagagactggggacctatattcaacatccttaaagaaaaaaaagtcttcaaccaagaatttcatatctagtcaaactaagcttccgaagtgaagaagaaataagatcctttttagataaaccaatgttgagggagtttgccttacaagaggtcttgaagggagtagtaaatattgaatggaaagatcactaccacctaatataaaaacacacttaaatatacacagaccagtaacactataaagcaaccacacaagccagcatagtaaccagctaacaacataataacacaatcagatccacacatgtcagtgctaaccttgaatgtaaacaggcttaatgccccacgtaaaaggtatagagtggcacactggatttaaaaaaacaatggtatgtggtcttcaagagacccctctcacatgtaatgacacccataggctcaaaataaagggatggagaaaaatctaccaagtaaatggaaatcagaaagaagccgggttgccatnctgatttcagacaaagcagactctgaaccaacaaagat

SEQ ID NO: 581955 - DNA, 552 bp, Homo sapiens
tcactttgatacctgtgaagaaaatcagctatggttcctttcaattctacagttctaaaacatccagataaaaacataaaacaagtcagtttttcattataatagaatgtgaacaattacacccttttagactctaaacataaactacattcacagcctcttcaaagttgaggcttagtataataaatacaatcataccttaaattgttcatccagtttctttcttcctttctttttctttctctctttttctctttcttttagacagtatcttttttttttttttgagatggagtcttcccgtcacccaggctggagtgcaatggtatgatcttgactcaccgccatctctgccttctgggttcaaacgattctcctgcctcagcctttgagtagctgggattacaggtgcccaccatcgtgcccggctaatttttgtatttttagtagagacggggttccaccatgttggccaggctggttttgaactctcaacctcaggtgatccgcctgcctcggcctcccaaagtgctgggattacaggctgatcca

SEQ ID NO: 581956 - DNA, 172 bp, Homo sapiens
accagattcctcaggctgtgtcagacgccgcgaaatccagcgcagacacctgctcaatcaccgacaaactcgcgagtacgagcccaaccaatcatccgcggacatatacggcgcaatctgcgccagccgccccggtagtgcgggttcagccgccaacacccgatacacctgc

SEQ ID NO: 581957 - DNA, 201 bp, Homo sapiens
agtagtggctaatgtgatgtgtaggaggaagagctcaggtggaaaaggagggagctgctctcaggctgcgtccagtgcaagtgaccccagggaccgtgatgtgtctctcacagcttgagaagcctgagacagctgtcttgtgacagggacgtgagatgcaggatatcttcacgcctccccatttgtgacttcaaggagcct

SEQ ID NO: 581958 - DNA, 644 bp, Homo sapiens
tagggccccgaccactggggccccttgtcatgttgaggatgacatgcctcccggcccggggatggacaatgtctgctgccacctttggcttgctgacgtgattccctgtgtgacggtcctgtttcctgccgtcatgctgcctggcctgagttgggtctcctgtggttcaggcctggctcccccttcctggtctcccttctcccgctgggcctggtttatctgggaggagattgtcttccagtggctagcaattggacttattgatgatgtttgacccagcggcaggaatagcaggcaacgtgatttcaaatgctgggctcagcctctgtttcttctctcgtgtaatcgcaaaacccatttttgtgagctggaattccaatcatgtcttgtgatggtggtgatgaaacgaacggtgacactggaacatgggagaaactcccaggcatgtgaacacctttttgctgtgatggccgcgtcatgatggcccggcaaaagggcatttctacctgacccttttcctcatcctggtggacatgtacactcttcttcgcctttgagtgccgctacctggctgttcagctgtctcctgccatccctgtaatttgcttgccatgctcttcctttttctccatggctaccctgta

SEQ ID NO: 581959 - DNA, 92 bp, Homo sapiens
tggggtggcatctccgggcccagggaaccctgtgtcccccgggtccaatgattccccgggcccagccccccaaatagcggggaatacagggg

SEQ ID NO: 581960 - DNA, 120 bp, Homo sapiens
tgcttgaggaccttttacgcgagtacaagctcatcatgagtgagcgtgaccaggtatctctgagctggacaagctgcagaccgaagttggagctggccgagtccaagctcaagagcagca

SEQ ID NO: 581961 - DNA, 453 bp, Homo sapiens
gtagctccatgacctttgtgcacagacattctatggcacagctgactttgtagtaactgactgaggtacagtgcattaaccctagaatgctggttccataactgcagagccttaggcaacaggcatgacagccgagaacttttacctgggtctgttgagggtagatcctgtcacaacaggcagacttgtctagacaaaaatcacatgtcaaatggaagtctggtttcctcctccattgcttactaattgaatgctttccagaaaaggaagacaatggaagccagcacagacagaaaacctatacagtgtcatgaactcaacacaaagacacaagcacttagggtcggataggcctgcctgcacaccttcagagatctggacagaggtacacaggacaaaggagaagccacagcccagatagaccatgaggtgcatgggcagacccaatcgtac

SEQ ID NO: 581962 - DNA, 764 bp, Homo sapiens
gggagggacggtccagctttagctctctgctcgccgccgccgcttgtcgccgccagctcctctgatctacgaaagtcaatgtgacccaaacaaccagggaggctggcaggatgtactagtttttatcacgaggtgcaagcgcagtggtcattggcaaagctattgcgattgaacagcagctacaaggactggagtcaaatcattgtgtgatgtgctagcgaagagaccgcaccatgccatatccaaaacgttctagggcacaatctatactgctgctgaagaaattgaagcagttggaggaaaggccttgccatgtactgtgatgtgagagatgaacagcagatcagtgctgcagtggagaaagccatcaagaaatttggaggaatggatattctggtaaataatgccagtgccattagtttgacaatacattggacacagctacaagagattggatctgatgatgaacgtgaacaccagaggcatctaccttgcatctaaagcatgtattccttatttgaaaaagagcaaagtggctcatatcctcaatatcagtccaccactggaacctaaatccagttgggttcaaacagcactgtgctttataccattgctaagtatggtatgtctattgtatgtgcttggaaatggcagaagaatttaccggtgcacattggcagtcaaatgcattatggcctaaaacagcatacacactggtgctatggatatgctgggaggaaccggtatcgaaagacagtgtaaaa

SEQ ID NO: 581963 - DNA, 152 bp, Homo sapiens
ggaaagatggcgtcccgcaagaaggtaccggctctactgccacctcttcagcttcacgcggcgcaagggaaaggcaaaggcaaaggcggctcgggagatcaagccgtaagaagtcagatagatgcttgtgtattaagatatcaacattatca

SEQ ID NO: 581964 - DNA, 507 bp, Homo sapiens
tcgagctcggtacctttattcttttggttttggcttccttagcgaaattcacgggcgggaccaggggtttagattctcggtgaggggcacagtgtcaagggtccccttccaggccctgttacaggctgcacttgagaagggaaaaggactcgggaggagaaatggttgggcgaaaggagtcctgagaaagaaaagaaaggttaaatctgagagctgtgagcgcccttaaatttatcgggcccaggcggggtggtgggggctcatacctgcaatcccagcacttgggaaggccgaggcgggcggatcacctgaggtgggaagtagggaatcagcctgaccaacagggagaaaccccatctctattaaaaatacaaaataagccaggcatcgtagcgcatgcctgtaatcccagcaactcgggaggctaaggcaggaacatcacttgaccctgggaggcggcggtgggggtgagccaagatggcaccatggtactccagctggggcaac

SEQ ID NO: 581965 - DNA, 282 bp, Homo sapiens
gtgatctagaggatctcagctcatttcagttctggttggacgttctggcgcgtgcgcggccgtgactttaccgcgatccagatcgcgctcttgcaagcttgtgggtaaattagaggaaatggggattgaaccttatgagctgcagtcgaatgttgaatgtacttcgataaatgaagagattacgcacgaagcccagagtcagcctattcttcatcaagttgtgcccgacaatcaaaaagtacattctgctaatgaacaaaggaatgtgaactgaaatgagct

SEQ ID NO: 581966 - DNA, 550 bp, Homo sapiens
gggcgcagtggctcacgcctgtagtcccagcactttgggaggctgaggcgggcggatcacaaggtcaggagatcgagaccatcctggctaacagggtgaagccccgtctctactaaaaatacaaaaaattacccgcgtggtagctgggattgcaggcgcccgccaccacgcctggctaactttttgtttttttgagacggggtctcgcattgttgcccaggctggagtgcaatgacacgatcttggctcactgcagcttccagcctgggagacaagagtgagactccatctcaaaaatagtaataataataataataataacaacaaatttgtaaagattaagttgaaaaagaactactatataattgagtgaattagaagctaagatccagaaaagtatttagtctaatctcagatatttagcctaatccattcattttaaatgaaaaaaggagacttacagagttgcaaagagttcctacaaatcccaaaaagagcaaatgttttgaacgtgatctaaactagggtgccagcacatctcataaggggc

SEQ ID NO: 581967 - DNA, 106 bp, Homo sapiens
gatgctgagatgacttggagaatgttctctttggtgctctcgatctgctcccttgcccctctccggatggctatcccattcatccctacctagtggaatctgtgcc

SEQ ID NO: 581968 - DNA, 230 bp, Homo sapiens
caacttaaaaaaactcctgggggtaactcccagtttgggcttaaccccctttgccatgaggtgccaaaaaaaagtttgagtccccctgtggaaaatgttggtttattttcagggcttgaaaaaccattcccaaaaacttggtttgggaaaaccccgtttaattttaagttaacctgcatgttgtaaatgcgttttatgtttaaataaaaaggaaaatttttttaaatgta

SEQ ID NO: 581969 - DNA, 142 bp, Homo sapiens
ctacaatcatggtagaaggcaaaatgggcagcgagcatataaccatggtgcagtgcagggagcaagagagagtgagtgaggtccccagactctaaacaagcaaatttcacctgaactaacgatctcactcatcacccaaggt

SEQ ID NO: 581970 - DNA, 236 bp, Homo sapiens
tcagctcgtacccgtactgcgctgggatatattgcaattgtagggttttacgtgactttgggacacatatcaataacatttatacaaatacagcccaaacaaagccaaacccaattttatatttggtagtgcttcctgtataatttttggtaccaaataagccaaatttcacttttacatcagtgtgctgttaatgttaaaacccaatccttttttttttttttttttttttggag

SEQ ID NO: 581971 - DNA, 363 bp, Homo sapiens
  misc_feature (253)..(253): n is a, c, g, or t
  misc_feature (256)..(256): n is a, c, g, or t
  misc_feature (275)..(275): n is a, c, g, or t
  misc_feature (303)..(303): n is a, c, g, or t
  misc_feature (330)..(331): n is a, c, g, or t
  misc_feature (333)..(333): n is a, c, g, or t
  misc_feature (339)..(339): n is a, c, g, or t
  misc_feature (356)..(356): n is a, c, g, or t
ccagagcaaatgcaaagagcccttttgtgaatggattggattatttaataaccttccccttctgtggaggaaggattgtaaaaaaaaatgcctttgagacagttttttagctttttaaatggtgtttctttttaggggtctttgtaaaagggtagaagccttccttttttgataatgttaaatttgtaagtttcaggtgacatgtgaaaccttttttaagatttttttcaaagttttgaaaagctattagccnggntcatggggtaataaaacanaacgtttttcctttaaaaaaatttaagngggtgtgtaaagttaaaaagctgttgnncntttatnatttaataaaataattntaaagga

SEQ ID NO: 581972 - DNA, 1287 bp, Homo sapiens
gggcaagtgacatcgtctttaaaccctgcgtggcaatccctggacggctccgcgcgtgatgcccagggaagacaggtcgagctggaagtccgatctacttcccttaagatcatccaggtcattggattgattgagtcctgagagatgttgtcattgtagggagacagagcaaatgtgggcatcgcttatggagatgcaggcagatcctgctatgtccgctttcgccgggaaggcagtgtgtgctcgatgggcaaggatcgaccatgacttgccgctgaggctcatgccgagtggcacctaggcacaataggaacccgagcatctcgtgatgaatactagcttgcctcaatatcgcggcgggaattgtcgaggcttcagtagtatcaacccaagggagagagcatacactaggaacatctatgggacccgtgtttcgctaggacgcacatgacacggttggccgagctaggcttgaccgctgctcgccattgggtagacgcagtatggcaccctcgatgtcagacagttcgaccatggtgagccaaggcgaccagtacaacactaggcttctccgggggaccacgaaagaaagaaccgttcctatttgtcccaaggggccatttttgacagctaagttcaagcccaagcttaacaacattcttcgccaagccgtggggccaaccgcaactttggcatatagtccccttgcacgcttggaatggttgccaagaccatagaagtcgagaggaacctcgtgaagcatcgacacaagtaggggcgaaggcccagacagagagatacacgaccggtcgtggcaattggaaaccaattgccttccacacgaagtcctttcaccccccctcgtataccttcagcatttgatgacgggggtctttgagcatccatccacgagggtcgaagagggttggcttgccgaccaaaaattagaagcagagtccagttccttaaagcataaaaccgcctttgagacggtggcattctcggataacatccaggcacgggcaaagtggaaaacaaccacatctgtggcaaagtataccattccggacattgtaaccgcatggtcacaggggcgggtttgtccccggtgcagaaattggtttttgcgcaccaaggatgggctcgttggatcagctggctcaggaactttcggcggctataagccttcaaaacttgggtcggccagttcatacggataacccaccgaagtacttaggtcaaatacagagaccggggggtttaccacacaagccagaaggttcccag

SEQ ID NO: 581973 - DNA, 182 bp, Homo sapiens
cccctaataatctctgttgctattattttgagtagtgtttattaatgcctttatcactagattttaaattgcttacacaacttattacttttattccccccagtgtcaaaaacagtttgtgatgtttaataaatgcttatgaatgaataaacaaatgaataaggagctacagatacaatcgt

SEQ ID NO: 581974 - DNA, 151 bp, Homo sapiens
gttttgaacaagcccagattacaggagtttaaaagaagccttcagctttatcgaccagaatcgtgattgcattatcttcaaggcagaccttagggagaccttcttccagcttgggaaggtgagttttccagaggaggagcttgacgccatt

SEQ ID NO: 581975 - DNA, 180 bp, Homo sapiens
cctatgaggatccagcgatagggcaggcagcagcgtggactgttacctgggtagcactaagccagtgcttctctgtgtatctttacagatgaacgggacgggttcagaagaaacgttcacaagtggtcaacaagcacttaatgaaggtaggaccctttcatatatatgctgtcccagaga

SEQ ID NO: 581976 - DNA, 459 bp, Homo sapiens
  misc_feature (7)..(7): n is a, c, g, or t
aactcanagtatcacacacgtgtagtctccatatatatatctctaacactatatatatatagactctctcaacactgtgaaaatctccgagtatacactataggatattgtgtcaatatgataaccaaatgtttgtctaagagtggtttaatatttgtgagataatactccatggctccattgctttatactgccatgggcccttcgctttttcatcgagtaagcctttgggtatctcacttctcgatccataatagagatgtagataaccaataaaaggatgcacaaagaatctcatatagaagagccatagatattcacaacacagagcgctctcgagtgtcacaatactcataagagtgtagataatagagaataagaaaaagacgtctcccacattaacctcctgcggtgcacagttactttcgctacaacgcgccgggagtgcactccctacgt

SEQ ID NO: 581977 - DNA, 161 bp, Homo sapiens
agcaaacaggtactcaactgtgaggggagggctgtgtctgggcagaagtaggaaggttccaccctggaccgtccgacccccccgggccggcaggggcagcgggtccggcgctcagcgcgcggcgacctgttccggggcgtgctcagcccgagcaaccgcta

SEQ ID NO: 581978 - DNA, 463 bp, Homo sapiens
ctgcggagcagctcactttatcagagacatagataccatctagagatttgctgccctgcttgtcaggaccgcgcctgtatccgtgaggatcactatggcagagctggacctatccagatctcaggtaggccccgcttaccattgcatgaccccttcagtgaataataatttttttctgcctggtatgtgtccataatcaagcctttctacgttgcagagttgtgagataccactttgtcacatcatttttctccctactttttgcttctatgggagggaggcagatcttttttcttgaccacagatactaaagctgtttcaaccgtgctcctctcctgcagatctctgggggagccatggactctcaattacatccaaacagtggaggcttccgccctgggacaccctcactgcacccttacagatcacagcccctatacctacccccgggcccagcccctcc

SEQ ID NO: 581979 - DNA, 329 bp, Homo sapiens
tgtggtgtagcatcagataagcgaagggtccaggttggggagagccccaagttgagaacaagtaagtgaacaattattgtatgaacaacttgttacgatgacacgctaatcacaaacaacctgtgtgcaatatgttttcctaaaaaacgtagcacccttcagcaggaccctataaaactttcctccagcccttgcctctttgcaggtagccccttctctgctgagctgcccactgcaacatattttcacaatttctctaataaatctgcccttctttacctacaactatcttggtaaatggctttaccacctgcaaaactgaccctagg

SEQ ID NO: 581980 - DNA, 879 bp, Homo sapiens
  misc_feature (879)..(879): n is a, c, g, or t
ggacgcgtgggtcgacccacgcgtcgcatatagtaaagcccagcccatgacccctaacaggggccctctcagccctcctaatgacctccggcctagccatgtgatttcacttccactccataacgctcctcatactaggcctactaaccaacacactaaccatataccaatgatggcgcgaatgtaacaacgaggaaaagcacagttaccaaataggcccaccaacgaacacccaccgtgttccaaaaaaggcgcttccgagtacgggataatcctgatttattacctcagaagttttggtttcttcgcaggatttttctgagccttttaccacgtccagcctaggcccctacgcccccaactaggagggcacgtggccccccgaacaggctatcaccccggctaaagtcccccgtagaagtcccgactctctaaaagcacatgcggttagtgaactccgggatccagggagctattccagctctctgcgtggaggctcacgccatagcgtcgtacagctaggcaaaaacgtggccggaggagcgcgctcagtcactgtgccaagctgccaaccttggctttacgtctaacccaactgctcttacccttgggcggtccctccgaagttgttctgacgccccgcgtgcccgtacacaagagcgccccttctgcgaagggtgaccttgttcccggaggttcctgccccccttgtgcgcgcccgattttgttcccctgcgcccgtggcccgattggccttaccggggggtctgccacacgcagtgtgtgtgtgcgtgtcgtacgcggccaccccactgggggcgtctttccccacgcgtggggcccctgccacgcgggtccgacttctaccgtggggggccn

SEQ ID NO: 581981 - DNA, 1147 bp, Homo sapiens
ctcggtcaaggttctacttgagcaagacaaagtgggtaatagtgtgcccatgatgagtctgcatcaccatgacgtattaccttacgttccagggaacgagagagctgtccttgcaccgtggtggagctgaagatacacaggcaatgccagtcgcacatcttcatccttccctgtatcaagacaagatggaggaagtggaagcctatgcatgctcccagagaccctgtaagcggtggagagactctctggaggttcatgagaggataggtgacgctctacctgctcgatagtctatccatctcgagggactataacctgaacgacatacttctccagctgggcacttgaggaacgccttcactcagtcagatggctgaactctgtcagggatcagcagtgggccaggtaacgctagctagtctcccaggctgggtccataaggctgatgctatgatgtagtaacgaggagggctacagagagcaatctgctgccagcagcagtcaaagatcaacctccttgctgcattagtgtgagacaaggaccacttgtgcgtttcaatcagggcacttccatgatgagcgcttgtccctagcagacgcccacgaacatctgcttcagtgagcaaagtcaccaatcgcatagaagtctagagcttgccatcaagcacggggaggctctcggctcaggaccttgcggctgccagctggactgcctggcgtctctgcggcccaggcctggccctgttgccccgagtggccatgggcatgtgcagcccctgcccgcctatacttggccacgtgacccgcactccccatgcggtatgccctctctaaaattccccgcgcgggcacccctcgggaacctcgtccagacccgagcacgccacggggacccgctcgtccaccgccatacacgcacgccggcgcgtcacacaccacccaaccgcgcgcgcccctcacagccgtccccagggagacgccaagatacgcccacccaccactcattacagcgggccccgaaagggaccaacacggacccgcgccccaaacacccgcagcgaacactcggcgcacatccacaaccccagcgcaacgacagcactcacaacaccgcccaataccgtcccgaccacacgcgcacgacaca

SEQ ID NO: 581982 - DNA, 1172 bp, Homo sapiens
  misc_feature (818)..(818): n is a, c, g, or t
ctgatttgtgtgtgcaccgcgtctccagcgatcccgcgatccactgcgctgccaggggcctgggggtgggtctcttgctgtctctgcgacgacatccttacgtttctggcactctaatgctggcgtttgtgcgtgtgtgtctgcttagcggtctacgcgtggctgttaggctccctcgtcccccagctccttgtgctcgttcatgctcctccaccgcagcccagcatgtgagcacgcgcgcgcaggcagctccccacgagatggctacatgaccgaacgtgctggagccacggtaccctgggtgatctgatccgccatcctagtaccagctctattgcacggcgagtgacggtcaatgctagaggacggtgcatgccatcgatggaacgcctactgagaacgaaccaaccggagtgggcaaggtacgccaatgttcgaccagtacaggtatacccgaaatcttgtggatcaacggaacatggaccatttgaatctcgatcgattctctgtagtgggtagaacggacattgtgcagccagtatctcttcgatcataccatagtcccaatgcttgtcttgaacgatggctacagagagagtctacagcgagacattaacttggccttggcctgacgatggattccaatgagtatggtcacagaacggtctgaaagagtctggagggagaaccagtgtgcctagcatcaatgaatcccatagcgcttagcatcgcagtaagagaagcatacgatgcatactggaaccctggtgtgagccttcacgtaagtgacatgcccaccctttctgataacattgcgnaaagccctttgagtccaagcagcaacagggactgatagaccaaaagttcacaacttgacattcccattaatgcaacttgtgggaatcgggagagtcccagaattggtcaactttccagggcttcccgtggggaagaaacaaacagagaagggggccgcccaaacccatcatagaggggttttacattttaaaaaggtcccgttggatagatttccgcctttggaacaaaaaagaggagctgaacctcagcaagcgacgtggataccccaggagaatacttgtcatgatacccacgaatcaaagcaacgctattataagggcaacgacaatataacgagcgcaaagtacacccac

SEQ ID NO: 581983 - DNA, 99 bp, Homo sapiens
ggatttgctggtgcagtacaactaggcttaatagggaccctattaagcctagctcgaattcgagcctcgaattcgagctcgaattcgacttctaacgtt

SEQ ID NO: 581984 - DNA, 146 bp, Homo sapiens
ctgattctagaggatcaccaatgcagcggaatcgcgaggcagcagtcatagacgaccacttcctcttcgacaagcccgtgtcgcccctgctgctggcctcgggcatggcccggtgatggccctgacgcccgcggtaatctggcaca

SEQ ID NO: 581985 - DNA, 346 bp, Homo sapiens
ctgctcagctatctagtagctgggactacaggtgcacgtcaccatgcccggctaattttggtatttttattagagacggggtttcaccatgtgggccaggatggtctcgatctctggacctcgtgatccccccgcctcggcctcccaaagcgctgggattacagggggagccaccgcgcccggcctttcttcagtgcaatttttaaagagaaacttaaatcctgtggtattctttcaacacaagcaaggatacttctcagagtcggctcaaaagctcagctcggtggactccgtgacaaaaggtacgcgtccacggccgaccctctgggtttctgaaaccaacctg

SEQ ID NO: 581986 - DNA, 880 bp, Homo sapiens
gccccctgcatttccaaagcagagggggcatggcaatcttgggtcccattttggcgtctacccagaggaaagagtccatatatggaaatgaatcctgcagcacgcatgtgttagagcagcgacaattcacatttgcaaaaatggggaaaccagcccaagctgcccatcagtctactagtggataagagtaatgtgtggtgtatctatacgtaccatggaatactatctcagccaggaacgaatatatatggcattcacagtcaacctggatggatttggagaccattattcgtaagtgatagtaatctcaggaattggaaaatccaatagcatcgtatgttctcaattataagagggagctaagctatgaggatcgcaaaggctatgaggtaatgatacaatggtactttggggatctctggggaaatgacgtggaggcgggtgagggatcatagaactacacactgggtccgagcacggtggctcatgccatataatcccagcactttgggaggccaaggtcaggtagattatgaggtcgggagttcgaaaccagcctggccaacaaggtgagaccccccccatctctacatataaataattagccgggcctggtggcgcatccctgtaatcccagctactttacttgggaggctgaggcaggagaattgcttgaactcgggaggcggatgttgcagtgagccaatatcgcaccactgcactccagcctgggcaacagagcaagactccgtctcgtaaaaaaaaaataaattttaaaaactacacattgggtacaatgtacactcctcgggtgatgggtgcaccaaaatctcaaaaatcactactaagaactatccatgtaaaaacagaccttccagcc

SEQ ID NO: 581987 - DNA, 262 bp, Homo sapiens
catagctattcctgtgtacaatagtaatccgcaaatggagtgcgctgttgaagtcagaggagacacctggtgctcagtgtagcccaggatgccttgagggggcctccgacgcctgcttcaccaccttcttgacgtcatcatatataggcaggtattcctaagacggcaggtcaggtccaccactagacacgtatggaagtggggcacacgggaagggccatcgcaagtagagcttccccggtagcagcctcaagggggatcg

SEQ ID NO: 581988 - DNA, 125 bp, Homo sapiens
tagaatcgagccggtacccgctcacacatgcacaggtggctgttctgtcgttatgtcagaggaacagtcctgtcagaaaggggctcttctgagcagaaatggctaataaacttgtgctgatctgg

SEQ ID NO: 581989 - DNA, 166 bp, Homo sapiens
gtgatcccaggattcggctcatttcagagtcttcgtacatgctgtgtctttctacctacaacatccttctcttgcatgctccaccagttaactggttcacagcttcgcattctttgggtttcggcttaaacattatttccttgataatgtgataggataatgtgat

SEQ ID NO: 581990 - DNA, 244 bp, Homo sapiens
gcggatcccgttctatgagcacagacacacacacacacacagacacacacacacacacagagtgaagagagcgacgggaggaagaggcagggggggggaactgcgcagaggggaacactatggtgtagaagtgtgagactaacagtagaaaagctgtgaaatggtcggagtagatccaaagtgccacaacttcccaacatctattcacaccaccactcctacaaaaaatgagaataatgaaaca

SEQ ID NO: 581991 - DNA, 179 bp, Homo sapiens
  misc_feature (3)..(3): n is a, c, g, or t
gtntttgattttgatttaggggtcttgtgttagtcaactcagaccctctgccttatcacaaggtcagagagctttctgtatcctggggttcttgtcttggtgtaccagaaaaattggatctcacatgggcttggagaatgagtgcaagcttttgtattgagtggtggcatcgataaaca

SEQ ID NO: 581992 - DNA, 241 bp, Homo sapiens
tattttatctcaacataataaaaacgactataaatcttcctaagagaatgctctactcccaagactaatttaaactcggggatcgtcagagggagtgccactgtgacttctacgatgaaagaacaagggagagaagatcttatcgacaatcatacaaagccatatatacgctattcctcaactcacagagttaattaaatgtcaccaggatggaagaaaccttataagcccctatctatca

SEQ ID NO: 581993 - DNA, 294 bp, Homo sapiens
  misc_feature (163)..(163): n is a, c, g, or t
  misc_feature (165)..(165): n is a, c, g, or t
  misc_feature (208)..(208): n is a, c, g, or t
  misc_feature (230)..(230): n is a, c, g, or t
gttgcgctgccgccgttcttgccgtgcccgaacgtcgatgcgcccagcgaaatcgcgttgtaacgttgagctgcggctgcttggtgacgacgttgatcatgccgcccggatccatcagcccgtacagcagcgacgtcggccccttcagcacctcgacgctgtnanccgccgcgttgaacgcacggccctgcacgagcggcatgccttnctgcatgatcgagccgtcgcgnttgccccgaagccgcgcttcatgatcgtgtcctgcgtgcccgcgagcgtgttgccctgcgtgat

SEQ ID NO: 581994 - DNA, 175 bp, Homo sapiens
ccggatactcatcatttgcagcaaactcagcactctgactgcctgcattcatggtgtctgcgcgcgatgctctaccccatgtactggcagcactgtgtacatccccgctgctgccgccgcatctgctggactactgctgtgctcccatgccctacctcataggaatccatttaag

SEQ ID NO: 581995 - DNA, 821 bp, Homo sapiens
  misc_feature (95)..(95): n is a, c, g, or t
ggccgtccccttttttgtcggaggtgtttgctcggtttcgcgggtcctccggacacaaaatgccgccggggtttttctgcgccttattccgggcncgcgcgggggtgtacaaccaccccctcttgtgtgacgcggacgggtctcatctcagttgctagctcgcccgcccctttgtgtctggcgccttgtttgctcctgtcgcccgcgcctcgtcttattggcatagcgcgtctctactgcgtctcttctagcccccattgcttcctgtgggtaaagtctcccccacgcatgattccggtttgtacctctcctgttccacacccctgctgggcaccgcggctattgtctccccgccttatggataggaaccacctaatgggtttgcataaatgacatctcactgtggacaccactttgttctctctctcctcgaaatcattcccctcgcgggctctccaagttttctaaaaccacgctcgtgattcggtgcacactatctaccacgtcacccccccaaattgtatcgaacagtctcgatccccgccacggtttctcttctatttacccaccctctcgctgtcgtgtcatcagctcccgtcctctctgagcgattgctttactaaaaaggaaagtgtttaagaacaatgttatatgactccgcgcccatattttgctccctcccttttttgacacccaaaacactctcactcctcttatctcgtctcgcccccttttttaggcgccccccctctgcgccccatgacaacccataacttcttcatcggcccccggttcccctaacccggcggacaataacaaaa

SEQ ID NO: 581996 - DNA, 883 bp, Homo sapiens
  misc_feature (41)..(41): n is a, c, g, or t
  misc_feature (144)..(145): n is a, c, g, or t
  misc_feature (147)..(147): n is a, c, g, or t
  misc_feature (150)..(150): n is a, c, g, or t
  misc_feature (172)..(173): n is a, c, g, or t
  misc_feature (182)..(182): n is a, c, g, or t
  misc_feature (185)..(185): n is a, c, g, or t
  misc_feature (193)..(193): n is a, c, g, or t
  misc_feature (199)..(199): n is a, c, g, or t
  misc_feature (201)..(201): n is a, c, g, or t
  misc_feature (203)..(203): n is a, c, g, or t
  misc_feature (211)..(212): n is a, c, g, or t
  misc_feature (220)..(220): n is a, c, g, or t
  misc_feature (226)..(226): n is a, c, g, or t
  misc_feature (230)..(230): n is a, c, g, or t
  misc_feature (241)..(241): n is a, c, g, or t
  misc_feature (244)..(244): n is a, c, g, or t
  misc_feature (246)..(246): n is a, c, g, or t
  misc_feature (254)..(254): n is a, c, g, or t
  misc_feature (334)..(334): n is a, c, g, or t
  misc_feature (338)..(338): n is a, c, g, or t
  misc_feature (345)..(345): n is a, c, g, or t
  misc_feature (349)..(349): n is a, c, g, or t
  misc_feature (352)..(354): n is a, c, g, or t
  misc_feature (400)..(400): n is a, c, g, or t
  misc_feature (404)..(404): n is a, c, g, or t
  misc_feature (412)..(412): n is a, c, g, or t
  misc_feature (421)..(421): n is a, c, g, or t
  misc_feature (434)..(434): n is a, c, g, or t
  misc_feature (436)..(436): n is a, c, g, or t
  misc_feature (444)..(444): n is a, c, g, or t
  misc_feature (446)..(446): n is a, c, g, or t
  misc_feature (453)..(453): n is a, c, g, or t
  misc_feature (457)..(458): n is a, c, g, or t
  misc_feature (460)..(460): n is a, c, g, or t
  misc_feature (467)..(467): n is a, c, g, or t
  misc_feature (490)..(490): n is a, c, g, or t
  misc_feature (492)..(492): n is a, c, g, or t
  misc_feature (509)..(509): n is a, c, g, or t
  misc_feature (511)..(511): n is a, c, g, or t
  misc_feature (540)..(540): n is a, c, g, or t
  misc_feature (587)..(587): n is a, c, g, or t
  misc_feature (669)..(669): n is a, c, g, or t
  misc_feature (750)..(750): n is a, c, g, or t
  misc_feature (873)..(873): n is a, c, g, or t
actttatcctttaaagcagcagcaatcacaaggcacatatntacaaaataccatcaagcaaaatagaaactgaacattcaaaaagtatgtgttgtttaaaaagatgttgaagaccatttgactaataagcacaggttataaaanncncanttccccccctctacctttaacnngacaaggcntgncggcatancacccncncnccataccnncgcacgtntaacanaccnttacaccacanaancnggattgcnaaagaaaaaacaggtaaagtactgcttaaaaatggtatttttagtgctttcacatcttttgtagatatctgggatttgtnagangaaaagngagnttnnntttttccttgggttagtaaaggcgtgtggttacacgtccctagggnaacncaccatanaggggaggngtagatttggtanantctgggananaaagggnaagnntnagattangggatcaacataataaccaactntnttcctaaaatatattanangtgaacacataagatatgtaaagaaaggntaattacattaaaataaaatagcttcagatttaaattattgctcacntaggaagtataatgaatattctctggctaaggatgctcagattagaaatggtgtgacatcaatatttagtgtgtacaaaagntctaagattcaaatacaatgcaaagtttataataatcacacaaaaagtgttccttttagccaccatttagcttcacacaangaagactggaaaatacgtgggttatttagatcttcaatataaatttgtaccacatatgttgaagtgttcctcttagctttaatgttgcagtcaattttctatgaaatactaaggagttaaggngtgcttactg

SEQ ID NO: 581997 - DNA, 401 bp, Homo sapiens
ggcttaaaacatctttttcttgggaagtccaatctgagtccatgagccctccatgttatagttataccatctagaatttatggtgtccagcattgctggggaagagcaggcatacaggggaggctcgtcagtgagtgactgccgaatctcagaagtacattcttcctgctcattgttcattggtcagttcttacgcacatggccctagaagctgcaggggagcctgcacgatgtacttttcaaaactatatacccaaaaaagggaatgagtagaatttggtaagcatatagggttgtctctactacacaggtatacttaatcttcatttagtatatattagtaaagccattttggtatgctcccctgaaattgagaaaatgaatttctccagtgacaatat

SEQ ID NO: 581998 - DNA, 861 bp, Homo sapiens
  misc_feature (113)..(113): n is a, c, g, or t
  misc_feature (268)..(268): n is a, c, g, or t
  misc_feature (640)..(640): n is a, c, g, or t
ccattgaggtgggcacccagggaagacggccacacactgcccgggggaccagaacagattccccgtgaagtccgaccgccgagcgcgcgcgccgcgcgtaagttgggttaggnacagctcacacccccgaggcagttgcaggagagccacaccaccataccaaacgttgtggttggcacactgcggctctcaccgggggaaaagaagacaaaagagcagtacagtgttcgcacggaagttggatgctacaaaataatatgaaggaggngccccgctgatctaaggatctccacgtggagtgaagcgggggagaacagaaacgccaacacacagaaggcgcctccggcagcgccgccgcggcgccgcaactcccgccgaggaattgtcttatctatgcaagaccacgcggcgtcacgactgatatgtactagtggggagttgggcggttgcatgccaccgcccagtcgctacattcatcctttcttcccatctgcaccctactcacacgaggggttggcgagcacatgtgcagcgccgaggacacaggaaggaagcgagggtgcaaggacgctctcctatgactatggtcctattcgtggcatggtaggcaacagcgaccgcgtgacgccgacacaccacncgacgccgcgtctaccaagggcgacacagttacgtgtacgacacacaagaatagactctatgagctaagctaacgtactttacttgacccagagcgacacgcgcctcacgactcactgacgcgcgcagtgccgactataacccgataagtgacacggacacaactgtccaaacaaagccactgacgcagtgtgtatcgtccacgctcatataacataatat

SEQ ID NO: 581999 - DNA, 144 bp, Homo sapiens
tgaccaaaattgatgtatacttgactcggtaacacgttataagagttctgataattccatgatctcagcaaacacttggacttgcctctagatactttcacctgagcttattaaattaaaggaaggcttactgtcctttctcac

SEQ ID NO: 582000 - DNA, 608 bp, Homo sapiens
agaaagaagtgaagtcgagatgaagaaccatttgcttttctggggagtcctggacgggttttattaaggcatgttcatgtgagaacgcccaagaagatgaaacggattgttcttgtcgacaacgaatgtcatgtgtgcccggattacttccaggtatcatccgtatctgtccgaagatcctactgaggacagtgtggagagaaacatccgaatcattgttcctctgaacagcagggagaatatctctgatcccatctcaccattcgagaaccagattcgtgtaccatttgtctgacctctgtaaaacatgtgatcctacagaacgtggagctggatacatcacgatagttactgttaaccagagcaatatctgtgatgaagaccgtgctacagagacctgctacacttatgtacagaacacaagtgctacctcagctgtggtcccactcgtatatggtggtgagaccaacaatggtggaaacatgccttaatcccagactgcctgctatcctgactaatttacagtcatctgctgactgcatagctctataatcttgagcaggctctccatttgcattcagacaagttaagcctatttaataaccaag

SEQ ID NO: 582001 - DNA, 148 bp, Homo sapiens
taaacattgatattagtagtggctagcagcaaggatctatgggcgtccgaccgtgatgagttcgttcaacgtagcataagaacgactcgtcgtagccatagcgtactctcagatatgagactggctctgaccatctacaaccactctt

SEQ ID NO: 582002 - DNA, 373 bp, Homo sapiens
cattgtaccatcatggacgatgctgccactcatttggattctgactgcggtggggatgatgggatccccaagtagcagagattgagtggcagcacttaacactacagataggtgtgccatgcagaatgggcagtgggaatgagcggccagcagactgctgctggccacagggatctttggcaatggctgactggctattatggtgtccttaagaatgaagtagatgggcagcctaataagtgttgctttatctatttgatggcagaaactccaccaggtctgggtagccagaggtgccacagggaacagtcacagcctcaccccaatcccgggcctaaccagttctcagattggaagccccttgattgaatcc

SEQ ID NO: 582003 - DNA, 383 bp, Homo sapiens
  misc_feature (14)..(14): n is a, c, g, or t
gtacagccccaggncatggtgttcaacaccctgtaatcctcagcactttgggaaggcccattcctcgatggattgcctagaagcaggagtttgaaaccaaccctggacaacaaagtaagaacctgtatctacaaaaaaaaaatttttaattaactgggcatggtggcatacaccagtggtcccagcctcccgaatagctgggattttaggcgccgccaccgcgtccggctgatttttctgtttttggtagagatggggtttcaccatgttggccaggctggtctcaaactcctgaccttgtgatccgcccacctcggcctcccaaagtgctgggattacaggtgtgagccactgcacccggccagagatattcgtaaaaaaaa

SEQ ID NO: 582004 - DNA, 961 bp, Homo sapiens
caccgtgctgaagggaaaagacaccagttgcacttggtgtgagcaggggtccggcaagaagggagacacatgctgtgcctgggagggaagaagtcgcatgaagaagagcatcaggggtccggaggctaggctagcgcgagcaggagtagcgaatagtgaacaaaggaaggcagctgggtggtcgttgagggagacgcccagtcccgatgcgaagtgtagtgatggtgcaactccgaggacatggcaatccaccatctcgacatactagaccgcgcactgtatgagctcgtgagccacaagtccagtcgtcacgtcttgtcgctgaggaccaccttgaatttttggacatgctgacggacggtgcatgggggactatgggactccttggggctatgtgcgcgaggcacttcgatccacgtcgagtccattgcacgaacaacctcccgttgtccttctgcgtatggtgcgcctcatttgcttggcacagtgaaacgaacatcgaagccccaaaggaaatcacattcaggagtcgggcatgggcgtaagctggatgcgcggattcatttgcgccacttgcagccagaagttgtcctcgtctcccagtggacacctagggttaacagcggtagtggctcattggtaggtgtattcaaaggaactggcccaagggaacttccctaagatgtggaaacttacacgggagaggggacacggtcgtcacgacaactgttgcccaccaagggagcctgtgaagacacccactcccgggacgacgcacaactcctggcgcaatcccacttcgaggtacccttccaaccaaacaaggggctaccaaaaggtgacaatggaaaggcccccccttggggacagcctcacgtacttcatagccttgctaccaagcgcacgtgggtggcgaacagccgtttgacacttcctggtcccatgtgcccttcccacagga

SEQ ID NO: 582005 - DNA, 555 bp, Homo sapiens
gttacagatctgcagactaacaccagctgcatagtcctgaatagtgcactttgtgtaaacagtttcactttctagatgctcagcagcttgtgcatggaacagcatcgactcagaacgatgtcgacgtagagtctgctgctcaccttcggtgacctggtcgattcccgtgccctgtttaaattcaaaatcccaaattgcagcacatgatgccagaaatagcactgaatcaagaaaatagccattgcgcgagttggcctcttgagtctttctgtccatcccattctattctgtaactgtgacttccagtcaggaagtttggtaaggtgtttaaaataaagtgggaagagcaagtttgctcaggtcaagtgctcagatcccgaatctagattccccagttctaaggccttatcacctcccctgcccataggccaacaaccatagttcctcacattagtgattagcagactctttgtggacgagtgaatttcacaaacagcacaaatttcagaagacatcgagggcacaggccctcacttgtcttcttttgacgcatca

SEQ ID NO: 582006 - DNA, 823 bp, Homo sapiens
ggccaccggggtccacaatgctccgggggaccccccctggccccccctggggagctgtgcccccccgacccattgttcaggcaaccaggtccaacccaccaagcgcgccttggggcggaacggaccaccccccctgggtccgcccggagatccaaagcgggaaacaaagttggtcgcccgccctcccagcgcatggaggatggggtgcacctgggaaagacctggtcacgagggtttatcatccaatcggagacagaatgcaatggggaaaatggtgggacccttttcccccgaggctgaccaagtccgccccactgctggttaggaagatccccggagagagtccctgaggggcctacctcttcagcctacagccacgtgtttatgactcccctcagcactggagacgctgtcagaccacagtttgagctggatctgccccctgtgcaactccatcactcagccaaatgatccttaatgaggagctgatggcctcctggaccagcccacacagacagtggtgatgcaccgcactgagcccactgccccgcagagacctcggctctgcaactggccgagaaactgggcagcctcggtggagaaccacgaacgggggtttgaccacacagcagggcacctacgggggctacttccgagaccagaaggaccggtcccgccaaaacgagggtacatgccccgcggtggtacccccagcagcagtttcagacggcctactgagctttccactttgtttcccgcctgggccatccaaccttgaagtcctaaaccccacctcagtcattaaggttttgtttaaagttta

SEQ ID NO: 582007 - DNA, 266 bp, Homo sapiens
atcccagaagcttctggcaaatggtagatgtcaatagataataatcaaattgactaatacacaatttaagccactcctgcttcagacccagtaaatatactgttcctccttcaaacacttaaacttcattatcacaagctaataaagcaactagataaaattgtgaaacataatttagtaatagacttctaaatatcccagaagtgtaaaatcttatatgtggaaatgttcattgagatactaggcattctagggatatcatggaa

SEQ ID NO: 582008 - DNA, 131 bp, Homo sapiens
cgttgcgtgtcacttacggccgtttggattaacgtgaaatattagttggcggacttaagcagatgtgaggaaagttgagccaataatgacgtgaattccgtgaaactctgtggctacaaaaaatgttgagc

SEQ ID NO: 582009 - DNA, 373 bp, Homo sapiens
  misc_feature (233)..(234): n is a, c, g, or t
gagatcatgccattgcactccagcctgagccatagagtgagtcttggtctcaaaaaaaaaaaaaaaccttgtgttggaaaccatctccaatgaagcagtgttagaaatagggcccaataggatataaattacagtgttaagatgcatactttactcttttcttttgagaagggagagagtatgttatgcgatgaaaacttttcagatttcttacagaggtcatagtgttccannacaagctgcgcaccaatgcgttggcgggtatgttgcgatatgtatattgcgtagcattcagatttgggctggctggtgtctggaaagttggggacaggttcatggtaataacctgctcaatgtaaaataaaaaaaaaaa

SEQ ID NO: 582010 - DNA, 418 bp, Homo sapiens
taacagagctgggaagaatattcaagatgacctgatttaacacctttcattctgttggggggcctttgatttcctcatatccagaagttgagagacttactcaagattgtaccatgcaagctggcaactagaacccaaatccttggactacttgttgaatgcagtttttctagattgtaaattaaaaatcatatccccacaacggctctggaaccccggggaccgcctcctaacccagcccacaagcgacagaaaacccgccatgccgctctgcagcctcacctcagacctctaaacgcttacttaaatgtaaaaaaaatttttttttacaccttttaaagactatatttaccattttgttgaaaaagtaaagaaaaaccatgacccgcaaccaaacgcgaaccacaatccccgagaa

SEQ ID NO: 582011 - DNA, 502 bp, Homo sapiens
  misc_feature (417)..(417): n is a, c, g, or t
ttaaggtcttatcgatgctgttgatactagttagcctgtcggctaatctgtggtgaaggttgttagcttctgtgagatgggttcgaacatcctcctttagctcggagaagttgttattacctatcttttgaagccttcttctctcaactcgtcaaagtcattctctgtccagctttgttccgttgctggtgaggagctgcgttcctttggaggaggagaggcgctctgatttttagagtttccagttattctgctctgtttttttcccatctttgtggttatatctacctttggtctttgatgatggtgatgtacagatgggttttaggtgtggatgtcctttctgtttgttagttttccttcaacagacaggaccctcagctgcaggtcggagctggctagaggtccaatccagancctgttgtgctgggtatcagcagcggtggctgcagaacaggggatattggtgaaccgcaaatgttggtgctgatcgtcctctgga

SEQ ID NO: 582012 - DNA, 128 bp, Homo sapiens
ttgatgtaaaaatttgtaaggaaaattttccccatttcgagggtcaagggtatttttaaccgtctggtttgtccttttaggccttttgtccccccaaagcggggttaaaaataaaaatgttaaacgca

SEQ ID NO: 582013 - DNA, 100 bp, Homo sapiens
gctccttcaccaaacaacttcccgagaaccataaattgaataaatattcacagaggtccgaggagaagcaagatcactcttctctccatggaagagggag

SEQ ID NO: 582014 - DNA, 552 bp, Homo sapiens
aaaatgagcagctacaaagactacacgttggcattaagaattgccacagcacatcggccagctccaaaacctgacattaaccatccctaataacgactgtagttcccaataggctttatagtgctttactcttttctttttgttttaagagactgtgactcgctatgttgatcacgctggttttgaactcctggcctcaagtaatcctcccagctcaacctcccaaagtgttgagattataggtgtgagcacagcacctgccccccaaccccaactgcctttatcattagagacagagtcttgctctgtcgcccaagctgtagtgcagtggcatgattatagctcactgcagcctcaaactcctgggctcaagcaatccacccgccccagcctcctgagtagctgggactataggcacacaataccatggccagccagtgctttactcttaaatatggacaaccaaaaactaccatgcagctgaggaagccaccgacatgggagagaccaagaaaaacaaataaacaaaaaattatgctagaggaaacagat

SEQ ID NO: 582015 - DNA, 823 bp, Homo sapiens
tagaggcttactagaagtgtggactagttctagatcgcgagcggtcgcccttttttttgtttttcatatatatctataaattgctggtggatacgcttcccaaaacagagacatccaaccaggcgttagaatggcccatctcgcaacatttcaaaaaacattgcaccccccagtggggtgaccaaagtatcgagtagtaccctagagttcagctgagtaggccacttgtggagcctacaagtggctgaggtctccaattccagagtgatgtgtctctcacctggtatcatcatttaacgcggaaaaacataatttgaactttgggggaacctgacggattcatctcgtaacaggattagtaacagcattcacggaatttcacacctctcctttggcgaccggctgcagaaccatgactggctagctagaagatcaccggggatcccagcctccagctgcaggatggaatgacgatataccaggacaaaaaacacctaatatttgcgtttacaacagctaacagccgttttaaatcgtgtcactctaattgacagaccaaattaaaccagaacctttttcaacatggcgccacatataccacccagcggcgtgtctcccaacaacttcttttctcgccaacaggtggcataggtctaagtggcctagttaaataaaacggccctggacacatttctcgccccagcgcagctccgctctggaagctcattcaccccagttaaccgttttctctttcacccattatagctcgcaaaacctcttagagacgcatcgggtccacgcttcacgcgtcttagctccccac

SEQ ID NO: 582016 - DNA, 399 bp, Homo sapiens
  misc_feature (220)..(220): n is a, c, g, or t
ttatcgctcctataggaattggcctcgaggcaagattcgccgaggtatgtagtttccattactccgtgactaagcttcaacgcctagggtcgcctgacccaccgcggcttagcgtgacaagcaaaggtggtctccgaggtgatcaggcgttctccgcccgagaatcagggcatgacgaggctggatacgcctgcacgacatgggtgtcttaagttgtcgnttggcaagtctcgaagcccaggtctagatgcagcctgtcaggcaagtaagggtgtttctccgcccatactgcccccatgggcctgtgtgggcaggtgccgctctgagagttggccctcccttgtgcctgccaggggaggaaaggcttgatgttccagcaataataaatgcgcctgtatt

SEQ ID NO: 582017 - DNA, 2132 bp, Homo sapiens
ggatcatgcacagaaactttcgcaagtggattttctacgtgtttctctgctttggcgtcctgtacgtgaagctcggagcactgtcatccgtggtggccctgggagccaacatcatctgcaacaagattcctggcctagccccgcggcagcgtgccatctgccagagtcggcccgatgccatcattgtgattggggagggggcgcagatgggcatcaacgagtgccagtaccagttccgcttcggacgctggaactgctctgccctcggcgagaagaccgtcttcgggcaagagctccgagtagggagccgtgaggctgccttcacgtacgccatcaccgcggctggcgtggcgcacgccgtcaccgctgcctgcagccaagggaacctgagcaactgcggctgcgaccgcgagaagcagggctactacaaccaagccgagggctggaagtggggcggctgctcggccgacgtgcgttacggcatcgacttctcccggcgcttcgtggacgctcgggagatcaagaagaacgcgcggcgcctcatgaacctgcataacaatgaggccggcaggaaggttctagaggaccggatgcagctggagtgcaagtgccacggcgtgtctggctcctgcaccaccaaaacctgctggaccacgctgcccaagttccgagaggtgggccacctgctgaaggagaagtacaacgcggccgtgcaggtggaggtggtgcgggccagccgtctgcggcagcccaccttcctgcgcatcaaacagctgcgcagctatcagaagcccatggagacagacctggtgtacattgagaagtcgcccaactactgcgaggaggacgcggccacgggcagcgtgggcacgcagggccgtctctgcaaccgcacgtcgcccggcgcggacggctgtgacaccatgtgctgcggccgaggctacaacacccaccagtacaccaaggtgtggcagtgcaactggcaaattccactggtgctgcttcgtcaagtgcaacacctgcagcgagcgcaccgaggtcttcacctgcaagtgaggccaggcccggaggcggccgcgggcaccctggaacccggcggcattttgcacatccactcctcaccttccctgccttggtgctgccagcagcagacatagacgggtgcagaagcggggagctccaggtgcaggagggcaccggccggggcccacgccctctgcccgcctccctggggctccttcctgccacctcctcccatcacctcctgcggcagaacagcacccgtgacccacccagagagcaaggccaggggtcttggtgctccccgacggggcccggcaagttctctttcttctctctgggaaaatgaacgtccaggacacacctgtatcccagagagcaaagtgatgaggagactgagcgtccccagccccacctggcggcatggacacagaaaagctacgccggctggcctctccagaccagttcccaggctgggtctgccgctgggccctggggcggtggggacagatgttgacacaaattatttatgttttcttagtatcagaagaggattctcggcactaacacatagccagtcctaactccgtactctgtgtcagcccatcccctagacaccctctgtttcctttcccggccccacctggccggcctctgcccctgcagagctgaggcagcctggggttgatggggaccacgcggtgcctgcaggtcctagaagtgagctgggcaggggctcttcagaccacacagccctgaccgggccttggaggagagccatggacaggctcctccatgccgtctttccttcttttgaaaatcctatcaatggctgggcgcggtggctcacacctgtaatcccagcactttgggagaccgaggcaggtggatcacctgaggtcaggagttcgagaccagcctggccaacgtggtgaaaccctgtctctactaaaaatacaaaaattagctgggcgtggtggcgtgcacctgtaatcccagctactcaggaggctgagacaggacacttgcttgaacccgggaggtggaggttgcaatgagccaagattgtgccactgtattccaacttgggtgacagagcacgactctgtctc

SEQ ID NO: 582018 - DNA, 259 bp, Homo sapiens
  misc_feature (6)..(6): n is a, c, g, or t
ggggancccccccccggggggtccccttccctttggggccttcccctttttttgggggaattaggggccggggccttttgggccccccgtttttgggttttttagggggggggggtttgggggcccggccctttttttttccccctggggggaattaaattgggggggaggggtttggggggggcccttcccccccccccccttcccctttgggtttttgggaagggggcccccccggttttttttgcccggtttttta

SEQ ID NO: 582019 - DNA, 352 bp, Homo sapiens
  misc_feature (341)..(341): n is a, c, g, or t
gagacggagtctagttctttccctcaggctggagtgcagtggcatgatctcggctcactgcaagctccacctcccaggttcacgccattctcctgcctcagcatcccgagtagctgggactacaggcgcccaccaccacgcctggctaattttttatatttttggtagagactgggttgcactgtgttagccaggatggtctcgatctcctgacctgattatccgcccatctaggcctcccaaagtgctgagattacaggtgtgagccaccacacccagcctctttctttcttctttctttttttcttcaggatttcattcctgttgcccagattggactnagtggcacgat

SEQ ID NO: 582020 - DNA, 111 bp, Homo sapiens
tactagagatctcttcgacggtgtctgtaatgctgactggtgagtgtttgactgtccccagtttgtcaccgagaggaagtcatgctttgcacagcccgctgtagttatcat

SEQ ID NO: 582021 - DNA, 401 bp, Homo sapiens
agcccagaggccccccggggttgtttttttaagggtttttttccggggggggggggaggggggtgggggagaaattagcccccccttagggggggggggggggccccccccccccctaaaaaaaagcccccaaggggggggggccccgatttcttggggttgggggttggggggggggggtccccccaaaattccccttgccgggttcccctttaggggggcccctgggggaaaccgggggcccccaaaaagggtttttgggttttaaccccccccccccccccgggggggtttgggggggggggtcccggggggggggttttttttccccccccggggggttaggcctttttcccgggccccattaacccccccttttttttttttttttgccttccgga

SEQ ID NO: 582022 - DNA, 134 bp, Homo sapiens
  misc_feature (39)..(39): n is a, c, g, or t
cctgcaggttgcctctacgacggactccccgaacccaanccggtgacgcccacgcgcaccaacactactcctgcggtttccggcctgcgtgccggggtacccgtacgctcgacatcttcgtacactcacgtggt

SEQ ID NO: 582023 - DNA, 690 bp, Homo sapiens
ggtcttttatcatatcctataaaaagttgagttaacaggctgggcacggtggctcatgcctgtaatcccagcactttgggaggccaaggcagctggatgccccaaggtcaggcatttgagaccagcctggccaacatggcgaaaccccatctctactaaaaatacaaaaattagccaggcatggtggcaggcgcctgtaatcccagctactcgagagactgaggcaggagaatcacttgaaaccaggaggcgggggctgcagtgagccaagatcacgccactgcattccagcctgggtgacagagcgagactccgtctaaaaaaaaaacacaagcgttgaatttcccaatacaggacaattgaggatgaagcggtaacaacagtgtttggggtcacctttatactctcagaaagctatgtggttatagacgcaaaggggcccccaaaccaccaaaacgtcacggggaactaatacctgtcgtgcttcatactaggtatatggtaccctgagaaagtcaccttaacctcctcttgaacctttaacttcggtccaatctaatacaggtgaaattctcaaccgttttcgcccccaggggcttaaccttcaaaagggtataggatggaaacaggaatccaactctgaaacttaagtgtaccgtgaaacaagaccttacttttcacactgggtta

SEQ ID NO: 582024 - DNA, 348 bp, Homo sapiens
  misc_feature (348)..(348): n is a, c, g, or t
ctcctacaggcagccaaacacattgattacctgttacattttaggatagaaatcaaagtagagcacgttggcatgagcctctttgtctcactccatcatttccagtatattcagtagttgaagaaagagctctacctgagtcagctgcactgtcatgagttagaccagtggctgagattagtagatggttcactagacatgttgctgttatgcagacattatatccattccagtcctctgcactgtacactgcagcagtgtgcctatgggacttagagggttgctgtcatctatccatgtgtggtagcttgctttcctctgactgtgcatttgcatgcttgtgcttgn

SEQ ID NO: 582025 - DNA, 470 bp, Homo sapiens
ggaggactgtcctgagagctggtgcattaggtgcctggccagtcaccatggtgaggacctttggccaactgccatgtaggagctttgcaggggcctgccagacaactccggctcccactccagagtctccttgtccctccccttaccctgtcaactctctgataacaccccctcgccgaccatagtcctttggccccagcctggagatggcctctgctgttggttctctggattctggattgagtcactggaaagggttgcatggcccattgtgtgttcagcgcttgtttgtttccaccaaatctcggaacaatgctcaccctagtctgcatgtccagtttcttgacagtattggaaaacacagctctctaatgtgtattctatccagtcggcttaactccaattccctgtttagatgactcggagaaatcgttttcagtggctagcggaccataatgaccttggccgta

SEQ ID NO: 582026 - DNA, 200 bp, Homo sapiens
  misc_feature (18)..(18): n is a, c, g, or t
  misc_feature (36)..(36): n is a, c, g, or t
  misc_feature (76)..(76): n is a, c, g, or t
  misc_feature (79)..(79): n is a, c, g, or t
  misc_feature (102)..(102): n is a, c, g, or t
  misc_feature (131)..(131): n is a, c, g, or t
gagaccctgtctctaaanaaattaagtagatatatnatatataatacatttttataattatcttattttataaccnagncatggttgcgtgtgactgtggtnccagctactcggggggctgatgtgggagnatcgcctgagcctgtagatggtttgaggctgcgatgggctcatggtctatgccactgcactcctagctc

SEQ ID NO: 582027 - DNA, 137 bp, Homo sapiens
gtggtaagctgctcctacagtagatggtattgagggtatagtaagtgtaaatctcaacactccttaactacatttgtttcttagaatccttctaactctgattatgtagatacctgggagacgttttaaaacaaaag

SEQ ID NO: 582028 - DNA, 185 bp, Homo sapiens
ccgggagccttaccctccggtaggccttaacctcggagccttaccctccggagccttaacctccggagccttaacctccggagccttaacctccggagccttaacctccgggagcccttacctaactcatgttctttttcaggatccaatcaatgctatacattacattaagtcacatgtcccct

SEQ ID NO: 582029 - DNA, 140 bp, Homo sapiens
agaccttgggcagctgcagtccccccagaattggtccctattatcccgccaggacttaagagccagcggaggtaaaccgccagcccctttagagaatgcctacctaagtagtagccttaccaagagacgcagtctgccgt

SEQ ID NO: 582030 - DNA, 519 bp, Homo sapiens
aatgaaaaccttcaaggcgatattaacgattgggccaacacaaaaattttggcacagtgtaatgaaattatcccccggctttataaaactccccccccccagaaggaaatattttacctccacaaaaaaaggtgggaaaagtttgccccccctttttccccaaattttaccaaagtgcaggaggcctccccggaaaaaatcctgggggattttctggggggggaacccccccctttggtggggcttccccagggccccccctttaaaaggtttattaaaccccccaagtgtgaatgtagcctttttcccccccttttaaaccttttaagggccttaatttggaacaaattttggggccgttttaaaaagttaaaccgctaaagtaagtttcggggccttttccaacctttaatatgggacatatgccccggggaaggaaaaaaccttcccctttttaaacccttttttttaaatggaaaaaccaatttttttaataaaacttttttaaattggccccca

SEQ ID NO: 582031 - DNA, 534 bp, Homo sapiens
  misc_feature (1)..(1): n is a, c, g, or t
  misc_feature (148)..(148): n is a, c, g, or t
  misc_feature (207)..(207): n is a, c, g, or t
  misc_feature (224)..(224): n is a, c, g, or t
  misc_feature (250)..(250): n is a, c, g, or t
  misc_feature (267)..(267): n is a, c, g, or t
  misc_feature (285)..(285): n is a, c, g, or t
  misc_feature (290)..(290): n is a, c, g, or t
  misc_feature (295)..(295): n is a, c, g, or t
  misc_feature (298)..(299): n is a, c, g, or t
  misc_feature (307)..(308): n is a, c, g, or t
  misc_feature (312)..(312): n is a, c, g, or t
  misc_feature (317)..(317): n is a, c, g, or t
  misc_feature (319)..(319): n is a, c, g, or t
  misc_feature (321)..(324): n is a, c, g, or t
  misc_feature (346)..(346): n is a, c, g, or t
  misc_feature (360)..(360): n is a, c, g, or t
  misc_feature (362)..(362): n is a, c, g, or t
  misc_feature (369)..(369): n is a, c, g, or t
  misc_feature (371)..(371): n is a, c, g, or t
  misc_feature (404)..(405): n is a, c, g, or t
  misc_feature (408)..(410): n is a, c, g, or t
  misc_feature (417)..(417): n is a, c, g, or t
  misc_feature (432)..(432): n is a, c, g, or t
  misc_feature (472)..(472): n is a, c, g, or t
  misc_feature (522)..(522): n is a, c, g, or t
ntattcttcttaggttgtgtaaataatttttttctaccatcccccatcatttgcatacatttttgtcaagtccaaacataatttgaagtgaggtaggtagtttctctctacttgtgccgttgtccttggggtgatgtcggggcctgtnccctgaacgcacttgtctcctgtgcaggggcagtgccaggactggcatcagtggctggnggagcttctcagttggntattttctcaatctcgtccaaatcanctgtgtccaatctttcnatcttcttattaaaatgntcctngattnaanncaaaaagnncatncagtncntnnnntccaccatgttcactgccaggnccctcttgccaaancngcccgtncncccgatccggtgcaggtaggtctcattgtcagnnctnnngtccttntccacgggtagttcnaagttgatgacgacagatacttgtatcaacatcatatgcngcgggcacacacgttggtggtcaccaaaaccttctctttgccctctcggnggcgctcaatca

SEQ ID NO: 582032 - DNA, 914 bp, Homo sapiens
gggacccttggggtctggacgcgacggcgggggagatgaacgcccctccagccttcgagtcgtcttgctctcgagggcgagaagaagatccccattagcagggggactcctagcggtacccaatggccctgttttattcaacacattcaacaaatgaaagaccgacacactgcggaaacttcaattaaatcacaagttccataaaaagaacgcgcagaggtgccttatttgtgctgtgcttagcaaaagtgtcgcccccaaccctttggggaggcaacaaagactatttcagtccggaggtggctaagaccgacggcgggggattttacaagcccccccaggggataggccttatgtaacaaaaggggccgtatcaccagagtcgtcatacagtgagcgtggcccccgtgtcttggagaggagcggcttttgccgggtgttggccgatatagaagatcaagcaggggaaggggaattgggaggtagcgggggccgggcagggggggctctttgcctccggggtccttgttgagccccagggtttcacctaattgtgttgccttagaaccacttcgcgtttcccagggttaccactcacccggggagggaaagaggccagggcggggccaaaggacacagtggtccccgggctgtttgtgttgggccactctcttatgaaacttgaaaacggaacggggttctgtactgataagagtaagggtttaagtattccttaaataaggttatagcgcaaggaggcagaagaaatgagaaaaaggaacaaagtgttttggggggcctgtgacgccgagagaaaaggttttagacaagaatggtgggggggggggccaagagtttgtgtacatggtccaaggggcaaggaaacgggaaggaagggggggcttctcaaaaag

SEQ ID NO: 582033 - DNA, 114 bp, Homo sapiens
ggtgtccggcgacctagaggatccccctcttcattgatttgtcatgatggttgatttacgttgtcaccttcctcttacggattttagctctaacttttgtttccacacgtcata

SEQ ID NO: 582034 - DNA, 454 bp, Homo sapiens
gcggccgctactactactacgcctactactactaaattcgcggccgctcgacgctatgttacccacagtccattgcgcagtgtcttgatcccaggcctctacgtcgcggttatgaaccttcccggcgtgcgcacagctcatgaattcactacctcctgtccttgtcgaactacgcgcgggaccgtgcgtgcaccgacgcctcgatacccgtctgccgttttcccgcatggacctggcgctgtaccgcgagctgatgagcgcctattacggcttctatcagccgctggagcagccctggcgccgtggggtgaaatcatccctgacctggaatgggggcggcgtacgaaaaccccgtacttgcaggctgatttgcgggcgctgggcctggaaaactcgcaaatcgacgccttgccgttgtgctccgaactgcccgccatcaccaacgtggcccagg

SEQ ID NO: 582035 - DNA, 1244 bp, Homo sapiens
ggcttgtaaacatatcctcgtgcctttatctgtcggtggagttgttcatatgcgcctccaagtggtgctatgtcgtcgcgcactctgcgctcagggatgcagtgacacgtatcacttttgcaactattgtgctaaatgttgcgcggttaaccgtttatttatctgttcgctcacatgcactagttgatggaggctcgcaactacctgcctgtcaatgtgcgaaatattgatggctcaaaccccatgttccattgagtaagtgttccgaagaatcaaatccgttgagtttcgttactgatttggcgcggccatgttgtgcatatggatgttaaagggcccaagtatatatgggtaagattcggatatgcaggacaggtcgtatgtatgaccagggcttaaacacaggtgagtttaaagtacccatgtcaagtggctacattaggtgtacgactctcatctctgtctgaatagaagtgtatgaatcttagcccttgcgatgttggcatcatgcacttgtaggtcccagctatctttggaagactgatgttcgtgatgtttcgcttggtgcactggtaggtcgaggtctagtcagtgatgccattgagcctggccacggtatctccagcctgggtagcaagagtcaagactccacctcatacgataagtaagtgaaatggattaatcggctagtaatagtaaccgtgactaaagtttacaatagtaaacagtggcattggccatccaaaacatggagtcgagtaaattattttaagatacacgtgggtaataagcagattaacagactataatagttgaaatatacagacataatttataaatggatgcagatgaacgagtaagttagtgagcttgaaagatcagcttgaagaactcttccacgaaagaagcagggacaatgactataactataataacaagaacgatattactgcttggggccaggtgctgtggcatcacgccttgtaatcccacgcacatttggcgacgcgaccgagtgccagtgtggatcacctgaggtcaggagttcgagaccagcctggccaacatagctgaaactccgtccctacttaaaatacaaaactagccgggtgtgcgtggcacatgccatgtaatcccagctactcaggaggctgaggacaggagaatcgctgagcctggagtgatcggtgacggttttgtctatgtcgagtggtcgtaggacttcggtgccttaaaaacgccag

SEQ ID NO: 582036 - DNA, 189 bp, Homo sapiens
cttaaacacaccacaatactatagtgtatagccagtggaatgtagcgtgggtgtagcgtagtagtagtagcgtagtagtagtagccggtgtgtagtagccatgggtgtagcatagtagtagcgtgggtagtagcgtagggtagtagccgtgggtagtagccgtagcgtagtgtagcgtagtgtagtagc

SEQ ID NO: 582037 - DNA, 437 bp, Homo sapiens
aggaccggaactggtatataccactaggagacacattctttggaaaacgatattgataacctgatgcgggactgtccagacgatcaaagcggttcttttccatacttatttatatacccatttaattatatgaagagcccttggtggcccttaaactacatactctaacatgcgttttagaaccctaagggaaaatgtggccctcatatataactcctaccacaatcaccctaatgggcctaagtactgtgcagcatgaggactaatccgttgttgttcacatactatccgcatgacatttcccggttaggaatacgcaatgaatcctttctggtacttgagatagcaacgctattggctgatacttgcagactgtgctcatgtgatcatccgcgtcgaataacgcactattgccacctgctgtggtgctgttgcgt

SEQ ID NO: 582038 - DNA, 419 bp, Homo sapiens
  misc_feature (316)..(316): n is a, c, g, or t
  misc_feature (325)..(325): n is a, c, g, or t
  misc_feature (356)..(356): n is a, c, g, or t
  misc_feature (387)..(387): n is a, c, g, or t
  misc_feature (393)..(393): n is a, c, g, or t
aaacagatttttctagattacattctgacaactattaatgtattttgagattatatattttagccctttagaattgaaatattttacctactttctagatgttattatttttaacaatgtgtttgtttgttgatctttttatcctaatagttttttcaaaatgttaattataaataatgaattatgaatcctttttatatagacattttcatatgtatttgagtaatagaaagtggaatagagataaataggagagaagaatgcaaaactaaaaatactgttggatattcagtaaaaccaaacacttctaccattnctccaatcnggagccatatgttaagggcaaatcaggtggncttgatgaagggttaaaggcagtagtttttncgtacngtctttggcaatgggtaaatacacca

SEQ ID NO: 582039 - DNA, 615 bp, Homo sapiens
  misc_feature (4)..(4): n is a, c, g, or t
caanactcattttatttttctactttatagtaggcctgacagaaacatagtgaagcaatctgggaggcaacctgtggtagattttatgctaaatgttaatgtaacctctgttgattttttaaaaatgtgtttatatataagatttgaaataaaaactttaatacaggctagaataaggaattttacaaattctctttagagcaaccaacattaaagttttagagttgaattttgctctatttcaactcccttacctctctagttttcagtttatattaagttttaataactttgcggggccctgcaaattaataatctacatgaagtatattattagagggaaacctaatcttactgctaagcagttggtgttggtactacataagtgaatggttcgtgttttggaattctaaaacattatttaaagtaagtgggtgttacgaaatggtttaaaaaatgtctgggtgaccttgcttatattattaaagtgatcaccacttaaggtcagaaaaaagtgtatttgttaaaatgtttctatgaaggtgcacttttgagacatttattaaacacgcggcatttaaataatggcgataaaaataaatatgaccatgttca

SEQ ID NO: 582040 - DNA, 228 bp, Homo sapiens
  misc_feature (7)..(7): n is a, c, g, or t
  misc_feature (16)..(16): n is a, c, g, or t
  misc_feature (42)..(42): n is a, c, g, or t
  misc_feature (57)..(57): n is a, c, g, or t
  misc_feature (206)..(206): n is a, c, g, or t
  misc_feature (217)..(217): n is a, c, g, or t
ggcgggnggatccccnggggtcgggagtttggggcccagccntgacccaacatgggngaaacctcatccctactaaaaatacaaaattagccggcctggtggcaggcgcctgtgatcccagctactcaggaggctgaggcaagagaattgcttgaacctgggaggcggaggttgcagtgagtggagattgtgccattgcaatccancctgggcaacngagagtgaaac

SEQ ID NO: 582041 - DNA, 198 bp, Homo sapiens
tttcattagtcgtttcctgccagcgtggtgctcccgcgcgtaatcctaccactttggaggccgaggcaggtggatcacgaggtccagagatcgagaccatcctggccaagatggtgacaccctgtctctactaaaaatacaaaacattggccgggcgtgatggtgggcgcctgtaatcccagccaatccagaggctga

SEQ ID NO: 582042 - DNA, 127 bp, Homo sapiens
tagtagattccagcatctaacatctataaaggtgggcccagatttcttgattcgaccactgtgctgttcctaccacacaaatatccattcctgttttgttagaagcagccactggtcctcttgtttc

SEQ ID NO: 582043 - DNA, 129 bp, Homo sapiens
cattagaggctgaggccagaatgggcgaaagcactaagaaggcatagtgggcttccggaaaaagtgcagtaatagtctggggggcagcattgttggaagatagctaatccgcctgtacttatggcgtgg

SEQ ID NO: 582044 - DNA, 145 bp, Homo sapiens
attgtgttatgtgcagtctgtgcagccattgctatctggttacaactcgccatgtcttaccgaagtctgaggtgcgctcaatcagcatgccggcgggcatgggcccctggaactccatcatgacttcttgaagctggaatctcct

SEQ ID NO: 582045 - DNA, 205 bp, Homo sapiens
  misc_feature (11)..(11): n is a, c, g, or t
agagacagagntttccctctgttgcctaggttggagtgcagtggtgcagtcatggctcactgcagcctcaacctcttggactccagtgatcctcctgcctcagcattctgaggagctgggaacacaggcatgcaccatcacgccttacttagatgtttatattatgattttaagaagtttgtcttatcccttctgtcgtcttctc

SEQ ID NO: 582046 - DNA, 167 bp, Homo sapiens
  misc_feature (146)..(146): n is a, c, g, or t
  misc_feature (160)..(160): n is a, c, g, or t
cctgcctgcacacaagaaagagagcaagggagcaaagtagaagaaaggtggcacgggggaaaggatatcaattcaagacggatggtaaaaatggcttagcaggagtgaaggctctccggtggtttcaccaagtggatctgctggangggattttctccangcgacag

SEQ ID NO: 582047 - DNA, 252 bp, Homo sapiens
cgccccccacccgcgaccccggaaatctcgcccctacctgcttcaccctcgccccacccacagcgcacttttcgggacctcccagcggcccttccccggttctctggacccccgtctccccgccctgcaacgcccccatcctggtgcccacgaaaggtcgtcccagttcccctcttctctacctcaaaggaggaggtgcaaatgaggaagcctaaataaaaacaggaaactcgatttttttaaaaagcctca

SEQ ID NO: 582048 - DNA, 705 bp, Homo sapiens
ggtaccagcacgccgtacggggccctggcatggcccgggatctcaggccttggctgctcggatgctgaaacagcggaggccggagagctcgcacacacacggtcaatcaattctctctggtgtttgcgtaaccaccagcaaacaaacttgacagtttgtgatacggctgaatgtccaccggcagacttccatgatagttcagatgctgattcatcagcaaattgatcttctggaagatgaaatcacttgctaacagtgtgtggttggcaaaatttgcatgcacgtgaactggaattttgagagaggcgtttacagacgctgattactttcgaatccagttccctttaaaccttgatgttaaaatgaaagctgtagtgattgttgcctgtgtcctcattgacttcatgtattttgaaagcactggctgccagaaacaaaaatcacgagcgtggatgtggactagggaaagtctcctcagcaaatctgaagtctgtatattgattgagactatgtaaactcatacctgtatgaattaagctgttaggccgtgcgctctggttgtatacttttgcttacaaattatagtgtatcttctggataacatgattataaagggttttgtacatttatttatactcattggcaatttgagagaaaggacatatgagtttttgcatttattaatgaaaacttctttgaactaag

SEQ ID NO: 582049 - DNA, 1640 bp, Homo sapiens
  misc_feature (74)..(74): n is a, c, g, or t
cacgcacagtcctgaaaaaaattttaatcttcttttcttagaactatcttggttggcatcatcaggccctgagngcacagtgcatgtcagcatctaagattccacttttcaaaatgaaggacctgatactgatcctatgcctcctggaaatgagttttgcagtgccgttctttcctcagcaatctggaacaccgggtatggctagtttgagccttgagacaatgagacagttgggaagtctgcagagattaaacacactttctcagtattctagatacggctttggaaaatcatttaattctttgtggatgcacggtctcctcccaccacattcctctcttccatggatgaggccaagagaacatgaaactcaacagtatgaatattctttgcctgtgcatcccccacctctcccatcacagccatccttgaagcctcaacagccaggactgaaaccttttctccagtctgctgctgcaaccaccaaccaggccacagcactgaaagaagcacttcagcctccaattcacctgggacatctgcccttgcaggaaggagaactgcctctggttcagcagcaggtggcaccatcagataagccaccaaagcctgagctcccaggagtagattttgctgatccacaaggtccatcactcccaggaatggattttcctgatccacaaggtccatcactcccaggattggattttgctgatccacaaggttcaacaattttccagatagcccgtttgatttctcacggaccaatgccacaaaataaacaatctccactttatccaggaatgttgtacgtgccttttggagcaaatcaattgaatgcccctgccagacttggcatcatgagttcagaagaagtggcaggcgggagagaagacccaatggcctatggagccatgtttccaggatttggaggcatgaggcccggctttgagggaatgccccacaacccagctatgggcggtgacttcactctggaatttgactccccagtggctgccaccaaaggccctgagaacgaagaaggaggtgcacaaggctcccctatgccggaggccaacccagacaatctagaaaacccagctttccttacagagctagaacctgctccccacgcagggctccttgctctccctaaggatgacattcccggcctgccaaggagcccttcagggaagatgaagggactccccagcgtcaccccagcagctgctgacccactgatgacccctgaattagctgatgtttataggacctacgatgctgacatgaccacatccgtggatttccaggaagaagcaaccatggataccacgatggccccaaactctctgcaaacatccatgccaggaaacaaagcccaggagcccgagatgatgcatgacgcatggcatttccaagagccctgacagctctaagatattagctactttctgtatgcacaagcttcccagctttgtccccacagtgtacctttttgctaaaacacttattacccttctgcagcaaaggcattaaaagcgctaagcatatattaataaatgcaagtggctagaaatagtgtaggtccccttcttgctttcaatatcttgttgaaataaaatgtgtcaattgtctctgtg

SEQ ID NO: 582050 - DNA, 1104 bp, Homo sapiens
  misc_feature (494)..(494): n is a, c, g, or t
gggagggccctgggatgccgggtgcccaaaggtgcggcctcgtctagcggggatagggagcgggatcaccctggcccgtgagcagagctctcagcggccctatgcattgccgtgggccagagcagggtgcttgccgcgagaccccgaccgatggcaggctgcgactgtggggggcattgcgtgttcaggtatctcgctctatgcattcatggggacatctagccaccgacgatggcagcaagggtaggagactctttgctcctacgatgaatggagagaacaggggtatcgaggtgtgggcacgtcgagctcgcgtgtagactagggtgcgcacttagccatcgattccccgatgagcttagtcgaaatccatatctagtagttgcgatcccccgattcgagagcactaagtcgcttgagaagactggagatctccgacgaaactcgtgcgaaaacagcgagatcagttggggtctcttagcatttcgactccntgtccttgcgtggccattgggcacagtgacgcagagggagcaaagaaccttcccagtcctattgtgaatgctgcacacgtacgagtagacaagcaacttggaggacacaacacggcaacttagacgaaagggccttggtttaatgtgccacgccagttggggtcgagttgggcccacgccaccacgttttttgtgttggccggcacgaatcggatcgttggacggcgcaacgccacgggagcggcaaaccggcctgcaggggaacacacctgcgaagtttccggtagggaaccaccaggggcccaccgagcgccttttttggacagggacaccttgaaggcgaggaacagaaccaggctaaggctctagtggttgagttactactcgcactattgtgggtgtcatatccaggagtgtataccgagtggggaatgaggggccccgcctgggggggcccgaccctgaaccgtttccattttcccggacgccattttcgttgaccatagcgcaccaccgtgtttcttccctttatctaggagtgaacccgtggtcgccaatgtgggaaagctttggcgttacaacacccgatagggccgcttaagcagcagac

SEQ ID NO: 582051 - DNA, 1983 bp, Homo sapiens
  misc_feature (74)..(74): n is a, c, g, or t
cacgcacagtcctgaaaaaaattttaatcttcttttcttagaactatcttggttggcatcatcaggccctgagngcacagtgcatgtcagcatctaagattccacttttcaaaatgaaggacctgatactgatcctatgcctcctggaaatgagttttgcagtgccgttctttcctcagcaatctggaacaccgggtatggctagtttgagccttgagacaatgagacagttgggaagtctgcagagattaaacacactttctcagtattctagatacggctttggaaaatcatttaattctttgtggatgcacggtctcctcccaccacattcctctcttccatggatgaggccaagagaacatgaaactcaacagtatgaatattctttgcctgtgcatcccccacctctcccatcacagccatccttgaagcctcaacagccaggactgaaaccttttctccagtctgctgctgcaaccaccaaccaggccacagcactgaaagaagcacttcagcctccaattcacctgggacatctgcccttgcaggaaggagaactgcctctggttcagcagcaggtggcaccatcagataagccaccaaagcctgagctcccaggagtagattttgctgatccacaaggtccatcactcccaggaatggattttcctgatccacaaggtccatcactcccaggattggattttgctgatccacaaggttcaacaattttccagatagcccgtttgatttctcacggaccaatgccacaaaataaacaatctccactttatccaggaatgttgtacgtgccttttggagcaaatcaattgaatgcccctgccagacttggcatcatgagttcagaagaagtggcaggcgggagagaagacccaatggcctatggagccatgtttccaggatttggaggcatgaggcccggctttgagggaatgccccacaacccagctatgggcggtgacttcactctggaatttgactccccagtggctgccaccaaaggccctgagaacgaagaaggaggtgcacaaggctcccctatgccggaggccaacccagacaatctagaaaacccagctttccttacagagctagaacctgctccccacgcagggctccttgctctccctaaggatgacattcccggcctgccaaggagcccttcagggaagatgaagggactccccagcgtcaccccagcagctgctgacccactgatgacccctgaattagctgatgtttataggacctacgatgctgacatgaccacatccgtggatttccaggaagaagcaaccatggataccacgatggccccaaactctctgcaaacatccatgccaggaaacaaagcccaggagcccgagatgatgcatgacgcatggcatttccaagagccctgacagctctaagatattagctactttctgtatgcacaagcttcccagctttgtccccacagtgtacctttttgctaaaacacttattacccttctgcagcaaaggcattaaaagcgctaagcatatattaataaatgcaagtggctagaaatagtgtaggtccccttcttgctttcaatatcttgttgaaataaaatgtgtcaattgtctctgtgatttagaaacactattaataacatcagagcaaggttctaagggtctcagcatttgatcatcactttttacttagctgtcttaagcattatagaatttctcttaccagcatgacactattatattcaggaaacatggcactgcttttttctctaagcaaaggcaaatatcctcataattctaagctaattcatttaaactttattaaatggggattggtgggaaactcccgactggtattactgggtttggtataatttaatttaaaattctcatttatagagtattttatttaatctagtataaaaaatctagcctaatttaaataaagaatttttctcactg

SEQ ID NO: 582052 - DNA, 184 bp, Homo sapiens
aattcaagcttctaacgatgtacggggacatgggtggtgcacgcctgtggccccagcaactcaggaagctgaggtgggaggatcactggagtcctggaggggtggaggttgaactgagctgtgatcctgccactgtactccagcctgggttgcagagtgagacctgtttcaaaaaagataaaaa

SEQ ID NO: 582053 - DNA, 1861 bp, Homo sapiens
tacagccccccattttataattatataatgaaagagaaaaggactttcgtgttacctcacatctgttacccgggtatggctagtttgagccttgagacaatgagacagttgggaagtctgcagagattaaacacactttctcagtattctagatacggctttggaaaatcatttaattctttgtggatgcacggtctcctcccaccacattcctctcttccatggatgaggccaagagaacatgaaactcaacagtatgaatattctttgcctgtgcatcccccacctctcccatcacagccatccttgaagcctcaacagccaggactgaaaccttttctccagtctgctgctgcaaccaccaaccaggccacagcactgaaagaagcacttcagcctccaattcacctgggacatctgcccttgcaggaaggagaactgcctctggttcagcagcaggtggcaccatcagataagccaccaaagcctgagctcccaggagtagattttgctgatccacaaggtccatcactcccaggaatggattttcctgatccacaaggtccatcactcccaggattggattttgctgatccacaaggttcaacaattttccagatagcccgtttgatttctcacggaccaatgccacaaaataaacaatctccactttatccaggaatgttgtacgtgccttttggagcaaatcaattgaatgcccctgccagacttggcatcatgagttcagaagaagtggcaggcgggagagaagacccaatggcctatggagccatgtttccaggatttggaggcatgaggcccggctttgagggaatgccccacaacccagctatgggcggtgacttcactctggaatttgactccccagtggctgccaccaaaggccctgagaacgaagaaggaggtgcacaaggctcccctatgccggaggccaacccagacaatctagaaaacccagctttccttacagagctagaacctgctccccacgcagggctccttgctctccctaaggatgacattcccggcctgccaaggagcccttcagggaagatgaagggactccccagcgtcaccccagcagctgctgacccactgatgacccctgaattagctgatgtttataggacctacgatgctgacatgaccacatccgtggatttccaggaagaagcaaccatggataccacgatggccccaaactctctgcaaacatccatgccaggaaacaaagcccaggagcccgagatgatgcatgacgcatggcatttccaagagccctgacagctctaagatattagctactttctgtatgcacaagcttcccagctttgtccccacagtgtacctttttgctaaaacacttattacccttctgcagcaaaggcattaaaagcgctaagcatatattaataaatgcaagtggctagaaatagtgtaggtccccttcttgctttcaatatcttgttgaaataaaatgtgtcaattgtctctgtgatttagaaacactattaataacatcagagcaaggttctaagggtctcagcatttgatcatcactttttacttagctgtcttaagcattatagaatttctcttaccagcatgacactattatattcaggaaacatggcactgcttttttctctaagcaaaggcaaatatcctcataattctaagctaattcatttaaactttattaaatggggattggtgggaaactcccgactggtattactgggtttggtataatttaatttaaaattctcatttatagagtattttatttaatctagtataaaaaatctagcctaatttaaataaagaatttttctcactg

SEQ ID NO: 582054 - DNA, 800 bp, Homo sapiens
ggctggtacggccggaagttagggcattgcagcgtcagcgcctgcgctcgtgcgtttcctcttcctcctcctactccttggcatacgcctcttcttcctcctgcgtctcccccgctgcctccgctgctcccgactgcggagccctggagcccgctgccgagcccctggcctcgcggtgcctatgctgccccaggcggctggcgcgtgacaggatgtgctgacgccagctgctctcctgccctctcccgctggcgacctgctggctgctgcggctgctgctctccggcctcgtccttcggctgccgcccctgctgtggagccgcctgccggccacccggatgtagccgcctgtcccgggagcctggacttgtgccctgacgaggccgggcacaggtgtcctcctggttgcacatgcctgtggggccctgccttcagcccttccaggagggaccaggcaagggctctgttggtgcccaggatgcgcccggcctccaggccgtgggggcccgggcccagcccagaactgccaagattgagcattgacttcctggccccaggagcttgcccggaacggagtctgcaacacttcaattccgcccccttaccaaagggacccgaccagctggttcccggacaccctgcaacactgggctttctcgggcacggtggccagcgtgcttggacagcttggtgcttccctttccgactccagggatccccctatgcccacggctccaatcccttccctttgttctcctgtgtcatccgaccctgttgcacactgtcgcccctgttgcccg

SEQ ID NO: 582055 - DNA, 1852 bp, Homo sapiens
aaaatcgtaacctaacgtgccaaaggcgcacagagcgttcgtttttctcacatctggacaccgggtatggctagtttgagccttgagacaatgagacagttgggaagtctgcagagattaaacacactttctcagtattctagatacggctttggaaaatcatttaattctttgtggatgcacggtctcctcccaccacattcctctcttccatggatgaggccaagagaacatgaaactcaacagtatgaatattctttgcctgtgcatcccccacctctcccatcacagccatccttgaagcctcaacagccaggactgaaaccttttctccagtctgctgctgcaaccaccaaccaggccacagcactgaaagaagcacttcagcctccaattcacctgggacatctgcccttgcaggaaggagaactgcctctggttcagcagcaggtggcaccatcagataagccaccaaagcctgagctcccaggagtagattttgctgatccacaaggtccatcactcccaggaatggattttcctgatccacaaggtccatcactcccaggattggattttgctgatccacaaggttcaacaattttccagatagcccgtttgatttctcacggaccaatgccacaaaataaacaatctccactttatccaggaatgttgtacgtgccttttggagcaaatcaattgaatgcccctgccagacttggcatcatgagttcagaagaagtggcaggcgggagagaagacccaatggcctatggagccatgtttccaggatttggaggcatgaggcccggctttgagggaatgccccacaacccagctatgggcggtgacttcactctggaatttgactccccagtggctgccaccaaaggccctgagaacgaagaaggaggtgcacaaggctcccctatgccggaggccaacccagacaatctagaaaacccagctttccttacagagctagaacctgctccccacgcagggctccttgctctccctaaggatgacattcccggcctgccaaggagcccttcagggaagatgaagggactccccagcgtcaccccagcagctgctgacccactgatgacccctgaattagctgatgtttataggacctacgatgctgacatgaccacatccgtggatttccaggaagaagcaaccatggataccacgatggccccaaactctctgcaaacatccatgccaggaaacaaagcccaggagcccgagatgatgcatgacgcatggcatttccaagagccctgacagctctaagatattagctactttctgtatgcacaagcttcccagctttgtccccacagtgtacctttttgctaaaacacttattacccttctgcagcaaaggcattaaaagcgctaagcatatattaataaatgcaagtggctagaaatagtgtaggtccccttcttgctttcaatatcttgttgaaataaaatgtgtcaattgtctctgtgatttagaaacactattaataacatcagagcaaggttctaagggtctcagcatttgatcatcactttttacttagctgtcttaagcattatagaatttctcttaccagcatgacactattatattcaggaaacatggcactgcttttttctctaagcaaaggcaaatatcctcataattctaagctaattcatttaaactttattaaatggggattggtgggaaactcccgactggtattactgggtttggtataatttaatttaaaattctcatttatagagtattttatttaatctagtataaaaaatctagcctaatttaaataaagaatttttctcactg

SEQ ID NO: 582056 - DNA, 1883 bp, Homo sapiens
ctgttatacgaactactggtatacgcgcccagaggataagctgaccaggacagaacacaattcagttactttgactcagcaatctggcacaccgggtatggctagtttgagccttgagacaatgagacagttgggaagtctgcagagattaaacacactttctcagtattctagatacggctttggaaaatcatttaattctttgtggatgcacggtctcctcccaccacattcctctcttccatggatgaggccaagagaacatgaaactcaacagtatgaatattctttgcctgtgcatcccccacctctcccatcacagccatccttgaagcctcaacagccaggactgaaaccttttctccagtctgctgctgcaaccaccaaccaggccacagcactgaaagaagcacttcagcctccaattcacctgggacatctgcccttgcaggaaggagaactgcctctggttcagcagcaggtggcaccatcagataagccaccaaagcctgagctcccaggagtagattttgctgatccacaaggtccatcactcccaggaatggattttcctgatccacaaggtccatcactcccaggattggattttgctgatccacaaggttcaacaattttccagatagcccgtttgatttctcacggaccaatgccacaaaataaacaatctccactttatccaggaatgttgtacgtgccttttggagcaaatcaattgaatgcccctgccagacttggcatcatgagttcagaagaagtggcaggcgggagagaagacccaatggcctatggagccatgtttccaggatttggaggcatgaggcccggctttgagggaatgccccacaacccagctatgggcggtgacttcactctggaatttgactccccagtggctgccaccaaaggccctgagaacgaagaaggaggtgcacaaggctcccctatgccggaggccaacccagacaatctagaaaacccagctttccttacagagctagaacctgctccccacgcagggctccttgctctccctaaggatgacattcccggcctgccaaggagcccttcagggaagatgaagggactccccagcgtcaccccagcagctgctgacccactgatgacccctgaattagctgatgtttataggacctacgatgctgacatgaccacatccgtggatttccaggaagaagcaaccatggataccacgatggccccaaactctctgcaaacatccatgccaggaaacaaagcccaggagcccgagatgatgcatgacgcatggcatttccaagagccctgacagctctaagatattagctactttctgtatgcacaagcttcccagctttgtccccacagtgtacctttttgctaaaacacttattacccttctgcagcaaaggcattaaaagcgctaagcatatattaataaatgcaagtggctagaaatagtgtaggtccccttcttgctttcaatatcttgttgaaataaaatgtgtcaattgtctctgtgatttagaaacactattaataacatcagagcaaggttctaagggtctcagcatttgatcatcactttttacttagctgtcttaagcattatagaatttctcttaccagcatgacactattatattcaggaaacatggcactgcttttttctctaagcaaaggcaaatatcctcataattctaagctaattcatttaaactttattaaatggggattggtgggaaactcccgactggtattactgggtttggtataatttaatttaaaattctcatttatagagtattttatttaatctagtataaaaaatctagcctaatttaaataaagaatttttctcactg

SEQ ID NO: 582057 - DNA, 1090 bp, Homo sapiens
gctcggccccgcgcgtcgcctggtcctccgagccagtcgctgacagacgcggggccgcgagcttctcctctcctcacgatccgaggcagagcagtcattagtggcgaagccttgggctgctgtgatgctggattctctttgtggcctagctatggagtgacctggagcctctgcaatgaagcgcccgaagcctggaggatggaacactgtggggcagctcgatacccgtgtggcagggcagccctggatggcaaccgctacccacctcagggtcggtggttgtgctgggggcatgcctcatggtggttggctcggggtgcaggctcgtggtggtggctgggggcgagcccatggtggtggctggggactagcttcatggtggtggctggggtcgaggaggtggcacacatagtcagtggaacaagccgagtaagccaaaaagcaagatgaagcacatggctggtgctgcagcagctggcggcagtaggtggtgcgggccttggctggtctacatgctgggaagtgccatgagcaggcccatcatacatttcggcaggtgactatgaggaccgttactatcgtgaaaacatgcagcgttacccaagcaagtgtactacagggccatggatgagtacagcaaccagaacaactttgtgcacgactgcgtcacgtcatcacaaatcaagcagcacacgggtcaccacaagcaaccaaggggcgcaacttcaccgcagaccgacgtttagcattgatgcgagcgcgtggctgagcagatgtgtatcacccagtacgagagggcaatttcaagggcttatttaccaccagaaggctccaagcatttgtcactttttttacttatccaactgtgtggaacccatcgagtaattctatccactaatcgtcccgacaatctgggactcaggacagcgccttatccctgtattgtgccagctcttctaagcattttactcagattatatgctatgagcatctacacagtgtaccccattaagcagcggttgtcaaacactaaacatagatagttcacaagtatttacatcaaagcgatcgtatacatagtggactgtgc

SEQ ID NO: 582058 - DNA, 1874 bp, Homo sapiens
caaacacaaaaaacccagaccaccccccttacacactgaccaacaccaccacccttcataatttcctcagacatatgctaccccgggtatggctagtttgagccttgagacaatgagacagttgggaagtctgcagagattaaacacactttctcagtattctagatacggctttggaaaatcatttaattctttgtggatgcacggtctcctcccaccacattcctctcttccatggatgaggccaagagaacatgaaactcaacagtatgaatattctttgcctgtgcatcccccacctctcccatcacagccatccttgaagcctcaacagccaggactgaaaccttttctccagtctgctgctgcaaccaccaaccaggccacagcactgaaagaagcacttcagcctccaattcacctgggacatctgcccttgcaggaaggagaactgcctctggttcagcagcaggtggcaccatcagataagccaccaaagcctgagctcccaggagtagattttgctgatccacaaggtccatcactcccaggaatggattttcctgatccacaaggtccatcactcccaggattggattttgctgatccacaaggttcaacaattttccagatagcccgtttgatttctcacggaccaatgccacaaaataaacaatctccactttatccaggaatgttgtacgtgccttttggagcaaatcaattgaatgcccctgccagacttggcatcatgagttcagaagaagtggcaggcgggagagaagacccaatggcctatggagccatgtttccaggatttggaggcatgaggcccggctttgagggaatgccccacaacccagctatgggcggtgacttcactctggaatttgactccccagtggctgccaccaaaggccctgagaacgaagaaggaggtgcacaaggctcccctatgccggaggccaacccagacaatctagaaaacccagctttccttacagagctagaacctgctccccacgcagggctccttgctctccctaaggatgacattcccggcctgccaaggagcccttcagggaagatgaagggactccccagcgtcaccccagcagctgctgacccactgatgacccctgaattagctgatgtttataggacctacgatgctgacatgaccacatccgtggatttccaggaagaagcaaccatggataccacgatggccccaaactctctgcaaacatccatgccaggaaacaaagcccaggagcccgagatgatgcatgacgcatggcatttccaagagccctgacagctctaagatattagctactttctgtatgcacaagcttcccagctttgtccccacagtgtacctttttgctaaaacacttattacccttctgcagcaaaggcattaaaagcgctaagcatatattaataaatgcaagtggctagaaatagtgtaggtccccttcttgctttcaatatcttgttgaaataaaatgtgtcaattgtctctgtgatttagaaacactattaataacatcagagcaaggttctaagggtctcagcatttgatcatcactttttacttagctgtcttaagcattatagaatttctcttaccagcatgacactattatattcaggaaacatggcactgcttttttctctaagcaaaggcaaatatcctcataattctaagctaattcatttaaactttattaaatggggattggtgggaaactcccgactggtattactgggtttggtataatttaatttaaaattctcatttatagagtattttatttaatctagtataaaaaatctagcctaatttaaataaagaatttttctcactg

SEQ ID NO: 582059 - DNA, 1499 bp, Homo sapiens
  misc_feature (1247)..(1247): n is a, c, g, or t
gttcttctgtacattcgtggttgacaagcaggttccttgtcctctcgtgtggtctccgctcttcttctctactcattctactgtgttggctggcacctgtgttctcttgtgggttgctctccgccgtctcgtgccgcgctcattttgttttgctcccccgctcagaggtgtggctcccgtccctcccccatttgggtgtggcaaatgtccctcgttgtttatataaacgccccgtgggcgacacacccccctgggttttgtttccccccccgggaccccacacgacactttttgggggggggtgctctttaagtaggagaaattgttgttgtctccacgtacggttggttttctcgccgcccgattgtcgttgttttgctcctccctcagtcccgcttgctgtcagccactggctgcttccccaagtatttttccggcagcacatcgccaaagacgatatatggcccccgggggctctgggaagaagtgccccccaaaaggtgagaggatgcgcgctcccccaacggttgcacaaaaatggtcccacaactgggcgccacagattcccacccgggggccccataaggaatttgctctggcacaatcttgtcttctggcccacaacggaggacctcgcacaacgccccccccaacacaggaagttttgtataatttaatgcacagaagcgcccgcggacacccatgtgacacgggtcggggagttttatagaatatccgggataaacgccaaagagccctgtgttgtgttttccccagatgggtataggagcgcccctgtctaatcccacacacatgtctaagcggtttttccacaggcttgagaggaggcacggcacgagatattggccccccacgggggtagaggtagaatgggagacgccctataggtgagaggcccgccccacaggcacacattttttctccctcccaacatagggcccacagggtctttctccacagagaaggaatccccgtgggcgactttcacaccctgcgacactgcacagagatacttatctcaccacgccacatggagagaggccaacatcctctgcacagcacccgtgggcccttcttgacacatctacccacacccggcacatgagacccgcccacaaggcccttctctatgaacggtgataccctcacagtgccggcagcccacacccgtgcacacatattgacacacaaggagcccgcgtggcgtctgtcttaacacacacagntggagaggcttgttcacagtgagatgagaggcctgtgacctatatggagttatcgggaatggaaattggtgttcgctccttataggtgcttggaacttcagccctcggaggtcacaatgtgaaagaaaaattccacttcactcaatacacttttctgaaagagggttcaatagacccccaatctcaccaatttgtccttcgcttacagttctgagacatccgtttaaaagttctatatttgtggctttatta

SEQ ID NO: 582060 - DNA, 1810 bp, Homo sapiens
tgaaagaaatgaaaataaatattcttcaatgtcccgcacagttcagcatgcagtacgttgggaagtctgcagagattaaacacactttctcagtattctagatacggctttggaaaatcatttaattctttgtggatgcacggtctcctcccaccacattcctctcttccatggatgaggccaagagaacatgaaactcaacagtatgaatattctttgcctgtgcatcccccacctctcccatcacagccatccttgaagcctcaacagccaggactgaaaccttttctccagtctgctgctgcaaccaccaaccaggccacagcactgaaagaagcacttcagcctccaattcacctgggacatctgcccttgcaggaaggagaactgcctctggttcagcagcaggtggcaccatcagataagccaccaaagcctgagctcccaggagtagattttgctgatccacaaggtccatcactcccaggaatggattttcctgatccacaaggtccatcactcccaggattggattttgctgatccacaaggttcaacaattttccagatagcccgtttgatttctcacggaccaatgccacaaaataaacaatctccactttatccaggaatgttgtacgtgccttttggagcaaatcaattgaatgcccctgccagacttggcatcatgagttcagaagaagtggcaggcgggagagaagacccaatggcctatggagccatgtttccaggatttggaggcatgaggcccggctttgagggaatgccccacaacccagctatgggcggtgacttcactctggaatttgactccccagtggctgccaccaaaggccctgagaacgaagaaggaggtgcacaaggctcccctatgccggaggccaacccagacaatctagaaaacccagctttccttacagagctagaacctgctccccacgcagggctccttgctctccctaaggatgacattcccggcctgccaaggagcccttcagggaagatgaagggactccccagcgtcaccccagcagctgctgacccactgatgacccctgaattagctgatgtttataggacctacgatgctgacatgaccacatccgtggatttccaggaagaagcaaccatggataccacgatggccccaaactctctgcaaacatccatgccaggaaacaaagcccaggagcccgagatgatgcatgacgcatggcatttccaagagccctgacagctctaagatattagctactttctgtatgcacaagcttcccagctttgtccccacagtgtacctttttgctaaaacacttattacccttctgcagcaaaggcattaaaagcgctaagcatatattaataaatgcaagtggctagaaatagtgtaggtccccttcttgctttcaatatcttgttgaaataaaatgtgtcaattgtctctgtgatttagaaacactattaataacatcagagcaaggttctaagggtctcagcatttgatcatcactttttacttagctgtcttaagcattatagaatttctcttaccagcatgacactattatattcaggaaacatggcactgcttttttctctaagcaaaggcaaatatcctcataattctaagctaattcatttaaactttattaaatggggattggtgggaaactcccgactggtattactgggtttggtataatttaatttaaaattctcatttatagagtattttatttaatctagtataaaaaatctagcctaatttaaataaagaatttttctcactg

SEQ ID NO: 582061 - DNA, 157 bp, Homo sapiens
agatcttggactcacggtgtaagaatgggagaggatggtttctcttactgccctcactagggcctagggaacccaggagcaaatcccaccactgccttcctatctctcagtcctatggagacagccaccttgagtgacgtttagttccaacacatta

SEQ ID NO: 582062 - DNA, 376 bp, Homo sapiens
actagaacggctgcttatcttctcatctggtggtggcatgcactataatcctgtattttaacaagaatagtacctagaaactgcctcacgctgcatttaagttgtaacagcagtacactggtacatggctctagtacccagtatcaggaatgtacaaatgtctttttattccagattacaatatacattatctagtggcgttgactgtgaccgctgtccacccttatatattttgtctactgaatccagtaacttgatggttattgtgattttccgccatgcctttttcttcattttctcccccttacttcgtctacgtttttggtgaggaacactgccttgggcttcctgtctcagttcattaataaaggtgctg

SEQ ID NO: 582063 - DNA, 110 bp, Homo sapiens
taattatacccaagagtagagtggaaattttttatagatggtcttagtttggaaattgaactaagaaatgagaaaatgttggccagagatgatgcatattttgtatacgt

SEQ ID NO: 582064 - DNA, 290 bp, Homo sapiens
  misc_feature (123)..(123): n is a, c, g, or t
  misc_feature (151)..(151): n is a, c, g, or t
  misc_feature (162)..(162): n is a, c, g, or t
  misc_feature (221)..(221): n is a, c, g, or t
  misc_feature (235)..(235): n is a, c, g, or t
gagttggagaccagcttgggcaatatgatgagaccctgtctctataaagaatacaaaaataggctaggcatggaagtgtgcacctgtagtcctacctacttggggtggctggggaggtagggncgtttgagcccaggggttcaaggatagngtgagcccgtnattgagtcaccacactgcaacctgggtgacaaagcaagatccttctctaaagaataggngaattttggatgancttgcctgcgctgagtcttacttcttcacttacttggtcactttggcccttcttc

SEQ ID NO: 582065 - DNA, 970 bp, Homo sapiens
gctacttcctcctgcttccccgccgtcgccgccgcatcatgagggacatcgtgtacttgcaggccgggtcgagagcggaaaccaatagttcgggtgcaaggttttgggaggggatcagcgatggagcacgggatcgaccccaagggcatcgtaccacggggacagggatctgtagcgggaatgcatcaaacgtgtactatcaaggagagccgtcgtgcggtaagtatcgtgccccgcgccgtgttcggggatctggagacccggaagcatggactccgtggcgctacggggccctatacgaggcatgatcttgccgtggcggagcaaacttcgtgtttcgcgtcggagtggtgctgtggagacaagcatggcgtcgcacaggagggcagctacacaggaaggctgcggagtctggatgagtatctcggagcgtggatgtgtgtgacgaaacggaaggttggaaatgcagtgactgcctggattgtgtctcagagatgacaccaaatccactgtcgtggcgccgacgtggcgtccgggacttcctgccctaatcttctggactgtccgggggacgagaggatagctctgacctggattgtgagcatcgctcaagcagtaggtagtgctgtcctggaagcttgtcggcgtgaagtgcgttgggcccgccgatagaaccgcccacacacgtcatgcaggttgcagcgggctcggtactgtgactcagttgggcactgccgcgtggataggggaacgtgcacctgacactgcttttgcggttcagagccccttgttggtggttcaccgcgcaacgtggtgggtgacctgtactggcctgggtggtggccccaaggggtggggccccgctggtggcgctgaaacgccaagtgaagctggctggggggtggggggctcatggccgcgcaccggggctttgtgcccgtttgcgctggccccgggtgcccgtccggca

SEQ ID NO: 582066 - DNA, 292 bp, Homo sapiens
atccagctcgttccccaggaatcagctattacacatcacaagagagcattgtggatgtacgaaggtgttgtgagaaaatgctgaatcagaacaattggaagctgttcacagtcaacgacgttgagttacatgcttcagaagatttatgtgatctgtttggctgaaccccgtgtgcccctgtgtttggataaagctgtccggactgaggcagaaggagaagaggaaggaagagctactgttaaccaggatacaagattagacaacagagtcattgatcttaggacatcaacta

SEQ ID NO: 582067 - DNA, 473 bp, Homo sapiens
tttaatcaattcattgacacacgtaacacgttgttatattataaatctaggaggctggcactcataccattacgctccagtttgggttccaaggtgcttctctctggattttcaccttccttgccaaaaatgattgattacgctgggccaactgggtgtccggcaatacccaacaagtgactttggcccctaacagcaggtcttggccagacagaaatcaatatttcaccattaaaatctatcaaagaagagttaaggcaccatctgtgcctgccgcctctctatggtgtgcgaacgttaaatccgacacttgcattacatgggtaatcaatatataccggtttacacatcacttgcggttcccttttagcagagagggatgtctggaatcgctcccattcattttcccacaccatttaacaagatttccgccccccaatcccaaccaaaaaaatggcatctatgggctgagg

SEQ ID NO: 582068 - DNA, 138 bp, Homo sapiens
gtccgggccacactttgtactcagtctctgccttccgggctcaagtgatccgtccgctcggcccgcaaagttctgagattacaggcgtgagtcacggcgcctggctctcctcccatttattgaggatggtccgcacag

SEQ ID NO: 582069 - DNA, 964 bp, Homo sapiens
  misc_feature (55)..(55): n is a, c, g, or t
  misc_feature (59)..(59): n is a, c, g, or t
  misc_feature (67)..(67): n is a, c, g, or t
  misc_feature (71)..(71): n is a, c, g, or t
  misc_feature (78)..(78): n is a, c, g, or t
  misc_feature (90)..(90): n is a, c, g, or t
  misc_feature (92)..(92): n is a, c, g, or t
  misc_feature (96)..(96): n is a, c, g, or t
  misc_feature (112)..(113): n is a, c, g, or t
  misc_feature (115)..(115): n is a, c, g, or t
  misc_feature (120)..(120): n is a, c, g, or t
  misc_feature (124)..(124): n is a, c, g, or t
  misc_feature (132)..(132): n is a, c, g, or t
  misc_feature (134)..(135): n is a, c, g, or t
  misc_feature (139)..(139): n is a, c, g, or t
caaggatgggagatcatgaccatccggctaacactaaaaatacaaaaattagccnggcntggtggcnggcncctgtantcccagctactngngagnctgaggcaggagaatnncntgaanccangaggcggngnntgcngtgagccgagatcacgccactgcactccagcctgggtgacagagcgagactccgtctaaaaaaaaaaaaaaagttgaattaacaataaggaaatgaggatgaagcggtaaaaatgttttgggttacattatactctcagaagctatgtggtttagagaaaagggcccccaaccacaaaagttagtggttcttattctgtctgcttcgtactaggtatatggtaactgagaaagtcacttaacctctctgaaccttaacttcgtcatctataaagtgaatctaacattttccccccggcctacctcacagggttgttgtgaggatcaaatgaaataatgtacatgaaaagacatatataaaatgtataatacagacaaagggtcctgttacacagttggaagtcattccctcagattttgggcctaggaaggtaggtgatttaaactcactgaaagcatgtaccatgtccaggttggatacatggcaacaaggctatgttaaattttttttctctgagttgagtccctaaaatactatcatgggctaattctaagaaggagcacgaatatatattcccctaaaattatagcttagcattgtcaatgctttagagcagttatgggagttatagattataacatattagtgatttgtgaaacttttttactaaaatgtgaccctcatttttctttacatgaaagaacatagaatatttcacaatgcatcccacgtggtaagaataaaaaattgttttagttatatgtacaaatgtgtgtgtgtgaacgtgtgtgtacttggtcattaaataaaatgtacttttttttt

SEQ ID NO: 582070 - DNA, 904 bp, Homo sapiens
  misc_feature (55)..(55): n is a, c, g, or t
  misc_feature (59)..(59): n is a, c, g, or t
  misc_feature (67)..(67): n is a, c, g, or t
  misc_feature (71)..(71): n is a, c, g, or t
  misc_feature (78)..(78): n is a, c, g, or t
  misc_feature (90)..(90): n is a, c, g, or t
  misc_feature (92)..(92): n is a, c, g, or t
  misc_feature (96)..(96): n is a, c, g, or t
  misc_feature (112)..(113): n is a, c, g, or t
  misc_feature (115)..(115): n is a, c, g, or t
  misc_feature (120)..(120): n is a, c, g, or t
  misc_feature (124)..(124): n is a, c, g, or t
  misc_feature (132)..(132): n is a, c, g, or t
  misc_feature (134)..(135): n is a, c, g, or t
  misc_feature (139)..(139): n is a, c, g, or t
caaggatgggagatcatgaccatccggctaacactaaaaatacaaaaattagccnggcntggtggcnggcncctgtantcccagctactngngagnctgaggcaggagaatnncntgaanccangaggcggngnntgcngtgagccgagatcacgccactgcactccagcctgggtgacagagcgagactccgtctaaaaaaaaaaaaaaagttgaattaacaataaggaaatgaggatgaagcggtaaaaatgttttgggttacattatactctcagaagctatgtggtttagagaaaagggcccccaaccacaaaagttagtggttcttattctgtctgcttcgtactaggtatatggtaactgagaaagtcacttaacctctctgaaccttaacttcgtcatctataaagtgaatctaacattttccccccggcctacctcacagggttgttgtgaggatcaaatgaaataatgtacatgaaaagacatatataaaatgtataatacagacaaagggtcctgttacacagttggaagtcattccctcagattttgggcctaggaaggtaggtgatttaaactcactgaaagcatgtaccatgtccaggttggatacatggcaacaaggctatgttaaattttttttctctgagttgagtccctaaaatactatcatgggctaattctaagaaggagcacgaatatatattcccctaaaattatagcttagcattgtcaatgctttagagcagttatgggagttatagattataacatattagtgatttgtgaaacttttttactaaaatgtgaccctcatttttctttacatgaaagaacatagaatatttcacaatgcatcccacgtggtaagaataaaaaattgttttagttatatgta

SEQ ID NO: 582071 - DNA, 1027 bp, Homo sapiens
  misc_feature (55)..(55): n is a, c, g, or t
  misc_feature (59)..(59): n is a, c, g, or t
  misc_feature (67)..(67): n is a, c, g, or t
  misc_feature (71)..(71): n is a, c, g, or t
  misc_feature (78)..(78): n is a, c, g, or t
  misc_feature (90)..(90): n is a, c, g, or t
  misc_feature (92)..(92): n is a, c, g, or t
  misc_feature (96)..(96): n is a, c, g, or t
  misc_feature (112)..(113): n is a, c, g, or t
  misc_feature (115)..(115): n is a, c, g, or t
  misc_feature (120)..(120): n is a, c, g, or t
  misc_feature (124)..(124): n is a, c, g, or t
  misc_feature (132)..(132): n is a, c, g, or t
  misc_feature (134)..(135): n is a, c, g, or t
  misc_feature (139)..(139): n is a, c, g, or t
caaggatgggagatcatgaccatccggctaacactaaaaatacaaaaattagccnggcntggtggcnggcncctgtantcccagctactngngagnctgaggcaggagaatnncntgaanccangaggcggngnntgcngtgagccgagatcacgccactgcactccagcctgggtgacagagcgagactccgtctaaaaaaaaaaaaaaagttgaattaacaataaggaaatgaggatgaagcggtaaaaatgttttgggttacattatactctcagaagctatgtggtttagagaaaagggcccccaaccacaaaagttagtggttcttattctgtctgcttcgtactaggtatatggtaactgagaaagtcacttaacctctctgaaccttaacttcgtcatctataaagtgaatctaacattttccccccggcctacctcacagggttgttgtgaggatcaaatgaaataatgtacatgaaaagacatatataaaatgtataatacagacaaagggtcctgttacacagttggaagtcattccctcagattttgggcctaggaaggtaggtgatttaaactcactgaaagcatgtaccatgtccaggttggatacatggcaacaaggctatgttaaattttttttctctgagttgagtccctaaaatactatcatgggctaattctaagaaggagcacgaatatatattcccctaaaattatagcttagcattgtcaatgctttagagcagttatgggagttatagattataacatattagtgatttgtgaaacttttttactaaaatgtgaccctcatttttctttacatgaaagaacatagaatatttcacaatgcatcccacgtggtaagaataaaaaattgttttagttatatgtacaaatgtgtgtgtgtgaacgtgtgtgtacttggtcattaaataaaatgtactttttttttttttttttttttttttttttttttttttttttttttttttttttttttttttttttttttttt

SEQ ID NO: 582072 - DNA, 170 bp, Homo sapiens
cggagtgaagacccaggtctggctctgcacttgcctggccatgtcaccttgaagctgtgacctgactcccttatattgtttcctcagttgtagaccaaaggcaatggttgtctgcccttccttaccttagaatgacaaatgcaagggcattttcaccacagagttggacc

SEQ ID NO: 582073 - DNA, 247 bp, Homo sapiens
tgtcgtcgatagcaatctaagatatataatcccaaaacgttattttctaaaataataaacaaacacctaccaagggtctaattacaggtattctccaagaagtctttgtcatgctgtcagtgtagaagtctaaaaccttaaaagtatagctatcagtttcttttaatatgactataatctaataatgaaattatgggcacctccaaagctgcaatattttgaaagacagattatacctcttataatg

SEQ ID NO: 582074 - DNA, 195 bp, Homo sapiens
tgagacggtgacggtacgagacatgctgtacggcgatgcatcggtccaaccgacgcgggcgcttgccgactcgctgcatcaaagcggcacggtcagtaatctcgtggcccgttttcccggagcttcgccgctcgtcgagagcgaagtggcgactcagaccgatggcttctttcgctgggtctgctcgatctggcc

SEQ ID NO: 582075 - DNA, 228 bp, Homo sapiens
  misc_feature (69)..(69): n is a, c, g, or t
  misc_feature (72)..(72): n is a, c, g, or t
  misc_feature (82)..(82): n is a, c, g, or t
  misc_feature (86)..(86): n is a, c, g, or t
  misc_feature (94)..(94): n is a, c, g, or t
  misc_feature (124)..(124): n is a, c, g, or t
  misc_feature (157)..(157): n is a, c, g, or t
acccacgttatgaaaaacgtcagttttacaacgcctaattgtgtgttttttttttttatatcaattaangtnaaaaatggcntcanctatttanttcatgaggatctttcatattaaaatttanccttaagattcaaccgccaggtgcttttataanggaaacattttttagagacgtctgagctcacttttacatgggggtgcctacggccggtaagtgtagagata

SEQ ID NO: 582076 - DNA, 4574 bp, Homo sapiens
ggaggcaggcaaggtggcagccccttacctcctaggcccacgctgcccctggcctgtgttaggcactggcatcaggagccactggcccagcagagggtggatatgtgggctgcagtctgcgtgcggaggtgccctctgctgtcttttgtttaatagagacagggtcttgcttctgtggcccaggctggagtgcagtggctgttctcaggtgtgatcatagcacactgcagcctggaactcctgggatcaggagaccctcccgcctcagccccccaagactacaggcacatgcgtgcctggctccctctggtttctcagtcagagcctctgcattgagccagtcctctcagcagctcccaggactcagaacgcagaagcaggaaatggagagtttgtcctatttggggcttttctatttaagaagttactgtacaaatgccaatttcttgaaggagagcaaggtagaacgtggtgaaataacccacagatggtctagacagccctctgtcaccctgagctgcagcccgctggctgctgagcgcatcggtgcttgagtccctgcagctctgggtctggttcttcaagttggcaaagctggtctgtccaccaaggccagctcagaacagacacgccgccctccttgtgttctcgtgaccatcactgtggtgcccactgtgccccaagtgggatacgtgaatttaactggaaacatctgagctcagtgactgcatgctgtgatgttgcctctaagtgcgtggtcgtcagtgaggaagccgcacacatgcctgttctgcagggcccagcaggtgggccgccaccagctcagctgattctgacctcagcgtctccatggcagctccacgggtcgttaggcatgaactggagagccaaggcctctgttttagtctttcagttcccaagagtttgggagttggaggtttctttgaatattagaaaacgttattaaggttttctaaaaccaaaagaaaaaccattttgaataggatggaatctaacactcagatatttatatctatgtaataataattattattatttttgagacagggtctcgctctgccagccagactggagtgcattggcgagatcacagctcactgcagccttgaactgtgctgaagcgatcatcctacctcagcctcctgagtagctgggactacaggctcatgccaccacacctggctaattttttattttttgtagagacgagatcacactatgttgcccaggttgctttcgaactcttgaggtcaagcaaccctcccacctcggcctgaaaaagtgctgggattaccggtgtgtgccagcacacccagcactcaaatgtgttttaaccacagcaccttgctgtttccgtggagcctctcactcagtctccattgcttgatgtgtggggttcagtgtatcgacctttctacttttgcatgtttcaaattattcatgataaaatgttcaaaaagcaaagcaggacatgttgctctgagacaagtgggccttggggtgttcgccagacacactgtagagggggtgagcggcagcggcaggccctgtggtgccactgggtgctgggctctgtggttcagcccaaggggtggccggatgattctggagcaggcaggtgcagggccactggggaggagaagacaaatcagggagcctcgcctggatgtagattcccctttaaggtttttggagaaacatgagttaaagattagaattagttattattttactgttttatctatattaccccacctaactttctttttttttttccatttaaattatgtttggttttttaattttttagagacaaggtctcactctgttgccaaggctggagtgcagtggcacgataatggcccattgcaggctcaaactcctgggctcaggtgatcttcctgcctcagcctcccgagtaggtgggaccacaggcatgcgccagccaaccatgggtggcacttcttgtgcccattttcaaattgggttgtttcctgtatagaattttgagagatctttctatattctgggcacaagtcctttgttggatttatggcttataaatatgtattttttttaacttttaatacatattgttttgttcttgaatagagacagcctgtgttgcccgggctgatctttaactcttggccttgagtgatttgcttgcctcagcctcccaaagtgctgggattatacgtatgggcctctgctcctgcccatagacattttcttacaggtctgttgcttgtctttttactttcttaacactgtctttcagagagcagaagttttaattttttttcaatggccagtttacttgagatggagtctcactctgttgcccaggctggagtgcagtggtgcaatcttggctcactgcaacctctgcctcccaggttcaggcgattctcctgcctcagtctcctgagtagctgggatcacaggcatgcaccaccatgcctggctaattttttattttttaaatttttagtagacacagagttttaccatgttggccaggctggtcttgaactcctgacctcaggtgatctgcctgccccggcctcccaaagtgctgggattacaggtgtgaggcactgcacgtggcctaaaagttttaagttttaggattcacatataggcctatgattcatttttagtttttttttttttttttttttttttaggtggcgtctcaccctattgcccaggctggagtgcaatggcgtgatctcggctcactgcaacctccacctcctgggttcaagcaattcttgtgcctcagcctcccgggtagctgggattacagacgtgcaccaccacgccaggctaatttttgtatttttagtagagacggggtttcgccatgttggacaggctggtctcaaactcctgacctcaggtgatcctcccgcctcggcctcccaaagtgctgggattgcaggcatgagccactgtgcccggccttttgagttaatttttgttaaatgtgaggtgtgtttgaggctcgtttttttgcatgtgaatgtccagttgtcccagcaccacgtgttgagaacactcttctctgtacgttgacaaattgccttgcatcttcgtcgaaaatcaggcaactgtatggattctctctaacgctccagctccactcatctgcggcatctgtcatcatctgtcagcagtaccacactgtctttccatggctttacgttgttctttttttttgagacggagtcttgctctattactcaggctggagtaaaatggtgccatgctggctcactgcagcctccacctcccaggttcaagcaattctcgtgcctcagcctcctgagtagctgggattataggcgtgtaccaccacacccgtctaagttttgtattttcagtagagatgcagtttcactgtgttggccaggctggtctcaaactcctggcctgaagtgatccacccgcctcggcctcccaaagtgctgggattacaggcgtgagccaccatgcccagatgctttatagtaagttctggagtcaggtaatgtgagtcttccatctttggtctttttcgatcatgttttggctattttagttcctttgtttttccctgtaaattttagagtcatcttgttgataatattccgtcttccaatccatgaaagcagtacatttctacacttatttagatcttcgattttgttcaccagtattttgtaattctcagcatgtcgattctgtatattctggtattttgttagatttgtaaaagctattttgtttttactgccattgtaatggtacaattttgttcatttcaatttctaactgttcatcgttagcatacagaatatacaattaatttttagatattgaccatgtatcctgtggctttgcttttctatagattctttgggattttctacatagagcatcatgtcttcttcatataggcacttttatttgtaaatctgggttagctttttttgttttcttgacttactacattggtgaagtctctagcatgctgctgaatgaatagaagtggtgagagcagccacccctgctttgttcccataaggggaacatactgccttttactattaagaatgctgggggctgggcgcagtggctcatgcctgtaatcccagcactttgggaggctgaggcgggcagatcattcaatctccttgagttcaggagttcaaaaccagcctggacaatctggcgaaaccccatttccacaaaaaatacaaaaattagctgggtatggtggcacatacctgtggtcccagctactctggaggctgaggcaggaagatcactggagcctgggaggcggaggttgcggtgagccaagatcatgccattatactccagcctgggtgacagaatgagaccctgtcacacacacacaaaaagttgaatgctgggccagcgcagtggctcacacctgtaatcccagcactttgggaggccagggcaggaggatcacttgagcctgggagtttgagaccagcctgggcaacatagcgagaccttatctctacaaaaaaaaaaaa

SEQ ID NO: 582077 - DNA, 1173 bp, Homo sapiens
agctggctgtggacgactcctcagactgaaggtggagctgtttctgaacgaaacaggaggactttgatcagaagtacaatttccgtttcgaggatgccggactcagtcatgtcggttcaagagcctacccacgcagtgattcgcgtcctccgtgtgtcgccgtaaggattgagcgcagaaaacggagtaagagggaagagactcggagagacgaaagaagagggatgaaacgcaaagaagcagcgaacagctcaatgcatgactgaagaatcctgaactaggaagggatgagttctggccaagtctggagaagctgcgcgaaagtaacaggcgaacgagatgctgggcctcgaggtatggggaccttgtatgacgacttcgaccctgccctaggctcgacacagtctcatgcaggaatgtgcttagcgggacgagtacatactcgtggaccgtgtgatgggagtgagaagtccacaattttgaggacagagagaagggcttgaaggacgagtggaactgggacatcgtgggacgggcctgagcaggagggagactggagtccacgcaggagctgcactgtgaggaccccaacttgcaacgatggactgccgattacgacaccagccagccgaggaagaacaaagcgcgatgcccccttgacgggcaagaagaagcgcaagtcgccttcgccgcggccgtggggccaggagaagcgcgtggttgaacccggggacaaagacgttcgaggagtacctgggatgagtattaccggtgtggaactacgaggaccttcatcgacgaactgacctgtcggttcaaggtaccgcatgagtggtgccctgtgactttgggctcagaactgaggagatctcgtgtgctgacgataagggggttgaaccggggtggctccctaaaggagactggatgttcgggtccacacgggaagaacctgggggacaagcggggggtcagcaagagaggccgacgcatgtgaaacggggagggctcaggaccctgcgaagaggagggagaccatggtgagccgagggaacacatagagtgaaccgccaaaaggagtccccttgagggtaggggggagaacccagagagacggtttgctaggacacggggagaagagcagcagagtgcaacacagaggcgtgagacggggac

SEQ ID NO: 582078 - DNA, 132 bp, Homo sapiens
  misc_feature (62)..(62): n is a, c, g, or t
tttgaaatattcaattttatttgatgcagtggttacatgggtgaatacaattgtcaaaactnattaactaggccaggcgtggtgactcacacctgtaatcccagcactctgggaggccaaggtgggcggatc

SEQ ID NO: 582079 - DNA, 277 bp, Homo sapiens
tcccgtgaggacataaaacattcttccccgtggtgtgtgtagaggaactctgtgtctgtgtgatgaggggcatgtgtgctctcagcacccacctcctgtgcccagagagccctgtcctgtgcagggtggttatcgcagtggcagggttcaattcgagaagaccttgagggccgcgctgatgttccctgaatgcgcccctggtcgttgcttgtccctgactctccatttccccatctgagtggatttggacctaatagggcactggagccggttcgaa

SEQ ID NO: 582080 - DNA, 334 bp, Homo sapiens
gctctagaggacccctggcaggctctctactcaactttttccctacatacccaggggggcttaatccctcctatctttctgggcctctaaccaaaggtctcctctgggggacttcctcggtctaccctattttaatagcatccccctaaaccagcattcttcccggctatttttttctaactttggtcaccatctgacaaaccatataaggtagctataatggatggtgggtctttctcctagaaagtaaacttgcggagggcaagaatatcttccagttgggtaaactacggtatggacggctgggtaggtagagagccgggcaagggtaccg

SEQ ID NO: 582081 - DNA, 398 bp, Homo sapiens
ctgcatggctgactccggtcaataagaatcgatagctggaaggtgtctgtgtaccaggctaaggcggctgcgagtagcgagatgccgacattttccccgaaggaatcttccggtgcctttcacccaagtacgggcaggagtttcctgaataacagcaaaaggtttccgttagccccgcagggcgagcaattccgattccctccgggccttccccggatcatgctcagccctgtgtccggcaggggctcctcgatcccatgggccgccagcgcccgagggccgaggcctggacacggaaggccgtggcgccggctatctcgaggtcccatggcgccaccttcggctccgctaccctgcagcagggaccaggaaaggccagacccagtcggaaaaggggc

SEQ ID NO: 582082 - DNA, 352 bp, Homo sapiens
taggatgcttgtgggtattctctgggtggacacttagaatttactgtattgtctgggtgtgctggctcatgcttgtaatcctagaacttgggaggccgaggcaggaagatcgattgagcctcggcaggtcgagatcagcctgggaaacacagggaggcccccatcgctacaacaaatattttacaaaattagccaggtgtggtggcttgtgcttgttgtcccggctacttgggaggctgaagtgggagggtggcttgagtccaggagttcactgcactgagctgtgatcacaccactgcactccagcctggacgacagagtgagacgtccatctcaaacaaaaaaacaaagg

SEQ ID NO: 582083 - DNA, 473 bp, Homo sapiens
gaggaagccgaggtctgaattgcgcgttgtggccatggcggccagcggggctgtggaaccaggcccccgggggctgcctgtcgccccgtctgcccgccccggccccgacgcctgcccctgatcacctgttccggtccatcacgcgccgaggacgaggagcagcaagcaccaccgacatctgagtctgctatgcatgaactgttcactgcacatggcactgacgcgcctcctgctcaccaatgattcccttcttcacgcgaaactaatacgtgagctcctttctcctgcgcagccactgtgcgctggaacacacacggcagcatccagtcggccacgcaggatccaggaccacgcacgtgcgctacacttcgctctgctcagggcctctggcaggacactgaaccagcagcaagctggtgaacgcactgcactcttgctcgccccacggattcctgaccctacatcccgcacac

SEQ ID NO: 582084 - DNA, 1128 bp, Homo sapiens
cattcgccagcagtgtcctatggaaactatcaccaccgtacaagaatgatggatgtcactgtgactatcaagtcttccatcgacagatgaacccgaccttggtcttaggccctctgaagtctgtgcaggacgctgacggagggacgcagcagctggctagagactcgaggcccgcaggcagcgagacgggcatgcacagaacgtgcaactgagagaagtgccgacgcacaacgaatgaccaatgcctctcctgtgcatggagaatggtacgactgacgttagcacagggccccgttctctgtaatgattgtctccttacttgggctgcaggctctaggacgcagcacaagatccacttggttacaccggctcagtctaacagagctcgctctgtgtaatccgcccattcaattggaaggccgtatgtcagtgggccgcacagcctggcccaggggaaaggctgactcggagatccgatggagacaggccaggccgtgatactatcagcaaggccagcatccacgcccggagttggaacggagtcgcacgattggtcatcaggtgcacaacgggggcaagttcaccagctgattcacagtccttatactgatgacaaacggtgcctaacaggtggtcgggaccccttgccacacgtgaccctggaagctacacgagtgaccctacacacgaacacgaagcggcaaatggggccatggacctgccgggcagagacagggcacaccactccggagtacccttccacggcccctagtgcccctgtgcaagacgataaagcgcctggcgcatacaagcagctcgaagcgaatgagcccacgcacacaccgggaagaagacccccctaaaaccccctcaaagcagcgagtgcccccagtgcaagagccccaaccccgtggagcgccgggcagaacaagggcagacaagcgacgtcacaaagcagaagagacccgaggacgaacgatagcccgcacaaaccgcgagcagaagaggcaccaccagggtagcacccactcacgagacgtccagggggcgaccaccgcaaactaagagcacacacaacaggagcaacaacccgccccacacagacagagacaacggaccacccacaag

SEQ ID NO: 582085 - DNA, 578 bp, Homo sapiens
  misc_feature (113)..(113): n is a, c, g, or t
  misc_feature (271)..(271): n is a, c, g, or t
  misc_feature (425)..(425): n is a, c, g, or t
  misc_feature (524)..(524): n is a, c, g, or t
tatgttaaacaaccaaacttaaggataatcaatgttcctgaggaagaagagaattctaaaagcctggaaaacatatttgggggaataattgaggaaacttcccctggccttgntagagacctagacatccaaatacaagaagcacaaagatcacccaggaaattcatcaccaaaagatcttcacctaggtacactgtcatcaggttatccaaaggaaaccattttaagagctgtgagacagaagcaccaggtaacttacaaaggaaaaatntatcagattaacagcagatttctcagcagaaaccctacaagctaagacagaattggggccctattttcagccccctcaaacaaaacaattatcagccaagaattttgtatacagcgaaactaagcatcatatttgaaggaaagatacagtcatnttcagacaaacaaatgccaagacaattcacaccaagccaccactacaagaactgataaaaggagctctaaatattgaaacaaatcctggaaaacagagnttctttaaagcataaatcacgtgggacctattaaaaaacacacacacacaagtt

SEQ ID NO: 582086 - DNA, 134 bp, Homo sapiens
gggctcactcaggccagcacattaacaagatagaaccctcattcacactgagaaaacaccctcatgttcatacaccttatcccccattctcctcctatccctcaaccccgacatcatcaccgggttttcctctt

SEQ ID NO: 582087 - DNA, 226 bp, Homo sapiens
ggggaatttttttggttttggcccccaattttgtttttccccagtttggaagggcccaacctttttggccccccttttccaaaggaaatttgggatcccgccaatttttttcctttttgggtaatttaaggggggggggcccccttgggccttgatccttaagaaaggggcccgttttttttggttttggttttaaaccttgtaaaaaaaacttttttttccccca

SEQ ID NO: 582088 - DNA, 897 bp, Homo sapiens
gagacctggctgctgtgtcccgcggcttgcgctccgtagtggactccgcggtgccttcggcagatgcaggcctggggtagtctccttttctggactggccaagcagaagacatggtgaagcccctcgttcccattagtgccctttgctgttggtgtggcttcggctatcacgatgttactggtggtttctggtgggattcgttggctatgtacaatcgggcagcgtgccgtccctggcttgcagggctgcgtcttcggccgtctagccggcctgggtgcttaccaggctgtatcgggatccagggagcgtttggggcttacctagccgctacatctgttactttgttgtaggttgtagtgggaatgagatcctacgactatggggagatttcagtgcccgtgaggtttacctggcgggtgccagtttgctgatggccgcaaagctaggagtcgaatgtgatgacatcttgattagcagaagtcatgtaccagcttgtgactcgtgacaggattgtacatctgcatctttccactattttcccctggtattacgagcaactaaagtgcagcatttcggatctgacatgtttacctgaaataagaaatacggccatccacgcttgtgggggtcgtgcgtctgcaaaatctgtgtgtttccaatttttatccctacgaagggggtggggcatgtacgctgacctttgtggagaccatgcgacacctcgcacctggtaaggattggactcgcttctgacgcaggggacacttcacggccaatgggggggtgccctgatagcttgagagcattccggtccgacatgtgaaccactctgcacatgcaaactttgacgtaaccaacgcggaattcgagtcacaaaacagaatggggcgcggaaa

SEQ ID NO: 582089 - DNA, 225 bp, Homo sapiens
ggagacagtgatcaccaggagacaggatcacagggagccagcatcactgagagggacgctccgacgaggcagagacggtgacaccagcggccatgcccaacacagatgccggagtgcgacacgggcagatgtgtcctcatcaaacgagcagtgcgactccttccccgagtgtatcgacggctccgacgagctcatgtgtgaagtcaccaagccgaccgcagacga

SEQ ID NO: 582090 - DNA, 157 bp, Homo sapiens
acagagattgggagtgatttagtacacagcacgcccaatacccaacaagcagcctcagagagactgagagaagggggagaggggactggaagccatctcctcgtgttctgcaagggcaggtgctccttcccaagaacacgcactcagtagacgccaa

SEQ ID NO: 582091 - DNA, 97 bp, Homo sapiens
gaccgccgcagacacggctgtctattattgtacgagagaatatagcggcccgtccctctgggactggggcccgggaaccctggtcaccgtctcctca

SEQ ID NO: 582092 - DNA, 582 bp, Homo sapiens
ttctgccagatatcctaatctctctctgaagtataaggttccacagatctctagggcagggcaaaaatgctgccagtctcttggctaaagtatagcgagagtgacattcgttccagttcccaataagttcttcatctccatctgagaccacctcagcctggactacattgtccatatccgtatcagcatttcggtcaaaagcattcaacaagtctcttggaagttccaaacttttcctcatcttcctgccttctgagccctccaaactgttccaacctctgcctgttactcatttccaaagtggcttccacattttcagattatctttgcagcagtaccccactctgctggtaccagttctctgtattagtccatgttcacactgctataaagatactacctgagactggtaatttatacagaaaggagttttaattgactcacagttctacatggctggggaagcctcaggaaacttagaattatggcagaaggggaagcaggcatcttcctcacaaaggtggtaggagagagagagctcatgcgaaactgtcacttttaaactatcagatctcctaagaa

SEQ ID NO: 582093 - DNA, 269 bp, Homo sapiens
ttcattgtagtgagcatctctgcgatagacaataatctgtggtcacacgcgggagtggcggtgcgcgcggggcaaccgcgtggagctgtcgggagggcgataggatgggcgcgcccgggctgcaggctggggagccggaggtgggaggtgcctcttgagagtggctctccaccgctgacagcaaacgagctggtccggacggaggacagagggggaagaaacggagggagtcgctgggggacggcgacgagtgggatccgggcggatgg

SEQ ID NO: 582094 - DNA, 576 bp, Homo sapiens
tcgcgacgtgttatccatgactgagtttagaagtgtgtctataaactccttgaaattgtacgaaaaatgttagagtgtgtatttatttttatcaagaaaggatccatggcttcagtcagattcttataagggtctgtgactccaagaagggtgagaaccactgagtcaacaggtgcttgcacagcatcaaaaagtagcaatagcagaagctaaagttgggtaagactcagaaaatgttttcctaagtcccctgtagaggagtaagagagaagatgctgggggctgatcatggcaagggcttatagctctaaaggacctactccagggaatatggttcaatcgcatataaatcaggagaacttgttcccagtaaccacagggcccctttatattagattctgttaatgatttaatatgctacctctctggggtggcggggaggtgagtgcctaaacccagaggaatgaattcacagtgactgggcctggaggtctcttgaagacttgacaaaatgaggtagaggtggacatgggggggctcctggtcctgtacatgtcaggctgcttgtctgtgtgg

SEQ ID NO: 582095 - DNA, 913 bp, Homo sapiens
aggccggcgagttgcctcacggctgtaatcccagcagttgggaaggctgaggcgggcagatcacgaggtcaggcgatcgagaccctatcttggtaacgcgatgaacacccccgtcctctactaacatagatacaaagcagttatatttagccagtgtctgtgcgtgcgcggtcgcatggttgctccctaggcttactttggagagggcttcgtggcagagaagaaagtcggcctggaacctggggaagcgcgcgatcttttgccatgtggctccgaggattctgttgccacttgagacagccaagtccttgcggcggagacgagaaggtgagatttcttgtctcagtaaactttaggtgacaaattcaaccactgacgggatctgagagagactttttttatggcctaactcgttttgcccaaccgaaaaagcctgtttcccaagaaacccgtttgaatacgcttgagccagggtgagtgctcccaaagattactttaaaaatgcggctccgcgacaaaatgcaggggtatcctccagtggaaccacttacgtggcccgaagagcattgacggggcgggattaccctttgccccgctaagaaattatgcccgggggggcgaaaacccacggatcgatatgtttgccaagaacccttcctcgaaaagttggaccggttcgcaggggcactcacgaggtggtgcgaacccaaccctggggcagtttcccaggaaccaagcgcggtacatgctgtgttaccccccgccgtcgtccgcttctgggtagaattgcgccggtttatttgcccgagattcccagcgcaaattttggaaatgctgttgaaaattccttgtgccaaagaccgagtgaaatttcctgcacagtggaaacttgaaatgaaacctaattgtacaa

SEQ ID NO: 582096 - DNA, 114 bp, Homo sapiens
ctctagaggatctcatgtaatcagccaacacggagaacagtgttcttactaaaaatacaaaataagccgggtgtggtggggccagactgtaatctcagctactcaggaggctgg

SEQ ID NO: 582097 - DNA, 888 bp, Homo sapiens
ccacggaggcccgcctcgtttggcccccgggaattcgccctttggtccggggcagaagtagcctctccagaggtggaacagccggcaacaagaaaaagcaaccaacaaggtaaccacataaaagctgcgggggcggtgtttttggattctcttacgcaacacactaacatctatatccccacgcacccattacccatcccgccgctccctgaccactgtaagtgaagcccgggacttgtccacacacacaacaatcgcatcctcaacaacccccaacaccaatatcaatacggacccgattatctctacttgtccactatctaataggtataatttaataatatcaatcacccaacctaatgtgtcaagtctgagaggtgacgtaatatctatatgtgatctgttggttgtggtttttttttatgttctccactccctaaatatcaaacaataaaccggcagcgtgatgactatagtacgtcatactacaagtacctctcgtacaataatattttgtaatgtcaataagtactcacacacgttaacgaatgtaaactgtaaggcccctctctctactgcttcgcctccatcgtatacttctcttctttctaccggtaacacacgcgtctgtctccgtctagtcgcgtagggttgcgaattctatattatcctttcttctcgtttctttaatctgcgtatttctttcgcacctctttgcgcttctctttgttgtaatgggtgatcgttcacgaaaggaggacggcttgactaatatgcactcacattggggttatggcaacagcgcccaagagaggaccccgcgcagcttagcaacgggtcgagaagctgccgcccaccccaatatactaaggacggtactccagcaac

SEQ ID NO: 582098 - DNA, 230 bp, Homo sapiens
gaagggggtcaccggcgtcgagaagggcatcgccaatactgtcgaacatcaacgtcggcttcctgtgcctgctgctgcttgttcgtgtttttgtgccgggacgacgctgaacctgctgaacggcatgttgcagaacctcggcgattatctcacctcgctggtcagccgcagcttcgatatgtatctgtacggcaaggctcgccaatggcagggtgcctggacgctgttct

SEQ ID NO: 582099 - DNA, 946 bp, Homo sapiens
tctgcgtgcccagcctctcctcacgctcgcgcaggctccgccgagtctcagctgcagctgcagggagtgagccgtgcacccggaggagatcccggtgatgatgcgaccaacttcggacagtgcctgacgacccaaacactcagccactgttggtagcctgcaagcatggcccagctgttcctgcccctgctgccagccctgtgtcctggcccaggctcctgctgctttcgggccgctgtcctggatggagacagctcagaggaccgcgcttttctgcgtgcgcatctgcgggcgacgcagcacactgcagggcgtgcttcgcgtggcgcccgtcaccgatcccttgctcaggtccactacctgtcggtcacccgccgagccgtcggggtgtgctgggctctccgacggtgctcatacgtggcacatttctcgtgtgccgcggaccgggacggagaggttgctgggtggctgcggggagtgggcgctccagtgtgaacagaggcctatcggttccgcgtggtactgacctgcgtacccagtgtcgtcaccgacgttctcgctggcgctgagcgagctgctcgccaaggattcaggtatctatcgctgtgagggtccacaacggatcgaatgacatgcaagctgacgctggtggagcgtcacaggtcatgaggcggtccgtcttactctagccgaaaaggggctctgcccgcagttgcattcataccttttactttgggaccagacggcctgtgcccgcagtaggaagccacattcagcacccccgtaaggagtctatccagcctaccttgaggctaaagacaaaaggtaatgtggtggatggccaaagaaccgtaaggatcccgtccaacccaaaaagcgcgtaagcagacgtgtggaacagagacgagaaagagtgtgcgcgtagacaagaggtagaactaacaaa

SEQ ID NO: 582100 - DNA, 522 bp, Homo sapiens
aataaaagaagagtccgatctgtagcctaggctggagtgcagtggcaacgatctcgactcactgcaacctccgcctcacaggttcaagcgattctcctgcctcagcctcccaagtagctgggattacaggcacccgccatcacacttggctaattttcgtatttttagtagagacggggtttcaaccatgttggacaggcagtctcgaactcttgacctcaggtgattagcccacctcggactcccaaagtgctgagattacaggcgtgagccactgcacccagctggactctggtaaattctttacacagggtgttttatttaatcctcaataaccatttattcagtgaggattattcattccatttatccagttgaagaataggaatcaggttggaagagatgaagtaacttacctcaagttacatagttgttggtgacaaagttgggatttgaatctacgtcttccaaatccagagccctgatgctctagtctgtaatctattgcttatatactatagt

SEQ ID NO: 582101 - DNA, 293 bp, Homo sapiens
aatagattacccagaaaacatggaatagtctgcataaaaatcgcatgactgctaatcaagttcagcagagtcagcccggctgtgctcctgccagtctgttcctccctcatgggagtcacacaaaatgaaaatctcctagaaagaggaattcctctgatcctctgagattcttcactatagtacgctgtcgaccttcccatgatagttcaacatacctcaagctcgaacgcgtcactggactgtatggtggtctataaattggaatcggcttaactatctcttcactgacaacg

SEQ ID NO: 582102 - DNA, 118 bp, Homo sapiens
tttcacagcacactctgctatttttattaccaggactttttaataatcaaactataacaatatactagctcagaacatctagaatagtatctgtggttgtcactcttcattgcaataa

SEQ ID NO: 582103 - DNA, 222 bp, Homo sapiens
  misc_feature (80)..(80): n is a, c, g, or t
  misc_feature (83)..(83): n is a, c, g, or t
  misc_feature (108)..(108): n is a, c, g, or t
ctctctgtgtgtctagatccccgcgctagcggcatagtgacggaccctgctggatggtgcctcctggggacacttgggcnggngcaatgccctggatggccttgtccnctggatccacccagcaagggaccagatagacagataatgtcagagcaccagaaggtactcctgctctgaaagttctttctccaggatgaaggcgttcacttaatgccgctagcg

SEQ ID NO: 582104 - DNA, 612 bp, Homo sapiens
  misc_feature (12)..(12): n is a, c, g, or t
  misc_feature (470)..(470): n is a, c, g, or t
  misc_feature (493)..(493): n is a, c, g, or t
aaaggaactcgncaaacaagaaccccgcctgtttaccaaaaacatcacctctagcattacaagtattagaggcactgctgcccagtgactaaagtttaacggccgcggtatcctgaccgtgcaaaggtagcataatcacttgttccttaattagggactagcatgaacggctaaacgagggtccaactgtctcttatctttaatcagtgaaattgacctttcagtgaagaggctgaaatataataataagacgagaagaccctatggagcttaaattatataacttatctatttaatttattaaacctaatggcccaaaaactatagtataagtttgaaatttcggttggggtgacctcggagaataaaaaatcctccgaatgattataacctagacttacaagtcaaagtaaaatcaacatatcttattgacccagatatattttgatcaacggaccaagttaccctanggataacagcgcaatcctatttnagagttcatatcgacaattagggtttacgacctcgatgttggatcaggacatcccaatggtgtagaagctattaatggttcgtttgttcaacgattaaagtcctaacacatgtcgacgc

SEQ ID NO: 582105 - DNA, 273 bp, Homo sapiens
ttcccccgggaaccccttttcccccttggccccttttgggggcccctttaaaccagttttgtccaaaaaacgggggggggcccggccgggatttcccgggattttttgccccccccggccccccccctttaagggtttttaatttttttctttttgggcccgggggggttttttaaacccccctttttttttttggtttaaagttttccccctttttttttttaaaaaggcccccccccccccccccccgttttttaaggtttttttttttta

SEQ ID NO: 582106 - DNA, 114 bp, Homo sapiens
tgctgtcaaactaccgcgtgacttcaccttctacccacgccgtacgccgctgcagcacgaggcaggcctctagatggaccagctctgcaccggctagcatgaagacccccttcc

SEQ ID NO: 582107 - DNA, 530 bp, Homo sapiens
  misc_feature (10)..(10): n is a, c, g, or t
tcgaccggantggagatgaaaatgccagccctgctagatccaggcgggatggagtgtggggtgtgggcacagtggcttgtacaggcctgggctgggcagacttgccccggagtctcaggccactgcggaaggaggacgcgtggccagcaggtgccaccaggagaggagaggagggccaggctgagctgcatctctggactccaaggagagcttggagaggtgactgaaaccctgccccacccccagcctgtctccatctgtgggtccttgggcaaattgcctcatctctctgagcctcgaatgcgtagctttcaggactaactagggtactgtgtaccaactgcctctgccaacgcccctgcactgggcagccctgggtacctggcttgggggaggagtaggcctgggaggagactgatgctacatttctctttatctatccctgtattgtttaatttgttccaagtgcttgagttactttggcaaatagaaacaattctaataaagagaactaagaccttaaaaaaaaa

SEQ ID NO: 582108 - DNA, 154 bp, Homo sapiens
caggaaacagctatgaccaggaaacagctatgaccaggaaacagctatgaccaggaaacagctatgaccaggaaacagctatgaccaggaaacagctatgaccaggaaacagctatgaccaggaaacagctatgaccaggaaacagctagtgac

SEQ ID NO: 582109 - DNA, 274 bp, Homo sapiens
cccgaggcacatactataagatagggcactggtatcacaagttcgtttggttaaaaaaaaaaaacaaaagggggggcggggggcaaagaagaagttgaactgggatgatttccatgcccatccagctgtaacattctatgacggtgacccagccttggttctcttttctcactctcctactagacttttcaatgaaaagtaaggcaggaaaaaggaaaggaatcccaagtggcggccagctctgatgagagatcaggtgggggtaccgagctcg

SEQ ID NO: 582110 - DNA, 381 bp, Homo sapiens
aaggatctcaggattgtgtggtgttatggtcttgttacaattattattcctagctaatatgaccgtatcgtgtccataccacgtcggtgaccatatatcaagcaagtgaacgtttatttagaaatcaagtgatgactagcatacggcagactgggtagacgtaccaccattctcggtcatcggtcacctctcgatgtaggtgataacgcccacgataatgtgcactcccaggaaatggtcatcggaagcctctcgattctgaaaatgcggttatccaagaacaagtcaagtatcacgttatgagtatcatgtcacgagaatcaagtatcaagtcaaggtagcatctgcagtccagccggccatacataacaccacacaatt

SEQ ID NO: 582111 - DNA, 601 bp, Homo sapiens
atggcacagttccacaatctcttctcctgctgatggccttcatgttgttaaattttgacatacagcaagtgtagggaaggaagcgttcgtagttatgacttgtccattcggggttcttcgtcataggaatgctagaggaaacagaacactgccttacagtcacctcatgttgcagaccatgttgatggtaatacacactttccaaaatgagccttacaaatagtaaaggggatactataacatgtgctacagttcatttgagacttcctcagtttaaaaagtgggttcttacatagtcttctgtctccctgatatgactacactcaaggggctaggacttcgctatctctgagatgtactgctacttgctgcaaattctgcagctgtctgctgtctctaaagagtatcagtgcactagagggacgtgttccctttacacgatacacgaaccgactgtcctggactggagaactctcacaagcggaacagagatctttctaaatccctgctactgtcccttctcacaggcatgcacagaagccttctgattcgtaagggttacgaaactcatgtacttactccagtaccctgtggatctctg

SEQ ID NO: 582112 - DNA, 169 bp, Homo sapiens
gaggtaagtaaagggtttgctgctgaaatttgggggaaattaacccgagtaggtttgttccctgccttgcgagtcgcgcccttctgggaacggatttttaaaaggagcatgtctggagggctttggtccaaggccatttttgttggctataagcggggtctccggacca

SEQ ID NO: 582113 - DNA, 726 bp, Homo sapiens
gctggccggtgaggccgcggcattggtgcgatgtgcagctcttcgagatcagcctgagccacggtcgcgtcgtctacagccccggtgagccgttggctggtgaccgtgcgctgtgcgcctgggggcaccgctgccgttctcggagccatccggtgtgactctgcataggttcctgcggggtctccaacaaggctaatgacacagcgtgggtagtggaggaaggttacttcaagcagttccctgtcgctggcgataacaaggtggagcctgccctgctggtagagcaacgagcttcccacttccatggttccgtgcttcctgccacgtgacacccacgatcctattgagggtcctttcgggaagatcgctgcaccaggtgagggccgcatcaatacgccaaagggttttccaaggatcacaagtgcaggcctcgtgttctatatcttgagccccttgaacctgaacagacagtcccagacagttgagcaacccaacgtggccctctgagcaaccaagaagttctcctacaagcgtggtgaacgacgggcagcgtgtgtcctcacagtccagcactgatctcctgcggctatgtggtggggcaggcactgcaagctgcatgccgacgttgagaaccagtcaggcaaggacaaccagccctgtgggtggccagtctgctgcaagaaagtgtcctataaggccaagcgctggatccacgacgtacgggac

SEQ ID NO: 582114 - DNA, 987 bp, Homo sapiens
  misc_feature (987)..(987): n is a, c, g, or t
agtcgcgagcgactcccaagagggtgtcgactgtagagccgagcgaagagatgcctaaatcacaggaactttggtcttcaagctcttctggcagtgattcctgaacaagtgaggttgacaaacaagttaaagaggaacaaagcaatgttgtccagaaaaaagcgtgtaaagaaacaagagacaggtgagaattcgagagccccgtgtcgatcattctaaacagagcagcagcaggagagaatggttaaacctgtttcagaattgggaaaaatgagggtagggttagagtgtaccggggaatttaaaaagggccagggtgataagttgatattagaggatatggggagtggatccttgcaagggttgaagactgaatcagcccaggaaggacaaaggggttattggctattaaaatccaagaaacacagtggcagccagcttgaaaggacagcaggatttatgacatgggagtgaatgcagtaagaagacacgtgtaaaaattcgaggggcacatataagattaaaaactgtaagtgatacataagtttgtgtaatactgatatttttaagagtgggatgacggggttacacaatggtgtccaagcataatgtatgttggaattgagacaacacactttggtaggaatgaaattacttgtttcaagtgtggcatcatgcacaaaccaatggagatgaagctcaatgggcaagcgtacatccaggactacgatggtctgacaccccaacccaagggtaaacaacaactcacagacacaacgacctccacaacaaacacagacgacaagacaacactggttgacgacggccccagaagcgactctaacacaaccagtggagggcgaccccaaagaaggaacaagggtagaggaccaagccaccggaacacaaggcgatccacacaaaaaccggggcggcgtgctcaccgagcagaacaagaacaagagcgagcgcaacaacccgggggan

SEQ ID NO: 582115 - DNA, 312 bp, Homo sapiens
  misc_feature (48)..(48): n is a, c, g, or t
  misc_feature (69)..(69): n is a, c, g, or t
  misc_feature (77)..(77): n is a, c, g, or t
  misc_feature (118)..(118): n is a, c, g, or t
  misc_feature (132)..(132): n is a, c, g, or t
  misc_feature (178)..(178): n is a, c, g, or t
  misc_feature (180)..(180): n is a, c, g, or t
  misc_feature (198)..(198): n is a, c, g, or t
  misc_feature (213)..(213): n is a, c, g, or t
  misc_feature (225)..(225): n is a, c, g, or t
  misc_feature (231)..(231): n is a, c, g, or t
  misc_feature (267)..(267): n is a, c, g, or t
acgagggctcatcattcaaaataaaacaaaataaaaaagtattaaggngaagattaaaaaaattttgcnttacttantttacacgaaagcaatgctatcacctcccctgggtgggctnggggggggggtggnccattctccttggggggggggggggggggttttggggtggcaaggnanttcctgtaacaacgcatntcatttttggcatgnctattaaaaaanccccantgtgcaatcaaagtcctcggccactttgtgaacttnggggggtgctcgctccaaccggctgctgtcaccttccccgttcca

SEQ ID NO: 582116 - DNA, 275 bp, Homo sapiens
tagtaaagtgcaggttaaaatacacgtaagcgcaaagcctttgcaactaacttttcaaattaatgatcagttaaaagagctaattaagagagctggaaaggatgcagggagatgccatcaaggtacattgtgcttggagtgtaaattggtacaccctctcgctcagggctatttgcagtataaatgcatacatttcggcctgacgcgggggctcacgcctgtaatcccagcactttggagggccgaggtgggcggatcacaaggtcaagagattg

SEQ ID NO: 582117 - DNA, 1314 bp, Homo sapiens
  misc_feature (1160)..(1160): n is a, c, g, or t
  misc_feature (1314)..(1314): n is a, c, g, or t
ggcaaaacaccatagatgtgctggatgaacgccggttgcagctggggctggcctcaggtgggtccctggtggcacctgagttatggggaaccgcgtgtggattccgcggaggtttcgtcagaaggcatcctggaggccggggtcgcggccgtggtcgggtgccgtgtgggcctctgcctgcggcagctcgcgtattgccggccggcaggatacggacgtggcttgtcctgtcaccgagtctgggcctggtttggtcacaggacatgaagatccatgtccctgtccgtgtagatctatctcttctccctgccatattatgcgaatcaggaggatcccttgatttcttcctggcgcggcccgtctctcaacggatgaggtattgtgaacgatatactgcgcagtgcgagaaagcgataccctggtgccggccagcttgcaccatgtctcacagggacattttgctttgccgtatccgcggtgagcgtaacaagtgggccacctgatcggatcctagtggctgttcacagattgcttccctatgggaacatgtgttggcagcactgaaccatatcgggttggggaagccgagtcaataccctgaggtccataggacttcttcccattcaggtcccgcccagtagcaggcaagaagagcctaacttagggggtgggaaaccaaaggaatccgggcaaaggccccgccgagtacctagtgtcccccctttttagagacaagtgttggacacaagaggccctggtgttgcagggcttcttaggttagcttgggttaacatgcccctcaaatacacccttgacagccccccaagggtgagccaccttgtgggcactcaggttcgttcccggttcaaccccttgatggtccctttaagaagtaaaatgccgttgacttccatttgcactgggggcgtggggattaattctggatttgtaaacgttggcgttaaccagacgtcgttcgcaagcccccggggtgggtccttgtacaccttgtcacgaacgacgccttggtggtacaaaaacacttatacgggacacaaaatggaggaccgtaagcccgttattggcaagttggcccaagattttttgcttaaaggaacccctttacgatgatataagccgttggaaaccccgccgacggnaacccttccgttgagagaaagggaagaaccgttggataaatttgcagccaccagacgcggagtatcattacctcattaattacgaaggggaagggttttaccaccgttgtgaacgcccaaacagcagtctgattacgataggaagaacacgcan

SEQ ID NO: 582118 - DNA, 1495 bp, Homo sapiens
  misc_feature (134)..(134): n is a, c, g, or t
  misc_feature (526)..(526): n is a, c, g, or t
  misc_feature (535)..(535): n is a, c, g, or t
  misc_feature (583)..(583): n is a, c, g, or t
  misc_feature (1495)..(1495): n is a, c, g, or t
ggtctgggcgcacagagctctcagggccggtcgccgagtgcacagggctgtccgcgacctacgccatcagctccaacactgggcaaaaatctcacgagacgcgcgtacagcatgactgaaggcgggtgcagtcnaaggctccctggaattgctgatctatccatggaagctactgcgtggagacacggagtgggttagtatacatacacttgcgtcatccagaggaacgagtagggttgccttagaagacgtgtcatggaatactacctagggaaacattaggcgtcgtcgcgttcgaccagaaaggagagcctacggaaatgggcaccacgccttggcttgatcgcgtttgaaccctgccaatggcagtcgaaagtagagaattcgtggagcaacccaaaagctaagctagtaatagtggtcaaaagcatgaggcatatatcctcagagcaagaatatttcctttgcacatcctagcaaattagggttggggacctctcaggccaatatattgagcggtttcgcncagaatagnacttctcccctttgtctccctcaaaggacgggccttcgatacacaganttcccctctcaaaggaaaaggcccggggaacgccgtcgaaagcggaaagccacagcgtttttgggacacctcatttgggggcgcgttgtggcggaagaaaaacggcacaaaacgcaacgctcatgtgttccccctttgtcacccaaggtccctttgtttgtccttgggtgcacattgccgagttacatgcacagaaccaaggcccccgacgccgctcaggttccccccccgtgggaaggcaaaccaatctttaaaatccgccaagcgccctttccaagttgccccaaggggggccccacgctagcacccgtggggcggcaagaagttaaagggattaaaaggttaaaaaaacgggccacagaagtgtggtttccaagccttttgtttttttttcaaaagaaaacgcgagaagtagaccacatgacgaggagtcacaagcacaacaggacgatacacagcaaacggacaagcacaaaagaagacaaacagaaacacccggggagggcaagcgatactcacaccaaaagcgcgacggcgacgagggtgcagacgcggcggaacacaacaaaacaggggcgatgagagaccagtcaacccaacacacgaagcgggggcacaccacgacacagggggcgtgcccagaacaacaaaacacaggaaggtgggtagtgcactcccgcaggggtacagcccccagcggcgaaaatgtgataagtggcggagggaacaaccaacgagcgcggcggggggacaaccataagcgaagctgccagcaagcggggctagacccgccacccgtaacatgtaggggagcaaagggaaccgaccagaatagaacacacacaatggaccccgcgacaaacgatcaggcgccacgcgggcataatagcaccccgcgcggaataacacacn

SEQ ID NO: 582119 - DNA, 486 bp, Homo sapiens
  misc_feature (148)..(148): n is a, c, g, or t
  misc_feature (281)..(281): n is a, c, g, or t
  misc_feature (387)..(387): n is a, c, g, or t
ctaaggatccctgaatcgacggttctctgctgactgcagaccaggttcggccctctcggactctactcagtccctatgacgggcgcacgtgggcagggctggaggtggtgcgctcgccgtcgcggcgctgcgctgagctgcagcaatnccaccaggtcgctgttgtctccccttggccaccagagcttccagtttgacgaggacgacggtgacggggaggatgaggaagacgtgcatgatgaggaagacgtggatgaagatgcccatgattcagaggccanagtggcgagcctgagaggaatggagttacaggggtgcgccggcactcaggttgaatcagaaaataaccaagaagaacagaaacaggtgcgcttaccagaaagccgnctgacaccatgggaggtgtggtttattggcaaagaaaaagaagaacgtgaccggctgcaactgaaagctctagaggaattaaatcaccaactagaaaaa

SEQ ID NO: 582120 - DNA, 926 bp, Homo sapiens
agtgggcccaggtgttgcgctctcgttggccgttccttacacttgcttcaggctccagtgcagggcgtagttgggatatggctaactcgggctgcatggacgtcacgggtccagatgaggagagtttgctgtactttgcctacggtagcaacctgctgacagagaggatccacctccgaaacccctcggcggtgtacttcatgtgtggcccagcctgcaggattttaaggcgttgactatggcaattcccaaggcatatcaagtcaaatcgttggcatggagggatatgccgacattttcagagtcctgggcgatgaagtgtggggagtagtatggaaggtgaacaaaagcaatttatgattctctggatgagcaagaaggggttaggagtggagatgtatgtgtaactagaagttacggttgcaactcaagaaggaaaaagaaataagctgtcgaagttatctgatgacaaattacgagggtgctcccttccatccccatagttgtacaagattagttgcatgggtgcgtgggaaaaatggtttgccgcttggaggtatcaagagaagttaaaagcaatagaaccaaatgagtatacaggaggggtctcaggacggaaattgaagatcatcatcaaaaaggtgggggaaaacacaaacttctttagaaacataacagaatatatctaagcggtattctatgtgctaatataaaatattttttaagcagttgagaacagggatctgggggatctccacgttgatccatttccagcagtggtctgaaggagtatcttaactggggtgaattcgtggttttagactttaaaagaactgggtaggagttcgaagacttaaaggggggattgagggcggaattgggccgttgatgggttccctttggaaatggaagacttgatgattagg

SEQ ID NO: 582121 - DNA, 295 bp, Homo sapiens
accgggagcactgatcatacccttgtgtacacattgtacgtacttcccattagtgagctcattaggaatatcatgttgtatgcttatactttcttgttcaaatgtctgtataatgtttttagagttggggtctcgctgtgttgtccaggctgatctagaactcctggcctgtgatggttaatactgagtgtcagcttgactggattgaagaatgcaaagtattgatcctgggtgtgtctgtgaaagtgctgccaaaggagattaacatttgagtcagtgggctagagtctaggtg

SEQ ID NO: 582122 - DNA, 132 bp, Homo sapiens
cagggaaagccaacctccctcctgcttctgtccagagaattgctctattacagggaccagagtaagcatactagctgcctgactgaggcatctcgagatgcactgtgataggaggttagcctacaatgccag

SEQ ID NO: 582123 - DNA, 111 bp, Homo sapiens
gagcatcagtctgaggcatcgttgtagctgccccctcttctatcaccctgtgtacggactagtcaattccattccagcgtagcgtggactagtagccaagcgtggactagt

SEQ ID NO: 582124 - DNA, 393 bp, Homo sapiens
  misc_feature (335)..(335): n is a, c, g, or t
  misc_feature (385)..(385): n is a, c, g, or t
atgcatcagaataaaaatctaaaatcttagtttaagctcaaatgacagagtttctaattacgtgggtctggtttaagagctgaaattttgcttttgtaacaagtgcccaggtatattggttttgctagtctgtggaccacacattgaaaatcactataatattgatagtggcagaaggcagacaaatttctaggcagaaaggggtgggtcccctttttggcctttttgcttgaacctgaccttcaggccaaaaatgacctggaaaaccaagctgctggtacggggataaagaccccaaccagagtcacaacttcctgggatgccttttattccantgtaatggttcttttcccagggttcacggatgggaccattcagcacacantcccttca

SEQ ID NO: 582125 - DNA, 143 bp, Homo sapiens
ctctctagaggcaggactgactatcgatgtagatgtaggtacacagatggagacaagcacgacgtagaacgacgatcatgctcacggcatcacggtggatcacccgctcagcgcgtaactgatggttttcactgtcaccggtt

SEQ ID NO: 582126 - DNA, 785 bp, Homo sapiens
ggggtcacacatcccatcgactatcacacgactgactacgtggatgagatcaagaagatttacccctaaaggagtgtgactattgtcatggaccctctgtggtgggtcagatactgccaagggctacaatctcctgaaacccatggggcaaagtcgtcacctatggaatggccaagctgctgacgggccccaaacggaacctgatggcaccttgtgcaccggtacatggtggaatcagtacagctgatgacagcttctgctagacatgcttgctaggcactaaccagggactgatgtgtggcttccaccttgtggtcttactcatggatgatgaggtggagctggtcagctggtgtggtggcccgcctccatggactctgtacaatccagggtccacatccaatgccctcatcattgactcagattactggaacctatacgagaaaggtgagtctgatgtccatgcacacacagcatgcagcgtagaagaacgcaaatgtgggcaacggtcctcctggttaccagggccagagacaggagaatctaggggccaaggtggctggtcgaagaaccctaagaagaccaagcggaacgcgcgatgatacgtttggagaaggcttaccgtttccttgtttgtgctcactcaagtactttggctaattatcaatgccctcttgtctattatatggccttcttgaccacgtgcgccttccacccccggaagtgagcaatcattcttggatgagatacgattgaacccggatctccgcacatgtacatcttcc

SEQ ID NO: 582127 - DNA, 82 bp, Homo sapiens
ggcagtatccttgacctcccacagccgggccgccagcccggcgatccgcggcggccccaccgagacgcgcccttcgcccgac

SEQ ID NO: 582128 - DNA, 531 bp, Homo sapiens
gctgatgtgaccgatcttgatgattcctctggaccctcaaagggacattccaaaatgaccgcatatctgggattgtacgccatcagtggtaaagaactcgtccagactgatcaactgtgatcctggactcgctgtatgttatagatgagtttaatgctgtggacttctagatggacacacattcgttcatcaacaccgaaatggacgataactatgctggatttgttctttggctaccagtccagcagtcgcttatatgtcgtgatgtggaaacccgttgcgcagccctactgggacaccaaccccacgagggctcagggatactcgggcctttctgtgaaagttgtaaactccaccacagggcctggcgagcacctgcggaacgccctgtggcacacaggaaacacccctggccaggtgcgcaccctgtggcatgaccctcgtcacataggctggaaagatttcaccgcctacagatggcgtctcagccacaggccaaagacgggtttcattagagtggtgatgtatgaa

SEQ ID NO: 582129 - DNA, 124 bp, Homo sapiens
agctggtcgcagtcccctatagacttctccaggcttatatggattaacctcacaacagtctctcccctatagacttgctccagggctttatatggattaacctcacaacagtctctcccctata

SEQ ID NO: 582130 - DNA, 218 bp, Homo sapiens
tttgatgaaggccgcaacaactttgaaggtgaggtcaccaaggagaagctgttggactttattaagcacaaccagctgcctttggtcatcgagttcactgaacagacagccccgaagatttttggaggcgaaatcaagacacacattctgctattcctgcccaagagtgtgtctgactacgatggcaagtgtggcaacttcaagaaacgagctgaagg

SEQ ID NO: 582131 - DNA, 103 bp, Homo sapiens
ggacgcctctcgacgactggtaccacgactcctacgctctaccttccttcccgcccccacccgtccccgtgctcaccacggtaccttggatacgacggcacgc

SEQ ID NO: 582132 - DNA, 1545 bp, Homo sapiens
gatggaggactgaaggaaaagcagagcatgggaacccaggcaacaggagtagttcactccgcgagaggccgtccacgagacccccgacgcgcagccgatgagccccaggcaccgccgctgttgcttggagaggggcgggacctggagagaggctgctccgatgacccaccatgtcctctcctaccacgagttcccatggatagcccacctgcactggaatatggcccacgctcagacctggacgccccattcttcttcacccaagtgtaaaggaggagggtccggagaccgatggccccaggggaataccgggaaccatggatgtccacaggccacgtgactgagcgccacggctcagccatgccagcacagacatggggtcaatccgcagaatccccgaagagggaacccaagatgcagcaacgaagagcaaggaccggggcccaagaccccgaaaaactgctggggcccacagaagacctcatggacacgaaggatcatggcagcgacgcccaaacggacccaccacggaactacacaacaaaacaaacagaatgcatacaaacgctgaccacaaaaggccacggcaacgggagccattcacactaccagaggagcacagaaggaatggaccacagaaaggaacggagggagcacaagcgcaggcaccaaagaccatagacaccagaagagacgtgcccgggaaacccgaaggacaagaacagggaacaccacacaaaccaatagcgcgggaccgcaacagaggagccaagaacaaggaagccacggagacaggacgaccccacgctcgccacacggaaggacacacaggaaacagacacggagcacacacaagggcacgatcacaaccacagagacaagaaaagaacggaatacccggggacaaccacaaacacacgacaaccgggcaacaccacacacaacgacacacacacaaggcagatcaacaaaagacacaagagcgacagaccaaacataccacaagccagggagagcaccacaagacggaccacaaacacacacaaccaacaagcaacgacaggaggacccaatgcgcgacgatacgccccatgaaaggcgaaaacctgtacgaagcagaagatgcacaccacaaaggagacaacaccgagcgaaaaaagaccacaggaccagtcgacacaacataatcagaacggacggccatccacgcaaacaacacaccgacacaccaacaagcacgagcgagtggagaggacccaaacgacagagaacgcacacagaaaagcagcaacaacagccgacagacagcacgaagagcgaacgacgacacaggacacacgatagcagcagacaacaacacaaagacgcagaagaactaacgccaacaaagacacgagggccacaacacagagagaagacaccaacacaccaagaacagacagataagaggacgcaacaaacacgagacagatacacactgagagaagcacagacacgaagaaaccaagacgaagagaaacaaacacgaagcacacacagacagct

SEQ ID NO: 582133 - DNA, 94 bp, Homo sapiens
gccagcaccaaccagacatctatgtacctctgtgccagcagtggggggtcgagaaaagagcagtacttcgggccgggcaccaggctcacggtca

SEQ ID NO: 582134 - DNA, 150 bp, Homo sapiens
tgactgggcccatcattcccaagtgccggagtggtgtctagtgtgtggcggtagagtccatgcctttgaacttgatgtgttctattgatgacctgtgctctcaggggaaccagaaggcaaatcttgcagatgaaaccctttagtggcaga

SEQ ID NO: 582135 - DNA, 238 bp, Homo sapiens
  misc_feature (98)..(98): n is a, c, g, or t
atccttccaaacgcagaaggttcgagaacagcattccttcagctggagaaacacaaaatgtagaagtagcaggcagggcccgctgggagaattctccntagatttggagcccccttctaagcagaagcgagaaggcaacctcccttaaaaaaagacatgcccaaatttttcaccacacaacaaagacaacatcaccttttttttcaacaaccttccctacaacattcagaaccggaca

SEQ ID NO: 582136 - DNA, 242 bp, Homo sapiens
agttacagcgtcaggcagaggatgtgcacacagatgcacctgaggttcgtgaacgcctgtggggagcagatgcagcgggggggattcccaggcagtgcccactgcatcgtggctcgccttccaccacttccggagaagaagatagtacacagagcccagaggcttgtgtaatccccggaattagcgggattaagccccatttctaggtaaacaccaggccgcccgggtccccaggcaggcca

SEQ ID NO: 582137 - DNA, 314 bp, Homo sapiens
gacccgtagcagcgcaccatcatcagatatgtgacttcagtctacgttagaatacgtttataaggtatagctgcatgatagtgatctctgatgactggacaagtaatggaacctctggaggagtcatcattcagatgcatgaaaacatcatgattcattggaggaggcaaattcacatacaggattagaaagtgttcatccctcatgatgacttgggggtcagcctaccggaggagtaactgcgatgtggtagaatagctagcaactagagtagatcctgaagatgtgactgaattgctgcatctctgatcaac

SEQ ID NO: 582138 - DNA, 128 bp, Homo sapiens
  misc_feature (65)..(65): n is a, c, g, or t
  misc_feature (86)..(86): n is a, c, g, or t
gggagtaatattgtgaggaagcttttataccacaaggcacagcagtctgcaatggccgtgtcccncagacctttctacagaaggcntcctacatctggacatgactctgtcctcccccagtccttagt

SEQ ID NO: 582139 - DNA, 222 bp, Homo sapiens
gatgcatgcatctgtgcttgactagtttttgtattttttagtagagacggggttcaccatgttggccgggctggtctcgaactcctgacctcaagcaaaggatttgcccacctcgagctcccaaagtgctaggattacagtgtgtgagccacctcacccagccttttttttttttttttttggaaataaatttccgctcttttggcccagggtggagtgcat

SEQ ID NO: 582140 - DNA, 175 bp, Homo sapiens
  misc_feature (32)..(32): n is a, c, g, or t
  misc_feature (56)..(56): n is a, c, g, or t
aaataatgaaaataatgacctaactgaaaacnttaagatgccatttatgatagcantaacaaaacgtacttacttaggactaactttaacaccaaggcagtaaaagatctgtatgtacactgaaagctatgagacactgatgaaagacagacacagataagatgaatggctatcc

SEQ ID NO: 582141 - DNA, 106 bp, Homo sapiens
gccgattcctcctccttggtcgccgccgtccttggcctggcgtaaaaatggctacaaacttcctagcacatccagaagatctggttcgagaagttcaaatatgacg

SEQ ID NO: 582142 - DNA, 263 bp, Homo sapiens
cttgccaagagcatctccataaaaaattaaaaaattagccaggcattgtggtgcatgcctccagtcccagctactcagtgagtgccgaagtggaaggattgcttgagcccaggaggtcaaggccacagtgagctgtcatcatgacagtgcactccagcctgcgtgacagagcaagaccttctcttacaaaaaaaaaaatgtgcggaggaaagctccatttcccttttagggagctttggtaaccggggttatcctcctgcctt

SEQ ID NO: 582143 - DNA, 454 bp, Homo sapiens
ataaattggttttgcttccttgccatggattctggaaggacatagttcttctaaaatttcctgttaattggcatgtacgtctcatttaaagcaaattaagtaggacaagcaagtcagtaaaatagaagtattaaaaagaatcatcctttaaatcacagatcttattttgagattaaaaaaaatacttctagctttagccaggtgtgcatgttgctgccattttgcatttttgaatcatcttgtgtaattgtcgccatgaaagtgttactcagaattgtcatagattttctcttctttgtgcaaaaacatggaaaattgtcactgactttgttttgaggtttcccccattttgctgccttttgggacacttcgttaaatactggtcttggctgcattcttttttttttttcctgtggggttcaaaagaataaacattttcttacagataaaaaaa

SEQ ID NO: 582144 - DNA, 166 bp, Homo sapiens
gatccctgttgctaggctggagtacagtggctattcacaagtcaatcataatgcactgcagccttgaactcctgggctcatgcaatccttctgcctcagcctccctagtaactcggactacaggtacatgtcatatggctggccaccattatcctttttttttttt

SEQ ID NO: 582145 - DNA, 195 bp, Homo sapiens
agcattatatagttgatcaatgagacatagttaatgcatatttctgtttgtgtatcatgcacctacctcagaaaacaagtattgtacaggtattctctgacatagaacagcactaccctccatctctccccagaatgtgactattgaccgccagttctgggctgtttcacgattttttattctctgacatttaca

SEQ ID NO: 582146 - DNA, 218 bp, Homo sapiens
ggcgacggcaccatcatattgatgaagctgcagtcacccttagtggccacaccgtccctctccccgcggtcccctctctgtagtgactggccctccgtcttcaagagtgcactttccactctaccaggaagccctatgacatcctcaggctccccagacctgcagcttgcatggggcccctcccttcttccacacccaccctccgtgggcctctaatt

SEQ ID NO: 582147 - DNA, 380 bp, Homo sapiens
cccaaaaaattttttttttaaaaaaaaattaaaggttttaaccccccccccaatttcccccttccccccccaaaaggaaaaaaaccctttgttttccgggaataaaaacccccggcccctggggaggggggcaaatttaagacccttcttaaaaggcccggggtttttaaaaaaatgaaggttaccctttttttttccaaaaaaattttggggggtgggaaaaagggccaaagccttttcccaccccccttaacggggggtttttaaaaacaaggttttttaaaaacccaaggtttttaaaaaaaaaggggttgggggttttttttgggtttttttttttttaaaacacgggcccccggtaaaaggttttaaccatttta

SEQ ID NO: 582148 - DNA, 163 bp, Homo sapiens
tggccaggtctctacctggtgtattgggtcatatggcgtgggggcgaggggatctcttcggtttcttccattgggaggaatcactcatgcctccggctctcattttcagcttcttcatgtgggtccccacatagttctggggttcttctttaaacggaggtaa

SEQ ID NO: 582149 - DNA, 149 bp, Homo sapiens
atggtgtaactgagtgaggcaggagttcgaggaggttagttgtggcaataaaaatgattgaggatactatgtataacgagatcatggttcgtccatttaggtgtttgtgctcattgtctatacatttgggtgatcctcatagacgtcga

SEQ ID NO: 582150 - DNA, 718 bp, Homo sapiens
gagctcattgagaaggtgcgcagagcgcaccaggaaaccttccctgccctctggcagctgggcaaatacgctacgaacaatgagctcatgaacaacgtgtctctctggatcattgacctctgggacaagttcagtgtaatctctcgcgaccataggtgcatcaggttaagactgtggagttcgccaagacacggactgcgccgtgcttcaccaccgctcaccattcgccagaccagatgcaccgctcctcacaggctgtcctgcctggcacgatccatgatcctgcgcgcatcatggacggcggtacacgcccgtagctagggacattgcagtgatcctgtctcgcgagcgggctgaccgcatgaacgcggacccaggatgcactaagcgactgtgcttgcggcccccactcagccagaccatgagtctttgccgttcgcgcaacgcgagctcgctgacccgctggaggatgtgatgactgtcggacgacgcgggctggctggcacgccgtcgcatcatgccgctcgatcgtgcgagagcacgcgcctaggtacactggcagactacgcgcgcgacctggtgtggacaatgcgtgcagggacgccggtgcatggcaggcgccgtagtaggggtcttagcgtgcggaaaagcggatggccgcagccgccccccagagtgtacgcccaaggaatgcgtagatgaacattactgaccctgc

SEQ ID NO: 582151 - DNA, 763 bp, Homo sapiens
  misc_feature (16)..(16): n is a, c, g, or t
  misc_feature (42)..(42): n is a, c, g, or t
  misc_feature (145)..(145): n is a, c, g, or t
  misc_feature (224)..(224): n is a, c, g, or t
cttttctcacgacacngccaggcatctgcttgttgataatcnttgatattgaagaaagcagggagaccaagtgcccaggtgctttaagagtaatggctcaaaggtgctgtagcagcacaggtttcaattccctggacgtgctccnaagtgtggcatacacatacgtaggatctaagtgacattattttctgagcagcatgatttccagatatattgtcttggcnagcaacagcatgtccatagctccttgttccccacatgcgtctcagtttagggtgaggtctctaaagcaattcatccatgcatgacacaagtcagatcaggtcgatacagattaaatcaggtcacaatagataaacaactctggggatgaatgtcttttacaaagctcgagaaacacatccagaacacattgcctttttgtaaaagagccatgtccatcccagcctgccccacctagcccatactcactttggagaggagaattgaaagaatttgttattccaggctgggtgtggtggctcatacctgtaatcccagccctttgggaggccgaggtgggttgatcccttgaggccaggagtccaagaccagcctggccaacatggtgaaacgttgtctctactaaaaatacaaaaattagccgggcatggtggtgcgcgctgaggcaggagaattgcttgaacctgggaggtggaggttgcagtgagccgagattgcaccactgcactccagcctggatgacagaggaagactccatttc

SEQ ID NO: 582152 - DNA, 1973 bp, Homo sapiens
  misc_feature (780)..(780): n is a, c, g, or t
  misc_feature (1972)..(1973): n is a, c, g, or t
aacaccatagctgaagaacacttatcaaggtgtctctggtgcctggctgatatgagcttgcggcactagtcagtgtgtataacaaagctaccaacgtaccaagtcagagcgccgtcgcgtacagtgacgtgacgtgcactacctagatacaataccacaagcctaacatctcagtgagtaagcgcacatagagtgtgcggccggaatgctaacgaagggcacgaagagagcatcataagacacaagtgccctaggcataacagccgagtcatagataccacacaatccgtgctcatcttcagaaataaacttagcgaaataaaatactcttaagtcctgagtgtcagctcgtgctaggcacgcatgctgcccttgctatgctccgacgagactttaactttccgtgggaaggcgctttgatgagccaagcgtacgcaaagtcgcgtcattcaccacctcacagcgcacgggcccgtagacggtagaacgcagcaaacggtttgagggctctcggcaagagatcaccgggcgcactcaaaaccacgcaagcgtgaaggaatttctctcgttcatccaaaagatcacacaacatacacattaaaacataacaatcacaggggtgcagtgtgcacgttcttggccaattacaaagttgaatgtcaattccaaatacgaagcgcgcttcgaaaagcatgcttacacaacgtagagatttcctaacaagtaagtgaaaatatattgtagagatcccagaaaaggaggtgggaggacaacctaacnaatatatcaagagggcagaggttgaggttattattattatacaagaagatttatgtggagcaaatgggggggttcccgtgcgattaagttatttataaagcaacaccagatacgtctttaagcgagaaagtacgcggtcacgaaagaaaggaataagcagttataccaggaacggttgtggtgcgacacaccattattttagagggcgcggaaataatatgcggcagacaacccgtggtttaaattatcatacagcgggggggggttctctaatggcaaattcttatatatgtggggtagagacccacaaacaaagaaggcacctattacgcaaagagaagagaatcttttaaccagcgggtcccatatgaggggtgagacattcaaaacatatattctcttcaagcgtattcttgtcatttggaggtccccggaccaaaatgcttaaaggtaaattatacagcatttagtaccgagttccctgaaaaagaaattcacggttgtgtagacgtgaggccgaaagtagccggatcgtgatcaatgaaataacttgtgagacaatcgaggtgagcagctatgatagggagatatactgagaacaacaagatagagctgggaaactgttctaccaccaaaatcataaatgggcaacgtgagaggggagtactataaacacagaaaacacaagcagacagagagacaaaagaaaaaggggaggatgcgcggccaccaaaaaaaagcatcacactcagcgagggggcgcacacgtatacgcagaacacccagacacaatgtagtgacaaaaagaggggggcccccaaacggagagtgcaaaaacaagacgaacgaagcagaccggcaggaccgcagcacgacatacacaagaggcaagcagggaagaaacaggacagaacggtgacaacatcagaagaaaacacaacagacggggggaagaacaaagaagaacaacacagaagcaaatagagaaggaacagaaaacacagagaccaaggcatcagcacagaagaaataagaagcagacaagagagagaatagacaaccacgaaaagaacgacaagcagacgcaagacgacacaataacagacagaacaaacagaagaaagcaaaacaaacaacacgagagagagagagaaacgcaacagacaactcgagtatcgacgcataatcaaann

SEQ ID NO: 582153 - DNA, 517 bp, Homo sapiens
ggacgcgtgggtggagatctctggatccatgaccatccttttcctttgttcttctttattgctttttaacttgcgggaagttaacataaataaaaatgggagtggagcgtttgagaatatccgctcagggggccccattggttgaacgcggatatccgcctgattattgttatgttacccaatgttgggctccctatagtactggggactgccggctgatctatcatatgctagcccatcgtgcgctgatcagctcctacgcagccggtccgggacctgtgggaaacactgcgtacctcgtggcaactcttggggtacaccaggaacacccctgtatagctctccatgcggagaggtgagcaccacctacactgtgggaccgcagaacatacacccaacaaagcagaaatttctcacacgcggcctccacacaggataacaacactatacaagactgtgtgacagacagcagggtgataaatcaagtgtgtgattcaaacaacaagccaagcgccac

SEQ ID NO: 582154 - DNA, 273 bp, Homo sapiens
  misc_feature (148)..(148): n is a, c, g, or t
  misc_feature (202)..(203): n is a, c, g, or t
tgggccccgtcgggcgtgagaacttgagatgccgccctcggtcaggattcctggcgtgcagcctaggccactgtgttttccatcaacatccggggtttgtgacaagccgcagtttgagggtctaacccagtggttctcagtgtggatnacctgcctccaggggacactagtccatgtctggggacatctgtggttgtcacannactggtgggaacccccccctgcacctatgtgcggggggggttcccacgacgggggactgggcgaatgtct

SEQ ID NO: 582155 - DNA, 286 bp, Homo sapiens
cgggctgtacactgatacagaattctcatctgctagatgcagggaatttgtatacatatttacagggacaacaatgaaatacgaagatgcagattgagagcatcagaaagagcaaagacaagcttccatactatctaaagtagaatatcttcagccttatctagtcatactgtacaatagtcctgtccatagtcctgtttccttaccttgatgtctctgactattccatgaaagcaagacagatatcttttagaacctaggtagacatgtacagtagtcaatttct

SEQ ID NO: 582156 - DNA, 1111 bp, Homo sapiens
  misc_feature (826)..(826): n is a, c, g, or t
ggggaccaggcgcagtatgctgtatgaagcggacgataatcacgttggcaagcatgatacctattatgcggaagacagtgacgctgaaatccgtaggtaccagatcatatgcctccttattcgacccgagctgccttcagtcaggcggacctctcttaggcttcatagatacagatcttacaacgtaatacggtgagagcccatggattggtaatgaagtctcacttgactatgctatatatcctagtcactaaatcggaaggcctctcggcaaggtgatgtagtctatcgcgtaatgtaactcgtgtgtgcccgaaaactggcggtccttctctcggcgtaatccaatactaaggcatgtcttggattcattagcgttccctcatcctcacatagtccctgactcgcgatcatggatactaggtgtgacgcgcctgcgagcaggagtacacaggtgttgatatcagctcttaccaccgtcgctcgttgagcgatggggagacgtgacatgcgcacgacacgcttgggaggacctcctgctaggacgcctaattcaattactctcgtccgtgtacagcactgaggtcataagtgttctcgctgcgtaggtctggacggcggcgcagtgcaagtattcgagtctagcgaagcgaaatggactcaagttagtgaaagatatggcccctgaactatagaccgcgaaatatccagaagcagaccccgtgcgtttgctgtcgtgatgcctgtgtcgtaagttcacagcaagtccgtactctctcctgatcgtctccgcaagtgcctgagtctagcgttggcatcacatatntcgtactaaccagagacgttcacatcacgccaaccatatttaacaagtagtaaaaggccgtcattcacaccgagaggacttggccctggaaaaaaggacttgagcgcctctaatgagaatgatcctccagcaggaggactgttgtccgggggcgaaagagaaagagaaccgagggcccttcctttttcccaccccctttgttttgtgacacgtgggaagcgggggccccctgggcctaatgagagggccggctaacaaaaaagttctttccggggggaggctcgc

SEQ ID NO: 582157 - DNA, 320 bp, Homo sapiens
agcgcctcaccgcaccgcagcgctacgaggcggcatctatgcgtgaagctgccgacgcgcccggctccgacgaggcaccaaggggcccaccacaagaaatatggctccaacgtccaccgcatcaaaagtatgttcctgcagatgggcacgacgtcggggcctcgggcgagtcgcgcggcggcgcggacctgccgagcgccacgggcgtccgagcgcgcgtgcgcctgtcgtgcgcggccagcagcctgaacgagaacgtggaccacagcgcctgctgaagctgggcaccagcgtgtcggagcggtgagccgcttcgactc

SEQ ID NO: 582158 - DNA, 1197 bp, Homo sapiens
  misc_feature (674)..(674): n is a, c, g, or t
  misc_feature (685)..(685): n is a, c, g, or t
  misc_feature (1197)..(1197): n is a, c, g, or t
aaaaaaggaaagctgggttttctagttaaaaaccatttcctttgctcatttatcaaactctccaaacgctaggagggccaccttaacattccttccgttcccacgccaagtggggtgtgttttcttggagccacttccggttttattcaggggaaccccttgttcagttgtgccattcgcacatgtgttttattggggcccagccccctgtgtgtggccccaccgaagagagagagtggggatatctatgtgaaacacacatgtgtttacacaagcgccagaggagagccgggtgtgcccccctgtgtgtgttctcaaaagcccagagttctcttctctgtgccctctcaaccttacacttgtgtgggagagagtctgtgagagcgccagagagagagacaactctgccttgtgagagcacctgtgtgagagagagtgtggagagagtgtgtggcagagtgtgagagcaccaaaagcgtctcagagtgcgccacactgtgtgccgcctctcgcgagtgtgcctgtgggcgacacacacgagaacgtgtgtaaaatctcttcccatgtgtctcacaaaaaaatatatacacacatatattataatatatacacaacatatacacatgtgtacgcgcgtgtgtgaaactatactctatatctttacaggcgccatntataaacacangggaacgtgtgcaaacatatatatgtgctcctgttgtgcgcccctatatgtgtgaggagtctcaccttttttatacacacagatatatatacatatatacacaaatatctacaatatgtgccaacacaggtgtagaagtgtctcaaatctcaccccccagaaatgttggcagagaaaacttgtgggaggtgtgtctctccctgtgtgcccatgtgtgtgagtctcgggtctcagaaggccccaagtgagacacaccttgtgtcctctcaagcacaaattattcgtgacaagtgtgtacacacagaagacgcggtcgctcccgctgcccacaaggaggccgcgacaaacatgtgtaattcgcgcgtgtatatcacacatttatatgcgcgtgtgaggacaaagggcggatttgccacccaaaaatgtgaatgtgcgcgcgtttattaagcgcaaagagacatatatctatatttcacctatatcttttatccccgcgtttaaaagatgcacan

SEQ ID NO: 582159 - DNA, 151 bp, Homo sapiens
  misc_feature (31)..(31): n is a, c, g, or t
gcacgaggtgaaagggggctggtgtggcagnacggtgtgctgtggtggtggagggagtggggtgggaggataaggtgggtggggcagggcccagtgagccccaggctcgtggcaggagccagtgttaagtgcaaccatttgccaagcccta

SEQ ID NO: 582160 - DNA, 426 bp, Homo sapiens
aaaacccagtctacgtcgttagaggcgaaaagtattcggtgtctttgatcctgcaaactccaatgtggcttccaccctgacctatccacattcacatccccactgagacttcctggagactctgtgtagcgttaaccaggggaggttttccatcctcatctgctgcgctgtctctgcagtactggagatgctgattattcttgtggacactctctcttcctttgccttctttgccaccgcagtgctgatgttccttctgtgtccctggcaccttctcctcctctctctggccattaaatgctggagttgctgaaagcttggccctgtccttgtctcgcctagcacgttccttctctgggtgatcttacccacatctggagctttatgactcagacatttatgtttccaacctagattgcttctgag

SEQ ID NO: 582161 - DNA, 385 bp, Homo sapiens
  misc_feature (44)..(44): n is a, c, g, or t
  misc_feature (70)..(70): n is a, c, g, or t
  misc_feature (77)..(77): n is a, c, g, or t
gtggtggttccatgccctgtaatccctgcctactttggaggttncaggtgggaggattgccttgaggccnggagttncgagactagcctgagcaatatagtgagaccttgtgtcctacaaaaaattaaaaaaataaaattagcccaagtatggtgtgcctgtagtcccagctactccagaggctgagcctgggaggcagaggttgcagtgagccaagatcatgccactgtattacagcctgggtgaaacagcaaggctctgtctcacaaacaaacgtgctgagaggctgggtgtggtggctcctgcctataatccagcactttgggaggattgcttgagtctaggagtttgagaccagcctgggcaacatagagcttatctctac

SEQ ID NO: 582162 - DNA, 504 bp, Homo sapiens
gctctacagatccccgcgggccaatcacttggacgtgaatcgccacctaccgcaagcagctggagggtgatgagtgcaggctgaactggcgatggccttggacaagtcaacatctctgtggtgcagtccaccgctctccagtggtctatggccggtgccaggtggtgtcagcacgtggcttcaggcctgtggttgagttaagctagctactcactatcgcagttggtcttggctttttgattgtggcttcagttcctatgcatctggctagatgccctttggggtggcctcatgctctgttggaagcgagagttccatccatcaagtacaccttcatctcctcctccagcaggaagagctatgagcactagagtgcgtctgctagctctcggtcccacagtcctcatgcccctctctggctgcacagccctctcctcaggttgcctgttctctcctggcctccattctcccctgctgtcccagcgtagagctggggattaatgg

SEQ ID NO: 582163 - DNA, 127 bp, Homo sapiens
caattggtatcagagctggcctcaatgatcaggtgatttttgaatgaacgattctcgtgtcttgcaacatattgtcacagttggatgcaattttggtgagtctctctctatgatctctcttaatttc

SEQ ID NO: 582164 - DNA, 174 bp, Homo sapiens
tacccagtctctgtacacccttcaccatcgggatttttatgggttaatttgcctgaatttttaactcttagagctctggtacaaaaagtctgttgtgttttgttttgttttgtttttgtttttgtttttgagatggagtctcgctctgtcgccctggcacattcctttatcgtc

SEQ ID NO: 582165 - DNA, 533 bp, Homo sapiens
agatcgtggattggccctcagcatactgatgctttctgactgagctcctctataccctgaatgcaagagaccttcatagttaggcaggaatatcatcgcccctattcagcctgaagaagttacagaagatggatctttgtccctctgcaacccttaggattaaaggttctcttataaaagaaaggggggaaatgtcagaggcggcaactccatcttaaataggaactgggtgaaatgaggctgaaacctactgtgctacattcccagacagttaaggcattctgagtcacaggatgagataggtcagcacaaaatacatgtcataaagaccttgccgataaaccaggttgcagtaaaggagctggccaaaatccagcaaaaccaaaatggcgacgagagtgacctctggtcttcctctctgctacactcccaccagtgccatgagagtttacaaatgccatggcaataccagggagttaccctatatgttctaaaacggagagacatgaattatccaccccttgtgaagtata

SEQ ID NO: 582166 - DNA, 606 bp, Homo sapiens
  misc_feature (250)..(250): n is a, c, g, or t
ctatgaaggaaaagttggatctcctctctaagtcacaggagattgccacatctgcccatgaataactgtatatctgaagggctctcaacagattcaaatttgtctgtcatgtatacgtgcaaatcttcaagctgttgggacttgtacacgacacaaatcagttgtgtggatgggtcgtatcgaactcagaagggtataggtttgagacagcagagttcctactttcgccttggcatcattaagactctcntgccacgtaatgcactggctgtaactccgtgacagtgttattctgaatggctgtcttctacggttccgtttggataagatttgtgttctctgataatcagaggtgtaattcaccatagcatgacagatgcacagctccatatgctttaatagagtgtcagtgtctgcagagcgttctctacacagtgaatcagtacattgtgtcgagctttgcaatgtattcatagtgtgagtcagacaaggcaagtggcatgtcctggcagaaatgggcacatctgagatctgaatcattgggtagatgtgcccactgctcatgtcagctcccagttcaggggtatgcgtgggcttgtatacagg

SEQ ID NO: 582167 - DNA, 165 bp, Homo sapiens
  misc_feature (32)..(32): n is a, c, g, or t
  misc_feature (127)..(127): n is a, c, g, or t
gaaacattatgtatgaaatgatttttgtgtgntctcccatgttttcttctcaacaataagaaaatgttttactgacagcaagaggacgaggtcaagaacagaaaggatttggacttgttttgctccntgaaatttttgaggacattttaattctaatatttctga

SEQ ID NO: 582168 - DNA, 314 bp, Homo sapiens
  misc_feature (147)..(147): n is a, c, g, or t
  misc_feature (198)..(198): n is a, c, g, or t
  misc_feature (229)..(229): n is a, c, g, or t
  misc_feature (247)..(247): n is a, c, g, or t
  misc_feature (274)..(274): n is a, c, g, or t
atgatctggtttatgcttcagaagaagcatagtagcttctacagaaaataaatgatagaaggcaaaagagaaacatggcgagtattccactccagtgtctagtcaagagattacaagggccctggcatgaggacaacagtagaaatngttaaaagtgtactggattgcaaaatattacttttgggccagggcgccggnggttacacgcctattaatacccagcactttntggaggtgcagggagttncgagtaccagtcctgggccaacacgcntggaaatcctgttgaaaaatataaaaattagccgggccgt

SEQ ID NO: 582169 - DNA, 747 bp, Homo sapiens
cgatactatcggtatctcagacgtgaatttggtgtatttattacttcagcatgctggtaccattttggtgcctgcttggtttcttgatcggttcttatagtccagaacgatgttacctatgctttccttggctgaaggttacaggatccaaggcatgacattggagtttgataggagtacgctgtagcctgtgctgatgaagcgctttcctgtcaatttcccaagctaactcagtagcaaattctggctggtcagtgtggtccacaggatcagtagccaactgttctccatcaaactttgcttccactacaagcatatgctttggacgtttggggaaatgccgaccttctaggatggacacgacgatgagcaattggtcggatttggagaccatggttgcggtgagcggtccgggggcgaaggcggctggggggaagtgaggtccagttgagtcgcgggtaatccgggacccccggcgggacccccactgcccgcccccggtccctgatgcccggaccccgctccgcagccaggtcccaccgccgtctgctgcagcgcgcccggctcctctgcctcgggccgccagcccagatcctaactgtgccccgactcaaggaaaaagccacgctgcagccctgccagtctgcaagcagagacaagcccgccacccgaggaccttttgccgcctgcgtagccgcttttcaaacgcccgggcggccgcagcggccgcacgccgctcaccccgct

SEQ ID NO: 582170 - DNA, 234 bp, Homo sapiens
agaaggacatgtgtgtaggctcctgccgggatgggaggcagaggactgactagggacatccttgttgtaagagactgtgcaggcttccacttcctctctggctagtagctggaagacctctctcatgctgtgattgtggtagtcccagggggaatgggtggtatgagtgtttaggagtgggcagagtatgggagagcagtggtgtggcaggtcctgcgctgggatcccatggga

SEQ ID NO: 582171 - DNA, 856 bp, Homo sapiens
cgatactatcggtatctcagacgtgaatttggtgtatttattacttcagcatgctggtaccattttggtgcctgcttggtttcttgatcggttcttatagtccagaacgatgttacctatgctttccttggctgaaggttacaggatccaaggcatgacattggagtttgataggagtacgctgtagcctgtgctgatgaagcgctttcctgtcaatttcccaagctaactcagtagcaaattctggctggtcagtgtggtccacaggatcagtagccaactgttctccatcaaactttgcttccactacaagcatatgctttggacgtttggggaaatgccgaccttttaaggaatgtataatacaccctcttaagaactgtagtcccctgagtcctccagcaagacgtgtaaagggaattgcctccggaacacttctggaatcgcaggaagccttctaggatggacacgacgatgagcaattggtcggatttggagaccatggttgcggtgagcggtccgggggcgaaggcggctggggggaagtgaggtccagttgagtcgcgggtaatccgggacccccggcgggacccccactgcccgcccccggtccctgatgcccggaccccgctccgcagccaggtcccaccgccgtctgctgcagcgcgcccggctcctctgcctcgggccgccagcccagatcctaactgtgccccgactcaaggaaaaagccacgctgcagccctgccagtctgcaagcagagacaagcccgccacccgaggaccttttgccgcctgcgtagccgcttttcaaacgcccgggcggccgcagcggccgcacgccgctcaccccgct

SEQ ID NO: 582172 - DNA, 701 bp, Homo sapiens
  misc_feature (656)..(656): n is a, c, g, or t
ttttaggggccagggtgataaaacctcctaaaagttgacccgagcaatgagttttaaccaacctctgaagaagttcaggcctagtttttcaacccaaacatccaagtttttgaagaaggacagggcatccaaagcagaattgggcacatcgggtagtgccagcatgtgcagggtcccaatgtcaagcccgccattctagacaccagtttctgcgctctttcgggaccctagtagggaaccttgcggctcttcatcactcgtagagagaccctcgtcctgtatacccatggtgtggcagtacaggagccccacccgtgagcattttcacacatgtttgctccaagccggttcgaggatggtttacaaagcaatactttttgctccctaggattttcacgcactctcatgtgtccagagataaggctcgaatatatggtttccacagtacttcatagtgtataggccaagatacagcacagacttgctgtgaagggtctggtggtctgacacataggatcagccggtaacgggacctatggaagaagctcggatcgtagtcaccaatatgggtgtgggctttcatacattgcaaatccctgcatgaattgcttgagttcatcgtctcctctaaaacctgttctatgttccatcctttngatcatcatcagcatccgcagtatatgcaccataaagtacgttaa

SEQ ID NO: 582173 - DNA, 222 bp, Homo sapiens
  misc_feature (179)..(179): n is a, c, g, or t
  misc_feature (186)..(186): n is a, c, g, or t
atcggacaggctgctcacgtgcttgaatccgggaggtagaggccgcggcgagcaagattaagccactgcactccagtctgggtgacagagtgagaatctgtctaaaacaaaccaacaaacaaaaagagaaatatactgataaaactttccgaatttcacatagaactattatgcaatangggtccnccttttttttttttttttttttggggaccaaaattc

SEQ ID NO: 582174 - DNA, 581 bp, Homo sapiens
  misc_feature (75)..(75): n is a, c, g, or t
  misc_feature (141)..(141): n is a, c, g, or t
  misc_feature (160)..(160): n is a, c, g, or t
  misc_feature (214)..(214): n is a, c, g, or t
  misc_feature (222)..(222): n is a, c, g, or t
  misc_feature (232)..(232): n is a, c, g, or t
  misc_feature (242)..(242): n is a, c, g, or t
  misc_feature (244)..(244): n is a, c, g, or t
  misc_feature (258)..(258): n is a, c, g, or t
  misc_feature (262)..(262): n is a, c, g, or t
  misc_feature (265)..(265): n is a, c, g, or t
  misc_feature (306)..(306): n is a, c, g, or t
  misc_feature (310)..(310): n is a, c, g, or t
  misc_feature (323)..(323): n is a, c, g, or t
  misc_feature (332)..(332): n is a, c, g, or t
  misc_feature (469)..(469): n is a, c, g, or t
  misc_feature (539)..(539): n is a, c, g, or t
  misc_feature (566)..(566): n is a, c, g, or t
  misc_feature (577)..(577): n is a, c, g, or t
tgcttctgcttcttcccgcaccagagtgcggtgaagtatgggaccgggggggggaaaggaagggaaaccaaacanctaaaaacaacaacaaaaaacaaaacacaaaacagaacacactcacacacacacgaaataaaaccnggcacgggaaatgaattangactggaacccagtttcttttttttttccttttttaaaaaaatgggggcatggngggggggnaataaggtcnacctggcaangnataaaacggcaaangcanggnttccattggataagattaaatatatataagaccggtccacnggcnggggggggggttngggggggcnggaggggggaggtatttgtgctaaaccaacagaaaaaagggctggggggagagggggacccaaataaaccatcaacgggctgttctgtacagtgagggcttattaagaaaaagccgactgtttataaaagaaacggnggttggtttgtcttcggagcaggtggggacagaaggagtgtcttcgttgcagtggtcacatgtggggggnggcgggggtggggtggggagggcagtnggactggcggnggcg

SEQ ID NO: 582175 - DNA, 419 bp, Homo sapiens
atagaagcatcaagtaaaggacgtgatacatgtaactagccagacttggggtccccactatagaagtcagtcctggataatggacagtccaggcggcctgggaggacagggtaggagcgccagagtcctggaagcatgaggttcctagacctactggcatctcagagggactgagtttgcaggcgcaagtagaatgtagactcatcagcacttctaacaacacagctctaagcaagctggactgtgcccatctcttccacgggctccgcacatgaccacatcgggccttactgctcctcgggggcccacatgcttggtaaactctgttggaagcgcgtacctctggtgctcacttggttctctctttctcatccgataaggaacagctgaaatgccaactctttgagaccttcctctcc

SEQ ID NO: 582176 - DNA, 301 bp, Homo sapiens
  misc_feature (63)..(63): n is a, c, g, or t
cctggggcccccccccccccttcccccataggattttcccgtggggagggcctatattccccntaggggccctccccccccgggaattttgaagggagggtcccgggttccggttttttttacccggtgggttttccctcccctttttcccccccgggggggtttcgggagttgggcccttttttgtcccgttttcccccccccttatgggggggtaattggaccttttgttccccctgggggggggggggatggggccccttttgggttccgggggggatttccggggggccccccccca

SEQ ID NO: 582177 - DNA, 896 bp, Homo sapiens
ccgagcgaggggcatctctcggcgaaactggcacaagcgccgcacaaccgggggcgagagaaagccctacacaagaagcggaagtatgagatggggcgcccagagtgcgaacaccaagatggcccccgacggatccatcacagtccgtgtgcggggaggtaacgaagaaataccgtgccctgaggttggacgtggggaagtttctcgcgtggggctcagagtgcatgtacgtcgtaagaacaaggtatcatcgagtgttgtctagcaatgcatctagataatcgagctggttcgtaccgaagacgcctggtgaaggaattgcactcgtgctcgatctgacaggctacactcgtacgcggacgagtggtacgagtcctcactatgctgctgtcccatgggctcgcaagaagggagccaagctgactcctgaggaagaagagattttagaacataataacgatctacagagaaattcagaagaaatatgatgagaaggaaaaagaatgtcataatcagcagtgtcctggaggagcagttccagcagggacaagctgctatgcgtgccatcgcattcaagggccggggacagggtggccgagcaggatggctatgtgctgagagggcaaagagatggagttctaatcgttaggaaaatcaagggcccggcaaaggccaacataaagtcctagctgtggtcgttcaaccgaggtgagtaaaggtgtcaaataggtgaaggtgcccgaatagagacgaagggacaccacaaaaggcaagaacacaaaggagcgggaaggctctcgcaagtgatagcacagggggggcacgcaaccagaacgaggaaacccgcgaatgttggggaaagaagaggggcgcccataggacgacttcgttcaaca

SEQ ID NO: 582178 - DNA, 1186 bp, Homo sapiens
gccgattgttaatttcagtgatcgtggacctgtcgctgtcgcttgtacaatcgatattgactggccgtcgtttacatctgttgccatcccggccggccgaggccattgcacatctgcgaagatggcaaagttcatgacacccgtgatccaggacaacccctacaggctggaggtccctgtagcggttcccgagacagtttcgggatatgccctaccagccgtatcagcaaaggagatcggctacggaaaggttagcagactggacagcgagcccacataaccacagactaacacggtacacacaagtcaagctcactcctcctcagccttcggctggctgcgcaacgctccaatatgctttactttccaatgcacgcggagagactcgaaaacgctacgccctacccgagccctgagctaggcacataccagcccgccgccaacaaccaccacaacccaccggcccccttacccaacgccgcgcacacctccgccacacctgcaccacctctatggccacccacgccaccgcgaaccccccttccccgaccacgcaacgaaaccacaacaagcaactccagctcacgggaaaacccactgtgtctcggcaacggtagtccaaagcccactagccgacggaagaatcgcctagacgccgtaataacgcacgcctcgcccccaaaacaaccactgcaccacaaacgcaacgcaagtcaacccacaaccatccccaactttacccgcacccttggccccacccaaccaccacaaaggctaccccccaacgcaaaccacccaaaacctccacggcgacgaggcttcaagcacgccacggtagaaaccctagcagcgcaactcccaacgaccaaaaacgtccaaacaagccacacagccaccccccccgcgaacgtcaaccctaccgctcatccacgccatccgacagcgcgcatcccagcccaggccttgaacactcggcgccaaaacagctggaacacacgcccaagcagtaaaaaacatggcggcgcatatcttacctccattctaaagactttggcacacttctaaaccaacattccccacccatcacccattagctctcaaaagcctattattcaaggaaaagtcaccccatcctccgtgtaaccaacattgtgcacgcttgcgttatcgactggtgtagtgccct

SEQ ID NO: 582179 - DNA, 815 bp, Homo sapiens
  misc_feature (558)..(558): n is a, c, g, or t
tgcactaaggtgatgcctcttatattataagaggatggtgtttttgtagaggagggggtattatactaccacaccccacgtcgagccttagtgataagccaaagtttaatattccctccatattgcacaccccgcacgtaggtaaattatgtggttgttaaatgtatcacaacatcaggcggctagcacataggcgaggagaaaatttgttcgtgtctcccccccccccccgcgcgtgttaataacagataagtttcatggagagaaggattttttactatttcatccccccccctgctgggcaataaatttatctgtgtgtccgctgctggacggaaaaacccgcacgacgactttgccctgagcgtttttaatgtgggtggcgccccccccgcacacagacgacacggtacgcacacatatgtgatcacaccctcacataaggaagatgcccccgcgtttcacacgcggcgcacacgcgatactcacgcgccgatcctcgcccacatagataagtgcgtatagaatataaatgggagaacacacactctgtgaganctaatggtgcgagagaaaatagggcacgcaaataagtgggaccctgcagcgagaagacactcgagagaggggcgaggacacacactctctctttttagagaaatggggcgcaccactggatgatgtccagactcgtacaaactggtggtttgcacacaacgaaccctcgcaagcgttggtacaaaaaacgcgaaagaaattcattgggcagccacacaaaaaaatgagaggggagaacgccccaacagataggacga

SEQ ID NO: 582180 - DNA, 291 bp, Homo sapiens
ccctcgccctacctggcgtgctttgtgacagacagatcctggagtgcacggagtcacactggtctatcagtcccgacgggggctttggtcacatattcttcttgttattcacaggcccctctgactacagatactaccctcacagtccttccagactccacaacaacccagcttcctcttccaggacccgagggtgtcctggtccctggtctacctccccaccctcccgagctgctggaactacgggttctcctgctcctcggacgtgtgcttgcctttgtggctgcgtcc

SEQ ID NO: 582181 - DNA, 251 bp, Homo sapiens
ggtctacaagacgctacttcccctatcatagaagagcttatcacctttcatgatcacggcctcataatcattttccctatctgcttcctagctccgtattccctcttcctacacttaccaccgaaacttaccttattcttaccacttaaaccgttcaggaattggaaaccgcttgaacattcctgcccgccatatcctaggcctcatcgccctccaatccgtacgcatccttatacataacagacgaggtc

SEQ ID NO: 582182 - DNA, 388 bp, Homo sapiens
  misc_feature (34)..(34): n is a, c, g, or t
  misc_feature (51)..(52): n is a, c, g, or t
  misc_feature (62)..(62): n is a, c, g, or t
  misc_feature (104)..(104): n is a, c, g, or t
  misc_feature (199)..(200): n is a, c, g, or t
cagctttatagtttttaaaatattttagatattnttaactatgaacttctnnacatcactgntgccagattaccgacactgtcacttgaccaatactgaccctntttacctcgcccacgcggacacacgcctcctgtagtcgctttgcctattgatgttcctttgggtttgtgaggttttgtaaactggggtagggccnnccatgttttggtccactttacctcccggggaggaataaggggggggacccttcagcccctacaccagaattttttaaattgacagtgccagaatgggggggggtttttacattgatcttttgctaatgcaattagcattatgttttgcatgtatggcttaataaatccttgaatcataaaaaaaaaaa

SEQ ID NO: 582183 - DNA, 153 bp, Homo sapiens
ctgagacctgacgacctagagcgaaggctgattgagctccgctttagattgccagagacgctgctgcactcttaattcagtccgattggatccagtccggagcaagactccttgctttggttgagccaggcaggggccagtcagcactcggga

SEQ ID NO: 582184 - DNA, 327 bp, Homo sapiens
atacttagattttggtacccccaagttacaacaatctcaatgtattttggcccttcaatttggaggagggcaaaagttggaagtaagaagtattattttaagtactttcagtgctcaaaaaatgcaatcactgtgttgtatataatagttcataggttgatcactcataataattgactctaaggcttttattaagaaaacagcagaaagattaaatcttgaattaagtctggggggaaatggccactgcagatggagttttagagtagtaatgaaattctacctagaatgcaaaattgggtatatgaattacatagcatgttgttg

SEQ ID NO: 582185 - DNA, 206 bp, Homo sapiens
agagatagggtctcgctatattgcccaggctgttttcaaactcctgggctcaagtgaccctcctactttggcctcgcaaagtgctaggtttacaggcatgagccatcatgccagaccacaaagacattttctattaggccagtggatgttcggatcatctttaaacaacatcgaaagttgaattgctgacagtaatatggggatag

SEQ ID NO: 582186 - DNA, 234 bp, Homo sapiens
catgggcaggacagtccatccgcggaccaatgggagtgttagggtgccgccccatagcccccccgcctccgagccgagcagggggcggggtcgcgccagccgctccgcccatgctccgtaggcggcgctgttgcttgcaggggctgcggcggggtcgccccgagctgggagctcagcgcccggtctcccagcccgcgggcggggcacatgggctggctgaggattccgcggccg

SEQ ID NO: 582187 - DNA, 1559 bp, Homo sapiens
acatcaccaggagggcgaagctggacacggtgaggggggccccgggacattgcgcagcaaggaggctgcaggggctcggcctgcggtgcgccggtcccacgatggcacatgctggcccagtggatcttggtgctgtgagatgtgtgcccacatgtggacttgtgtgacagctgtatgcccatcacctgctcatgcccctgtgggcttggcttgtgcagaccagtacatgcatccagtggtgcagtcaatggtgcattggtgtgctgcagaacccagcactagtgctgagtgctgtggcatggtggctggagttgaattgagctactcagtgagggcaggattggttgcatgtgcatgggggttgagtggagctgcagcgtgagcgggctgaagctgtggcggtgcaacttgtgcacctaccaaagagccccggtgtgcccaagggcaggggcctcggcgtggccggctgcacgtgcagccggggcatcaggttgcctacaaacggtatctggggcttgggagacacggaggtgccaatggtgtctcccacgccatgggaggatgggaccagtaggccacaacccaagccgttgcgcggacacgcgcccaacgaaccggccaaggtggtccctgggtgagcaagttgacccacagcaagtgaccattgaacatgggtaccagggatgggtggaccgggagagcatgaggacacaagacagggaagaggcaggctggttccctagggcccatatcccttttgaaagcaacccgtatatagtgactttgggattggagtgtgacctggcagaggcgacacgcacaaggcaggggtgatcgatggtatagtcatatatacacagtatacaccttcacacgcggggcctgtgttcccggggcaacaaccgaccctttaattcgggcggcattgggcgcccttacctttggaggagactcccccccaaaggacaccaccccacgcagcagccatttgcgacccgggacacaattgggtctgcttaccaccccacaaggtcttccaaagggcccgtgggggcgcacttttgtgaccattcacagtgcagacaacaagataacagcacatctgcactacaaggctctgcgggccagaccttggacagttacttgcgcttggcacccatttacaacaacgaccgcacacactggcaacctatcacccgtagtgacctaccagggggaacctacaggggagccgctcccgacacgaggttgtcaacagcgcgacagaaggggaacaaccgaggaaaccgctacacttcacgagccgcgaaccacttacaacgagaaacccgcgagttcggaacaccagcaagcgggtcccacgggataagaacacccaacgcagacggaaacgcgtggcagcaaccacgacacatacaacggtgccccaccacccaggtcagcgccggcatcgggatgacacacagcacgagcagcgcagatcgatcaacgaagcaaagacaagagtagacactaacaaagccaagtgagcagacaacccaccagccacaccacgtctt

SEQ ID NO: 582188 - DNA, 406 bp, Homo sapiens
gaggatgcaccacgactgcaatgtgtgtctaaggcagagcccagcttatccgtgtgcacccatgtgccaataagacggtgggcaaagctacaaatggcaagagaaaaatgggactattaatgcgtgtggaaaaggccttaatagttaagtgacagctaaggatgtcatgtcttgggttagaattttcatttttagcaccgttaatgtattcacttaaatctatgttagcaccttgtctccaggcagaacaacaaaccatccaaacattttaaacattgggggaaacacgaaggggagggttaaagagagaatccggtaccgtggaaggagtggatttagatcacaagatccttgtcgatatccttctgcttgatgccgaagcagccggcccactcatccagggcga

SEQ ID NO: 582189 - DNA, 118 bp, Homo sapiens
ccaacgctgctcacaatagcaaagacatggaatcaacctaaatgtccatcaatgacagatcagactagaaagagtgtggtacatgccagagatcaacatataggaaagaaaaggtggt

SEQ ID NO: 582190 - DNA, 101 bp, Homo sapiens
ggcacgagatgccaccctctccgtaccatcagttggtagagatactgatgagacctattgcattgacaacgagggcctcttatgatatctgcctcccgcac

SEQ ID NO: 582191 - DNA, 897 bp, Homo sapiens
agcgtctgttacggcccggaattatgggatctccgcacaacaggtcggtgcatacgccatttgtgacgagtcttcgtcggggactggtctccactgggcctgaaggtcaggatcatggggcccaacatatacccctgggaacgaagcgaggagctctacctgaagcctaagtccagagaacaatcttgatgatgggccgcatacggtggtagacccatacgagagatgttgccgttgtgggaaacattgtgggcctcgatggcgcgtgtcgaccagcttcctggttgaagacgggcaccatcaccaccttcgagcacgacgcacaacatgcgggtgatgaagttcagcgtcagccctgttgtcagagatggacgtggaggccaaagaacaccggctgacctgacccaagctggtggaggggctgaagccggcatggccaacgctccgagcccatggctgcagatgcatcatcgaggagctcggcgacgacgcacactcatacgcagtggcgcccgtccgaagacatgcaacctgcgacgattctgccctgacacgggacctctggcaccgacggcaccaccgcactgccactcacaccaatccaacgacaatcttgacacccggctcggatcttccgcttcacccgccagcagaatcgggctccagtgcagacgatgatcagcaaccacgcttgcattcctggcccgatcttacccaaagttcccgccaaccaacacccaggacgtagcgagacacgtgcaccttgtattgcccaattgcaacaaacgggcacgacccggccccccgtctcccgctctgcaacagatgccattgggacccgcgtccggcgcaaccagtttccgacgttacacacgtcgcacttcaagcgagctgtgt

SEQ ID NO: 582192 - DNA, 200 bp, Homo sapiens
gctcaacagtgacagaggtaccttaggatccaagcacaattctgaacctgaaaacagaatagtctgtttatgcataaatcctaaaatattttcatttcacaccacttgtacccatgaggcaaaaaatttaccatagcagcacaaataggttaagtaccaggcaactgtgccacataatcaaagctttcaggccaaattca

SEQ ID NO: 582193 - DNA, 398 bp, Homo sapiens
tgagacagtcttgtgctgtcacccaggctggcatgcagtggcatgattcttggcttattgcaatctctgcctcccaggttcaagagattcccgtgcctcagcctcccgagtagctgggattacaagcagcctgtcaccacaccggataattttggtatttttagtagagacgaggtttcaccatgttggccagactggtctcgaactcctgaactcgggtgatccacccactttggcctcccaaagtgctgggattataggcatgagccactacacccagcctagttttcctttttcaaaaatgattgtgctataaggaatcacattaaaattattaaggaaggattcatgttttaaagttttctttcaggcatttttaagcacccttcaaaccttaa

SEQ ID NO: 582194 - DNA, 158 bp, Homo sapiens
aactttattcaagcatgacttttaccttctagaaatgaaaaaaatgacaatgaaagtattttcactaagtctgaaagaagcaaaaccttctcacccaaatcttaaaagcactctgatggtttggatgctctgtgatctgttgccctctagaagctaac

SEQ ID NO: 582195 - DNA, 99 bp, Homo sapiens
tcaagcttctaacgatgtacggggacatgttttgaagcagcaggtccaggtcactttgtatatagaattttgctgtattcaataaatctgtttggagga

SEQ ID NO: 582196 - DNA, 899 bp, Homo sapiens
  misc_feature (87)..(87): n is a, c, g, or t
  misc_feature (899)..(899): n is a, c, g, or t
ccggagcgtgggctagtggggcaaggggtcaccgagcgcggccgggcggaaaggggccatggccagtgcaggacaaaagttcccttnttgtgggcaccccggtgtgaccaatctttgagcaaccggttccccaaaggggtggcgacaggcaaaaagccctcacaaaaccggggggtttgggcacaaggcggttagtgagcacaccccttttgggggccgacgcaacccgcggggccaagggggccagaatttccggaggcgaaaagctggccccatcttgggccatatgggcccagcaccccccacaaaaaggcgggcattgtggtgggcagcagagcggtagagaacggtcccccagtttatatacccgctccgacacgacgccggccggggaggggggcgcgctgattaaaactgtttttacgcggtgtttattaaaccgtctttgtggtggccaaacagcagccgggctgccgtggggcccccccttttttgcgcccgcgtttcggggctcggaccgacatcaacgacacgcccgctttttaacaaacaagcgcgggccaaaacagggagaaacccccccggagggggggcaaacgggggacaaaacgccgcctcatgcaaaaccgctaaagggggcggaggccccccccagggggggcccacgttttaaaaaaccggcaccccccttttaggtcgtggggacgagctacatcgtcgtcggcgcacacacactgtacgagcggcaactgacccgcaggcggaccacggccgcgcacacaaccgcgggcgaggatattccccgccaccaccagatgattccttgtacggcgccggcgagccacaacgtcactgagacaccacgactgaggcgcgtcccaggcggcccacccaccctn

SEQ ID NO: 582197 - DNA, 190 bp, Homo sapiens
gagaaggggtcagtccgtaaaagggcagaaaagaattccaagtgtgggaagagctataaaaggaagaaacaggcctggcgcggtggctcacgcctgtaatcccagcacttttggaagctgaggtgggaggatcacttgaacctagaagtttgagaccagcctgggcaacatagtgagaccccgtctctac

SEQ ID NO: 582198 - DNA, 183 bp, Homo sapiens
agcagatgatcgagctcggtaccttactcttagctgtaatgtttaaatatttttataaggagatgtactcacatgttacctatgtaattaactacaaccggaaaaaaaaaaccgaaaaggctaaagaaataaattgctattcttcccctttccaggctccttgcagattaccaagcaaccccg

SEQ ID NO: 582199 - DNA, 112 bp, Homo sapiens
ggcagctgcagtggtgccttctggagaagagcagagatacagatgccatgtgcagcacgaggggctgccggagcccctcaccctgagatggggtggaaaaggagggagctac

SEQ ID NO: 582200 - DNA, 1121 bp, Homo sapiens
ggaatcaccatgggcggctggtgaccctgtacacagtatcctgaaaactggagggccttcaaggctctcatcgctgctcagtacagcggggctcagtgtccgcgtgctctccgtaccaacccacttccatttggggccaataaccaactcgcagcgccactgaatttctccggcaaagtttcctgtccgggcaaggtcccagacatatgagggtgatgatggattctgtgtgtttgagagcaaacggccattgacctagctagtgtgagtcaatgaggagtcatgcggggaaggtactccacaggcagcacgacccaggatggatgcagctggggtgaagcgtttgctcgagttacccaatagtaagtgtacccacaggcaagtatctggatgttccccagcttgggcatcatgcaccacaagcaaacaggccactgagaactgcaacaggacggaacgtgaccggcgaacttctggaggctgcctggactgcttaccttgaaagaccgagagactaattcgtggtgcgggcgacacgaggtgaccactctgcgctgcccctcagcaggttgctctgccacccctgtgcgagtaggctacgtcatgaaagagcaggggtatcctaaggagccctgtctattacgcgcacaaggggctattactctccgcaatgatcaagacaggctagaggtctcactaccaacctagacaatttgacactcaacggcccgccaagtataccgagggcatggaccttctgagcgaggaacacgctggacgacagcctgctggctgcacagacaacggcactgcggccccccaccccatactggcaacacgcccggagagcagcacagcatatccaggcgacgaccacggacaacccgcaacagcccttacacacaacaccagcgaaccgaaccagcacacaccggggcaacacagacagacaacagcgatgatcacaccacaggcgacatacacgacacgcacaacggccacgaacacgaacgaccccacaggcccaggaaccccagggacacggggacacgtaaggacaaacaaccacagggccagggcaaggacaccctgaccaactacacctgcacaggcacgcgcca

SEQ ID NO: 582201 - DNA, 258 bp, Homo sapiens
cggaaagcttttgcctaaaatgtattctcgaactcacgtatcataagcgtgtacggtccgcaggataggcaactactcatcttggtacgtttcgcaaagcgtatgtagacatcaaccaagtatgacgtaagttgctgcaggtgacttccaaacgtctcgagcgcctcagacacatgtcctcatcctttaagatgtcactaaaatgtcattcttcacctagtcccatctctgtttctgtttctgtgctcctgacctgtg

SEQ ID NO: 582202 - DNA, 1130 bp, Homo sapiens
cacgattggggtcacagccttctaccaagatgatggccaggtggagatcctcaagagtgcctgccatcaatgtcaaatgactccgtcaagcaagagactaagtctcgacaaccatcgtataggtctgcctggtgagtccctcatagtatggcatctaacgccgggccaccggatgtgatgatttggcggcaaggtagcggtggtatcaagctatggtgatgtgggcgcgggctgtgcccgagggtctgcggggtaactggagcccgcgtcatcatcaccgagattgaccccatcaacgcactgcaggctgccatggagggctatgaggtgaccaccatggatgaggcctgtcaggagggcaacatctttgtcaccaccacaggctgtattgacatcatccttggccggcactttgagcagatgaaggatgatgccatgtgtgtaacatggacactttgacgtggagatcgatgtcaagtggctcaacgagaacgccgtggagaaggtgaacatcaagccgcagtggaccggtatcggttgaagaatgggcgccgcatcatcctgctggccgagggtcggctgtcaacctgggttgtgccatgggcaccccagcttcgtgatgagtaactccttcacaaccaggtgatggcgcagatcgagctgtggacccatccagacaagtaccccgtggggttcatttcctgaccaagaagctggatgaggcagtggctgaagcccacctgggcacagctgacatgtgaagttgaccaagctaacctgagaagcaagcccagtacctgggcaatgtccctgtgatggccccttcaagccggatcactaccgatactgagaccgccaggtctgccgtttcaacctccagctgcttgtccattgcccaggcccaacctcatactcactaagagctaatggcaccaatttgtgactggttggtcaggtgtcccccatcgactctctgggggctgatacacttagttatggactctgatgcaggacgccataactgtccaaatgtggccgcggaaacagagtaccctcttaagccccggtcattgatgggaggtcccagccaaaggggaaccattgagctcaagggggacctggcaaaatag

SEQ ID NO: 582203 - DNA, 490 bp, Homo sapiens
  misc_feature (31)..(31): n is a, c, g, or t
  misc_feature (132)..(132): n is a, c, g, or t
gtcggcgtgtgacaacaggcgcccagcttcnacgcgaccctgctcgcgtcgaatcgcggcttccagatcgctcagctgcttcggctgtaatatgtcgctattccagccgaattctgtcagcatcagctcaanatccagtcctttgtcttccagcagaaatcgttctacacccaatgctgcaagatatcgttcttgatgtgcgctgcgacgcttgattttgacttgtggctggcgtgcctgtcgatgttccacccgtgcattcgatgcatcatcaccaatttccacagattcaactgcttgatctgcaggctggtcactggactccatgacgctatgaagctcttcgggaggctgattctctgaatgcgctggagactgtggcgacctaatttcgactcgcggggggctctctctcgaagcgctctcgtcggcttccccattaagtggagtcaagggtctctcatctggcttcaatcgtggctgcggccgc

SEQ ID NO: 582204 - DNA, 204 bp, Homo sapiens
cgcgagcgccacaagggatgcacccaccttggtctcgcaaagtgctgggattataggtgtcagccactgcacccagcctaagttggatctcttgaatgcaaaaaggttcaataggaggcaacagaaaaccttttttcttttatgccaggaacacaatacagtgctacctagaaccaacattattttatgatatagcgtgcattc

SEQ ID NO: 582205 - DNA, 559 bp, Homo sapiens
tctgttcttctcctacaggaatacatccctgtcctttcggttgtaactattactaaaactagggctatgcaaatgacctggttaccatgtaatgaaccttgtgtacttattttgagagaacaatatgtataggatatgttgaggggcagaaagaaagacatcaaaaactggaactattttaggtggcaaattgtaacgcaaaaaacaaaagtataccttattttgtatacgatgtacacttgggacagagttttctaatatgttgccaatgtttttgtagtgtcaccacaggtcttttctgaagtgtttttcccatttgttatagagtattaatgacttagcgtaattaagccctcaagtatgtgtgagagagcgcgtgtgagaaaatacaaagccatagatattgatttacttcactgacctgtgtaactttatgtctgggtttcgccatccaagatagattgttttatagagagtgtcaccaaagactttttccttccaatttatagaagaaaaaaaaaagaaattattaataaatgacatgacttttcaaaaaaaa

SEQ ID NO: 582206 - DNA, 1022 bp, Homo sapiens
gcgattcgtgccggccggtccggggttctccggtcccgccgtctcccgcaggagccatgtcggtcttcccggtagctttactttacacgtggacaatggctacttggagggactggtgcgcggacctgacggccggggtgctcagccaggccgagctaccgtcaaccgtggatgcaggtgcgagacgcgtagaggacgttggaagacgtgcatctgcagagcgactgattgatggtacacttgcctggccacaggaggctatcagctctgacggtgtcagttgcatcgagtgaccggctcaaggacgaagatggcggtgggagttccgccacgatgaggaacgcagtgcctatgagccactcgtccagacttccgtagacttcagttgactgtactagttacagtgactcggacgaagcgtgatcctgctcatcgacaggcatcgcgtgcatccgagtcgctccatcgcgtgagctcgtgcgccaagttgccaaccacgtaggcagcttcgagcatgatgggaggtccgtgaacattgctgcagacatcctgctgaggctctacgagaggccattctggtggacaggcctcttgctggcttatgtccaggatcggcatttcagagcaggaccttggacgagatgaacatcgagatcatccgtgaacatcctctacaaggcctaactgggagtccttctacaagttctggaccctacttgggcgggactacggttgatgccatgtggccctattctgggaggttcggaagcaggacgccgcgcccttccgtcatcgcctcaattcttacgggcagaagctgtcccaagagcgcctggcagggcccctattgcacccggaggggggggcaaacccgaagggccgtgggcacacttggtcggacagaagcgaagacagcgccacacacggcgcgaaaaaccggagcacaagcgcgcccacgagagggaaccacccagaaaacacacgcgaagcttagacacgaaaacagacgcagcgcatgacac

SEQ ID NO: 582207 - DNA, 454 bp, Homo sapiens
tcgacgaagcatgaggaggagtgttggcaaatacagatagaaaaagcacaaggcgcacaggtgccaatgaagatgaagtgaccaggaactgaaggggtcgtggttatgggtagtgggaaagggttaaagcagtggagtgtgagagtaagcagtggtcagctggggtcagtggcctagattttcattctgaatgcagcgggaagcctgacatgacccttgtacctccttcagggcatggaaaatggtttctaaggctcctacttaaagcttttcaagcatcagagaatcctcttaaaccagaggagggatatgatgttgacagagcaggtttactccaaaagtcggcttgaggtcaagtcatttaatcttcttactctatatgggatttggaacagaaagggaagaagcagagtcctcccatccatctgggaattcacccaggctgcttccggtc

SEQ ID NO: 582208 - DNA, 171 bp, Homo sapiens
tctgccgatgacacacagtcagcctccgacgagatgaattcaatctgtcaccagggaaatgcagagcccaagtgccacgtttacccaaatgtacggccacgagcgaaaacgtctgtccaggtctgcactggggaggacggtgtgggtgacaggcctcccatccactgtccc

SEQ ID NO: 582209 - DNA, 285 bp, Homo sapiens
aacgggtgatgcggttggtgatgaacaagatggccaggatgctgacactaccagacgatcagaacactgcccaacaggaggagacatgcaatatctgtatgcaggacaaccactctgatgagggacttcatgagcaacactaacgcatgcatgtccgactggctgaaatcggctccgcagacactattgatgaactgctcatgcgtattacgcactcagacgaacgtagccatgtgccataagcagcacatgtgacagatcatgatgcacttagcaaacttgcta

SEQ ID NO: 582210 - DNA, 172 bp, Homo sapiens
agactatacgcccctgcctgcaggtgctcacacctctcttcagtacacgctcaaatttggaacagagggaggacatccggctctaatggatgtctgaccgacattcacatacacattttactgcagactactttttgacacactttaccatgtagtagtgatatgcatgcag

SEQ ID NO: 582211 - DNA, 1872 bp, Homo sapiens
  misc_feature (1)..(1): n is a, c, g, or t
  misc_feature (282)..(282): n is a, c, g, or t
  misc_feature (305)..(305): n is a, c, g, or t
  misc_feature (426)..(426): n is a, c, g, or t
  misc_feature (637)..(637): n is a, c, g, or t
  misc_feature (1252)..(1252): n is a, c, g, or t
  misc_feature (1526)..(1526): n is a, c, g, or t
  misc_feature (1673)..(1673): n is a, c, g, or t
ntcgtcttgcttgttgtgatgtagctcctctgtcctgggtactcctcttgatggggaagtatgatgtttggcagtcacctcacatacgcagcacgtggctgggtttcatccatggcttcagtagccgtgtggtatttttctgtccggaagagagagctgcgctggacctgcttgtttggctcaaccgactgtatcggacagagtgttgtgtgtcctcgtggtagaaactctcccgcggggttggtttgcctcacacgtgatacggccactccactacgatgnacctccctgcctcgttgtcttcncgagaggctgtgttaactgatacttgccctaccttgcggtgtctcttttgcgcacgcctgtcgatgtgcttacatccggctcgggctctacttccagtgacgctcgctgtatctggatagngctcgatatgttgccgaccactcaccacattattgtgcggaccgtcagctattgtgtgttttcaagacatcgacacagtagcgtccacaccacagacgtcggttccgcgccaaatgtggttcggatatatgtccctgttctatccaatgggtgggtgggtatggcgcctctttgtcaccgcgcgttatatggttggggcggccgtgtgatntgggggggcacatgagccaactcaacgagaacgcccatcctggtggggcgcctgccacacagggtgtgcgtctctcgctgctgtgtgctcctctttttgtggagcctcctcctctctgggtcgtcttttttattagtgtgggcctctcactcggtctctcaccttgtttgttatatatatgacccactactatcgtttgaccatctatataccctacggctcaaaatgatcttgttgcggtagtagttgaattgtagtattgtattctctccctctctcggggtcctcctacctccactggggtctttatattgcttttcgtcggcggagagatgtatattcctgcacaattggtatatagtgtagtagggagagtaatacactttgtagtaagagaatagttcgtggtcacaaaactaggtccacaagggagagtctctgtgtctctgtttgagagaggaagaggtgtgaatatagtcttgtgtgcttctctttcacaaagcccccctctgtttgactctctctagatatagagagggagagagtgtgtgacgacacacaacagaggagagagagagttactacaacacagagatcctactctctcttttgtcngagcaacacagggtctctctgtgtcacagagaagagtgtctgtgccacacacaggcacacagagagtgtggagtagagagagttcacacactccctcttgagaagagtgtggcccacacacctctggtgtgaaagggtcgcgacacgctgcggacacacacagtgacacacagtgcacacacaggcgccacagtgcacacacatagaaataccacagaaggcacgcgggagaggagatccctcctcacacgcacacagggggccgcaggggctntgaggaccacaggcacattcaccgggcttatatgacccgcgggagatcgttgtcgggagattggtcgggaattcggggccacatgtcccggggagagctgttctgggaggtgtgcgggaattctggggccacatgtcccggggaganctgttctgggaagtgtgcgggaaaatggggggcacatacccacatgcctgccgctctgggttctctgcgctgaacacacctggtctgtgcaccctgtgttgctcacccattgagaaaactggagcaccttttgtaagtataataatagagaccctgtttcccattttaaatttatccaaaatggaattatcctttagaa

SEQ ID NO: 582212 - DNA, 436 bp, Homo sapiens
  misc_feature (436)..(436): n is a, c, g, or t
cgatgagtctcaagctgccgcccgtttggcagaaatcaacagcctgcaacagcgccagagcaacatcagcgccgcccagatccgcatccgtcatgatctgtgtatggcattgtccattgatgcggaggcattgcctttcgcaggcgaactcatccaggtgcgtaaggaggacgcacgcaattgggaaggcgccgccgagcggttgctacatggctttggcctcaccctgctggttccggacgcgcactacaaggctgtcgccacgtgggtgaacaaccagcagttgcagggtcgactggtgtacttccatatgcgttcacgcaatacgacgcatgatgcggcgttacatgcgcaggcgctggtacacaagcttatcatcaaaccggagttaccacactacacgttgctgcaacaggaacttcagcggagctgctan

SEQ ID NO: 582213 - DNA, 954 bp, Homo sapiens
  misc_feature (263)..(263): n is a, c, g, or t
gcgctgctattttcgcccgccgatattacagaacctcttgttagaggtgtttatgccggggcaattccccctcggtaccggcgtgttggtcccttcttgagggcacgcgcaagggtgcgcaattgtcaaggcccaagggcccgcgtaccattctggcagtggtatatcagctccatcatgtgacgtgcgctcgtgcgaaggaaagaattgttgtggcgaagcgcgcccccagactgtctagtagcgtacgggtgaagaaactnccatgtttgggtgtagaggcaggcgtccacccctgccgggacattgtggcgcgcaaatgcccgtgtggttttattgacgcagaggccacgtaaaatgagtgaggacaagcacaacctgccttgggagtggtcgggtagtctataccggagtggtgtttttatagctcccagcctttgtcgcgagaatgcgcgctgagaagttggtaatgtgtatccgcaacggtggggggagaaacgccaacgttgtgtggcgcaaaagccttccgccggagtgttttcttctaggcgcttaatacgccgctgcataggtcacgcccccgactcccttcggtgggtgaatccactcccccactgtgggatttatccgcgccgctgccaatggccttttttcttcctagtcgagcttgttgacactcactcctgggcgcccaagttcttcttaggggttatgcgcactctcaataagggtagataaagaatgtttcttgggtgctcgacccctgcagacaaaaaatgggtgtagttataagatgactctgggcggaaaaagttcgggtcacattcctcttggtgacacttcattggtatgaactcgcggaccggagatctaggcgcccaaacgcaaaggagaaggggcatttctttttatttcaacctacccagaacaaaaacttgtgaccgaaaaaaaaga

SEQ ID NO: 582214 - DNA, 246 bp, Homo sapiens
caacgatggtcctcagactactctgggaggtgaggcaggagaacctctgcttcccagattcaagcgattctcctgcctcagcctcctgagtagctgggattacagtcacgtgccaccatgcccagctaatttttttgtgtttttggtagagatgggggtttcaccatgtttggccaggatggtctcgatctcctcacctcgtgatccgcccgcctcagtctcccaaagagctgaggaccatcgttg

SEQ ID NO: 582215 - DNA, 100 bp, Homo sapiens
acacgttacatggtactgaaactttagagggactcctgcactctcagacatcacccattactgttcttttttttgttttttggagatggagtttcacgct

SEQ ID NO: 582216 - DNA, 1157 bp, Homo sapiens
gtccgccctgcctactactaaaaatacaaaattagccaggtgtgctggcgcagtgcctgtaagtccccggctacccaggaggctgaggcaggagaatcgcttgaacccgggagacggaggttgcagtgaaccgagcacttgcgccacggcgcatccagcgctggcgtgacgagtagagcaagactgacgtctcagagaaaacaacaacaagaccgcgagaagacccacaagacaaataacaaaccaaaaccaccattggggaaacgctttacgtgcgaggcccttcatgtcttctggtcctggcttcctctttacgctcctacgctcttactgagcacatgtttcaaagccccaattaggccacactgagcttttagtcctttgttgtatcaataccagcatacaacagatctccaccgttcacatcattcaccaccaccagcttctcgcacatattcccttccctcctcccctccaccacaccgccaatttcccgcaggaacacaccattcaccatttcctccaccccttgccgattcaaccctccgccaccagcccagcaccacgcacacgctgcacagtccaccaccgccaccctgtcgcccactgtcacacacggccctcacacctgcagtcccaggcaccaccccaagcagccccccacgcaggctccgacccccaacccctccctcccccgcctgcccacacaaaccaccagccatccagcagccacaaccaccggcacccccaaagcgactccacccctcccacaccaccgccctcagcacactcccctcccacctccccgcccccacaccacacccccccccaccccagcactccacgcacacgacagctccactcctcaacaccaccgcgcgaccactcacacacgcccacgaccctctcgcgccacgcaccactcaccacccccaccatcggcctcaccccccccctcaacccgcgccacacacaaacagcctccagcaccccacccacaacccccaccactgccgcaccgccgccagcgtcccccgccccagggcccccaaccggcatgcagccacgcctccaacaaacacgcagacaacccaaccacagccgccaccagcaggccatcccaccgaccgccccgacgacacatcgcgcccccatca

SEQ ID NO: 582217 - DNA, 406 bp, Homo sapiens
  misc_feature (96)..(96): n is a, c, g, or t
ctgtattgcccaggctggagtgtggtggcccaatcacagctcattgcatcctcaatcacccaggcctaagcaatcctccccccttgtaggtggggntacagctcccagcgcacctggctaaaattttttttttgtttagacggattttttatttggcccaggctggttccaggctccttggcttaaatggtcctcctgccccagctttccaaaggcccaggccaagttttagctttgtcccttgccctcatgccccaccaaaggttttataccctttaatgaattgactttcataaattggttttgttggtgggccagtttttttagctggaaattgttaattcctcctgaaatgttttttcctgccgtttcccttaacttattctcccataaaggatggttttgg

SEQ ID NO: 582218 - DNA, 223 bp, Homo sapiens
gagcaaagggcgctgacccgtggggcgaggtacggacaagatggacatgatcctggccttgagctgcgaccctctggccacatggtgtgtgtgtgtgtgtgtgtatgtgtatgtgcatgtgtagtgtgtgtatgtgtgtatctgtgtatgtgtgcgtctctgtgtatgtgtgtgtatgtatagtgtgtatgtgtgtaggtagtgtgtgtaatatattcgccta

SEQ ID NO: 582219 - DNA, 149 bp, Homo sapiens
cgccggactgtacaggattgacagattgatagctctttctcgattccgtgcacggtcgccactacgtgtcggccacgtggccggacacgtattgccgacacgtccggacacgtcccatcgatgaattcgagctcgaattacgtgtccgg

SEQ ID NO: 582220 - DNA, 701 bp, Homo sapiens
gcacgaggctcctgtcgaaataggctagtgatgaaggggggcaaaaaaaaacaagcaagttctgaagttcactctttgtattgcacccaccctgtagaagatggaatcatggatgctgcctattttgagcagtttttgcaagaaaggatcaaagtgaacggaaaagctgggaaccttggtggaggggttggtgaccatcgaataggagccagtagcaagatcaccgtgcacattccgaggtgcctttctccataaaggtactttgaaatatctcaccataataaattatttgacatgatagaactaatctacgtgtactggttgcgcgtagtttgctaacctagcatacagagagttacgaatttacgttacttccatgattaaccatggacgaacgaagaggacgcgaagacgacggagttacatttcatttatctggaacacttttgtactgagtttcttgaattaaaacttggtgaaccaatagcaaaaaagaacgtaaatacaaaattaggacacaatccgtgggttctcatttatccctggtggcccgggccacacgcggctttcgccacgtggcggcagtgggctcactagctggtgcccccagacccggtttgtcttcttcactgtgggttgacaacgtgccgagcttgccgcttgggggctctgttgttcgcttatccctggtccccgtaacc

SEQ ID NO: 582221 - DNA, 292 bp, Homo sapiens
ggccgacctgcgccgccgcgcgaccaaggcgctcggccgctgcacgcagaaggacaacatccgtttcgacgggctgtcgcgcgtgtcgcacgtgaccgacgcgaccgactggcgcgtcgaatacccgttcgtcgtgctgacccccgatagcgaagccgagatcgccggccttatcaaggcctgcttcgatgctcgtgccttgacctgtgatccctgcgctggcggtggcaccggctacacgggtggtgcggtgccgctcacgccgttctccgccgtcatcaacaccgaaaag

SEQ ID NO: 582222 - DNA, 131 bp, Homo sapiens
taccttacctccgccttagcttcatccgggctgctccgcacggactcggcctccgccttggcagtcccggtgctctccacggccatgctcagagccctccagctccaaaagtcccttggcgagctttctcg

SEQ ID NO: 582223 - DNA, 645 bp, Homo sapiens
accacgcgtacgcccacgcgtccggaacaaagaaaaaaaaaaaaaacacatttaccttaagaaaatacagacaaaaaacgaataaagtatgtgtcatatgctccatttggagattccaaatgcgggccggggcgtggtgggctcacgcctgtactctcagcttcccaaaatgctggaattcacaggccatgagccatcacgcctagcctactctctgaattcctcaacaagtccagaaggttgaccaaaaaagtctagaaaactgggcttacaagtccagtaaggggcacgtacttatcaacagcagttcccagatggttagcggcaccgtataatcgggataggacacaacgataaactcgtgacgcatatactgtattatacaacgtgacctatacccaacatacgtagcgacactcggtacaacctaagaactacgaacaaggtgcatactcgtgcgaagcatatcatcatactatatatagcaacagatctaaataaacaaccaacagtaacttagaatagcgagaccttacaataaaatataagggagcgccgcatccaagatcgcaagaaactgatagagtgacaccagaggaaaatcaacgtactattaacacacacatatccacatatgggaccaat

SEQ ID NO: 582224 - DNA, 728 bp, Homo sapiens
gaggaggaattgacaatgggcatgtcctacgtgaatgatgagcatcttccgaatctacattacagagaaaaacttagtgccggtgggagcacgcgcccagcgtgtgctccgtgaggcgccccgtaacatggtgcacctcaatgtgatctgcgatggctgcaatgggccgtgtggtaggaacccgcctcacacaggtgctccgtctgtgcagacctagtgtagttgtgtagcgtctgcgacggaacacgggcttgctgcgggggcaattcctagctcgcattcccctagcccttgttcgggcacctgtctgagggcttctcgccactatgccgctggtttcgcgggacggtgaatactacgggcccattttcggggtgtccgacggatgttgaagtgtcgtcctgccaggatagacctggagccgcacttttctcctcgtcgccagtgctgaggctctggcctggggccctggggatgaaactcacgttcttctggctgcactcggagggatccgggggtgtgcattttgcctgagagaatcgttggtgacaagtgttggccccgtgcccttggtccttcgtgggcttttgagcggttggtatcggctgtggaccacgggttgggcatggcaggcgcccctgactcccgggttctccagagagttccgagcactggacggagaagagccggttgcccgtccatgcaccgtgctggcctggccccagcaa

SEQ ID NO: 582225 - DNA, 400 bp, Homo sapiens
gcgcaggggttagcatgaggtgagttcgaccaaccggatgtattgggagggtctggaaggcccgttatggcagttgcggtcggtcagcgcatcgcggcgttgccggccgctccgcgggaagacactggtggtaatgcgacttaagacaatttagtcatgccgtcgctgcatcacgtcccgtcgtcgcattgccggatgatggtcttcttcgctgtccccaacgtctttcggacgtcgagaagtgaaaacgtctcctgggtctgatacttgggaaattccacgacgaaggacttctgcttgctcgcggccaaggcattgacgagctctctgaagtcccattggttctggcgtcgttcggctttgaactggcttccatcgagaaggaaggggtgttcttgcc

SEQ ID NO: 582226 - DNA, 140 bp, Homo sapiens
tgactggctgctcaacaacagaaattatttctcagttcttgaggatgaattcaagatcaaggtgcagtagattttgttgtggtgaggtacccccttcctggcttgcagatggtcaacctcttgctgtgaaggctatcagc

SEQ ID NO: 582227 - DNA, 891 bp, Homo sapiens
  misc_feature (384)..(384): n is a, c, g, or t
gggtacctagctgctagccggtgccttggaccctaccccctacgcttctacgttctactagccccaggagcccggcgggtccgggatctcccgtccgtgccggtgcggtgcgccagtcatagtaggctagtgggatgaccaagaagcaagcaacacaaaaggcgccctataacaacccaaaccaaactagcgaaagaagatactaactaagataaaccacaaaacctcgagagacaatatggtataccactcacagcaagtatgcccacaatcatagtcgatcatagacggaccatgcatttgagattggggttctaatgggctcggttatagcattaatctcgctaagcttaaattaagggacaagctccctcatgttagccnatcttaaatattgacccatgcgatcccctaccgaaaaatgctaggtgaacccaggagacgaacaacttctgagaatacggcactgcaaaaaactaaaacgcccaggatcataacggtaatgcaaactaaatggacgaaaaaatacaacaccaaaagcaaaaacttagggattgatgcccaaaaagaaattaagacaccaatcaagggacgaaattgaaaagcctgaagcacgaagaaagatacagcctttaataagagcgctgagagaaaaaatgatttaaattcttgcgaaaaacgaattggacgcaaaaaggccagattgagtaactataattgggaaccgcgagagttagatctacactaaaacataattgggcgcatgggtaccccaggcatttaaaagccattttgatcatccgctaaactaaacatgatcccctagagaaaaggcgttatggccccaatcctcaagaaatatcttcagtgaaaaccaacgagggccaaatc

SEQ ID NO: 582228 - DNA, 85 bp, Homo sapiens
cctactctctagggttattgtgaggataaaaggtgatttgtttacataaagtacctaatagtatctgggctatcgtaaaaaaaaa

SEQ ID NO: 582229 - DNA, 350 bp, Homo sapiens
ggatattcaaaactacgccatagaggcctacatcctgagggtcaggtacattggcggttgctgtggatttgagccctaccacatcatggcaattgctgaggagctggtcccagaaaggcgctttgtgccaccagcttcagacatggcagctggggaagtggtttggacatgcacaccacaccctgagttagagcaagggccaggaacgaatactgggagaatcttccgatagcctcaggccgtccatacagcccttcaatgtcatagccagatggctgcggagtgaccaaaggaacagtcgagctgatgcatcagactgaagccacctgagcagcagctggagctctctg

SEQ ID NO: 582230 - DNA, 151 bp, Homo sapiens
  misc_feature (127)..(127): n is a, c, g, or t
ggcatctccacagcttatagtttgataaaggcaaatacaccattgtgattatacactgatttccatcacctgcctttttactatcaactcttattagattaaaaggaaggtgatggaaatcagtgtntaatcacaatggagtatatgggca

SEQ ID NO: 582231 - DNA, 114 bp, Homo sapiens
gttgctgaggtactcagaggatcccttagcacgaattatcgcgccggtgctgcggtttctcggtgaggcggggaactctctatatcggtgatctgcgcgtcgatgccctggctt

SEQ ID NO: 582232 - DNA, 254 bp, Homo sapiens
gagttcccatgcttgaccgctgaatatccctcttaggaattccttgaggacagagactctattatcttatattttgtctttttctattatgttttttggagcctgtctcccaggctggagtacagtggcgtgatcttaactcactgcaacctccaccgtcccaggttcaagcaattcttctgccgcagcctccagagtagctgggaattacagacatgattcaccacacccagccagttatcattttttataat

SEQ ID NO: 582233 - DNA, 270 bp, Homo sapiens
  misc_feature (110)..(111): n is a, c, g, or t
  misc_feature (115)..(115): n is a, c, g, or t
  misc_feature (117)..(117): n is a, c, g, or t
ttgtttttttggtttttttattgctcccccaaatagaaatttagggcccccccccccctgtttccccccccgttttttttttggggggaatacccccttttaaggggaannaaanancccccccctttctccccccccctataccccccccccagggtgttagcttttggtttttggggcccggccccccgggggggttacttagggggttttagggttgggttttaaaaaaaaaaaaccagggggggtttgtgggcctttttcttttta

SEQ ID NO: 582234 - DNA, 233 bp, Homo sapiens
aggatcccccatcaaatcataggaaatgcaacagatttaataagaagttgatgcctctcttgtatatcgtgagctctggataagagcttcccagccacccttagtcttccttatcttaaacctgtcttatgctatttagcaagctaattggatttactgtcttgaaaaggcttcttgtcattgtcttctacttcacagttcttacttgtgtctcttttttttttggggccccc

SEQ ID NO: 582235 - DNA, 376 bp, Homo sapiens
cgggcggaacacctgaggtcaggtgttcgagaccagccaggccaacatggtgaaaccccgtctctactaaaaatacaaaaaaaaatgagccgggcatggtagcaggtgtctgttatcccagttaggaggctgaggcaagagaatctcttgaacctgagaggcggaggttgcagtgagccaagatcgcgccattgcactccagcctgggggacaagagtgagacttagtctcaaaaaaaaaaaaaaggaaaaaaaatccggggatatggtcaatttcccatttcttggttaaccccgttttccctgattttcagcctgtagctatgggcctggggactccgggtcaaggtggccccccggggatgggcctaccaggg

SEQ ID NO: 582236 - DNA, 213 bp, Homo sapiens
gggccccccaaattttttttttcccgggggggggtgaagggatttccccccccttttttttagggggggggtcccgccccccgggggggcccggttccccgggttttttgggggatcaaattggggggttcccccgatttttttttttaggggggggggtttttacccggccccgctttcctttttttaaaacagaaccaggtttcaaattta

SEQ ID NO: 582237 - DNA, 127 bp, Homo sapiens
tagaggatcccccatgtgtctgagacggtgatctaagggccgcggcctcctccacacacacacacacaccagtggaaccaatgagaaccacgtagaaatcctcagaagcgtgcggaccatcaacctt

SEQ ID NO: 582238 - DNA, 334 bp, Homo sapiens
aaagggaaaaaaaagtttattggatttctaaatttaataaagtatttgcaacttttttacaaaaaaaagaaatttagtttccattttcattcttatagagcattgaaaaaacataattggtagaaaaaactgattgaaggtaaataaaaaaacaggttttaatttagtcggatattgcctaaccccaaaagaaaatccctaactcacttgcttataacagattttattttcttattttcatactgaactatgggggctattttggatccatcagggagggtttgtaatgtagtgaataaatgcattttgctaagaatccaggaaaaaagagaac

SEQ ID NO: 582239 - DNA, 551 bp, Homo sapiens
  misc_feature (333)..(333): n is a, c, g, or t
ttgtagtagtctattgcccttaatatcttcacccacatgtcctgtaccctgccctgaaccctcctcctcttttgttctgatctttgagctccctagagcccataattctttagagcaggtatgtcccgagtctgagacatgcccttatttgtcccaagctctggacatttctcaccccaaggcggatcaatcatgattaaatcactccaatagaacaactacaaccggttgttctattgggccgggagcagtggcccacgcctgtaatcccagcactttgggaggccaaggcgggtgaatcacctgaggtcaggagttcgaagaccagcctgnccaacatagtgaaaccccaatctccactaaaaacacaaaaatcagctgggcgtggtggtgggcgcctgtaatcccagctactcaggaagctgaggcaggagaatcacttgaacccaggaggcgaaggttgcagtgagccgagattgcgccattgcgctccaggctgggcaacaagagtgaaactccatctcaaaacaacaatagaacaactacaaccg

SEQ ID NO: 582240 - DNA, 102 bp, Homo sapiens
ctaggtggaaatgcgagtcacactcggtcactctgagtcctggctcagctattcacacctgagaggagtgaggactgggcgtcacacgtcggtcactctgag

SEQ ID NO: 582241 - DNA, 216 bp, Homo sapiens
cggcggggccgttattggtaataggcggagtgcggacgctatactacaccaaaaataaaaatattaagccaggtgtggtagtgtgcactgtggtcccatctactccagaggctgagtgtgggaggcattgcttgagcctgaggatgttgaagcttgcagtgagccatgagttgtgccactgcactccagcctatacaaccgcggaagcaccctgtc

SEQ ID NO: 582242 - DNA, 105 bp, Homo sapiens
ccatttagactcttaaggttggatttttgatgttgatcactcatctctaggttgaatttatcaaggtattatttatgtaataaacaccatgttttgttaacagta

SEQ ID NO: 582243 - DNA, 191 bp, Homo sapiens
taaccaaatgaagataatagagctgcgatggtaatttctatggcatctggcaagtgacataggactagtgtagtacaccctaaaccactgacgctagcacgtacgtattctatagatagaaacccaaggatacgtacatgcatgtgtatgccccgttggatatctattatacagagaaagactactatcca

SEQ ID NO: 582244 - DNA, 343 bp, Homo sapiens
aggctgtacatacgaacctccccaggttctaactggaactggtttcgcacacttggcatagagtccccagagggagccaggtgcccctgagctccgttcacactttgatgttttttgctctctaatcctccttagaaatcggaaatgtcttcctgtaactccaggtgctgtgtctcagtgtacgatttctgaccctgtccctgcagcaagattttgcagtgtgagtccatgacattctcatctttgcgtgggagccttgggtgaattgtgctctcagtggtgagtgggtgtggcacgggatgaccaggacaccatccactgtgggcctgagtttggggcactc

SEQ ID NO: 582245 - DNA, 1376 bp, Homo sapiens
  misc_feature (536)..(536): n is a, c, g, or t
gctgttccgtagtccaggtgtggcgtgtagaacgcaggttgtcggctgagaatggtagctgccgtaacattaggccggaaaactgtggaggtgggcaacagcacctcatctatcattcatggtcttagctcattcggatcacgatatgattctcagggtcatctgtccagacagcttagcgtgggacagtcgagatccgtagatgaataaggatggcacgtcgagtggacgatgacgatgagcaggaggttttgaagcacagagcagtgcttgggtgtaggtactggcgagacactggcgtcttcacctcttctaatgctcactagtcactcggggatcctatgtggagtacacatctagaccacagttatagcagacggctgaaaccagatgggggtagtcccaccccaggtatagccatactcctaacgcatatgttggagacaaaactttttggagggaacgtaggctcacagatacttatggtagaatacataacctcaatattcagatgggcaccccaatgggacacacangcaagaactccatgtatatcaacacatttcacaaatgaactccaaggggaccattgtaatcaacgtgtgcgtgactgtgatgacgtgtctggatggacatctgtttgtcctagccgtaggggtggtttcggggtcgaaccctctttggacaggccttgcgtatgatcgtgcccacctgaagactgtggtggcacagtatcccagaacgaaaagctttggaccccgtatccatagtgtcctttctatctaccatcggtgagagatggtttgcatttactaaaccttaagaatcgcgattccgcgttggttgtttgaccaacatccattagggtgcattttacgctatgcatgagagcgcaaatccccttgaacaaaggtccccatggaacccggaccaattaattgattggtgaagaagaatagggttccacacgggggacaggggttttcggcggccgaacttatcatcgccatgtgcacctgtgaaaagagcgtggtatgggattgagaaccacttggcacattcgttaacggccatagggtgctgtacaatgtgggaaggtatggccgcgaggtgtatagcgtttgagttcttcgcgggacactttggggttggaacaagcactccactgagacattgtgacaaggccggagagaaaaggccgtgacattcaattggccgcggttttgtgtgggacccccaccgaggaaatgttgacagggaatacacctctcgcgggatttagtgggacttgggcgcacgtgcccagagggcggggtaatctccaagagacgaggcgtttggacagcgagatctctcgctgaaggtggtgttacccc

SEQ ID NO: 582246 - DNA, 138 bp, Homo sapiens
taacaagcacatagctaaggatacagaccacaaatatgaagaggtggccaggaagctggtgatcctggagagaagagctggcgcgctcggagtgaaagggctagagcgctaggccgaagagccgaagccatgacagct

SEQ ID NO: 582247 - DNA, 1440 bp, Homo sapiens
  misc_feature (1029)..(1029): n is a, c, g, or t
atggtgggtggctcgtccggcccaggagtttggtctgcagggggcacgacgagcattgtggggggcgcgcctcatctcaccgtccgggcgaggatgcagcagcgtgtttccggcgcgcgagggggggggcgaaacaaagttgtggccgcccccccggtggttatcgtgtgttgtcgcggtggtgaggggggggcgctcgttgtgtccctccctgtgtgggcgacgccggtttttttttggttggtgcgccaccgagggggagtgggtgctccccgccacatggggggtgtgttgttggtgtgtgagccgcgcccctgccccaccggccgccaacgacggtgggtggggggagaaatagtggggggcccgcctcctcgcggcccccctccggggtgttgagataaatacactctggggcgctggtggttctgtccgcctctctggttgtgagcacccccggcgtgtggtagacaccgggggggtgtcccccccacgagcagagagaggtttcacacagcaggggggtcgcactctctttgtcgccaccgctctctctgcgctagcccctgggggtcccacgacacgccgccgctgtgtgtgggggagagtgtgtgtgcgcgcccccaccgctggcgtcgtctctcacaggagtgtgtgcgcgactctctctctgctcttgtccgccgcctcttctccaccgcccctgctgtgggtgccctctgctgtgtggagagacgcccgcggcgccacacagcgtgtcacacagcagagagaggctctgctgtgtgcggcactcgctgctgtgtgcgcgcacacaccccgcagccgccgctctctctgctgctgagagagtccctgcgtggggctctctcccgctgggcgcccccacacacgtgtgtgtggtctcccgcggtagtgtggttgctccaccgcgggggcgtccctgctgtgtgtgtctctcctgcggaggacgcgcgcggcggtgagaggggcagggtgtgagagagagagagaggcccagcagtgttnttacacgccgaggcgccccgtcgacgaagaatatatagtgtcgtcgcccctctcgacgagagaagagagatatatatagagagagagagaggtcgcgtgtgtgtgtgggagatatctctctctctgtgaagagagagagagaggcgtgagagagagagaagaagagagagagagagagaatatatataatataaccccactccctctcttgtggccccgccacccacacttcacacgctctcccccgcatatttcacacgctctccaccctcttaacgacacacacacacaccttaagactcttttgtggttaaaatgttttcaccctggggaaacacacgttttttccccaaggggccccgcgaaatttttccccgtatatttcccaagataagtccctttaccccccca

SEQ ID NO: 582248 - DNA, 852 bp, Homo sapiens
  misc_feature (102)..(102): n is a, c, g, or t
  misc_feature (125)..(125): n is a, c, g, or t
  misc_feature (133)..(134): n is a, c, g, or t
  misc_feature (142)..(142): n is a, c, g, or t
  misc_feature (149)..(149): n is a, c, g, or t
  misc_feature (160)..(160): n is a, c, g, or t
  misc_feature (310)..(310): n is a, c, g, or t
ggctgggccttggggagctgcgctcgggggcggacgcgggggatcatggaagctgataaagatgacacacaacaaattcttaaggagcattcgccagatgantttataaaagatgaacaaaatangggactanntgatgaanttacaanagaaaaatatncagctaaagaaggagatccaaaagctgtgaaacggagttccaagaggctaccaaagaattccagattaagaggatattcctgaaacaaaagatgaaattcttatcagtgtgaaactcctgagaatgacagccagtggtcaaatatctccntgtcgttcaagtgagctcgaaagttccttatgagatacaaaaggacaagcacttatcaccttgtgaaaaagaagaagtgtgtccaaaatgtggtaggcatgagtaacattcatgtaccggataaccggatgttaactctggggagtacggccaagccagttccattaaattcaggagtcagatccaggtttatgtagaagtttctaaaatgaaattcatgttactgaaattcctggaacatggggtgaagatcaatgagagacaaatagagctgagctttcaaagtcccgaaatgaggcggagaggtggaccgggtggactatgacagacagtcgggagtgcagcatcacgtgtggggattgaggtggtgccagaatttgaaagaagaaaccttttttttaaattaaactgccgaaaggtatggtttccttaaccggactcctcggaagtttcgattttcggacctctcaggaagggttgcagaggagggccacgcggacacgggggaaacacctcccggcacagggggaagaggaggcttc

SEQ ID NO: 582249 - DNA, 400 bp, Homo sapiens
tagccgacctacacagtgttaacaagtaaaacaaactgtaaggaaaagaaaacaatttgtaactaattaaactgttgtaactcatgagccagcctagtagtgaaaatgttatccatcctactaaatttctttgttttctgcatttataagcaagatcttaacttttaacttcagagcactgaccccatttctttggagtctgcttcccagatggccattcccagctttttccttgaataaactcttggcgtttttgttgttgttctgagacagggacttgctctgatacccaggctagagagcagagcagcaatcatgattcattgcagccttgacctgtcaggctcaagtgatctttccacctgagcctcccgagtagttgggactacaggtgcatgcc

SEQ ID NO: 582250 - DNA, 183 bp, Homo sapiens
  misc_feature (40)..(40): n is a, c, g, or t
  misc_feature (112)..(112): n is a, c, g, or t
ccaacttagcaactttggattcaggtttgaataagaaatncttcagcgtgtgtatttcggctacatcttcttctggcaatgacttccgctccttttcttcttatgtttcttnggcaaaataattacttccgcatccgccatgttaccctgcaccgcgttcgtgccgcccggtccacagccgag

SEQ ID NO: 582251 - DNA, 183 bp, Homo sapiens
tcccggcccggttttttttgggggggggggccgtttttttgggggcccttttaaaaaaaaaacccagggccccaggtgggggggcccccccccccctgggggcccgggggaaaaaaggccccccccccagggggggggccaaaacccacctttccgttttttgttcctggacaagggcccccg

SEQ ID NO: 582252 - DNA, 1171 bp, Homo sapiens
  misc_feature (108)..(108): n is a, c, g, or t
tcatacaggtgggtgtgctacagcgccgctttgtgtgggagatggtttgtttggtcgcccagggaaggtctgtcgtctggagccgaatatatttgtcgcctccgtgtnctctaacaatatcgcgcgggtgttgagggcgccatgttcatgggttttcatgccacagctggtggcacaggtttattgtggcccaagagccaagtatttgggggaggtagctcttttgctttgggggagtttccaagggtaccgccaactaatggtgggggatagaaggcccttctttggtattcagatgcgcaacgtttttgggcaaagctttcctgcgagggccccgaggtgtgcatcacaggacgggggcatccgggatttctgtccctcttgagcgagagccactgggtcgagagttgcccccggggggattcctgcctgttgtgggagcccctttgtgcattgttggccgccatgacattttgaccaagtgctggatgagacgggccccctgggggaaccttacacccccggaactcttaaggagaaggagtttgagctttgtggtcctcctcgagagcccactgttgggattacccaccagggctgtttgcccgaggccggaacattcttagaattcccacgaggggaatttaactggggttttgagatgttgggcgctcgtggtatcctctctcccaaaagtgggaaaaaatgtggctgaatttcacggcacgctttgaacagaatttcgggaaaggcccccgagttgcacactgtttacctgtgcacgattttgaggaaacagcacaacttcgaggagaagtacacggcacggagggatcacaatgggaaaggacgagactgaaggacaccttttattaccaccacgggccaagtctgagtcaacacaggggggccaatccacgggttaaccctgcaagactggttccacatcaggactcccttcgaacaccaagattgctgtggcaaacggaaaagtgtagacgcacttctccgaaaactgcacgggcataaccaaaatcaatacttttcctcttgattcttgtgggtaaacacagacagtttctgtgtttgagagatttcccgttaggggctttgtttgaaaagggactttcataaatccaaattggtattaaataaagctacatttttaaga

SEQ ID NO: 582253 - DNA, 695 bp, Homo sapiens
tgctggaaggactatgctgaacctccttaggcactctctaattagatgtcctagatcctcccaattcttagtccttttatacctgtttttctccttctcttattccatttagtttttcagttcatacaaaaccgtatccaggccatcaccaatctttctgtatgacaaatgtttcttctaacaaccccctcaatgtcaccccttaccacaagacctcccttcagcttaatctctcccactctaggttcccacgccgcccctattcccgcttgaagcagccctgagaaacatcgcccattctctctccataccaccccccaaaaattttcaccgccccaacacttcaacacaattttgttttatttttcttattaatataagaaggcaggaatgtcaggcctctgagcccaagccaagccatcgcatcccctgtgacttgcacgtatacgcccagatggcctgaagtaactgaagaatcacaaaagaactgaaaaggccctgccccgccttaactgatgacattccaccatggtgatttgttcttgccccacttaactgagtgattaaccctgtgaattgcttctcctggctcagaaagctcccccatgagcacttgttgaccccggcccctgccacagagaacagaccctttgactgtaattttcattacttcccaaatctataaaagggccacc

SEQ ID NO: 582254 - DNA, 473 bp, Homo sapiens
gttaaaactttagagaactttataaaatagaccataaaaattccttaaggacttttaagaacattgttttaaggacattgttgaggacagtttattgtaaaagattgtagatgcctgtacttttttcttcatcttttgcatgctgttggtggttaaattttgtgattttgtgattttttttaaaatttatttttattttttattattattttttgagacggagctcgccctgttgcccaggctagagtgcagtggtgtgatttcggctcactgcaaggtccgcctcccaggttcaggccattctcctgcctcagcctcccgagtagctgggactacaggcacctgccaccacacctggctaattttttgtattttcagtagagacagggtttcaccatattagccaggatggtctcgatctcttgacctcgtgatccacctgccttggcctcccaaagtgctgggattacagg

SEQ ID NO: 582255 - DNA, 678 bp, Homo sapiens
  misc_feature (224)..(225): n is a, c, g, or t
  misc_feature (227)..(227): n is a, c, g, or t
  misc_feature (229)..(229): n is a, c, g, or t
ctagatcgtgagcgccgcccttttatttgtttttttaacataaaatagaaactaactttatttctctggaagaagcaggtactgaatgccggagcagcaacttcgccaacaggctggtgggaaaacatggaaccgctgtgggggaattgggtggaagaggaagcactgatgtccctccagggcggttgcccttggttctccttccagccctggggccttgggcnntngntccccgtcagagaatggtctggcaccctttctccgcttcctgagccacctcagggctatttccaggcacaagatcctgaggccagccaagtcccattcaagtccatggtaaggccacaagtcacattctgcccgagaccccagttgctgccaggggccccctggaaaaaggcccagtcctagagaggtcccaccgggttgccggatccgcactctccctggtggcacaacaaaatcccgcacgtgcccaggttccagaccgtggttttcactcccagtctgtgtcaccacagggcagggccctgggggtacatagtccacaccacgaggccccgcccaggaaccagggccagaaggcaggtcatacccagagcctgcatggggaagccctcaagacctgtccttcacccggccctttccacatcttggcaggggccacgggactgaacc

SEQ ID NO: 582256 - DNA, 388 bp, Homo sapiens
attcgtggtgatgatggaaaaaccgtgtaaaggtaggtcaaatgcatcacatttacacttgaaaacagccatattttaggctatatagattataactcaacaaagctacttttaaaactgtcccgtcaggctgtagagaaattaagtctgatttctgtaagtactcactgagtgcttgcaggtaccaggtgcacagcaagggctcagtaagtggcaggcagctgggagccacttggagcagacaggtggaatgaagttaatacctgacagaaagatgcagaccttgataacatccactttcaattaaagacagtgaggaggagtaggaaaggtttaaaaaaacaaaaacaggcccagcgtggtggctcacacctgtaatcccagcact

SEQ ID NO: 582257 - DNA, 259 bp, Homo sapiens
  misc_feature (17)..(17): n is a, c, g, or t
gactcttgacggatccnctcacccgcgtagtggtctcgttgctggcatgaaagtacagctgggcaacactgcactgatggaagctgcggcgtgaccaccaaggtctacaagaacgtgcagagttgttggcctttgaagctcagcgatcatctatctagcagttgacggggtcttggcaggattactaagcggtcttcagacccgataaaaccggcctctaaagaaagcagtcaccaagcttacggttgctaacgtacaa

SEQ ID NO: 582258 - DNA, 412 bp, Homo sapiens
caatagcaactgaaatgtttacgttttggtgattatatcaacatcaaagaaatgcaaatcaaaaccacaataagatgccatctcacaccaatcagaatggctattattacaaagtcaaaaaataacggatgttggcaaggctgcagagaaaagggaatacttatatactgtttgtgggaatgtagactggttcggccactgtggaaagcagtttggagatttctcaaagaatttaaagtggagctaccatttgacccggcaatctcatgactgggtatatacccaaaggacaataaataattttacacaaaagagacatgcacttgtatgctaatcacagcactgttcacgatagcaaagacgtggaatcaacctgggtgtccatcaatggtggattggataaggaagatgt

SEQ ID NO: 582259 - DNA, 511 bp, Homo sapiens
tgcactgtacgcggtcttctggctacactgcatgggcgtctgtcgtggctcactggccgcgcatcgatcttgcgttcgtccattgggcgacatgtatagcatttggatgagctgaagcagcgtgattacaagaatcctgatagaaccagatgtaatacccttgaatcccgtatatgtagtagcaccaggtgatggagtggctccagtgactctattgaaccctacaacacatcatgagtgcagatattctaggcatattggtcacgaatggagacggatggtgcacaagttatgcttgttgatcttcatagcactttatgtattaactgacgctacttagtgggcaagtagtactacgtaaaatgggttgtggtttgaggttgaatgcttctttaatgaatagactaatcatgaatgaatgaggtccagttaatgtagctatgctataaagtccaccaaatgaatgggattctatccagtaagatccgtgtccaatgagtagccttgtgga

SEQ ID NO: 582260 - DNA, 911 bp, Homo sapiens
gctcggctgtgtctctttttgcgtcagctcgtccctgccacaacggctaacacatttctatgactgggccccgatctgtctgcctcgggctccagtgaggatctcctcatgaagcttgaggcggaaccaccaggctactcctttgtagagattgcacatgaaagctctggaggacttgtggcgtggaccttctaaatcaaggccgagagtctgggtctcctacacaggtggacggcccagcacagggagtggccgctggagtctaaacgccctgcctcagctccaaggccgaggatagaccagtgaatggcctgcttgcgcgctgctccgcatgaaggtaacactcctgtgttatgtagaggtactcctgtgagacacgattattgtattctcgaaatttggctttttcatctgttgggtccaccatagtctcccttgcaacctgggttcattgtcccgcacctattgctgtgatccctcctcctgcatacggtaaatgcgtttcttgatagttcctctgagcttcttctggagctttccagttgggcctgcacagaggacctgctcgagctgcttcgtttaccctgtctagagacgcctggtgctgtctgcgataaacccttgattcttctccgcagcttgcttggtgtagccctgttgctaccggcggttttacgtatggcctctgtatgtcgctgcagacgttgcgcgagtgctctccctttacagggctgtgtgctggaggaaggtatgccggtgcctgtgggcatcgtggtgtgggccggtctgtaccgtaaccccagaacctttacgcatgtcgcgttgtcgacttggggcggtcgtgagggtgggtcttgcccgcccctcttttggttgggcttccttggtatagcctgcgggaaggggtagac

SEQ ID NO: 582261 - DNA, 180 bp, Homo sapiens
tctggatgcaatgtgtctccagtgagggatagtacaggtttcacggatagaagtttgtcaggtagtctaaggaagaactcgttccccttctgattctaagcctcctttctcacgagggtcatagagaaaggccactggcccgtgggcaaagaaaacaatcctcctctggagggttgggga

SEQ ID NO: 582262 - DNA, 201 bp, Homo sapiens
acccgcagcatactaacaatcagtgaagaaatgacacatattacactgtttgcatttacagaaaggtgctcatttcgtgctgcatggcttaactcacacgctttatacttcctaaaaaaaataaaaagttttttttttttgggcacttactcctattttttttaaagatatttttttataaaagaattttgggcggcccga

SEQ ID NO: 582263 - DNA, 985 bp, Homo sapiens
  misc_feature (32)..(32): n is a, c, g, or t
  misc_feature (693)..(693): n is a, c, g, or t
  misc_feature (864)..(864): n is a, c, g, or t
  misc_feature (959)..(959): n is a, c, g, or t
cacgcgtcggcggacccggaagtggcgccctnggctcgcggcggtgccgcggggatggcgggagccggagctggagccggagctcgcggcggagcggcggcgggggtcgaggctcgagctcgcgatccaccgcccgcgcaccgcgcacatcctcgccaccctcggcctgcggctcagccctcggcccgcaggatggatggcgggtcagggggcctggggtctggggacaacgccccgaccactgaggctcttttcgtggcactgggcgcgggcgtgacggcgctcagccatcccctgctctacgtgaagctgctcatccaggtgggtcatgagccgatgccccccacccttgggaccaatgtgctggggaggaaggtcctctatctgccgagcttcttcacctacgccaagtacatcgtgcaagtggatggtaagatagggctgttccgaggcctgagtccccggctgatgtccaacgccctctctactgtgactcggggtagcatgaagaaggttttccctccagatgagattgagcaggtttccaacaaggatgatatgaagacttccctgaagaaagttgtgaaggagacctcctacgagatgatgatgcagtgtgtgtcccgcatgttggccaccccctgcatgtcatctcaagtgcgctgcatggtccagtttgtgggacgggaggcnaagtacagtggtgtgctgagctcccttgggaagattttcaaagaggaagggctgctgggattcttcgttggattaatccctcacctcctggggcgatgtggttttcttgtgggggctgtaacctgctggcccacttcatcaatgcctacctggtggatgacagcgtgagtnacaccccaggggggctgggaaacgaccagaatccaggttcccagttcagccaggccctggccatccggagctataccaagttcgtgatggggatncagtgagcatgctgacctaccccttc

SEQ ID NO: 582264 - DNA, 607 bp, Homo sapiens
gcatgctgtatgtactggacacagtgaggcatcttcagtgtgcacccatttatcgggatggcctcaggcgagatagggtgtgacttcaagtccggtagactattgactggccggtccttatacagtaaattctcgtctctgtggtcaactttactagctgtaaggcacagtcagtagcttaactgatgttcttctacatttgaagagttctccgtagtactactttatggatctgaactgaagtcctgtagaatatcagtgtcctgtacgtactgtacttactagaactgcgctagctatatgttagatactgtcggtaagactctacgattgcgctactcatactgacaatgtcctaacttacatatactcattcgttcatgaccctcctatgatgtgagttctgacttgcactcttgaggactcggacctgctaggctgatgagcctagaggtagattctccggccgcttacatagcacatgttacagtgccaactcgactgcgtatagcagcacactgtggcacagacgcgcacatagctatctcgtaggtgctacgacgcgtcatggtaacgatccaagccttgggcctttcaccttggctcc

SEQ ID NO: 582265 - DNA, 377 bp, Homo sapiens
gaggattcgtgactgattcagagagtccttcagctaggtctgtaaggaactgacgagctggggctttatcgtccctgcatttgcaatgcccctcccgcatttcaccccgtattaccgcctgtaggaatgtggaaactttcagccaaatagcgcagtcatcccataacggaggtcacctcacccaccatccacgggagtagacatggcggcgattcacatcggcatttccggctggcgctacacgccctggcgcgtggacttttaccccgaagtgctgacccaaaaacgcgagtggcagtttgcgtcacgcgccgtcaacagcatcgaaatcaacggctcgttctacgcgctagaagacccccaagcgctacgccgaa

SEQ ID NO: 582266 - DNA, 236 bp, Homo sapiens
gccttctattgtcccaggtgcacccacgggtctctgaacatacatcctagttagcttgctcccgcatcccgagcagcatttgagtctatatagtttagaaatagggttcatttgagccagcacactccctagcttccctatttgtagcctcgtagcactatggagtagtccactagtcctattacctagtatcccaagggctcctatctctagagacttcccagtctctcctgtat

SEQ ID NO: 582267 - DNA, 225 bp, Homo sapiens
gacggttcctgagacacccgattccacagatcaggacaactgaggtcgcgtcccccgcgcaggtgcacagtggaaggaccaggactgctctatgcagtggagtctttggctacagtcatcataggtcggagcgacacccggtgcgtcttttgaatgagcaccatgggattgtagctggcgggcacgagcagggcgctggcaccgtgtcgggcttcaggcggtggt

SEQ ID NO: 582268 - DNA, 839 bp, Homo sapiens
accagcatatgctgaggaggatgtggagcaacaggagctcccattcactgcacggtgggaatgcaaaatggcacaggcacttcagaagacagcctggcggtttcttacaaagctaaacatactcttaccatatgatcaagcaattgcaaccttgttgatttaccaaaaggagttgaaaacttacgtccacactaaaacctgtacatggatgttttagcagctttactgctaactgcgaaaatttagaatcagctaagatgtccttgtgtaggtgaggggctgaacagatacattctgacaatggaatattatttagtgctaaaaagaaatgctttatgaagccatgaaaagacatggaggaagctgggacgtatattgctaagcaaaggaagcaaatctgaaaatcctatatactgtatgattcccaatatgtaacattctggaaagggcaagactatagaacagaatacaagatcagtggttgccaggggtcagcaggcaggaaggaatgagtgggtggagcacagaggattttcagggcagtggaacaactccatatgacgctgtaaagcaaaatcatgtccttacacatttgttaaaacccaatgactgttcaaggccaagagtgagccctaatgtaactatggactttgggtgactggccaagagtgagccctaatgtactatggactctgggtgactagccagagtgagccctaatgtaactatggacttcaggtgactggcaacagggagcctaatgtacactatggacttcggggtgactggccaagaagtaagccctaattgtaactatggacttgggtgaattttaacca

SEQ ID NO: 582269 - DNA, 105 bp, Homo sapiens
accagtagtcagtccccttgtagttagtgggatatttgatactggttagatcatacttgtaaattttaatgctttgtgtattggtttgaaaaacagtgaaatggg

SEQ ID NO: 582270 - DNA, 303 bp, Homo sapiens
gccccaaaataaatactgaattgttccatttcattaaaattttaaaataagtgaaattaatctattgctgttaggatggtgattacctttcgggaggacagcaggacagtgattaggtggggcacagggagaataagcttctggggttactgataatttcctatttcttgtccaagaaatgtgtattctgcaatatgttaatcttatgatgtatcattgagctgtatacttataatttgtgtaattttctgtacatgttacatattaaaaagttcaaattgaaataaaacttcttaatcagtt

SEQ ID NO: 582271 - DNA, 1238 bp, Homo sapiens
  misc_feature (500)..(500): n is a, c, g, or t
tgacgccggtgcagctgggggggcccgggggccctggtggccctgggatggggaacctgcggtggcttcctgctggaggtttcggcagtggcatactggggccggggtctgcggccgtggacggggcctggggcctgaggccgctggagctcgcgggaggcaaggccagaggataaaggagtggatgcccgtaaccaagttgggccgcttggtcaaggacatgaagatcaagtcctggaggagatctatactctatctccctgcccattagggaatcggagatcattgatttcttcctgggggcctctctcaaggatgaggttggaagatatatgccagtgcacaacgcagaccctgtgccgggccagcgcaccgagtgttcaaggcatttggtggctaatcgggggactacaatgggccatgtaggacgtgggtgtacacgtgctccaaatggaggttggccaccggacaatccggtgggggccaatacatcgtaggcnaagcatctcacatacgtaccccgttagccgcagagggataactgggggggaacaaagaatcggaaagcccacagagtgttcccttttggcaaagggttgacaatgggcctgttgacggcatcctagtgcgtaggaacgcctacattccgcttgcaccccaaggtggcactagggcatcggactccggaaccttgtgccctaaaaaagctggctccttgatgggcgtggtaatcgggatagactggggtaacaacttcaaggcccgaggggcttaggattgggcaacctcatgggccaaatttttggacaaggtgccaccttttggattgcccattatctaaaagacctaacagggtaacctgagaccccgtggaactttgtggaaggcgcgctttgattcaaacaaaggttatcccctaaataggggagttcaggtgggcaaccttggtaagagaacccaaaaccaagaagatctttggtgggaggggactaagggcctcagggttgtgggtaaaccaaggtggttttaatcccgggaacaaaatggtgggtatcggggtgaaaacaaaaaataaagaaaagagtggggtaattgtgggtggacacggatatagggaggagaaatagatgacagcatttaaagggagaagggccctattattagaggctcaagtagagaggtagtaagaaagagaatagcgatagaaaggaggagagaagaacaagaaaataaagaaa

SEQ ID NO: 582272 - DNA, 425 bp, Homo sapiens
  misc_feature (65)..(65): n is a, c, g, or t
  misc_feature (73)..(73): n is a, c, g, or t
  misc_feature (96)..(96): n is a, c, g, or t
  misc_feature (110)..(110): n is a, c, g, or t
  misc_feature (112)..(112): n is a, c, g, or t
  misc_feature (159)..(159): n is a, c, g, or t
  misc_feature (183)..(183): n is a, c, g, or t
  misc_feature (198)..(198): n is a, c, g, or t
  misc_feature (204)..(204): n is a, c, g, or t
  misc_feature (309)..(309): n is a, c, g, or t
gctgcctgacccgaggaggacctgcacacaccctgctgacacgagcgcttatcaagctgttaccntctggttncttgctttgccagacagaattangtcccagacagtgnantgaattctataaagccggttctcctccttctgtgacctgccaccagnaaccacccaggggatggagtcacngagttcacaggcgcntctggnaggttctcatgaccagcccttgagactaagaatctgggtggcctaagctggattggattaatcacccaacgcctcatcatgggaccactgactgccaaaaccctnaaagctctacactcttggggtgtgagcagaaacagacacgtgcttaccactgctaacaggcatcagtaaatactatttaaatacatgcttgatcatcataagacattaaagatgtt

SEQ ID NO: 582273 - DNA, 113 bp, Homo sapiens
ggtccgatatgtgcatacatcaacgggcagatccagtccctccgacggcctttacagtctagttgggaagggagcgacaaatgtacaagcaacaagtatggtgcacaaggaaa

SEQ ID NO: 582274 - DNA, 1112 bp, Homo sapiens
ggacgcgtgggtcgcggacgcgtgtggtcgagccacgcgtgcgcaagtgcaactcattgggaagagcggtgccaagatcaacagaatcaaatgagcagtacaaggtgatcgcgtgcgcatccctcctgacagctgaagaactgagcaatattgatccgctatcgaggagggacccagagggacgtgcagtgaggtccaagctgagagctgcatggagcttgcatctcgcatggaaaatgagcgtaccaaaggatctaatcatggagcaaagatttcatcgcacaatgcatagggcagaagggtgaacggatccgtgacaattcgtgacaaattcaccagagagtcatcattaacgtgccagacccaggcacaaaaaagtgacaatagtccagcgtcacgaggaccatacgaaatgcaggtggaaaaactgcacaaaaagacatgcagaagatggtggctagatctaggtgtgacaactagctatacaagtttcaggtaccgcatcgtaacaaacagtaacgcctaggaatatcatctgggaagggagcgcgcaaaccataagacatgagccgaggccgcaccgaccaaaccaacatacccgacgctgtccagagagagaatacgcagacacgagaccagtgaatccatcaacaggcaaagcagagacaaacagccgagacagcccagacacaggatccagacgcaatccgaaaagaaactggcgaaaaaaataaaccgaaggcaagaaggacaacaagacactgacaaagcagggcacaaacgccggaaaggacacaaagagccggaagaaccacgcccatcagggacaacagaagagggaacaagccccacataccgcggacaggacggaggacacccaagagatagaaacaaagggagcccgcactgcgaaacggcgacaacaggcaaagacaacacaaagcccgctaacaccggaggagcaaggacaaaaaacggatgaccccggtaggacccagtcgcgaacgaagaacagcacaagcagcgcaaaaacatagcgcgagaccaacgaagggacacgacaagggggggcagactgacacgcagacagtgagagagagagcacacgtacc

SEQ ID NO: 582275 - DNA, 344 bp, Homo sapiens
agaggggtgggttgttgcaggctgcctagcaaagcgcccaccatgcttaggttaaatcaacaacagccgggtgcagtggcccacacctgtaatcccagcactttgggaggcctaggcgggtggatcacgaggtcaggagttcaagaccagcctggccaacatggtgaaaccccgtctctactaaaaatacaaaaattagccgggcatggtggcacacacctgtagtcccagctactcaggaggctgaggtgggagaatcacttgaacctgggaggtggaggttgcagtgagccaagatcacaccactgcactccagcctgggtaacagagtgagatcctgtctc

SEQ ID NO: 582276 - DNA, 290 bp, Homo sapiens
  misc_feature (116)..(116): n is a, c, g, or t
gacttcctggacatgggtcttcggcaaatacatcagaggaagatgccttgaacctgttgaaggacacaccaagtcttctcacaccacactgtacttgggtcacatctcacaaacanaagggcccttcagactcttagaacacctgttgcagactttaaggtacagctgaccaggaatacttctccccgaaagtggacagcatcctagatgcggacagctttcccaagatcacagatcaagacttttctgccattatgaaagccttgtgctttttgcttttttcctcttga

SEQ ID NO: 582277 - DNA, 362 bp, Homo sapiens
cactgcatttatttattaaataaaatatactcgagaacgtagtaacacatcttctacctagaatgagaaggaaaaaaaaacacaggctgatagggccaggacagacacattttactttaatgtaagaggtaagtatataaatcagatgcccatagtgtaattttaattttcagatacacatatctggggctgagataaggtcttcgggtagtaataacctcagaagactataaaatttggcagtatattatccctggctcagtggcctacttaactgttctaataaggacccagcagtacaacaataactcggctctaacaaaacaaaccagccttaaagaataggtaaggcacattcacac

SEQ ID NO: 582278 - DNA, 996 bp, Homo sapiens
ggacgcgtgggttgcggagcgtgggtcgaccacgcgtgcgatctactcctcattgtacccattctaatcgcaatggattcctaatgcttaccgaagaaaaattctaggctacatacaatacgcaaaggcccaagttgtaggcccctacgggtactacaaccttcgtgagccataaaatcttcacaaagagccctaaaaccgcacatctgccatcaccctctacatcgaccagccccgaccttagctctcaccatcagctcttctacctatgaacccccctccccgataccccaacccccttggtgaaccatcaactaggcctcctattgatacgtagccgagctctagcgtagccggcgactcgaatcctctagatcagggtgaagcataacacttcaaatacgccctgatcaggcagaccctggagagaggaagaacaaaacgaggtctcatatgaagttcaccgctagacatcataactattatacaagattactaataagatggatccttataagcatgtccaccctatgatcacaaccaaagaaaacacctctgataactcatgaatccaagacccaggcgcaaaatctgatagctcgacaacagtagcagaagaccacggaacccgcttcgaacttgcgaaaggggagacagaacaatcgtaaggctaacacaattgagataggaggaatgaccctggccctcatccatcgtggccgactgccaccaccgttatacgaacaaccacccatcacaccgccacaacaaaagagacagaagggacgcacacactacagtacgacaagttcggcccccaccacgcaaacgccgtgtaagatcagcacacgcgtcggccacgacaacccaataaacatccgaaccacacagaagaggcaacgaaacgacacccctacaaaaagacgcccaccggcgcgaccataagcgaacgaaacagcaacaaaagaacccaccacaaacagtgcaacaactcct

SEQ ID NO: 582279 - DNA, 929 bp, Homo sapiens
ggttcgttgggggaaactggatacgatgaacggtgctggaatgcagagtctggagggagcgtcatcggacagctctgaatcggcgtcccaatggtgccagagccgatcaccgatggtggtttgtgcatcccctcttacgtgctctatatcgacttcgctcgcggcagaagctagatcccgaagattgctgtggctgcgcggaactgctacaagagtgacgtaagtgtggcgctatttactgggtgagatcagccctggacatgatcaaagactgcggagccacttgtgtggtcctggggcactcagagatgaaggcatgtcttaggggagtcggatgagctgattgtggcagaaggtgtggccaggctctggcacagggactcggagtaatcggcgtggataggggagaagctagatgaacgggaatgcgtggctattcactggaggaagaggttgtttccgagctagacaatgggtcatcgctagtagtaagctgtaaaggactggagcaaggtcgtcctgtgcctatgatgcctgtctgggccatcttggtactaggcaagactgcaagacaccaataaggcccggatgtacacgacagaagctccggaggatggttgaagtcccaaagtctcgtgatgcggatgggctcaagagcacccggtatacttatggaggactctgtgactggggcactctgaaagagctggacagacagactgatgtggatggtaccatgtaaggtagaggaaccctcacgcccaaatcagggaagtatccatggccagtattagcccagtatttcctaaacttctgcaagccaggagaaagggccaaaccattaatggcttcccgaaattcgttagagagacaaggcatacgagcacacaaaggttcataggtaatacaaacattgtgcaggcagactc

SEQ ID NO: 582280 - DNA, 158 bp, Homo sapiens
actgcatgctgctggtcgtctctacaggtatccccctgtggactcagcggtgtagcgctgctggctcggctaatgaaactcccgagaataccggacaacgtgggacattggcttcgggcgcgctctaccgcattctgccactgatttggaagttactt

SEQ ID NO: 582281 - DNA, 285 bp, Homo sapiens
ttgagcaggctgatgctactggacccagtcgattttccttctttttttttgtgggaaacggtctcgcttggtcacctaggcgggggtataggggtgtagaacagggctcactgcaacctagacctccgggactcaagtgtttctcccatctcagcctcccgagtagcggggataacaggcttgtgccaccacacccagctaatttttggtattttaagcagagacaggatttctccagtgtgggtcaggggggtcttaaactcccaacctcaagtgatccgcccg

SEQ ID NO: 582282 - DNA, 356 bp, Homo sapiens
  misc_feature (85)..(85): n is a, c, g, or t
  misc_feature (351)..(351): n is a, c, g, or t
tgggaggccagggcaggagtatcattggaggttgggagtttgagaacagtctggttaatgttgagaaactgcatctctgcgtggnatacaaagtttagcagggcacgggggctcacacctgtaatcccagcactttgggaggctgaggcgggcacatcaggaggtcaggagtatgagaccagcctggccaacatggtaaaaccctgtctctgctaaaaataaaaaaattagccagacgtggtggcacatgcctgtaatcccagctactcaggaggctgaggcaggagaattgcttgaacctgggaggcggagtgcagtgagctgagattgcactactgcactccagcttgngcaat

SEQ ID NO: 582283 - DNA, 235 bp, Homo sapiens
  misc_feature (28)..(28): n is a, c, g, or t
cttcaggagaactatgcaggaggagtgntgcactttttactccaaccactaccacagctgcagaactattcaagtctttgaataattacttatcaggaaaacagaattggtcattttgtgttgatatattcatggaggaagtggctgccatgactggacagctttatgcttttactacttgagtcaaagaagcagctcctgaatctaattctctgaagatatacagactgctgag

SEQ ID NO: 582284 - DNA, 900 bp, Homo sapiens
  misc_feature (192)..(192): n is a, c, g, or t
  misc_feature (202)..(202): n is a, c, g, or t
  misc_feature (204)..(204): n is a, c, g, or t
  misc_feature (209)..(209): n is a, c, g, or t
  misc_feature (360)..(360): n is a, c, g, or t
  misc_feature (375)..(375): n is a, c, g, or t
  misc_feature (406)..(406): n is a, c, g, or t
  misc_feature (410)..(410): n is a, c, g, or t
  misc_feature (428)..(428): n is a, c, g, or t
  misc_feature (436)..(436): n is a, c, g, or t
  misc_feature (447)..(447): n is a, c, g, or t
  misc_feature (463)..(463): n is a, c, g, or t
  misc_feature (568)..(568): n is a, c, g, or t
  misc_feature (865)..(866): n is a, c, g, or t
  misc_feature (869)..(869): n is a, c, g, or t
  misc_feature (874)..(874): n is a, c, g, or t
gcgccattccggtgctgctatatttgtagtaagattctatattgtgcagaacatcatggatgatgttacagctttcctgctgcagcagtgacgctaagtaaagaggtgcatataagatctgtgtggatggcaactcatggcttgttgtcttctgacgccccccggcgatgtgaagagtctgccatgatgagntggtggtcancnatacnattccacatgaagtccagaagctccagtgccccaagattaaaactgtggatatcagcatgatcctttcagaggcgatccgtcggatccacaatggggagtccatgtcctaccttttcagaaacataggcttagatgactgagttttccttntaggaaaactccccngagggccaaactggaaacagtaagagtgacntgcntcggtgggatggatttcnacaggaanccgtcatgctntgttccctccctctcnccctgtaacctcacttcttattgatctcctaagaagatagaccaactttttatgtcggttgtggggtgttgtgtgagtttggggagcaatttttataaaagaaanactttattctcctcttttgaaaaggtaagacctcgttttagttgtaactgtttaaaaaataacacttggaataagatttgtaagctcacaaagccttcttccaaagttgcttgagccaagtgcttaaaaagttaataaaataaaatgatctgtatgatacctgcaattgaaaagccgaaaagattatactgtcaagtccagtaaatgacatttttagagatgcttttgtagacaagcatatggaatatgtgattgtatttattttctgcaactaaaaaaggaataaaaacttgtgtnngtntgttnttctaaactttgtgtttgtcagtccc

SEQ ID NO: 582285 - DNA, 1182 bp, Homo sapiens
ggagaggccggcagccacccagtctcggggtgagcacttagctcccccgacccggctccgcaccctgtcctggggtgtgctcctagaagccctcagaccccaacaccctggtgctcccacactggaatgcctagctgatgcccctagtgatgtgacgcaggacggacggtggcagtcaggcttgaattgcccactggtgctgcactgtgtgtgccccatgcagcaccgatccgctgactctctagaccagctttgaaccgtacatgtgccaccctagaatgacaagcaacaatagttggactaacgagatacaagagtatgatagaaaaaacacacacgagcagcgagggaccgcaaagaaacaagagaagagagcagagagaagagagaaggacaaagaagacacagcgagccgatagaggacaaaagagaagagaagaaagagacaacaaggagcaagacgaagagcaagagagagcagaatagaacaaaccagagaaggacgagagaagaaaagacagcaatagcagagaggagaagacaacaaaaagaaagaagaagaagagaggagaagaataaagaagagtgatgagcagcgagcaagacagaagatatagagatagaacaacgaagacaagagaagaaaaggagaagcagaaagagagaggaagagaagaagaaggaaagaaaggaagcagagaaaaaagaaagacagggcgaaaaaagaaagagtgaacgacgcagacgagagacagagagagacaaaggagacagagagagaagagaagagccaggaacagagacgagcgcgagagagagagcgaggagaggagcagaagaggagcgagagaaaggcaccatacaaacacagaaggagaaggcgagagaaaagaagagaggaagaaaggagagaagcagaggaggagagagaagatggctgataatgaaggagagcggagatataaagaagagagaagtggcgaatgaagagggaggagaaaagagagagagagggaagaagagtgacggcagaagaaagagagaagaggaggaggaggagcagaaggacaaagagaagaggagagacagagaaggcgaaagaaggagatcaagaagaaaagagaagaggaccagaaagaggaacacgcagtgtagcagaggagtgcaagaggagagagcagg

SEQ ID NO: 582286 - DNA, 121 bp, Homo sapiens
tccactcagctctgatgtagctggattaacaggcatgcaacatgtcccactcattttattttttattttttgtaagagatgggtttcaccatgttgtccaggctggtctcaaactcctggg

SEQ ID NO: 582287 - DNA, 147 bp, Homo sapiens
gacctaacaaaatattcgtggccacacgccggacagatagccacaggaaaaacacacaaagtgtcaaatgaacgtaaaaaatatagggagggtggaaaccaaaaaaattttcccctcaaccccaaaaaataaaaacccacctggata

SEQ ID NO: 582288 - DNA, 514 bp, Homo sapiens
  misc_feature (44)..(45): n is a, c, g, or t
  misc_feature (64)..(64): n is a, c, g, or t
  misc_feature (95)..(95): n is a, c, g, or t
  misc_feature (97)..(97): n is a, c, g, or t
  misc_feature (136)..(136): n is a, c, g, or t
  misc_feature (327)..(327): n is a, c, g, or t
cgatgatagagatgagaatgacatcatggttaggaaaatagatnnggaaccgacaatctggttngaatcctggctccaccatttactaactatgncnaggggctcaactctctgtgcctcagtttattcatgcatnaaatggggataaaaacagaacctatctcatagttacgtatagggttcggcaggattaaataattcaataaatacaaagtgatggaacacaataaggtctatgtaagtgcccactattattatcacaagtcatgggcatgggtgacagccacagtcagaccatatcttccaatgtcttatttgcaacatggnttaagaggagtggtatatgtggtaataacagcaaggaatattaagtgctttatatgagcctggttccatgccaagcacttaacatgaattagctccttaattattaacactagagatctggtattgagttcttatgcccattttgtagaaggaaaaaccaagattcagagaaatgaactgacatgtc

SEQ ID NO: 582289 - DNA, 363 bp, Homo sapiens
cggagtcgttcctgaacactatggcgtttgtttgtttgtttgttttgagactggggtttctttctctctgtcacctaggctcgagtgcagggcatgatcacggctcactgctgcctcgacctctcaggctcaagtgatcttcccacctcagcctcccaagtagctgggaccgcaggtgcacaccatcatgcctggctaatttttaaatttttggtagagttggggtctatgttgcctaggctggtctcaaactcttgaactcagacaatccttccatctcagcctcccaaagtgctgagattacagatgtgagccaccacaccatgattgcattcctggataacacgttcgcgagggggatcc

SEQ ID NO: 582290 - DNA, 191 bp, Homo sapiens
  misc_feature (102)..(102): n is a, c, g, or t
  misc_feature (157)..(157): n is a, c, g, or t
  misc_feature (166)..(166): n is a, c, g, or t
  misc_feature (186)..(186): n is a, c, g, or t
tctggttcccaggtctggtaccagtggaggacgtcagatccaaaggaaccttgagcagcaactgaattccagtgctctgctgagacatcaattagcattttnagcataagggcaatttgaataaaattctgtggattgtttgagaattctctaggtngaattaggnagtatgggtaggaattatcntaccc

SEQ ID NO: 582291 - DNA, 819 bp, Homo sapiens
agcggggaactgctgcagcgtgcgtgccgcctgccggaggaaccttggatccccgcgtgctccggtacaccccggtgcctcgccatggctgtaccatggctgcactgaaggatgcatggatttgcagacgtctcaaggaggccttctccctctttgacaaggatggagatggcactatcaccactcgaagggagttggggacagtgatagagatccctgtggacagaacccctctgatgcagagctgcaggatatgatcaatgatgcgttggatgcagatgggaacgtggaccatcgagcttcccggatgttcctgaccatggatggtccctgaaaagatgccattggaccgactgatcgaagtgaggaggacgatccgagaggtcgtcccgtgatctatttgacaatggcatgtggaagtggctactagtcatactgcgcgacaggagcatgccgctcacgatagatgatcgcataccctggggtgagaagcttgaccagatgatgaagttggcatgatgactgatcaggcggaaggctgatcagtcgatggaggatgcgccaggtcaagttatgaagacgtgagtagcagatgatgactgcaacatgtgaatggccccccggggcaagctggactgagtgcccggttcatctgtgatctctctcgttcatcgcgcgcgcactctctcttcaagcatgtcccctgtgtaccccggttctagcaaacaccaattgattgactgagaatctgataaagcaaccagcatgaattgtgtcccgggacctttcatgacataaaatattctcacagtagttcga

SEQ ID NO: 582292 - DNA, 259 bp, Homo sapiens
gccaccacacccagctaacttctgtgtttttggtggcgacggggtttcaccatgttggccaggctggtgtggactcctgacctcgggtgatccacccaccttggcctcctaaaatgttggtattacaggcgtgacacctgcaccccgccttcaatttttttaaccttttttttcttgagtttatcttcagttgtgaatattcatttatatatgtaatggattctagtctttttggccgtcatgtcataggtgtacatgc

SEQ ID NO: 582293 - DNA, 122 bp, Homo sapiens
tgcccgacgtgctgtcgcgccgatcacgacccagatctccaaggacacgggcgccaccctggtggtggaaaaccgtcccggcgccgccggcaacatcggtatcgcgctggtcaagcgcgccg

SEQ ID NO: 582294 - DNA, 339 bp, Homo sapiens
ttgttgctggggtgcatatgcttatatatgaatgtgtccaatcccccccccctccccgttctgtcccccattcaaggaatgacattctcagtcacccagagccatctggcctaccctctcaggaaatgggttgtcctgtagagttctctacccttttaaaggcaaaagtattgtgatgcaatactatcttaatgtccctatctgtggtgtgtgtgcacttgctgtgaccttcccagtagtccctccatgacagaaaacactcccatgagtctcgagggaaagccaagaataaatgtcactccagaacacattttttagcaataaaatggtgtcaaatgt

SEQ ID NO: 582295 - DNA, 222 bp, Homo sapiens
ccaggtaaggatggagacggagactaaatgaagacccttggctcaaagcagtaggctggccatggagaaaaatcaacaaccagaaggagcatggagtctggattcatttctccaggcttaagggtttttaagctacacttctctaacatctttaagtgaaattcttacttcccaaaggaatggtgtcaatatgtccttacctcgtgcgggggtacggagctc

SEQ ID NO: 582296 - DNA, 257 bp, Homo sapiens
tccgtctctactgcggtttgggtgaacaatctagggcgtgagaaaggttgacataagagagttgggaatcgatatggggtacaggtagtttatgccatggatgtgtaaattagaaccatgaagtgacaatgtgcaaatacaaaaaaaagaggccaggcacggtggctcatgcctgtaatcccagcactttgggaggccgaggtgggcggatcacgaggtcaggagatcaagaccatccgtggctgacacgttgagac

SEQ ID NO: 582297 - DNA, 111 bp, Homo sapiens
ttacaatcccacgatcacccaggtctgctcaaggaccctggggtgggaggcaaggctcgggctggtgctggggcacctgcagtgggtatgtggtagtagtcggggttgtaa

SEQ ID NO: 582298 - DNA, 160 bp, Homo sapiens
atggcgtaatggctgctcagtgtggagttcgggtgccgtgaagatcggcgactacggcctcgtgaagatcggcgattatggtatggtgtttcggcgtgtgcagtgaagatcgccgatcttcacgcgtgaagatcggcggttaggaccttcggcgtgtgca

SEQ ID NO: 582299 - DNA, 1297 bp, Homo sapiens
cccgccctggcgcccgccccgcggactgctgccacctacacacacctggcaaacacgccccctctcctacccaccgcaccgcaacctccacctaccaccacgccctacccgcgcgcactaccgcgccccgcgcgccccccctgcgcctgcgcccctcctcctcctaccaccgcacctacccacacaccctcccctgcacacaccccgagcccctggccgcgctcacaccctggccccgacccccctacccggcacgcctcctcacacagccgcccctggcgcgcctccgccgcgccaccccggcccccagcagcgcgccgcgcccgcctgcgccgcgccacgccctaacctctctctcctgggctcaagggcccctcgcgcaacacccgcgccgccgctcctcctcaacgcccctcgcccctcctctcgcgcacgccctggcacaccgcccctgcactctgctcccccaaccaagccaacggcccgctgactcacccgaacgaaccgcccctaacacccaccccggggcaccaaagctaaccctctcctacccccccccgccgcgcgggctgagccagcccgggctggcacacggctgccacgcggcggcgccccccaaccgagaccgcaccggaccgctcccccagcacaccgcacccacaccgaacgcggcctctcacgccccgaaaccgcgcccaaccggcacacacaacccccctgccaccccacctccgccacacacacaactgcaaccccaccgctgaaccaacgccccacgcgagacggggctacccctgaccaccggaccaaccagcgccgcggccacccacccagcataggccccccacgacgaggagcgtcgctacccacccggcacctcagcaggcacaccatccccgcctcacccccccaccccatcacgcacaccccaccaccccaacccccaccgacccactccccgcgcaagcacccccacaggcccacccacgcccagcaacccgccaccagcgaacacccgcccgcacccaccatcacccacacccccaacatcccacacccactcgccgaccgccccaccccccccactgccctccccgcccccccacccacaggccaacaccaacacctcacacacacacgcacaacccacaccgcccccactccccacccccctccgcccaccgtcacccccccccacaccagcccgcccaccacaacaccaccgacccccgcccactcctctgctctactagagtcccccccccacaccacccagtagcaccccccccaccccccc

SEQ ID NO: 582300 - DNA, 438 bp, Homo sapiens
cacccaggcgcacttctggctgaaggggggaggtgttactgaagcttgggcactcatgtgtgtgccctccccagtcccctatcctagtgtggccagtctcattaggcagccattgatcagcctggaacttggctgtcattagtgacttgatcctggtatgacatgcattctgcgtattaggttgctcgggtattttatttccttggccacaattcccatagatccccatcttttcgtatcgcctcagtctctcaatcgatctcttttgtttaccacgtgctatcacttagtgtgagtcaagaagtgcgcctgggtgccacccaggcgcacttctgcacccaggcgcacttctgggagatggtcgagaagaagaagggagtctcaggccagaaggatggtggtcagacggaatccaatgaggaaagcaaagaaaatcga

SEQ ID NO: 582301 - DNA, 382 bp, Homo sapiens
ggggtgcctgcctccatttcctgttcattttcagctggcctgccaggagccaacggggagcctggcgggaggcgggggtgcctaaagctttcaaaaagtgagagccccaacctgaggagtggacagggaccaggaagtgggggaagggaggccaggaaaaggtggatacaggagacccttttcttttcatttcagaccctagaggggtccccagatggggacccaagacccagccagccccctggatggcccgggcaagtaacaacctttttgtggttcatttgagggcccggtgagagttaccgtcggcctccccgggcctcccccctctttcatgtaaggggccaggtgttagtttttgaagatatttgcaaattataca

SEQ ID NO: 582302 - DNA, 674 bp, Homo sapiens
gaaaaaaacagataaaccagccatcagaataaaaaactttggggcttcaaaagacactatcaaaacagtgaaaagacaacccaacagaatgggaaaaaattgtttgcaaactataaacagtaataagttgcttgtatctagaatatataaagaacaattacaactcaagaataaaaagacaaatagcccaattcaaaaataagcaaaggatctgaagtagatatttctttaaaaaagatatacaaatggccaataagcacataaagaggtcctgaatattattagccatgggagaaatacaaatcaaaaccataatgagatatcacttcatgtctgctagggtagctttaattaaaaagtcagatgaggccgggcacggtggcccatgcctgtaatcccagcactttgggaggctgaggcaggtggatcatgaggtcaagagatcaagagcatcctgaccaacatggtgaaaccccgtctctactaaaaatacaaacattagctggtcatggtggcatatacctggagtctcagctacttgggaggctgaggcaggagaatcgcttgagcccaggaggcggaggttgcagtgagctgagatctcaccactgcactccagcctggtcgcctgagtgaagatcttgtgctcacacgacacacacacaacaaagggc

SEQ ID NO: 582303 - DNA, 148 bp, Homo sapiens
atcgcgtgcagagaaacagatcggccccagcagcgcgttaaggctttagtctcccaggaaaacagaagagccagcctgacaaagaggtggctggaggattcagagtcgctgtcaactgctcacagaggaggaactggtgtcaggggct

SEQ ID NO: 582304 - DNA, 137 bp, Homo sapiens
  misc_feature (1)..(1): n is a, c, g, or t
ngactctagaggatacactcgctattcatcggcacctcgctattcatcggcacctcgctattcatcggcacccccccgagtgttacagcccccccggcagcagcactcgccgaatcccggtgccgatgagcgaggtg

SEQ ID NO: 582305 - DNA, 319 bp, Homo sapiens
  misc_feature (33)..(33): n is a, c, g, or t
  misc_feature (43)..(43): n is a, c, g, or t
  misc_feature (77)..(77): n is a, c, g, or t
  misc_feature (82)..(82): n is a, c, g, or t
  misc_feature (120)..(120): n is a, c, g, or t
  misc_feature (164)..(164): n is a, c, g, or t
  misc_feature (172)..(172): n is a, c, g, or t
gaacggcctgtccaaagatcctctctcataggnacagcagaanagctttttacactttaaaaaaaaaaagacagaanagaanaggtcgaaatttcttttgggacaatatttaataagtgntgatcaggagatgcatcagtagcagcagcctatagcaagagctnataaatgnttgtgcaaattagcactctgctccccctctagtaaggatactagtagcacaacctcttccccccaccccgccccgccttttggtcgtccatccctgtccctttctggccctcttcctgtagcccaatctcaggctttcctctacctg

SEQ ID NO: 582306 - DNA, 834 bp, Homo sapiens
  misc_feature (700)..(700): n is a, c, g, or t
gggcagaggttgggaagatggcgtggacgaggctgggcgcagataggctggggctgcggccaggcgtggggtgcgttggtgggcggtcgcagtctgcgaggagctcactgcggtcctaaccccgccgcagatcctcggacgcaggtttaacttctttattgcagctaaaaaatgcgtgattcagaaaatgcacccaggtaatggttgaacctcgtagatgatcagacccaagggacacaggtggtgaaggctatacaagagaagtgctttgattcctcctgtggacgaagcagtcttttgatctcttctccctctatcgctataaggagtcctcataaggacctttatttgtttagcatgtagggtttacagggttgtgcttttggatcagctgctatttgggcaactatgaagtcagtgaaagtccagggtccacgatgttattttgaatggtataataatgctgatgggttggatagtgataagatcagaagaaggaacggagattgcgagaaaggaggtatgaactacacgttgggtggaataacccgtaagttgactgtgccagtcggatctgttgaccgggctatgagtacgcctggtacacactgttgcattgttactcctggcagatgggcatgagtacactttcttcttggcaaagaggtacaattgatcagaatatatgcaccattcgaantccgagacctgcatgatggtccttgtgtaacgtaccgatatgttgcatggtcgaatcagttccatgtctatcgtcctcccttattctcacatgtgcgaagtgaatatgtatggtctcgtggagcttctcttcca

SEQ ID NO: 582307 - DNA, 114 bp, Homo sapiens
tatgctgatggcatatagagtattctcgaggggatcttggtgactgttctgactttagaagcacttcctgtggacgatggagggccctgcctcatcatactcaggcttgctgat

SEQ ID NO: 582308 - DNA, 317 bp, Homo sapiens
tgcatggcacggcgttgaggcggtgcttttccttttctcattggcggaagccgccgccgtctaggcggcagaggcgtccgcttgcttcaccgaaggagaacgagaagagaccccctttcccttctgttgcaggcaatggaaagggcaggtttggggtgaggaggaagcaacgtgaaaaaatcgacgacggccgcattgatggccatatcgatgctcattggggcgggagggacgtacgctggccttcagttggcggaccgcccgatggaaggctcgctttcgacgattgtttcgaatgagccgtccaagtcgacgaa

SEQ ID NO: 582309 - DNA, 347 bp, Homo sapiens
agagatatactaagtcgcgttgagacagctgcacatgcataaccgtctacaaaatgcaaaataggcgatgtgtgcacgctctagatccagcactcggaggtgagtggagaacgctgaaccgtgagtgaggctcagtgagatgagacggtgcactgactccagctaggttgacagattaggctccgtctcaaaacacacacacacacacacacacacgaaaagaggttgacgaataaggtcagatagaccatcttaggcttgagggttacaagagtggcaataacatatgtcagttcttacagtatctccttaatcacatctgtaaggactgggtacattaaaaacaa

SEQ ID NO: 582310 - DNA, 140 bp, Homo sapiens
  misc_feature (123)..(123): n is a, c, g, or t
acatacgactgcaaatatccttcaaaaccaaagaaatttctcaacaacaaaattaaggctgggcaaggtggttcatgcctgtagtcctaatgcttcgggaggctgaggcaggagaatgtcgtngaacccagagaggcgga

SEQ ID NO: 582311 - DNA, 160 bp, Homo sapiens
cgcttcacttgttggtctctgcatacggtacgaaccagtgcaggggtcaagaagcactgaccctgaacctgggaggcggggcacactgcctaacactgttctctgctgcacgccccatgtatcaccacgcgggaagcaaatgggttaacaacagatcctg

SEQ ID NO: 582312 - DNA, 679 bp, Homo sapiens
  misc_feature (1)..(1): n is a, c, g, or t
  misc_feature (72)..(72): n is a, c, g, or t
  misc_feature (100)..(100): n is a, c, g, or t
  misc_feature (107)..(107): n is a, c, g, or t
  misc_feature (109)..(109): n is a, c, g, or t
  misc_feature (129)..(129): n is a, c, g, or t
  misc_feature (138)..(138): n is a, c, g, or t
  misc_feature (145)..(145): n is a, c, g, or t
  misc_feature (153)..(153): n is a, c, g, or t
  misc_feature (156)..(156): n is a, c, g, or t
  misc_feature (160)..(161): n is a, c, g, or t
  misc_feature (170)..(170): n is a, c, g, or t
  misc_feature (181)..(181): n is a, c, g, or t
  misc_feature (186)..(186): n is a, c, g, or t
  misc_feature (190)..(190): n is a, c, g, or t
  misc_feature (193)..(193): n is a, c, g, or t
  misc_feature (195)..(195): n is a, c, g, or t
  misc_feature (200)..(200): n is a, c, g, or t
  misc_feature (223)..(223): n is a, c, g, or t
  misc_feature (234)..(234): n is a, c, g, or t
  misc_feature (252)..(252): n is a, c, g, or t
  misc_feature (273)..(273): n is a, c, g, or t
  misc_feature (275)..(276): n is a, c, g, or t
  misc_feature (300)..(300): n is a, c, g, or t
  misc_feature (302)..(302): n is a, c, g, or t
  misc_feature (359)..(359): n is a, c, g, or t
  misc_feature (526)..(526): n is a, c, g, or t
  misc_feature (560)..(560): n is a, c, g, or t
  misc_feature (668)..(668): n is a, c, g, or t
nggaacttaagttcacttcactgcaaagtgacctgagaacaccctctagtggaaattattaataaaacaaanaccatgcgcctaattcaccttctgatanaagaatngnttttaaattccccaaaaaanggaaaaaanaaaaaanaaaaaaanaanaaannatctttaanaacacaaaaanaattntcanaangnaggantacccacccatgcttagtacccngactgccaaancacattccttcctcaganactctgactttaatatattcnannaaagggagaaatgtcgtggggggngngacttgtccccttaaattttgggcagactgcctgctggtgccagaatgatgccaaanacatagaaaagtcccagcaggaggttgagcttggcagttctctggggcagtttgttgaaggcctggcttcgaaactgtctctcaagggagaaggccatgggaatggtaagcagggggagtgccaggctgagggtgcgagtgtgtggccaggatgctgaagaccaggnagggcagggagagcagtgtgttgtagagaatgtnggagaacgtggggccgatgaggatggccagcgtgacgataccagcctcccggtcggactccatgtccctggtgttgttggaatggagaatggcctcggtgctgagggngagggggatgg

SEQ ID NO: 582313 - DNA, 1856 bp, Homo sapiens
  misc_feature (276)..(276): n is a, c, g, or t
  misc_feature (500)..(500): n is a, c, g, or t
ggatggagaggagacggatcagcctaccggtaggtcgaccgctcctacgtgtcctacaggggagaggatggtgggggtgccttgtgttctcctgtgccgccgttcgtgggtctcgtggccgcctcgtcctgtcctctggtgtctgggatgtcctcctctcctacctactccgaacccggtgtgagtactatactaccgcatggccttgggagtcagctcgaactgcgtaggctttcaaggtggaacggcgcgcgcgaacggtggtaggactgctgnctatgaatggagtgcaatggagtacgccatgcatagtagtaccgcgggtttgggactcgaggcgtaactattccgaacgcaaacggttgtctggctatggctggaaaccatgctagagaaccaaggacgtctggctgtagctgccgtctggaacacacagggctcgactggggtcctacgggcaagctcgcgcataccacagcgctatggccacgatacgaatnctatgcaagagtgtgagaagggctagaaggcagaaaggtgtggtgccatagcagtgcgtgcagaattgcagagtttcaaccccgtatcaacaagtcgtccaccggaacatgggaacggggttcgccacgcagggggaccgagagtcactggcacgaggcaggagaaccactgcgagttgcgagccatggtttgagagacggtgcgagccaaacgtcttcaccaaggggtaaatgggtacaccatcttccacattttccgtagaaatgtggtgataggcgccacaaggcccgggcacgtacagacacacagcgcggtgggtggcatgcgccctccataaggataaccaagggcaagaggccgagcgaattcgcacaggggccacactccaccttgtcgcccctccagttaccatagggactccctagggagggggaaggggaacaccgatgaccggcaaatcgggcattgggaaggggcaagggtaaggtaaccccgtggggtctctcttattggccaagcgcgacatcgaatacccgggtggaaaagaggaaaggagcaaaggggaaccgaggggcaaaacctcccccaaaggaacgcaaagtgcgtgggtcccccgaaggctagagcccagaggcatccgcacggggatgcgagaggcgttgggccgcgattgtgacccccaccgacccatttaacctggtcaccctgaggaaagggctgcccctggacaaagcgaagaattcccacggaaacgaccacatacacggtagagcgcaaaatggggcgaagactgagcaacacacaataagtggaccagtgacaacacggcgtgaccaaaagggtggagagcccggaaccacaacatgtggccagggaacgcggtatcaacagaacggatacgcccagctaccggcccaattgcggggaaggggagtcacacgcgacacacgagagcgaggtagccaataacgggtggacagccgacccacccgttaggtcgccgttgtagaatgcgccgcagaatcactgggcaaacaagcgggagggaaacccaggcccagggagaaacaacagatccccgacgaaacaaacctcatctcgcgcaaacaaccaccgcgagcacacacagatggcgaacggaaccacatacaaacgaggcacgagcgaacaacaaccaagagcaaaacaccggcacacgcacgcagcacagtctgaatacaaacacagagaactgatcagatgagagaacaaaccaccgccacaaccaagtcggcgaggcccgcagcggacgagtacacacgactagcatacgacaaaacgccacatgagttcagatcgcatagaacgccgcagtt

SEQ ID NO: 582314 - DNA, 853 bp, Homo sapiens
gtgcgctgcacctcgaatcgggttgtgaccgaaatgatatagattgtgtggccgtttcgtgcaaaaactcggggatgctctgccggaggagattcgggagcccgctctgagagatgagcagtatggacttttgaattagttgtgcaagagaatatcagaaattaattgggcaatgcttggtcaggaagttttcagataattgttcttatgtgagttctgtaacatcaatagtagattgaagatacagtttgagtgataatctatagttatgagtatagacgcataagaatgtaagcagttattccaaaaagatcttggattgtgtcatcaataatacataacaaggcagagaataagaagattgctgaagcaagtactcatccctgtctgtagccatccactggacctaaaatatgaccctgatccagaccccttcatatggaaacttgtgaacaatgccgacggggaacactgtggcaatagggacgagtcagtgaaggtcatgaagtcctgtgactctgtattaatttgagcaaggagagggatctgcccgagttctggcaggatgcagctgttattcagacttcagaggattcagacaagaagtcttgttcgagttgtccatagggataccgaggatgtaaatctgagaagtttattgcacagattggaaacctaatcaaaagagaatgctttcaggtaaaagctctgacatggtactgaaaaagagagaaattaaagatgtccccagatgaaatggggttcattggggcaagaaattaattgttcatggaatttcggctggcttgggggttggaataggggctaaattgattaagtattaactggaaga

SEQ ID NO: 582315 - DNA, 725 bp, Homo sapiens
  misc_feature (666)..(666): n is a, c, g, or t
gcaatgtgaaggccaaaactaactgaggggccccttttccgagtgaatcccctatcactccgccttttctgcaaaatcgccttcttactcctacgccaatctctgttcaacctcgacaactccacctaattcctcttggccctaggtgtccttgtagtgtcgctgtagctctgtcagtactttgcaagtttacggtgaagctgtctgtctggtatctccttacttcatgctctggtgctccttggcttcggttctcgtcaaacatcactgtaggggcttggatgtgtcagtgaagcgtgaggagagtctcatggctatctctttctcagttggttgatagatatgttgaaaacatcttggcttcagggaggggttgcctgcaggcctgcacttgaggtggccccaccaggagaagcatctcctaaggatgatcttttctgatgcctagaggcctggttcttggggtgaggaagagggaggtatggacatgtcttaaaatctcatatctccttaccaaggctcccggttgggtggatcgtatgtttagaggggcttaggatagtcagcgtgctgactggggtatagaaagaaaattcagatgtccttagcctagcccttgtagtcagaatcaccatggtacagcaaagaacagagtgatgggaaatntacatgagatggctggagtctgtattctgatttagactcaataaagtttttggattgaa

SEQ ID NO: 582316 - DNA, 126 bp, Homo sapiens
tgcagatgtatctccaggcttagcaatccagtttttgtttcttgtttttcgtttatttgtttattagtgatttttgagacagagtctagttctgtcacccagtctacagtgcagtggcgtgatctt

SEQ ID NO: 582317 - DNA, 479 bp, Homo sapiens
ggctcggccccagttacacagctgagcagtatccatcatatattatatatatgacacatatatacatacttatatacatatatatacacacacacacactatcgtatatacatatatacacacagcagtttatccattcgttgataggcatttgggttgcttccatgattttacacttgtgaattgtgctgctataaacatacatgtgcaagcatctttttcaaatgacttcttttcctctgggtagatatccagtagtgggactgctggatcaaatggtagttctactcttagttctttaaggaatctccacactgttttccagagtggctgtactagtttacattcccacagcagtgtaaatgtgttgcctgatcactgcatccacgccaacatctactgtttttttatttttttattatggccattcttgcaggagtaaggtggtatcacattgtggttttgatgtgcacttccct

SEQ ID NO: 582318 - DNA, 326 bp, Homo sapiens
gctgtttgaagagacgactcaagggcatgctctacacctacctgacgtcatgtcgagtacttggaccaccggcggaagccagccagatcacccagcagtccaccaaccagagtcgcaatcccgacaccaccaaccagacggagtttgagcgcgtcctctgagggccggcgcttgccactagggctcttgtgtaaatactcttctgctatgtgacttgcatcgtggagacagggccatttgagtttatatctctcatgcatattctatataattccccaccctgggctctgggagcagcccgctgagtggactggagtggagcattg

SEQ ID NO: 582319 - DNA, 106 bp, Homo sapiens
tccatttttatctggggctgaagctttggcactatgctttttacattaggaacgactgagcaggctcaggctaatctcatctgcattaagctgggcaagggcaatg

SEQ ID NO: 582320 - DNA, 421 bp, Homo sapiens
cacgaggggcgatggtgtctgatcggggtaccacctcagtgaagcctgtgcggtccccggtggggaggcagtcatcgggggtcatcctcaggtccagcccctcctgcttccacaggacgtccatgatgctggatcatctgcagggtcaggatgtcctgccggaggtcatccccgttcttaaagattatgcccattctggcgccgctgtgtgcctccgcgttggtgtacatgatccacaggggcttcatcttggattccatgaatgtgtactgctccacgcagacttcaatcagcatggtgctggggtcgagtggggactgtaggtggtatagggcctctaggtatgtctcctgccgcatgcacttgtgcatcatgtccttggtctggggcttgggggtcttctgagagctcaacttgacga

SEQ ID NO: 582321 - DNA, 1085 bp, Homo sapiens
ttccacgcggccgtgtttgtccctctgtggcctttttttggtcgcctcattggccgcgtgtgtccgcaaaaaaccggcggtgggcccgggtcgggagtttcccgggggaagtgtcgctgggccccaggcggtgcccgaaaatgtggtgtaaccccttcccctctggccccctttgcaaggggcgcccgtttctggccccctcctgtgtgtgccctcccgggcttacaccaaggtgagtgtgaacggccaggtcgcggttacggctccttcagtgctaggcctttttgcccctccccgctggcccgtatggcccgatgatgggcgccggaatgtaacccgagggatagcaccaattccacaggcccaccacacacccaccgtggtcccaaaagggcctttcggatacgggataatccctatttagttaccctccgaaagtgttgtttgtcttctccacggattttgttcctgagccccttttagccacctccacgccctatgcccctctatcgcccccccactttaggagggcacactgggccccccacacacggcactcacccccgccttagatttcccgctatgagaggtgcccaccgtcgcttaacaccactccgctatttatctcgccactcacggagttatttcacattcaccctgaggcctcacccacatatgttttataatatgaaaaccacacccgcaaaccccacacattataattcacagcccaccgtggccttatttaccacaattttaactcgggttcttctattttaaccctccctaccacagccctccacgagtaactttcgaagttctccccttcacccacttttccgaccggcaattctacggctcacaaacttttttgtaaccacacacggcttccccggacttcaccgtcactctaattggctcaaactttcctcacctatctgcttcaatcccccacactaatattttcacctttaacacatccacaaacactcacctttggcttcgaaacccccccctgatactggccttttgtagatagtggtttgactatttctgtatgtctccctctcttgatgagggtctta

SEQ ID NO: 582322 - DNA, 389 bp, Homo sapiens
atgtattgaggacagaaaacatagaggctgcctcagaccacatgcctagtttagcagattatgtgcatttgtgagggacattttgtggattccttaaagataaccagtggtgggttctgatgggaatatattccctcatctggactaggccaattggaagcagtctctttcagttcacctccgtacagcacaagttgttcctgctcatgacctcattgtaggaaaatgagaattgtggtgctggtgactttcatgtgtcttgggaggcttgaggtgttcaacatcgttactggcatccccttacgcaaacctcctttttttaaatgccaattgtacatctacattaattcatctatgccaacttgtgttttcatggtttgttttttaca

SEQ ID NO: 582323 - DNA, 434 bp, Homo sapiens
  misc_feature (9)..(9): n is a, c, g, or t
  misc_feature (172)..(172): n is a, c, g, or t
  misc_feature (394)..(394): n is a, c, g, or t
  misc_feature (422)..(422): n is a, c, g, or t
aggttagtncccttagttccccatgttaatatttttaatatgtcctaaggagtgaaggaatgccctgatgaaatttctttcctaggtctgcctactaatcagcacttttatatcctcatcctgaaagataggaagattttaaaagataaaaacattttaggctgggtgtggntgtcacgcctgtaatcccagcactttgggaggccaaggcgggtggatcacccgaggtcaggcattcgagaccagcctggccaacatggtgaagccctgtctctactaaaaatacaaaaattagccaggtgtggtggcgggcacctgtaatcccaggtactcaggaggatgaggcaggagaatcacttgaacctgggaggcagaggttgcagtgagccgagantctgccactgcactccagcctgggcaancaggctccgtct

SEQ ID NO: 582324 - DNA, 711 bp, Homo sapiens
gtttcccaggctggagtgcaatggcataatttttggttcaccaaaacctccaccttctgggttcaagtaactctccttagtagctgggattacagggctgcaccacacacctggctaattttgtatttttagtagagatggggtttctcccattgtttggtcaggctggtcctccaatcctcccttgaaccctcagggttgggtcttgcctgctttgggcctccccaaagtgtttgggggtttcaccagggcattgaagccccaaccttgtttggccccttggggggcctttgggaaaaaactcgcacaacaaacacaagggggccccctttatttgtgcttatcgtgtcaacaaaaacgggggggccacacacacgggggttttatgcgccttcccagaaaaaggcacgccccccgttgattaaaattttgaccccaagcgaagtttaaagctttcccaaggttaacgtttggggcaccggaaggaaaaaaccccggttaagcaaaaggcttggtttgaaccaaggcacaattggcttggcggccaaacaggccccatggcgttaaaccaaaggggttcccttccccaaaacttctccacgtcatttcgacacaactttctgtggtcgctgatcaaactctcatcacgcctgcggggaagcctaatgtctgccatacctaagacacttctttcgtctttgttaacaaaag

SEQ ID NO: 582325 - DNA, 402 bp, Homo sapiens
aaacgatgatagagcttagtgagcaaggcagtcaaaagcagaggaaggcgggtgcagcagcatcatgcctgtgtacccagcacagtgggcagctgagagaaggagggtgcgatgagcccaggagttcaaggtcggcctggacaacacggaccccatctctacaaaaaataaatttaaaaaattagatgggcatggtgatgagtgcctgtagtcccagcaacccaggaggctgaggtgggaggatcccttgagctcaggaggttgaggctgcagtgagccatgatcgtgccactgcactccagcctgggcgaccgagcacgactccgtctcaaacaataacacaccacaaacaataggtgaacattccttataactccaggttgggctcagccgacgggacgg

SEQ ID NO: 582326 - DNA, 425 bp, Homo sapiens
  misc_feature (1)..(1): n is a, c, g, or t
  misc_feature (8)..(8): n is a, c, g, or t
  misc_feature (60)..(60): n is a, c, g, or t
  misc_feature (274)..(274): n is a, c, g, or t
  misc_feature (316)..(316): n is a, c, g, or t
  misc_feature (366)..(366): n is a, c, g, or t
  misc_feature (385)..(385): n is a, c, g, or t
  misc_feature (393)..(393): n is a, c, g, or t
nattcggnacgaggggtttcaccatcttggccaggctggtcttgaactcctgacctcatnatccacctgcctcagcctcccaaagtgctgggattacaggcacgagccaccgcacccagcccatagtccctttttaaaggcactggtgtgggccttctttttttttttttttgagacgagtcttgattgatctgtcacccaggctggagtgcagtggcactatctcggctcactgcaacctccgcctcccgggttcaagtgattctcctgcctnagcctcccgagtagctgggactacaggtgcccaccaccacgnctggctaactttttgtatttttactagagacagggtttcaccacattggntcctgaccttgtgatccgnccgtgttnggccttcccaaagttactggggatttacaggg

SEQ ID NO: 582327 - DNA, 136 bp, Homo sapiens
cattgacatgctcggagttccctctgtgtcatcgaccgcctctcactgactagttgactgcatcgatccacactgtcgtttcctggtcgccacacccaattccttgtctggctatcatgtgcaagtctggcgacgt

SEQ ID NO: 582328 - DNA, 701 bp, Homo sapiens
gtgctggggagactcccatgagtaccgcctctgccagttgccagactgccccccagggctgtgcccttccgagacctacagtgtgccctgtagcaatggccgccctgtgcctgggcacccagaagacctaccagtggtgtgccctttccatggggcgcccaacctatgtgcgatccttcaacgtgcctggtctgaggggcatcgcctttctatccactagcgttcggaccgctgttccttggactggctaccgcctgtcagctccgtggtgcccaggggggtctgcgtggctggccgctgccttagcgccgtgctgtgatggggttgttcgggctctggggtgccctcgtaggtaccgactgtggtccgtctgtcggaggctgctcaacgactcgtgccttttcgtgcggcgcgtgtttcgtgacgccggtgccttcgctgggtactggaagcgtgaccctgatccccgagggcgccagacacatccgcgtggaacgacaggagccgcagagcacctgggcactgatggggggcgatgggcgctacgtgtcttaagtgggcactgggtggtcagtccaccaggacctacgaggtcggcggcacgcatgtggtctacacccgagacacagggcccaggagacgttgcaagcagccgggccactcccatgacctgctcctacaggtctcctgcggagccaacc

SEQ ID NO: 582329 - DNA, 276 bp, Homo sapiens
  misc_feature (215)..(215): n is a, c, g, or t
  misc_feature (245)..(245): n is a, c, g, or t
tatcggtagaagtcgtgctggcgggcgtgggccaggtgggcaccaccaccctctaccccaccgcggtcatctcgccgggcaatgacggctcgcccattggcacgctgacggtcaacggcaacctcacgttcggcgaaagcaccatctatcgcgtgcacgccgacccggcaagcaccgccagcgaccgcatccacgtcacgggcgtggcctatctngacggctccgtggctcacgtcggccccganggcaactatgcaccgcgcacgagcgggtacc

SEQ ID NO: 582330 - DNA, 233 bp, Homo sapiens
actgcccgtgggggggcggcagaatcactgtggctccaggtgggagtcttctgctgctttatagtccagaagcccactatgctgaagaatatgttagagactgatgtatttctcgggggagagatggtaggtcacgctgtgcataggtaaaatatacatatatatgatgcatctaactgggactatggggagagagccctccaaaagacctctgagcctcagaggcagactga

SEQ ID NO: 582331 - DNA, 618 bp, Homo sapiens
  misc_feature (38)..(38): n is a, c, g, or t
  misc_feature (214)..(214): n is a, c, g, or t
ccagtccaccgtccccattgtgggcatagtgctgggcntggcgttcctaccagtgtggtacatcgaaactgtggtcgcctctgtaatgtgtagaggaaagagctcaggtggaaaaggagggagctactccaaggcggcgtgcagcgacagtgcccagggcttttatgtgtttttcacagcttgaaaagcctgagccagttgttttgtgagggantgagaagcaggattttttcacgcctcccctttgggacttcaagagccttgggcatttttttttgcaaaggcacctgaaggggtttgggtccctgttagcataatgtgaggaggtggagagacagcccacccttgggtcccctgtgacccctgttcccaaggtgacctgggtttcctccccagtcattttttttgttccaaaaaggtggggcgggatgtttccatctctgtttcaactttagggggcctggggggcaactttttacttccctactgaaaataagaatttgaaaaaaaatttgttttttcaaaaatttgctatgagggggtgagggattaattaaaaaaggcaattccgggaatttgagagggcaaataaagacctgagacccttccagaatttga

SEQ ID NO: 582332 - DNA, 432 bp, Homo sapiens
atgaccaccaatcacatgcctatcatatagtaaaaccagcccatgaccctaacaggggcctctcagccctcctaatgacctccggctagccatgtgattacttcactaccataagctcctcatactagctactaacaacacactaaccatataccaatgatggcgcgatgtaacacgagaaagcaccataccaaggcacacacaccacctgtccaaaaaggccttcgatacgggataatcctatttattactcagaaattttttatagcagattatgagcttttacactccagctagccctaacccccaaataggagggcactgcccccaacaggcatcagccctgtaagtccctagaagtcgcactcttaaaacagatccgtatgactccgctcaggaagtatcatcactgagccaccatagtctaataga

SEQ ID NO: 582333 - DNA, 239 bp, Homo sapiens
ttttttaaaaatgaaaaggtttataatttccctccagtaaaacccccctttttagggtctagtctgtgaattttgccaaaggcagggtttgggaccccatcgataggccggttttgccccccgggccattcccctcggttccttggttcctctcttttccggcccccaagcaaccccgggggttttcgggccccctggttccttgcccttttttttaaaataaaattttttaaaatcta

SEQ ID NO: 582334 - DNA, 116 bp, Homo sapiens
tcagctcggcctgattcaccttcacatttacagtatagaaaagcacactccatgagaattcacgtgtggtatagggtggtatatgggtgtgtatatgggtggtatggtggtatagt

SEQ ID NO: 582335 - DNA, 165 bp, Homo sapiens
cctcaaggtctccccaaagcagtgactactcacagcaagggcattggccctctaggggcagaagctgcctagttcttacctgaagaaactcctactgacaggcagatcacattggccctatagcaggcagtcaggctagtgggcacacacaagggcccctcttca

SEQ ID NO: 582336 - DNA, 806 bp, Homo sapiens
tctccaacaaaagtcagactctcacaccactcacgctcttatgcagggtgctccaccagcattatcttattccaacctcaccttggggtaagccacctctcctctctccaggaacactcacaaactcgtcattacttatgtcaactatttttctccttccatatgttatattcttttgtgttacactcgcacaattccagccgagaacatattttttttcacacgccccccactcactctcacacaagaaaatagaaatgccttactctctttctgaaggaggagaggtatttatgttcaagaaacttcttcttgtcttatatagacaaacttagccaggacactccacccatttctactactctagtcttcccacacacacacacaattttgtcgtcactcgcgtacagaatttaagatctcacttccaatttttttagtgacacacacacacgcaccctcttgggctctctctatcttcctatatattaacctacacacacaagccattacatttttaatcctcacactcaacttcgaaggtatgatatcgtgctgccactctcacatctatttatatataaaactatctatcactcaccccactgcccaccttattgttcctatgactcccttctgtataaataatggagaataaaatgtggtagtaactactctttctattctgcgctctcttgtcttagaagtactattagaacacaatattattgtttcttatataagtactatgaaaattaatagatgcaaatcaataaacaaccaacaaatacaatagaaccaaaaca

SEQ ID NO: 582337 - DNA, 191 bp, Homo sapiens
tggtgcgatggatgccagactccagtgaacccacaacggatggtgaagtgacgagagctcggtggcctccatcctgaacttgtactcacacctccgtgggtccctgcatgtgacacgcagggtcatgctgcacccagtggcagtggccaggctcctggcgccccatggccccccatccagtccggtgttct

SEQ ID NO: 582338 - DNA, 317 bp, Homo sapiens
  misc_feature (20)..(20): n is a, c, g, or t
  misc_feature (82)..(82): n is a, c, g, or t
  misc_feature (184)..(184): n is a, c, g, or t
  misc_feature (193)..(193): n is a, c, g, or t
  misc_feature (206)..(209): n is a, c, g, or t
  misc_feature (219)..(219): n is a, c, g, or t
  misc_feature (227)..(227): n is a, c, g, or t
  misc_feature (230)..(230): n is a, c, g, or t
  misc_feature (240)..(240): n is a, c, g, or t
  misc_feature (248)..(249): n is a, c, g, or t
  misc_feature (270)..(270): n is a, c, g, or t
  misc_feature (272)..(272): n is a, c, g, or t
  misc_feature (274)..(275): n is a, c, g, or t
  misc_feature (280)..(280): n is a, c, g, or t
  misc_feature (293)..(293): n is a, c, g, or t
  misc_feature (295)..(296): n is a, c, g, or t
  misc_feature (311)..(312): n is a, c, g, or t
agaacctattcatttttggnttgtgtttagcttaaattttatcattaaattaaggggcccacaacaaaatgtgttgccagcngccatatcccaagcccctgcgtgaagaatgttttggctgctatttcaacctaagggaacaacgtttgacctcagtcaccttaaaatgccagtgtgggcagangattttttnttcctcacaattnnnnaccaaacggnaccccctnggntcttgagggncctatttnngagaatcttcatatatgcgangngnngccanaatggatacgttngnntcagttatcattgcnncccag

SEQ ID NO: 582339 - DNA, 279 bp, Homo sapiens
  misc_feature (199)..(199): n is a, c, g, or t
  misc_feature (212)..(212): n is a, c, g, or t
  misc_feature (257)..(257): n is a, c, g, or t
aaaggaatatttatccctttaaatgtattcagaaagccagcactttggggggccggggcggatggatcacctgaggtcaggagttcgagaccagcttggccaacatggtgaaaccctgtctctgctgagaatacgattggctggacctagtggcgggcgcctgtagtcccagctgctagggaggctgggacaggggagncgtttgaacccangaggcggaggttgcagtgagccaagattgcgccattgcactccancctgggtgacggcctctgtctc

SEQ ID NO: 582340 - DNA, 226 bp, Homo sapiens
  misc_feature (2)..(2): n is a, c, g, or t
cngtggggcatgggtgctcggaccacttatggagtaccaagatctatggatgctcaagtccctgatataaaatggtggactatttgcatataacctgtgtacatcccggtattatttaaatcacccctagatcacttataatacgtaatacaatgtaaatgccatgtaaataacctgttatactgtcattaaggaataacaacaagaaaacagtacatgttcagtc

SEQ ID NO: 582341 - DNA, 200 bp, Homo sapiens
tacgtcaacggactcagcagatgcgtatgatccgtggcatgggctcattgacattacaaatttgcccctctacaatgtacccacctcatgctagcctcactaaactggaattactcctccgacgagaacattgtccttaaacctcgtgtctgattttagaactggcattgtagaacttggagtctgatttagaccttgtt

SEQ ID NO: 582342 - DNA, 266 bp, Homo sapiens
  misc_feature (117)..(117): n is a, c, g, or t
  misc_feature (145)..(145): n is a, c, g, or t
  misc_feature (158)..(158): n is a, c, g, or t
  misc_feature (170)..(170): n is a, c, g, or t
cgttagtgcgtgaaacaccgaacttggactggttgattttgactgagcgcatggtaacgtagcctcgatgcttccggctgattggcggagcggttacagcaacgtctggctaggacncaagcgtcgttatcaggatgaagctgancgggatatacctnagttgcttgcanctccggcgcaagtgcgttggctgagcatggagccgctgcttgggcctgttacccttcgaagggttgttcatgatccgttactgccagcgctgggta

SEQ ID NO: 582343 - DNA, 1136 bp, Homo sapiens
  misc_feature (1)..(1): n is a, c, g, or t
  misc_feature (14)..(14): n is a, c, g, or t
  misc_feature (37)..(37): n is a, c, g, or t
  misc_feature (487)..(487): n is a, c, g, or t
  misc_feature (1128)..(1128): n is a, c, g, or t
naactgtgattggntcaattttaccataccgaaagantaaattcatttgagcttttacctacgcctttgctttttgttaaaggaagaattcaatgcaatgtgttcagaaagttacatttaaatcgttaataaagagaaaaaggaagagaaagagaggacaccattccgacacaaacgtttatgtgattttagccattacaacagtaattcagaaatatctcaaatgttacattgatgtcatcaatattacaaaaaaggaaaaaaaagtgacaggcaacagtgaagagcaccagagacccagcgcacacctaaagtagaccatgcttctttccttccactgccaggttatcgtcccgggaagccccccaccccctcgctttcctcctccgctttccctaacccgtctcgcgggggcatctacgcctcgtcctcgccctcctcctcctcgaactccccttgttcgtcggccgtggcgtcctggtactgntggtactcggacaccaggtcgttcatgttgctctcggcctcggtgaactccatctcgtccatgccctcgcccgtgtaccagtgcaggaaggccttgcgccggaacatggccgtgaactgctcggagatgcgcttgaacagctcctggatggccgtgctgttgccgatgaaggtggccgacatcttcaggccgcggggcgggatgtcgcacacggccgtcttcacgttgttggggatccactccacgaagtagctgctgttcttgttctgcacgttgagcatctgctcgtccacctccttcatggacatgcggccccggaagatggcagccaccgtcagtagcggccgtggcgcgggtcgcaggcggccatcatgttcttggagtcgaacatctgctgggtgagctcgggcacgtgagcgcccggtactgctggctgccccggctggtcaggggcgcgaagcggggcatgaagaagtgcaggcgagggaagggcaccatgttcaccgccagcttgcgcaggtctgcgttcagctggcccgggaagcgcaggcaggtggtgaccccgctcatggtggccgacaccaggtggttgaggtccccgtagtggggggtggtcagcttcagggtgcggaagagatgtnatacaggg

SEQ ID NO: 582344 - DNA, 1136 bp, Homo sapiens
  misc_feature (1)..(1): n is a, c, g, or t
  misc_feature (14)..(14): n is a, c, g, or t
  misc_feature (37)..(37): n is a, c, g, or t
  misc_feature (420)..(420): n is a, c, g, or t
  misc_feature (445)..(445): n is a, c, g, or t
  misc_feature (462)..(462): n is a, c, g, or t
  misc_feature (465)..(465): n is a, c, g, or t
  misc_feature (468)..(469): n is a, c, g, or t
  misc_feature (477)..(478): n is a, c, g, or t
  misc_feature (484)..(484): n is a, c, g, or t
  misc_feature (487)..(487): n is a, c, g, or t
  misc_feature (493)..(493): n is a, c, g, or t
  misc_feature (501)..(501): n is a, c, g, or t
  misc_feature (503)..(503): n is a, c, g, or t
  misc_feature (507)..(507): n is a, c, g, or t
  misc_feature (547)..(547): n is a, c, g, or t
  misc_feature (558)..(559): n is a, c, g, or t
  misc_feature (566)..(566): n is a, c, g, or t
  misc_feature (580)..(580): n is a, c, g, or t
  misc_feature (586)..(587): n is a, c, g, or t
  misc_feature (1128)..(1128): n is a, c, g, or t
naactgtgattggntcaattttaccataccgaaagantaaattcatttgagcttttacctacgcctttgctttttgttaaaggaagaattcaatgcaatgtgttcagaaagttacatttaaatcgttaataaagagaaaaaggaagagaaagagaggacaccattccgacacaaacgtttatgtgattttagccattacaacagtaattcagaaatatctcaaatgttacattgatgtcatcaatattacaaaaaaggaaaaaaaagtgacaggcaacagtgaagagcaccagagacccagcgcacacctaaagtagaccatgcttctttccttccactgccaggttatcgtcccgggaagccccccaccccctcgctttcctcctccgctttccctaacccgtctcgcggggggatgtnggggtcgtggtgggggtcgtggtgntggggctccccttgttngtnggnngtggggtnntggtgntgntggtgntcgggcancnggtngttggtgttggtgtgggggtgggtggagtgggtgtggtgngtgggctgggnngtgtggnggtggggggggggnttgggnnggggcgtgggggtggggtggtggggggtggggttgggggggtgctgggtgggggtggtgttgggggtgcgggtggccgacatcttcaggccgcggggcgggatgtcgcacacggccgtcttcacgttgttggggatccactccacgaagtagctgctgttcttgttctgcacgttgagcatctgctcgtccacctccttcatggacatgcggccccggaagatggcagccaccgtcagtagcggccgtggcgcgggtcgcaggcggccatcatgttcttggagtcgaacatctgctgggtgagctcgggcacgtgagcgcccggtactgctggctgccccggctggtcaggggcgcgaagcggggcatgaagaagtgcaggcgagggaagggcaccatgttcaccgccagcttgcgcaggtctgcgttcagctggcccgggaagcgcaggcaggtggtgaccccgctcatggtggccgacaccaggtggttgaggtccccgtagtggggggtggtcagcttcagggtgcggaagagatgtnatacaggg

SEQ ID NO: 582345 - DNA, 738 bp, Homo sapiens
  misc_feature (1)..(1): n is a, c, g, or t
  misc_feature (14)..(14): n is a, c, g, or t
  misc_feature (37)..(37): n is a, c, g, or t
  misc_feature (423)..(423): n is a, c, g, or t
  misc_feature (434)..(434): n is a, c, g, or t
  misc_feature (438)..(439): n is a, c, g, or t
  misc_feature (442)..(442): n is a, c, g, or t
  misc_feature (444)..(444): n is a, c, g, or t
  misc_feature (447)..(447): n is a, c, g, or t
  misc_feature (454)..(454): n is a, c, g, or t
  misc_feature (457)..(457): n is a, c, g, or t
  misc_feature (463)..(463): n is a, c, g, or t
  misc_feature (466)..(466): n is a, c, g, or t
  misc_feature (499)..(499): n is a, c, g, or t
  misc_feature (515)..(515): n is a, c, g, or t
  misc_feature (573)..(573): n is a, c, g, or t
  misc_feature (577)..(577): n is a, c, g, or t
  misc_feature (591)..(592): n is a, c, g, or t
  misc_feature (596)..(596): n is a, c, g, or t
  misc_feature (602)..(602): n is a, c, g, or t
  misc_feature (615)..(615): n is a, c, g, or t
  misc_feature (617)..(617): n is a, c, g, or t
  misc_feature (692)..(692): n is a, c, g, or t
naactgtgattggntcaattttaccataccgaaagantaaattcatttgagcttttacctacgcctttgctttttgttaaaggaagaattcaatgcaatgtgttcagaaagttacatttaaatcgttaataaagagaaaaaggaagagaaagagaggacaccattccgacacaaacgtttatgtgattttagccattacaacagtaattcagaaatatctcaaatgttacattgatgtcatcaatattacaaaaaaggaaaaaaaagtgacaggcaacagtgaagagcaccagagacccagcgcacacctaaagtagaccatgcttctttccttccactgccaggttatcgtcccgggaagccccccaccccctcgctttcctcctccgctttccctaacccgtctcgcgggggtatttatgncttgtcctcgntctnnttntnttngaatctnccnttgttngtnggccgtggtgttttggtattgttggtatttggntattaggttgtttatnttgtttttggttttggtgaattttattttgtctatggtttgttggtgtattagttgtnggtnggttttgtgttggnntatngttgtnaattgtttggagntntgtttgtaatagttttttggatggttgtgttgttgttgattaaggtggttgttatttttaggttggggggtgggntgtggtttatggtggtttttatgttgttggggatttattttatgaa

SEQ ID NO: 582346 - DNA, 1164 bp, Homo sapiens
ggtggcgtggagtggcgtggcgtggcggggtctcgcgtgcgcgggcgcgcacccggagctgtggacggagagtgcctccctctggcctcagtttcctcatgttgtagtagcggagcatggccctgtgacctgggcccccgagactgcccgtgcaagctcagcgcagcctgttgggcctcagcgactgggacgggaccaaggggctcggggattctcccttgccacggcctggttgcgtgactgaccctcctgttcccagagccacccagcgcaggccgggatgttcgtcctggttggaactggtggacaccgtccgggatcgcgcccttgggcaagtttgagagcgaagctcaacgactccaattgcccagaggagcttgaacaagaagttggccaacaaggtcgtgtacaacgttggggacttctgcatttgtctgtttgatatcaaccaaattggaggatgccctattgtattcccttgggggatggcgcaatcaacgagaccaaacggtcttctcgtagggcttcgttccggatagaccatttctcattcaccccgcagaagtcacgctgcacgacagggcaagggcaaagttctcgaccgaaagccggacgcagggttgtagcggtgtggggagtaccgcacacggggcaggacacgcgatgcacaacagaccgctactaacgttggacacaacgggtggagtgaagaatcccggatacccggagataggttggacggaacgcagctttttagattgggagagagtaaccgccagaacaagagggacaaaatacacgcaaattgagcacgccggtaccaggtatgagtgaggcttgtcaaaaagaatgagaggggctcgccgaaccacaccagtagtaggggagatccaacatcaagggtgaaggccaggactatgggcgcattactcattccgttggttgagaccctgagacaaagttaagcccgattggggagttcggagaaaggtatgggacccgtttccgacgaagacttctgggagaacagggtcggtaatagcccgggtcagcaaaagacaaactcgaagattcgagggccgaatgagaagaggagaaagatagagagcagagatggagcccgatacggcaactggacaggcagttcgccgacacggtgtacca

SEQ ID NO: 582347 - DNA, 430 bp, Homo sapiens
  misc_feature (2)..(2): n is a, c, g, or t
  misc_feature (13)..(13): n is a, c, g, or t
  misc_feature (20)..(20): n is a, c, g, or t
  misc_feature (41)..(42): n is a, c, g, or t
  misc_feature (91)..(91): n is a, c, g, or t
  misc_feature (99)..(99): n is a, c, g, or t
  misc_feature (134)..(135): n is a, c, g, or t
  misc_feature (149)..(149): n is a, c, g, or t
  misc_feature (190)..(190): n is a, c, g, or t
  misc_feature (197)..(197): n is a, c, g, or t
  misc_feature (211)..(211): n is a, c, g, or t
  misc_feature (224)..(224): n is a, c, g, or t
  misc_feature (243)..(243): n is a, c, g, or t
  misc_feature (246)..(246): n is a, c, g, or t
  misc_feature (252)..(253): n is a, c, g, or t
  misc_feature (262)..(262): n is a, c, g, or t
  misc_feature (282)..(282): n is a, c, g, or t
  misc_feature (285)..(285): n is a, c, g, or t
  misc_feature (294)..(294): n is a, c, g, or t
  misc_feature (339)..(339): n is a, c, g, or t
  misc_feature (347)..(347): n is a, c, g, or t
  misc_feature (370)..(370): n is a, c, g, or t
  misc_feature (375)..(375): n is a, c, g, or t
  misc_feature (378)..(378): n is a, c, g, or t
  misc_feature (387)..(387): n is a, c, g, or t
  misc_feature (405)..(405): n is a, c, g, or t
  misc_feature (424)..(425): n is a, c, g, or t
cnccgatccttgnggtttcnggtgaaatctgcacatccccnnttttatatccgttccctaccctgtaatccctaccacgtgcacttgttcngcggtttnggtctcttgtttaattgcacacaagtaatactacnnggtaaccagaatcnggtgtgaatgcgttgagatttttttactgttttgcatgatnggaaatngagaaagaatacgnataaagatagagnggcataacatcaatgcagngtnggaagnnggctcccangggctgacatggtgtgagcntgncggtgtgtnataggttctcatccctgcatagatgcagtattcttagttagtagnaaaacctnggttagtggtttaagccttgtgnggaanatngatcttaangggaaagagtatattggnagttgtcaatatagcagtnntagct

SEQ ID NO: 582348 - DNA, 482 bp, Homo sapiens
  misc_feature (29)..(29): n is a, c, g, or t
tctgcccgggtggttgttcgagaaaggangtttaaattccctcccttacagattttaccctttgggtttatttaaaaaggggttggcctttaaaaaaaattttttttaaaaattttccaggatgggggaaaatgggttttttaaacaatttaaacagtccaactgtttttgccattgggggggctttgaaaaccccttgtgttgccccccgaaggggcctgggttataattaaacccctttttgccctggacggggggtaataaaaaaacacctgccctaaagttaaaacgtgggcaaaaaccctgccggtaacattaaatgggaaggcgtttggcattaaactataaacccgaaaccagggggggccggccccctttcccttaagagacttattcccccttcatgccgagtataaaaaagcggaataatgagctcccaccgtaccttgcacgcgccgtagacatacccgaatgatcccaat

SEQ ID NO: 582349 - DNA, 129 bp, Homo sapiens
  misc_feature (79)..(79): n is a, c, g, or t
gtatgtgggtgattagaggaatcccaggaacagcggttcgggggggatgccttcattactgaggatttgtattccaggnctcgagctgtgtgcctcgcccctgaataactagattatcttgcttccctg

SEQ ID NO: 582350 - DNA, 375 bp, Homo sapiens
  misc_feature (83)..(83): n is a, c, g, or t
  misc_feature (92)..(92): n is a, c, g, or t
  misc_feature (107)..(107): n is a, c, g, or t
  misc_feature (124)..(124): n is a, c, g, or t
  misc_feature (206)..(206): n is a, c, g, or t
tatgtcagcaggatcttgtactacctggttctgctgctccatactcgcagtggagttgggccagtgctcctaccacgctgccncatcatctnctggatctgggccanctgcatgcattagcgcnctttggtctcctccaggctgttctccagggatgctttcatgctgagctgggactgcagctcaatctccaggttctgcatggnagcttcccgtggagaacatgcctggaggctctgcaccagctcgcttgttggtggccacctcgcggttccagctcctctgtctatggtgaagaacccatttcctcggcatccttgcggttctactctggcatcttctcatactgttcacgcatctcgttcagaatgcggc

SEQ ID NO: 582351 - DNA, 343 bp, Homo sapiens
  misc_feature (23)..(23): n is a, c, g, or t
  misc_feature (87)..(87): n is a, c, g, or t
  misc_feature (129)..(131): n is a, c, g, or t
  misc_feature (181)..(181): n is a, c, g, or t
  misc_feature (246)..(246): n is a, c, g, or t
  misc_feature (257)..(257): n is a, c, g, or t
ctgcaacctttctaaaccctgtnatatagatggtccaatgaggaaacagactgaggtttgtttgttttttgtagagatgggactgtnttgcccaggctgatctccagcttctggtctcaagcaatcctnnnacctcagcctcccagcactttgggaggctgaggtgggtggttcacatgancccaggggttccacaccagcctggacaacatggcgaaaccctggctctacaaaaaattacaaaanttagccaagtntggtggtgcatgcctgtggttccagctactcgagaaggctgaggtggcaggattgctttgagcccagggaggcagaggttgcagtg

SEQ ID NO: 582352 - DNA, 938 bp, Homo sapiens
tggtcaggtacgaggctgggtggtaatcggccgagggagcgctcgggctgtctgcgtgaccctgccgcgtgcaggtgtcgctggccggctggagctgggagtgaggcggcggaggagccaggtgatggaggagccaggaatgtgcagttggtgggaagtccagcttgtggtccctgagagctgtgagaaggagatgcggctgctgctggccctgttgggggtgtcctgctgatgtgtgccttgtggcctccagtcttgtccctgtgatgtgcctctgaggaagtggatgcttgaagccctgccatgtgctcccagcctggagcatgcaagagcatgtgagctgacaagtagcccttgggcatgctgtgctgtctgtgcttgtgtgtgctgggtgctagagcagatggtgaggccaccatgtgtacaatggtgatgtggcagtctgccatgtgcaacctgcttggcctgtgtactggtgtggcttgggaatggggcctagactagcagatttgccagcatatcctacgctgagtggatgcttggccgagtaccatacatgccatgtgcacataatggctccatgatcgtcacgtgcagaaatctacagacttgataacaatggttgactccattgaagctccaggaaaagatgatgaagaaccccaaggaaccaataagggaacccctagaataaggacaggaaaaccaccaggaagagaacccgatacttggaaaaaacgacacaagggcatggagaagaaactgggtgaagaacctgaggaggaaaacggcaaggtacggatagaaaagtaggaaggaaccaaggcaacaatacgagtggtagtatgacaggctcatgtggaacgggtagagggaagaaggcaaaagaggagacagaaggagacgagtccatgcaaggaaagaggaggaaaggtgag

SEQ ID NO: 582353 - DNA, 252 bp, Homo sapiens
ccagctaatatattgtgatgggaggcaagaggctgggcgtgtctttcggacccttaagagggagaaccgggagcttcgggggctgcttcagtgtgcttcagggagcagccaggggggcagcacccggtgctggaggcaccgagagaggaccctgtgcttccagtgctggaggaggctccccagaaatcctgttggccttcgaccacagtccctcaggggcttgggttcagaaggggaaggggattggagggc

SEQ ID NO: 582354 - DNA, 154 bp, Homo sapiens
agcgttttccctctgtgcagatctatctctgtgtccaagtgtcctctttttataaggaaaccagtcataatggacccacctgaatgacctcattttaacttgattacctctgtaaaaaatgtatttccaaataaagtgaccttatgaggtattg

SEQ ID NO: 582355 - DNA, 602 bp, Homo sapiens
gcactgggtgcagcaacaagggcaattgacaggctctgagtgtccagtggcatgccagaacaggtgacacagagcagggcgctacagctcactagagacacgactcagtggagtgccagaatccgacactcaaggttgttccgtgtgggcatggcatccgtgaatgtgtgcctggtgagtgtgtccatcagcgtgcactcacagctataccgaatgagtctagctggcatagcgagtctcatcaccccaagattacacaatcactgtcgtccttgatgtagtcttgtgtagcactggtagcggctggactcagtaggagttgcttagagcaactcctaaaaacgtttgggtgcgccacatagctaccaccttatggcacacagaccattatggaagcaaagaagccgcgacaggttagacactggaagatgaccggccccacaacgggggagagcagagatataacatgagcagacatgactgcaagaccattgaggaagcactaccgagcaaaatcccatataggggcaaccccacatagtggacacacaagaccgaagacgacatgagcagtgcaactgagaaaccttcacctagtaccg

SEQ ID NO: 582356 - DNA, 182 bp, Homo sapiens
tgcacctcctgcaggtaggtggccacattatcgagtgatcccactatggctgggcttctccttgacgttcaacttctgactttcaatcttgacatctcctccaccaggcttgtgctatgatgtaagccttagagccacacttggaggagcacttagagatgtccactttcttgtaccgaatc

SEQ ID NO: 582357 - DNA, 1044 bp, Homo sapiens
  misc_feature (31)..(31): n is a, c, g, or t
  misc_feature (66)..(66): n is a, c, g, or t
  misc_feature (82)..(82): n is a, c, g, or t
  misc_feature (119)..(120): n is a, c, g, or t
  misc_feature (127)..(127): n is a, c, g, or t
  misc_feature (175)..(176): n is a, c, g, or t
  misc_feature (194)..(194): n is a, c, g, or t
  misc_feature (222)..(222): n is a, c, g, or t
  misc_feature (250)..(251): n is a, c, g, or t
  misc_feature (258)..(258): n is a, c, g, or t
  misc_feature (261)..(261): n is a, c, g, or t
  misc_feature (275)..(276): n is a, c, g, or t
  misc_feature (301)..(301): n is a, c, g, or t
  misc_feature (316)..(316): n is a, c, g, or t
  misc_feature (328)..(328): n is a, c, g, or t
  misc_feature (341)..(341): n is a, c, g, or t
  misc_feature (352)..(352): n is a, c, g, or t
  misc_feature (354)..(354): n is a, c, g, or t
  misc_feature (359)..(360): n is a, c, g, or t
  misc_feature (363)..(363): n is a, c, g, or t
  misc_feature (366)..(366): n is a, c, g, or t
  misc_feature (371)..(371): n is a, c, g, or t
  misc_feature (383)..(383): n is a, c, g, or t
  misc_feature (387)..(387): n is a, c, g, or t
  misc_feature (470)..(470): n is a, c, g, or t
  misc_feature (475)..(475): n is a, c, g, or t
  misc_feature (482)..(483): n is a, c, g, or t
  misc_feature (489)..(489): n is a, c, g, or t
  misc_feature (503)..(503): n is a, c, g, or t
  misc_feature (518)..(518): n is a, c, g, or t
  misc_feature (523)..(523): n is a, c, g, or t
  misc_feature (528)..(528): n is a, c, g, or t
  misc_feature (557)..(557): n is a, c, g, or t
  misc_feature (684)..(684): n is a, c, g, or t
  misc_feature (855)..(855): n is a, c, g, or t
  misc_feature (858)..(858): n is a, c, g, or t
  misc_feature (958)..(958): n is a, c, g, or t
  misc_feature (963)..(963): n is a, c, g, or t
  misc_feature (997)..(997): n is a, c, g, or t
ggaaaaacaagcaccatgctcctgccggcantcccggtgggaacatgccaaacagccggcgatcgnacccagcccacctgtngtggaggtcccttccttctcaggttacagaaataaanncgtgtanttcttattgttagcactaacatcaccagaaatactgataagcgatagnnaagtcaggacagacagtnaagtagtacttcgcacactcccaaactnagggaggccctataaccttaaggagggnncatttgntanacaaaagcactatnnacgagtccagggatgatgtagccanaagaataaataaggngaaaggagaccntagaattcatgtnccttacgcctnanagcgnnganccntgggnagctggttggtntagnatctacgcagaatatgtacaccttgttgggagagatgggggcagcccaagaaagctcctcagcgggctgaagagggagcaagntgggntgagggnngttttnagttcatgctgcantatgaagagggaagntcttnagtcnagtgcgctgcagggtgggaaagcaacaanacggacaccgtcccaccctcaacccccccactggcacagggtcacacaatctgggtcaaagaaatagtggggcccttgtggtcatcaaagcgatccatggtcttgaggctgaggatcatgtgcaggncataggtgaagatgaagagcatgaacagggaggtgagcagccccatccagatgccgggggagaagaagctggcacagtcgctggcgtaggagaactgctccccattacgttgaaagcctggatctggaagtcctgaagcatcatctgccagggagagggctgcgtgcgggncangaagagactacccttcttgctcaggctgctgacatactcgcagtggaaggagtagatgctgggccctgtgacctgggaagcattgaagtaggcgacgggncattnctgtggacttcgagcgctccatggtacaccagtnccgggcagaactgggtagaggcggttggccagaatgaacttgaattt

SEQ ID NO: 582358 - DNA, 537 bp, Homo sapiens
gtcgctctagaggatcctcgcgtgaccttctgctctagtggacggcaaaagcactcacattccatatctgggactcaaagcttacaggctcctccaagatcccttgtgcaatccagactgtgatggtgccacgtgggctgcctcttacaacgtagaagagactctgaccattctgcgatatgcaaccgtgccaaaaaccataatgaacaaaccaagggtcatgaggacccaagatgcctccttcgagaattccaggaagagattgctcggctcaaggcccagctggaaaaaacggtccattggtaggaggaagaggcgagagaaagcggagggaaggtggtggcagtggtgggggttggggaagaggaggaggaggagggagaagagggtgaggaggaaggggatgataaggatgattactggcgggaacagcaagaaaaactggagattgagaagcgggccattgtagaggatcacagcttggttgcagaggagaagatgaggctgctgaaggagaaagagaaaaagatggaggac

SEQ ID NO: 582359 - DNA, 796 bp, Homo sapiens
  misc_feature (796)..(796): n is a, c, g, or t
tgctgatggtaagcatgtcatttctgagctgttctatacggaggatccgatggcaggaaactgaaaaattctgcccgactgtcctgtgcatagaacttgggaagtacgacccctctagccctaatcgagatcttcacgagactgtactcagcctgcaattgcactgtgacctcatatgagatgctgagccagatcgtccctggagagattactatggacattgtgttatgagccaaaataaacctaaatgcaagcaggttttcttattcgagttcaaaatgggctgcaaagcagcagagacaacttgcaacatcaagagtgcatttggcccaggaactgctaatgaacgtacagtgcagtggtggttcaagaagttttgcaaaggatggccaggcgcagcagctcacacctataatcccagcactttgggaggccaaggcatccggatcacttgaagtcaggagttcgaggccagccaggccaacatggtgaaaccccatctctactaaaaataaaaaaattagctgggcatggtggcatgcacctgtaatcccagctactcgggaggctgaggtgggacgaagcgcttgaacccaggaggcagaggttgcagtgacgctgagattgtgccactgcactccagttgacagacacaagactccgtctcaatttacaacagaaacgacacgaacacgaaagacagtttttggcacaaagggagctttagaaacccttgaagattgaatgagcattagtgaccggggccatggcgaaagttggaccaattgaacccaan

SEQ ID NO: 582360 - DNA, 902 bp, Homo sapiens
  misc_feature (396)..(396): n is a, c, g, or t
  misc_feature (902)..(902): n is a, c, g, or t
tcaaatttacaaattttttttataaaaaccaaaacaagggttaaaaaagtccttacatttccaaccctgcctggggtgttgtggggtgggggatatagatataagtctccagaaagaggtgctcaactctcctcttccctggcaaaggacacggcgaggtcagaaggcaggcctcttgcctcttttctagccctgcctactctccctccgagtgtaagtctacaatattgctggctaaggaagtatttctcataggcacaagaaagtggtgtggaccatgtgggaagcgcccaagaagtcgtgcacttttcttctcaacatctctaacgaagaaaactctccaagactgtggtctctatctcgccccctttagaagagctctctctcgtggagccncctacccccacatgtgggggaaactctccccccgaggggggtgtgtggtcgcggtcgagggacatggacccgaggaaagagctattcaaggccccctatctgtgggggcaataagtagatgctgcctcgagacaccccaccctgcaaacctattatctctgtataaaagtggccctcttatgtgaggtgaaacaccccatggaaaggtctcagggacctccgagggggggaaaactatctccacaaagtttagtccggcgagacgcagcggggtagctctgtgagacaacagggagaaaaaacctctcctgtagcaagacagaccacgcccccggtacattctttctctcctttggaccccatttatggcgccactcatttgtcggcgctctataaaaagagaactagacaacaatttactctatggtggacatatacttccccccgagatttcctcgtgaaaaggcgctataaacatgttgagaaaacctcccaaacggggaagn

SEQ ID NO: 582361 - DNA, 116 bp, Homo sapiens
ggctcggtaccaatcatttcaaaatctggtcaatgctgacttaactatctatcacctcaaaaacaaacaaacaaacaaaaacctcaaaatgtccccatgtcattgggtcctttata

SEQ ID NO: 582362 - DNA, 154 bp, Homo sapiens
gcgtgtattgggtgggtgtgggtataatactaagcttgagatgatatcatttacgggggaaggcgctcttgtgaagtaggccattatttctcttgtccttatcgtacagggaggaatttgaagatagattgaacaccgaccgtggattactccg

SEQ ID NO: 582363 - DNA, 153 bp, Homo sapiens
ccgagctagctctagtgtctgaatgttcaagctcataatgcttttccggagcaccgtccccgttcagcctttggagttttacggtgtgttaaaatggataccattaagttaagagtccaagcaagatcagtcccacaataagatagcgtcggg

SEQ ID NO: 582364 - DNA, 621 bp, Homo sapiens
ctgtcagtcgctctgaaacactcaaatacacctaacggcctgctaccctcttactcctcgctcacatgttagttgtcggtgatgctcacctcttcccccagtcccccctttcttaaaattcggagaggacttcctccctgccctcatcaaagtaacaacggagcatctctgctctgggtatttatgtaccggtcttagctcctctatgaaagctgagtgtacattctttaggaacagaaaaccacagctgtctagttgccataattatacaattatgttccaagggtctaacatatagaaactgctcaatcaatctgttaaacgagtgtcaagcaggtgtgactctgtgtgccacagggcaagcgcagagaggaggcttactgattaaatatgtgcatctctattacatgcacgctaaagcttctttcactgcagcacaaaagacatttttaacagcacctgattaaagaaaaacttacgcaactccatggggagcatccggctgtaccaagaattccaagggtactttggcatcatctataaatcctttctcaggatcggtcacttcctataaaacataaataagaatatccagattgaataaggaaacacactttattc

SEQ ID NO: 582365 - DNA, 321 bp, Homo sapiens
cagacggatcccgtatataggtgagccagggtgaacctagggatgtggcagtgtatagtaggtgcgcagatgataggggaacggagcctacatattggtgtatcatgagtgatgtatgtgcctgcgtgcatgcgtcatggctggttgcctcatcgggtgatgatagccaaggtggggataagtgtggtttcgaagaagatataaaatatgattagttctgtggctgtgaatgttataattcaggcagcattggtcagggcagattagtatagagaggtcagagtttttttcgtgatagtggttcactggatacgtggcgtt

SEQ ID NO: 582366 - DNA, 1537 bp, Homo sapiens
  misc_feature (179)..(179): n is a, c, g, or t
  misc_feature (243)..(243): n is a, c, g, or t
  misc_feature (1537)..(1537): n is a, c, g, or t
ggtaaaagcaacagcccattacccctagcaggtgccctctcagccctcctaatgagctccggcctagccatgtgattttcacttctcattctataacatgctcctcagtactaaggtcgttacttagacccaaggactacgtagcccatatttaccgaattgcattgcgccgctgcatngtcacacgacggcagcaatagcagcctacccgaagggctcactcgaaaggacctaggctgtccngaaagaaaggcacttccgtatagcgggatcacatccctaggtttatatctaccgcttctagggagaggatctgtcttctcagtctctggcgaggaggcagctatctgctccttgatgacgcgatattttagcccaccgtcccgacgccggtaaggctctccgtagcgcacaccggcaagaaatttaggggaacaggtgtcacacgtgggcgctgccccctaaagcaaagggactatagtcagcgacacgccggtttgagagaattgcccaccccattaggacgatgttcgcctcgagtactactcctaggaggcgggagaccgaattcgcggcatagttcagtcctaccgtcgaggtccaccgtgaaaggtaagtcctagaacttctggacccctttgggaaggctttcgagccccatggaacggttccgtacagtcacggatgaaacaaccataccccctggaacacagcggccagagagttcaacgttcactacagagcccgtagccttggcacgtgtaagttctgcacctaagagtgatatcgttattccgttgaggcgctttaactcccttgagatttctcataagcgcggcggtgcggcctacacggagaagatcgcgtgccaagcaaagcgtgaggcaatcttcggacacggattcgttgctccccgttttttgcgagcccccaccttgttacctccgttgagacgcgccacgatttgcgttacccgcgttgcgtaccatgactgagatcaccgacttgcgggatacggcgccaatcaaggggggcgttatccacaaactggtgcagccattctgccaccaggtttccacatttatcagttcacggcggtcgtccacgacagcgtattgtaccctcatcccaacgttaagttcacattggctctttcgcgagttcctctggacgccccaacagtctatcaacaattagacttctctccgagccctatttttaggcaatgttcccctaaacaccaccctaaggttccaaccttctcttgtggtgggcacttctcctctgcaaaacagttgccgtgcgccctgggtcggtggagtcaccgtaggggaacgagttgtttgtgggtcacggcaactcgcttaggagcaacattgggactttaaactctatgcattggcgtacattggatacttccgccgaattgcgtatattctggcacttgaagtgggtgctccctctagaacagtagataggccagagcgcaacaacagggcagaccccacacaagcagacaaacatcgcgaaagatacn

SEQ ID NO: 582367 - DNA, 392 bp, Homo sapiens
  misc_feature (9)..(9): n is a, c, g, or t
  misc_feature (20)..(20): n is a, c, g, or t
atacctacnccctgtgtagnctaattaatttaaatattcctgtgttttacatccaatcctacaaggagtttttattgctttgatgaaatccctccctcccccttctttcctctcatctctccctttctccttctcctcttaaatgattctctggctgaacaattttctattaatagcattttgggaggccgatgtgggaggattgtttgagcccaggagtttgagactagcctgggcaacatagagagacccttgtctcaaaaaaaaaaatataggccagatgcagtggctcacacctgtaatcccagcactttgggaggccgaggcaggtggatcacctgaagtcagaagttcgagccagcctggccaaacatggtgaaatcccatctcta

SEQ ID NO: 582368 - DNA, 234 bp, Homo sapiens
  misc_feature (221)..(221): n is a, c, g, or t
aagatcgccgtgcgaaacacaacgtgtcgcaacaaccagaaaacttgacccaacgatggtgggaatggttaataagaagaagaaggttgtgaagccgggctataagcgtcaaattaagtcagctatccaacgggaaaatcaaatggatcgtcgtattgccaagcgtgaagaaatgcgtgcagtacgtaagtcaaataaaaagcgcggcggtccctaaaccncttgtaatgataa

SEQ ID NO: 582369 - DNA, 985 bp, Homo sapiens
  misc_feature (193)..(193): n is a, c, g, or t
  misc_feature (436)..(436): n is a, c, g, or t
  misc_feature (595)..(595): n is a, c, g, or t
agcggatctcgcgatgacctctgtgttggaagagttggtgctaatggtgggctggtattcgaccgctatgcgcgtccctgcatcgcctggctgcggtccaacctgaggagcacggcttggctatacgacgaaaaccgcgatgacgtgcctgtaagggtgtctgacagagcgcgcgtggatcactcaggcagcntcgactgcaggaggtcgcattccgcccacgcaaggaggtggatgcagcatggacttaccgatcacctctggggcgcatgacaggtgacgttagcgaatgaccctcattcgcggatatcacgtgaccgggcgacaaggggcactccccaggcctgacgcgacgatggatgttctacgtaagccgacatcattgcgatgccgagccatagctgaagccgagaaagagtggtcgtcttagaatgangcgacgacgtgatgcggtgcaaactagtcaccgcaaggccgggtcggaatccttgaagcattcttgctcccgtggtgctcaaggagacgggggcatgtatcccgaagcactcccctccgttgccgtgcacgaataggagtcgcctgaccagcccacaanttgcgtgcctgcctcccgtggattgtcccgcgtctgggtcgcgtcggtcgctgtgccaaagatatggagacctttccccccatgtgtggacgcactttggccaaggcggggcaagggtagacctggacgcacccgcattggatattcgccacgaaacggacttaagattgagaacgtaagcttgccctatgatgccacctctcagacgccagattgcaccaaggccctttctatgcgcgccccccttttggcaaaagacccccgtggggagcaaaaacagcgccgaaatgtgcgttggcttggaagaaccgccttggaataagcccagattgggtgcaatactgccctaagaggcccttggcccggaagaaccctgtggaaagcccccag

SEQ ID NO: 582370 - DNA, 1461 bp, Homo sapiens
tccacggaaattaaaatcaagggttaaatgtcctgtaacgaaaacttctccgagagggaaaaccaattctcacagcagaggccaccgagaggcccccactgtggaaatgggtggtggatgcctcaaggctttggaagtgtggcacccctcgggcggcccgctttgggggcaggtgtgcggccgtgtgtctccccggccgtgcacgcggccatctcccaacacaaatggggtgggaaagccaaaacgcggggtcgcaaaaccacaaaacaagggggagaccccggtggtgcccgcgagaacccacaaggccttaccccacaaacaacagcggggaaacccgcccatcaggcctctccacagggccaaggagatgtgccccacacccccgcgagggcccctcgtgtgtggcgggttccggtaacatctacggtgaaaaagaaaagcttctccggaaattgtgggccgctctggggcgtggagtgtgcggcgtgtagtgagagtgacacccctctccagcgtctgggccccgccccccgtctcctctcgggggcactccgcgtctccaccctctccgtgacacactgtgggtggccctccccttttattacgacccccatgctgtgtgaacgcgtgtgccccccccgcgggttgagagagcctctctctaacaagcgtcgagagaaagtgggagagagacactctggtctctctcccgcgcgtgtgcgacccttatacacaacacgcggccgcggcaaacttcgaagactctcaagctttttcccgaagaccctccctgtgtgaaagccccccgtgagcgtccccccgcgacacgaggggggcacaaaaaaacccaccggggcaccacacaaagaagctctccgcggaagatcccccgggaaggggagcgcaactgcaacaccccgcgggctgccacaccagaggaggctcccccacccccgtctgtcgtgcgggtgagacaaaccactccccccccacctccagagcgaggacagctacccccacgggcgaacacaccgggcgggccgagcagagcaaaccactcatcaggacagaggcaccaccaacagcagcaagacccgcttgcggacaccacaaccaacacccgcgaggccatcatcacaagcggaggaagcaacaccacgcccacactccggcgagcgcagaggagcagaagaaacacacaacccacccacaccaccacctggtgtccacacaacagatgaacacaaccgccacgtgagcggagcaccacgccagagcctccacacacaaacgagagagctagagcgacaaacaacgagccagccacacacaacaacacacaccacgcacgcgcccactgcgagcgagcaacaagcaacacaccacgccaccgaggcccacccacaaaagcaaccacgagccaccacgatccacacgcaacacacgcaccccccaccg

SEQ ID NO: 582371 - DNA, 113 bp, Homo sapiens
actctgcaggagtccttgtcaggagagagaactggcagagtacaaagtgtacaccaacacagcaattgaactaaaattagtgaaactgcttttggttacaagggtctaaagat

SEQ ID NO: 582372 - DNA, 399 bp, Homo sapiens
cacactcaaatacctgagtggcttgaatggtaaagtgggttgggcatggtggcttacacctgtaatcccaacattttgggaagcctaggtgggcagatcacttgaggtcaggagttcaagaccatcctggctaacatggtgaaacctcgtctctactaaaaatacaaaaattagcagggcgtgatggcacacacctgtatttccagctattcaggaggctgagacaggagaatcacttgaacctggaggcagaggttgcagggagccaagatccgtgccactgcactccagcctgggcgagagcgaggctctgtctcaaaaataaaaaataaaaataataaattttgcctaaagcagatctgggcccaccccaaccccgacacggatagggtaccgagc

SEQ ID NO: 582373 - DNA, 375 bp, Homo sapiens
  misc_feature (18)..(18): n is a, c, g, or t
aatgcttctattgccggnaagttcagcacctgtaaaagcagccccttcccgtttcactgtggctgcattttaattcttattttttaaatgtttagcttaaggccgggcacagtgactcacactataatcccagcaatttgggaggctgaggcgggaggatcacttgagcctaggaattcaagaccagcctaggtaacatagtgggaccctatctctacaaaaaataaaaaattagccagtcatggtggcatgctcctatagtcccagcttggagattgaggtgggaggatcacctgagcctaagaggacaaggctagagtaagccctgatcccgccagcaccccagcctaagtgaaagagcgagagcctgtctca

SEQ ID NO: 582374 - DNA, 959 bp, Homo sapiens
cccttcaaagggggtactggaccgtcccgcaagtaacgcccgggtaaggccacaggggagggaccccggggcgcccaaaatggtaggcacctaacggagtaggacagccaaggccgagtcgattcttgagagccgccccagcggcatcaagctcccggggtctagcgccaactctcaggtggcccacccgagaccccgggggcaccaccctagtcccccgcggggcccctaatttcgctccggacaaggtgaaaagataccatccgggaccagaaaactcgccaagcggcaggcacaaggcgcattggagggaaaggaactgctcgcagaaagcagaaggtggttcatagaacagccacagcaagatgacaaaaaacggcagttctccttaaagaagttaggggtaaacgaatatctctggcatagaagaggtgaatatgtccactaaccaaggcacagtgatccacatttaacaaccctgaagttcaggcatctctggcagcgaacactttcaccattacaggccatgatgagaccaagcagctgacagaaatgctacccagcatctttaaaccagcttggtgcggatagtctgacttagtttcaggagaactggccggagctctgcccacacacaatgctgtggagtggagaaagcaccacttgctagctggcagaggatgatgatgatgaagttccagatctccgtaggagaatggcgatgaggcttccaagaatgaggcaaactgaactgagtcaacttctgaaaggataaaacctgaagaagttactgggagctgctatgttaatattatgactgctttttgaagaaattttggtttatggatctgataaaatctagatcctctaagtacatttcaagcccaagcccattggacactgcagctcttttcagtttgcgcttatacacaactcattcatgcttagctcatgaagcc

SEQ ID NO: 582375 - DNA, 197 bp, Homo sapiens
aggtggctattgtataatacgcctccacagtcattctcgacccccttacaaaatacatagcctacccctatcctatgttactatccctattaggcatcattatgacaagctccatctgcctacgacaaacagacctagattcgttcattgacacttctcttcaatcagccacatggcgccggacgcctggtgttatc

SEQ ID NO: 582376 - DNA, 112 bp, Homo sapiens
gaggtagagaggggagagatgagtgcactgaaggtcattttttggatagagctgcccaggacttgttggatggatttggaccatagatgtgaccaggaggggagtataatag

SEQ ID NO: 582377 - DNA, 144 bp, Homo sapiens
ttttccccccccccgggtttttttggaaaccccccgtttgggaaaaatttttgggggccttttttccaaatttttccccccccccttttttttttaaggggaagccccaggggtttcccaaaaaccctgggtttttaaggttta

SEQ ID NO: 582378 - DNA, 390 bp, Homo sapiens
gaaagaaagaaaagaaaagaaatatatcataagtacttgttaaaagaatgaaaataggctgggcacagtgctcatgcctgtaataccagcactctgggaggccgaggtggatgaatcacctgaggtcaggagtttgaaaccagcctggccaacatggtgaaaccctgtctctaccaaaaatacacaaattagctgggtgtggaggtgcacgcctgtaatcctagctactcaggaggctgaggcaagataatcgcttcaacctgggaggcgaaggttttggtgagccgagataggccactgcactccagcctgggtgacacagcaagacttccgtctcaaaaaaaaaagaatgaaaataaatgagctaggtacctaccatcacaagaagtt

SEQ ID NO: 582379 - DNA, 129 bp, Homo sapiens
tacccatataccaccactgatccaggagccaactcggctgagagaggagaggatcttgggacaagactgcagttgggaatgcatggacaccgatttgttcttattccttcacttttggggaaaactctt

SEQ ID NO: 582380 - DNA, 238 bp, Homo sapiens
ctcatggaggatgtagcaccatggaggatgcatggaaaactagtgatatctgaagagaagttggtgcatgtgtaatgacaattttctagattttctcgttattgtattctttaagagacagagtctgtgctctgttgtcgcaggtcgaagtacagtggcacagtcatagttcattggagcctcaaactcctggtcttaagtgaccctcttgcctcatcctccatggtgctgacatcct

SEQ ID NO: 582381 - DNA, 845 bp, Homo sapiens
  misc_feature (215)..(215): n is a, c, g, or t
  misc_feature (224)..(224): n is a, c, g, or t
gggaggccgggtccactcgtcgggagtcgtgcagcatgcggcgtgtgtgcggcagtggtagtggtacgggacgtgaggggacgcggcgctggattttcaatgcttggcggctgtccgtgctgacggagccgggggtggcggtggtgcctctggccgtgacgaggacgaagtgtccgatggttgacttcattctacttctgggaccaacgaaggantctctggantagaccactagatgctttagatagatcaacagtcatgaggcatagttcgtataatcgacatggtatctcgcaggagagggatgcgagacattacgcgactgttgcgatccacgagacacaggcacgatctagaagcattgctacgcaagcagcaggaactgggcaaattgtcaactgctgatggtaaagcttttgcagatcctgaggtactccggagactgacatcctcagtcagttgtgcactgggatgaagctgtctgctgtcactgactacggcatgaccatgcagagagaacagccacaatgcaggacaagtggacactcgcagtctagcagtaagcttgattcagatggggatgtcaatgctgtgcgctaaattgctagatgaaggcaacacagtgtcactgatcatgcagaatgactggacgagaagactgtcgccctaaggtcttcgtacaggcacgcttattatgacttgtaacaccatttgattgcattggctgattgtgttgctacaagtaggaccaatcttacagcaagtaatcggatgatattccaattccctggaatgggtacgcctaccaggtggaaggttaattagcataatcgcgacaaataata

SEQ ID NO: 582382 - DNA, 150 bp, Homo sapiens
agcacgattaataaaacaggtctctgttcttgtgggttggtaaaaaatcagatggttgtagctgtgtggtgtaatttctgaggcctcgtgttctgttccatgggtctctatatcgtgtttgggtaccagttatcatgcgtgtttgtggta

SEQ ID NO: 582383 - DNA, 341 bp, Homo sapiens
atcaagctgcgtttaataaatgctctccatcaccaggccgggcttggggccttgcaacagatattttccattttccttccttcaacaatgaacacctgagcaaagatcctggtctccaactaaatgagctcctcggagtagttggaaagttggaaacgtgtccagcacagaaggaatctgtgcagatgagcagtcacactgttactccacagcggaggagaccagctcagaggcccaggaatcggagcgacagagaggtggagaactgggatttgaacccccgccatccttcaccagagccccatgcttaaaccactgtggcgttctgctgccctgtcgac

SEQ ID NO: 582384 - DNA, 230 bp, Homo sapiens
cctgagaaacttattttttcctttccctcattgcttctggatgactctcaacactgagaagtatatacacttgacccacaggtttgaaatgctctgccacccccaagactgcaagaccaacccctccacttcctcctcatccttaacttacctaaaatgaagatgatgagaatgtacaccttgatgatgagccatttccacctaataaatagtaaatataaaaaaaattt

SEQ ID NO: 582385 - DNA, 1177 bp, Homo sapiens
  misc_feature (162)..(162): n is a, c, g, or t
  misc_feature (283)..(283): n is a, c, g, or t
  misc_feature (301)..(301): n is a, c, g, or t
  misc_feature (394)..(394): n is a, c, g, or t
  misc_feature (452)..(452): n is a, c, g, or t
  misc_feature (459)..(459): n is a, c, g, or t
  misc_feature (495)..(495): n is a, c, g, or t
  misc_feature (522)..(522): n is a, c, g, or t
  misc_feature (709)..(709): n is a, c, g, or t
  misc_feature (760)..(760): n is a, c, g, or t
  misc_feature (803)..(803): n is a, c, g, or t
  misc_feature (815)..(815): n is a, c, g, or t
  misc_feature (827)..(827): n is a, c, g, or t
  misc_feature (832)..(832): n is a, c, g, or t
  misc_feature (838)..(838): n is a, c, g, or t
  misc_feature (846)..(846): n is a, c, g, or t
  misc_feature (893)..(893): n is a, c, g, or t
  misc_feature (910)..(910): n is a, c, g, or t
  misc_feature (955)..(955): n is a, c, g, or t
  misc_feature (1014)..(1014): n is a, c, g, or t
  misc_feature (1142)..(1142): n is a, c, g, or t
aagccagaaccatgaacccgtaacagtggcctgtctcagggcctcctaatgcagctccgtgtgctagcgcaggtcgatgttcacgttccatctcctataactgctaccttcgatacttagtgcgctacgtaagccaagcatcacttaagccgactaatagcnaaggtggattagggagcagatagttaacgacagaagaaaaagctacaataccaaggagggcggactcacactggcgattcctgttcctaagaacagggccgtctctagagtactaggagcntaagtccaatatttgtantgtacgcctccatgcaatgcttattattgtcctatcagctaggcgcaattgtgtacgtagaagtcacgtatattacaacaccaatctcaaagnctctataagaccctcacatagctccccacactacagacataagtcgatgtgcgtcacnctggcgntcccgcgccacattatagagctaagtctacaactcnggtctaaatcaatcctctctgtcagtnagacgtttcgtctaatcttccctttagataaacagcgagatcacagggataattggaccaattctgtcgatctcgaaaggggagggctatatcgacagttccaaacctttggaaggctttcaatctcaacctatggatcttgagaggtgaagaaaatagagcaatatcccaggaaatatactcatantacttacacttgttccaacgggacccgacatcggcggtcttaactttaacnataatgtatctataagctttgggcggatcgttcggtaagtatnttgatcccgcangtcgcgctaaanagaanggctcnctacaagnaaggtaaacatatgcggacagatacatacctccttctacaaaccganatttatcgcgcgacacngagccacttccttaaccgtgctatccggaagcaaaattgaactcnagataaaggtcgagcgacaggggccttcccaaacgcgtgaccgtgtcaaccggatccantctaatttagagcgttcacaacggtttttccatccaacgaaaatcattgggtgatcaacaaccgggcgcaaacagcacggtgttttccacacttttatacattcccctaggaggtccaaactctaggngatttcaaaacacgcgacaccctgcggggggctct

SEQ ID NO: 582386 - DNA, 81 bp, Homo sapiens
ggtcgacaaaaaaatacgtccaagaccaacaaaaacaaattatgaaggaccatattatatatgtaaagatgttgctgctga

SEQ ID NO: 582387 - DNA, 122 bp, Homo sapiens
ccatcaggggacagatgagagggggctgctcctttttggagaatggaccttatggaggcagtatgaggagagtaactcctcaaagagaagacacccttgggttgggcctgctttttttaata

SEQ ID NO: 582388 - DNA, 147 bp, Homo sapiens
ctagaggatcccagactcggcaccgttcgaggtgctgaaggcagcagagaacaagaaaaaagaagcggcgggggcggcgttgggggcctggggccaagagcgcagctcaggccgcggcccagaccaaactccaagcgcggcaggcaa

SEQ ID NO: 582389 - DNA, 249 bp, Homo sapiens
cgcaatcaaggaggtatcaaatcaacctgaggctcaaccatagtcttaataggaaaacaacccgaacccaaattattccaggcactgcttatacaaattttactgggcctctattttcacctcctcaagccctaagggtacttcggagtctccctacaccatttccgacggcatctagggctcaacatttttgtgaccacagcttccaggcattcaggtcaatatggctcaacttcctcatatcgcttc

SEQ ID NO: 582390 - DNA, 1522 bp, Homo sapiens
  misc_feature (194)..(194): n is a, c, g, or t
  misc_feature (246)..(246): n is a, c, g, or t
  misc_feature (664)..(664): n is a, c, g, or t
  misc_feature (698)..(698): n is a, c, g, or t
  misc_feature (1522)..(1522): n is a, c, g, or t
ctctccgactgctgtacgcacggatccctgttgccttacgccaactgctctagtcgttcatgcgacactgcactacatatggactaataacagacaagtggcctacaaggaacaaaatgaaggagctgtccatgctgtcactggatctgctcttgcttttacgccggtaaccttcgctaacgatctaacgatcntatacattacggagtgatcatggagagctgaagctaatatcgatagcaaacngtgcgctcttgagccaggctttttagaggcgtggatcttgagagccactcgatctccttatctcagtaagcccctacgatactttgagacttctccatagagatagaaatgacctgtaccctgggaggtagatccagaatgataattggaggctgcgagaggaaagaagaaagtctcaggaggcccaggtgctgaaacaattggcagagaagagggaacacgagcgagaagtccttcagaaggctttggaggagaacaacaacttcagcaagatggcggaggaaaagctgatcctgaaaatggaacaaattaaggaaaaccgtgaggctaatctagctgctattattgaacgtctgcaggaaaaggagaggcatgctgcggaggtgcgcaggaacaaggaactccaggttgaactgtntggctgaagcaagggagggtctggcacgccccancaatagtaaatccccctgcctatattataatggatcatgcgatatcaggatggggaatgtatgacatggtttaaaaagaactcattataaaaaaaaaaaaccaaaaaaattcaaaatttaaaaaaaatcaagtgcggacctctttgcagaaagtgtttggcattgactgtttaaaaaaatacctgggatcttatctgggacatacttacatattgggttaaagaaatacaagtatttgcattatgcaagttattgcataatcttacatgtcctgttaacaggctttggatgtcgtgtcttcccagctcaaatgaattggctaggtctgtccttattagaagctccccatgtctaactccattccaaaagcaaaaatgaggtcagtagaacaagtctatggtgctagaaacccaccattgcctaatgacctagaagggctctgtagccctctgagcttgacctaaggaccatacctagtatcacaggtattatgaactcccagttgaaaccttcacaatttggtccgctcaataatcctcactaacgggcctaaaaacctacaaaacccagcgctacaagaaatttaccccaacccaggtgcattaggcattgtaaccgttcgtgagtacccccgggggaataagtggtggcgtcaccacaattgtgtgctgtttggggcgttttgcaaaacgggggtattgggcagtgcgaggaagagacccgagacctgtgaggaacccccaattctgggggtagcaaagcgacacgaatagttttgaacgcctatttacaaagcggtggtgtgcaacaacacaattccaagn

SEQ ID NO: 582391 - DNA, 101 bp, Homo sapiens
ggtaatgctcgatccagagatcacaggaggcccacaaaatctactgtatacagtagaaacactgccatcttgggatcagaaggggaagaacagacggggta

SEQ ID NO: 582392 - DNA, 232 bp, Homo sapiens
  misc_feature (19)..(19): n is a, c, g, or t
  misc_feature (48)..(48): n is a, c, g, or t
  misc_feature (56)..(56): n is a, c, g, or t
  misc_feature (90)..(90): n is a, c, g, or t
  misc_feature (95)..(95): n is a, c, g, or t
  misc_feature (101)..(101): n is a, c, g, or t
  misc_feature (126)..(127): n is a, c, g, or t
  misc_feature (138)..(138): n is a, c, g, or t
  misc_feature (153)..(153): n is a, c, g, or t
  misc_feature (169)..(169): n is a, c, g, or t
tttttcattgatctatgcnttgagtttgctgtctcaacattattgtantttccacntattattactgtataacatatgctagtgtttagntggantaaacntacctaaaagtactgaaaaatgccnnttagtaccttntcataatttatacanttatttccgaatgtancattgaataattttattgagttataaaagtatcttattgctatttaataaaaaattaacacat

SEQ ID NO: 582393 - DNA, 753 bp, Homo sapiens
ggagcaaggtgagctttctgtggccacactcccagacgcctccctgagccctgtgaacccggactcgttgctcctggccttccataccccctgtgcagatcatcctgcgtgtcccaccccagatcccctcctcctcgccatccacattacatgcccccatccccatccctgtagtacataaatggtgactgaatgtagttggagcaagatgatgtgggtgcttaaagagcacccatgtgagcacatgagctaggagatcaagagtgacagagaagcgacaggggccaatctgatgtcctagcacctcaccattcgtcggtacctgctagagaggagcagaggacccaggccccttgtctcggaatgcaacgcaaattgtacttggcgatgttcgtcataaaagtggccgttgtaatgttgcacgcggaacagtgccaccagacacaagcttagtagactacctgaaaacacctccacatatggcaacaaatagaacaatccacaagacacccacggcaggggcagatggtaacagactttgagcaactagagcctagatactataacgacgcctactactaccccccagaacaccatcccctcccaacaccacactcgggcgttaagtactttgatacaacttagttcgctgcacactgaagggggatcacacgagcccaagggtgtactccgcttgtaccccaatacatatattggcagggagacgctcagtaggagaatccaaagatcagt

SEQ ID NO: 582394 - DNA, 88 bp, Homo sapiens
gcctccagtagtgcctggaattaagaccaagaaaagcctggggggctctgagagacttgaacaagtgtcaataaacgctggcctctgt

SEQ ID NO: 582395 - DNA, 700 bp, Homo sapiens
tgagcccccccccccccccccccgttaccagaaacgtccccacccacaaaagaatcatccaaacacaaatactctcatacagaaatatctcctataaaaggatctccgtaccatcgttcctcgattatgattagtagatatcgcggacgcaaggatcttatggcgctctttgatctttaggaccccaaggtcaaacgcgtatccggagggaataggggtcgcaaggtcaccctcctttccctccccaaaagataaaccctacggccctttaccttaagacaggtcctacagtcggggaagactccaagacctccggctcaaggggcaagtaaacactccttcgagatcgggaggcacgactaggtatccgggaactcggtcccgaacgctactctcgaagtacggaagccagcggcgaaaaaaactccacccttaagctcaggacaagtcatcctcggaacggtccactttaacctaagcaagctataggcgccacgccgctcgtactcacggacgcaatcaaatagctaccagggcgtccggacgaagaagaaagatacttagctccttaccaggtctaatcggccctagtctaaagttgaatcaacatccccaacggaacggtcggagtccccacattggcatctcaggaaaactcactaaccaccgagctttaggtaggggggttatttgatcctat

SEQ ID NO: 582396 - DNA, 293 bp, Homo sapiens
aatacactggaataaactgctgcatgcactgacacaggataacagcagaaaacagccacaatgcaggacaagatagacactcgcagtctagacagaagcttgttcagatagggatgttaatgctgttcgtaaattagctagataaaggcagaagtgtaaatgaacatacagaagaaggagaaagcctgctgtgtatggcttgttcagcaggatattatgacttagcacaagtattgcttgctatgcatgctaatagttgaagatcgagggaataaaggagacataactcccct

SEQ ID NO: 582397 - DNA, 351 bp, Homo sapiens
ttccatgtgtgtgagacgcagttctggccctgtcgccgtaagctggagtgcagtggtgggatcgtcgggtcactgctaaactcagcctcccgagtggctgggattacaggcatgtaccaccacgcccgggtcattttgtattttgagtagagacggggggtttctccatgttggtcaggctggtctagagctccagacctcaggtgatacccctgcctcagcctcccaatgtgctgggattacagctgtgaagccaccgcgcccggctgctgtgatagttgagatgtgaaccaaaaataaaattctaagccacccaatccgactgaatggacccttcctgttgagcaagga

SEQ ID NO: 582398 - DNA, 1025 bp, Homo sapiens
  misc_feature (260)..(260): n is a, c, g, or t
  misc_feature (649)..(649): n is a, c, g, or t
  misc_feature (688)..(688): n is a, c, g, or t
gagggggggtcctgaagacctgaagcgaaaatgacagcacaaagtttccaccatcgtttggctgagtagtggtcatatcagtacactctagtcgcgtgtctagggactgattcggctgcagtcgggggccgctagacttttggattgactgcttcactgtgactctcactcagtgggacgtgtcctgctacaattggtgcagcgcgcatcaccgcgtgatgtatgttagtgtgatggtctgcagagagctgtgtgtcaancgaagtcggcgagtacgagagtaatccccgggcttttgagtgcaggcgagtatggtcaaaatcgccctcgttggcgagtaagaggtgcaatgctcacgcaatatatttgccatggagcgatccggggtgaacacccctgtgatggatgcgtcggagagagcaggtgtaacttctagcttgattgttaccggccacattactatctcagaggtttggaacatttggccgctcgaattatttaccgcccgtggggaaatacctgtctttggaagtccacttcaaccatgaattataattgaggtgtgcactaaaggataagtgtttgcttctatgattacaatttcatctctatagtgacgaatcacttggagagaaatttgggaagacanataacatgaatgcccgtggatgggacttgaccatttagnttggaacggtttagtggggaatctgttgcactgcaggagttaggctccggtgttcagagaggtaaacgaggtaaggatttctctccactttttaaaagggtgttctcttccagcggaagaagagggtagaactttcaagtaaggaggcctttggggttttccaatgaggacatatcttctcagggggaaaattgaaggaaagtaatggggctgggtgggaaatttttggaggcttgctggaaaggttggattcaaggttttgggtgactctgggtaggtcactagtatcctgtgtagcctttaattaaagttggttggagaagggaggtggcaaccc

SEQ ID NO: 582399 - DNA, 606 bp, Homo sapiens
  misc_feature (108)..(108): n is a, c, g, or t
  misc_feature (115)..(115): n is a, c, g, or t
cttgaacctctttgtccctggcagatcccatcttggaattgagatcaaaggcccaattgagctcatgtgccacacatgtccctagagttctcagggatgggagggccntgcaccntcagggtataccagagagagagagagtgagcaagcaagcaccgtagcatcgccaccacagtttcctagaaggtgttttatacactctgtgtcattaggaaaaacttatttcagcctaaggaagcctggctgcctagagagctggggcaggcaatacatcattggctaggtccttttccttaccagagaagccccagcagcaggaagcctgagtgtggaagtcaccgtcgctagggtttgggtatctatttctggtgtcagcaggccatggactacaaaaaatactgttgtggaacttgttaacaaagaggaacaatggtaaaactttttttctgtgtttgataagtaacaacaaaaaaaaaatcattggctgttcttgggagacggttttctgttttataaagtaaatctagtagcattaaaattataagttacacaatcacatttagttttcattagtcttaaaaaaaaataaaagatatttaactgaaa

SEQ ID NO: 582400 - DNA, 147 bp, Homo sapiens
ggggggggggggggggggcccccccccctcccctttttggttccctttaaaaaaaggggttttttttgggccttgggcccctttgggtttggggcccggggggggccccctttggacctaaaaaaaattttttttttttttccccca

SEQ ID NO: 582401 - DNA, 856 bp, Homo sapiens
actccaccttactagcagagcaaccttaagcagaccatttgagccaaataagagtataggcgatagagaatggaaaccgtgggcgcaagtagatataggtagccgcaacggagaaagatgcaagaattataaccaagcataatatagcaaggactaatccccgtatagccttgctgtcataactgaagtataactaggaagataagctttagcaagagagagccgaaagactaaggagcccgcgaaagccagtacgaagctactctaacgaagcagctgtaaaagagcaacacgccgggctatggtagcaagaagtagatgggaacgagtgtatagcgaagagcgcgacagaagcctgagccgagcgctggatgatacgctaggttggtccacagactaggaatcttagttacaacatttaaagtcatgcccacagagaccctactaaatcgccgcttgtacaatttaactagtctagttccagagaaggaagagctctataggacacaaggacaaaacactagatagagagagtaaaagactggaacgacacatagtaggcctaaaagcagcacaccaataaaggagagcgtacaagcagcaacagaccactacgtaaaaaatcccaaaaacatataacgtgaagcaccatcaacgcccaaatgggaacaaaacaagtccaccccgtagtagaaagaaacgtaacaggatcgagaagtagagtaaacactgacaacaaaatacatcgctacagggcatgagggcaggaagacaagaataaacaaaaccaagaaactggacaacacaacaagacccaaaaacaaagcaaaccaaccaggcaaagacacaaataccc

SEQ ID NO: 582402 - DNA, 337 bp, Homo sapiens
ccagtcgggcatgcgtactcatctttttcagtggaggtagaataccgtggataacacgagatagagcgaccagtccttgctgagagacaagtctgaatgctccactttttcaatactctctccattcatcagtaaggcgactgcaatgtcggatggatgaaacccagacacatagcaattcaggaaatttgactttccattctctgctggatgacgtgagtaaacctgaatctttggagtacgctggatagcctccaggccagaaagagagagtagcgcgagcacagctaaggccacggagcgagacatctcggcccgaatgctgtcagcttcagga

SEQ ID NO: 582403 - DNA, 1218 bp, Homo sapiens
gtttcctaaattctcctacggtatcacttcccccttttccgtgcctgaactgcttcaatgtacaccgcgggtaaccgttattcgttctccttcttagactgttccgagaataccttcgggcgctggatatgtccatcacccggaggtgaacgcttcgatgtttctgtgacgacgtccccatagggcgttgtgccaacctccgacggccaaggaatgcccaaccgtactcacgtgctgtgggtaacccgcgtgcttttcgttgcgcgctgtggaaattgtcaatcgtatgacgctgcgggcctctgaaacaggggtgttgtaccaccttgggccttgcgacgttttacctactagggcgtcacggtcgattgagtgatccatgtacggctccgtgcctatcttgtcgaggctagtcttcttacatgtggatgtgacccagccttttcgtggttgtgaattaaaggctcctgtgggttccccccgttcgcctgaacttgtgacaaggccatgttgaatgtgcgcttccgtagtatctggggcccaagatgtcgcctccgtgggaatttggcacaatcaatgagaagaagccttcttgatgttgcgggtcgaactcgtacggatggatcatacacgggtgatctccactggagaatgcggtggtaacatcgaagtagacgctgattctgaaacgattctgccgaggccttcaaagacgcgttggagagaccgttatccaagaactcgtgtgtctgggagttcatgtggaactgatgcgctttgggattacagtctttgacctgctccagtcgtaacctggtgcacctggacttcgggtcacggagtgcagcatcaaacgtgcgcccatgctaagcaaagatagccgcgttcccaagagatcctggagaacctaagactcgcagaaagcagtggtactggacggatgtggacactgctcgccatcaggcggtggtctttgatatgttctaatttggaccgactaggcaaatcacgaggtggagctggtgcaactaaggtcatcgatggacgtaaactatttgattgattgtgaacggcgtctggagagaggaggcaggatatccgcatccaccacaccgtgtcatccacacacaagcattaactccccattcgccagctgatgactcaagattcccaggagttctgctcattctaatgatgatactccctacgtgctctgac

SEQ ID NO: 582404 - DNA, 580 bp, Homo sapiens
  misc_feature (227)..(227): n is a, c, g, or t
cggagcccttccgtggggggtcccagatttggggggtgttccaacgcaaaaaccccgccccgggtttgtcgtttccccatccaggggatgggtgtttcttcccagttttttgccccgccccctttttttaacccctcggttttttcttttaatttggggtgagggagggggccccacctcccctcctccccaaaagtggggggccgtgagggggtgcatcctcttcnttggagagacttccccttcgggcaaaaaataggggggggattccccggggggattttaccagggatttttttttttttggggggggggggccccccccccccgggcccctttttgccccggttttttttggtccccggggaatttttcctttttttaaacaaaaaaaggggggggtttttaccccttttttttgggggtttccccgggggccgaaattcccccaaaaggggggggtttaaaagggaaaacccctttttttccccttttttgttcggcccaattttttttttggcccccaaactttcccccccccgggggggggggggccccttaaaaaaatttttttttttta

SEQ ID NO: 582405 - DNA, 1458 bp, Homo sapiens
ggcgacagatggcggccgagagggaacctcctccgctgggggacgggaaggccagcgactttgaggatctggtaggacggagaggacctgttctaccagcactgtctccaccctagatggtcaagtctcactcatctcgcagaaaccgagtctagtcttccgtgctagaagattatcagtgcatagagctccacattggccgccaagaaagccgcgacgagatacgttgctgagttgagactcgagtgagcagcagcaacgagtcgtcttgtctggcgagcaatgcctacaaggaagggagagctcttcctcttgggatcgggccctgcaataggggacagccgtgatccgtattccttcggatagaggctttctactctgttgagatcgagcacgctgtgtaaaactttcctgaactaacatctcgatgtggcgtgccttagtcaatgtgtaacagtccaggaggcagtaatgtcttgactacaccgtggaattgcctttgagttaagaattcccatggggtagaggacgcacttgggagacggaaatgtaacgacgcatactggggaaggatctacttttttctggaaacaggtaaagaacaaggtatgaggtggtaaatgcgggaagttcctaggtatatacaacggtatgaggtagaattggacaggtgaatacctgcgccatagtgtagtcgggaccatcattactggagggtatagaatccttaaacggatgcagtccatcctgtatttaccactggtttgccagcggaaaagcaacgttgaggcctatcatacccccgacgtagcgttcggcaacgaaattgcgagttggagccatctccctcgggggagtaggcaagcgggcggccagaaacgtcaagagtccaaattgagccataccattaagtttagtgacccaactaggctcacggggttttacatcaattgcagttgggacagaacacgaagaacttacacgactgaaaaaatgagcgacacgtcactaacggtaacaggggggattatgaagcccgaacagggtgcaacgaccggtagggggtgcaacgagcgacaagcaactccacatccccatccaccctgcggcaacgtcgtggtcacgaccacaagccaggcgccgccacgcaggctccactggacacgagggcaatcctctcccacacaggccaaacaagggcaacacacctccaagccgtcaacccagcaagagagttccctgacttcaaggggccagtcctggagagacagctgccagaaggcgtgcccatcaaagccaagcaagaagcacagagcactcgcaacgtgcagccacgcgacaactgcaacgagatggtgccacccacgggcagacagacgcgccagagcacaacacggcaaaccacaacaggcaggcaaacagagcagcagacgccagagcagacaccggcccccgaac

SEQ ID NO: 582406 - DNA, 704 bp, Homo sapiens
gactctgcagaaacccggcgatatggctgccgttgtgccccgcgcggcatttctctccccgctgataccccttctccatgggtctatcctgctcctctccgctccacgcatgtgagggagcggttctgcacagcactaagggacagcccattccccctggaatagggcctaccgttgtctcacgaaaggattctgcccccagagagcattgtttcccttcatgaggtggacatcttcggagctccacgaaatagccccctaaacaggtggaagaactgcgagtgatgaaatttccagggctttgcttgctgggagataacctccgtgatatcgagggagactgatcctacatttggatcgcacagaatagctggtgaacctccacgaatgatgggttgacaagcatgaaagatgcagcttggtgtgaagcactctacctcgtcgttgacgccattgagtagtcataccccgaaggtctttacttaggcgtcatgccgggacagtcgtgaatgggttttagcacaaacactcaatctacccattaacaagcgtgaacggtgagtacaaacggtgggttatggcaatccatggggctgagcgtgtaacggttgcacaagggtgtcttgcctcatgggtattgcctggtttgccttgcctgttatacgacggccctggccgggggagtccatcaagggcctctgggt

SEQ ID NO: 582407 - DNA, 199 bp, Homo sapiens
gaaaaaaacaattcttacagtctaacctggcacacttagggggctttattacactttaaaatcttctagctcagtatgtaaattggagaagtaggcaaaaggtctagatgtaaatataattggagaaagattttaaagaaaactccataaggttggaccgagctagggggaccctcctaagaagtcgaccggcaggcat

SEQ ID NO: 582408 - DNA, 170 bp, Homo sapiens
cagtaggaagatgtgctgttctctggttctctaaaatggccacacacactttaaatgggccaatgaaaagatacaatttctttgccccgggcccaggaccctcaaggctctgttgtgtggtgcccgtgaggttaagttcagagcataaactgacacgccaggctctggga

SEQ ID NO: 582409 - DNA, 363 bp, Homo sapiens
ttagacaggtgtgttgccttcaccccagcgaaaaagaaaaacagatgaataagcttttgatctccattttctttctctaattctcatggtagtctgagatgcttttaaatgtgatgttataagcttaagccagcttcacttacagcaccaagttttttaccctcctggccaaaccagtgtctcctaatggtcacccttgcagcacttctctccaaaagctgcgaattcatccatccagctttcagttgctctttggtcgccttgggctgtgtgtttcacgagctcccagagcgcagtgtgtctcttgatgtgtctctccctctcagagagtgtgcatatatgcgcatgaaaggtgtgtgttcc

SEQ ID NO: 582410 - DNA, 294 bp, Homo sapiens
agcgtgtccttctccaatcagccatcttccatcatccctgcatgttcttctgaaagcccaatgtgaacgagagggacccagtcctttcccttcctgcaacccccacagcaacaacccatggcagggagaaggacttgtggtggcccagagacaggcagagattcaggcgacaagggacaggacaggaatgatgatgagggacaggagagggtacaggtaaggagtaaagagagcacctgtgttcccggccaagctgtagtcgctctcccatggggtactgagcacgtgaccagt

SEQ ID NO: 582411 - DNA, 259 bp, Homo sapiens
  misc_feature (244)..(244): n is a, c, g, or t
tggagtgcagtgactattcataggggcaagcattatgcacaacagcctcaaactcctgggctcaagtgatcctcctgcctgagcctcccgagtagctgggaggctgaggcatgagaattgcttgaacccaggagggagaggttgcagtgagctgagactgtgccactgcactccagcctgagtgacagagtgagactctgtctcaaaaaataaaaataaaaaataaaagaaagtaaaaccaaanctttaaaaaaatata

SEQ ID NO: 582412 - DNA, 116 bp, Homo sapiens
ccattctgtcccccttatcagtctctgaagcctcaactggactgtcttgggatgactcctagctgtcctttttcctctccgacgcggctgctcaaggcctgcttatgttctttttt

SEQ ID NO: 582413 - DNA, 414 bp, Homo sapiens
gactctagagggtacaaggacttgcagcgagcacttatctatgattatcgctgttttaagcagggcagactcccaagccagagtagcttagacagactcccgaactttttcttcttaatttatgagtgttcttcacacactagggaagttagctctttgtccgtgatgtgagttgcaaacattttttccagttagtagtttttctcttgactaatttttttttttttttttttggcaaaacaaaatttttttttaataaggaccaatttataaacaaattttagggcttcgggatttaaagttttagtaaacccagcctttgccattaagggttgaagggcctttttttcttttttggaatttccttcaaaaactttttttttttttttggaaaaaaaatttttctttttttcc

SEQ ID NO: 582414 - DNA, 327 bp, Homo sapiens
  misc_feature (14)..(14): n is a, c, g, or t
gagctcggtaccgnttcatcttctgaatcccaattcttacatgtattgcatgatgaattcagatgccagtggcctgcctggaaagaccagtcttaacgcaacaaggagtctggcaatccacttaataacacaaaccataagagaaaaaaatccaaaacctctatgttaatgaagcagcaactgtggtcccctagcctcctccacttcaagtacatggtgttcctagcacattaatgtcccttaatcctcccagcgacccctaggcatctgatgtgctatctgcattggctccgtgtcagtatcagctctggccttggcctacagagc

SEQ ID NO: 582415 - DNA, 741 bp, Homo sapiens
atcttcttaaggagctggtctgtggatcttgcgcttgaatagatgaacctacataagtctctctgtgagtgctcttcctgatgctcactcagtgacagtcacttccagtcctaatacaccttccactatggtcacaggattgacgagttcacaaggctgattctacacatttactgccctaaacctctaaatgcagaagcttggccataacttggatgagttacacctataataaagctgtgtgtcatggacaaagatcttctgacttgagccctgaaggcatgaacaagcatgccagctaatgatttgaaggtcagcaagctaattgtaccacttgtaatcctacgtattgttacaagcaacggaacaatactgttgcgtgaaagccccttgttgtaaagcctgtaaagagactcaagtctctgagagatccagttttccttgtgcaacgataatctataccagataatcggtatagattgctattcagaagaatgataaaaagatgcctcaaatctagtcgaaggctcacctgatggaaaatggagctgggctactgagatagttttcatatatatattaagataaccattctctaattccgtgaaaatatgtctttgcaaatctctgcaagttaagcaacttaatctgaagttggataattgggttttgtctagtactcacttctccctaaataatcttcacagatattgtttgagggatattaggaaataatactcg

SEQ ID NO: 582416 - DNA, 1892 bp, Homo sapiens
tatatatttatttttaaaggagtagaaaaaatctctttgttaacccccacacaaaaggcccaagtgggggggttaaaatggccaaagggtgggggtgtgttggggcagtaggaatgaatgggcgacaatgtgggcgcatgtgtagaacatgggcaacaagagcagtgtagaagcaagaaatgtaacacatggagcaaatatgtatttgggggtgctcgccctagtagatgggtgtggtgaggaatctccactactacaccgcgacgcgttagtcgccaatgaggtgagaggctgcactatgagggatcttgtggggtgcattataaaaacctcggtgttgctcaccacacaactcgcgaggagaaaatagtattgtgcctagtgcactagtaaagataatcagagtgcaaatcaagacaaaaaaaaccacaaaaagggtgtgggccccacacctttttgggggaaagaaacgagaaaaatatcatcctatatataagaggggacaaaaagatgaagtgggaacaaagaaaacagtgatgtctcgcagaacatagaaatagagggagagaaaatacccgagaacccacaccccaataaagatgtgagagagcaccaaaaaatggtggatgtgttttatccatggtggcgctatctactccctcctgtagtgagaagcaaaaatctcacaagaaaattataataagaccactctctaaaaaacagcattagtagaacacacaagatcatgatgtggatagaacgacaaataagtatctagagcccccaggtagtcacagtataaatataacaagctatcatgcgaggaaaagcaagagagaagaccaacaaaaaatggggatcactttatgaaaatttaagaaaaaaaaaactagtagatgagaagaaaagagataaaaaaaaatgataatatgataaaaacaaatactcaatatagatcattgtagaaacaaaaaagatatatgacattaagaggacacacctagtatcatatcaatcacagaaatagagaagagagatccctataaaagaaagaaaaaagcagaggcaaagataaaatgtaagaaatgaaatgtataaataatgttactatatctacaacctaaacacaaagaattttacaataacactccacatcgacatacaaaacaaaatgattgtatcaaacatacatccttatgtatgttgaccacaacttaataacaaatataaaatagaataacttatcaacccaaccaaaacaaacacacaacaaacataattatatatcaaatcaacctgtacgataagatatgactatagcataaacataactcctacatagtgaatacacacacatcaaagacaaagactaatcagtatactagtatgttaatctctagtactgacaacaatacacaattatgatatactaacccaccaccaaacacatatgaatacacgagaaataacttaatatatatatgatataaaaacataatcaaaacaatttataagcctgtcatttccaaaacactcacaaatcaaatacaaacacacaaaatattataacaactctcacgtcccaccatcaattatataaagaaatgacagagaatacactaagaaactataaagataaactatcatgagcataaccaccactattacaatcgatactaacaaaataaatacttactatcaccacgctaactagattatcataaagaaaaaaacaatactacatataagacaatataattacgaacaaacccacaacaaacagaactaagcatatcaaataatcatatgcatcacaacaacaaaaagaacacaacaatataaccattataatactaatcacataaaccaacagcaagatagagtaacaaata

SEQ ID NO: 582417 - DNA, 991 bp, Homo sapiens
  misc_feature (991)..(991): n is a, c, g, or t
gccaaacagatcctggagctgtacatgctgtataatgctggtgaccgagaagggaggcctggatggagatcatcaacaagaagatctggagggagatcagcaaaggcctaaatctgcccagcatccatcaccagcgccgacttcaccctcaggacgcagtacatgaatgtatctagtatgcctatgagtgtgagaaggaaagccttgagttccccagctcgatgctccaggcatgcaattgatggcaaccgcagggagggcccggtggcccagctaggagctcctccctctttggctactcacctgctgcgtgctactgctgcatgccgcatgccggggcccctgtcccttctgctcccccacccaagatccgctttcccaatccttgggtgctgtgggttccgagtcagtggttaccaagtacctacgttagccctcgtgcatactcccccgagacataccacctctcaggaaaggtggaatggtagccctctagttgacaaccatgttgcctgtgccgaaatcgtgcgtgggctgtgcccgttgacccttggacatagcccaggcagggttgtttactcggaatgcgcgcactggtgatgccagtcttccgggagctggtgggaggtcaggggtgacgtctttgctgcagaagcaaggcatcgacggctgtctgaggaggagcagcggctggttgcggcaggccttcctgcgcaacttgttccagaatggctcggcagtccgcatgagatctccggtcgactgggcgcggcatgaaacctgagcggaggccctcggttggcgcttgggcttgacaccgagtagccttgcgggcttcacatttggggccctctggcccccatgcagtgtggtcgttgcccgcacccctcggcgcctgtggacggacgcagtcactggcctttcttctcaagcccaccgtccacttgcacttgtctggtggcttcgcacactaccgtttccgtggggaaan

SEQ ID NO: 582418 - DNA, 322 bp, Homo sapiens
taagagcttcaaggaaaacccgaactgcctaccacatcaccatcagtgtttccctcggcggctgtcaagtgcagccccccccgtgggtcctttgttcagctaccaccagtatcataatcagcccatccactctgtctctcagggagttgttttttactccgaggtgcggaccaagggatttcaaagaggggccagccaggagttgaaaaaaccagttaggtcctctgtaaaggaaaaacagtgtttggagttaaccgggtttggggagtaggcttaagcccaaccttacacgtttgatgattatcaacatgtgcttaaacca

SEQ ID NO: 582419 - DNA, 192 bp, Homo sapiens
atgggtcagatggacggtcagaaaagaaactgcccatagactgagacataagccagttggacacgttattataccaagccaatatagtggtgtgagcgtgtactactacacaacgaatgaggttgtactagaattaaatcatgcaaagcaggttgcagacatggttagattaagtatacaacacatttccat

SEQ ID NO: 582420 - DNA, 382 bp, Homo sapiens
gaagctggctctctaccaccttcttactacatggaatatgtgagggcactagagactcatcagaacggattgctgaggaccatactgaccatacttgaagtctttcagctaatggtgagctggaagaaattgctacagtgtatctagaaaatgggtgaatacccactgatttccatcagtggtttcttgagactttctgaaaaattattgacatggatgcaggggcagatcaaaatcactctctggccctaatcacctttttcttgactctctcgctgattttccaaacacaagttaggagaaaagtggtagcatgacaaaaacagtctattacccaaatcttaacaaaggctacttagttttgggggataatctagagaaa

SEQ ID NO: 582421 - DNA, 100 bp, Homo sapiens
tagcttgcgactgtactttccggggtgttggtcgatagggaatttagctatgtaatagctgtcgtcctaccgcatgagttcatgcggtcagagatatagt

SEQ ID NO: 582422 - DNA, 436 bp, Homo sapiens
gcgattagccaagagtccgtactactatcaagctctgtgagacttcagaatctttatgaagcgtgtgtcaactggaattcaaatcacattttgccaaatccaccttgcttccccttggaatggctagatgtcgcaggtctattatggacaccaactggaaaaagacttctacctgtaacatctctgtagaaattgcacagtaactatcttcatcaagactttgatggccaccataccatcactactcataaagctacatgtgagagaattgtttgttgttatcaatcctaatagtctttgacctatcaagctctcgtatcaagctgtaagactgagtcatggtagtctctcactgtaagctgggcctttcaccaagatggccttcttaaacaacctaccttctaaacatttaattcttttgagcttgatagtgcat

SEQ ID NO: 582423 - DNA, 893 bp, Homo sapiens
  misc_feature (28)..(28): n is a, c, g, or t
  misc_feature (124)..(124): n is a, c, g, or t
  misc_feature (196)..(196): n is a, c, g, or t
  misc_feature (240)..(240): n is a, c, g, or t
  misc_feature (336)..(336): n is a, c, g, or t
  misc_feature (369)..(369): n is a, c, g, or t
  misc_feature (548)..(548): n is a, c, g, or t
  misc_feature (561)..(561): n is a, c, g, or t
  misc_feature (587)..(587): n is a, c, g, or t
  misc_feature (621)..(621): n is a, c, g, or t
  misc_feature (640)..(640): n is a, c, g, or t
  misc_feature (645)..(645): n is a, c, g, or t
  misc_feature (684)..(684): n is a, c, g, or t
  misc_feature (688)..(688): n is a, c, g, or t
  misc_feature (693)..(693): n is a, c, g, or t
  misc_feature (695)..(695): n is a, c, g, or t
  misc_feature (697)..(697): n is a, c, g, or t
  misc_feature (724)..(725): n is a, c, g, or t
  misc_feature (727)..(727): n is a, c, g, or t
  misc_feature (737)..(737): n is a, c, g, or t
  misc_feature (740)..(740): n is a, c, g, or t
  misc_feature (749)..(749): n is a, c, g, or t
  misc_feature (755)..(757): n is a, c, g, or t
  misc_feature (759)..(760): n is a, c, g, or t
  misc_feature (763)..(763): n is a, c, g, or t
  misc_feature (766)..(766): n is a, c, g, or t
  misc_feature (772)..(772): n is a, c, g, or t
  misc_feature (776)..(776): n is a, c, g, or t
  misc_feature (786)..(786): n is a, c, g, or t
  misc_feature (802)..(802): n is a, c, g, or t
  misc_feature (806)..(808): n is a, c, g, or t
  misc_feature (815)..(815): n is a, c, g, or t
  misc_feature (827)..(827): n is a, c, g, or t
  misc_feature (829)..(829): n is a, c, g, or t
  misc_feature (882)..(882): n is a, c, g, or t
tcatatataatttttattatgaccatanaaataaccctgtagtaaataacaatttaattgtacattttaaatttaaaaaaaggtgtagaattggattataaaacataggataaatgctacacgngaaggatgcctcacttaatgctgttattattattatatattgtattcctgtattaaaacatgccatatattncatagatactcatgcagccaccaaaattaaaataaatttaaatnattaaaaacagaataaaaatttacctacagaaacaatattctttaacttatttgcagttgaaagccactggcaaaaaaaaaaaatcactagagttnttaatctattatcttactaaacagtatattgtnaccatcttttacctatacccttgagtcaggtgaaagaggttaaagtttgtggcataataacgcttcattgaatgcccaatagtatttaacatgttaaaaatgttgaattaaactattaacttcacacataatctaaaatttataaatgtactgcattttattatataaaagtacaatcnggccaggctcggnggctcatgcctgtcatcccagccccncgggaggccaaagtgggcagatcacctgacgttngcagttcaagaccagcctngccancatggggaaaccctgtttctactaaaaattcaaaattanccangcatngngncacatgcccgtaatcccagctactcannangctgaggcanganaatcacttnaatctnnnanncanatntcacanttanccagacatcnttccaattcactccancctnnncaccaanagccaaactctntntcagaaaaaattagtacaattagtacaataatatactactcatttaattttanataaaattaaa

SEQ ID NO: 582424 - DNA, 234 bp, Homo sapiens
catatgacgaagatggacttcccggtgttagtgagttagcaatacagtcagtgcagacttaaagcgaatgagatcatttatcagatatcagttgaattgtgcagtcttctctactttggtaataaggtaggaagttagtaggactcacttctcggattaataagcaattggcagcacacagggttccacgggggggtctcacgctcacctgaaaacaccggtgcccaaccggtg

SEQ ID NO: 582425 - DNA, 880 bp, Homo sapiens
gctttctttgcggaaatcaccatggcggatgggaccgctgtataagtatgctgaaaactggaggggcttcatggttctctattcgtctgttcagtaccagtagtgggtgtcatggtcacgtcgttgcttcttccgtaatcacaagccacacttgccatttgggtcaaatctaccggtacgctcgtgaagtacttccgtgatgatctaacctgaccaggtcaagtgtcccaagatatttgaagggtggactgatgagattctagtgtgatttgagacgtaatgggcgagtggacactatctagtgtgtagccaatgaggtagactggggggaaagtagtacacagagggcggatagtccaggtgggttgcacgatggggatagagactttaagcttgagttctcgataataggtggcgcgcgccagacacagtaaccatggcgatgattcccaccatcatatggcgcatcgatgcgaccgataagacaacgaggccaactgagacatgcatgcagagaaggcaagtgagcagcgaaattcttggtggtctcgctgtggaattggcatgtaccttggaagcactgagggacctatgctgtgtgaggcagaacgatgtgacatgtggctgacatgcagagtaagtcatgcaacgctgtgagtggctctataaggaagtgttctagaagccttggttaacagtcaggcctttcccaataacgaatggatgagtaccgtaaatcctgcgataaaaccaggccccagttcccgggctggcttggggcgaagtgaaacatgtgtgagaaaacatggccaagatagatgattaaaagttgggagaaaccccagctaaaaaggaccacaggaaaagagaaggtcagggg

SEQ ID NO: 582426 - DNA, 115 bp, Homo sapiens
tagtccacacctgcaccggtagtccacacctgcacggtagtaccacacctgcaccggtagtcccacaccgtgcacctggtactgcacctggacttgccctccaagtggatcctcg

SEQ ID NO: 582427 - DNA, 101 bp, Homo sapiens
cactgcacgcccagacatccactgcacgcccagcctcccaaagtatagagattacaggcatgagccagtgtgcccagccaattcatcggatgttagatcga

SEQ ID NO: 582428 - DNA, 224 bp, Homo sapiens
ggattgtggaatcatttggcgcacaggtgcagcagccgtggtcagactttaccttcgtgacatcccaggtccggaaaagaaactgtcggagttcaggatggtggcttctctacgtggtgtccatggtctgtcagcgatgatttctccatcccgtccccgacagcccacgcccaacgtcatgggcaaagttcttggagcatgctcagctagcgcaataggcccgc

SEQ ID NO: 582429 - DNA, 605 bp, Homo sapiens
  misc_feature (541)..(541): n is a, c, g, or t
  misc_feature (565)..(565): n is a, c, g, or t
aattcgtgtaagccgaaatgggaaagctcacgaccaaagccactctttttcacgccaccaaaggccactcgcgcgtcgctggcacaataaccattgataaacaccccaccgcattccagacgtgccgccatctgtctggcctgtgtttcgtcagtggtaaaaatggtcgctgaaagccgaactcactatcattagccagttccagtgcatgttctgcatctttcgcaatggtgattgccgcaacggggccaaacatttcttcccgaaacgcggtcatttctggggtaacattcgccagaaccgttggcggatagtagttacctgccccagccatcttttccccgcccagtaacaaacgcgcaccctgcgccagggttttctccacctgatgatgcagctcatcacgttccgagccattggtccgagagcgttctcttcgtcacggggatcgcccttttcaaggctgccgcagctgccaccgttcggtaaatgccgaagcaattccctcttcgataataaagcgttttgccgctgcaaatanctgtccggtattctgatgtccggntaacggccgcttttcaacgccagttccagatcgggtcgtt

SEQ ID NO: 582430 - DNA, 1208 bp, Homo sapiens
  misc_feature (302)..(302): n is a, c, g, or t
  misc_feature (360)..(360): n is a, c, g, or t
  misc_feature (404)..(404): n is a, c, g, or t
gcggacatggcgggatcccggttcgcgcgggagctcttcctccaggtcgtggcggccgtgttcatggtaagcttctacgtcattcactcgtacgtactacgcaaagtactccaggtcctggtacttggcctcaccggcagtggacactcgctaccatgacacaggtatgagaacgacgtgctggactctctagggacgatatggtggacgcatggcgagacgagtctgatggagagaactcaccgcaaggacttgcttgtggcgcaagctgccgtagaactggtggactgcgaatcatcggnacacacgggaccttgtcactcatgcctgagacctgcttgcgggtgcacctacgttggncgactggcgagtcaccctgttatgactagagaccacactgttgncacagctacatgtcacatctaactatggctagtgtattgaggcccggactaaccattggtcaatgactgaccaagggtgtggccaaggctgttccgtttagtttccaagttggcgactcacctttgcatagcgtagagaacattggcttttcctagtggcaccgatgcgtatgtgtaggcccccaggcttgagtgcgcatgcacgtcctcagccggtaagggagtgcacctccacgaggggacaaggggcgagcgcatggggtgcccctgacaccccgacagcatagggacacttcaccccttcatgtgcttggtgcgcatgggcgtgctgttcacgcacgtcactgttctgcacttcaaggcagtgtgtcaaggcgttgaccatgctcggcttgcgcctgcggtgagtggggggcatcgacttggcctcaccttagccactaccggagacccgagtgccttgcccagcgccccgccggcctgggttcgcagacaccaacgtggcggtctggctgcgacaaggctcagcgtggttgggcaccttcctacattgaggatcgctgtgccggccctgttcttcggccccccattcgacgcctgcggctaggggcttggtttctaactccgcaggttgcttgctgccagggtcctgattactcactccaccgggaaacttaccaactttcttacaaggcttgattgacgctgggtgctttaccacttgcgctgtttggacgacaggaccctggcttgttagccttgccatggcaggccgtacacgaccggcacactctgggcccaggc

SEQ ID NO: 582431 - DNA, 421 bp, Homo sapiens
gtggttgacctgtgtttgcaaggttctgcacagacggtgcccccaggtgtcccaatacctcccgagcagtccaagaggcctctgggcgtgcacgtgcagcgaggcatcggaacatgcctacaaatggccatgtcaaggtacggcggcttcatctcctgccctcagccctctggtgcctgtgaggtgcagtgaccaatagccatgcgcagccactcttgaaagcagccccttgcttgcggctggtggccctggtgcccagtcctagggggcttaccctccttggcactgaggccatcaggtcggcgcagccggtgttcttgaatggccttgggcttcctgagggctccaaggcagaggctcactcagagtccatcgtgggctgagttgtccagcaggtggggagaaggtcagtcatgaaagc

SEQ ID NO: 582432 - DNA, 142 bp, Homo sapiens
aggtatagtcaagaggacatgcatgtatctatcttcggcagagcctgctttacgagcattatgcagctgtcccccaaatgcagaaccatggagcagacagactttccagtacagggcccaattatgtgtcaccagtgaacat

SEQ ID NO: 582433 - DNA, 294 bp, Homo sapiens
ggcggtgcacactggatagcgtgataagccagtctccagagtatcccccttcctgggagcccggcatctacactcagattagccagtgctcccagctgcgctccagccctctctatgagtacatccaagcaacagagatctcaataccgcccttaattgatgttgcctatatcttgacacctgccaaagcttcctgcacgggacaatgagaaacacctgcgtaccaagatataatctcatgatctttctggttcctgggataactctctgactcttagacatgtctctttcttc

SEQ ID NO: 582434 - DNA, 351 bp, Homo sapiens
  misc_feature (8)..(8): n is a, c, g, or t
  misc_feature (34)..(34): n is a, c, g, or t
  misc_feature (77)..(77): n is a, c, g, or t
  misc_feature (103)..(103): n is a, c, g, or t
gtccatgnaaagaaaactgcctcgccttttggtncccctaagcctaatagcctacagataaaaggtcagatatcctncccataggtaggtactcctatgttcnacccttatgtaaagtgcccaatttattgagccgtaagaggattaccctaattgactattccccagcctgctccttttctcttgcaacacatggagtcagcaatgggaccatatcctctctctttcccctccagcctgctttccccctttaaatactgaagccctcaaaatcatctttctaaaaaggtatgaaccatagattgttcctgtggatttgtgtttctttcttccgggcatatccttaagctt

SEQ ID NO: 582435 - DNA, 189 bp, Homo sapiens
  misc_feature (44)..(44): n is a, c, g, or t
ggtccgggaattcccgggtcggacaccgacgcggtccggattgnctgcgtattttgttgtgtgtgcgcaactcagactttgtgttcattgtgttaactttaatttgcaaagaaacatcacgtgtactgctgtttttcatttctgccttttaaaaagacagaacagactattcagaaacagacaagaagg

SEQ ID NO: 582436 - DNA, 254 bp, Homo sapiens
cagcacgctgctcagacgtgctgggacttacaggccttaggcatctgattcttgccttttgacaattgttagactgagttacaggcggtctgtctgggacccacatcctatattttgaactgatgaggcccagcaggctcagaaatgggaaggcgctgtgcttggttccccatctgtctggctctttcatgtaacaagttctcactggtgctgtgagcaacttgtaaataggccagactgctggtctctggaat

SEQ ID NO: 582437 - DNA, 283 bp, Homo sapiens
  misc_feature (254)..(254): n is a, c, g, or t
atgttcggcagtgttctgaggttctcgtacgagatcatctgtgcctgacgcctgtcgtgcagtgaacatgttctgatgcagcatgctgcctgtcgagctgatatgctgtggatcagtgtgtgtgccctgtgtcactgcctgccgctgtgcactgctgctgtgatctgagtgcttcagtgaagaactgctgttgtcggcccgttgactgttgcctgtggtgtgatccctctagatgtctgaccttgcatgtgcantgcaatgcttgtgcacttgtgcctgtctg

SEQ ID NO: 582438 - DNA, 111 bp, Homo sapiens
ttggtgctgctgggtgatgagggtggggtctggtaggaccagctgtagtccgagccctttaggtctttgattacctgctcgctggcgggaggcagtttgtggggttctgct

SEQ ID NO: 582439 - DNA, 619 bp, Homo sapiens
agactgtaagtgacatatgagaagggaaagacagagatgcatggaggtgtttacgcatgaaacatgcttcacattattagagttggggaaatgcaaatcaaggccacagtaagataccactgtgtactctctagggaagctataataaaaaaatcagtaacaggtgttggctaggatgtggagaaatttgaacccttgtacattgctgatggcaatgtgaaatggtgccactgttgtgaaaaacagtttggcagtccttcagaaagttagatgtaaagtttccatgtgacacagcaaatctactcctaagtatatactcaagagaaattaaaacttacatctgtgcaagcacacacaaactcgtgcatgaatgttcatagtggcgttaatcctaatagccaaaaagtagaaataagctaaatgtctaccaactgataaatgagaaagaaaatgtggtatgtccatacaatggactattactcagccacaaaaaggaatgtagtcctgatattggacacaacatggataaaccttgaaaaagtttatgctaagaaagaagccgtcataaagatcacatgtatgatctgctatatcaagtcagaatagcaatcgtaagacg

SEQ ID NO: 582440 - DNA, 406 bp, Homo sapiens
actactactactaattcgcggccgtcgacttttttgagacagagccctggtctcgcccaggctggagtacagtggtgcaattatggctcactgcagcctcgacctcctgggctcaagtgatcctcccacctcagcctcctgagtagctaggactatagacatgcactaccatgcccggctaatttttgtattttttgtggagacagggtttttccatgttgcccaggctggtcttgaacttctggactcaagggatccacccacctcggcctcccaaagtgctgggattataggcatgagcactgcacctggcccttgttaagttttaattaacttttttgtttgtttcttttttttttttgcgacagagtctcactctgtcaccctggctggagtgcgtcgacgc

SEQ ID NO: 582441 - DNA, 120 bp, Homo sapiens
cgactcttgaggatacaccgccacgagcgcagcgcagctgcaggagtcagggggtgttacggagtctcgttgggtgttaggagggctcgttaggagggcggtagtagggctcgttacgga

SEQ ID NO: 582442 - DNA, 264 bp, Homo sapiens
taccggggataccgccagtaacaacagacattttatgcatcctttgtacgtaaggatccccaaattctcggctgtggatcacatacccggctatagagctgttaggaaacagggcacacagcaggaggtaacatgggggtgggggactgagcattactgcctgagctccacgtcctgtcagatcaatgggattagattctcataggagcacaaactctgttgtgaactgtccatgctgggatctaagttgggtgctcattatga

SEQ ID NO: 582443 - DNA, 825 bp, Homo sapiens
cacccgggggagaagtgtgcccccacgggggacccacagcgacggcaggtgtcacgcccctcggcgccattagttgtgacccgccgggcacaaaaagttgcgccaagcgacaccgcggcgacaaaaaaggggggagcacctttgctgcacggaaagcataccgtcgataccgccccggcagaaaaagagcgtttgcggtgcggtcacgaaagcgaagaccccgggcttggggtaaacccagcagccccctgcgacaagccgttgcaggaaatggcacgctacaggaagaaaaaaccacgctcgcgtgcgcaaaggtgagtcagagcacacggatctgccaggtctggaaaaaaaatgtccatcgaaaagtaggagacaaagaggcctgctggaccaaacgcaaggggaaggagaaccaagtgggaacaggctcccgtcacaggcggacgtgggttctgcaaacacatgccagactggacaggctcgacgaccgcagcctgcgatgtatgtactccctcccaagccctctgggccaaaaaacgccagcacaagagggctcgatgacaccaaaggccaccccaggaccaggcctccttagaagatgattttcggggaaaatggtctggctctaccgacctaataacagaagtgtctcgtgtacatacacgcaggacataacaacagtacacacaaggttgcgaaacactgctcgtcaaaaagagaagacaagatatgtgaatcttgtgtgtatacaaacacacaacaaagtcagcgagttttgtagtaacaacaacaaaataggatattttctgtgcaatcaaatca

SEQ ID NO: 582444 - DNA, 461 bp, Homo sapiens
tgcatcttcactgatgggactcagtccccactgaaggaaatacacctcccaccaagtccaacctccaacactggagattacatttcaacatgagatttggaggggacaaatatccaaatgtatcagctgtgttcccagttctaggtttatatttcagagtatattctttatcactttttggtggtggtgttgcagggagaagtaggcagcaacccagatacctatcactaggtcaatggaaaagacaaaagtagtatattcacatcatggagggctggtacagtggctcacacctttaatctcagcactttgggaggctgaggtgagaggatcactggagccaggagttcaagatcagcctgggtaacaaaatgagaccttgtttctacaaagtgagactctgtctaaaaaaacccccaaaaaacaaagatgcaaaccaaaagtgtttatatatttattta

SEQ ID NO: 582445 - DNA, 246 bp, Homo sapiens
tcctggttaagacagagtctcactctgtggcccaggtggaagtgcaggggcgccatctcggttcatgtgaactttcacctcccaaattcaagcaatcctgtgggcctcagcctcccaagtagctggaataacaagcgtcgtgaaccacgcccagcttattttttggttttttaagataagaagacagggttccgccagtgtgggccaggcgggtctcaacttccgtggcctcaagtgatccacctg

SEQ ID NO: 582446 - DNA, 231 bp, Homo sapiens
tcctgcgggtctctcctgacctcaggtgatccgcctgtctcgcgcctcaagtgctgggattacaggcgtgagccgccgtgccgggccttgactgtgagattctgaagtgaattaattcacactgatggtgccctctcacttgagtcaagggttctggtcttacagatgccctcttcgccatccatctgatgttcaatgtgaatatagcagcaatctaactcttagcaggac

SEQ ID NO: 582447 - DNA, 419 bp, Homo sapiens
caaagttgattgcatgttattccattccattccattccattccattcctttccactcgggttcattccattccattcaattccgttccgttccgttgttttccgttccattccattccatttcatttcattgcattcccctctggttgattccattccattccattcaattcaattccattccattccattccattccatacccttcaggttgattcctttccattccattccattctataccattctactccattccgttccattccattcgggttgattccattccattccatgcccttttattccattccattccattcctttccattccattccataccattccaccagttgattgcatattattctattccataccattccactgtcgattgcatgttattcctttccattcct

SEQ ID NO: 582448 - DNA, 280 bp, Homo sapiens
  misc_feature (136)..(136): n is a, c, g, or t
  misc_feature (138)..(138): n is a, c, g, or t
  misc_feature (150)..(150): n is a, c, g, or t
  misc_feature (160)..(161): n is a, c, g, or t
  misc_feature (188)..(190): n is a, c, g, or t
  misc_feature (198)..(198): n is a, c, g, or t
  misc_feature (207)..(208): n is a, c, g, or t
  misc_feature (216)..(217): n is a, c, g, or t
ggacacggacttgcattcactgacgagaccacacaccactgtcactcagggaagaaaaagcgcgggcatgccagcctggagccccgaggaggcggcctcctcttcaagagtgggagggggcagtggctggagtgtngngggcagcctggngaacacctcnngcttaataggcgttgttagagacgaannngggactcngctggcagnnagccccanncctgtaccgcatcgcgaggtgtacctttctcttgatagggcaacggcgtgtttggccacgtgg

SEQ ID NO: 582449 - DNA, 185 bp, Homo sapiens
  misc_feature (121)..(121): n is a, c, g, or t
  misc_feature (160)..(160): n is a, c, g, or t
  misc_feature (181)..(181): n is a, c, g, or t
cttggttcgccagcggatcagtcgactcggccagaggatgtccggcttccagatcaacctcaacccggtcaaggagccactcggcttcatcaaggtcctcgagtggattgcttctatcttngcttattccacctgtggaggttttaagggccaaacaganattcaagtgaattgtcctccngcag

SEQ ID NO: 582450 - DNA, 339 bp, Homo sapiens
gtgctactagttcagagttcagagactgtatggcctgaaacacctaaaatatttactatttggccctttaaaaaaaaaaaaagattgtcaaccccgtgagctaaataattgtttatggctgtgtgccactgaaagtcaccagtgattggtttggcagcatcattgtagcaaaagttttactgacacattcttctcattctgaacagccattttcttttacctatttccccccacagtaaagtactgttggagcagtaaaaagcccaacgttcaaaacaaagccagctttcctcctcctctttcccaccgtgggcacggaccccatgcgtgaatggccag

SEQ ID NO: 582451 - DNA, 1009 bp, Homo sapiens
ttgaggtctctagaacttgatttgcgtagcacgatcattcctgtcaaagtcaccagagaaatgcatggtggacatgattaccggaccgtctaaagccatgaaccccctgtaaagcgcaagacagcctccctctttgatgcagaagtcctatgaaaggaatggtggccatgctacgcagagaaagatggcgcccgcgtaatggctgggagaagtggagatgacatggaagtcctcaagcgagaaggaggccgaccggagagggccagccgggaaggggctggtgacggaacccaacagtgaaccccaaggctggatttaccagatcgacagaaatctccttccttctggttcacctaagccccatgcaagaccatgaagttcatcgtgtggagccgcatttaagtgggtcatcatcggcttgcatgtgtcctgcattatccatgctggtcttcgtgggcgtgctcctctactctttgccgaactattgtgtcagttgacaggattgtaaatgcctacaaatgtgtagacaaacaggcaaggcttcattttccacgagtcatccagggaatgagagaatcctgccgtctgtagacgaacatccagttgtgatttgtgtctgagaacagaccccagtagccacggttacgccatgtcaccgagcccattgattccagaagggtcttaggtcctggaaaagtcaggcgaacaagcaaggttgcatcatggttatctcttaagtatgaaagcgttatttgtaaaggttagatcactgttgtgcagatgtcttcacgggggggtcccttgagaatgctcctttgaatggggtgggtcggaccttagcttgggatgttaatgaatgcacagtttggtcggggggaataattttgaacggagaacgggttagacggggaaagacaaattctgtgcgagggttattgtggggaaaatcgtcgaaagagtgttaaaaagggggattaggcacgagtgtggatgagggggtggtgtgagg

SEQ ID NO: 582452 - DNA, 316 bp, Homo sapiens
ccactctatctggtaccaactgtagtgcattagtccgttctcacactgggtagcaaagactaatccaagactggacaagtttacacaaataaagaggtttaatttgcagttacacttcgacgtgggtggggaaggtcacacaatcatggcagagggcaaacggcacttctcatatggcagcaggaagagagacatgaggtagaagcagcggtggaaacccctcataaacccatcagatctcgtgaaacttatgcactatcacaagaatagcatgggaaaggctgggctccatgattcaattacctcccccgtgtca

SEQ ID NO: 582453 - DNA, 207 bp, Homo sapiens
atcccgggcagaggagacaggcaagagctccctgctgcttgaacagtcacaattgcatcccttcctcccgtactgaagctacgcaggggttggactaatgtgccatcatgctggtacccatctcacccatcctccgtcactggaaggaagacaagtggcttcaaactcaccagccctgtggaggacttctcgtgtgactagggagag

SEQ ID NO: 582454 - DNA, 157 bp, Homo sapiens
  misc_feature (63)..(63): n is a, c, g, or t
actgcggtcgacctctacgacggactcccccaacgacacgacacctctgtgggacgctacggntgacgctggacgactataacaccttgtggacactcactcgggcactactactgtagtgtacttccgcgtgggacggacacttactacggtacga

SEQ ID NO: 582455 - DNA, 190 bp, Homo sapiens
tgtgtagcgctctagaggagctctcatggggctggccgggcgatgacaaaattctcagcattgtgcttgtcagcgaaatatttatatctctttcccttatgaagcttacttgggctggatacgaaatactaggttgaaaattcttttcgttgaagaatgtagaatatgggccccacagtcttcgcctgag

SEQ ID NO: 582456 - DNA, 804 bp, Homo sapiens
aaaacgtaggctaggtacgaggctggggttgcagtggtgcgcggagaggagaggcctccgggagtgtctctggcagatgagcgttcttagctgatctcgaagaggcagcagaagaggaggaaggaggaagctatggggaggaagaagaggagccatgcgatcgaggatgtgcaggaggagacagcagtggatctttccggggattcagtcaagagccatcgccaagctatgggatagtaagatgtttgctgagattatgatgaagattgaggagtatatcagcagagcaagccaaagcttcagaagtgatgggaccagtggaggccgcggcctgaataccgcggtcatcgtgtgatgccaacgaagccgtgaccgtggagatcgaagaacgagctgaacatcatccataacggttcatccgggataagtactcaacacgagattgccctgaactggatgtcgccttggtcgcccaatgctaactgtgattacatccgcacggtcaaggaagctgggcaacttagccgtggacacgtgcaatgaacaatgagaacctgctagcagatcctcacctaatgccaccatcatggtcgtcagcgtcaccgactcaacacacacccctagggggcagcagctgtcggaggaggagcgtggagcggctgcaggaggcctgcgacatggcgctggtagctgaacggcctccaagcaccgcatctacgagtatgtggagtcccggatgtccttcatcgcacccaagctgtccatcatcatcggggcatccacgcgcgcaagatcatgggtgtg

SEQ ID NO: 582457 - DNA, 585 bp, Homo sapiens
  misc_feature (147)..(147): n is a, c, g, or t
gccacagtctccagcctgaagcggaagtggaggaaagatggaggaccatcagcacgtgcccagtcgacatccagaccagcaagctgctcgattggctggtggacagaaggcactgcagcctgaaatggcaggaaggtcctgggatgncctgaccgaatcccgcggaagaaacaatatgctgctcgactccaaggaaatgcatgcgtggtctcatcatatcatgctaatctgactctcaaggccagctccagatattggctctctcaagatagatggaattctctgtataaaggacaacacctacttagtggaactctctagcctcctggttcgaatgtcactataatcccctcactgaagaacaattgcagtgcagcagctgcagcaagaatcagcgcaaggaggagagtgcagcagggctgcgaatgcgggagcagtttaccatcctgcaacagtatggcatcagggcgaaaatgtcgaggagactgtggccggtgaggacctgcgagtcatggtgaattggggcaggtcaatccctgggggaagccttgagtgtccaggcgttgggggtggtgtgaagcccag

SEQ ID NO: 582458 - DNA, 1426 bp, Homo sapiens
tcggtacgcagcttaagttgaacgtactcgatgagtctgttgagaaggattcagaatggaccgttgtggagtaaaggtatgtgcatcatgccctacttactctaagaacaggctttctgtgcttgttgtgcgatgtagcttgctgaccacatgtatctatgaatgtacatacaactactatggggttcattgggaagcgcagagagtggattcgacgtgtgcacgaaactcttgctgtagagcaggacgtcccgtgagactacattatcccgtctttacttgactagacacgctgatcacactattcactatcaagagtgaaaaccaataagtcacctgggatctattatccggggatgaccagcttagggatatttctccgcaaacgacgaatggacatatcgtcatgcatttctctcgaaactaccatatgggcttagttagcaactctgtgctctgatcctatagcacgcaataaaaaagacgcttttccctcttgcgctaataacttctgcataatgtgtcgaggatccctatggtttcaatttccgccatgagccccccttggcacggccaagccattgcataccacttcgagtgcgtttagttcgtattctcataaaggaactccggacgctctgtaccatagcgcagagcgttgctcgcagagcagtacagtgtggtacaggtctacgtgggcattccggactcacctatatgtgtggttcaaaaacgaatattccgtctaggttggttaaacttacacattttcatagtttccttaccttccgctacaattgtaaagtatatcgaaggaaattcccccccattcctctggaagttgaaaacagagataatagggaagcattgagttttgattccaacaggtaaaatgagctccaagaaaacttgtggttggtgtgcgaatttctccgcgatacccggaatatctacaacttatatatgagatgagcgccttcagtaaaaattaaaccgctatatggtgggtgcaatatatagggcgccccttcacaattttctccgcagaccaattattatggcgcgttaagaaaagttcggcgcgcatacaacccgttgtgtgaaaggggggcgattccacaagggagatcagtatccaccaatgtgaaggagtatctcagggtggaaaataaacattgtaaggtgaaaataatcattaataagcccaggtttcggccgcaatggttcctggaatcatctaccacagcttttttacacccgttatttggtttcacaccacaggagaacattagcacacattgatcccattgacataaaaacactatgtaagcaccacaccatataaaaaaagtgagatgaacacacaacaacatctacgaggcacctatcaatccctagtcgaacgcgacattaacaaacccaatga

SEQ ID NO: 582459 - DNA, 604 bp, Homo sapiens
gtgtcagagctcatcacccaggctgtgggccgcctctaaaaagggtagcggagtttctctggctggtctgaaaaaagcgttggctgccgccggatatgatgtggagaaaacacacagccgtatcaaacttggtctcaagagcctggtgagcaagggcactttggtgcaaacgaaaggcaccggtgtttttggctcctttaaactcaacaagaaggcagcctccggggaagccaagcccaaggttaaaaagggggggggaaccaaacttaagaagccagttggggcagccaaaaagcccaaaaaggcggctgggggcgcaattctgaagaagagcgctaagaaacccccgaaaaaaggaaagaaagccggcccggggcccctgtaaccaaaaaagtggttaagagcccaaaaaaggccaaggttgggaagcccaagaaagctgccaaaagtgttgctaaggctgtgaagcccaaggccgttaagcccaaggttgtcaagcctaaaaagggggggcccaaaaaaaaaaaggggaacgcctacttttaaaacccaaaaggtttttttcagagccccccctgttttcaataaaagagctggataatta

SEQ ID NO: 582460 - DNA, 284 bp, Homo sapiens
gaccacatctctgcaagaaatacaaagattggccagacctggtggtaaatattgtagtttcagctactcgggaggctgaggtgggaagatcgcttgagccctggaggttgaggctgcagtgagccgagatcgcaccactgcacttcagcctgggctacagagagagatcttgtctcaaaacaaaacaaaacagaaaatgaaaataagcactaaatgaacctgttaataagggtcaatgcatgctttcaaattaatgatcttttgagcttctaaggaagggcaag

SEQ ID NO: 582461 - DNA, 1238 bp, Homo sapiens
catcgtggatgtagtagttttgtttgtgactctcgtgcgtcgatgtcgtcagtcgcccgtgtctgacacgaccttgctgttctccgttttgctccttgttggagaacgtgtatatttcttctccccctgtagagagatgtactcccccccttctctctagaggaggagggaggaaaaatgggtgtgtagccctccccctctttctccgtgacgtgcctcctcatctaggtggccccccaggggtagactctccccgcgctgggggggaacacccccccagtgcgttgcgtgggacacacaaagtctctaagcctttaaacccagagaaagggtaatttcccaccgagcgatggtttcgcccccatctcttcctgcccttattccacccaaaaaattgtgcctgtgttcaaagttgtttcaaaccttttaaaaaatattcctttggagtaaaaggttaattgtcctagattttaatatgttgttctcaccctagacaggttatccccaaatttaacaatggtaagaacgcttctgaggaccccacaaactttttgtgcccactcttttaccccccgtcacaaactgctttaccacgaaatggaatcaatgtccccccctaatgttgagggtgaccaccttaaattggctttcctggcctcccctctggaaaggaagaaagagaaagaaagatctcgtgtttttgccccctcgagtttaagccacacgtgaaaactcattctccacttaccccttttttcttgggtgttgagaactgctcgtcttctaagaaagtcccactctcacacttgtgctcttgtaataacgctcacagtgctggagagaaattcttgaaatagcttaatggacccacaaaccttttaaaattttaataattattttgaaaactttgctttgggtttgtggcacccctggccacaccccactctggctgtgacacgcctctgcacgtccgctgggctggcacgctttgttgatcttttaagtttccttccctatcccacgtccccactttttctggtaagggttttctacggaaggttctcgttaaggtgtaacactcctcgcacggcttaattggcttaaaaatgtaactcctccttttaatgtggttcttctttggggccgaattgggaggaaagagaaatcaatagtgccactgttttgatactgaatattgacaagtgtctttttgccacctaaagaacccgtccctccca

SEQ ID NO: 582462 - DNA, 136 bp, Homo sapiens
actggcgcagtcattctcattaatctgcccactgacttacatcctcattactattctgcctacatactctaaactacaacgcactcacagtcgcatcataatcctctctcaatgacttcaaactctactcccacgt

SEQ ID NO: 582463 - DNA, 158 bp, Homo sapiens
  misc_feature (17)..(17): n is a, c, g, or t
cgtagtgctttccaggncagcgtgtcacagtgcagattgacgccggacggggtagcgtgaggcaggacaggtcagttgtgacggaggttgctttctcctgggtcacatctattgtgccccatatggcgctgaggctcgcccgtcaggctgccatactg

SEQ ID NO: 582464 - DNA, 474 bp, Homo sapiens
agggtagatgacagtagatcagggactctgaacagtctggggagactgatggagaaggagtcaaggacggccaggaggaagatggatcctattaagctgatattagaaagcaggaggaagtgagtgagggtgtagggatgggaatgagagatgaggaagataagagaaagaagagtaaagatacttttttaaacctagtatactctatgtatgcctatggagacttggcaatcatattaacaaagaagaccaagcaaggggtcctcagttacctatgtggagattgacaaaggtgctgtcccaggagacaaataatgctctgtaggatgctggtcaggtgacgtctcgtggagctacaaaggtgctctacgatacgtctgctgcattcagtcgaattccattggattagatggtgtagatacaggcaagagccaaggatgaacttaagacagcatatagcccagtttgctcaga

SEQ ID NO: 582465 - DNA, 488 bp, Homo sapiens
  misc_feature (278)..(278): n is a, c, g, or t
  misc_feature (348)..(348): n is a, c, g, or t
  misc_feature (366)..(366): n is a, c, g, or t
  misc_feature (409)..(409): n is a, c, g, or t
  misc_feature (434)..(434): n is a, c, g, or t
atcttatttaaaaactattgttagaaaatgctaatgatcatttgagctttcagtaagttgtaatctttttggtggtagagggtctcgccttgatgttgatggctgctgactgaatcagggtgatggttgctgaaggttgaggtggctgtggctattaaaataaggcaacaatgaagtttgccacattgactcttcctttcaccaaagattcctctgtagcatgtgacactgtttgatagcatattccccaccacagatcttctttcagaactggggtnggaacctgggcactgcagtaatggttctaaaccctttgttgtcatttcaacaatgtggcacagcatcttncaccagaagttggatttncatgctcaaggaaaccacttttctttggcttcagccgtaaganggcaattcccccgtttcaagttttnttctgaggttgcagtcaattcagtcacatctttcacaattccactgtaatttta

SEQ ID NO: 582466 - DNA, 1030 bp, Homo sapiens
ccatggggaagccgggcgtggaggcagcaccgggctcggagctggccaggttccctagcctatggagcacgcagaccaccacagtgccccaggcctgggacctccctctcggacgggtgagagaatgattgtgctacgagccaaggcactggcatgcctggagctcctggtggcacctcgtagtgtgggccaatctagcttggaagcagaggtcgccaccgagatctagcgctcaataatggaggcagcagcgtgcagatctccactgagctggttcgcacattcacgatcactagacaccacgcaccgtacatgagcagcactgcaggcctgataatcgttcgcatgctgcaagcacgtgcagatctcttctgcgcctgtgaatgagccgtggttacgtggtcgctggagctgcgatggcagatgtgcgaccatgcccgggctgtgcagatccccaggtgagacgtctggaacccctagtgcaattcccgagcgtcaggctgcccatgagctcatacactaagtgcccagtgtgcctggacgacgtctgatgacctacgagatgtccacggtgtcagcccaggaacaccatgatccccgagaatgagcagcacagggctggggagctggcggtgagtgttgctatgccacctagactcaggggagtagggcagctaccagagaccccaagagcctagggatctcatccagccagccctgtgtgccccgcaagctgccacggggaagtgaagtgggcgctggagcatcaggaggcccggcagcaggcactaggtgacgcgtgtggcaacctgggccggcagctgcagtgcagccagagaggagcccaggccagccgggcatcgactgtccccacaggctgtcggtgctgtgccgctgccaaggcacgggtccgccaggcctgaggctgcagtgcccgggtgcagctgcagctcaagcaactggcacgctgactccgttcctcacgcctgccccctgcgccggccggccctggcgccgccctcgctgcggc

SEQ ID NO: 582467 - DNA, 94 bp, Homo sapiens
agcgggctggctgcggcgtctgggctgcggcgtctgggcgcgcgcgggggtctccgggccggaccctcccctcccggccaagcaaaggacgagg

SEQ ID NO: 582468 - DNA, 109 bp, Homo sapiens
  misc_feature (57)..(57): n is a, c, g, or t
gtccaggactgctgagacaacatagcaaaaccctgtctctacaaaaaaatgttttanaaaattagtagggcctgatgtcctgtgctagctacttgggaggctgaggcag

SEQ ID NO: 582469 - DNA, 250 bp, Homo sapiens
ggcagtggtgggactcagggctaacttcaggctgatgagtgtgtggggtatggggcaggctgtaggtattactggaaaaggcaacattcgattggttaaggcgttattcagaaagaacaattgggaaagggtgggcaaacaggaacagaagttcccactctgcgtggtgggtttcatccaggaccagcaatctggtcttttagccttcaggctgatctttgcttgaacgtggggtttcatttgggaccct

SEQ ID NO: 582470 - DNA, 164 bp, Homo sapiens
gttgggacatgttttgaaatgctagagggggaacatattttgacgggaaccggttttgcaaaagagttggtggattcaaagtgggattggaccttcttgtggaatttgaatttccgcacactacaacgactggagttcttctggggatcaatagtcaaaaaatg

SEQ ID NO: 582471 - DNA, 580 bp, Homo sapiens
  misc_feature (33)..(33): n is a, c, g, or t
  misc_feature (35)..(36): n is a, c, g, or t
  misc_feature (40)..(40): n is a, c, g, or t
  misc_feature (107)..(107): n is a, c, g, or t
  misc_feature (115)..(115): n is a, c, g, or t
  misc_feature (134)..(134): n is a, c, g, or t
  misc_feature (139)..(139): n is a, c, g, or t
  misc_feature (141)..(141): n is a, c, g, or t
  misc_feature (143)..(148): n is a, c, g, or t
  misc_feature (150)..(152): n is a, c, g, or t
  misc_feature (156)..(157): n is a, c, g, or t
  misc_feature (160)..(162): n is a, c, g, or t
  misc_feature (164)..(164): n is a, c, g, or t
  misc_feature (166)..(166): n is a, c, g, or t
  misc_feature (169)..(169): n is a, c, g, or t
  misc_feature (179)..(179): n is a, c, g, or t
  misc_feature (182)..(182): n is a, c, g, or t
  misc_feature (187)..(187): n is a, c, g, or t
  misc_feature (193)..(193): n is a, c, g, or t
  misc_feature (195)..(195): n is a, c, g, or t
  misc_feature (202)..(203): n is a, c, g, or t
  misc_feature (205)..(206): n is a, c, g, or t
  misc_feature (210)..(212): n is a, c, g, or t
  misc_feature (214)..(215): n is a, c, g, or t
  misc_feature (219)..(219): n is a, c, g, or t
  misc_feature (221)..(225): n is a, c, g, or t
  misc_feature (228)..(228): n is a, c, g, or t
  misc_feature (230)..(230): n is a, c, g, or t
  misc_feature (234)..(234): n is a, c, g, or t
  misc_feature (236)..(240): n is a, c, g, or t
  misc_feature (244)..(244): n is a, c, g, or t
  misc_feature (247)..(249): n is a, c, g, or t
  misc_feature (256)..(257): n is a, c, g, or t
  misc_feature (263)..(263): n is a, c, g, or t
  misc_feature (266)..(266): n is a, c, g, or t
  misc_feature (269)..(269): n is a, c, g, or t
  misc_feature (272)..(277): n is a, c, g, or t
  misc_feature (279)..(279): n is a, c, g, or t
  misc_feature (284)..(284): n is a, c, g, or t
  misc_feature (286)..(287): n is a, c, g, or t
  misc_feature (290)..(290): n is a, c, g, or t
  misc_feature (293)..(293): n is a, c, g, or t
  misc_feature (295)..(295): n is a, c, g, or t
  misc_feature (301)..(305): n is a, c, g, or t
  misc_feature (307)..(307): n is a, c, g, or t
  misc_feature (310)..(310): n is a, c, g, or t
  misc_feature (312)..(312): n is a, c, g, or t
  misc_feature (314)..(314): n is a, c, g, or t
  misc_feature (317)..(317): n is a, c, g, or t
  misc_feature (320)..(320): n is a, c, g, or t
  misc_feature (322)..(323): n is a, c, g, or t
  misc_feature (326)..(326): n is a, c, g, or t
  misc_feature (328)..(329): n is a, c, g, or t
  misc_feature (331)..(332): n is a, c, g, or t
  misc_feature (336)..(337): n is a, c, g, or t
  misc_feature (341)..(341): n is a, c, g, or t
  misc_feature (345)..(351): n is a, c, g, or t
  misc_feature (354)..(354): n is a, c, g, or t
  misc_feature (356)..(359): n is a, c, g, or t
  misc_feature (366)..(367): n is a, c, g, or t
  misc_feature (380)..(381): n is a, c, g, or t
  misc_feature (383)..(388): n is a, c, g, or t
  misc_feature (405)..(405): n is a, c, g, or t
  misc_feature (417)..(417): n is a, c, g, or t
  misc_feature (425)..(425): n is a, c, g, or t
  misc_feature (429)..(430): n is a, c, g, or t
  misc_feature (439)..(439): n is a, c, g, or t
  misc_feature (444)..(444): n is a, c, g, or t
  misc_feature (453)..(455): n is a, c, g, or t
  misc_feature (457)..(462): n is a, c, g, or t
  misc_feature (465)..(466): n is a, c, g, or t
  misc_feature (476)..(477): n is a, c, g, or t
  misc_feature (488)..(489): n is a, c, g, or t
  misc_feature (496)..(497): n is a, c, g, or t
  misc_feature (533)..(533): n is a, c, g, or t
cacagaaggatgtaattatcaagtaagatgcanannacantttgttattggagaaacatgcagattatatcgcatcctatggctcaaagaaagatgattatgaatantgtatgtntgagtatttgagaatgagnggcananannnnnngnnnaaannaannnancncancccaaaaagnaanacaancaatananaacacanncnnccannnannaacncnnnnnaanancaancnnnnncaanaannnagacgannccaaancanaanaannnnnnanaaaanannacncancnaaacannnnnanccncnancanacnannaancnnanngacnnaaanaaannnnnnnaanannnnaaaccgnnaaacaaacaacanncnnnnnntgctggagatatttggngagaaattgcanacaagcantctnnttttgctgngcgcngcgcaaaannngnnnnnngcnngccccaacanngcaggcagagnnaaggcgnncaaaagcgcaaagagcaagagggcgggggagaaagncgaggcaaagggggcaaaccggcccagggggccgggcaaacaaaaac

SEQ ID NO: 582472 - DNA, 155 bp, Homo sapiens
ccgatctttattacgccaaactcaactcagaagtataactcaaccacaaattgacgggctggatccggatggataaggatgggggctgtggtgaaccaatgtttcatgttccacaaatggctctgtcgacctgtggagaccatgtgaactggtac

SEQ ID NO: 582473 - DNA, 379 bp, Homo sapiens
  misc_feature (69)..(69): n is a, c, g, or t
ggcccctttaaaccagggttgggccaaaaaaccgggggggcccgggcgggaatttcccgggtttttttnacccccggggccggttcctttttggggggccccccccaaaaaatgggggggggggggggggttggtttgggggttttttacccccgggtccccccccccggcccccgggggggtttgggttttccccccggggcccttttgggggatccaaacctttttttgggtttgggggccccttcctttccggggccccttagcccaggggggggtggggccccccccccccctggggggccccccttcccccgggggtttctttttccccccccccttttcccggggccttttttttgggccctttccggtttta

SEQ ID NO: 582474 - DNA, 1277 bp, Homo sapiens
  misc_feature (728)..(728): n is a, c, g, or t
  misc_feature (749)..(749): n is a, c, g, or t
  misc_feature (1258)..(1258): n is a, c, g, or t
  misc_feature (1277)..(1277): n is a, c, g, or t
tcttacagcctttgatttgagcccccatttcagtctgctttatactactgtcttgcatgttttcccatgataaataagatggtttttgggaaactgaactttggacttacttgattctcttataacaccaggaaattggccaattctagttgagttatggaaatatgttgtctgctgcataccaggcaagttcaagaataccagcaactcctgctacttagggtaatggtacaagtaggattaagtggatatagttgctatctatctgtagaagacaatgagtgagtgctgtcttaagtttggaaagtagttgattctctgcagaggggtataaactactgatgaaaggagagtgactcattactcctagagattctgaatgggaagaatgccagctttatgttttctgatactgatttttttttaataacttggtgcaaaagtagaacattattctaagatgactgtgtggaagaaaaaaaaggtagaacattagagttgtaaaaatgtttttaactataaagaggaaaaaactgaacttatttataattcatttacctagagagaacattcaacatttggtcaatgtattttttttctttatatctatgtagatatatatttcttcatttatttaacaaatgctactgacaccctatggttgctggaagtgagctgtgtaggaataaccatgagcctctgctctgatgtaattttagtgtatgtgnattgttgacatataattttanatttgcttttttcacttaatgtatcatggaattttttcatatcattaaatattctcttggtgtggcacaatagtatttcagcatgtagatatttgtaatttattgaatgaatccttttgttgcatattttcaatttgtctgtaattatatagcaatgcaggcaatagtccgtgtagcaggtggaattctaagatgaactccagtgacacttaccttgtataattccctctcctgtgaacatgatgggatattacttccctgattatgttatgttctgccggggacttggggacttaattaggctggctatcatggctctgattatcaagggccaatcctcggtgactaacttatagtgtggctttgacggggggttttcgctgtggaggaaggcccgactccgggtgggacccggagaggtttcgcgtgggagtccgacaggcggggtctatctgtgctgcggccaaggtgttcgggtgtgttgggtgtccccccacgttttccccgcngtacgcgctatctgtctgn

SEQ ID NO: 582475 - DNA, 135 bp, Homo sapiens
gctgacttagaggatccggcacgaggctgcggctgggctctgggctggagtatggtctagagctgggtgcgattggctcatgagtcagccccgcatgggatcgttgctgtcaagaaatcgcggaaacagatagtg

SEQ ID NO: 582476 - DNA, 245 bp, Homo sapiens
gtgaactctaattatagtaaaatatgatatcaccattatcagactgtgacatcatcaaacaacaaatcaagctgcgctaaacagcagaattagtacggtatcaaaacttaccactgtgtcctccacctacatcaaatacatccacaccactcccagtctctctggaaccttgacaaccacttatcctttactggaccacaaacatatgtttgtaagtatctattttttttatttatttttttttt

SEQ ID NO: 582477 - DNA, 2000 bp, Homo sapiens
ggcgcgggggccgcggctggtgctgggagccagcgcctgtcctcgccgccgtcctcgctgcctgtcactccgtcttggcccgttctccggaccgtgcagaggcgggggctgtggagtgggacgcggtgcctgtactgattggttcccagatcgatgggaatgcccctagacgcagctcggaggtggtcgtggtcatacggagcggctgagaaaatgactgcatcctgttgccagcagtaacccagctatttatcctattcgtaaaattaacttgttaacatgttggggggggtctcaaaattgttaccctggactggtctcgaactcccggacttaagctgatccatctggggtccaagccccattaagcgagtcatcaggggttacgtatactagaaatgatcaactaccttttttctctatatctgcatggcaatatgagatgtgggctttcagcttccgtcatgaattgtgaggccttcccagtgcacgtgggaactgttaagttccaagtaaagcctcttttgtacattatgagaaacaaatcactatttacggatactaggatgggtcgtgactgttgaagggaaggactttacactattcctaacatttgacctacatattttctccaaagccaagatgattccattcccgaggtacacatactgggtattcaataagaacccaggacgggactgtttcaatgcgtgcacaaggtgtaaccgaggtcgcaagagcttgtcctcctgcgcgtaaatctgagaactctcttaaaatctgatgccagacacgaaatgtcatgattccccagacagtagctcgttatcagtaaccacatgtctttcgttgtcacaagactcacaatgacggggtggtaggtgcctacacccactcacagcccggatgttacaacaccctgacaccagcatccacaactcctatcattgttctcactcgcctctttccacatgcattccacacataatcattacacttcccacgtaacacgacaatcacagaaacatcatcataaacaaactatccacagcagaacaccatacctcgcacaacccacacataccaacactacccaccgttaagccaacaccactaccaacacaacatccacgagcaaccacacgacacagaccatccacgctgccaaacacacctatcagcggcacagccccgaagagcagacacgagacagcagccagagcatcgagaaacagaagcgacagacaagacacaggagagaagaaagcaacaaaaggagaaggaacgagagcagcgcgcacagagcagcaccaagcgcagacagcaacgcagaaagagccgagccagcacgagcaagagacgttgagtagcgtaatctaagcgcacggacacaacagaacgataaagcgaccaaacacagcaccatagcagcgacataccgaagagcacaacagcagagcacacagacaaaccacacgaaggagagccagcgaaaacgagaacgacgaagcgagacacacgacctaggcagagacgacaccgcggactaaagacccacgccgagcaaccgaccacgccagcgcagacagagcgacgacgacacgacaggacccaacgcacggccagacgagctacagcccacacccaccaccgcacctacgaggcgcacacgacgcagcgcaatgcaacacagagagcagtagaggatgacgagaaggaacgcgcgcgaacaagaagtcagacgaagagaacagagagtgaaaaggagcgcaaacagatagagagcaacacactcctagcagaagagtcgcgatgccacacagctcgagcgcagtcgacgcgtaagagcagagggacagtgaccaagacacacagaaaggcggcgacagaaggtacagaagaagccgagagggaccaagacagcgagaacacagcagaggaccgccgagaagcaagagatgcgccagacgcagccaagcagagcacatcccggaccaccc

SEQ ID NO: 582478 - DNA, 1324 bp, Homo sapiens
  misc_feature (191)..(191): n is a, c, g, or t
  misc_feature (682)..(682): n is a, c, g, or t
  misc_feature (701)..(701): n is a, c, g, or t
gggggtagatacccacatccgtcgtgaggagtcgaccatatttcttctctttgtgtccaacattttcttgttgtttcagcgcgcccgccttggttaatgttgtccccctaggtatttagttcccaattttgttctctgtttgttgtttaataggtcgcctactcgagcctcgttgtgaaatatataatctncttgttgtgggcgaagaaatctcgtctcttcgtttttacacccctagattatttcctagtctctttcgtgtaaataatgcgtaatatatttgctgaaagtttcacaacaacgggggttgtatattatgcccacggcttttgttgcaacatttaccacggttgaaattgtgttgccgcgtatccacatcttcttcgctcatcctcccctccacaaaatgggggaagaatttaattttattggttcgccctaagaatatgctgcttgtgtaccgtatagattctcacaacgtgttccctagaagagattgttataaaatagtttggagaggttggttccagagaaaaacacacgttgggtttaattttttatatctgttggtgtgttgggccccgtcgtgtagttagatgtgtggtgtaattgtaacacaattttgaatgttgccacattccggggggaaggttgtttaaaaaccttgttccccacacttgtncccaactgggcttatgttncgcgaatgtttgtttgggggcgttcccacactgcccacagaatcctttgtgaaagataaaaaccacagctcacggtgacatgcacattttgtcacattatatgaggccacacagagtctacatcactttgttttcctgcacacacttgagagaaattctattatgttgcactccactctggcttctctaagagaagttctgccacaatttctttatactgtgtgtcctctgtggtggccactctatttaattctatgaggtggccactccacactcggaatataattgtggagagtgagactacgaagaaagtcaataagatcacctcgtaaagggaccacgttaaggggaaccacctcttaagagaggtttaattaatttttaaaacaaactcttttcttgaaactccctggccacaacacatggtgaaaaccccgtgctctatctctaaaatatcccaaattatagccacggcgtgatggtgggtgcctgtaatttcacgctaacttgggaggctgaagccacggagaactgcctgaaaccccggaggcacagaaggttggcacgtgagttcgagatcgtgctactactgcctgggtggcaagggtgagactccatttcca

SEQ ID NO: 582479 - DNA, 299 bp, Homo sapiens
  misc_feature (79)..(79): n is a, c, g, or t
  misc_feature (299)..(299): n is a, c, g, or t
gggatgcgcagctctctatcgcccatgatgcgcgcaaagccaggattgcctcctcggtgggaaatatccagatgaccgnggggattggcagtggcacaaaacaaggtgtcggcggaggtgatgatcgccttttcggcagcaccaagtacagtaccaacaacaggcacaccggtctccgaggcgtccatgccatcctgatccgcaggcaatctgaccttgcgtcgctggatgtatttgggacacaaaggaaaagactctcgcacagcgatcacgatctcgggagcatcgatcttgacgan

SEQ ID NO: 582480 - DNA, 98 bp, Homo sapiens
cctggaaaatagaactcacccacgatatcatcaccaagttcctggaaaatgaagacagaaggtctgccagcttacatttacccaaactgtccattact

SEQ ID NO: 582481 - DNA, 380 bp, Homo sapiens
  misc_feature (203)..(203): n is a, c, g, or t
  misc_feature (212)..(212): n is a, c, g, or t
  misc_feature (266)..(266): n is a, c, g, or t
  misc_feature (285)..(285): n is a, c, g, or t
  misc_feature (314)..(314): n is a, c, g, or t
  misc_feature (342)..(342): n is a, c, g, or t
  misc_feature (359)..(359): n is a, c, g, or t
ggtcgaggtgggcagatcacctgaggttaggagttcaagaccagcctggccaacatggtgaaacccatctctactaaaaatacaaaaaattaggtgtagtggcaggcacctgtaatcccagctactcgggaggctgaggcaggagaatcgcttgaacctagaaggtggaggttgcagtgagcggagattgtaccatggcactncagcctggncaacaagagcgaaattctgtcttaaaaaaacaaaagtcccaattaagaaccttncgaactttgtttttgaggncaaagggggagttagttctttggtaggtncaggattagtagtgtcctttgggattantggttcatctttcttgnacatcacagtaggaaaccaaa

SEQ ID NO: 582482 - DNA, 239 bp, Homo sapiens
ctactactaaattcgcggccgctgttgactttttttgtatatttagtagagacggggtttcgccatattagccaggatggtctcgatctcctgacctcgtgatccccctgcctcggcctcccaaagtgctgggactataggcgtgagccaccacacgtggccacaacttttttttttaatggcctaatctgtttctcagcgtcgacgcggccgcgaatttagtagtagtaggcggccgc

SEQ ID NO: 582483 - DNA, 935 bp, Homo sapiens
  misc_feature (1)..(1): n is a, c, g, or t
  misc_feature (66)..(66): n is a, c, g, or t
  misc_feature (69)..(69): n is a, c, g, or t
  misc_feature (522)..(522): n is a, c, g, or t
  misc_feature (527)..(527): n is a, c, g, or t
  misc_feature (542)..(542): n is a, c, g, or t
  misc_feature (845)..(845): n is a, c, g, or t
  misc_feature (902)..(902): n is a, c, g, or t
  misc_feature (927)..(927): n is a, c, g, or t
ntccggccggagagctccaccgctgaggccgacgaggccgaattctttatttcatgtgtgtgtcancantattgaaatggggggggtgatacgtgcaattcttttatagattcaaaagtgaggggtggtgtgaatgtgacaaatcataacatgagccaaatttataagaaagtgctttaaaaatcagacaaaagacttaagaattactatggtaaatttctaatcgggggggggaacaagaatacaggatattggcaatgctaatattcaaaatggggttaccccagttcataatccctctactcccctcctacctaaaatctaagaaagtattcattataaattggaagtacagaattcttaaaaagccaactggatgctgagttgtatgattttctttacagggacaatttacttttcagcgacctgtaagccatggaaagagtaactccatatccaacaaaaaaactcaaagctctatgtgggtggggaagggggggcaaatatgcaatggtggggganatccnggctccgacaaatantctgaagtgcaggatggcgtgaaagggggtcggaccactcaaggagtacagggggggcattccaagaaaggggtaatattttcaagggattcgggggggtctgggacacggctactcgggtttggggaagatgttctggggtttgtcttgggcatggtcacagtttggggtggggaaactttttggagtttaagggcgggcgagctatagcgtctgttgaagataatggggggggggggaaaccaggggcttctcagcatgcgggggggggaacttgttaatgtggggggagggggcggaaanagggggtgctcagcggggttggggctccgggcagtcccaactgtgaatactcggtgntaggggggaggggggggcgagaatntccggggt

SEQ ID NO: 582484 - DNA, 224 bp, Homo sapiens
taaaaaattatactttaatttggagtcaccaggagaaagattcactggtgaaggaaaagtgatcagaaaaagaaagaagccaaagagaaaggtaccgtgggttcaactaaagcgccagccgtgctccacccagagaagcacacttgggtgagaaccaagtgggaaggagcctgagcgtgcgtggaacctattccctagtgaattcagtggcataatagggtgtt

SEQ ID NO: 582485 - DNA, 797 bp, Homo sapiens
ttgccaattacaacttgttagcggcttgtacccatgaagtgacactagctcctgacattggtactctacctcatgagctggaggcatacactgtctacgagagtgaagtaatgtccccaattgtcaataggtggagggggcacacatggtccagtagaatctttgcaaggaggtggttccgtccagtctccattgatacacatcacgtcttcatccccaaacatttcataagggctcatacattgatgacgtactctctctccagatggatatttactcatgtgtctcgactgtatagcagcattgtgtagtgtgtgcgtattcacacagcaagtgtcagtggacgtgcattgaagtctgtatcgtgtgttgcaaataatctgcacagtatcaccttcgagatgtgttgtcctcaagattcagaatgaccattttccacaaaaggaaagaaacacagtctggacactgtggtgttggtgaccgtcgttatcatgcgcatgttatgagagtccagaaatgatgtgtgatagcacacacgagacttatattcacaggagtcatatacaacttcctctgtaggaccgtggtggaatataatatattcttgttcatcatatagagttcgctccataaaacagaaagtcccagagtgctgcgtctccccctgcagaggaatccgtcaattataatgacaatgagcagaggctacacgattagtagtaccattagttatagcagtcataggccttcagtggtggcggtgatgcagtgaatctgccttcatgagcagttaatag

SEQ ID NO: 582486 - DNA, 173 bp, Homo sapiens
  misc_feature (107)..(107): n is a, c, g, or t
atgtgggagaccagagaaaatctcctatcccagtcactatgcttaccagcaagttcctcagagacaggaagcaggcggaagcgttccttaccaaccaggagtatgtnctgggctcacattgaattgcctaccaccttggaagggcggcggtaggtaaagggcggcggataggt

SEQ ID NO: 582487 - DNA, 136 bp, Homo sapiens
cggtgttcccttgtctccaattgaacacctcactgactttaggcattaccacgccacacaggccaccttttatttttattttttttaagattctgcttttggccaggcatggtggctcacgcctgtaatcccagca

SEQ ID NO: 582488 - DNA, 639 bp, Homo sapiens
aagacccgggaattgcgagttcgcccattgggtaaaatatcccctagactgccctaaagttcagcaaatataacccacttcaaagtacttggaatttcaggcaccattcagactgccaaactgtcgtatatttcgatttcggacttctacagtaatatcccaacttcagatacgatcatctaatgggcaacccttaccattgccctcgatagttaatcacatcttaattcatgtgtcatctaatgaccccattctttgcgtccttctttccatattaatcttaatccgactcctcaggatttatttggtctttccaaacgttgctatattacatttgctgatcatccctaccgaaacgcaggtttctatttcaataactctcttatagccttctttaaataagccttggtttgttccattgttcatttccaactttctcaagttaaatctttaacgcatcatgtttcaggatttttaaggcctaacttaggcaattataccctttcatctgcagctctaaaaagttaacgtttttcgataccacgcaggttttcatatgcaatgctttaattacccatttagcactgtggatttaacaatcctgacactctgggccacatggttaaatcaagtctctcc

SEQ ID NO: 582489 - DNA, 119 bp, Homo sapiens
catcagcgatgatccggaatcccgttcgtaacttaaagggaaatttcacaactgtccggagcccttgatgtcctgcaaaatgaaggaggaggatgtccttaagttccttgcagcaggaa

SEQ ID NO: 582490 - DNA, 837 bp, Homo sapiens
gttgtgcaggtatttgggtttacagattcttcacttatgttttagaaacatgttggcctcttggatacttaatccttgtgctgataaagtcagattatggtaaattttaaatgggcctgtttgtggagttcatcaaatcatttaaacattataattatattctgtaatgaaaattattaaatttacataaaagatatcgagaaaaattctcttgcgtgttccaaagttagaaaatgagctgtgtggcaggcttagtttagtttcgtttacccaaacaatgtgtactgtttgaattcaaattttgtctcattactactcttagagtaagtgactgtggaagaaaaagaaggaaaccagcctggggcaacatagggagaccctgtctctacaaatagtaaaaaaattagtctgagtgtggtggcacgtacctgtagtcacaggctagttggaggctgaggtgagaagatcattgagctaaggtgttgagattagagtgagctatgagcatgcgatgaatcgggctaggtgacagaaatgaagaacctgtcttcgccaaatagaagaaaacaaaacaactaacccaacgggcgtgtggcgctagggattggcaagcccgaagcggggctcgtgagccttacggcacacattcaggggagacatcaggcaacacgaaaaggggccacatggcgaccctcggcgggcgaacataacacaagaggataccgggaaattaggggaccaggcgcaactcgcggcacaacctctactaacaagcttttcccctgaaggcatggacgaaacgcccggcggtcagagacaacggggcatacctcagta

SEQ ID NO: 582491 - DNA, 163 bp, Homo sapiens
  misc_feature (96)..(96): n is a, c, g, or t
  misc_feature (109)..(109): n is a, c, g, or t
aattcgcggccgcgtacggaccgagaagacgacagaagggaggaggtggcggtgccgcctggcctcgtgggatacgtgatggtgacagaagagaangtgtcgatggggnccagaccccttgcgggattccgggactgacgaccaagaggagggccgctgggcg

SEQ ID NO: 582492 - DNA, 283 bp, Homo sapiens
gtggtcgtctctagacggatccctacacatcaggctccggggcacgttgagctgggtttagaccgtcgttgagacaggttagtttaccctactgactatgtgttgttgccatggtcctcctgctccgtccgacgaggcaaccgcaggttcatacatttggtgtatgtgcttggctgaggagccaatggggcgaagctaccatctgatggtattatgactgaacgcctcttagttcagaatcccgcccaggcggaacgatacggcagcgccgcggagtcttcat

SEQ ID NO: 582493 - DNA, 198 bp, Homo sapiens
tcaaaccaaaaaggcataattaaacttataactatcctctctgacacatattcccacatcacaacacataagagattaagacatagtatctacctatccacactcacatccatacggcttatgacatagttctaccattccccacatcaccctataagacgtaaaacaacagatcatggaggatcctcatacgagtcg

SEQ ID NO: 582494 - DNA, 207 bp, Homo sapiens
tgtatacctagaggatcagttgggccaggaggtcgaggctgcagggagcactgatcatgccattgcactccaacctgggtgacagagtgagacaatgtctcaaaaaaaaaaaacgtcagtgaattgtaaaaaacacccctttcaaaattttttctgactagatcaatcatcatggaggaggtccagtattatctccaatcaatcccc

SEQ ID NO: 582495 - DNA, 164 bp, Homo sapiens
gcaggcccatgtatcactgcggacaagtccacacgaacaatacaagaaactagtacgcaaccatgggccgaacagctgtgggacgaaagcacagacaggcaactgggagagctggagatccattctctcaaggacaggattattcccaacatgccacacaggga

SEQ ID NO: 582496 - DNA, 1335 bp, Homo sapiens
ccttgttcccattttcgttcctcgtcttttttgcgctctgttttctgtctctcgtgtttattttgtctgttcttccctttcctttttcggttctttctcgcctccgctcttttttcggttgtttctttctggttttgtatggtgttctgttgttgctgtttgttttttgtctgtcgtttcctgtctctctcttttgtgttttttcccttttgttggcgtattttttcgatcgcgctgtgttggctttttttgcaccttttttgtgccctttctgcaccttcctgtggtctgggccactgtggctggactttatccctcctcccccatgtttggtgtttccccttggtcgcgggtccgtgtggacgctcttgttctgtggttcctgtctccctctaccacgtgttcgatctctcgtttgggtggggctcatgctctgggctcttcgtattcggtagacatagccaaggtggctcccggtcgatctccgcgtttgtgtgaggcccggtgtcgctttgtcacggtggtgccatttcctcttgtgaggggattgtcgccttggtgtttgtcctgtccatgtcttggtgatccctttggcaccccctccctctggatgactgtatcttgcttgtctatctccccgctgcccctttgttccccggaggtggtgggatccgttggttcggatccctcccttcctcgcactccgtgtgctcttcccctgcgttccttacttttcccccctttgacttatcccccccgttgggcgcctatgtttcatgtcccaaagtattgacttcctttgtgtatacgcaagtgcccatccccatagccgcctatgcgacaaggggggcactgcccatgtcccattctctgtgtggcccacgcactgggggtccatcgtggcttcggcacaaagtgagctcgatggcggttcaagggaggccataacagtgcacccgtcacccttgatgtgctcgtacccaactccaaagatcccctgcccaacgggtggcagccccaccaccatgagaatggccaagcatatcggaagtgagcaataactgccgcaagtctgcagcaccaggcgccaccagtcctgcagcctcctcctgatccacggacgtttccatcaggttcacatcacactgaaaatcgtctcaggttccacgtcacccctggggcattctcactgacccagtccccgtgccccgccgtccccgtaatcaggctactctccatcggcacaccacatcacagtcagggacatgagtgaatgcatcagtcagtcatcctgtcacaacagtgtaccaattaacgacctggggtgtgagacag

SEQ ID NO: 582497 - DNA, 196 bp, Homo sapiens
gctctagaggatccgttatagggtacccaaaaaaaaaaaaaaagaaaattcttcagaaattcagtttcaaatgccaggttgcttgtaatcccagcaattggggaggccaaggggggcagatcacctaaggccaggagtttgagaccagtttggccaattgggggaaacccggtttttaataaaaatataaaaaaat

SEQ ID NO: 582498 - DNA, 189 bp, Homo sapiens
gccccaggctttcttcagggtgcccgtgaaagtggctacattgccttctgtcagtagggcgggggcacccccagcagctgtgcccatcattaacatgatcttaccaactgtccctgcttggcctggacctggagctgggcctgggcgagctcgagcgggggaactcactcagccccggggcacagagca

SEQ ID NO: 582499 - DNA, 830 bp, Homo sapiens
  misc_feature (261)..(261): n is a, c, g, or t
gcgggctccgccaggacactggtggacagcacggggaggacatgggtgcggggaagggtgctctcacccaccgccctcctgccggcacgggtgtgcttcctgcgtcgcggtctcagaaggcctggccactttgcagttatagacgtgaacgagtgtgagctctactaggcaggaggggcgcccccggttctgcatgcacgcctgcgtgaacaccccgggctcttaccgttgcacctgccccggtggataccgatactctgngctgagcgtgtgaagtagctgtgaggatgtggatgaactgtgtgggcctgctaggccgcgtgtgccccccatgtggtgacctatcatggcgatctaactacctggtggaagcttccagtgtgtcagccctgagtgccccgagggcagcggctaatgtgagctacgtgaagacgtctccattccagtgtgagcggaatcccttgccccatggtacagcaggccctgccgtcatctgcccatagaccatctccttcgcagttacctcgtctctgccttccatcctgaagacgcccatcgacgctcttcctgcatggccactagcctctgtccccggccgagctgggccaacagcctgcgggttgggactcgtgggtgggaacagccgcggtcactttgtgcatgcaagcgttcaggacccggcagacctggggatcttgattccttgtgcagaacctggacggggcctcagtacgcttggatggtggacgtctcacagtgttcggagatacctggaccgctccttcgaggccgaccaccgtgtccagggttcaccatcctttgtattcccc

SEQ ID NO: 582500 - DNA, 215 bp, Homo sapiens
agaaggagaaagtgccaagatcctttcaggatatttggttttttggcgcgacacaatcgaggtgagggagagagaggaaatccctgaatcctgcagattatttattcaaaaggaaataaaaatactcatatgcaaagtctgtgagaaatgaggaaacacagacatgccaagccgaggagatcgcctttgaggatgtacacaggaggcagaggaat

SEQ ID NO: 582501 - DNA, 238 bp, Homo sapiens
gcatggggtcatggtaaaacgatattgggagggcagcacggtgctcacgtgtcgacggaacttgtacagggaggcatgcaccgcagtggtgaatacacgtcgaccaggatccatgtaagcgatattgggaggtgagcacggagctcatgtgttgaaggaacttgtataggaaggtatgcactcgcagtggtgaatacacgtcgagctggaggcatgcatgcatgctcgggtcctggac

SEQ ID NO: 582502 - DNA, 372 bp, Homo sapiens
cgggtggatcacctgaggtcaggagttcaacaccagccttcccaacatgatgaaaccccatcgggactaaaaatacaaaaattatctgggcattgtggcgggagcctgtaatcccagctacttgggaggctgaggcaggaaaatcgcttgaacctggggggcagaggctgcagtgagctgagattgcaccattgcactctagcctgggcaacaagagtgaaactccgtctcaaaaaaaaaaaaaaaaaaaagaaagaaagaaagacggccgggcaaaaggggtggaaggccgggagtccaggaagacaagtagtccagacaacgggtatccgggccccaattcacgatacggaatatggagagatcagaagt

SEQ ID NO: 582503 - DNA, 117 bp, Homo sapiens
ggcactattataagcacttgactggatgttaatgtatttaatcctcatcccaaccaattgtgctatcaattattatcctcatttgacagattaggaaacaaacataggaaggttaag

SEQ ID NO: 582504 - DNA, 336 bp, Homo sapiens
ttttggggtgggccaaattgggcccccaccccccccagggcccgccttttcttgggttttaaaatttagcccccgagggggggccccccgggaagtttacccttcccgggcggttttttttcccaaaaaatttccctttttttccggtttttggaggggaaaaaatttaaccccttaaggggaaccccttttgggtttaaataaaataagggggtttttttgttggggccgaaagccgggccccttgttagtttttccccatgttttaaaatggaaagtttaggtttgggtttaaaaaagaaaagtgggtaactggggttttttccttttctttta

SEQ ID NO: 582505 - DNA, 119 bp, Homo sapiens
ggtgggttggacgtattcactccagtggaaacgccaactataacccctccctcgagagtcgagtcaacatgtcacttggcaaggtcagggcccagttcttccttaaaggtacctctttt

SEQ ID NO: 582506 - DNA, 367 bp, Homo sapiens
tcgaccccgattatgcatgtagattcagaaaagtagcagagcaaacaagttgcattaaataaatcttcatgaaagcaaccttttcccttcgtgggcactacttctacccagtaagagggctgtatgattatatgttatacagtcttacccaatcaggcttcattttccacagagactcaaatgccaatgggacaagcacaggatgtctaaaaagagaggggcactgtgtaaagcagaggagtagtaagatgactgatcaagagggggggtgcctgccctttcctaaagtgagaggtgactttttagttctagccacctttgtcttgaggtaatagtggataggtcttgggatttttcaaaaatgaaa

SEQ ID NO: 582507 - DNA, 208 bp, Homo sapiens
gagattgttaataaattgattgctcagaaacagctagaagtagttcatacactcgatggaaaggatatatacctccagcccaaattaggtaaaggaaatgaggagatgaggctacaatgtccgaggtggtcggggtaaacaattgttgaatctacaacaagggaaattaaatgttgggcctgattcaaattggaaaatggatggggtg

SEQ ID NO: 582508 - DNA, 170 bp, Homo sapiens
gcaagagcctgcagctgatcttgtttccccgtgtgcagaggctactgtggggaaaaagactctggcaagtccccatcactgtcccttgcagggtgactggccgctgcggctctgtgcttgtacgcctctttcctgacatccaagagcactggcatcggctcttgcctcct

SEQ ID NO: 582509 - DNA, 432 bp, Homo sapiens
  misc_feature (105)..(109): n is a, c, g, or t
  misc_feature (112)..(113): n is a, c, g, or t
  misc_feature (426)..(426): n is a, c, g, or t
  misc_feature (431)..(431): n is a, c, g, or t
ttggaagttcaattaggaataccacaactctgtgttttgaactgttgtggttttctgcaatgttttccttatgctacaaagagaaatttccttgatgagggatannnnnaanncttaatctattggtataaatttagagcatagttatggactatatatattatttagtaaattagtggttgtaggttctctgtcaagaagcatgacttccctagcccaaggtagttggctaggtttccaataccaggcagtttctctgtctttaaggggatttaaaatttttatttatttatctgtccatccatctgtccatctgtctgaaatctatctatccgtccacccatttaggtgaggcctgagagacagagtcgaggaaatgtcaccatctttaaaaaaaaaaaattaagaaggaccctttctttaaanttaana

SEQ ID NO: 582510 - DNA, 244 bp, Homo sapiens
gatttcggccacgagggggaggggaggcccatttctttttttgggcacaggaaactattggctcttgtgcttcctccaataggcggcatgtttttagagggctgtggctttccctccgagtgtcttgtggtcatctctgtacaaccaggacacaggaagctcctcttgtaagtctcgagtcatgtctcttcttgccccgatatggtgttggagggttccttttcctgttcttctcgccctttaa

SEQ ID NO: 582511 - DNA, 248 bp, Homo sapiens
  misc_feature (9)..(9): n is a, c, g, or t
  misc_feature (55)..(55): n is a, c, g, or t
  misc_feature (59)..(59): n is a, c, g, or t
  misc_feature (90)..(90): n is a, c, g, or t
  misc_feature (195)..(195): n is a, c, g, or t
  misc_feature (233)..(233): n is a, c, g, or t
tttatgtgnttattggccaatttgtatacattttttaaagaaatacatattaagnaccntttgctttatttttgaattgggttatttgcntttttattcttgagttgtaattgttctttatatattctagatacaagcaacttattatgtttatagtttgcaaacaattttttcccatactttgggttgtctttnactgttttgatagtgtctttgaagccccaaagtttttnattctgatggctggg

SEQ ID NO: 582512 - DNA, 267 bp, Homo sapiens
catagttgttccttgtgtaaaattagatatccagaaatgatgtattacagagctgtcctacttgaatggagtactgaaccctctacgtggacgtggggtgcagtagagatgccggggagctgcacctcctccaccacctgtacccaggggccgtggtgttggaccacctcgagggactttggtacgtggtacaccagtaaggggagccatcaccagagttgccattgtgactcgaggcgtgcaaccgaactagtgtgaggtgtgctc

SEQ ID NO: 582513 - DNA, 214 bp, Homo sapiens
ggggggccccctcccccccccccccccttgggcccggggtttggaaaagcctggggggccccccccctttggggggggccctgttccccgggggcccccaaaatccccttttttttttgggggtaaggggggggcccagggatccaatagtttttttttttttaaatggaagggttttggggttttttgtaaaaagggggcccttttttcccca

SEQ ID NO: 582514 - DNA, 481 bp, Homo sapiens
agattaccccccccggttcgggattggggtccctccaaagggagattgccctgtaccaaaaaaacaaatgtttcgctcagatgtttcaaaagactctgggcccaataattgcaggtcaccggagtgggcattcccccaaacttctttgcgctattgggggccagaaggagggatttttttttttttaatgaaaaaaaatttttattcatagcttatccttcagagcaatgcccggcatgcagcaatatcaaacatcagctaaccgaaagagctttttgtcaaggcccgtatcagggtaatggggttggtttgcacatgttgttattgccttaattttaattttattttgttttctacaaccaatcaaggtaaagccatatcccaatgatccagtaatattgcaatgtttgtaacccttcatttttactagtttctttttaatcaagaggtcaaattgaataaaaatcccagcaatttttga

SEQ ID NO: 582515 - DNA, 169 bp, Homo sapiens
tcgcctgccgacccgttgctgtccttccacctggatctggggccctccatgatggacgcggaccttgagctgaatgacgtgatcggcttataggttccctcattcgccgcgccgttcccgcccggcaccccacttctgtctacataaacggccaaggtgtgtgcccgga

SEQ ID NO: 582516 - DNA, 882 bp, Homo sapiens
aaagaaaaaaggactgtgtgcagaagaacagagaactcgcagtgatggaaatatttatctgaataacaaaagatgtatctcaataaaaagacttggagaagattgctcccgcaacgagaaaggcatccactgctactgtcagtacaccaacgagagtccttcgaaagcttagtcgatgatggtattggttggactgttgagcaggagtcggagacttctcatagtttatttattgcggcttcccttccaagtaaagctcttcatgcaccggaaacatcagtaggaggttcggtgcaatctcaagttgtctgagggaagtcaaaagcatgtcaagccatacagaaatgcgattgagaaagctcatctgggccgattgtgaaaccgtggatgagcgaatccaccggctagtcaatagaacacgagcttacttcagttcgagagccaacgggaagagctccaggcagtaatgtagaagaaactacacagacgtgtgatccgcaaggtgtggaagatatacgccaggcaaataatggtacgccaagggaagctgcataacagatggactgataacttgttcgctataagatcttggcccactaagaatactttcgggtttgaggactctttacatgggctagacgttggtcatccccgaagaccttgcctacatagaactaattaagtccttggcgcggaagggaggtacaagctggtgaatttcgtactctcaactaatatttaactaagggtcgactggcgtggcggacggggacccaccgtaaggtcacacgctcacgccccttagcccaaaaaaagtggcgccgccgaaagaacctggggcgccaaaaaaaccttcaacggaggggccccaacggcggggca

SEQ ID NO: 582517 - DNA, 723 bp, Homo sapiens
catcccacaagcggtcctttcccgccagacctgcgcccaactggagtgtaaaccccgccccccgtgtctcaccagggaaacttgacaaccagatgcgaacttccaaatggatccctcccgcacagtgtggactggcgctaccaggcactgctctgccatgcgtcttaagacacagccgagggcgctgcccccaccccgctggcgatcgccctctcaagcccctgttcatgcctgggacagcgcccacaggaccttgctcatgcctgggacaggcccccgggccccccctggctgccgtcagcagcggccggctggtgggggaaggtatggaccctccgtgggccggagctgggagaaccaggcctattattggacacctggtggccctggcaaccccaccaggatgcctgagactgaaatctgtgggcttcacggagctcccgctcttgcacctggctgagtccccgtgacctatataactcttactcccccttttgggacactttttgagagggaccacgggatcctatctaactaccccgggatagacactcgccccagaccctcctgagcaagcctggacgctgtgaccctaacgatgaaggtgtcccgcagaccatgtccggggcaggcaccatgctctccccacctaccccagccagatgtttttgtaaagaaccataaaaatgaattactagaaagccaagacattaaatacacata

SEQ ID NO: 582518 - DNA, 2036 bp, Homo sapiens
  misc_feature (951)..(951): n is a, c, g, or t
gtggaatgagccgttggtttcgtggatggcgatgggttcggttggttggcgaatgcgctggttgtgtcctgtggtgtgcggcgcgcgggggtgtgtgggtgtggttgtgttctctgcgctcgttgggggccttcgtgagcgtgctggcttcgttctccttcccttctccgggggggtggtggtggtgttctcttcgtggggcctctgtggggtttcctatggggtggtgtagcaggggatgactgctgctgtgtctccatcgtggggaggggtggttggtgcagtggggtgctcaaagtttgtagtgtttctgcctgcagctggggcgtttagtatattcgtttgagggggagaatgttttggtcgcgcgcctcgtgcggtgacgccccgtggttgtctgtgcttgtccgcagacggggttgatgttcattttggtgggtgtaggagccggcccctcgttgggcaggtgcttgtggttgtgtgtgtgtcctctgtgtggggtggagataagtgtggcgtccatgggtgggtgtggtcccgcgttggggttggctcccacaaaggtcttcggttggtggcccagcgttggtggatgataggggacgctacccgtgtggtttgtggtcgtcgtttgtgtggtaaattattaggagggggtggtctggtgtaatatatataggggggtgttgtcctgccccacgcttgtgggcgattgatgagatgatttgtgtggcgcgcctcttgatgtctcctggggggagtactttctctacacgggtggcgccctctctgttatatgaagggggtggtgttgtgtcctcccacgaggtggtgtggtgggttgtcccccttgcttgaagcacgacaggtggcccgggtgttgtgttgttcttctggggtgttgtggcgccaacttcatgctggtggtggggaggagatcttcttatgagnggccgctccttcttgtgtgttgttgggatatggtgatcacctcttcggtgttaaagtggggggcgcgtgttgagtaggagagtagtattatagtaggtgtgtggtggttgatgataataaggggggaaggaggaggcggattattataatgatattattagactaccatccagcagaggacgcaccagcaatgcagcacctccacagcgggagagagtattattagttgtaggtgttgtgtaatgagagtagagtagtgtgttgtgtgtggttgttgttggtgtgttgttgtgttgtggtgtgtgtggccccccacttgtggtggactccacgctggagtaggtgtggtgtcccctctgcggggtggcgggagagtgaagagggggagatatagatgtagttgtaggtcttttttgtggggacgctcactacttgtcctcttctgggcgcggctactgcgtgggtcgtccccactcttgtgtggtcttgtggacgactctagagtttgctgtgggatagacctctgtgtggatgagtatagaatagtagtgtgtgtgtgaaatagagtgagagaagtgtgagagagagtgtggggatagttagagaggcgccataagagagaggagtgtgtgtgtctcccatagttctcacttttgagaggggacagtgtttgaacagctgtgtgtgtctcacaagtagccgatagactccccgcaaacgccctatagtaagtacaccactatactctcctctggcccacgtgcgcctctgttgtgtgaatatgggtgagttgtagggtggagagcgagagtgccacatgtgtaatattgtggtgggtgtgtcatatgttgtagtaatagtgagtgtggatatagagagtgtgtctcgtgagttgagaaactctgaagagataggtgttggtgtctgataaaagctcatagtgtctgatagatacaccccaccgtgtgtagaaccttgtggcgaataccagaagggttgttgtgtgtgtgtgaagaacacccagaggtgtgtgacagattgttgttgtgtcaccgcagttaccccggttggtaatgttataaaac

SEQ ID NO: 582519 - DNA, 877 bp, Homo sapiens
tttgtgtacaatttcgtgcatttggaatcacgagtgctggaacctccgcccgcataacgctgcacaatacgccctgtgggaaaaattgggaaatcttacaattggtctgtataacccgcccagttttataccccctgcataacatatgacagcccaggcttggatgctcctttggggcaatttaaaccacgtcaattcgttttgtacaataccggccttagtttcgccgttgccgcaggctatttaactaactggccccatgcgctgcgtgggttgcgaccccccggtctgttaggcaattcctctgtgggttccctcgggggggtaatcttgtttcgatttgggcgccgccggggtaagactcgctcctagttgaatgtgtggtcggtgcgcaggatcctgatacgtcgtgtggcacacgcgcagtgctcgagctattaccactgttttaagggcttcacaggaatgttgtcgcccccaaatacaggtgctgtatgagatatgtttgtcacgcgggagccttttttagcgcttgtccgcaatacgccccctatgttgtacatcgctggggcagaaccttctctgggtgcgtcacacgcggttgtctcgcgagctcaagatcggcggtatccccgttcgccgggggcgcagcatatttgggtcccgaccccttaatttcgccgtttcaaatagttttccccgccaccccgatgggggtcccaatgacctcaccgcaactcacgcagttgtccagcacattcttaacaccgtcgtcctcccgccgcgctgacaccccccggcgtttgcacaccacccatccccccatttctcccttcccctcccccccacaaccatccgggttttccctcaacataac

SEQ ID NO: 582520 - DNA, 104 bp, Homo sapiens
gtgagcctggaccgccaagcactgcaaccactcttttcttcatggtgctggtgctagggccgtgatctccttctgcattcggtcggcaatgccaggtacatagt

SEQ ID NO: 582521 - DNA, 133 bp, Homo sapiens
tgaaccactgatgtcaatatcctcattgccaacagtagtattttcatgttttcacatagactttttagagcagtttaggttcactggcaagattgagcagaaggtacaaacatttctcctataccttccaccc

SEQ ID NO: 582522 - DNA, 1440 bp, Homo sapiens
taagaaaaaaaaaaacaatttttcctacttttatcttacacccctcaatttgttatatatgtgcaggggtaattccctaaacttcttgtggtggggctccacagaggtggtaagtgttctataacaagtgactacccagagttctttgagggtgcgcaacaaatattatattcccctctcaaagcgagtggacaacaaaacccatttgtgaaggagggtatagtagagaaaatgtgtgtggctcattatatttctctgtagagacacaatgttgtgttgctcattatggacacatttttcacacacaaataatactctcaccacatatacaaaactctcgcgcacatagagacacaaaaaatataccgcgcgtgcaaacatgtgtgtgtgaaacgaagagcgtggtctacacaccaaataaagccctatatatatttgtgtgagtaaaatgtgcgggtacaccacacactacggagtataaaaagaagcgcggactttaggagcgcgtgttggtactacgtgtggtgcacacaccatatgatctgcggacacgcataacatttatcggacgggatgtcggctgcagcaacctcccacattatttttaaaatccacaacctcgtagagtcaaatataacatacccgtgtggtgtaataagacacacccagcaagaacaacaaacacaccacagagggcggtgtctttttttttgaaaaaccacacatgctgcgaacaggacagaatgtatgataggcggcgaacacaactattatagtgtgcgtaccccaaagaggggggcggaatcaatatatttctacacatagataacaaggggaggcgactgagtagaaataaggtgtgttttgaaacatgtggtaagtggcgcagactgtgtgtggtagaaacacaaactagtagcatgttgtctcttcttaagaaccgcccactagttggttgggcaaccaacagacgggttctactaataataatatttttgacagaggttgttcgaacagcagacaacctattaatgtggtggatgatcaaacaaccttaataaaaaacaacaaccggtgtgtaattctatacacaaagcgagcggccgcacgacttattcgttaatcaccaccaggcgaggagactaaatgtacaccgacactctattaaatatatatttacgaccggaagataatataaacaactctcgcgcggggtggtgcgagaggcggaacgacatatttacaccacccacaacgcggcgttttacaacaaaaggcgctttaaaacataacaccaacaagctggtgtttgcggctctcggcaaacaaaaagatatcttacgatggctgatccaaagggaataaccaacccgttctagtcggatctagtcgtagggcgcacagttccaccgagggaagtccccacaaaaatatatttag

SEQ ID NO: 582523 - DNA, 133 bp, Homo sapiens
aaattcgcggccgcgtcgacagcagcccaagagataaggcctcttaaagtgactggctgatgggaaggcattttatctaattcagactcagatgagggaaaacgataacacttcattacagacttggtcgacg

SEQ ID NO: 582524 - DNA, 704 bp, Homo sapiens
aacttacggctaggtacgagtgcttgtggtttaaatcgtgccgagggagcggcccggtggctggggcggcagtgtccgctgcaggacgagaaccctggtgtgtggctgtcctgtgccctcgcagtggagggccgtccagtggcatccgcgtgggagacgaaaagttgccagacggccagcattgccactgccagtgcatcctgcccaggccaggaatcatgtggactgcccagtgtgcagactggaggccccctgtgcctgtcagcgtgcagccccgtcccagtacgacatacccaggctctgcagcctttcttcggagagtggaggccatggtcatccgagagctgaacaagaattggcagagccacgcgtttgatggcttcgaggtgtcttgtactgtataccctgggctacccgccagacccaagacgcagggtctgcattgtgaccagcatctcctgttgaactccactggctcttgtggttgtgcctgtgtccttacggccggctgggaccatggggactgggagcacgcttaagtccttctgtgtgtgcctggaaccttgtgaccgcgcgagaacttgtgtcccagcagaacgtcggccgtgtgtggatggtccccacgcgctgtcctgtgtactggcttccaccccacgcagcctcccacgtcgcagtgagggctgtcactggtgaggggatgggtg

SEQ ID NO: 582525 - DNA, 202 bp, Homo sapiens
gcgaagagagtgatacatgatatttccagatctggagtcagtcacttcgtttgtagagggctgatgtccaggtagtagcccgactcattggtgatgaacatggcggatgggaacggcactgccgggtggtggtactgacggatgtcgatcttgacctcagcctgtagcacacggagtttccacaggcccggctgcctgtagc

SEQ ID NO: 582526 - DNA, 263 bp, Homo sapiens
cgtttctccatgttgtgctcaagctggtcttgacacacgcaggttcaagtggtccgtccgtcttgtgcctcacacggtgctggcactcgcggcgtgacccactgcaccggggcggtagagttaaggttgtggcatgttgtccaggatggtcctgaacccctgggctcaggtgatccacccacctcagactcccaaagtgctgggattacagacatgagccactgcgcctggcccagaactttttccttttttgggaagaaggg

SEQ ID NO: 582527 - DNA, 1848 bp, Homo sapiens
  misc_feature (439)..(439): n is a, c, g, or t
  misc_feature (1483)..(1483): n is a, c, g, or t
  misc_feature (1637)..(1637): n is a, c, g, or t
  misc_feature (1848)..(1848): n is a, c, g, or t
tctggaaagggagtctcgctctgtcaccaggctggagtgcaggggcgcaatctcggcacacctctccgcctttcgggggtttcaaggcaatttctctccgtgccctcagccctccgtggagtagcgtgggacatattagggtgctgtgccaccatgtgcccaggctaattttggtggtattttcttagatagaagagcgggggttttcaccacctgtgtgtgtggcccacagagagtagtggtctctctcagattctctctctgtgagacccttcgtgtgtctctctccacaccccacctgctgcggcctcctacccaaagagtgtggcgtgaggatatctcccgagagtgggtgtgagagcccaactgtggcgcccgcggtccaagtccgctgtgggtgtgtgtcctttcacaaagagtaacacctgctcgtgcgccncccgagtgtgtgatgtggccgcgtgtgactctctacaactctccccgcagctgtgtgttctctcgctgatagacaatttatacaactctctctctctcgcgtggggagaaatctccccctctctttctcgcgtgggcaaggctctttgtgttgctccccgttgttgagaggggagaagtctcaaccgggggggcagaagagtattcaccccgtgggccgtgtgttggacacccgctgtggtgctcccccctctcatagttgatacaccctgttgtgtgtgccacgaggcgagcgaggaggagatagttagaataatctcccccgagaagagagcgctccggaattcaagcgggggggggggggggaacaactccccctcaagagttgtggataaccacgagatccccaaaaagaagcccccccacaatatcgctggaaaaaacacccacaaggggtgctgtggggtcgcccgccgggtgtggggactaataataaaaacaatctcaggagaggaggagagggaacattccactcccccaaaaaggaacaccccaaatatacaaagacgaaggggtggcgaaacatcatcaaagaacccccccccgctgtgggggggtgccccctgagtgggcggctatatgcagcgacggcgatggggggttcctcattctatccaactatcaaatggcccccccctgttgttggggatctctctcatataaaaggcacctattctggtggaccccaagagggggtagtataggtcatccttagtgagttacatcatcaggaggcggcgcctctcccccagtattggtggtggtggctcactccacgagcgtgtttgtgtttgcggtcttctaaaaagaggccccccccaaattttttccacgcttggggggggggagcccccctatcttccacgagagacatcacttcaaatgtagagcggcaccttatcctctctaccgaagttgtttcccccccccacaatggtgtggttttcgtgtttccccccccagtggggagagacgcgcggtctgntcgcacttcaggtcagccctgatggtggtggagacaacccacccacgcggcgtttgccgacacaatatttccaaccctcctgttaatatagaggcgatcttcccttctgtgttgcggcccacaaccttctcttgtgtgtttcttcctcctcccngggtgtcgccgcgactcttggtggtagtttcccaccaataccagccgtggtttctggccgcgcgcaacaaaacattactaccagacaaaaaccgcgtgcgggggctcaatttctggggcgtcgcgggagaacccagtgtcgttataacatactcgtgcagtggcttcaatagctgtctctagcacctgctctcttgtaacctgtgagcaan

SEQ ID NO: 582528 - DNA, 292 bp, Homo sapiens
agtccaaacagggccatgatgacttctgattacagcgttgtcacaggtagctcattttcttcccaggacaaggcaatgctgggattgcgatggcaagagagccaccaagagctcctgccccatgtaggggcactgttgctttgggctatctggaaagaacactgaactctgcgagtcaagagccctgggttctagtgttggctctgcccctgtttatcatgagaaccaaccatctgcaaggtaagcattaattgatgtcatgcacatacaataattaccactgtgatcatgc

SEQ ID NO: 582529 - DNA, 450 bp, Homo sapiens
agaaggaaccacttctggactgtttcaggatcaggaccactaaccctggcagtggagagttgaggaccacagttggttaatgaaggcatggtgccagccacactgtagcctcagtgaagataggcaggaaagtagaaataaaaacatcgtttcccaagggtcataaaagaaggcagattggttctacttgcgtatgaactcatacctggtgctgaactggaagcagaatttgctgtggcatcttgttgccccttcgatattctccttgttctccccctgtcgcttcagcgtctggggtcgtggaaggacatgtaggtaatcgaggcagacatggaacaacagatgaggaggaggctgctctcccgagctcctcagctacctctgtaaggaggacaaagggaccggtaataagaacaatttcatgaccaaaacggggaagtggttccttgt

SEQ ID NO: 582530 - DNA, 126 bp, Homo sapiens
  misc_feature (3)..(3): n is a, c, g, or t
gtntttctgggagtagttatctacctctgtatgtctttatcagtttggtgtagatgttttacggtcatagtccgccgccgaagcttcgtttcactacaaacctacatttcactttataatcaaccg

SEQ ID NO: 582531 - DNA, 260 bp, Homo sapiens
gaaacccagttcagttccaggtaagaggagaagttcactccatccagtctagtgactttagctataaatcaggacagaacgaatggaataactattttcaggctctgaaaagtaaatggtaggaggaagactgggcaagaagatcagaattcaaaatgccactcaaccaatatgtctaacttaaacaagactcagaatctgatgtgttcaaatattcaaaatgccccaaaggcaatacaaaattgctcagcatacaaatc

SEQ ID NO: 582532 - DNA, 553 bp, Homo sapiens
  misc_feature (15)..(15): n is a, c, g, or t
  misc_feature (57)..(57): n is a, c, g, or t
  misc_feature (104)..(104): n is a, c, g, or t
gcacccaggtagatnccatctttatctcaaccagagcaagctgctggcctactgcangatgaatgacattgttctggttgcctatggtgccctgggaactcaangatacaaatactgtataaatgaggataccccagttctcttggatgatccagttctttgtgccatggcaaagaagtacaagcggactccagccctgattgcccttcgctaccagctggaccgtgggattgtggccctagccaagagtttcaatgaggagagaatcagagagaacatgcaggtctttgatttccaattggcttcagatgacatgaaaattttagatggcctggacagaaatcttcggtactttcctgctgatatgtttaaggctcaccctaactttccattcttcgatgaatattaagatggaggcccttgccacgagttctattagaagatcttttgtgtgatgctggactctcagatgccaataactcgacacaccgcctccaatcactgcttagcaactcacccccagttaattcaataaattttgcttcttttctat

SEQ ID NO: 582533 - DNA, 701 bp, Homo sapiens
  misc_feature (33)..(33): n is a, c, g, or t
  misc_feature (125)..(125): n is a, c, g, or t
  misc_feature (152)..(152): n is a, c, g, or t
tatatgccatgagctgtgggctctcatgtagtntacatgttactgggtaaggtgagccttgcctatagagcagcagtacaatcacggccaactcgacgctttaagagctcggcctcatgatgtcnacagtgtcattgtctaagctctcgtcnagccatgatctgacacagatcattagagtggatcttgtatggccatcaagtggtggtgcacatgggcagctatgtgcatgtccagagttcagcagctccacagtctcacagagcgagtacctcatctaccagtagagtcagtgtcgcctgcgctacttgctgcaggtcctcctctgagtgcccgcactgtcccacggggtcgtgcaaggtgagactgtgatcttcaatcatcaggcccatctctggtaccgttatatcgctcctttttttcaagaatccaatccgttgttgttagctatagtccccatgctgtacaagatccctgtctttatgcctcctaactgaaattttgtattctttgacgcatctgcccagtccctctcctcccagcccatggtacacagcgtttgactcttgacttgtataagggcagcttttataggttccacatgtaagtgagatcacccagtgtttgtctttctgcgccgggcttatttcgctcagcataatggcaccgggttcacccatgttttcataaatgacaagatt

SEQ ID NO: 582534 - DNA, 947 bp, Homo sapiens
gccgcccttttttttttttcccctgagtaaaagcaaaaaatttcttccttgggaaaaaattatatatattaaaaaaccactttaagtgtggtttttttaaaaaaaaaaaaaaaaacgggtaaaataactttgggcaagaaaaggtgtttaatgaaataagtgtatcagtgtggatatattattaatatattgttatacggtgtgtgctcatgtgttacatttttaaccttgtgtggtaacaaaggacaaatataaagagactctttctctctacaaaatatatctctcgtggtacacaaaaacaaaaaaaaacaaaacaaaacaaaaaacaaataataaaacaaaaaaaaaaacaacaaaacaaagagagaggagggcgcgcgcgcgatcaaagaaagaatatctctcccgcgcggagaggagcgcaccacagtacaaaagcgcgcgcgccaaccgaccagattatgtgtggagaagaaaagagagggcgcccactaagagtggacggaggcgcacactattacacacaacaccaaccgagcggcgagcggcgaccgagcgagaatcataaacaaaacctagagaagaacgcgaggcgaaaaacagccgcacagacaaagagagcgagaaacatccgcgtgagaaaagaagaaccaccatcatacaccatgcggggggcggggaaacaacacataagaggggccgcgacaaaactcacacccaaccacaggcaagaacgaactacttaaaaagcgcacccacacagaacgggcaccaacaccaaccatcacccaccccctacgcaccaagcagtcctaaacaaagaggtggcgccacaccccccaacctcgcccggaccaaattaaccaccgcacgaccacgctataccacaacctacaaccaccaaccaaaagggaagatataataacgccagaaacaataatatt

SEQ ID NO: 582535 - DNA, 823 bp, Homo sapiens
  misc_feature (14)..(14): n is a, c, g, or t
  misc_feature (65)..(65): n is a, c, g, or t
  misc_feature (71)..(71): n is a, c, g, or t
  misc_feature (82)..(82): n is a, c, g, or t
  misc_feature (171)..(172): n is a, c, g, or t
  misc_feature (186)..(187): n is a, c, g, or t
  misc_feature (197)..(197): n is a, c, g, or t
  misc_feature (207)..(207): n is a, c, g, or t
  misc_feature (217)..(217): n is a, c, g, or t
  misc_feature (231)..(232): n is a, c, g, or t
  misc_feature (243)..(243): n is a, c, g, or t
  misc_feature (291)..(291): n is a, c, g, or t
  misc_feature (300)..(300): n is a, c, g, or t
  misc_feature (303)..(303): n is a, c, g, or t
  misc_feature (343)..(343): n is a, c, g, or t
  misc_feature (346)..(346): n is a, c, g, or t
  misc_feature (348)..(348): n is a, c, g, or t
  misc_feature (352)..(352): n is a, c, g, or t
  misc_feature (362)..(362): n is a, c, g, or t
  misc_feature (373)..(373): n is a, c, g, or t
  misc_feature (449)..(449): n is a, c, g, or t
  misc_feature (482)..(482): n is a, c, g, or t
  misc_feature (525)..(525): n is a, c, g, or t
  misc_feature (577)..(577): n is a, c, g, or t
  misc_feature (582)..(582): n is a, c, g, or t
  misc_feature (615)..(615): n is a, c, g, or t
  misc_feature (637)..(637): n is a, c, g, or t
  misc_feature (653)..(653): n is a, c, g, or t
  misc_feature (681)..(681): n is a, c, g, or t
  misc_feature (693)..(693): n is a, c, g, or t
  misc_feature (698)..(698): n is a, c, g, or t
  misc_feature (737)..(737): n is a, c, g, or t
  misc_feature (740)..(740): n is a, c, g, or t
  misc_feature (798)..(798): n is a, c, g, or t
gggcctctgcagangttaagcccagaccttatacccaactacttactcacccccgaatatttaanccactnttcctgaaagnactcagggtagcaagtaacaaaatgcaaacgattatataaagaaagtgcagtcaaaaaggaaactatgtggcaagtaccctctttcccnncccaccccccaatnnaaggcaaacnatggcacttngccctcgctnaacccagattgtcnncaaaaactatnaaaatgtaaaagacttaacaaaaaaacaaaaagacgtttaacagatgncaaaaagcnccnccagtgtttagaaaataaatgcttaaacaaaagacaacanatntnatancaaacaagtntgaagagcccngaattgcagcattctgtaacataaacaaacaaaaagctgcgtcactacggatctattgtcaaaggcagaatttctncaggcaggtaagtcagcgagcgtggtggttctntttcaggcattttcacggccatttcataggttggcacaaacgnactgagcgcaggtgctccaaaggcagggtacacagcaatctccggcacgttncggtngtggatgtattcatagcagccccaaacacagtnaattagataagccttaaaaatnatgaataaggcaaagnacacaagaacaatgaacaggaggtagcnggagttcaaggncaggnggtcatctttttttggaaaatcaggtagttgatccaganatnctttgattcttggcaaataggtgagagaactaatagcaccaggcaactgaggacgagnaaaaagtcggtaacagaagaatgga

SEQ ID NO: 582536 - DNA, 342 bp, Homo sapiens
aggtccgccctgtcttcagcacattctggcatatctccatgacagcattccgtgtgaacttgggaagatcggtcgctaactcgaaactttctgcaaagtcagctttggaaaatctgtggctcagtcgagatactgcccacgcttagagagctctttctccaaatttgtagagagtggcacgcttgagtctctgtgtggcagaggactccgcaggcttggccccattctgtaagagcacctttattccttatagcaaataaagggagtcccggggcataaaagtaagagtgtcggctggcaatctcatataggtatttcataaagagtgtctctccgttctca

SEQ ID NO: 582537 - DNA, 376 bp, Homo sapiens
caatggaacatgtataactatgtaacaaacctgcacattctgcacatgtatcccagaacttaaagtataataaataaataaataaatatttttaaaaagtcctaaaagatttaaaaaaaaaacagaaatggaaaatgttaatagatatattctctattaaagaaattgaactcaactactttaccataaagaaatctcaggcccacatgtttatatcggtgaattccaccaaacatttaagaggaaataatactgaggccgggcaagatggctcacatctgtaatctcagcacttagggaggctgtgacaggaggatcgcttgagcataggagttgaagaccagcatgggcaacatggtgaaaccccatagctaca

SEQ ID NO: 582538 - DNA, 1498 bp, Homo sapiens
gggtgcgagctgggccggcggggtggttcagagagcgcgcagagtccagactggcgtgcagggcccgaggggccgacttgcagctgtcctggtctctccagccctcactcggaacctgcaccgtgagggcaaatccgcgccggatggctggcttagcacagcgggggacagcccctaccgaggcctccctagcggtgtggagcgagagggcgtcagggtcggggagaagcacggaaaaggtggcttcagacgatgggctgtagttgagggaggcgggggacgggcagacctggcgatgaccgtggaacatggaatgagtagggcaaaaaaaccatttatcggaaagaatagcatacgccaactataaaatggcagagggacatcaggacaaaagcaaggtcttcgccacaccagttgacaaatacccctccacatcccatatgggacatggacacccatagtcgttacagcatcaggaggcccaaattggcaaagcaaagacgaaaaaccaaaaccagaaggtgaagttgggaacccagaggtgaacggtcatggactaggcttgaagttgaccaaccggtgaaggattcgagtcttgaccgtggagtaagacaaggcacgcagaagggggcaaaattccataacttcaattggcagcaggacttattaccatcaaattgggacatggggcttatacaaaggcgcacacagcacacggcgtaggtacagactgatacagcacccatggaagccctttgtaaccaaaggcatcaaaacaagaccacacgggacgagacatgagcagatagaaccgagtcacttatagattggagactataggcgaggcacaccagggatagaggccaatggaaatacggatatcccaagaaaggccaattgcaagttggcctttcgccataaatataatcgcgagcagatagggacgcacaattagtaccattggagatttcaagatgcgagcccccgtgggctttgcagaagttggcgcacgacacagacccgtttcctgtttgcaaagagtctttccaactactagaaattggtatttggtcagacttacagctttataagacatacatattcaccggtatatatgtatgacgcatccgttagcacacccaaacagtgaatttccactatttccaagtaacaatgtgtaacataggtattatacaaggcccaggtgtcgaccgaggacagtctagcggaaatgccacgagcgggggaaacagacaacaacgagtggcggcacccccgagagaaacatgagaatgaacaggagcagagcaacgagagcacagaaaatacaccagaggggagatgaagaacaaacgagagggatatcagtagcgactacgtgacaccacttagggcaaaatgggagaggagaagagaaacagcgagcacaaaagacccccggagagcagcgtagcacgaggagaaccctgtgcaagaaatccccaagcagtcaactcgc

SEQ ID NO: 582539 - DNA, 408 bp, Homo sapiens
gtgtgtggcactgccttcttattatatttcatagccatttattaccatgcttgaggagccattccttttggaacaatggcccccgtttgttgcatctgtttttttgttattcttcctctaaatcttgttggtacaatacttggccgaaatctgtcaggtcagcccaactttccttgtcgtgtcaatgctgtgcctcgtcctataccggagaaaaaatggttcatggagcctacggttattgtttgcctgggtggaattttaccttttggatcaatctttattgaaatgtatttcatcttcacgtctttctgggcatataagatctattatgtctatggcttcatgatgctggggctggttatcctgtgcattgtgactgtctgtgtgactattgggtcccatattttc

SEQ ID NO: 582540 - DNA, 262 bp, Homo sapiens
  misc_feature (115)..(115): n is a, c, g, or t
aggggggaaaaaaccataggggggaaagggggggttttccccgggtccggggttccaaaggggtggggtttttttcccgggggttttggggccccccgggttgttagaacccccnccccctctcaaaaggggtccccctccggggggtttggtttaaaggggcccctttttttagggggtcccgtttggaaaaatttgtttgccggggggtttttttttgaaaggggtttcccttttttatttttgcctttttattagggga

SEQ ID NO: 582541 - DNA, 169 bp, Homo sapiens
  misc_feature (163)..(163): n is a, c, g, or t
actagacttagtacaacttcatcaaactttaaaacttttcagctaggaatggtgatgtgcactgtagttccagcaatgtgggaggctgaggcaggaggatcggttgaacctgggaggcggaggttatagtgagccgagatcgtgccactgcactccagcctgngagaca

SEQ ID NO: 582542 - DNA, 405 bp, Homo sapiens
gagaatgaggtctcacttctgttgcccaggttggagtgcaatggcggtgatctccagctcctgcaacctctggcctccaggattcaagcgattctcctgtctcagcctcccgagtagctgggattacaggcgcacgccaccaggcccggctaatttttgtatttttagtagagacgggggtttcaccatgttggtcaggctggtctcgaactcctgacctcgtgatccactcacctcggcatccacccacctcagcctcccaaagtgctggaattacaagcgtgagccaccgcgcccggccaggcaaagcagttcttagagggaaattcacactcatcagttccttctgggtgtttgaccttcccggtcgacgcggccgcgaatttagtagtagtaggcggccgc

SEQ ID NO: 582543 - DNA, 314 bp, Homo sapiens
tagcgaactggtgaaagtcgtgaaattccaaggagatttggaagtaagatcattatttactggtcctttaaatagaccaaaaaaaaaaaaaaaaaaaatttaaaaaacgagggctgccccctgcaggctctggcagaaccctgggctgctctggggaacacaggccaggggcatttcaccgatttgttccacagtgattctggttttgcctgtttccctccattgttggccacgagttcggggacgttgcccagcagtgggcttgcctacacctttgtagttaacctcagcgttcatctgggtgtacttctcgt

SEQ ID NO: 582544 - DNA, 429 bp, Homo sapiens
cacgaggagcatcgacatggcgcgggcgatgttcagcccgatgtgctcggaatcccctgcccggtaagggatccccgattgttgttcgtgcatcggtagtcgccgccaggcctggttgccgtgcgcgtcagcggcgctggccagccaccggtcctgccaggtgtcgccgggctggcgctccagccagtccaggatctggatcaggccgcggcggcggtttcgcgacccggccgaaccgctcaggagcgggtcggccatcaatctggtcatcagttgtgctctcggggccctggtcgccgaccagtcagcggtggccgcacggggtgggaatcggcgcaacaacgcgactgccggcgaaggcccgggcgtgggccgcccggccggtcgggcgccctgatacagaccaccacccgcgaccgcgggcgcctc

SEQ ID NO: 582545 - DNA, 108 bp, Homo sapiens
aacttttgggacggcgtcagcgggactgatgtataagaagggcgagtgagagtactgcagggagctctgctttctgctttgggcagccagatggctgacacagtaaag

SEQ ID NO: 582546 - DNA, 773 bp, Homo sapiens
gggagtggcaaaccatcctcttgcctgttccctggtgtttgggccttgcctgtgactggtgggaaaagaaaatgtgccttgctgtgctacaacctgtgggctctggtcagctgcttcgatcctgagaccaattcctgacgatgcttgcacataccacccaggtgttgttctggtctttcactgatgcattaaatgggtttggtctttctgtatatgatgatattgatacattcttgatttttttcttgatttcttacatgacatttgtatgtgcttgtatcaaaactgtgtatgatcattacatatgttgatgatatgccattctgtagggccatgtacaaaacctatgaaatggtcaattggatctttattttgactgaacattggaaaatggtggaatggtcctttacatttgggttttgcaatatttttttcaaaataataacacctccaaataatttttttccattgtggatacaaccagttcaattatccaatgctccccattaaatgccccattgttatgacattgcaacatcaaagaaatgcaccagatgcacctattgattgatactctaattgatcaaacacttttgtgtcattttatatcaattcttattcttgatcattccactaataaaatcaatggcctctttttgatatctcaccttttaaatccttggttactattttcttgtgtgtcacttttgtactgcacactctttaatttgactcactgcaatctgtgtatgattcaattttggatttgcaac

SEQ ID NO: 582547 - DNA, 219 bp, Homo sapiens
agagtgtcactcaagacgtaggactatactcactgatccaataactttaccaacgggaacacgttaccctagggataagagcgcaatcctatatctaaagtccatatcaacaatagggtaacgacctcgatgttggatcaggacatcccgatggtgcagtcgctattaaaggttcgttcgttcaacgattaaagtcctacggcttgattgacactcttt

SEQ ID NO: 582548 - DNA, 338 bp, Homo sapiens
cggaggtgcaacgcactcaagagcaagctcaagagcgaggaaacgagactctttcgttccttctagaagagtctgagaggacgatgagttattgaaaatgcagatgttctgaggacggaaacggacactcgagacgcagacttcaatggaaccaaggcgagtgaatcagcaactttctacagttttgcaccacggcaagaaaaccaaaaaccaaaacaaacaaacaaaaaaaacccaacaacaacccagaacaaagcaaaacccagcagactgtacttagcattgtctaaatccattctcaaattccaaatatcacagacacccctcatcctaccaaa

SEQ ID NO: 582549 - DNA, 372 bp, Homo sapiens
tgttataatccttaggtactctaaccacgttaatcattgaattaaatagtaattccagtgaatggtgggggtttgttgtgctgtttgcttcagttggctatgatctttttcttcgagtcttcgtacgcgagagctaataggcagttattgtgacaattaatatatgtagtggcagttttcttacggtcttgacattttcagagccacaaatgaatcatcctgtaatgcatcgaagaaactttctttttgtttgttttttttaatcccccctgttcattttttctttttttaaaaagacatataatcaaattaagttgaatttgtgaccccggggatatgttcagaataataaaacaaacatcctggcacaca

SEQ ID NO: 582550 - DNA, 472 bp, Homo sapiens
aaattcctatgaaagggaaatgttcgacaaggctagattgaaactgggcctggataaagctgtgctacagtctatgagtggaagagaaaatgctaccaatggggtacaacagctttccaagaaagaaatagaggatcttctacgaaaaggggcctatggtgcactcatggatgaggaggatgaagggtctaaattctgtgaagaagatattgatcagatcctcctacgtcgaacccacactattaccattgagtcagaagggaaaggttccacatttgctaaggccagttttgttgcatctggaaataggacagatatttccttggatgatccaaatttctggcaaaagtgggctaagaaggctgaattggatattgatgccttaaatgggaggaacaacctggttattgttactccaagagtgagaaagcagaccaggctctacagtgcagtgaaggaagatgagctgatg

SEQ ID NO: 582551 - DNA, 120 bp, Homo sapiens
  misc_feature (120)..(120): n is a, c, g, or t
ggaccccgcccaagccaacaccctgttgattatcagtgtggtgatcggtgcgccattcttcgtgttcttcggctggctgtcggaccgcatcggccgcaagccaatcctgatgctcggccn

SEQ ID NO: 582552 - DNA, 662 bp, Homo sapiens
  misc_feature (346)..(346): n is a, c, g, or t
  misc_feature (397)..(397): n is a, c, g, or t
  misc_feature (662)..(662): n is a, c, g, or t
agcagtgtctcacacctctaattccagcactttgggaggccgaggtggacagataacctgaggtcaggagttcaagaccagcatggccaacatggtgaaaccccgtctctactaaaaatataaaaattagctacgcatgggccgggtgcggtggctcatgcctgtaatcccagcactttgggaggctgaggcgggcagatcatgaggtcaggagatcgagaccatcctggttaacatggtgaaaccccatctctactaaaaatataaaaaattagccaggcatggtggtgggcgcctgtagtcccagctactcgggaggctgaggtaggagaatggcatgaacccnggaggtagagcttgcagtgagctgagatagcaccactgcactccagcctgngtgacagagcgaaactccgtctcaaaaaaaaattaacttgccgtgctggtgcgcgcctgtaatcccagctactcaggaggctgaggcaggagaatcactagaagctgccaggcagaggttgcagtgagctgagattgcgccagtcgcctcctgcgcaacaagagcgaaactctgcctcaacactacttaaactaagcgtccttataggttggtgaggattttgtcagacaccaattcattaaggatttagcgatgcgtttcttcn

SEQ ID NO: 582553 - DNA, 92 bp, Homo sapiens
tcgaatatgtaggcttcatatgagggtcactctcctcaccctgctgctgcagagccaccagggtcacactggcagattgcagccccagcagt

SEQ ID NO: 582554 - DNA, 126 bp, Homo sapiens
taaggatccgtgcgtcacttcatcgcgttttctgggccatttaggtaagctctaagactcctgagccaacttttatgtacctggctttcctaggcaggggcttgaactaagtatagaagccaagga

SEQ ID NO: 582555 - DNA, 175 bp, Homo sapiens
  misc_feature (155)..(155): n is a, c, g, or t
ttagaggatcttatccccgggtctgggtatcagcagcggatggtgcagaacagcgaatattgctgaacagcaaatgttgctgtctgattgttcttctggaacctttgtctcagaggggtacctggccgtgtgaggtgtcaatctgcccctactgngcagttcctcccagttaggc

SEQ ID NO: 582556 - DNA, 216 bp, Homo sapiens
ccgggagccggtcgaggccggcgggccaggaggcgtccatctgccggagtgtttgttgggcgagggaacaagggagaggttttttttctacccggaagcctgagagtgaagggggtgaaactcgcatttggggaagtgaacacgaactctgcctgagggcacatttgagttccagcgacagagtcacacgggctgagctccctcccagcttgactg

SEQ ID NO: 582557 - DNA, 349 bp, Homo sapiens
  misc_feature (19)..(19): n is a, c, g, or t
gggtttttttgtccggggnggggtttttttaccccgggctcgtttggggacccccccccttgtgtttggacccccttcgggtgttttgggccccccttggcgccggggtgttcgtttcggcccggggggttttgcctttttcccggggggggtgcctttttccctcggggctttgttgtggccctttggccccttttggggccccttttgggcggggttgggggccggagctggctgggtctggttgggccttccgggggggttgtttttccccccgcccgggttgtttttttccccccccccccgctttttttccccccccttccttttttaagaaaatgtttaatta

SEQ ID NO: 582558 - DNA, 329 bp, Homo sapiens
  misc_feature (11)..(11): n is a, c, g, or t
tttgaggcaanctatatagtaatagatgtggagatttggccatcctgttttagtctaagtaatggagtgtatatctaatttgcaggtggaaaaaactcgaaagttatgcaacacgaagatttacaaccaaccacgaaagttcaaaggctagtagctacttgctaacactcgttgtccactacggacaagaatccacagatggcactgcactttcttcacttctatgagacatcacaaaagtactgcacaaatgttatgaatagtataggagaaattcaagagacagaccaagaggctgaaccagtcccactagatggcaccgtcacagg

SEQ ID NO: 582559 - DNA, 374 bp, Homo sapiens
aaaaaaaaaaaaccaaaaaagccaccattactttcagggcccctattgctttaaatgcataatataacctgctgccagaacccgatgtgtttaaaaaaaaaaataaaacccccttctttttatagcccttaaagccaacttttctgttttaaccaatttggtttttattttgcattgccccccctttggttatttaaaaactacatccccttgggagtaatgtttcagggcaagtagggattacagcttgatggttgggggttttaattttaaaagttttttattcccggtcatataaaggagttaaaaccactggaacagcctttttttaaataccttgttaaataataaaagggccccccatttaaatcgga

SEQ ID NO: 582560 - DNA, 1346 bp, Homo sapiens
  misc_feature (9)..(10): n is a, c, g, or t
  misc_feature (14)..(15): n is a, c, g, or t
  misc_feature (41)..(41): n is a, c, g, or t
  misc_feature (59)..(59): n is a, c, g, or t
  misc_feature (92)..(92): n is a, c, g, or t
  misc_feature (102)..(102): n is a, c, g, or t
  misc_feature (175)..(175): n is a, c, g, or t
  misc_feature (192)..(192): n is a, c, g, or t
  misc_feature (199)..(199): n is a, c, g, or t
  misc_feature (219)..(219): n is a, c, g, or t
  misc_feature (229)..(229): n is a, c, g, or t
  misc_feature (241)..(241): n is a, c, g, or t
  misc_feature (249)..(249): n is a, c, g, or t
  misc_feature (259)..(259): n is a, c, g, or t
  misc_feature (265)..(265): n is a, c, g, or t
  misc_feature (270)..(270): n is a, c, g, or t
  misc_feature (282)..(282): n is a, c, g, or t
  misc_feature (296)..(296): n is a, c, g, or t
  misc_feature (375)..(375): n is a, c, g, or t
  misc_feature (397)..(397): n is a, c, g, or t
  misc_feature (410)..(410): n is a, c, g, or t
  misc_feature (446)..(446): n is a, c, g, or t
  misc_feature (500)..(500): n is a, c, g, or t
  misc_feature (726)..(726): n is a, c, g, or t
cccggtcannaatnnatatagccgtgatctatacgtaattnatttattatatagtattnattatatgtaataaacgtattagtcaaccatanacatcaatcntcataccaagacgccctgatcgcatcatccactcacatacgtcttctacatacatataccacacatactttancgttccctacaccgtantccaccncatatacaacaaatactatntatactcacnacgcatcacacngccaacanataatcatcncacaancacanacacctacaccnagtcatcccacccncagtatcatatacatcgttctcgccggtactcatcccacgcgtccaatcacacgtgggtacattataagtcctactcantccgctaaattctaaataaaanatgacaataatantataataagatataatataaataacagcatcaatantgtaaaataatatatatatatatattatttttgcttcacaccgaatctactatntaatcatatttacaccatgtttaggtcagcggttacactcccgtctatatgattttaatgtagggctacgtctcatatcgttcggtcgcatctttttcctacaatgtacttgcgagttgcctgggttatgtggcgtgcccgcctacacaccaactcgagtgttcccacgcggagcgtggcgcgccacgcgcgcggtagttccggcccttcgatgcgtccgtacgtngatcgtgcacccgcgcgtgattatgagtatttaggatgactaactccacgaacttacccagtaggcacgccgagccctccccgccctctccttacaatctcccttccttagctctcgtgcgtcgtgcttctcgttccgtcggtcgtccctcttcactttactttcgagacttgattctgcctctcgttgtgggtgcgtcgcgtgtgtgcggggttcgaggtatgtgtgtgctcagtttgcgctatgagcgcagagagatctgacgctaatgtgcgtcggtacggctctcgctaggctgtagcgcattacgccgcgcatcatggagctccgttgacctcggcggtaccgatctctacgtcgatcggcagcagcaccaggtacacctcggcatgtagtgagatgctcgatagtatgtgttctcgtgcttcgtcgtcggttaggacaggacgagatggataaaggcaccacggcgtcgtgtcggtgaggttacggtcatagcgcagtgtcctagcctggtgatatgtagcatgtaacttgtctgttcattacgccgtacgtttgtagacgcgtcttacatcgcggttgtccgtcgtctctgtaggcgcgatagcgggcgccgt

SEQ ID NO: 582561 - DNA, 253 bp, Homo sapiens
  misc_feature (248)..(248): n is a, c, g, or t
atgaccactccttccagtccctcacctattggctttattcagggcagaggctctttcttccggctggtcagtacaaagaggcaggattcttcaccgggatctggggattctcaaagaattgggggagagaattcagggcatggatgacctgggatgaagagaaatttacatctttatttacactaaccttcaggtgaaatttagcattttgggccatttaaaaataggggcaaaaaaggggggggcgnggggt

SEQ ID NO: 582562 - DNA, 249 bp, Homo sapiens
ggtcgacgtctagagtatcccccctcctgagtagctgggattacaggcatgcgccaccacacccagctaattttgtatttttaatagagttgggttttctccatgttggtcaggctgtcttgaactcccgacctcaggtgatccgcctgcctcggcttcccaaagtgctgtgattacaggcatgagccatcatgcctggcctacctggaggtcttaaatatccttgagacagaggtgggaggagaggaa

SEQ ID NO: 582563 - DNA, 928 bp, Homo sapiens
  misc_feature (34)..(34): n is a, c, g, or t
  misc_feature (79)..(79): n is a, c, g, or t
  misc_feature (87)..(87): n is a, c, g, or t
  misc_feature (89)..(89): n is a, c, g, or t
  misc_feature (105)..(105): n is a, c, g, or t
  misc_feature (115)..(117): n is a, c, g, or t
  misc_feature (119)..(119): n is a, c, g, or t
  misc_feature (125)..(125): n is a, c, g, or t
  misc_feature (136)..(136): n is a, c, g, or t
  misc_feature (141)..(141): n is a, c, g, or t
  misc_feature (149)..(149): n is a, c, g, or t
  misc_feature (154)..(154): n is a, c, g, or t
  misc_feature (156)..(156): n is a, c, g, or t
  misc_feature (165)..(165): n is a, c, g, or t
  misc_feature (169)..(169): n is a, c, g, or t
  misc_feature (171)..(171): n is a, c, g, or t
  misc_feature (175)..(175): n is a, c, g, or t
  misc_feature (202)..(203): n is a, c, g, or t
  misc_feature (220)..(222): n is a, c, g, or t
  misc_feature (230)..(230): n is a, c, g, or t
  misc_feature (239)..(239): n is a, c, g, or t
  misc_feature (272)..(272): n is a, c, g, or t
  misc_feature (334)..(334): n is a, c, g, or t
  misc_feature (413)..(413): n is a, c, g, or t
  misc_feature (417)..(417): n is a, c, g, or t
  misc_feature (423)..(423): n is a, c, g, or t
  misc_feature (427)..(427): n is a, c, g, or t
  misc_feature (431)..(431): n is a, c, g, or t
  misc_feature (688)..(688): n is a, c, g, or t
  misc_feature (861)..(861): n is a, c, g, or t
  misc_feature (903)..(903): n is a, c, g, or t
tatacatattaatactcctgaatagtttcccaanttctggggcacttagggagcaaaagcaaatgtttcaatttttgtntacaaaantntactttaccaattgcngaagacaaannntncataantctggcgactnaaacnctcaaagnctcancnccttttccnatancnaatnctcccaaccttgttttgactattttgnncaataaaattgggtttnnntgtttgtnttgaatttnatgaagtatcagcctgttcattaaaattttganagttcttagtccagtggtatgatcttgaagttatcaggaacttgtattcaagagtccttgtnagagtcttttcataaatctccttgaacaaaaagcaattttggactgtagctgatggtaaatactttgaggaagaatganagcnactgtntgcnagtnttcctgaaatacagaaatgacatcacggctgctataatggattaaggccaggaagatgtcctgttcctgaaggagcagagactttgactgttatggatttggagctttccatgccagtggctgagttacgaacagagcaagcatagagcccgctatgctttgtagtaatctgggggataaagagcttttgtcctgatagctgaaacttcccattaattgtccaagaatattctgctggtgggttagagtccgcgaanaggacaaagtagaggttttctcctgaatggtaataggtgaatgaagggtaaattctggggaggtctggaccatagaggacattcagggtgactgggtaactgcggatgccaccatatcggtcctgtatttcacattgatagggtcctgtttcatttctcgtgacactgggtanaatgaggatcctgttttcaatggggtcgctttaccctgggantgaacggggaggctctgaacattta

SEQ ID NO: 582564 - DNA, 989 bp, Homo sapiens
gtctccagcccacacttccaggtgggagagcgagctctgctattactggaaataatgaatgacatcatgagtctagaatcagtgacaacgcagtgaagattctgcccattcatgtttccttcctgtaccgcagctcaaagagccatggaacaagacaatacatggctgatatagcagagcgccccggagagcatcttcaatggagagtgaaccagaagctattatgatgactgtacacatacaggttcaaagcaagagagactaataagagaagctaaaaatgaaagaacgggaagaagcatgggcttaaaatagaaaatctagccaaagccaatccccaggcgcagacacagatccgaagaaggaccgtcctcttgcagcgccgcaagtccgacgctggctcaggacccccacagcaagaaaggcttggaagctcagctgctaggcccgatgagctggctcccaggacggccgctagtctccggggggccgcgtcggggcgggcgtcgactagattcttgttccggattctgtgagaaaatacatacttgctgtgtcataccaatcagttacatctcaaaagctttcttggaacccgttccgtaggacaataacgtgcgtggcggctcagtgcgagaatgagggaggtacaaaacacaagggtggacgtttcccaagagccccgccggcagagcccgcggggttgaccgacggggtgtccatctggatgggcgcgtcagcccatgcgataggtcaagtcagagacattcgccgaacgtccagaggaaaggaaagcacctggcatcactctagggctccgaagggagtaggacctgtacagaggggctggaacacccgcggtccaccaccgacgccaaacgtgggcaaatgagagttaggatgaaggagcaggagaacagaggccggcgcgggaaccaacgaaaggcgggcagaccaaggagaaccaaggagaagagaccagaaacaga

SEQ ID NO: 582565 - DNA, 120 bp, Homo sapiens
gccatccagactgaggaagacccggaaacttaggggcacgtagcacggccacgcctagaggaaggacctgaaggaccctgcggcctcggtaatctggtgcttcataccacggactacact

SEQ ID NO: 582566 - DNA, 229 bp, Homo sapiens
acaaactggtggacttgctgctgatccatgaagtcctaacccctgtgtgctggatgcgttcccctgctctcaacatatagttgggcgcctcaatgcccgggccaagctcaaaggcttcctggcctccgctggaaatacattttcctcatttataccaactattaagcgggcaaggatgactattttaaggcactgcccgggcaactgaagccttttgagaacctgctgt

SEQ ID NO: 582567 - DNA, 453 bp, Homo sapiens
  misc_feature (12)..(12): n is a, c, g, or t
  misc_feature (41)..(41): n is a, c, g, or t
  misc_feature (51)..(52): n is a, c, g, or t
  misc_feature (58)..(58): n is a, c, g, or t
  misc_feature (68)..(68): n is a, c, g, or t
  misc_feature (85)..(85): n is a, c, g, or t
  misc_feature (215)..(215): n is a, c, g, or t
  misc_feature (259)..(259): n is a, c, g, or t
ccagcgtgccanttccagcgcccgcgtccccgcagcatgcngcgcccccgnntgctgncgcgctgtgnggcgcatgcatcatgcnccccagcctcctcgtcgccctggatatctgttccaaaaaccccatgccacaacggtggtttatgcgaggagatttccaagaagtgcgaggagatgtcttcccctcgtacacctgcacgtgccttaagggntacgcgggcaaccactgtgagacgaaatgtgtcgagccactggncatggagaatgggaacattgccaactcacagatcgccgcctcatctgtgcgtgtgaccttcttgggtttgcagcattgggtccctggtactggcccgcctgatccgtcgcagtgcatggtcaatgcctggacacccagctagcaatgacgatcacccctgagatccaggctgaaccatgctgcggaaggatgtg

SEQ ID NO: 582568 - DNA, 204 bp, Homo sapiens
tctagaggatcccgtaggtcgatcactgtactatagcctgggcaacgagagcagactctcccccaaaaaacaaaaatctgctgtccagccagtacattatttatttcagacatgtaatttctatctgttgatatccagttggagtttttttatatcttccgtatctgtaaggaactttgggaacgtatggagtacagtgatcga

SEQ ID NO: 582569 - DNA, 295 bp, Homo sapiens
attgaatgaactgtttcaaggaattactcaatttaatgcagtggccaggtgcagtggctcacgcctgtaatcccagtactttgggaaggattgaacacctgaggtcaggagttcaagaccaccctggccaatatggggaaactttgtctctactaaaaatacaaaaatttgccaggccagctattcgggaggctgagacagcagaattgcttgaacctgggaggcagagtttgcagtgagctgagattgcaccactgcactccagcctgggcgacagagcaaagtagaacagcta

SEQ ID NO: 582570 - DNA, 442 bp, Homo sapiens
accaaaggctcccccagtgtccacatgaagaataaggtggaggagcacttgttcttctgcagctctgctactgtaactgatgcagcactatatctcagaggggtccatagaagctgacgagacatttttggggaaattaaagcacatgttactccgacttatagacgacataatgaatctatgcaattcaccgcagtgattaaaaggccggctaataatatacaggagccatagttgcgtatataagtcacatatcatccgtccaccgcctgttataaccggttataaacacgaggggttagcctgttaaactctagccactgaggccatatcacatttccacttctgatcaggctacctattaatcccgtctttcagaaagatcatcctggcattagcgttccaagtcgactggagacgttgaatagatcaagagcaacga

SEQ ID NO: 582571 - DNA, 265 bp, Homo sapiens
  misc_feature (4)..(4): n is a, c, g, or t
  misc_feature (33)..(33): n is a, c, g, or t
  misc_feature (98)..(98): n is a, c, g, or t
  misc_feature (125)..(125): n is a, c, g, or t
  misc_feature (260)..(260): n is a, c, g, or t
ggancggaggccaaagaggggaaaagggcagancccgggagcctgatgaaaagttcctgatactttctgttctccagtgccatttctctccttcttcntggttcacatatatgcttaatgcacantcatgtgcctacgtcctgcctcgcaatgagggagcatttaccccagtacacccatgaaactgcggcagcattttgacttattgctgttttcagctttaaaggttgtggtgtttttgtttttgattatgttgcttnttaac

SEQ ID NO: 582572 - DNA, 120 bp, Homo sapiens
ttgcattgtgcggccctttgggtaactccccaaccccactcccaaggagcccccttgctccttcagttccctccaacactggcgctcccacccctctgctggcctcagtttgtccaaacc

SEQ ID NO: 582573 - DNA, 271 bp, Homo sapiens
tacatagctcttattagttacacggcgcgcaatcttgcccgaagaagtgcggttgatttcccctggggccttccacacgatgtcatctggggtaattccatcatgcgaggtaacggcggtgcggatggccgcggatgcctctgcatcgccagctggttgcgcatcatcggcgcgctccaccaacaatacgagagattcagagtccttgccttccacagagaaagcggcgacggagtccggccgcacctgggtggacgctgcttgtcgacgc

SEQ ID NO: 582574 - DNA, 523 bp, Homo sapiens
tccaaacagtgccatatttattcacacaaaactactgaacagtaaaaatatgaaatatcattagtacagtgaagaaataatgtgttcactgtaactaatcagcacagtagcattaccagaatacctgtatcagatattaacagcaagaacagacaacaggctttcagtctccacctctgatgctgtgttttgattaaaaggttactgtacattgtatttcttttaggtgagaagaaagcttagaagcatttgaggaccaggaagtgggtcctctagtgatgaggaggtattctgctagatggctttttaaaatgttttccccagtgtcatctgcctcattaacaatggtttttgtcttagaggtctctctttgattttataaactgacatgatttcttgttctgttatgaatgcacaatgctttagtccttcagtaagcccatcacacatttttaccatgtcatgcataggcactgtttggactctgggcactgtttggactctgagcactgtttggactctg

SEQ ID NO: 582575 - DNA, 354 bp, Homo sapiens
gagtcggcccaactatggtctcagcttcccagagtgctaggattataggtgtagccactgcaccaggcctacacgtggtttctcccttggaagtactagccaggcctgaccatgcttagcttccgagatagcaggttccagccggtgcagcctcagatgcagcatgttttaggtctttgaacatatttaaatgagctgactgaacgtctttgtctagcaattgcagcatcgggctggtcccattggtgacttttcccgtgtctgggtcgtcctttcggtttcctttccatgtctcataatttgttaaaacctggacatttcacgggcgataatgtggcaactccggaagtcaga

SEQ ID NO: 582576 - DNA, 592 bp, Homo sapiens
gcccgccccattaatgatggtgtcaagtctaagacgcttgatgtgtcctgaaccagcggttgatgttctgcggctctcaaaatgtggcctgcaaaacgagagatatagttctagtgagaggcgtcattttcccacacggatacattgaccggcccctgaggggtcatagttatccatgtattggcggtattaaacttccactccgtcctctcgaggggggtggtcatccccgaggcctgaagccggggatctagcccgagctgagccccacgcagtttttttgcagaggaatggggtcaatacaagaggctacgcaccccgataagtagtttgtgctcggcccatttcggaatttggacatctgttggaagcaacatttgaatcctcccaaaggggctttcctcccttcacagggtcgcctggaattaagtgacgtctcctttacaaaggagactcttaaaattaggagggagtatttctcgcgccctgatgtcactgacagcaaaattctcgcccgaagcaaaacgtgttctaaccaaatgtatgcgggggcaaaaatccaaaaaaggaaggaccccgctcaaacatgaca

SEQ ID NO: 582577 - DNA, 833 bp, Homo sapiens
tcctggtgcatcttcaaaatgagtcctaagagaacatactgagtacttagaagtagaagaacataagatgtatttctgagctaaaacaaatggctctttcacatgtggctttattagactctgggagagcaacaattaaccaagctgcttcaggaaccaggtgtttgagctatttaattcttcacggtaagacaaatgaagtcctaattgaacgtgtttctcccaaggtttgtaaaacatgtcaagagttattctgtctgtttaaatgacataagaaacctccttaagcaatagaatttcgctgggttttctttgttaaaaacataatactgtgcaggcaaggcactgtgaaagttttaattccttccaggaagaaccagtggaagaattctacagatgggcgctacgatcaaagactactgtaacttagtagaaataatgatgtctaaagcttaccatacaaaagaaccctcagcagaataacaaaaactttgcctcaggacatttgaggtcaattgaagacggaaaaccggaaacccgttttcttgtaagcccctagaggcagatcaggtaaagccatacattagtaggaggggaacgggagaggaactggcacataacactcaagtatttatgcaagatttatgccctttatgttctaagcatcttctaaggttcggggtctttcagggctggcttgcgtggtattaggatctgtgctaggcctaataactgggatttcagtctgtataattaaagctaaataaatccttttccttggggatatctatcctttgccttttgttgtttaaaacttcacccttccaaaaaca

SEQ ID NO: 582578 - DNA, 331 bp, Homo sapiens
  misc_feature (311)..(311): n is a, c, g, or t
tgagacagagtcttgctctgtcacccaggctggagtgcagtggcgcgatctcggctcactgcaacctccacctcccaggttcaagcaattgttgtacctcagcctcccaagtagctgggactataggcatacaccatcacacccagctaatttttgtatttttagtagaaactttagtaggttttagtaggcttagtaggttttgccatgtttgcccggctggtctccaactcctggactcatgtggtctgcccaccttggcctcccgtgctgggattacaagcatgaccactgcatccagtcttggcggngaagatcctgtcattaccct

SEQ ID NO: 582579 - DNA, 540 bp, Homo sapiens
tccccatgcactagttgatctggattagcagtgagcaagactctgtgggtgtgggacctgctgagccaggcgtggaatataatctcctggtgtgccatttgctaagacctttggaaaagtgcagtatttaggtggcagtgtcccgattttcccggtacagtctgtcacagcttcccttaactaggaaagggaaatcccccgaccccttgctcttccttggtgaggtgatgccccaccctgcttcggctcaccttccatgggctgcacccactttctgaccagttccaatgagatgaaacaggtacctcagttggaaatgcagaaatcacctgtcttctgcgtcgatcacgctgggagctgcagaccggagctgttcctatttggccatcttggaacagaagcctttttttctttttttagacggagtttcactcttgtcacccaagctggagtgcaatggcacaatcttggctcacctccttgcaacctccacttcctgggtaaatttttggtattttttgtagagacagagttttatca

SEQ ID NO: 582580 - DNA, 1573 bp, Homo sapiens
taggtaaaatcttttttttccaaaaaaaaaaaacccccaaaaaccacaaattttcccacccacccacggggagggagatatggggtaggggagagaggtgtgtgcctggcccacccacgcccgggcccccagcccacggtggttttcggcgccgcaacaaaggggtgaatggggcgtaatgggcccaaaaaattaaacggtggcatgcgggggtggtgatatgtgggagaggagacagaggggagcgacaaaccgccgtgtaggagcgagacgcggcgaacgaaggagagacaaccgcgccgaccaaaccagcgcgcgcgcacacacaaacccgcggcgaaaccgccgcacagcggcgcgaccggcgcgcacacaattacgccacaacaaaggcaccaacactactgcgatgagagagacaaaaaccaagaccagcacgcggggcggcgaacaacaccgtagcatggagcggcccccacacaccagagaggcacaacactagcagcgcgctccgcaggcagagcaaacgacaccgcgcgcggacagcacaagacggcagccaacacgagggaaacaggggagtggagcggccccccaccacagcgggggggaccaaccactgagcaggtcaacacaggaagaagaaacacccagcggagagaataaaaatacatccaccccaacaacacggagaggacaagaaccgacgcgcacgactcccgccggaggacagcgaccgggacaacacaaaacgacggcgagccccccccaagcaggaccaaacgcgccaacatccccgcgatacacacaacacgctggaagaacacgacggacactagtaggaagcaccacgagggcgggaacacccgacccacagcaaccgatggtgccctgaataagagaccaagcacacaaaacgcgcgggtgcaaccccaggagggaacagagagatggacaaccagcaagcacacgcagagcgcggaacagccccaagccgccaccccagaaacagcagggtagagcccgaacactctagggctgatacaccatgagagtcatgacttcacccacacttatccgcgactagacaccctccgagtcctacaaaagcaaatcggtgtgtgctatagtacgtccctagtagaccaattgaaccaacgcggggggacagtgaaccgcgcttgctttgtctcgcgacccccctctctgagtggctcgacacgttttctcccattcgtctgaccgaatagatggggcctacgaggacacacgcgacacgagggggctagtaccaagaggcccccaacaagaagagaccctccagggggacaccggcacatcagaccaaaggggacgcacacgaagaacacacgaataacagagacaagagacccaaacacccctggagcgagacaacgccactagaagtcaacaagtggcgacagctagagccagcccgtccaccaaaagaaagggaacaacgacgacacagcccgcggaggcgcacagaaggcacacgacacacaaagagagagcggcgagaccacacgtaccacgagcatccaagcgagcg

SEQ ID NO: 582581 - DNA, 729 bp, Homo sapiens
ttttttttttgtttttggaaatggaatttttatcccaaaggactaatatctagaaagggcagtagctaacactcaaaacaattggtttaagtgtaaattaaaagcagtggattggcaggagagcaaacaggggggtagtgggcctagggcactcggatctagggtttattatccaagaaaagctataaaataaccaatggtgcctggattatgcaatctgggtatgtgcagctatttacagcaaaaaaaaaaaaaaaaaaaaaaaaaaaaaagaaaaaaaaaaaaaagaaaaagaaaaacaaaaaaaaaaaaaacaaacaaacaaaaacaacaaaacaaacacaacaaagaacaagaacacaaaaaagaagagagagagagaggggcgcgacgcggaaacacactatatcgacgcctcgcgcgaggggaagccacgcaccagaccgctcgccgcacccacgactggatcccaggaaaaagacgcaaggaccgccaaccacacgaaacagagtaccgacgaggacatacaacaacacctcacacgcgacaacaagccccccgggcaccgccttaaaactaaccctcaacgcacgcgcgctacgccacgccgagcgacaacccaacacggggacccacacactcccaaagccccacgcgggaaaagcaacaacacccacccaaaacctcacgcgccaggaccagaacacaaacaaacacgcacaaccccac

SEQ ID NO: 582582 - DNA, 288 bp, Homo sapiens
acgcgcacgcggtccaagtgatgttggatgtaaagtgaaatattagttggcggataaagcagatagtgatggaaagttgagccaataatgacgtgagtccgtggaagcctgtggatacaaaaaatgttgagccgtagatgccggtcgcaaatggtgaagggagactcgaagtactctagaggcttgtagagagggtaaaatcagagacccagtcaaaattgtaaatagggcagtgcttgcaattatattgggtatacgggtggtatatctaataagactaatggagag

SEQ ID NO: 582583 - DNA, 392 bp, Homo sapiens
  misc_feature (3)..(3): n is a, c, g, or t
ggntcgacatcccagctactcgggaggctgaggcaggagaatcgcttgaatccgggaggtggaggttgcagtgaaccgagatcatgctattgtactccagcctgggcgacaagagcagcctgggcgacaagagcaagactccatctccaaaaatatatatatatacacatagagagaaacgttatagtgaaaaaaggggcccgttacagcggctcatccccataatcccagcatttgggtggctgaggccagcggatcacttgagctcaggagttcaagaccagcctgggcgacatagcaaaaccctgtctctacaaaaaatacaaaaattagccgggcatggtggcacacttgtagtgccagctactggagaggttgaggtaggaggatgg

SEQ ID NO: 582584 - DNA, 296 bp, Homo sapiens
cacgaggcccgccgccgccgcgctcgcccccgcctgatccgaccccgccgctgcggtatcctcgccccatggaacgcgccgaactgctcgcccagcttcaggccctcaccgcccgggtcgacgagctcgccgaccgcgtgcgccgtctgcaggacgagaaccgcagcctgcgccagcagcaggagcagctcgtgatcgaacgctccgcgctgctggcgaagaacgagcaggcgcgcagtctcgtggaggcgatgatcgcccgcctgatatcgctggagcagcatacatgaccgcga

SEQ ID NO: 582585 - DNA, 256 bp, Homo sapiens
gagactcatggaaacagacgataatacaaaccagtatgtaccgagcaggaaagacatccatgacatagtgctcaataaaagtacaaaaggagattataaaacagccagtatagatgtgtatatgaagtatggggaaaatgttcaccacgcgtaacagtatgggctcatggagaatggcggattcgcaggtgatattttcttacttttttgtacgtgctctatatttccaggtgtgcatccatatttgacgtgcggg

SEQ ID NO: 582586 - DNA, 323 bp, Homo sapiens
caggccttcgcctgccttccaggggcaagccttccaaccaagggttcctcctggtcagccccagccaggccgttaggagggctcccctttttaggtggaacgccttaaactggagcctcccgaaggggtggtggtccgctttccctacgcgggctgaattcagcctgacatgggccccctacccttttccttttctttccagggcctttgggttttgatttttttttttttttaaaaccaacaaaccaactgttgcagattttgagttaaccccccaatagggtgttttttgccttccaattaaagtcccccctgcatggtta

SEQ ID NO: 582587 - DNA, 115 bp, Homo sapiens
cacgtctaggatttatgtcgttgaaaacaagaaccatttacatagcgctgctccatcgggatgtcctgattccatatatcgagttcgtataccctattgttgatatggatcatgc

SEQ ID NO: 582588 - DNA, 145 bp, Homo sapiens
  misc_feature (130)..(130): n is a, c, g, or t
gggaagttatggacaggaacttaggttgcccttacccccttcccagacctttttccttttctttgacttacagagcaccattcaggcaaaattaggagcgcaaatggtttttcttccaatcttaagcagntatacctttcacagg

SEQ ID NO: 582589 - DNA, 220 bp, Homo sapiens
  misc_feature (31)..(31): n is a, c, g, or t
  misc_feature (57)..(57): n is a, c, g, or t
  misc_feature (83)..(83): n is a, c, g, or t
  misc_feature (101)..(101): n is a, c, g, or t
aagcacgtgctgctgctcgaggaggagatcngcgagccgctgttcgaacgcctgccncgcgggcatggctgacccggccggcnagatcctgctggcccacntgcgcaggacgatgtcggagtaccggcaggtcgaggccgagatccgcaatctcaacacgctgcagaagggcgaggtgatcatcgcgacggtgaccggccttgccaccggcatccgtcta

SEQ ID NO: 582590 - DNA, 226 bp, Homo sapiens
ttgctgtcttatttacttactacttatgtgtcagtctagtatatgcatgaagtagtttctgagttccaatctatgaaacacctttactggattatagcctttatattcaggccagatgcagttttccaagcttcttaggttatattcgtgtttttcccattcccttcagtgtggttatattggtcattcggagtgcatgtgtttggtggtgcaccaaagccacaca

SEQ ID NO: 582591 - DNA, 796 bp, Homo sapiens
gccgggggggccatctcttctggccgtgcttgtctctgggccacttggagtgtgtgatacaatcagtcaagctgttgaagtctcaggagtcgtctggtagcctgcagaagtaagacctcatcatcatgagcctttcctcaaaactggagtacccaaatgtcatcaggttcgtgttagtaattaacagctcacataagaacccctctgtctttgaactctagaatgtgggctatggatcagatctaagcatcttgagatacgtctgggcggtctaggagccgttcaggccttaagtggaaggttggatccaaggaggggtgtaatggagcagtcaagccaactcggcggcagaatggagctataactaaggcatcctgtgagggttcgtggctcgtccaggcatgttaagccctcacattgagatctagttactgtggtatggctaataccgtgtcaacatgtggaggcgatcctaccttgcttatggggttgctagagcttagcagtatctggatcgtgtcaggccatacttatcagtgttccacttggtggtactataagaagctttctgagcagccctaagctccaggggggacaaatatgtggccccatcgaatagcagcccctagtcacatacaagagaacctagccagctgtccgggcagaatgcgtctctgctggagtagaaatggtggcactgggttgtgaagaggtaattacttgacacagaatccaagaaaaacagaaaggatgactggagcggtctcatagcgtgagcaattccctaaacatcgag

SEQ ID NO: 582592 - DNA, 945 bp, Homo sapiens
gtcccctaggactgggggcccccgggttgcctgggcggtccacttgtgttttttttttccagcagaagatcaataaattctgaatacagtgctagagatcccaattctacatgctaccaaggacagcacgccaattgatatactcccgaatctagttaactgtagcatctaaaatacgaaaagctgatcatagaagaactttcttaagtgacataatgtgaatatctaacccggagaggctaaaccacacaactatggatattcatatttgatcttggctcctaattgcttggccagataaaatagccaggtccacccccattcagtagaattggacaggacccaatgtatatggtagatggttcacagtaagtttcacacagcctaggagcagcaagaaatgtgacaaatagtgtgcggattaagctgctcctcaagacagtcattcatcacctttgtgaacatggaaacaccaacataagtcaaggtctgaatattcccatctgtgataacgagctaagtaccacgtacgcagtatggttcataaatcatcattactgaaggatatttcaagaacacagaaggtggggctaaatcaatgatagaaaccatgcagttcatcaattccagagaatcgacaatgcagggttcatatatcctttttaaaaatctgagatcattattataaaactagctctatacattctctaggcgttcaaatcttaatcttagcttgaaatgattacccttaagtcagttggctttaggcctttggcgattgctcaatataattatggaattattaggatgcagcatcttcaggtaagtgacagttatgttttaagaagagatcatttaaaaaatgatcctagaaatacactgctctgatatgtctaatgtataccccccaaatgtgtcagtgtccatataagctagagtaaattt

SEQ ID NO: 582593 - DNA, 250 bp, Homo sapiens
  misc_feature (121)..(121): n is a, c, g, or t
gcattaattctccttctgtaatgacacttatactataaaacttgtattatggtttcagtaaagatatctttttcttctagatcagtgctatacataagtacgtgagacacatacataattntatgttttctagtagtcattatttttaaaaagtaaaattgattttgtaatatattatttaaccccaatatatcgaaattttttttaaagacataaaccatataaaaattattgggcgtacggggagttt

SEQ ID NO: 582594 - DNA, 204 bp, Homo sapiens
  misc_feature (110)..(111): n is a, c, g, or t
  misc_feature (168)..(168): n is a, c, g, or t
gtatgtacagtacagcacgacacctagcgccacaatgtggtttgcccccttgcgagatagcagggcggcccaaattaggcaggcataattcccgaacggaaccccacccnnatccactgggccggggtgtacagcaaggtaataaatacctaacccgacaataatgtnggccgcgcgcccggccaacttagtggaggttggcaa

SEQ ID NO: 582595 - DNA, 101 bp, Homo sapiens
aggtggtctagaggatccctgcggtgagcatcctccacttcagcctccttgtgagttcaggccatcctcccacctcagcctccttggtagctggaactaca

SEQ ID NO: 582596 - DNA, 295 bp, Homo sapiens
tttcctttctttctctttccattcatcccacattgttttctaaagttgtctcaaaacatttgccaatggcctagtgtttccccatgggttttattttcctgagagcatgtccaaccaaaatgggatcattacccacccccccaattagggcctgttggggggcctggctcaaaaaagtctgctgccttgctccaaagcaaaaagccccctcccctttcttggacaggacacccccgtttttttcccacctgactgattttgggcaaatttcttcctctttccaaatgccacgttc

SEQ ID NO: 582597 - DNA, 319 bp, Homo sapiens
aagcgccttctccgcaccacggaaggcccacccaccagaagccaggatgtacagccacgcgggaccacagccacgagcaccaggaaggcggcttgttgggtaagtgggaggttagatggtaagctgtaaaaattgacaaggggtgggtcagctgtgaaaactctttggatgattctgccaaaaggtacttctggaaaatacaaatatgtggagaattttggtctattgatggtcgcctacatctgtacatctctgtttctttgcatagtgctttgattgggatatatgcaccctttcagagtcaaccgttttgcttgtg

SEQ ID NO: 582598 - DNA, 144 bp, Homo sapiens
tataaagcttgtttaattataatggcatgatctatgtaatcacagaggccattatgtacagacgaagtgggaggtatatttcttggatctgcttcctccttggataaagtcttgatgatcacctccttcttggccttatctgcg

SEQ ID NO: 582599 - DNA, 394 bp, Homo sapiens
  misc_feature (268)..(268): n is a, c, g, or t
  misc_feature (271)..(271): n is a, c, g, or t
  misc_feature (273)..(276): n is a, c, g, or t
  misc_feature (282)..(283): n is a, c, g, or t
ggcggcataaggttcatcccattctccttttcagccaactgaccacaccgccgaggaccggcacgtgttcatacagcagcgcacccgcgtcgaaataatcccgatggtggtacaccttgtcgcgccacagcagatgcgagcagcgctcgtcttacgaggcgatcctgcaagccaaccgccaaccgggcaacctgtacaatccgacgcagacaccgcggccgaccaacacctatttcggcagcgatattcacgacccgcgtgttgtcancangnnnngcatannaggtcattccctgagtcagacatgcctctttgactaccgtgtgccagtgctggtgattctcacacacctccatccgctctttgtggaaaaactggcacttttctggaacta

SEQ ID NO: 582600 - DNA, 397 bp, Homo sapiens
tcacagaagggacatttgaaattgactcggacaagagggtgactggctttttttttttaatttggaatctttctaatggaaagggcaagggaagagaccacccagaagagctccctccagggacagggctcggggctcggcccccgctcggcccggcagagctgtgtgcgggggacaggtggcatggatctcggtcgggtcattggtggacgggataatgagatcggctgaggaagagggtggaggcggtggtcggggcagataagggtgtcgcccaggggccattagcggggcagccgtttagggggcacggacggtgtgctaggtaaggtcctaagtggttaatatctatggatccatggagaccctacaatggccatcaggggaggatcactgg

SEQ ID NO: 582601 - DNA, 222 bp, Homo sapiens
ccattcgtggcctcaagctgggcgccatcgccgagatgcgcaagattgccgcttcgcgcaatttcagtttctgcatcgcgcaccgcgccaagccgatctacgtcgccttgctcgccacgcgcttgcaggtgattggtgtgcaccacgcgtttggtgattactggtgattctcacacacctccatccgctctttgtggaaaaactggcacttttctggaacta

SEQ ID NO: 582602 - DNA, 111 bp, Homo sapiens
actagtccaggttggtgagcgggagatgccagccagacagtggacgatgactggctggctggagagcttggctttatcgatgaactcgataaagccaagccggggactagg

SEQ ID NO: 582603 - DNA, 436 bp, Homo sapiens
gagacatggccgacttcataacagcttcttagatggcttcattgtttgcagccttgccactccagtcagccagtgcgctggcctgcagggtccgtccataagagttccttagtttccatggctttggtagagggcacaggttgacagcattaaggtttagagtggcatcctcttcactcatgccaccatgcacacagcagatgccaggagcagctgcaggcgctgtacggtggagagctgttacggtgcccatagctacttgttctggagtatacttcttggtgcaggcatgtccatgcagtcaccatgttgggctttagcagggtgccctccaggtagacataatggtcattcaggtccttgtagacttctagccaggaccttctcagtcacatactgtcagtgttgcaaatcatggtgtcaaacggggattacc

SEQ ID NO: 582604 - DNA, 690 bp, Homo sapiens
  misc_feature (324)..(324): n is a, c, g, or t
agagctgagctcagatgacacttgctcaggaaaggcctctctcctcttctactcctctgtgagaccttcccctgggtcccggctcactcatgactctactttccaaatcacaccgggtgctgtgcctctgtctcagtgcactcaactccagctggcctatgggtctgctccacagcaggctccacttagaaggacacggagctgaggaaggagggcagggccaggttactacacaacctccaatgccgaggcaatgccttcagactttgtcttggtggcaatataaagttatgggagcgtgtgtgcagaatcagaactgttttntggttgggggagacagcctcactctgtctttgggataaaattaaaacctgtaacaggtctatggggcctcgcagggtctcggccctgctcattgcacacggcgccttcctccccggcttcagccccaccagcccttcccagttccatggagcatccgctccttcctgccctgggtgcttggcacatcctggcctttctgcctgaagcagctgccaggcagcttccggctccgtgtctccacctgcctcaaccagttaatgcatactcatcccacaggtcttcacttagcatcgtgagctcacaaagccttccccaacaacagaatccatcaaaggtcactcaggcccgggaatttggcaagcatta

SEQ ID NO: 582605 - DNA, 198 bp, Homo sapiens
gtgcagacatcactgagcagatatcgctcgagcactattgggagcgctgaaacaccgtgacctgattaccgattctcacgcgcagtaccaaaagtcgatggtatgattcgtatgcctgtgagtcctcatagctgagcacataatgtaagtgagaacatacagggttcggtttccagttcctgagttagttagacgcgt

SEQ ID NO: 582606 - DNA, 455 bp, Homo sapiens
  misc_feature (346)..(346): n is a, c, g, or t
  misc_feature (368)..(368): n is a, c, g, or t
  misc_feature (378)..(378): n is a, c, g, or t
  misc_feature (390)..(390): n is a, c, g, or t
caccacgcaaaaattgtttgcctggcctggtccccagccaatgaacactttgcctccggtggcatggacatgatggtgtatgtttggaccctgagtgacccggaaaccagagtcaagatccaagatgcaccccggttgccccatgtcagcagcctggccgggctggacgagcccccgctggtcccgccctcccatgatgcctctgtcaaggagtggccaatccccttctgaggagccccccccccgcctttggatgggccgaatcagggactagagtttaactgcagcggaacatgtcatttttctatttttgtgacgggcccccatgcccccccccccccccaanaggcaggagggcccagtcatgncccttgtctntgcagggggtcnggacccgtttttttgaaagctttagccagtaccagtttgcccatgaaaaataaagcgggccccta

SEQ ID NO: 582607 - DNA, 379 bp, Homo sapiens
  misc_feature (19)..(19): n is a, c, g, or t
  misc_feature (49)..(49): n is a, c, g, or t
  misc_feature (67)..(67): n is a, c, g, or t
  misc_feature (112)..(112): n is a, c, g, or t
  misc_feature (117)..(117): n is a, c, g, or t
  misc_feature (230)..(231): n is a, c, g, or t
ttattaaaggagtgggtgntacagtaacttgaggcacatccacagattncttagaaataaaagatgnactaatagtataattttaacatgtttattggcagcttattttacnggaantcaattaatagagtatatagaagctagattttctattgcagacggagtatttggaaggattttttatttatctacgggatttcacggaattcatgtcttgtgtggtggtttgnncttagcatttaattttttacgtcttctaaaaaatcattttaattataatcatcatctggggttggaatttgctattttatattgacattttgttgatgtagtgtgattatttttatttgtgtttgtttattgatgatcttactaatat

SEQ ID NO: 582608 - DNA, 912 bp, Homo sapiens
atcgccctgctgggctttgaaaagcgcttcgtacccagccagcactatgtagccatgttcctggtgaacatggcgacggacctgtcggagaagagtggtctaccggcgcttcaccgagatctactgaagttccataaaaccttaaaagaaatgtgccctatggaggcaggggcgatcaattccagagaacaggatcatgctcctcgaagcttcctcgagcgtcaccaagtggtttgacgaggcaagcgtggccgccgaggaatctaaccagggcatgacattatcgaggtactgcgggaacgctcatgagccatgcccaccataggatctcccgctgtccccaccatcccttgatgtgcttcaaggtgcgcccgtgattgtaacttcaaagctcactccaacggacattaccctacgaacaacaaaagaatggctcagaatggacgagtacgtgtgaatgtcccacatatgcatgtgcaacgagataccagaggaagacaatgcgatcgcggccacccaatcgaatcgcatgggtagacggtacacgcagtccaatgttgcccaaacctagcgaggaaaggacgctcgggggctcgcgatgatggctctggtccacgggggacgtggtggacggttccgaggaggaagaagtcgagagccggtcgggtggggtctgttcacgattgaaatgcataaggcggaaggatggatctcggagcataccgtccctgcgagtcccctggtacaggacttgaccgagaggaaagacccttggagcccaatttatggccgggtgaggcataagttcgccatcacgggctaaactggtgtggaggggggaccgaggtgttcctgtccaagggtgacttgtggagtatttcccaaccccgggaggtggggggtcctccggaa

SEQ ID NO: 582609 - DNA, 400 bp, Homo sapiens
cagcttgtccagacctggaacaaaatttttggaataagaaatttgtattaaagtccttttttgccctaacagttggctcttgtagcctgcaggctgaggaagtcttttctctgggcatcagcagagttactgaaagcctttgattgagaaaaaacctccgtttgcctaaatcccttttttcgcagaagccatgggactcccccccgacacgggcagcttcccaagccatttttttcatttttgcttgaagcccccttgggtgcagcaatcctgtttgccataggttttttccttccttacctactcaagggctttttttaaggcatgcccccatatttcctgttttttgagaggaccatggggttccttaaaagaagaaaatttttaattttgaacccca

SEQ ID NO: 582610 - DNA, 709 bp, Homo sapiens
ttgccgcatgcgaaatggtgggggccgcccacacgacccccttttctctgctcggtgacaaaatgagtttcgcacggcgcgcctcccactatactctctcgcggtgcgccactggtggccagaaagtacaaagaggaggcgctgtctgtatacaaaagtgactttcttttgacgggcggcttgtaacaaggaagaggttgctgtcgccccacgccgcgagttattggagtctaagtggctacacagcgacggacagtgattgttgtatggtccgccctcggtctctttcgatcgggagggttacagcactacacatagtcgatgtctctaggattggtgtttcgcgcgcccagtgccgctcgcccgctccgatggatagtgagagtagcggggacacccctcttctcgtggccccgcagagacgagctagatatatggtggcggcgacacacgcacacgcggtatgtacaacctacatagatcaagtctgtatggtgagaaaaaagaagtcttgaggtagagtaggtgctgtctcgggggggtataggtagaatagaaatcttacacaaagaatattctcccctagtaccttctttttcgtaaaaaatcttttattttatccgagtactatttactcctcacacaccccctcgccactcacgctccccgcccacacgcaccccacaccacaacaatagacaaacacata

SEQ ID NO: 582611 - DNA, 416 bp, Homo sapiens
ctgtggtgtaccgtcccccaaaagtcttaaactgataagcaacttcagcaaatatcaggatacaaaatcaatgtgcaaaaatcacaagcattcctatacaccaataagagacaaacagagagccaaatcatgaatgaacacacattcataattgctacaaagagaataaaatacctaggaatacaacttacaagggatgtgaaggacgtcttcaaggagaactacaaaccactgctcaaggaagtaagagaggacacaaacagatggaaaaacattccatgctcatggataagaagaatcaatgttgtgagaatggccatatggtccaaagtaatttataggttcaatgctattcccatcaagctggaaaaacaaaactagagaaaaaaacaaagagacaaaaaaaaaagggacta

SEQ ID NO: 582612 - DNA, 459 bp, Homo sapiens
  misc_feature (289)..(289): n is a, c, g, or t
  misc_feature (348)..(348): n is a, c, g, or t
caacgatggtcctcagctgctgggcagcagctgctcagcacagagttctttcctcacaagtggagaggctggttgtccccactgatctccctgaggtccttgacttttttgaggggtgtggcccaaacccacaacttagttcctaataccttttgatactcttttattagatagatgttttacaaatattttctctcagtctgtgccttacaaagtagcagaggtgctgaaatagaggtttttcaaaaaagttttgctttttaagtccagttgatcaacttttttcttntctggtccatgcttatgtcctatctaagaaatctttgctaactgaaggccacaaagaantcctcctctgtctaaagcaggggtttccagccggggtgcagtggctcacgcccgtaatcccagcactttggaaggccgaggcgggtggatcacctgaggtcaggagtttga

SEQ ID NO: 582613 - DNA, 477 bp, Homo sapiens
  misc_feature (385)..(385): n is a, c, g, or t
  misc_feature (414)..(414): n is a, c, g, or t
ctcccttgggaactctagggcactgcacatgcctgatcatccctatactaccacagctgatgctctcttgatcctccacttcctggcaggaggcaaacagcacaaaactagtgcaataaacaaaactacaactaaggaccctcacagagttcatttcactctcctgccacctccaccagagcaagtgctgctatccacagctaagagacctgaagatggttcacatcacaggactctgtgtagacacccccaagtaccagcctgggagccaggtagctctgctggatggctagatccagaagagaaataacaattcactacactttggcttttcagaaaaccccatccctgggggaaattggggggagcattacattcaaggggngttacccaatggggacaaaagattttgantagttggcctttgagccccgggtttttccttttggacttagtttaccttaattgaggagggac

SEQ ID NO: 582614 - DNA, 114 bp, Homo sapiens
gcaaagaaaagaaggaacaatggtcgtgccaaaaagggccgcggccacgtgcagcctattcgctgcactaactgtgccccatgcgtgcccaagcacaagcccattagcaatgcg

SEQ ID NO: 582615 - DNA, 510 bp, Homo sapiens
gaacccctgcgcctggtttctcatcgttcaattcccacctatgagtgagaatttttggtgtttggctttctgcccttgcgatagtgggctcataatgatggtttccagcttcatccatgtacctacaaaggatgtgaactcatccttttttatggctgcatagtattccatggtcacacccagtcttttaacacaattgttgtttctggcctgcccctaaagatgctggagtttgacaacttttcttttgacactttgttttcttgcttgagaaaagaaaattgtagaggccgggcgcgggggctcatgcctgtaatcccagcactttgggaggccaaggtgggtggattacgaggtcaggagttcaagaccagcctggccaagatggtgaaaccccgtctctactaaaaatacaaaaaattagccaggtgtggtggcgggcgtctgtaatcccagctactcaggaggctgaggcagagaattgcttgaacccaggaggtgaaagtgcag

SEQ ID NO: 582616 - DNA, 397 bp, Homo sapiens
tctggagtagctgggattacaggcacacgccacgaggatcaactaatttttgtatttttagtagaaacggagtttcacattgttggccaggctggtctcgaactcctgacgtcaggtgatccgcccactttggcctcccaaagtgttaggattacaggcgtgagccaccacgcccggcctccaatcagtccctgttattctaactttgttatatttcatcttaatctcaaaaaggagatttgctcaactcttactatgaaatttactgcaggaaggaagaggataataatatagtacaaaggtaccttctgatggaacaataaaccaagaatgcctgtctcttaatactctagttcattaacccacagacgtattgatatgtatgctttgtcgacgc

SEQ ID NO: 582617 - DNA, 260 bp, Homo sapiens
tcttcctgtgagcaactttggtgtaaagaaagagcactggaaccgggcgtggtggcttacgccctgtatcccagcactttgggaggccaaggcgggcggatcagggagttcaagaccagcctggccaacatggtgaaaccctgtctctactaaaaatacaaaaattagacgggcgtggtggtgggcacctgtaatcccagttactcgggaggttaaggcacgagaattacttgaacccaggaggtggaggttgcagtgag

SEQ ID NO: 582618 - DNA, 193 bp, Homo sapiens
gcacgaggaattgcttgaacccaggaggaggaggttacagtgaactgagatcatgccactgcactccagcctgggtgacagagcgagactccaactcaagaaaaaaaaaaaagtagaagtgcagaagagaaaggtcttaaaaaaaaaaaaccatcaagaacaatttcaagacatgaaatgttctgcactgatt

SEQ ID NO: 582619 - DNA, 131 bp, Homo sapiens
tctctttcaaaggacagtttacatagtgtatcaaggggagacaacaaaattccaaatcactagagtatggctagttttcccacagatcctccactccacaccccaactccacgagtccatggcctatgtat

SEQ ID NO: 582620 - DNA, 333 bp, Homo sapiens
aagatagagacaagcactcacatgcaatcgccaaatacaacacaacacttagaaagtacaggtgcacattatataaagggaaaaatacacgccttacaatagcataatgtcaagaggtgaaaacaacaggtatcaaaacaccctgtatgcactacgtagatagtaatagactgatagagtgcccaccatatacaatgaggatgtctccataatataagtacagatgatgtaataaagtactgataaagataaaaacccaaatctaaataggctgcattaagacagcaaaattagccaaatacaacaaagtatataaaccactacttagtgata

SEQ ID NO: 582621 - DNA, 683 bp, Homo sapiens
gaccccaccggcctgcctggcatctgtctgctgacgcctctggcttgcgccaggacttggcgtgggcaccgggcgcccccatcccagtgtctgtgtgcgtccagctgtgtggcacaggcctgggctccccacttgagtgccaagggtcccctgagcatgcttttctgaagagccgggcctcagagtgtgtggctgtgtgtctgttcgatctccccatcgcgcccattttcatcccaccgcccgtctctgatccccgggggcgacagttggcgcgggagtgtgggcgcgccccatcagatgttctccctgtcaccagcgggagcttgatatcccttgtgtctgtaggcatagagccgccgggatactgcgggaggggagggctgactggggaggactggggggatgttatgtaaactagtagatttaattttactgtgtcggaggctaggactggtgttactgtaagggtgggagagtgggtgagcagcatctggtgccaggctgggccagactcccggccaagcgtgaagaggactgtgaccatctttccaacccctgggggaagacctttgctgctgagttggcggaggacacaggttcagcaacagcctctcctgcgtggccaagccagctgggaaccctaccaacaggtaccggagggcaggaggggggatgcgctgtgg

SEQ ID NO: 582622 - DNA, 360 bp, Homo sapiens
aggcgtgctctattgctctagggcgggtgggggggtggcaatgagagttccttggagtattccgctctgggagtttcatagcaacaggatcccatgaaggtgcatctttacttttccctccctttctattctgacttgctctaggcttggataaattttttccttttttatggaggagaaacatggtgaagactcaatgggacactcattaagagaagtgtggacctttccactataccgttggaaatcttcaacctccacatctctatccaccctggtaaagtaggcattacttatgcagcctgtgaaattagcatactgagcactgattgctgagccaccgaagtaaaacttcttttc

SEQ ID NO: 582623 - DNA, 956 bp, Homo sapiens
gcccaccgatggcggagaccaagctccagctgtttgtcaaggcgagtgaggacggggagagcgtgggtcactgcccctcctgtccagcggctcttctatggtcctgctcctctaatgggcgtacctttcaccctcatccacggctggacacgcgcaggtccccggacgtgctgaaggacttcgcccccggctctgcagctgcccatcctgctctatgacattgcgactgccaagacagacacgctgcagatcgaggactttctggaggagacgctggggccgtccgacttccccatggctggcgtcctctgttacagggagtccattagcaccgtgcggcaacagacgttttccacaatgttctccgcgattcatcaagaacccggttgcccgcgctaggacgaagccctgtaccagcagactgctgcgcgccctcgccaggctggacagcgtacctgcgcgcgcccctggagcacgagctggtcgggggagcctgcagctgcgcgagtcccgccgccgtcttcctggacgtgcgactagtgctcacgctggccgactgcagccttcctgccctaagcttgcactatcagtctgactacggtgtgctgcgcacttcctgcaggctgcccatcccgcggagctgctgcggcgtacgccgtaacctggacagcgcgatgcaggagaaagagttcaaatacacgtgtccgcacagcgccgagatctgggggctacggtccgcgtgcaccccgctacgagcccaccccgcgtctgtcgccaataaatggcatctttgtcgggaaaaaacaacactcccacacccccacactccccacaacaccaccaccaccctcccccacatccctcccaccccttcctcaccctccaccccccccctcatactaccccaacccaccaccaacacccacccaccctcacccaccccacccacaacacac

SEQ ID NO: 582624 - DNA, 116 bp, Homo sapiens
cacattcatcttcaataacggctgaaaggtgtgcaaggatgtaatatatggtctctagacaataatccttgagtgggtgaaatgttgcaaaaaagaaatgctcctgaatgcgtccg

SEQ ID NO: 582625 - DNA, 217 bp, Homo sapiens
tcctacggcctcctcttgctagtccacctacctctagtgctagtccacctacctctagtgctgtcacacctacctactgtgactgtaccaaccatccacatgatgcatagacatccacatagatgcccatccatcaatgatgcaatgatccaaccatccatcatgccatccaatcatgatgcatagtccaaaatcccaaacctacatactagtagct

SEQ ID NO: 582626 - DNA, 212 bp, Homo sapiens
aaaactagcactctacccacagtgaggtggtatctgatgaagacctgatcgagtgtattgattttagtattgcttggtgtcctccacacaggaggaggatgtattcagcctttaggatgatcagaaaagcagaaaaaaagagtggccggatggggctgaggggagaaaaaattatccccccataaatcctttcaagccaattttaattgtga

SEQ ID NO: 582627 - DNA, 396 bp, Homo sapiens
ctggaggctgtgaaggctaaagttgaggggatgaatctggtgagggccttcttgctggtggtctcaaagctgtgcagagcatctcatggtgaggggcctgatggtgcttgctgaggtctctcttcctcttataaagtcaccagttcactcccatgataacccattattccaataattcatgaatgaattaatccattcatgagggcagagccctcatgacccaatagcttcttaaaggccttgtctctcaatactgctatattgggggttaaatttcaacataagttttgaaggggacaaacatttaagacattgcatatgtcatacgattaaagtatgccttagagtgtgggatttgaatgttatttatcctctctgagagaagcagaggtgttc

SEQ ID NO: 582628 - DNA, 113 bp, Homo sapiens
gcttttgctgaagaatctgaaacatggcagccatggcgtaccggacgagtaatgcccagtccggaacgtctatagaaggagtaaagctcgagtcatcactgaggaagagaaga

SEQ ID NO: 582629 - DNA, 463 bp, Homo sapiens
  misc_feature (37)..(37): n is a, c, g, or t
  misc_feature (172)..(172): n is a, c, g, or t
  misc_feature (366)..(366): n is a, c, g, or t
  misc_feature (398)..(398): n is a, c, g, or t
gtattttggttttttctgagacagagtttcgctcttnttgctaaggctggagcgcaatggcgcaatctcggctcactgcaacctccatctcctgggtttaagcgattctcctgtctcagcctcctgagtagctgggattacagacgcatgccaccacacccagctaattttngtatttttagtagagacggggtttcatcatattggtcaggctggtctcaaactcctgacctcaggtgatccaccagtcttggtctcccaaagtgctgggattacaggtgtgagccactgggcccagcctggtcaatgtttttaatatttacccacataacacatatttgccacattctttgcagtttaatactnccattgtgttccagggccttcaattctgggantcattttccttctggataaattttttttttttttagaatttccattaaatgtaggtctgctgggt

SEQ ID NO: 582630 - DNA, 204 bp, Homo sapiens
tttgatacttctctttgattgacatgacatcaactattttgcacgtgccactgagtaaatatcaatgctatctaatgtaatatcttagcagacaacgtttaacaagcacattttggctgggcatggtggctcacaccgtgtaatctcatcactttgggaggccggatcacctgagttcaggaactttgatggtaacagaccctg

SEQ ID NO: 582631 - DNA, 812 bp, Homo sapiens
  misc_feature (665)..(665): n is a, c, g, or t
tgggaaacggagtctggctctgtcacccaggcaacctccacctccggggttcaagtgattctccgtgcctcagcctcccgagtagctgggattacaggcatgcactaccatacccgtgctaaatttttggtattttaagtagagtgggggttcactgtgtggggcaggctgggtctcaaacttccgggacctcaggtgatccacctggccttgacctcccaaagtgctggggattacagggcgtgacccattggtgcctgggtcacctggtatcttaatatcagataggaatcagatgggtctggtaagggaattcaataattctggattttcagaaacaatgggtttgggtacgctattattagaatttcacaagatacggggaagtcacctggtgagtagtggttggactctggggtccacagataacagggataatagctatcagtttaacaattccaaggatttttcactcttaaaattttttcatcaattggactttacaaaatttctggtaaatccggatttatactttcatttaatagtggcctgtaagtcccaagaagtattgaggtctataattttggaacactgccgagtgtttaacaaatcttgtggtgacagcatttggtgtaggccgcagtaatggggggaccttaattcgngggagcagtagggtccttttgggctttaaacgtggggattataacccttttccacttttctagagccgggagggactggttgggaatagcccaatggatgtttcaaattggggctaaatgccccctggcgggctttggatcaatcca

SEQ ID NO: 582632 - DNA, 183 bp, Homo sapiens
acgccgaccgcggtcaaaaaggcttcgatacgggatcatcctatttattacctcagaagttgtttcttcgcaggattttctgagccttttaccactccagcctagccctaccccccaactaggagggcactgcgcccaaacagtgatcaccccgctaaatccccttagaagtcccactcctta

SEQ ID NO: 582633 - DNA, 305 bp, Homo sapiens
  misc_feature (76)..(76): n is a, c, g, or t
  misc_feature (228)..(228): n is a, c, g, or t
tccatcgtgatcgaacaggtatagggcagggccatcaggtggacgccacgcttggtcttccggttctggcgatccngatcggggttgcgctgctgttcgatttcctcaacggactgcacgatgcggcgaattcgatcgccaccatcgtgtcgacgcgggtgctgcgcccgcaatatgcggtgctgtgggccgccttcttcaatttcattgccttcctggtgttcgggnttcatgtcgccaacaccatcggcactggcatcatcgatcccagcgtggtcgatgcgaccgtgatctttgccgctttg

SEQ ID NO: 582634 - DNA, 190 bp, Homo sapiens
  misc_feature (105)..(105): n is a, c, g, or t
  misc_feature (184)..(184): n is a, c, g, or t
ccatgttgccaagtctgttctcaaactcctggctcaagcagtcctcctatcccaaagtgctgaaattacaggcatgagccaccacgcctggccaccactagtttnttgtaatgggagcaggttccatattgagatggaggaatggatttcactgattgtcatttgtaattttctcagtgtcccncaagaa

SEQ ID NO: 582635 - DNA, 407 bp, Homo sapiens
gatcgagctcggtacctgtccttacccttactgggggggggtggtgctggaggctcacgcctgtgatcccagcactttgggaggccgaggcagatgcatcatttcaggtcaggagttcgagaccagcctggccggcatggtgaaaccctatctctactaaaaaggcaaaaattagctgggcggtagtggcacacacctgtaatcccagctattcgggaggctgaggcaggagaattgcttgagcctggcaagcagaggttgtggtgagctgagatcgggtgactacacttcagcctgggtgagagagtgaggctctgtctcaaaaaaaaaaaggctaatcatgtgtgaatcctgctcagcattgaaaacgtctgaactattgatgcatacagtagggggtagggcgg

SEQ ID NO: 582636 - DNA, 234 bp, Homo sapiens
ctgcaaaaacaaaaaattagcaggacatggtggcatgttcctgtagttctagctacagaggaggctgaggtgggaggatcacttgagtccaggcgttcaaaggtgcagtgagctcggatcacaccactgcactccagcctgggtgacagagcgagaccgtgtatgataaaacaaaaacagaaaacatccagaggtttgtctagaagtagttatcttgcaggtgttcagaaggac

SEQ ID NO: 582637 - DNA, 395 bp, Homo sapiens
  misc_feature (2)..(2): n is a, c, g, or t
  misc_feature (14)..(14): n is a, c, g, or t
  misc_feature (20)..(20): n is a, c, g, or t
  misc_feature (26)..(26): n is a, c, g, or t
  misc_feature (40)..(40): n is a, c, g, or t
  misc_feature (72)..(72): n is a, c, g, or t
  misc_feature (177)..(177): n is a, c, g, or t
  misc_feature (269)..(269): n is a, c, g, or t
  misc_feature (325)..(325): n is a, c, g, or t
  misc_feature (367)..(367): n is a, c, g, or t
  misc_feature (375)..(375): n is a, c, g, or t
gnattcggcacganctcgtncaattnggcacgcccatggnctgctagagcttgaatatgaagggttttatancgaggggattcttcgttacgaagaagaggtatgcagtaatagatgaagaaggaaaagtcattactcgtggtttagagatagttaggagagattggagtgaaattncaaaagaaactcaagctagagttttggagacaatactaaaacacggagatgttgaagaagctgtgagaatagtaaaagaagtaatacaaaancttgccaattatgaaattccaccagagaagctcgcaatttattgagcagttaacangaccattacatgagtataagggccgataggtccctcacggtngctttttncaaaagaaacctagcttgct

SEQ ID NO: 582638 - DNA, 781 bp, Homo sapiens
  misc_feature (11)..(11): n is a, c, g, or t
  misc_feature (101)..(101): n is a, c, g, or t
  misc_feature (146)..(146): n is a, c, g, or t
  misc_feature (157)..(157): n is a, c, g, or t
  misc_feature (208)..(208): n is a, c, g, or t
  misc_feature (252)..(252): n is a, c, g, or t
  misc_feature (299)..(299): n is a, c, g, or t
  misc_feature (359)..(360): n is a, c, g, or t
  misc_feature (406)..(406): n is a, c, g, or t
  misc_feature (420)..(420): n is a, c, g, or t
  misc_feature (422)..(422): n is a, c, g, or t
  misc_feature (425)..(425): n is a, c, g, or t
  misc_feature (445)..(445): n is a, c, g, or t
  misc_feature (460)..(460): n is a, c, g, or t
  misc_feature (595)..(595): n is a, c, g, or t
  misc_feature (611)..(611): n is a, c, g, or t
  misc_feature (637)..(637): n is a, c, g, or t
  misc_feature (680)..(680): n is a, c, g, or t
  misc_feature (703)..(703): n is a, c, g, or t
  misc_feature (710)..(710): n is a, c, g, or t
  misc_feature (764)..(764): n is a, c, g, or t
tattgttggtnttgcaccttagatatcaaataaagatatctagcttgacacaaaagttggtagctgcaaggttaagtctgtattagtttgatgatgggccnggaaatgatatattttctaaattttgtccttaaatattggctgtnacaaatgctgntatagcaaaaagtaagcttctattagacagcaagagggaaacttgagtgantgaatgcaacttaccgtgccaagtcctcttaaaggaggtaaaanaataaatactgtgttttaccagtggctcccctcaaagcattattctnagcatgcggggcgcgcgctatagtgagcagctcacaatagtgaggtcgcggcccaggggnnggttcaaggccaagggtaggacgccgtggtgtgggggaatccgccnagggcgcggtgccngntcntggaatgccgcacttgtgcngggggatgagtctanggcctattttcttctgattcaaaaggacattcccaatttcaaccttgctgaaaaacaggcatttttgtacctgctgttaagaacagctaggatacaggataaggctggcataaaattatttagcaagcacatgcnagctattccagtttgnaatctaccaaactgtaacatcagggngaaataaaaagttgaagatgaagttgttcctcaagctgagggnacaaaatcttacaaaaggagggnttaggcnctcgctaaactctatatggagaacatccttctcaagctaggtggaagatgaggnagaatattaccaaaagc

SEQ ID NO: 582639 - DNA, 1194 bp, Homo sapiens
gctgctcgcggcgccgccgtcctgtctcctcccgtgtgctgctgcccgatgcccgcctgagtcactgcctgcgcggctccgggcgtctggctccccatactaatcagcgcagatatttggagttcttacaacatgggcaggacatagactagaacgaaatgcaagcagtctgaacttagatctacacgtactttggatgagctgtccgaagaatgtcagaagaaaggaggcaacacttgttgtgtaaccgaacacaagatacttccaagaatgcacgatctaggacgtacatccgtggttcgaagagtgagtagtcagacaagtccctccagcattcattggccgatggctcctttccgattgaaattgaatcttgagtgcgtcctgaggtaagacaacaatctcaacacaagggactagctacgtttgaaaaaaggcttcgtgcccccgtacggtgtgagttggtaggggaacgacggaatcttgacattcgccttccgtacatacagaagaccctgggctagagatgtagacatagtagcggcgatttattgatgtcaaggacctagagatttccttaaggtgtagtcgccacagttgctatggcggatccccttgtcaggcaccgggaacagaatattgcttgtggttacttccatcaatcaaagacccttgctttatctttgcatgaaacgcctgatttcgcagaattcatattaattagcaatcaattttatcgaaccctcaaccgaaagccaagccaatgctgaaatcggaaacacccagaatgaaagcacagtatgccggcatttccccgcgcaggaaacatttgaccagcaacaatcgtgcgaacaagcatttgcacaggcatgcagaacagcactctgggactgcaatgaactacaatgtagtgagccccccagagcagggaaatatcccttggatttagcgccgccaacacatggttgctcagcggacatgattgaactgtagctaccagtgattatgccgttccaggcttcgacgagtgagcaccactacttctgataacgccttcgaccacgattattagcgtagaagattcttccagatgctggcacgcctaatgagttcggcttaaacattacacttgaccccttgaatttttccaatattagtggttgcgcgaccaccagtatccgccgacgatattgc

SEQ ID NO: 582640 - DNA, 973 bp, Homo sapiens
gcaggaggcggaggttgtggtgagctgagatcgtgccattgcactccagcctgggtaacaagagcaaactccatctaaaaaaaaaaaaaaatggtattatactggccttcaattcctctcttcacttactaatattctgtctggttatttttattacagaaagtggggtattgaaatttcctactataattatatggcttgtctaggtgtttcttccagtctggtcaatattggctttatatattgggaaccttagtggtgacatacacacagacacacagacgtgcacacacacacacacacacacacaaaattctgtcataggttcccagttaataaatctattatggttaaaggtctttcttggtctcttggcagtttggacttaaagtactttatgtaagatatgacagtttggggacttaagatgtagctttgggtaatactatttgggacctcttgggctctcatgggttaatatgggcatgcaagtgtctaaatctatctgtgcaccttcagtatgttttaatcattagatgtcaggtgacccttgtagaaaggcaactgggatcgggttttaataattttaataaattctttattgaaagtatgtctctggcatgggaaagttttcttgaacacaaagagacttactaatttatgggggggctcaactggactcctggcatctgtggtcccacattttctctccttgggtctcatcggggacggaaatttgacttgaatatgctttaacttctctttcttaatgggggtcgcggattcaaaagcgggataattctcggtgggaacggggcggcgatacattaaacctctgagaagaataccggggttttcgcgtctgtttgaaatggaaccttggtgtggtgtgcaacaaatatttccttcacatgttttccacaagtgtgctgtcaggtgcaaaaaattcaatgatgtatataaacgttgttaa

SEQ ID NO: 582641 - DNA, 165 bp, Homo sapiens
tatatgaaagggtttttttgggccccaatttctcaatttttttaaaaaaataaaaaaaaattggggtttcctacgtgtggttgtgtgtgtgaaaaacctttagggccccaacaacaggttttgtgtgtgtgttagaggaaaaataaagaggtggtgtgggcgaaa

SEQ ID NO: 582642 - DNA, 140 bp, Homo sapiens
  misc_feature (117)..(117): n is a, c, g, or t
ctaatgataaatcatggaatgtaagctcgataaagaggagagtgaagggacatcaagagcatgagagatatgaaagactcttccttatcaacaatgaactggcatgcaccctttttnctttgcagatacttctgacatat

SEQ ID NO: 582643 - DNA, 767 bp, Homo sapiens
agcgggttgtggagtggatgctttggccagatggcggggagcggggtccggcaagtctacttctaacgtcagcaccttcgatgaacgcccattttcagtcgcggacatgaagcgaggccaagcgagagggtgcgcgagctctaccgccgcctggtactcggtgcgtaggcgctgctctgtagacgagctgatgcgacctaaactctccaagctgccactatcagctgctggaaatagagtgggcacgggagtaaccgctccgagaaatgtgtatgaagaatgcccatgtcacagaccccagtggtggtgtgatctgtctggtcattatcggggacaacgatcaggaccatcgggaagacaacgcatctacagacgtatcggaagccagctggactcgatgtctatgcgggcttcgttcccatgagaacgaagaagcggcccaagggcctaaaagggtagttttcccatatccaaagtttccttattgattggcccgaacgaagtaccccagtgggaagaggtcccacttacaagggtcggggacacatggacttggccatcggtttcgagttagcttcgttcttgtcaagtagtcgagctaaaaatagatacttcccacctgatttacagactggggctttcaaccttttggtctgactcagtaaaattccctattctgtattgtacagcccaaagtattgcctttgctaagccctcctttttttggcgcctgaaggcatactgtgcggatcccttggggttattag

SEQ ID NO: 582644 - DNA, 831 bp, Homo sapiens
  misc_feature (7)..(7): n is a, c, g, or t
  misc_feature (18)..(19): n is a, c, g, or t
  misc_feature (22)..(22): n is a, c, g, or t
  misc_feature (37)..(37): n is a, c, g, or t
  misc_feature (97)..(97): n is a, c, g, or t
  misc_feature (118)..(118): n is a, c, g, or t
  misc_feature (124)..(127): n is a, c, g, or t
  misc_feature (134)..(134): n is a, c, g, or t
  misc_feature (136)..(138): n is a, c, g, or t
  misc_feature (143)..(143): n is a, c, g, or t
  misc_feature (208)..(209): n is a, c, g, or t
  misc_feature (213)..(213): n is a, c, g, or t
  misc_feature (219)..(219): n is a, c, g, or t
  misc_feature (221)..(221): n is a, c, g, or t
  misc_feature (232)..(232): n is a, c, g, or t
  misc_feature (235)..(235): n is a, c, g, or t
  misc_feature (252)..(253): n is a, c, g, or t
  misc_feature (256)..(258): n is a, c, g, or t
  misc_feature (261)..(261): n is a, c, g, or t
  misc_feature (297)..(297): n is a, c, g, or t
  misc_feature (304)..(305): n is a, c, g, or t
  misc_feature (309)..(309): n is a, c, g, or t
  misc_feature (315)..(315): n is a, c, g, or t
  misc_feature (323)..(323): n is a, c, g, or t
  misc_feature (325)..(325): n is a, c, g, or t
  misc_feature (330)..(330): n is a, c, g, or t
  misc_feature (354)..(354): n is a, c, g, or t
  misc_feature (368)..(368): n is a, c, g, or t
  misc_feature (372)..(372): n is a, c, g, or t
  misc_feature (379)..(379): n is a, c, g, or t
  misc_feature (388)..(388): n is a, c, g, or t
  misc_feature (396)..(396): n is a, c, g, or t
  misc_feature (406)..(406): n is a, c, g, or t
  misc_feature (413)..(413): n is a, c, g, or t
  misc_feature (425)..(425): n is a, c, g, or t
  misc_feature (433)..(433): n is a, c, g, or t
  misc_feature (443)..(443): n is a, c, g, or t
  misc_feature (455)..(455): n is a, c, g, or t
  misc_feature (459)..(459): n is a, c, g, or t
  misc_feature (469)..(469): n is a, c, g, or t
  misc_feature (508)..(509): n is a, c, g, or t
  misc_feature (529)..(529): n is a, c, g, or t
  misc_feature (576)..(576): n is a, c, g, or t
  misc_feature (613)..(613): n is a, c, g, or t
  misc_feature (619)..(619): n is a, c, g, or t
  misc_feature (659)..(659): n is a, c, g, or t
  misc_feature (663)..(663): n is a, c, g, or t
  misc_feature (686)..(686): n is a, c, g, or t
  misc_feature (692)..(692): n is a, c, g, or t
  misc_feature (701)..(701): n is a, c, g, or t
  misc_feature (716)..(716): n is a, c, g, or t
  misc_feature (730)..(730): n is a, c, g, or t
  misc_feature (734)..(734): n is a, c, g, or t
  misc_feature (740)..(740): n is a, c, g, or t
  misc_feature (746)..(746): n is a, c, g, or t
  misc_feature (748)..(748): n is a, c, g, or t
  misc_feature (758)..(758): n is a, c, g, or t
  misc_feature (820)..(820): n is a, c, g, or t
gtgaacnaaacgcctcgnngcngccagatcgctgctntcgctggcggatggtgtgtggccgccgcaggacgcccgccgtgcccgggccatgaagtancggctgctggcggcgccgctncccaannnncagcccnannnccgcnctgcgctgcccggtcctctcccggcggggtcgtatcggcgtggacatggctggccgcgtccctannctgntatttntncttgtttttcnaancagctgtttggctttcnnaannncantttctgtctttaaaaggtttaaagaaactaccagancattttnnaatnaatgtnttggtacnancaganccgtagttcctattgattcatcanattttgcattgganattngcatgcntggggttanacctaaanagtccgatanatacttntgcatgtctatncgaatacnagtggatgangaagccttcgtnattnaattcaagcntcgagccagcatggatactgtccatcacatgttaatttnnggatgcaatatgccttcatncactggaagttactggttttgtgatgaaggaacctgtacagataaanccaatattctgtatgcctgggcgagaaatgctccttnttactnggtctccccaaaggctgtgggattcagagttggaggaganactngaagtaaatactttgtactacangtacantatgggggntattagctttttganagataataatatgnactntgcggntgtgcncntacactgcanatgtctgccacagcctttaattgctggcatgtacccttatgatgtctgttgacactgttatnccagcaggaga

SEQ ID NO: 582645 - DNA, 546 bp, Homo sapiens
ctagactggagcctatcgtgtgttctttaaaaacagccgctcctatgcattccactataaagacgcaggactgacatacactccagtaatccgaactcactgaggattatacatatacttcatattatcactcgaccttctggaagacccttacctctgatcgagcgagcgcggtatataacgagaacccccttcgagaggatgagttacataattcgccggcgagcgtactttatttgacctttcgtggcatgaagacgtacacctagtacgaagggtccacgcaggtacatatttcgggttcaaacccacctgtattatttcacgaccgcaggccgatgttcatgggctttgagagactcggtttacctgaagctccatagactttatgccttgaactgtacgtgccatgggtgcggctgtgctcacttgctatcaccgggagcacgtctgatctcaactcataggacgcatgcaagttttgcacaatgcgcgttaccactattgtctctatatgtgctctagcagggttatttccggagcggt

SEQ ID NO: 582646 - DNA, 467 bp, Homo sapiens
  misc_feature (386)..(386): n is a, c, g, or t
cgtcataaaccagactgacacaaacagactttaaaagtttgtggaaaaatggaattaaaaaagaaaaatttatttcaacctaagctctaccaagtacaattttgtaatcaatgatagcagccatttaatccatcctaaagaactgagggtcttgataattataccatggcaatgcagtagttattacgctattaactgaagaaaatgggtgtcctttatagattctttaagattaggaaacaaaaagaagtcagaggactgtaaggtgtacgcttaatgattctctgtcaaaactctcgaaaaattgcccttgtatgatgagaataatgagcaagaacattgtcatggtttagaaggactctttggagaagctttcctgggtgtgnaacatgctaaatcttttgctagtttacaccaagtcatctcataataagcagatgttttgtctttggccctaagaaagtcag

SEQ ID NO: 582647 - DNA, 239 bp, Homo sapiens
aacacggtcttacaatagtcgagcgaactgtttgagggtcagtctcctcaccattaggctgcacgcccttgtacctcaaagcgatcccacaatgtccacgcttggttatatgtacttggtgactgtgatgcggcaaggtgtgttcagtagaaaccaaatgaaaggcaggcccacagttgatgtgaaaccagttcctgtaaggaggtcaagctgtcgtgtgcccctaccacaaccttgtc

SEQ ID NO: 582648 - DNA, 248 bp, Homo sapiens
  misc_feature (13)..(13): n is a, c, g, or t
taacgacggtaantgaaagtagaagcacgacggcggccagccgatggatgcccccgagcagcgcaaacccttcggcagctacgccagcgacggcacggaagttttctccttcctgcggcaatttttaccgggtgtaggcgtatgtttacacggcgaagcctgcagttatgatatgagccccgacgaagactttattatcgatacgctgccggattgcgatcgcctgatggttatcagcggattgagcg

SEQ ID NO: 582649 - DNA, 934 bp, Homo sapiens
  misc_feature (172)..(172): n is a, c, g, or t
  misc_feature (174)..(174): n is a, c, g, or t
  misc_feature (191)..(191): n is a, c, g, or t
  misc_feature (213)..(213): n is a, c, g, or t
  misc_feature (217)..(217): n is a, c, g, or t
  misc_feature (228)..(228): n is a, c, g, or t
  misc_feature (249)..(250): n is a, c, g, or t
  misc_feature (263)..(264): n is a, c, g, or t
  misc_feature (291)..(291): n is a, c, g, or t
  misc_feature (295)..(295): n is a, c, g, or t
  misc_feature (320)..(320): n is a, c, g, or t
  misc_feature (363)..(363): n is a, c, g, or t
  misc_feature (400)..(400): n is a, c, g, or t
  misc_feature (923)..(923): n is a, c, g, or t
gttctgaataaagctttgttggtttgtgccactttaatttaatggtaaatttgtgtccaataagtgtctggtgatattacaacatggatctaagcattttggtggttctgaccattgtccgtttctacatggttatttgattgttaccctcaagttgatacaagtctggcantngtactcaactgatgaanctggagcatatactgaccccgnagantctttgcatanaggtggtcccgtcagttttcnntttaaacacatcnnttcttcatccccaacatttcataaggnctcntacattgataacgtactctctcacnagatggatatttactcatctgtctcgacactatataagcattntgtactgtgggcgtattcacacagaaagtgtcagtgnacctgcatttgggaggggtggaccagccccgttctacacatgaaatgttgttctcattgttttgaagtctgtatcctgtgttgcaaataatttgcacagtatcaccttccagatgtgtttgtcctgaagattcagaatgaccattttccacaaaaggaaagaaacacagtctgagacactttggtgttggtgaccatccttcttctgtgcatgttatgcgagtccaaaatgattttgaaggagacacaaaattatattcacaggagtaatagaaaacttcccctgtaggaacctgggaaaatggcttatatttttcttcatcatatagaattccatggtttatgttttggaaaatcacaaaatgttgcttctcccccaacagaggatatccgtgagattagaattacactgaccaggagccacatgcttggtagttccaatcttatataactaaaaatacttcagtggtggtggtgttgctttgaatctgctctcgtgccgaattcttgcagccggggggatncactaggtcta

SEQ ID NO: 582650 - DNA, 812 bp, Homo sapiens
  misc_feature (172)..(172): n is a, c, g, or t
  misc_feature (174)..(174): n is a, c, g, or t
  misc_feature (191)..(191): n is a, c, g, or t
  misc_feature (278)..(278): n is a, c, g, or t
  misc_feature (801)..(801): n is a, c, g, or t
gttctgaataaagctttgttggtttgtgccactttaatttaatggtaaatttgtgtccaataagtgtctggtgatattacaacatggatctaagcattttggtggttctgaccattgtccgtttctacatggttatttgattgttaccctcaagttgatacaagtctggcantngtactcaactgatgaanctggagcatatactgacaacaggaatgaagtaatgtctccattgtcaataggtggagggggcccacatttttctgcagaaatagtgnacctgcatttgggaggggtggaccagccccgttctacacatgaaatgttgttctcattgttttgaagtctgtatcctgtgttgcaaataatttgcacagtatcaccttccagatgtgtttgtcctgaagattcagaatgaccattttccacaaaaggaaagaaacacagtctgagacactttggtgttggtgaccatccttcttctgtgcatgttatgcgagtccaaaatgattttgaaggagacacaaaattatattcacaggagtaatagaaaacttcccctgtaggaacctgggaaaatggcttatatttttcttcatcatatagaattccatggtttatgttttggaaaatcacaaaatgttgcttctcccccaacagaggatatccgtgagattagaattacactgaccaggagccacatgcttggtagttccaatcttatataactaaaaatacttcagtggtggtggtgttgctttgaatctgctctcgtgccgaattcttgcagccggggggatncactaggtcta

SEQ ID NO: 582651 - DNA, 363 bp, Homo sapiens
  misc_feature (182)..(182): n is a, c, g, or t
aactggacgcttacagtctacgtggacgacgaccggtagtacaccaagtaaactgactctgaaactcgtggtgactgctagagactgggctgcaacgcgaggacggggggcaactgtgagaccacggactttacgacaagggacaacggcttcctctgacggacacgtaggactttacacgnctgacgaccccacggacgactgggacgcctgattttcaaccatgacagactggaggacgccaaacgtgatttccagacacaacggacacctgatgtgtcgcagacacgcccagaggacaggacacgcctggatctcctgacggacgactggacggccagaccaaggggacctggacgacgt

SEQ ID NO: 582652 - DNA, 151 bp, Homo sapiens
aagacaccatactcagcaatcacaagagcccgccgccagtgggttgtgtgcagactggttgaggtggagcctgctctctcgttctctgacacagagagctgccctgcctaggagcacccaagctaggcaggggtctggagcacgggttctg

SEQ ID NO: 582653 - DNA, 275 bp, Homo sapiens
  misc_feature (274)..(274): n is a, c, g, or t
ggccagagcagcttctgcccggactgcctctcccccgctaggcgctggagcctctggctggaggctccctcccttggccgtcccaatagagcccgagctacttccactggccaggctcccgagcatctgagtgaccccagcctgctgagcagtgctggcctccgctcctcaggggcttagtccgtcccaccccttcccttccctggcgccccgagcccaggcctctcagctgtcagctggttttgatgacctcccactgccccacacgccgcgng

SEQ ID NO: 582654 - DNA, 142 bp, Homo sapiens
gacgtcccagtctacgctgctctgtctgctgtcgtccgcatatacttaagcattgtgaagcatggtaatgaaaaaaaatctagctttcatatctattcagtcgtcagttgaatgtatatgagtaattaattccaccccctgc

SEQ ID NO: 582655 - DNA, 446 bp, Homo sapiens
cgatggtacgtacgcccacaaggactccagcctgggcacagcgactctgtctcaaaaaaaaaaaaaaaatttagtagggttttcacccattgataagaaatctttaatttggatcagagcccacatttgaggcatcatatcccaggatcggaggcccctacccatgggccttctaggcaggagctccacccgtaatggcccttgctctgtcctggggagcacagtttaggtcggactcttgtagaccatgttcatccggtttatgtgagttctggctgactttgagctatcctgtataaggtgtgcctgtaattaccatacttttcccagaccttcagaggaatacttgggggccctttcctaggcgtggatgcttgctgagcaggcttggaggggggggtgattggcttcatctgcctgtgttccgtagcccattttattcctcc

SEQ ID NO: 582656 - DNA, 450 bp, Homo sapiens
acgggtaagtgtcctctgggctcagtcatcgctctctctttctatctcggcccaatatcactgcctcagggaagccttccatgataccccagcccctcccccgcaacacacacacctggccaagtcctctgtatacacacatgacatttctattttcccttcatcacacttaccacagcttgtatttacgtaattgtttggttaatgcctatctgtcttacttgactataagctctatgagtgtaagaccattatacctctatcacctaactcagtgactggcatataaaaagcaatccacaagatctggcatggcagctcacgcctataatcctcgctacttgggaggctaagagaggagaatcgcttgaacctgggagttggaggttacagtgagccgagattgcgccactgcattccagcctgggtgacagagcgagactccgtctc

SEQ ID NO: 582657 - DNA, 302 bp, Homo sapiens
tcgtacgtccacagcgtgaaattttgaaactgtggtatctctcctgcattcatgactccgctctgggacttctgatagccaatctcacctccatcagcttctttatcctccttccatctgattttgggttcatggaagccatcagcgatctcctccaaatccaaggcaatggaacctctgggtccccatccttagcatagctccctagtgtctaacgtcctctcctggctgcattccttccttaattctctttcttgccatgccttaagagaggacgtcgtcacggtaacaccttttttttg

SEQ ID NO: 582658 - DNA, 268 bp, Homo sapiens
aggatctaatctcgaaagtagtgcaggctggtctcaaactcccgactcaggtgatctgcccgcctcgccttcccaaagtgctgggatgacaggtgtgagccaccgtgcctggcctctttctccgttattaaattagggtagcctctttttttttttttttggattggccaaactcctttattctggtatactaaacccctctataaaacatttttactaatacaatatttacctcccagtcttaggaatacgtctctacactctactg

SEQ ID NO: 582659 - DNA, 318 bp, Homo sapiens
  misc_feature (22)..(23): n is a, c, g, or t
  misc_feature (28)..(28): n is a, c, g, or t
  misc_feature (43)..(43): n is a, c, g, or t
  misc_feature (165)..(165): n is a, c, g, or t
  misc_feature (173)..(173): n is a, c, g, or t
  misc_feature (181)..(181): n is a, c, g, or t
  misc_feature (189)..(189): n is a, c, g, or t
  misc_feature (194)..(194): n is a, c, g, or t
  misc_feature (198)..(198): n is a, c, g, or t
  misc_feature (315)..(315): n is a, c, g, or t
atgctcgatgtctagtaggatnncaccnaacattggcctcgantccacctctcctgtgaagatctggccagcacctccccgtgagtgctcctcaccttgccggcatagtggataatgcagaaatcagctttgtccttcagctgcttgggcttctggaacttgggntgggtgcnctgctccngcatcacnttctncacnagctcttgtcggtggctttggggaaccaccactcctcgtccagcagggccaaaatgcccggggggcctgctggcttctcaatgaggtcgatgcagggctgcagggtcaaggccaatnttg

SEQ ID NO: 582660 - DNA, 302 bp, Homo sapiens
  misc_feature (32)..(32): n is a, c, g, or t
gtttttggcccggggtttttaaaaaaaaaaanccccccccccccaaaaaatgtttttttttttgggccaacccaacccggttcccaaaaaaggccgggggttttaaaaagttttaaaaatcggggagcccttaaaccaccccccccccccaaagggaaaggggcttttgttttgtttttcccttgggggccccttttggaaacccccccttatgggccaacgggggccaaaattttaaaaaccctttgcgggtttttaaaccccccttttgtttccttttttttttttttgggaaaaattta

SEQ ID NO: 582661 - DNA, 310 bp, Homo sapiens
gaagggggtcccctgtaccgccacatcgcagatctcgctgggaccctgacctcatactccagtgccagccttcaatgtgatcacgggggctccatgctggaacagctggccatgcaggagttcatgattctgcctgtgggagccagctcttcaaggagccatgcgcattggcgcgaggtctacaccacctcagggggtcatcaggccagtatggctctcacagacagatcagactgcgccctgcgctcgagcgtctggcaatacaccactcatgagatcgagagctttgggacaggcaatctatctggcg

SEQ ID NO: 582662 - DNA, 1277 bp, Homo sapiens
ggccgagccacatcgctcagacaccatggcgaaggtgaaggtcaggagtcaactgggatttggtcgtatagggcgcctggtcaccgagtgcctgcttttaactctggtaaagtggatatttgttgccattcaatgacctccttcattggacctcaatgtacgatggttaacatgttccaatatgattcctacaccatggcgaattcctatgcgcaccggtccaaggctgagaacgggaagcttgatcatacaagtggaaatcccatcaccagtacttcgcatgggagcgaggataccgcttccaaaaaattcatacgtgcgcgagcagattgctagagtcgtctagacgtacgattcgttgaggatgtaccacatggagacgtacgttcaactcatcgcattggaaggaagggctaggggggctcaatattagtcaagggaagcgcgatgcctaaaaaagtggttcatcaatcatcgtgccactccgtcctgcgtgagtgcacaccacatgatctcagatcatgggatggtgagaacccgagtgcagtcaagctatggacaaacgagtcctcgaagcatccatctagcaaataagccttccatgacgacctaccaaaattgtctataagacaacccaatgggccgaaaggatacatactcatttggagccacactatatgtgtagtccgttggaacggacttcaagtagacccatcatggtaccattgcacatctacttgcgcacccaaggaaagacttgtgggataggccccctctcggggaagacattgttggtcgtgaattgggccccgcaggggggctccatccaggataacgattcattccccctgcactactaacttggctgcttggccagaagtgacttgtcgggccacacgggtacaatccccttggaagtctagaaactgggcgaaagctccaacttgggcgaattggggccatttcccgttggttccccccaacttggaccaaagccggttggtcaaaggttggggttggggaaccctttgaaaccctgggaccgggtcttaagaaagaaaaccttggcccgaaattcacatgtactcgcaccaccttcaacacgcaaaggcgtgggttgcaacggccacggagcgtccggaaagggggcccccccttcaaagggggggaattccgtggggtgcttacaagaccttgagagcaaaccgatcgttgggtcgttctccctcgctggagacttgtcaacgcgagcgaaaacgccaacgtcctttccgagc

SEQ ID NO: 582663 - DNA, 428 bp, Homo sapiens
ggtttagcacgtggtaagtggtttcagaaacatgaaaagctataaatgtaaaatatacaagacaagaacaaaatagaaaaaaaggctgggtacactggctcagtgcttgtaatcccagcactttgagaggctgaggcaggaggactgcttgagcccaggagttcaagaccagcctgggcaacagagtgagaccctgtttcttaaaaaaaaaaaaattagctaggtgtggtaatgtgtgcctatagtcctagctaaccgggaggctgaaggatggtttgaggctggaagttcaagaccagcctgggcaacaagagcgaaattctgtcttaaaaaaaaaatcccatcaagagctttatggtctacttggcctgagctgctgtagaaaaaactgataccacggtgctataagataccacggtgctataacg

SEQ ID NO: 582664 - DNA, 566 bp, Homo sapiens
  misc_feature (98)..(98): n is a, c, g, or t
tttggattgaatttgttttcagaagtggaagaatctgccattgagaagcactttctggactgtggaagtatcatggccgtgaggattgtgagagacanaatgacaggcatcggcacagggtttggctatgtgctctttgaggtatgggagactaatgcattgtcactgtccttcgaagtgccctgggaggcattgacactgttgcatgtcatcattgagacataactttcacttccattctcaaattccatcttaagaaaactgggctaggtgcagtgactcatgcctgtaatcccagcactttgggaggccgagacgggtgaatctcttgagctcaggagtttgagaccagcctggcccacatggtaaaacctcgtctctactaaaagtccaaaaattatccaggtgtggtggcaggtgcctataatcccagctactcaggaggctgaggcaggagaatcgcttgaacccgggaggtggaggttgcagtgagccgagatcgtgccactgcactccagcctgggccacagagcaagactccatctcaagggggaaaaaaaaaatac

SEQ ID NO: 582665 - DNA, 184 bp, Homo sapiens
cgacttctagaaggatcctcccatagatatgtgagcccaaagatgttatttcttacatttcgttgcatattgaaatactacttacgatagacatccttggcctgagactccttgccatagtccttaactactacacaactgcaaccaaccactttacggggtttccccttctgtcaattgatac

SEQ ID NO: 582666 - DNA, 727 bp, Homo sapiens
agaacagagcgccttacgaaaggcggcataactagggagccaacgaagagagtggtagatccattttctaatgaaagattaggtatgatgtgaaagcacctgctatgtgcaagtatcaagaaatatggggaaagacgctcgtcacccaggacccaatggcaaccgaagatggcaatcatgaatgtgtctcaaggtgctcggtgctgctattggacagctggaggtccgtggcatgcactgtctgcaagcagactgactggaaagatatgctactatgttagtacacacactcttcgaaatggcatgcagtctcatcctagataagaacttgctctactaggagtggtaatagacaaaccgtgggcccgttgaaactaaaaccgtgtccacaagtagaggccattcggtaggtctttgatcgctcggctagtatcaaaaaaaggtggtggtgtctccctaaccgtggagtccacataacaaataacaatggggcctgaggcaccaacaatatggggaattgtggcaacagagcccacacaaccggtgttacggggagtggcctccgtaggagagagaacagttaaacaccggcgacaattgtcggctatttccacattatgggggcattagtgccgggcctcccctcggttgttgccctagggttgactctttgggggttcttattggggaccactttaaaagaagaccacagaaccggggcccaaaa

SEQ ID NO: 582667 - DNA, 563 bp, Homo sapiens
aaatccaatccaggttcccaaatcagcccgcacatccactagtgttcggggcttttctattggtatttggttttcgtccgttgttcttatctatgcgagtctttttagtttttactctcttgtctgattttttttttttttttttttaacttcccattatattgtccgcgaacgcggtaaatgtgttagctgtcattcgttaggattattagtgcgggtattaggcgaagagggggccgatgacttaccggcttaacgcctcgttctctgacttagcgatggtctcttgtctgatgatttttgagtgtaattgtttggtcgggtgtcgctgacttctggttttattgtggttcgttcgtatgtgcgagcggtaggaggtcgtctttcttcgttcggcgcgtttgttaaaggccggtcgttatccggaacggtgtactgaacgttatatggtgagggacagttggacttttgcccctaatcctctttaacctacgggagacgaatggggttcgtacgcgagcgggtatgatgccgaatgggtgatagaaccgggcgcggagaac

SEQ ID NO: 582668 - DNA, 879 bp, Homo sapiens
acgtgtcccttctctgttcaccacgtatcacgaacccaacaacaaagttaagctgtcacgcttcttgagcttttccgggcagagaccagagtcggtttgagttgcatgactgacatcttctggctacagtggatattacaggaagactgaaactccgcaaaagtgtgtttgaaaaaaagaaaagcaccctggaatttggatcattaagtatctgccatttagaatgtgcccacaactgccaaatcaataatagaataaagcaaggggaatccctgagtcttcatggagtaagagccacaccttcttaaggggatcaaggggcaaagtgacttgaagacaatattatcatgataaataaagaaataagggaaagtgtggaaggttttcatctcaatggacatgaaaaagtgtgcattattagagtcgagtgcatttaataagccaggattatctcctagagttgcacagcacgacacagcaagtagagtcggcatttggagacccttttggaaagaagagacaagctctctctaagctatatcactagtcccaactttcctgggctccagccatccctcgcacctcggccttaccaatcattcggattacaggcgtgaagcctttgctccacgctaatatttctattcgccgcgtttggggggactttgaatattacaaataaacccttgggtctctttggccccaggggaggaacttttgcggccgctttccttttatggagggttaatgtataatcctcccttcctgaactccttgcctcggccttactgctgccacaacggtttaatccacttaaacgccggtccctcgtttttccaagaattggggatatcccccaacacacggcttctaaagcct

SEQ ID NO: 582669 - DNA, 882 bp, Homo sapiens
gtgcttgctaacgtgggtatatttataacaatataactgagttatagttggcattagtaaatatttgctgtcactctaaatagttctgttgtatagcctgaaaaccgtttagtggctcattgatcagattcctgactaacccctctcttagagctacagcgagctgcattaccagctgaaaacacttcttagggatcaagatatagagtgtaatttttcaaaatcgtttttaattcaaactgtgttttagtgtaaaattgttaaccttgtaagatggatacggtgtataagaatgtaggccttaactatttcacagtgagtcaaaacaaagcagctttaaagaaataattggaagcacaatgtgcatggcactgactgaatgcggtaactactctctaaaagtttctacattcagattatatgcctgattcatagtaaagtacctctgaataaacactgtatatagaaaacctgacttcagtgaatatctcgtcattttacatgggccagtttatgtactgctatttgcacgtattatttcctatagctacatgttcttttgtagctttggtagttctatttgtatactagatcatacctgatggaaacgctcaatctggtagggtgacagcatgttcgagcatttgtatagagaactggtcagtaatccttccatgtgtctcttccggttaaccagcagtggggtggtacgccaaatttgccgctggtggccaactgtgcaacgaaaagagccctcttctagcacacaaaaacccagaaacaaatctgtcgcccccagaagtaacaaccgcggcgggcgcgaacattaagccagacgctgtgggctacaaacaccgcgagccgaacgtagtctcattgacc

SEQ ID NO: 582670 - DNA, 965 bp, Homo sapiens
gctgttgtgttttcgtctggctggttcctgttatgttccctgcctttctttgtctggccctggtctccctctttttttcttcgtttgtttctctcttgtttcgtcggcccttttttcctcgtcctgttcagggacctggtctctttgttgtcctttgtcttgatcgctgctctatctttcctgtgtcgttttgttgccagttgctatgttggccaggtctcttgtctttctctctattacgctgtgttgtgtgttcttcgtgtctggacgcggatggtcgtccctgtgtctcctggtcttgtcctcttctatgctccaatgctgtggttgtttctctggttgcccgctgtctgttatcttccatgatcccccgtttcctgccagccccttgtccttaccccagttcaccaccagcccatccattaggccagcaactgcctgtgtacgaactctatctcctgggctgtaacgtggctatctggttatggtttggacactcagggatagaatgatctaacagccatcactgatatacatgcgctgctcgatctttgtcagcctgtctctatgtgtggatatgcccctcgagccttgtgctgccgcatcatgtggccccacccatagtcaacgggaagaagcgaggaatgcctggacctggagtgcccctggagccagatgtcaagagggctgacagcttcctattcctgtgtgtattctgtccagcttcctttagaataaaattggatgcccagaggatctcccaatccctggcttggggtcaagaaagcagccagcaagacgttaggggccttagggcatctgggctagttgttccattgaagccgaactctggaccctggcccttacttgcttctctagctctctaggcctttgccagtcttgcacctgtccccaccctccactcagcatgtcctgcacgcaaacactccaccctccaccttcca

SEQ ID NO: 582671 - DNA, 427 bp, Homo sapiens
cagtggctcgtgcctgtaacgccagcactttgggaggccaagatgggaggattgcttgagcctatacgttcaatatcagcctattccacaggacaaaaataatttctctttctctttttttttttttttctgagacagtctcgctctgtctcccaggctggagtgtagtggcatgatttcggctcactgcaacctccatctcctgggttcaagcgattctcctcctcagcctcccgagtagctgggtttataggcgcccaccaccacacccagctaacttgtgtatttttagtgaagacggggtttcaccatgttggccaggctggtattgaattcctgacctcagatgatccacctgccttgacctcccaaagtgttgggattacaggtgtgagccaccgcacctggccaaattcttgctcttaaa

SEQ ID NO: 582672 - DNA, 561 bp, Homo sapiens
  misc_feature (228)..(228): n is a, c, g, or t
  misc_feature (240)..(240): n is a, c, g, or t
  misc_feature (245)..(245): n is a, c, g, or t
  misc_feature (259)..(259): n is a, c, g, or t
  misc_feature (271)..(271): n is a, c, g, or t
  misc_feature (288)..(288): n is a, c, g, or t
  misc_feature (295)..(295): n is a, c, g, or t
  misc_feature (301)..(301): n is a, c, g, or t
ggaagagggatattcattagtctccaagatcaccatccaattcccttatccgttaccacaccagcaaccataccgttaccatgaagaccatgggccggcaccaccttcaccaagtgacccatttaatgtctccatcagattaacccaccttatgtacacaccatgtgtgacatagtggagaatatatatcacttatacatcactccctatgtagtaattatatcaganatattaaactcnatatnatcatgaggaaacnaactatgggacngactataagagaattanctggccnggcgcngtgtcacgcctgtatcccaacactttgggaggctgaggcaggcagatcacaaggtcacgagttcgataccagcctggccaatatggtgagaccccatctctactaaaaatataaaaattagctgggcatggtaacaggtgcctgtagtcccagctacttgggaggctgagatggaaggatcacttgagactgggaggtcaaggatgcagtgagccaagattgcgccactgcactccagcctgggcaacagagcaagacac

SEQ ID NO: 582673 - DNA, 152 bp, Homo sapiens
tgaggattcaccacagacacccccactgtaccggcaccctagcaggagggctcctgggaggagtgtagccctgggccccctcagagaggttcgcagctggcatgtgatcaggccctggggactctgagggacccagcctggcacacagcagg

SEQ ID NO: 582674 - DNA, 312 bp, Homo sapiens
tatgaagagggagttcaccctgtcacccaggctggagtacagtggcatgatctcgtgctcactgcaacctccatctcccaaactcaagcgattctcctacgtcaggctcctgagtagctgggaccacaggtgtgcgctaccacgcccagctagttttttgtattttttatacagaccgggtttcgccatgttgcccaggctggtctcaaactcctgagctcaagcgatctgcccgccttgtcttccaaagttgtgggattaccggcgtttaatcccctgtcttccaccgaatcagatcttagtgagctaggc

SEQ ID NO: 582675 - DNA, 519 bp, Homo sapiens
ctataaattcagaattctagaatttagtaataataaacttttataatatgcctacggtagtatcattctctcaatatatataaggatcacctatgtaagcaaaatcagatggttctttctatattattctattgtctggaaatactacaatatgtttatcctttaacctgtagatgaaccatttacaaatgtttctcattccttgattattcacaagtaaagctgctatgttcatttgtatgcacatgtattccatttctcttgcagtcaactaagcaatggaatattctaggtccacattgtaagtgtatgtatcaactgccaaactgcaatccaaactgattatccacttcatactcccacctaaatcatgcatcaattcagggtgttgtatgtcctctcaaacattcagaatagacatttagtcggatccactatagtgactgtgcagtgttattgcatatagcattttaaagttccatacccaggtggtaaatgatgcataaaacagtgtaaatc

SEQ ID NO: 582676 - DNA, 239 bp, Homo sapiens
gcgcgctcctcgtcagtccctgagaccctaactagtgaggtttaccgtttaaatccacgggttaggctctcgggagctgcgagtcgtgcttttgcatccggtgaaatggggtggaattttattcgtttagaagcaaataacaagaagaaagagaaagtttgtactgaggtggattgagttataccgtctgagtgttttcatgtgttagagtgggatcagtgtgaccgagagaagtggca

SEQ ID NO: 582677 - DNA, 150 bp, Homo sapiens
tgttgcctaagtcaatcaccctcgtttcatctggtcctattctcttgtcggaaatttctcatgcaacctttttttatatctgaaaatgattgtttaaaatattcaattaaagttatactgctaagttcaatcttcttccatgttatggtt

SEQ ID NO: 582678 - DNA, 341 bp, Homo sapiens
gtagaaaaaagaggtaaggcggaggtggggttagggggagtctgcgagggggggaggaggagagcggaggtgatagagagagcgcgatgtctggaggcgtccccgtgcgagggacggttttgccacatgtgcgttggctgttcttagagggctaggcgcgggggggcttgggctgttggctgagtatggggagcgtcgtggttgtcttcggcgcggtccggtgggttgcgggaggcacagcccgaagggctcttcgcgtccagggacccggggtcgttggggggcgtcggtttgccagggttgtgacggccaggtactggaccacgcttggatctgtgatg

SEQ ID NO: 582679 - DNA, 1005 bp, Homo sapiens
  misc_feature (1005)..(1005): n is a, c, g, or t
gtggcgggggacctcagcagcgtccgagatgtcatactctcgctcggacttcctcgtctctacgtcggtggtgtgccgcacgtcgcgatgcacagatccgctgcgacggtggacatgttacactcctggggtccacagatagtatggttggtaagttctgtgtgaagataacatgggccgagaatcgacttatcatgtttaaagtggactgatgatgagtattgatgtccaagtgagtctgtcaaggagcggggcagtgtatggggctgtgggcatggatgtttgggggacattgtcgatggcaggtggccgtgtgttacgttgagcagggtaaattcaaagtaacagggggcgaaatgtggcatacattgtcatggacacgcacagagaggtgttgcttgtggggttggaagatagacagcaagctaggtggatcgggcaagggttgaagtgtgggtcagggctaagatgattataagttggtgagaattttaggatgtgggggtcgtcatgatgcaggaagtgggaatgatgaagatggtgtgcgcgattgtgagattctgaatgtattagtttgggacagaggtcatgacacgggtaaggcggggagccacaagatcgaactggaatggcgtacttggttgtgcttacacgggtcggggacgctgggcgaaccagctgccggatgcagacgcacggaggaaggcacattgggggaccgggaaccgcggaagcaacaccacgcgaggtgaaacaccagcaggccgcacacgccgcatggcaacagcaagcggacagaaggaaccaaacacctgcagaacccaacacaggaaacgcctgaaccagcacctagaccaaggcagaacgaccgacaaacatcggtgacacacaacgaccaccgagggcaaaaccagaaaagacgaccacgcacacaagcacaagaagaaagcacgacacagcctgcgcaaagaacgatcacaggcatacctacgtccacgctcggcn

SEQ ID NO: 582680 - DNA, 350 bp, Homo sapiens
  misc_feature (84)..(84): n is a, c, g, or t
  misc_feature (158)..(158): n is a, c, g, or t
agctcggtacgacgctctatctgtggggagatgcattgcggactgcatcgtacgctccttcacttgggtcagcgcgctcatcangtctgggtgttggcgtgaatccaagggacacgaatcccgttttcctgtgcatcattattttctgctttgcatcnataactgcttgcatctcagcatgatccttcttcagttcctcttccacagacattagactgcttgatgtatgctctttcactcttgggctaatcttttttcttccctgctgtcttcggagccgctcctcgctgtcctccagtcgggccttgtataccagcagcagcttctgcatctgctgctcctgcaccagc

SEQ ID NO: 582681 - DNA, 1106 bp, Homo sapiens
atatatttatactatatgattctcctatacagccctacacccctgtgtactcatctatatctatgatcaaacatacttttctatgcctactgtaccccttctactcatctacttagactccccttccaaacctaggggggcatgtaggtgtgagagaagcacacaggctctgacgatttcatcatagctctcctttcctaggagcccacgagagagggcacgcagacagggggtaggtgtctaccaaccaccccaagcactagaggacagacacggggctcttactacatttacaccccatccctttctacccctgccccacaggactagggccactatctgggtaggggcagtgggtcccagataggatcacactgacgactgtaacgaactacaaacaaaatttctattcacattaacatatcggtgtactcaaacacacacaacacacgacacaccaacacaaacacacaaaagaaaccaacaccaacaacatgtgcacgcgcacaacaacaagacacataaagacacccgaacacaacaacaaagcagaaaagtggcaccaacgagccccaacaaaacaaaacagagacaccactgacacacaacacacgaccacacagggaagaacacccgggcaacagaaaaacacaccaaagcagagatatacaccaccacacaaaaacacacacacccacgcggaaaaacaccacgaattcaacaacacaaccacccacaacgaaggacactacagcagcaccaaacggcgaaaacatcaccaagcgggcaccacaagggaccaccacaaaaaagccaccaccaagtaaacaaaaacaacaaaaacaaaaaaaaacaaaacaacaacaaaaaaaaagaaaaaaaaaacaaaaaaaaaaaaacaagcaacaaaaaacaaacaaaaaacacaaaaacaccacacacgatcaaaaaaaaagagaaagcaaacaaagcaacagaacagaacaacctaacaatctaaaaccaacgcagcaaacaaaaaacggacgacaagacacgaccgctcacacacacagaaccaaaaagcagacacaaaacaaacagacgacaaccaaaaagaagagaaa

SEQ ID NO: 582682 - DNA, 379 bp, Homo sapiens
gacatctgcacctgccatgctcgttccagcactattcacagtacccaagattggaatcaacctgtgtctatcagcagatgaacaggtagaatgtggtatatataccccgtggaatactatttggccattaaaaaagacaggattctgttattctcagcaacatgtatgatcttagaggacattatgttaagtaagccaggcacagagggataaatactgcatgtactgtactgatgtggagggtgagaaagatctcatagaagtagagaggtgctcatgcctctaatgtcggtgctttgggactgtaaggtgggaggatcacttgaggcgtggagtttgagaccagcctgaggaacatctctcaaaattaaaaaaaaaa

SEQ ID NO: 582683 - DNA, 923 bp, Homo sapiens
cataaatattatatctagcatttaccatctcacttctaggaatactagtatatcgcttcacaccttcatatcctccgctactatgcctagaaaggaataattacgtatcgcttgtttcgattatagtctactctcataacctctcaacacccatcgtcccgtcgtgtagccagactattgtgcctatttgcccatactagttctttgcacgcctgcgcatgccatgcgtgttgggaactacaccctagctatgtctcaatctccaatcatcagtatgctcctagaactacgatatcataagcctaaacctaactccaattgtctaaaaactaatcgttcaccaactcaccattatatattaactagccagctgagcatgcacttttccaacaaagcacataattttgtaaatcaatcacaatccacctccacaggctctaatttattttactcatcactccgccctactagttttttaagccaattatcatagcatacatacctatttatgctgttcctccacatcgcttttcctccgacctcctaatccaatcaccccctcctaattagtaactacctgactcctaccccttcacaagtcatggcaaaggccaactggccacttatccagtgaaccagatatcacgaagaaaagtctacctctctatgactaattgctccctacaatatctccttaattataaacattcacagacatagtaactaagtcagtattttatatcttcttcgaaaacaaacttatctcacttggttatcatcacccgatgaggtaccagcagaacgctgaacgcttgcccttcttcctattctaacctatttggttcctttccctctccatcggactaattttatctcaaaaccctgtcctaaaaattttttacactctccctgcccaatattta

SEQ ID NO: 582684 - DNA, 351 bp, Homo sapiens
gctaatattgactaatgccacaatggacttgcatcgagcagcgatgataatgacatgagccgatgggcagctcatgacacagtcgagtagaagcacgcctgtcagatgcctgcaaacatagctgagaccgggtctaacaatgcagtccgaacagatggccaactgttacaactagtgatctgtcctcgaaagtgttaaacatatcagcgatgccacgtgagagcaactacgcacaatgcttagagactttaatgctactcaatatgcagaggtaggacagcagcgcactccggaggagatctgatcgatgacaatctgttatgaaaccggctgtcagattctgccttgttt

SEQ ID NO: 582685 - DNA, 850 bp, Homo sapiens
gtctgcgtactgtagtggctgctgcttgggcccttgagcggattgtaagctgctggttaagcggctgggaagagcggcgagagggttcggcaatttttcgtcgggatccccgcaaggatgagtgctgccagagagtctcacccgcatggggtgaatgcgttcagcctccccagatgacgatctgggatctagcaattgggaggcagcagacttgggtaatgaacgagagaacacaaaagttcttgagaacttatgggtgcaggaaatgaaagaacatactggccgtcttgtaaactacggagatcacaaatcaaccatctcactttccgaaccggggaagaagcaccagacaacaattacttgaatgaactggagtctcaatatcacgcaacagtatggacagtacattatccaggacagatatcggcgacatttgtggaccttggcttcagtgaggtacgaaagaccatgatgggagcaggtggatgtggctggcgatgatgactgatgacggatgatcgatttcaccttgatcctgaaaaggtccagatgacttcttgacaacgcgattcaagagtccagagacaaggacagaatctgcttgacacgaacctcccaaagctggttgaagcaccccttgatggaatgttgggtgggatcccccaaaatacaacatagaatgccagcacacgcattcttcacactgctgtttgtcaactcccagtggtttcataactccccaaagcttagtctttgcattacaacgtagccttgtggtacactgccatcgtggaggcactggtcctgacagcgaccttgtattaactgtcaaaggcttcactataaaagg

SEQ ID NO: 582686 - DNA, 81 bp, Homo sapiens
  misc_feature (49)..(49): n is a, c, g, or t
cccagccccaaccagacctctctgtacttctgtgccagcagtttattcntagcgggagggtacaatgagcagttcttcggg

SEQ ID NO: 582687 - DNA, 445 bp, Homo sapiens
cgccgtgcggtcctttcctctgcagtgagccgatttgctctgccagcagctgtcggtgccgcgctcgacaccgagtcctagctaggcgctcacagaatacgcgctccctccctccaccttactctgttcgcccgcctctcggtcacccggaccatccacggagacttgagggatccctctctagggaggcctctgcgcagcatagcggctcattcggggacttgatatggagtctccaccggaagaggggtccccagcatcgacagacttcgagttctcctgatgttgttccatacaatggctcaaatcatggcagaacaagaagtggccaaatctctcaggcctttccactaaccctgaaaaagatatatatgtggtgcgggaaaatgggacgacgtgtctcatggcagagtttgcagccacaatttatttgtaccttatgatg

SEQ ID NO: 582688 - DNA, 274 bp, Homo sapiens
ctcccgatgagaacttcactgagcactacggtctggctgggtgagcatgccagggaggcaagacaccaacggctccagttcttcatcacgacagtcaagacagcctggctagatagcaagcatagtgtgtttggcacagttctagagggcatggagggggtgcggaaggtggagagcaccaagacagacagccgggataaaggcctgaaggatgtgatcatcgcagactgtcggcagatcgaggtggagaagccctttgccatccccccccccc

SEQ ID NO: 582689 - DNA, 191 bp, Homo sapiens
taagaccttcacagagttgctatggtatagaatcttttataatttttaaatataggccacgcgtggtggctcacgcctgtaatcccagcatctgaggaggccaatgtgggtggatcacctgaggtcagcagttcaagaccagcctggccaacatggcaaaaccccgtctctactgaaaatacaaaaattgg

SEQ ID NO: 582690 - DNA, 680 bp, Homo sapiens
gtctcagctacttgggaggctgaggtggaaggatcgcccgagcccaggaggtcgaggccacagtacaccatgatgcaccactacactcaagcctgggcaacagaatgaggcttgtctccaaaaaaaaatttagaccaggcgtggtggctcacgcctgcaatcccaacactttaggaggccgagatgggcagatcactcgatgccacaagttcaagaccagcctcagcaacatggtgaaacctagtctctaaaaaaaaaaagccaagtagaggctcgctcctgtagtctcagctactgtgggaggctgaggcggtggaagggtgggcttccgctccagaggcagagattgcagtgagccaagatcatgccactggactccagcctgggcaacagagtaagaccctgtttcaaaaaaaaaaaaaatttaaaattttttaaacctttacggggtgaacctaagggggacggaaagggtcaagaactggattcaaggccaggtgcaggggtctcacactggtaagcgctggtaatcccaagggctatagagaggtgcgaggacacatggttccccacggtccaggaattccaaaacaagcctggaccaaatggggaaacccgttctcattaaaacaccaaaattccaggatggtgattgggccaataatccagcactcggaact

SEQ ID NO: 582691 - DNA, 174 bp, Homo sapiens
cagtcaccctgggcactccagctcctcctactctctctccatcttgaattagacacgcatggtcttagaagtggctgcaagcgggccctcacaggcgccaccaatgcacttccattctggctctccctggacagcttgggatgagttttctaaacgcagaagtgagcggaggat

SEQ ID NO: 582692 - DNA, 183 bp, Homo sapiens
atgtccagtgaaatggctggtgaaaggatgttgaatatagttcagaattcattgacacgcaataatttccagaataatctcccccttctctgactctccaatcttccatgtcttctgctttccttctgttcacctaattcatctatcatttgaccacattgggagtatactatttgacacatc

SEQ ID NO: 582693 - DNA, 675 bp, Homo sapiens
  misc_feature (39)..(39): n is a, c, g, or t
  misc_feature (133)..(133): n is a, c, g, or t
  misc_feature (256)..(256): n is a, c, g, or t
tacatgtaagtacaagaactgaccacattctggttaatntacatttgaaagcaaaaagacatttcataacagagttacatttaacttactgagaaagaatcatttttataaaactaataatatacttattatnagccagataataataatatacttattatagccagataataattagtagcagaatgagcttctttgacacttcataggatcataagtttaaaggattagctgagaatgaccatgctagtgtttntgttttaaaagtaagaataatcccatataaggttagtgatcatttaaggtgttgatgaatcagtaaaattaaccccaaattttactcttcaggcaatggagatgggcgatcctgtatccataccaaggtcttgattgtgagctttctcttgcccttccaggtataacagactatacccagtccagagcctgggcatgcccagggggcaggtgggctcctggtccgtctgactgtggagaaccaggaggaagccaccgaggtatccagggtagccgtcttctcctgtgtcacctttacgtccgggaggcccaggagacccagggacgccatccacacccctcctgccatccagcccaggctctcctttgcaccctggtcctggggggcctctcattccagggagccccatggctccttct

SEQ ID NO: 582694 - DNA, 1544 bp, Homo sapiens
  misc_feature (284)..(284): n is a, c, g, or t
  misc_feature (700)..(700): n is a, c, g, or t
gcccctactaaatcgtttctctctttacctcttttttcgccgccctttattttagcggcagagatttgttggttgcgatgccacaaagaccatggctgtgtttcctccttcggaggatttttggtgttggggagccccgctggggaaagtgttggggaacccctgggtccaaggaaattgtccgcacggtacacaaacaccatgggggttggccccatataacaactcccccgctcattccgcagctgttgcccacgttctgtggcgccagacagagaaatggncccgcccgtggtgctaattatttctgtgccgtggtaggagatagcccgttggcgccactgggtgtgccagcgtttttttctgttgtatagccccccagaggaatttccccggcccaacatgtgcctttttggcgtcttttgtaagagcccacaggcccacaaccccacgagaattgggctggaaaaaatgtgtgggagccccccgtgtcgcccacacttggggtgataaaaaaccacatgggcctgtttgtcatggccaccttggtgtgttaacccgcttgtcgttgaaccgctgggggtgtgcccccccaacatagagatgtgctccacaaaatgcctggcacccacaattggcgcaacccccacgttcgtcacaattctcacatcagccggcacacgccacatccccacagttnttttttgtgaattttgtgtggcaccccccacacactgggcgatgtacaacacagagtttgtcgcgacatctacaagcttatcctcacacgtcgctttctctcaccctctggtgtggtggtgtccccttggtgtgtgtgagatgagccccttgggcacacacagggggacatcacagagaggaagatcctctgtgtggtgtcacactgtctctgagacgcgacactacactctcacacacaggcgcacactttgtctctgagggggggctctctggggccttctctcccctggggggacacccacacaacagagttttgtcgacacttgggatagttttatagtcccacagaccggtgtcccctatttgtgtgtctcacaatagggtatacacctgggttgtttagagcgggattgtggagaggaagagacggcagatttttctctcagagagagcgctccgcgtgtgatagagatatatagggctcgccccccctctgtgagagatagaggattatatatagtgagaggaagagttttgtgtggtctgtgtgaatatttctcgtcttgtgatagaggagagagagggtgtgagaggaagaaagaggagagagaggaatatactctaatatgataccccatatccctttggccgccctgccagccatagtccatagctccccagaatattccagcgttccagcgttaacatgcaccagacacgttaaagacctttctcggtgtagaatatgtgtttccacattggtggataccatagtgctttgtcccatagggtacctgtaatatttttccatcatatttccaagtataagtcattaacatcca

SEQ ID NO: 582695 - DNA, 877 bp, Homo sapiens
  misc_feature (3)..(3): n is a, c, g, or t
agncccagaaagaagacgagggccaaactggcagaaggacagaaaaagaacacgggggctgaccccgcccaacgccgccattgtgcccccatgagccacggctgggccgaccacgaaactgtggggagggaaacgagtaccctaaagggccctcaaaagcacttcgcggggcactccaggcgcgacccagggtgacgggtaaaggaaactctacaagggcccgccgagaaacaacttgggcaaggaaataacggggctttccacgccatacagtcgattgcgcgcacttgcaagagcccaagggcgcaaaggtaccagagccggcgactgaggcgcacaaagcggcccaccgcataagggggcacaaaagcctatcagtacggggccataaacccagccaccacgccgccccggggtagaaaagatccaacagagggcccataggggcggtagaaagaccccccccccgcccgatggccggcggcagtctcttgcccacgctgtctcggcgcgcccagaggggggtgcccaaacagtctgtcccgccccaaaggcgtggattctggggttgagtgacacgtccgacccggggcttctgtacaatttgtcacgaagggttagattacgcccaccgacacctgttctgtacagtctcccggctatttaaaggcagggagtataacgaccaaggtctgttcttcaggaacaccacttagggagacgaacatttacaagagactattcacaggtgggggggagttcgtccgtgttaacgtccagcacgtggggcggaatgtgcctctatcccttgttctccgccacaaatcaatttcccaggaactcgaaaatttaaaactttaagaccgaccacaaaaca

SEQ ID NO: 582696 - DNA, 149 bp, Homo sapiens
gctcggcaccccgcccggtgttgcgcccatccaacatactatcttttttaaaagatctattattattacttttttgactcagggtctcactctgtgtccagcgtggagtgcagtggcatgatcctagctcactgcagtctagacttcct

SEQ ID NO: 582697 - DNA, 270 bp, Homo sapiens
gacgtaccgtgagctgggaatgtaagaaacagaagcttctgggtcatcacaaactggtgccttcttgatcttcaccaccatgtgttccccatcagtctcgaaagtgacctcagtgcctgcaggacagagtcacggtgccagatgctgcaagcctggcctggtagacagggatggagctgagagctgtgaactcctgatgcccactagagggcgtgcctgattcccgggcctgcctaattccatagcgcagttatcctctggttccattcc

SEQ ID NO: 582698 - DNA, 333 bp, Homo sapiens
tgaggggaaacgtgcaagaggaacagtggtgagaagggggattgtcccccactttccacaaactataaacagcgacatgtaacacagagaatcacaaataagagggtctttcctcatgtcttctctcaacccattctttcataatgagttccagttggtccctaaaggtgccaggtgatctggaagttctgtgctgggagtggggttgagtgagttggcctcaaagttgtgccagatgcttcccgagccagaaacaaagccagctgtgcgggcgtccatctgcaactcatgtactcccccacgctccagtgggaaaggtagggcccgtgttct

SEQ ID NO: 582699 - DNA, 140 bp, Homo sapiens
tattcgtgttgcacctccccgtgtatcatggtatattattttcttcaacatagttcaatttcagttttcaacacagcactccatgtacttcaacacacagcaattccatggtctccaacaaatgctataacagataacat

SEQ ID NO: 582700 - DNA, 122 bp, Homo sapiens
ctctagcatagaaatcgttagggatattagaaattgctgtgagatgaagaagagtgagtgtactatatttcagcactttcaggtatgcagtttacagcattgatcccggtaaccccattatg

SEQ ID NO: 582701 - DNA, 240 bp, Homo sapiens
tatccgaagacatcagcgcgatcaggagcattatccttgcgttgaatctaggctaccgatcttcagccgggagaacacgccttacatctcgggcgtatcggtagatgttgatgtcgatacgcgggtgaacatcgaagtacacccgggtataggagaaacgcttcagccaaattcgggtcctccaattactgaggcttacttaccagttgttctgtaccagagtactgagatgtgtgacgg

SEQ ID NO: 582702 - DNA, 221 bp, Homo sapiens
tatggtcgacaatgctgatttgtcacctaattgtacatttacagatcacgccataatcagccggatcggtttgcttgggatgaactggtgcctggttaatccacgctgattaaatcgctggtcggtgacctataactgattcaggttctgcggaaagattcagaattactgaatattggttattttgccctgcatctaatgtgatgcactgcatggtcctg

SEQ ID NO: 582703 - DNA, 451 bp, Homo sapiens
  misc_feature (86)..(86): n is a, c, g, or t
ataagacagaatagtgtgtaaagtgttttagaagtactcctattcaaaataattttttttttttgagatggagtttcactcttgtngcccaggctggagtgcaatggcacgatctcggctcaccgcgacctctgcctcccagattcaggcgattctcctgtctcagcctcctgagtagctgggattacaggcatgttccaccatgcctggctaattttgtattcaaaataacgtttttaagtcagtttcctacactggcctgggcaaaatacctttgaccaaattctcctgagtctccaagccttggggtttgagggttccactcatcaggctttcacttcagacttactaggaatccacttactcctttcctctttcttctacctcagattctgagatcctctttactttttctgtcctccctgggattatcagggcactgggcactttt

SEQ ID NO: 582704 - DNA, 391 bp, Homo sapiens
tcatagctgctcctgagggaaaacgcggccagtgatcagtataagtgtactggttaatacctgaaataaaaaccaggcacagtgactcacacctatgatcccagcgctttgcgaggccgaaacaggcggatcacgaggtcaggagtttgagaccatcctggccaacatggtgaaaccctgtctctactaaaaatacaaaaatgagctgggcatggtggggcgtgcctgtagtcccatgtacttgggaggctgaggcaggaaaattcttgaacccaggagacggaagttgcagtgagctgagatcacaccactgcactccagcctggtgacagagcaagactccggctcttaaaaaaaaaaaggaaaataaaaagggggggggggggattaa

SEQ ID NO: 582705 - DNA, 346 bp, Homo sapiens
acatatgtacttacgtgtgtctgtgagtgtgtgtgtgtctgagggttattctgaacagcttgtaaatgttgtagttgtttaaaatggaaaataaaagctgagttcttttggcgaatatattgcgtcaaaaatacactgttggcagtggataaaacactgaggaaataaattttttttcattttgaaaaaaaaaaaagaagaactcgagggggggcccgttacccaatctcccctatagtgagttgtgttacaatctactggccggccttttacaatgtcgtggctgggaaaacattgtcgttacccaacttaagcaccttgctttacataccccttttgtcaagtg

SEQ ID NO: 582706 - DNA, 516 bp, Homo sapiens
tgtgttccctttgagtccagtgtgggacacggtttaactgtcccagcgacatttctccaagtggaaatcctatttttgtagatctccatgctttgctttcaaggcttggagaggtatgtgccccttctgggtgctcaccgcctgctacacaggcaggaatgcggttgggaggcaggtcgggctgccagcccagctggccggaaggagactgtggtttttgtgtgtgtggacagcccgggagctttgagacaggtgcctggggctggctgcagacggtgtggttgggggtgggaggtgagctagacccaacccttagcttttagcctggctgtcacctttttaatttccagaactgcacaatgaccagcaggaggggagaagagagtaggaaaaaggagggaaggacagacatcaagtgccagatgttgtctgaactaatcgagcacttctcaccaaacttcatgtataaataaaatacatatttttaaaacaaaccaataaatggcttacatgaaa

SEQ ID NO: 582707 - DNA, 282 bp, Homo sapiens
ctggctcgttctgcattcctccccgcagtcctggggaaggggatccgtgcagcccaccctgtgtgaaagaggtggacacgtggcggcaggaggctctgtgccgcacattggctggagccgttcattgtaggaggtggagggaaagaggccaaggagctggtgagatgtgatccctcgctggtgatcaggatctccttgtgttcttgtccaccagtggtgttgaagcccgagcaggtaagcctgcgggcctggactggaagctcagtccaaggtgagcagtgc

SEQ ID NO: 582708 - DNA, 539 bp, Homo sapiens
  misc_feature (517)..(517): n is a, c, g, or t
tgactcgagtaatgcaggaactgtgagcttctgcgtctgtcaggtacaaggccagtgctcatggtgtgccagtgccagtgcctgcccagtggcttccaacatctgcagccggtccatggacagctgggccacaagggtgacatcgtgaggccgggggggtggcggttcatggggcaggaaagtgacatgcacacggtgcacagtgagctgctgctcgcggaactcaaagcaggggtcttcctcgtccagttgtgccagggcctgctgcaactgctcagcaccaggtgggggctggctggggtacacaaagagctctctccgcagcaggtccccatcgtactcctggagagtcaggtagaaattgcggaagaattccacatgcttgttcttcacccgaagcttctttggtgagttccagtggaccaccttgaggtcagacgcctcagagtagcagcgctcggccagtgtgtgatctgacaggtgcacattccagacacaaggcagacgctgcactagnccccgggtgctccttgatcaca

SEQ ID NO: 582709 - DNA, 88 bp, Homo sapiens
tctacctctgtgctgaccctttgtcctccgatccctccaggcggggatacggggccaacgatatttacaccgataaactcatctttgg

SEQ ID NO: 582710 - DNA, 294 bp, Homo sapiens
tggctgggctcagtggctcacccctgtaatcccagcactttgggaggccaaggcgggtcgattacttgaggtcaggagttcacgaccagcctggccaacattgtgaaaccccatctctgccaaaaatacaaaagttagccgggcgtagtggcacatgcctgtaatcacagctacccggggaggctgagacaggagaattgctagaactcagaaggcagaagctgcagtgagcagagaaaaaacaaaagcactccagcctgagataaacaagcaagaatccataacaaaaaaaaa

SEQ ID NO: 582711 - DNA, 504 bp, Homo sapiens
  misc_feature (14)..(14): n is a, c, g, or t
aactccactcactntatttatgctgagagggaacaagctcctggccgggcctaatgggttccaggtgtgctctgtgccctgcagcggctgaaccggcagcagtggtggtggctgtgactgtgcctggctggctgagaagacccagctaggccagtcctctctagcccagccctccagcctatgaaaactgtagagctggagcaggccctacccagtatggtgggacagatgttagccttgtgctcagagggccttgggttcaaaatcaggaggcgttgtccgcacgcccagcagcacacacggggggctcccagactctcctgcctttatcgcaacaggttctggggctgcccagacatttttcacagatctgtaaaactccctttcacaagaggtcggctgtggaagtgacctcccagagaggctcgggaaccaggtgggagcccagagggcatgaatgaggtttcttttattaccattatatattaattatcctgttattta

SEQ ID NO: 582712 - DNA, 237 bp, Homo sapiens
gctgagactccccctctgatgctctgtctcctatgtttttgagatggagtttcactcttgttgcccgaggctggagtgcaagtggcatgatctcagcttactgcaacctccgcctcccaggattcaagcaatttctcctgcctcatgcctttcaagttagctgggactacatggcatgcgccgaccacgcccgcgccaaattttttactttttacgtagacgatgggtgtttttttc

SEQ ID NO: 582713 - DNA, 880 bp, Homo sapiens
ggtttatttgggggaaatacacactgaaatattaaagagtaaaggaatatcatgtctgtagctaaacacttattcagaacaaatgcatctgtatatgaagagtgaaagaaggataaaacggatgtaaatgtttacatctgaagaatttgggtggaaggtattcagaagttctttgtactttgctgtcttttctgtaaatctaaaattatgtcaaagtacaaaaatgaaaaaaaaaaacaaggttttaaccccaaagccagggtcagtgctcaagggaaatcagtagtcatggtcacggtcaagacagggatacccagcctcacaattccttatttacccattatatgggattatgcaagccaaccctttgggacaatacaacacgtactcatgatcactggttttcacacaatgatgttatcccaaaataattatagctggtttagaaaactcaggagaatccagttggcaaaactattataagcaataaacataattccatgaatatatggagatacagcactttctagagaacatttagtatcctacagccagttagacgatgtaaagaacctccttttgcaggacaaactgtgagggggacaactccttccagatttaacattctcaatggggatggtgtaaaccggggatcaaatttcccagtggcttcaagagtttaaggggcaaaaacaaacaagcaataccaacaagaacaaaaaacaagacgacaaaaaacacacggtgtgacagccacggggcccacaaaaagactcttgacaaaccgacgagaagagacgcggccacaagagaacgacacaggcgaaagagggaacacaggagacagggacaacaaggcgggagaatcaccaaacaaaag

SEQ ID NO: 582714 - DNA, 197 bp, Homo sapiens
ggaagttgaggctgcaatgagctgtgatcacaccagtgcactcgagcctggggcaacagaacacgaccctatctcaaaaaaaaaaaaaagggggccaggtttaccagcatttgggaaggccaaggcaggcagatcggctgggttgagcaggccaaaacctgctgggccaacatgggggaacccccatttctattaaa

SEQ ID NO: 582715 - DNA, 301 bp, Homo sapiens
ttggagtcgcgacacggtagagccgagagacacggtagatgccgcgagacaaggtagagccgagagacaaggtagagccgagagacactggtagagccgagagacacggtcgagccgcgagacaaggtagcgccgagagacaaggtagagccgagagacacaggtagagccgcgagacaaggtagagccgagagacaaggtagaggcgagagacaaggtagaggcgagagacaaggtagagccgagagacaaggtagagccgagagacaaggtagaaccgagagacaaggtcgcgccgagg

SEQ ID NO: 582716 - DNA, 188 bp, Homo sapiens
ggagtccctgaaggccatgattgcctgggaatggacgatagagaaggggggggtgtgtgaggaggataagacggacaagaaaaaaacgcggaagatatcacatagtgcccagacctatgatcctcgagaaggttacaaccttcagccccccgaccttagagctgttaccctgttccggtagctgcagg

SEQ ID NO: 582717 - DNA, 105 bp, Homo sapiens
cccccccccccccccttttttaaacaagtgttacttgggccgggaaaattttgctgtctttggaattttaaaacttttaaataaattgggaaaggggggaactga

SEQ ID NO: 582718 - DNA, 934 bp, Homo sapiens
gggtacacgggactcagacatgttccgtgctgaagccagaggacggcacagacgacaatgtgggttttggactcggcatgaactctcttcgggggtcgagcccaggcccactggtctggctttttccagtggccatggcccctgaaatctaccgagaacaactgttcgttcgggggtgctctgtggacgcaggaatcaggaggagagcctgtctgggcgtagttacttcgagacgcatctgtacgttcgtacgcacgcctaccagtgcacaccagttgatttgagcggcacagcctgcagaggtaccccacatggtctgaagacatcaaggaatcgccaggctgttcgccagagaaaggatgagcccggaacggtcggtagctagcgccgggcggtcgctgggggaagcgtggacacccgtgcgagcccgtgtgccatcgtggtcccaagcgaggctggtgggccctgagggttgtccaccggtcgcgtcacctcattcactcttgtcgctcgcctgccggctcaggctccgcgcggagcggcaccacggtccttggcgtgacggaagctcggcctttgagcgagcgccggtgagcccgcgagcacgcgtggttgcccgccttgtccagcggctcgctaatacgtccagtagcgtggcatgtcgatcccgcagtcggctcgtcgttactagacgtctatttgagagtgtgcattgtttccgtttgggctgaggtgatcccggccatgggtcccccgcgtccaagacgaacctgggcgatcctgtgcctggcgataccttggcaccaaggaattgagacgcgcgctgaaagaccggccatagagttgggaattagtttggacccccggaaaaactttaagggaacgtcgttcctttgagaggaccgtatggcgaaccatccggaaagaagtgaca

SEQ ID NO: 582719 - DNA, 1972 bp, Homo sapiens
ggagagatggagatgtgcacgacggattcatttatgagctgcggaacaggacgccctctgactgctgacaagaacttgtcctggacaacagctcggctcgaactgaaggcaacactcgaaggccatcacagatgaactctcgaacgcaacctggcaacttctctaacgctacaactcaaccgctacgcgccctcaccgtcaactccgcacaaccttacgcaaagctctacacaccacacactctaacgccaagcctctgacactaacgccgcactacaccacgcagctcctccaccggcaggccctgcgcaaacgctacttcgcgcccgcacaacagcctgctcacggacacccatacaccgccactcatacaacacttccacacgctcgcgccacccgacacacactctcacacgcacccatccagccgcacacacttagcagacccaccctggcacacagaccaggcggtctaacgcacacaaagccccgtccatacagccacgcgcgttctcagcaacagcgctctctctgcaaaacctctcgggcggaaagcgcttcaactccctacacccccttgtacagcccggaacgactaaccgccgcaagcgaacacgcacacgtggcttggatcctccaaacagacgctgcccctacccgccggcccaacacgcttccaaccaacttacgtcgttccgcacgacccacgcctaacttcgaaccccccgcacgcgaaacagaccccacaccgggcacagccgcccccaccttggaaccctcccggcgaaatacgcatcaggacacgcgagccttacctccgctgcacaaacgcgcgacactgcggcgaaactccgaacttcgcacagccgacaggcgacccccgacctgcgacacccacgacaatcgaatacacgctactaagcacacacccccacgctcccacaccacaacccaccacccccaacgcgccctacacagcccccacacgcacaccgccaaacgcaacacccacccaccagcgcacccacaccaccgcacccacataccccaccaacacgccaacaacacaggccacggcacccacctgaccacgaccggaacaccaaccgccacacgacccccaacacaccaacacacacacaacaaaccagaccacaccgcacccagacccacaccgaacccaccgacccgcacccccaccacccacgcgcacacacccctgcgccagccagaacagccacgcagccccgagccacaccagcacagcacacacacgtaccagacaccacagacccacgcccactcacacacccacgcaccgccagggacgacgcacgtcacacccgcacacagcacacaccacacaacccaagcaaagaaagaagccaaccagcacgccacacgcaatccgcacgcgcacacacccacgcccacatcctagcaccgaccaggcagaccaacctgacaacccgagcacgccgacgaccacaccgaacacgaccgacacaacacatccaagcacgacagcagaggaacgccacgagagcgcagggggaacgaaaaaccaacaagctaacacgcacccagacgcaagcgaccaagcagaccaacaacagcgccaagcaccacacacaagcaccgagaccaccagcaaacagacagacggcgagcacgactccgatccaccgagaatgcccactaagacaccagtcagagcaatcagtagaccacaacgcgcacacaactacaccacccacgatcacgcagcaccgctacctcgtgccacgaccgcacgaccgaaacagatcgaccgagcagacgccaacaccaggatacagccgacgccgagaagccgcacagcgccagcgaccgcagtcgcagggcacgaccgcgcggaacagactcagcacaacacacgaacacaccgccaagccacaccgcacccacccccgccgcacgcacagcgccgcgc

SEQ ID NO: 582720 - DNA, 147 bp, Homo sapiens
cggttgtcagcccccttcctttcccccgacctaaaacataaaagacaaggcaaagcccgcataattttaagatggttttttaggacattagtccaccatttttttggtttgctggctttccgaaataaagtccctttccttgctcca

SEQ ID NO: 582721 - DNA, 883 bp, Homo sapiens
  misc_feature (12)..(12): n is a, c, g, or t
  misc_feature (65)..(65): n is a, c, g, or t
  misc_feature (67)..(67): n is a, c, g, or t
  misc_feature (85)..(85): n is a, c, g, or t
  misc_feature (88)..(88): n is a, c, g, or t
  misc_feature (93)..(93): n is a, c, g, or t
  misc_feature (103)..(103): n is a, c, g, or t
  misc_feature (107)..(107): n is a, c, g, or t
  misc_feature (111)..(111): n is a, c, g, or t
  misc_feature (122)..(122): n is a, c, g, or t
  misc_feature (130)..(130): n is a, c, g, or t
  misc_feature (137)..(137): n is a, c, g, or t
  misc_feature (147)..(147): n is a, c, g, or t
  misc_feature (153)..(153): n is a, c, g, or t
  misc_feature (162)..(162): n is a, c, g, or t
  misc_feature (184)..(184): n is a, c, g, or t
  misc_feature (298)..(298): n is a, c, g, or t
  misc_feature (326)..(326): n is a, c, g, or t
  misc_feature (331)..(331): n is a, c, g, or t
  misc_feature (337)..(342): n is a, c, g, or t
  misc_feature (345)..(345): n is a, c, g, or t
  misc_feature (350)..(353): n is a, c, g, or t
  misc_feature (395)..(397): n is a, c, g, or t
  misc_feature (406)..(408): n is a, c, g, or t
  misc_feature (415)..(416): n is a, c, g, or t
  misc_feature (430)..(430): n is a, c, g, or t
  misc_feature (443)..(443): n is a, c, g, or t
  misc_feature (452)..(453): n is a, c, g, or t
  misc_feature (457)..(457): n is a, c, g, or t
  misc_feature (460)..(463): n is a, c, g, or t
  misc_feature (465)..(465): n is a, c, g, or t
  misc_feature (493)..(493): n is a, c, g, or t
  misc_feature (500)..(501): n is a, c, g, or t
  misc_feature (505)..(505): n is a, c, g, or t
  misc_feature (510)..(510): n is a, c, g, or t
  misc_feature (516)..(517): n is a, c, g, or t
  misc_feature (521)..(521): n is a, c, g, or t
  misc_feature (523)..(523): n is a, c, g, or t
  misc_feature (527)..(527): n is a, c, g, or t
  misc_feature (532)..(532): n is a, c, g, or t
  misc_feature (553)..(553): n is a, c, g, or t
  misc_feature (590)..(590): n is a, c, g, or t
  misc_feature (681)..(681): n is a, c, g, or t
  misc_feature (707)..(707): n is a, c, g, or t
  misc_feature (718)..(720): n is a, c, g, or t
  misc_feature (729)..(729): n is a, c, g, or t
  misc_feature (738)..(739): n is a, c, g, or t
  misc_feature (741)..(742): n is a, c, g, or t
  misc_feature (754)..(754): n is a, c, g, or t
  misc_feature (758)..(759): n is a, c, g, or t
  misc_feature (778)..(778): n is a, c, g, or t
  misc_feature (781)..(781): n is a, c, g, or t
  misc_feature (786)..(786): n is a, c, g, or t
  misc_feature (793)..(793): n is a, c, g, or t
  misc_feature (797)..(797): n is a, c, g, or t
  misc_feature (799)..(799): n is a, c, g, or t
  misc_feature (805)..(806): n is a, c, g, or t
  misc_feature (808)..(808): n is a, c, g, or t
  misc_feature (812)..(813): n is a, c, g, or t
  misc_feature (818)..(818): n is a, c, g, or t
  misc_feature (846)..(846): n is a, c, g, or t
aacactacaganaatttctagacttgagtgacaaaagaataccacattatttgcacttgtaattngnttcctttttacgcatgtnggnaaganaaaaaaaaantagnatanggctgaaaganaaaataantaaatantatggaaatntttatnttgtaaggngagggttatgttaaaagaatangattaacatatttagtaaacctattttttgtttaacactagttaatcaaagttattttttttccttttgatgacctattttttcatatacagactggaaataacaaaattttanatgtctttttttttttttttttcgggcnggggngggggnnnnnnaanggggnnnngggggccatccattcagattttaagcattttgatttatttannngggggttgnnngtggggnnggattactttgaanagtatacgggggnggggggggnngggnatnnnngnacagcggggagtacaatcagtatctgcnatatggnngggntgggnggaggnncttngngggnctcgnggaaggtgccttgtgtcttgngtgagtccactcttcttgcgctttgggctggggtgcnatagctgttatcataggaatcataactctgttcatcataagcagtgccatatccatcatcatagtcatattctccataagtctcttgtgtngggggtggcggtggaggtctgtaccnaattggggggnnncctcttganctaaaaaanngnngtcctattcccncatnnaggaccagggtgggcctgnttntttgnttttttntttncnaatggnncnccannccccngaacgggcggtcccccccccaccccggnaatgcggggcggaacccccctgtcgcaagggggtttc

SEQ ID NO: 582722 - DNA, 635 bp, Homo sapiens
  misc_feature (207)..(207): n is a, c, g, or t
aaaccagattgtacatgcttctttgcacgacactattatagacctcacctatggatactgcactacacgaccgaatagatgggaacactcaaaggtcaggaaagtcccgccccttggaagcctgacaggagtaacattaactttactcataagcttctagcatcgacctgaaagtagcgtgcatcgacatttcactcgtagctactntacgcagactagaattattcatgatccacacataccaagccgctagagagctctccaaaaccttacttgaaaccacttcccctgaaaaccttaccacatttcacaacgtggcctgcaagccttggttcactcgaattgttagaaactatttcgaaaatgcgttcgcagtgagagcacatattcaaccattgaatgtgactgtaatgtagccacttgaacagcgaagtagagcgtggtctttagtacggtacataggatagcacatcttgtaacgagatctcgcacctgtatttgagctcgccttaaaggccgcatgtgcggcaagccctccgactcggcgtggggtcagactaagtaccttgtgcacgcattgactcttgaagaatctaaggcaggatactggatataatactgcgctcatactcatg

SEQ ID NO: 582723 - DNA, 421 bp, Homo sapiens
atgaggctgacaggaagcggggagggaggcaaggagtggggtgcagtgtgccaaaaggggaaaaagccagaaaaggcattattttgaagaattcaagcagaatagtgggacctgaaatggattatgaaataacggaaacaaaaacagaaatgacaaagaggtcaaaccctttctgatatgacagaggatgggcttatccagaaatgttcccaacagttctgtagttagcttctccaagaactgtggggaccaacaggaaaatgctcactgctcttacctggaagctaaagtggcttccaagcacatgtgtgcccagcatagtgattttttttttccctataaaatccctggagacccacacgttcagaactcttgcttcttgggaataatgtgtgtgggtaccaaagctatgcaaaaggaa

SEQ ID NO: 582724 - DNA, 646 bp, Homo sapiens
  misc_feature (105)..(105): n is a, c, g, or t
  misc_feature (636)..(636): n is a, c, g, or t
gatcgaccgtcttcagactgttaaggattgtggtagagaactgtgacagccactctcagatcaccctgaaccaaaggcccctatcaagtaacaatatagccaagnaaaattccagtcaatagagacattgactggctggctggcttcccaagggatagcaccagacaagaaatgcaaggatgaggaaaccaggcacgggagagagaggggcaacagaggtccagggtttggttatctttttatttttcactgggaggtggtaagttagccctgttgcccatgtatgcagatgggagaagtgatttagaaactccaaagcaattggtaatccccaaaatgggtgtatctggtttgaaatgaaaccttattttattggaaatggttggtttcccaattctgtttgccattggccaatataattgtgggtttgcacatggccagcacatgccaaacagaagtagacaaaggtctcactctgtaagtgggaccttggggaggagctgcctccatcataaagggaggggttagtaaaaatggtctcttaagcctgttcctgctacagttatagaggttgctcagaaccttctcagcaaatatagcagttatctattgttgtgtattaaaccatttcaacantaaaaaaaaa

SEQ ID NO: 582725 - DNA, 215 bp, Homo sapiens
tgtggaggctacagaaggtttgggggatgatgctcttggccagggacaggaagaaggaggtgctgggatgtagaagaagattggagctcctcctgagctggatatatcccctggggcagctgggtggggcttgaagatggtttctttgggcccccaaccaagggaacaagtccaactcagatctggtgtaataactctcagcttccagttgatca

SEQ ID NO: 582726 - DNA, 102 bp, Homo sapiens
gcggccgcctactactactactgctcgaattcaagcttctaacgatgtacggggacatgtttcattgcctgaataaaaactgtttaccactgttaagaaaaa

SEQ ID NO: 582727 - DNA, 1172 bp, Homo sapiens
aaaggcagtggtgttaaacaacgtggatgtctgtgggacaggccagggaaggagggcagagacatgggtctccatgttcaccttgcctgcagaactagcctaatctgtccctgcttactggtcttgtgccacttgtgcaatcatggggaagtttgactaccccgcctacactatgtggctatgtgagctatggatactacgtgtgccacgcccaggataggtatgccagagtttcattaaggcctgctggtgtcggtgcttggagtgctatgtagtacaacctcgcgagcagtactgtggcagcaggagggcctggaatgcctaggtatggttcttgtcatatagacctctacttgcccttgtagcacttaacctttgcatttagcaaccttgacctagcactaggccctcacagactagttaggacgggaagtacgcctacttgcatgggcaaatattatacccactgccctgtgaatctcctatgtgccttgtttaacagattccagggccaagaacctcggcagggctgacggaacgcaagctaaggtacgcgatggcgttactgccgcgtatcacggactggcttctgtgacacagggacttgccgtgtaacttctgaaaccaccgaatgccctttaaccacctattggctcaagggcgcgcgtggggtaaatgcataacaaacacaaaaccacgtgcagggcaaaggtctgggcaaacgccataaacgtggactgcactccagaagactcaagcccctataaatcctaaggcctctggggacgacctggctgccatcctcaataaccgggcacactgggcattcccacggacagccctggtgcgggagcggcatatacacgggaccgagaagaggccaaccacaggacgggactcaagaagacaggagacgaagtcacacacacaacaacaggccataaaccaccgcaataacaacaatctggcacacaacccgatgcatcaaacacgacccaaaacaagagaggaaaggggcacacgggccgccaatagtcaaacggggtgaaaaacgcaagagaaaagcagcacaccgctacaccagacaaacagaggggacgaaaaaacggaggacacagccgaagacacagaaacagaacaagaggccacagcgcgccagcagatcaactgcg

SEQ ID NO: 582728 - DNA, 1023 bp, Homo sapiens
  misc_feature (1)..(1): n is a, c, g, or t
  misc_feature (487)..(487): n is a, c, g, or t
ncctgtcgctcgtgttttctcttctatttatgtttcgttctgttgtgatctatgtactctgtgactgtatattgtcctcgcctcgtggtgtccttcccgtcattttttctgtgttgtgttcccttgtctcctgtccataccttccagctttagatagcacaagggctcttccctcctgcccgctcatgccccctggtggcccatggccccaggtattcctgtgacctcccgctctcttcggctgctttctcacgtcgtctccagaccccggtgtcgcttccaggttcttctgcccctactcccttgagaccttccctgctgcgctacccggagtacgccatgcccttggacctgggtccccggatccccaacccctggaggtttacagctgacttcatggtgacccatgcccacctggttttcttgtttctgaccgcgccgcaacctcatgggggaacagtaacctgcccgaacccaggagatttcnggggcatgcgctgctgctcggcagacttccacgtgggtgcccacgtgaacacgttctggaggaccccgtgcccggggccacctgaagggctcagccaaaagtcgttcctttgggagaataagcacatcacgtggtttgccccctggacggcggcatccgggctgctgctgcccaagcaggagaagacctaccggcggctgctgatgccccagaacgcgctgacccccaagctgccacaccacgccggcctcaacccccgcgccttccggatgctgcaccgtggaccgccgcaccctccagaatgccgtgcgcaacgtgctggatggggagctgctccaccgctacctgtacctgagcaccctggagcgcagcgagctaacccagaagatcggcaccacacccagacataatcctggacgacttgctggagacggaccgccgtcaccgcccacttctagccccgtggaagccgtcacccccagcacccggaactacctcccaccccctttttgtaccaaaccaccaggaaaaacctt

SEQ ID NO: 582729 - DNA, 995 bp, Homo sapiens
tcaacatggctgtgtcattctggcttacatatgttttgatttaacagaaattctagtcataggggataaggggcctaatgtaagacagaggcttcatgttatgacaagtacatacactattatgtggtgatcaagtttttagaaagagtgacattaagaagcccatagtgccataatcatttgcagtcaaactggtgtcttatctctgctgataagtctcctgtgagatagactagtgtagaagggtaggtggttctcgagtctaccttggagtgcataagacttacctagacacggctgtgtttctaacacgttcagaatttccatagcttctgtagcccatgggatgggcctcgagagtgtggtattgggcttgtggttcctggaagcacatcacgtttgtgatagaagtagtaggttccagagaccaccggagacgagaactgcttcaatcggaatgggaatgtagcaaggaagaaggtacaattcagtattgtctggaggcagagtgggcatctttgtacctgaggtacagaatagcgatggtctcttgcctagataacaatgcccaggcgataaacggtgtgtcagaagtagtaacgagatgccttatagattcaggaggattgatctaaagcctctttcaagagctaggtttctcggtccccatcgtctgtcacgtgccttgctcgtggagagcgatgcttggtaacagggtaatccgtaatgttctagatgttacgttcagggatttcctaaagagccaatttttcggatagttccccctttgcaccatgccgttcaccacttccgcctgcgggttggactgtggaacgcctaggattcttgtccgccataccggtcggacaacctttcagtgccatcaggttaagggagtattggccaaggagaagaagacgaggatcctaaatttggtgttcattagtcgaacgtaaggaacccctattagagaactttgggccacgagtcagggg

SEQ ID NO: 582730 - DNA, 208 bp, Homo sapiens
  misc_feature (29)..(29): n is a, c, g, or t
gccttgccaacatagtgaaaccccatctntactaaaaatacaaaaaaaaaaaatttagctgggcgttttgggcacctttaatcccagctacttggggggggtgaggcaggacaatcgttttaacctcagggggcagaggtttaagttagccttagaacgtcccacttcacttccagccttgggaaagatttcgagactccctctaaaa

SEQ ID NO: 582731 - DNA, 105 bp, Homo sapiens
cgcacacagtggtctactggctgttttctccctggcattacatgagaatatcatgccctacttttatgaccttggcttctacatttgtatggtaacctgtgaaac

SEQ ID NO: 582732 - DNA, 1160 bp, Homo sapiens
gggacttggaaggcaattctgataaagagttacagagacatttcagccatcattgcaaaagccaaccattccaacagcagtatgtaggcacattcattttcatcaaggcatcagccatttcattccaacaacaccatttttcaaactgtttcactgtgtcatcacaggtcatgtggcacattcagctgctggcagaggtagtagcacattgcacagccattttcaccgtttccacatagcacatattcaaatcatatcattcatttccattgcgtcaagtcattcccaaccaagctttacaaagggtatctcattgtgtcatcatcaatggtcaaccatcacacatcaaccaaaaccagcaatgcgtcatcgttcaaaacaccaacacactggtcctctccattctcacacgcacattcagcgagcttatttaatcaacaatatctatgatagcattaccagatcccagggccacgggcacaaggccaagcaacacaccaggtgtcatccgtccaaaaatgagcaatcaaacaatggcacggccaggagattaccacattcacaatctatcggtgttctctcccacgagcaattggacatattaacgcaccatatgagagcgatttaaacaatagagggacacttcccacatttcaaaacccacacaagcaaagtctttgcacccctgtgctaaggattactttgacaactcgtttgggggcacaccatgggggccaatatactgacacatcacagatggccagggattatgttcctccattcgaaacacaggacaccaagatcacattatcacagaactgttggagtcacaaacaggaatcagagacatcaagaggagacacccagtacgtcagagcatcaattaacaaagggatcggaccacggggacaaacagacacgagccaaaagaacagaccctcacaaatggactagaaaaggaacagatcaagtaaacctatcaacttacaaagagagacacatacgtcaacctcgaccgttgagcaacaaccccccatatccaaccaataccacatgaaccaaattcccccctgcgagacatcacaaaacgagggacccagcgagaacaacacaacacggggaggacaaaacaagggcaggagcacaggccatagcaacga

SEQ ID NO: 582733 - DNA, 104 bp, Homo sapiens
agtcaagagaggaaggaaggaggatgagggtccctgttcgagtgatcaagtgtactgggttgcccagtactggttcagattttgacataggaaaagtctcacat

SEQ ID NO: 582734 - DNA, 1525 bp, Homo sapiens
  misc_feature (410)..(410): n is a, c, g, or t
  misc_feature (412)..(412): n is a, c, g, or t
  misc_feature (423)..(423): n is a, c, g, or t
  misc_feature (425)..(425): n is a, c, g, or t
  misc_feature (525)..(525): n is a, c, g, or t
  misc_feature (1269)..(1269): n is a, c, g, or t
  misc_feature (1439)..(1439): n is a, c, g, or t
gagaaatcctctgctgaagacccctggtctgatctgcctccaacatgtataagttttatttgaaatacataatcttttcactatgctttggtggggtttcttttagagtatgtgtaaaaatgtgatgctcagataagtacattgtatatcagttcagtgttagaaatgcagtctcgttgagattaaaggtcatctttattttaaatgcagtgataaagtgtcaactcttcggagaaactaggagaacaacaacagaaagctgtgttgtgtctttttgtcgtctcaaagtatatctcccgtatgagatttcaggtccccatgttttcaccaagcaatctgctatgtcagccaacccaacatcactttctacaggaggttatgatttttgccatttactagaggaagatgtntnatgaaatcaantnggggtttgaattcaggtgcagtcatcagttctttaggggctgcaatgttttaaaaaaaataagtcatcagattttaagaaaaaagtgatgatttcttatngatatttttgtaacagaatatagctcttaactgaaaatccagaaccagaaacataaatcttgagtttcttttcatgtacataaaaagcaatagccttttagtatagatagccctgagccaaaaagtaatagaattttctctagatatttaatacagagagtgtatagactgactctaagttaataatgtgcaaaatatcttaaacatccctccccttattcaacaattatgtatcagtgatcttgaaccattgttttatatttttcacctttgtaacctcatggaaagaggctttacatactttctatgtactatttacttagaagggagcccccttccagtcatgaaacttcatttgttttatccatatccctgaggactgtgtagactttatgtcagttctgtgtagactttatgtcagtttttgtcattatttgaaaatctattctgacaactttttaattcctttgatcttataagttaaagctgtaacaactgaaattgcatggatcaagtaagcatagttttatccagggagaaaaataaaaggaagccatagaattgctctggtcaaaaccaagcacaccatagccttaactgaatatttaggaaatctgcctaatctgcttatatttggtgtttgttttttgactgttgggctttgggaagatgttatttatgaccaatatctgccagtaacgctgtttatctcacttgctttgaaagccaatgggggaaaaaaanccatgaaaaaaaaaagattgataaagtagatgattttgtttgtatccctacccatctcctggcagccctactgagtgaaattgggatacatttggctgtcagaaattataccgagtctactgggtataacatgtctcacttggaaagctagtacttttaaatgggtgccnaaggtcaactgtaatgagataattatccctgcctgtgtccatgtcagactttgagctgatcctgaataataaagccttttacctta

SEQ ID NO: 582735 - DNA, 698 bp, Homo sapiens
aattctaggcgctattttcaacacaatcgtttgggaattgcctcctttttccatagccaaggtgtgtagaaaaaaaaaccggccgcagcttcaaggaacatgacccttcttgtaatgggttccatgcaaacctactctggcaagcttggtaaagaaccccaaatccccgtaaagttaggctgaggtgaacttctcaaccgaagaaaacccgttgttctaaaggttgagtcaggcaaggcttcggtaagtggagagtgaattttcgtaaggacttgtgtttgctgttcaaacaagtatgcgcctagaagctccatagaccaggattttctttgtgaatagaactgtgtaggtaagatgggcttcagccactgaactgcataaagaaccgggccttatgtacaggcattgagctctctcattgtctgtgtagagtgctatacttgggaatataaagtaggtgaccgtaacagtgttaggaggtaaacttggctcctgtgcttctcccgggctgtgtgccaccaggcacagtacgtaccctaaactcatggtgaggtctgataacataaacaccctttctgaataattccctccgcaaattattaatgtagataagaattcttccactggatctaacgatgacgtttatgtagcatgttttctctggagtattctataagttgtatgtttagccaatcaag

SEQ ID NO: 582736 - DNA, 815 bp, Homo sapiens
  misc_feature (696)..(696): n is a, c, g, or t
  misc_feature (718)..(718): n is a, c, g, or t
  misc_feature (721)..(722): n is a, c, g, or t
  misc_feature (736)..(736): n is a, c, g, or t
  misc_feature (739)..(739): n is a, c, g, or t
  misc_feature (751)..(752): n is a, c, g, or t
  misc_feature (754)..(754): n is a, c, g, or t
  misc_feature (777)..(777): n is a, c, g, or t
ggtgagcctcggggaggacttgggctttgaccttgaaggagatgggagccatgtagggttgcaggcagaggagggactggccctgactcaggtgcttacaggtgccctctggtggctgctgccaggaggagactgcaggggaaggagaaccaggaccaggtggaggctgtttccccgtctctaaaatgggaggaaagctaggatgcatgccagtgctggcacacgcctgcactccatgtgagccgtcaatgcggaggaccctgcttcctgcccgccgttattgcaacaatgacccagtagctccgagtccaagggcacagcctctggcacgatgcctgggctcccatctcagctctgccacttgggcaaacatttactttctggagcctcagtttgcttatctgtaaagtggggagtgaacagtgccctgcacacagatttgttctaaggactccagaagttgctattaagaagagggactgggcttggtagctcacgtctgtcatcccagcacttgggaggccaaggcaggaggactccttgagccgaggagttcgagaccagcctgggcaacacagcatagtgagagcctgtctctatgctgtgttgcaaggcaggaggactccttgagccgaggagttcgagacagctgggcaacacagcatagtgagagcctgtctctaaaaaaaaaaatgnaaattagtggggtggtggcaanctnngtcccaggtaccanaangtggggggaggnnantgagctggaggtggggggggganttttctgcatgttcgtggggagaatggcgttttagaaa

SEQ ID NO: 582737 - DNA, 228 bp, Homo sapiens
gggtttatcgatttcttcgcttgcaagctttttaactggatgtggtcctacttacctattttggctttagtggcctggtgctgtggggggtgttcctcaaaaatcttggcccactctaatatccgggagcgtttccccaaggtttaattttagtaggttaaatagtttgaggtcttagattgaagtgtttcatccggattggattttggtatgtggcatcgataaaca

SEQ ID NO: 582738 - DNA, 1152 bp, Homo sapiens
ggtggaacgaatggatgaagaatttaccgaaacataatgcaaaactactgatcctcactcgccagagtagctacgtggaggcacttgaccggatgaggcccagtgtgtgtgccagtcatcgagcgtgtgcaggcgctacctggaggagacagggcactaccagagggagagtctgagcgacgatctactctgactgctgcaatcactgtcaggaccatagtactagaggttatagatttcacgaacgggcgccgatcgagacgcacagcgtgaaccccgaccgtgtagtggtcgtccgtcaaagattgtcgtgacggcaaaagagcgcaggcgaggaacagactggagggtcgagagacatcgtgcctgtggttgagtgggagggagacctgctgacataagttacagtgctacggcgcaaggaggcgaacacaggagccggaaatctcgggcacaatgctgtgccaatccatcgtggccaacagtcgtagccaaccaatggctctgggaacggtcgctcgctggggttacgctaggtgcccggtcggacccgtcgatcgctccatgatgcgctacattatgctaaggcggagcaaaacttatctcaaggggcaatagcatagaaacgctggcgctaggatagcgatgactctctttataaaaagacacgggcgactcgatgggttgccaggcttgggggcgcatttcattgatgccattcgccgctcgagagggtgccttgtagcacgacaagggatcagcgagcatcaatagcggccctcgtgttcgtgggaaacaagtctctaggttcaggatgcttgcgacaccagaatggctcgacacgggcaagcatttcttggcggttcccaaagggtgagacgtgccatagcattagtcgcccacgtcgcggtggccaagtggcaaagcggccaaaccaccgaagggaaaggccgagcggaaggaacaggcggttgagtgacgccgggacaggccgcgatgcagggggtcccccgccgatatcgcgagcgcatggcaccaattccaaacccctggggcacgcgcgttgccatggaaggggtgggtgatcagtaaccctagtgagatagaattcgtggcccaatgtccatcccgaggggtaaggaattcgcccta

SEQ ID NO: 582739 - DNA, 939 bp, Homo sapiens
atgtccatttccaacatcacagtctacatgccctctgtgttgacactagtagggatcccaggcctagaatctgtgcagtgctggattgggattccattctgtgccatttatctcattgctatgattggaaattccttgcttctgagcatcatcaaatctgagcgcagtctccatgagcccttgtacattttcttaggcatgctaggagccacagacattgcacttgctagcagcattatgccaaagatgcttggaatattctggtttaatgtgcctgaaatctattttgattcctgcttgcttcaaatgtggttcatccacacattgcagggtatagagtcaggcatccttgtggccatggccctggaccgttatgtggccatctgttatccactaagacatgccaacatcttcacccaccagcttgtcattcagataggaactatggtcgtactcagggctgctattcttgtagccccatgcctagtactgataaagtgccggtttcaattttatcacacaacagtcatctcccactcctactgtgagcatatggccattgtgaaactagcagcagcaaatgttcaagtcaacaaaatctatggtttgtttgtggccttcactgtagcaggatttgacctcacattcatcacattgtcctacatccagatatttatcacagtttttcgtttgccccagaaggaggctaggtttaaagcattcaatacctgcattgctcacatctgtgtcttcctccagttctacctccttgccttcttctccttcttcacacataggtttgggtctcacatccccccttatatccatattctcttttctagcatttacttgctggtccctccatttctcaatccacttgtctatggtgcaaagaccacacagattcgcattcatgtggtaaaaatgttctgttcataa

SEQ ID NO: 582740 - DNA, 182 bp, Homo sapiens
tgcacttgactgtaggtgtaagtcagaaattgaatctatagtacaaaaaaagtctcagtagtctttgtgaaaataaacactctcagaggaacggttcacaacaaatattattgcaagtttatgtagaaaaagaacgtatttggatttttcctggtaacgaaataggttataacaaagatgaa

SEQ ID NO: 582741 - DNA, 377 bp, Homo sapiens
gctgtaggaattcggcacgagctcgccacgacatatgagaccactctatagaagtgctgtgccgctgtagatactcatgagtgctatgccaaagtgttcgatgaatttaaacactcttgtggaagagactcagaatttaatcaaacacaattgtgagctttttgagcagcttggagagtgccaatttcagaatgcgctattaggtcgttacaccaagaaagtgccccaagtgtgaacttcaactcttgtagagggctcaagaaacctatgaaaagtgggcagcaaatgtgtgtcattctggagcagaatgcgcctgtgcacaagactatctattcgcgggcctgaaccaggtatgtgtgttgcatgagaggcgctgc

SEQ ID NO: 582742 - DNA, 3065 bp, Homo sapiens
  misc_feature (2025)..(2025): n is a, c, g, or t
  misc_feature (2875)..(2875): n is a, c, g, or t
  misc_feature (2956)..(2956): n is a, c, g, or t
  misc_feature (2958)..(2958): n is a, c, g, or t
  misc_feature (3027)..(3027): n is a, c, g, or t
  misc_feature (3039)..(3039): n is a, c, g, or t
  misc_feature (3047)..(3047): n is a, c, g, or t
  misc_feature (3065)..(3065): n is a, c, g, or t
ggcacgaggccaccactgctgcctgtaagggctgttttggatacagaaaatgtgccctttctaacccaaaaaatgcttgaaatgtgtaaaagtggccagactaacagtcccaaagagggctgccctctaagaggaagcgtcccaaatctgttcagttttagagactacgtgactggggtacgtggtggggccttaccagacatccacgaggagaatccaggccttggtttggctccagctgggcctgcctggtggctgccacttattgacttaagtcccagtgattcagctcctcatctggaacacctcgggtcacccccgacaacggtggtgggagggagagcggcctcctcctccctggtggggcctgtctgggtgaagcccctctgttcccgagatgtgactcccaacccccagccgggtgctccgagccatggccgacaccatcttcggcagcgggaatgatcagtgggtttgccccaatgaccggcagcttgcccttcgagccaagctgcagacgggctggtccgtgcacacctaccagacggagaagcagaggaggaagcagcacctcagcccggcggaggtggaggccatcctgcaggtcatccagagggcagagcggctcgacgtcctggagcagcagagaatcgggcggctggtggagcggctggagaccatgaggcggaatgtgatggggaacggcctgtcccagtgtctgctctgcggggaggtgctgggcttcctgggcagctcgtcggtgttctgcaaagactgcaggaagaaagtctgcaccaaatgtgggatcgaggcctcccctggccagaagcggcccctgtggctgtgtaagatctgcagtgagcaaagagaggtctggaagaggtcgggggcctggttctacaaagggctccccaagtatatcttgcccctgaagacccctggccgagctgatgacccccacttccgacctttgcccacggaaccggcagagcgagagcccagaagctctgagaccagccgcatctacacgtgggcccgaggaagagtcgtaggaagaaagtgctgatccacgctgcagcctggatgagccttgaaaacaccatgcgaagtggaagaagccggagacgaaaggccgcgtgtgtgtgatctcatctatatgagcagtggtttccagtgacagtgacagtgactcggatcttagctcctccagcctagaggacagactcccatccactggggtcagggaccggaaaggcgacaaaccctggaaggagtcaggtggcagcgtggaggcccccaggatggggttcacccacccgccgggccacctctctgggtgccagagcagcctggccagtggtgagacggggacaggctctgctgacccgccagggggaccccgccccgggctgacccgaagggccccggtaaaagacacacctggacgagcccccgctgctgacgcagctccagcaggcccctccagctgcctgggctgaggtgtctggtgcctggaacagacttccctgtggaggattcctgccagaccctgcccggctcctccctgaccggtccttgtgccctcaccagacaccctgttggccatgactcaacaaaccagtgttgggagccgtctgcctccccagctcagtgcctttctgcaccccttctctcctggggagctgtctgcatccgccaccccctccaaccactgccctcagcccccgaccttatttattaccctcccctcccacacccccaatctacctggtgatgattttaagtttgcgcgtgtcttgggttgggctggggggtttcccacatgcagtgtcagaggggccgcccggtggggctatctccgttgctatattaatggcaagactaaatgaaacctagggcacggcctccgaagctgcgtgtggccccttagaggtgagcatcagagccagagcagtgagggggagactcacccaccctctccctctcccttcagctctgggaggcaggcgcagtgcccccctcccntgggctggcccaggaccgcgggtgaaacctgggtctgtttagtttctttggtttttgtatgtttgtttgtttttgacacagtctcgctttgttgcccaggctggggtgcagtggcacgatcgcggctcactgcaacctccacctcccgggctcaagcgattctctcacctcagcctcctgagtaggtgggattacagatgcccgccaccacacccagttaatttttgtatttttagaagagatggggtttctccatgttggccaggctggtcttgaactcctggtctcaagtgatccgcccgcctcggcctcccaaagtgctgggattacaggtgtgagccaccgcacccaatcctattaggtttctttgaatcccctcatggcctgcctggtttttgctcagcctgtcttcagcttgaggagctgggaagctctggtggatgctatgaactcacttgctgaagagcagcgttcaggtgcatccccagccagggcacgtggctccctcagccatgaattcacttctcttcaggaggtttggcttggcatgaaaatacttcattcagagtatgggcaaatgcttctggtcccatccttcctgcctcctgccccaaaccccgggttcctgggtctggaagggccttctctccaagctgggagctcctgggcccccaccattcactttttgtccttgctgctggcaaacagtaaagaaactcactttccctgtggcacgttatgcttcagaattaaaacaatgaagattaaaatttgcaccgagccagtgtgttgatcgaagaccacgattgcctgtgtttctgagatgcgtccatggaaaaatggaaaaaantgtggtgcgttgacttgctggaacccttcctaagccgcagtgaaaggaggggctagatctgtgtgtgttcatgcagctcananacctgatgctgaacggataagcaaggccatctacatacaaaagtacacacaaattaattcagaattgangttcttgcaaanacattacngtatgtatgcaaaaatcn

SEQ ID NO: 582743 - DNA, 135 bp, Homo sapiens
aggatatcttggggattgctttctgtctgaatttaattaaaacactgaagttgcccaacttcaagtcatgtgtgatactctctaggctctctctctctctctatagatagtatattttgtgtgtttcataaacac

SEQ ID NO: 582744 - DNA, 462 bp, Homo sapiens
accccagcagccctacatcgcggggcagcagcccatgtaccagcaggtgagccattcccggggcctcacagcggcacccgcagggcaccctcaggcttcacggtttagcaatgggacccctggccccagtggggattgtcccgtacgtctgctcacagggggagacgcatacccgaggccccttctcagcagacagaacgaggacacaagtctcagggcagatacgcgcatccgcaagtgtagacaggaaaaaccgtgaatttacttgaaaggcaaaggccgcatgagctggctgcatgagctgcagtccgtggacatggattacaagcacttgtgggtctttggctctgctgggacaaaagccttcctccctgggctggggaagggagaccagggccatgcctgctttcctcctgcaatggcaccctctgcgtccccccccacagagagagcgtcggtacc

SEQ ID NO: 582745 - DNA, 752 bp, Homo sapiens
  misc_feature (562)..(562): n is a, c, g, or t
  misc_feature (643)..(643): n is a, c, g, or t
  misc_feature (645)..(645): n is a, c, g, or t
  misc_feature (714)..(714): n is a, c, g, or t
  misc_feature (726)..(726): n is a, c, g, or t
  misc_feature (734)..(734): n is a, c, g, or t
  misc_feature (752)..(752): n is a, c, g, or t
agtcttcattgttttgattctgaagcataacgtgccaccgggaaagtgagtttctttactgtttgccagcagcacaggaccaaaagtgaatggtgggggctcaggagctcccagcttggagagaaggcccttccagacccaggaacccagggcacgtggctccctcagccatgaattcacttctcttcaggaggtttggcttggcatgaaaatacttcattcagagtatgggcaaatgcttctggaaaacccttccctgaagagagagaacgtgtgtgtgtgtgtcggtgatcacaccctcccatccttcctgcctcctgccccaaaccccgggttcctgggtctggaagggccttctctccaagctgggagctcctgggcccccaccattcactttttgtccttgctgctggcaaacagtaaagaaactcactttccctgtggcacgttatgcttcagaattaaaacaatgaagattaaaatttgcaccgagccagtgtgttgatcgaagaccacgattgcctgtgtttctgagatgcgtccatggaaaaatggaaaaaantgtggtgcgttgacttgctggaacccttcctaagccgcagtgaaaggaggggctagatctgtgtgtgttcatgcagctcananacctgatgctgaacggataagcaaggccatctacatacaaaagtacacacaaattaattcagaattgangttcttgcaaanacattacngtatgtatgcaaaaatcn

SEQ ID NO: 582746 - DNA, 225 bp, Homo sapiens
tgagatcgtgtcctttcgtacaggcaggaatttgagagtagattaaaccgacctggattactccggtctgatactcagatcacgtatggactttaagtcgttgaacaacacgaatcctttaactagcggcttgcaccaatcgggcatgtcctgtatccaagcatcgatggtctgtaaacctctatatgtcgcatatgtgactctagatactaggacttggcgctg

SEQ ID NO: 582747 - DNA, 533 bp, Homo sapiens
tagggggctgacgctctctctgtggggtaactttcttgtgggtgacgctctctctgtgggggacgctctcttgtgggtaacgctctctctatggggcagcagcccatgtaccagcaggtgagccattcccggggcctcacagcggcacccgcagggcaccctcaggcttcacggtttagcaatgggacccctggccccagtggggattgtcccgtacgtctgctcacagggggagacgcatacccgaggccccttctcagcagacagaacgaggacacaagtctcagggcagatacgcgcatccgcaagtgtagacaggaaaaaccgtgaatttacttgaaaggcaaaggccgcatgagctggctgcatgagctgcagtccgtggacatggattacaagcacttgtgggtctttggctctgctgggacaaaagccttcctccctgggctggggaagggagaccagggccatgcctgctttcctcctgcaatggcaccctctgcgtccccccccacagagagagcgtcggtacc

SEQ ID NO: 582748 - DNA, 1324 bp, Homo sapiens
ggcacgaggccaccactgctgcctgtaagggctgttttggatacagaaaatgtgccctttctaacccaaaaaatgcttgaaatgtgtaaaagtggccagactaacagtcccaaagagggctgccctctaagaggaagcgtcccaaatctgttcagttttagagactacgtgactggggtacgtggtggggccttaccagacatccacgaggagaatccaggccttggtttggctccagctgggcctgcctggtggctgccacttattgacttaagtcccagtgattcagctcctcatctggaacacctcgggtcacccccgacaacggtggtgggagggagagcggcctcctcctccctggtggggcctgtctgggtgaagcccctctgttcccgccgaggaggatcgtctgccttattgaaaccatctaattggagatccgcagattaggctaccaagacacagctgcctccagcagaatttgtgtagtggacacttgtacgtgcactttggagacagcaagcatgaggcctgcagctgacagctttgagtggctgtgaacctgactatggaaaagatgtgactcccaacccccagccgggtgctccgagccatggccgacaccatcttcggcagcgggaatgatcagtgggtttgccccaatgaccggcagcttgcccttcgagccaagctgcagacgggctggtccgtgcacacctaccagacggagaagcagaggaggaagcagcacctcagcccggcggaggtggaggccatcctgcaggtcatccagagggcagagcggctcgacgtcctggagcagcagagaatcgggcggctggtggagcggctggagaccatgaggcggaatgtgatggggaacggcctgtcccagtgtctgctctgcggggaggtgctgggcttcctgggcagctcgtcggtgttctgcaaagactgcaggaagaaagtctgcaccaaatgtgggatcgaggcctcccctggccagaagcggcccctgtggctgtgtaagatctgcagtgagcaaagagagcttttttattttaccatctatcgtgtggagccttctgttttcctgtgagacgccctccagaccccagagtagttcctgagcgctgccttccgggaacttcccctcagctcaccttttgagttggagactgtttccaggatcctgtgttttccctttcttgtttttcacttgtgtttttctggaacccgtcctaagttcttaaaaagagtgtgtgtaagggaaactcagcgtccttatgagtttaaaaacatctgtgttctgccctcaaaaaaa

SEQ ID NO: 582749 - DNA, 261 bp, Homo sapiens
ctcgtctaagacccgtgtcacgagacccgtcccacacggaccggtgtgccctcccgatcatctttccggttccagagaagtgggcgggatgtctccatctctgtctcaagcttcagggtgcgctgagctgcaacttcttacttccctaatgaagttaagaacctgaatataaattggttttctcaaatattggctatgagaggtggatggattaattaaataagtcaattccgggaaggtgagagagcaaataaagacctg

SEQ ID NO: 582750 - DNA, 711 bp, Homo sapiens
ggcctccaccgccttccccggctgcccggcagcctcccctcgctcgctctcctcttcctctagggccccagcgcagctcgggagcccgcgcaccgaggcgctaggggcaccgcgcactagagggacacccgccgcgcctggacagccccggcgggcgccccctcgcacctccatgccccgagcgggccggctccccatcccccgcgcctgtgtccccaggcgcagggcctggcgtccaagacccagaacccgccggggtcccctggggacgcgccagcccggcaagtggctcgacgatggaggaagccgcagaagcgcccgctccgcaacacaggtcaccacgcaaccggacagactcccattcggcaagaagaaacttcgtacaaacaagacgagcacggccagactttccgccgaaacagaaacgcggggaaggttacattcacgacaacaccgtgcacccgggctgtttccaatctaatccgtaggcactgaagaatccgtaccgtgagaggacttggccgcgtgtcatgggacgccttcactagctggaaacctggagttaccttacccgggtgtccaccgcaattgagggactaggggtcactgtatggctagctggtaattatgaccggggggatacctcaagccgagacttacttccatccaattatctacgataacaaggacctacaccaagggattccccag

SEQ ID NO: 582751 - DNA, 122 bp, Homo sapiens
aaaattgctttgatggtttgcctaacagtaatgatgtcatgtatcgcctggatgtgttcattttggatgtctgaattcctttaaatgttctgcatttttgaaattaagtgtttttatgttaa

SEQ ID NO: 582752 - DNA, 774 bp, Homo sapiens
gagccacgtgacccccgtgcggccaacgggtgcgccgggatttgggggataaagcgcggcccgcgcacagttgcggcgggagagcggggggccgagagcgtgactcgcccgctccggctgttcccccgcgcgcctccccgcgcgctcgcgcagccatgtccgaggagaagcccaaggagggtgtgaagacagagaatgaccacatcaacctgaaggtggccgggcaggacggtccgggtgcagttcaagatcaagaggcacacgccgtgagcaagctgatgaaggcctactgcgagaggcagggcttgtcaatgaggcagatcagatcaggttccgacgggcagccaatcaattgaaatggacactccagcacagctgagatggaggacgaggacaccatcgacgtgtccagcagcagacgggagggtgtgccggaagagccatgctggcagggcaaaagttctagagggccgtcccagccggccgggtcatcctcgcattgtggtgaatggtgagccacgtgacatgccggaaccacaaaggtgtctgcgggaaactcgaggacattcaccagatgatttcctctcttgatgtcttcagtgcaactcacaactatatctgcagggatgatctgtacttaattgggcactcagatgtatcttgtcacggtaaatgcgtggagatatgggggcacttggggccctttgtgtttcccctttaaatttttaaccaatttgctgatggcgattaccgccggatgaccgagtggccacg

SEQ ID NO: 582753 - DNA, 423 bp, Homo sapiens
gggtatgaaataaatgaagagagctttctcatccaaaaaaaaaaaaaaaaaaaaaaaaaaaaaaaaaaaaaaaaaaaaaaaaaaaaaaaaaaaaaaaaaaaaaaaaaaaaaaaaaaaaaaaaaaaaaaaaaaaaaaaaaaaaaaaaaaaaaaaaaaaaactttttggcccccttggcccacatcatttttgaattaacacatcttttccaagggggccaaatttggggtccattggccaattcccccataaggggggcggtttaaaaatcaatggccctccttttaaaaacttctatctgggaaaaccctggggttcccccaattaaatcctttggaaaaaaaccccctttttcacatggggcttaatatcaaaaggcgcccccccaatgcccttttcaaaaatgggcccctctgggctggcg

SEQ ID NO: 582754 - DNA, 401 bp, Homo sapiens
ctgtttgagctgttggtactgggatacaggcatatcacacgcctggtaattttgtatttttaatagagacagggttcgccatgtggccaggcagtctcaaactcttgacctcaagtgatctgcccatcttggcctcctgaagtgctgggataaaggtgtgagccaccacacctggccatcttgactatctaattgtttacttctttttttgttttgttttgtttttcaagacagtctcactctgtagcccaggctgattatctaattgtttacttctttttttgttttgttttgtttttcaagacagagtctcactctgtagcccaggctggagtgcagtgtcgtgatctccactcactgcaacctctgcctcccaagtcccagttgagcagttctcctcc

SEQ ID NO: 582755 - DNA, 448 bp, Homo sapiens
  misc_feature (249)..(250): n is a, c, g, or t
taactaatagcttatagctgtagctataggctggcttatgacttatggctatagctataggctgacttgtgacttatagctatagctataagctaacttatgacttgtagctatagctataagctaacttataacttatagctatggctatgagctaacttataacttatagctatagctataagctaacttataacttatagctatagctgtaaagctcactatagcttgaacttatttggttggtcnntgaattttcaaaatacaaatttagattaaatatgtgatttggtttttatttctacttttatccatgtcattgagtacttttcaggctgattgtaaaacatctttaaaaggccttttattatattgaagcactggtgttaatttctccttaaattgctttgaattgacttgtacttataataaaactaaaaaagcaaaa

SEQ ID NO: 582756 - DNA, 583 bp, Homo sapiens
  misc_feature (122)..(122): n is a, c, g, or t
  misc_feature (297)..(297): n is a, c, g, or t
agtcctccactcgacctccacatcagagtataattgaaagacgcctatcagacatttctatcaccaataatgccaacctctgtatacagcagcaggctgggccccaaattcagaagattcantgttgcttgcatttctactatacgggaacacgtgacagctttcggtaacgtatcactgtggctacttcctcggttctacttttccctgtgtggacaatgtaattacctcggtttacacgtgctctttgtgtgagtacgtatatggtgactaggaatacaaggagaaagtctgganaagcaccaagcacaaagcaggcctgaggctccagcaacagtcattcagaaacaactgcccactttatacgtaaaagtatgaaaggaatgccaatgtgagcccatgtcattaggagaggtaaggataatatacaccttgcttaaccatcacttaacctttttattgcacataatgaaatttaagccctaacctaggtctgtacttgtgtaataattatgcactctaaattagcatctgcatttagatagatggcaagcttagaaatcagtcctgcatttgacctctt

SEQ ID NO: 582757 - DNA, 316 bp, Homo sapiens
gagaaggagtacaggagctgatgaatctgtcatgctggccctgtgatgtggagatctgccacctaccgcaagctagtggagggcgaggagtgcaggctgaatggcgaaggcgttggacaagtcaacatctactgtagtgcagtccaccgtctccagtggctaatggcggtgcccgcggtgtcggcagtggctttaggcctgggtggaggaagcagctactcctatggcagtggtcttggcgttgggaggcgggcttaagttccagcacgtgggcagagcccattgggggggtgggccttacacagctctagttgga

SEQ ID NO: 582758 - DNA, 1059 bp, Homo sapiens
  misc_feature (587)..(587): n is a, c, g, or t
ggaacagggttcctgtagcaaagatcaccaatgcttggtttgagctgagacaatcagatggtgatgtgtgaccctcgaccgatggtgaaatacatggttctgctgtctgtgcgttcatccgctgtgtgactttggattcctaaaagatttcagatttgcattgtcaattgctcacatcaatgacacaatccgttccatccatgtattagtcgcgtaattgagtggtcccccacatggtctatctacaagtgctctaggtcacttcatagcatagctcaagtggcttcctctacatgtggggtggaccttggattgcaagaatccgtgtgtcgatcgcgataccaagcaagatgactagtaggtcgccaatcgtcgtggaagcataggactcgacacggcctaatttagggtgaaagagacgcgtgagggttccgtgcgtgcgcaccgagcacacgttatggagcctgaagtgtattgcgctagacaccgttgcccttctcgcttcacgtggctaccgcttgcgtggtacgagggccatggcgtctgaggctgacagtgcccccaggctcaggtgccctgactgtggnctgcagcggccgaggaaacgccctctgtgctgcggggggtctgtgtgcgggggttggggtgcgtgcggcagaggggctggactggactcccatcgtccgttgggtgacatcctccttactagtgtgtgggacatgagcgcgcttcgacgcaccacgcgctagtggtggacagtttcttgtacctggagggcttactacttgtatcaatatgctcgatggtgaccacatgcaatctgtggagcaaacgttgctgctggggctcatggcaacttcatgcaggtcaactttatgaaccaattgcttagcacagagtttggtgatcgcccttctcgaccttgtacatgaatggtacgtagcactggcgtaactggcttgcctatcatgaaccattggcaaacttgcactttgttgtccatgagaaacccataagctttctgcacccacctggcaggattgccggttattggccact

SEQ ID NO: 582759 - DNA, 384 bp, Homo sapiens
gttgtagtgttagacaccccaccttcagacttgtaccttgaaagcttaatctcgtaataaattaatccactggtaataaagggaaatgtatgtcctgtggctaaaggatcctcaaacttgccatccccaaggaaaatcatgtatgagtatggctaaatgatggtctgtatcttcttggtaatggaaggggggttagatgttggcaggtaaccttgatggggagagtaatcatcctctaaagtttacacccccttataagcctaaggccatttaaatggagtaacctgagagagcattaatagatgtggctctagggtataaaatccattatctgatcattttccggacttcccccggattccaactaattggtgctggaggggt

SEQ ID NO: 582760 - DNA, 293 bp, Homo sapiens
ctgaaccacaagtttacatttaaccaaaaaaaggttcaccatgactgatgccatgttttcactgtttcagaatgtgggagtctttaagcaactacaggcttacatttttctcttaaaaaaaaaaaggaaaaggaaaaggaaacccaaggcaggttttggcccaaacttaaaaagtttattttctccacatccttgaaacaaaaactaaactaattggtgaaaatacgtaagcccaaaagaaaaacaaaacatgtctctttggttagaaatagccatctacaatttacctttaa

SEQ ID NO: 582761 - DNA, 341 bp, Homo sapiens
caatagatcatcagacgacgcgaaacgatcacatacacgatgcttagatgtgtcatacaggaacctacataccgcgataatcgtgtggtgtatggaggaggggctgctgaaatatcctgatgcccctggcagttagccaagaggcggataagtgccccaccttagaacagtatgccatgagagtgtttgccgacgcactggaggtcataccccatggccctctctgaaaacagtggcatgaatcccatccagtctatgaccgaagtccgagccggacaggtgaaggagatgaaccctgctcttggcatcgaccgtttggcaaggggagctctggcaagggg

SEQ ID NO: 582762 - DNA, 261 bp, Homo sapiens
gcctgacaatggtgaaacgacaagtttatagcccttcgaaaggcagatggcttatctcatcttattacctaaactgtgattctaaaagtcagataaatatcatcaataaaaagatacttatatttaacatactttatcgacagcttccctgcctctagctatatcctagggtctccaaaccactctaaacacatccagggctttagtctactagagtgtgcactcccacatagaatactgtcactcaagaaggaaaatcag

SEQ ID NO: 582763 - DNA, 1575 bp, Homo sapiens
gttcgtgaaaggaattagggtgtgtcatgtgttgccatgaaacaacgaaaccaactaccctacaatcatgtatgcagggggtactagaggtagaaataataatgaagggcaggataaacatttgtatcctcacgtactatccatacaaagtcatagtacctgaagagtttaagcttctagggcgatgtcctcggcatagcagattgcgtcgtactaacttatgtgagtaggtcattcctcgatataaaatgcgagctctctaaccatctactaaattgcgtacacgatgcactgttcgtgcaacactgagctgcgcttgtccctgtcctgattgacaggtgattagcaagggggcagccatcgtcgactctagtgattagtacacccgctttactacgcggcgcacttattagactatgtggcccacctttacttacacgccacacgcgtgagaaatgcgtccacgtgacgtaaccattaagctctttcgtttacataccgcttgtatctgacattgacgaaacgcgttctcacgtgctaaatacgataaagagcgtagctactataaattaatttatttctaccaagaatagagctactatttggaggcattattggaacataaattcgcgggcatggacacaaataaatatcacggggggtggaaaaccattggaaaggcaggctcgccattcggtgtgtcggttatctagaaatttcctcggaaaattctttaataaataaacgagcaggcttgggaaaaacctcttactcggtttcttacccttggaatcggctattggcacccgaaatctcgattagaacatgacatgtacattttcgaggtttatttaactatccctataaaagtccgttatatcggttaaaaccggggtccatgggggcgactctttataccttactgcaacacggcccgaaactgttgcaacggacagggtatgtaccctaacaacgtttggccccaattcaaggtttgccccaagaatgacgtggggcaacacggcaacggagataccctcgcagaggctctgtgaaaacttattggcgaatatcacctaaaaaccaatgcccttggcacaccctggttattctcaccccctgtcaaacagtgggcaccttagatctaaacctctcgggcggacaacaaaccagctcatgttgggcattaggcaaccgtgcagggcgacaacagggggaccgtttatacaacacgcgcgcgccagaactggggaaggagaagcaaacatcgcgccacacgtggcgtctcgacaagacgacccacaatagccacacacgaagacaaaacaaccacccacacacagacggcgcggcgcccaaaaagaccaacacaaggggcacaaccaggccgacccacacagggaaaagaggagagcacaaacgcggagtaacaagaaaaaggggggcgaaaaacccagggaggaaaagaagagagtgtcgaagaaaaagagcgcgagagacgaagacaaacacacagcaaacaatgaaaagagaaaccacacgagaaagaaacaaacagacggcagagcagggaca

SEQ ID NO: 582764 - DNA, 862 bp, Homo sapiens
gttatggtggcgcccgccccgcatctggcggctgtctggggccgcccttgggtcgcgctttgtgtgtcctgcttggcgcgcggtgggttggtggctctcgtgagggcgccctctcttggcgtgcgttaggctcgcggtcgtgccgggtgtgaggcctcgatgaccggcggcacccctggggcaagggggaggactttcgggccggcacacggtggcccggtgccggggtgggcgcgattgagtgccggtcgtggcagaacgtcgcggggtcgaccgctcgctggtggggagcgcgtcatttcttggtgcgtgcggtccgccgcctgtgttcatctctcgtggcgtcacgaaggtgttgcccgtccatgcggtctctgactcgccgcgtggtggtgcatgtggttgctccggtcggagggagtgcttcccgtcgggggattgcctaggcgtctgttctgcaccccgtggactgttgggccctgtgaggcggctaccgctattggcccccgttggtgtcccccgctcccgcctggtgcgcgggtgtaggtccgcctgcgccacggtgggcccgagacctctaggtttctgtagctgacgtgtctgcgccccctaaggggagaaaaggcagcttctccccggcagtcagcgtgtgcaaggcgcctcagacagagatgtcggcggctttgattctgggcggcctacatgtccacctgcgtggaagggcacccccggcgggacgccagggagtataaactcataagtgtgcgcatgcacccccgaacgtgaaagaatttcacgcgagtgatccgctgtctttgttctatcaattgaccgtgccccccccaacaccccaaccaaacgg

SEQ ID NO: 582765 - DNA, 620 bp, Homo sapiens
  misc_feature (179)..(179): n is a, c, g, or t
  misc_feature (325)..(325): n is a, c, g, or t
  misc_feature (358)..(358): n is a, c, g, or t
  misc_feature (391)..(391): n is a, c, g, or t
  misc_feature (398)..(398): n is a, c, g, or t
  misc_feature (445)..(445): n is a, c, g, or t
  misc_feature (456)..(456): n is a, c, g, or t
  misc_feature (459)..(460): n is a, c, g, or t
  misc_feature (467)..(467): n is a, c, g, or t
  misc_feature (498)..(498): n is a, c, g, or t
  misc_feature (510)..(510): n is a, c, g, or t
  misc_feature (518)..(518): n is a, c, g, or t
  misc_feature (539)..(539): n is a, c, g, or t
  misc_feature (549)..(549): n is a, c, g, or t
  misc_feature (561)..(561): n is a, c, g, or t
  misc_feature (571)..(571): n is a, c, g, or t
  misc_feature (616)..(616): n is a, c, g, or t
cggcccatctcgtttatttttatctggcatataaattgcatatttttatgtgaaatgtggttgtatacattagaaataagatttacacatttcaaagcacactactgcaaaaataaattatctttaacctccaaactctcttttgagctttgcctgctcagatctcaatctcaccagtngccctttatgctaaggatttctcaagaccctcttcttcaagtgagttgactcttcctttttcctccccatgaggctgctgacaattttacattatgttcttacttaggacacttttactattcatcttcggttgcatctgactttnctttgggttggcctttttttgcttatcatgctncccccacctataaccaattaggtattattattnctcccancgcctataaccaactagcagatgttcttttctgggatactttctttnaagatgctganttnngctttcnaagaacctggaaccttgtcaccaagaaaggntttcttctttgngggatttnaacaaaaaagaaatggggggnccccatttcntattggaattancaaaaccggnggaccattacccccaccacctttcatttcattggggaccccaggntcca

SEQ ID NO: 582766 - DNA, 122 bp, Homo sapiens
gctagcggtcggtgttccagctgtcgcgtgtctccagctgtcgcgtgtctcaagctggtcgcgtgtctcaagctgtaggtctgcttgaggatctgcccagtccggcggctgccgtcctccag

SEQ ID NO: 582767 - DNA, 1060 bp, Homo sapiens
gaagatgccgcaatggcaagaaggccaagggaaagaaggtggctccggccccagcatgtcgtgaagaagcatggaggctcacgaaagtggtgaatccccatgttagagaaaaggcctaagaattttgggcattggacatggacatccagcccaaacagagacctcaccctgctttgtgaaatggccccgcatatatcaggttgcagcgtgccagagcagccatccgtctataagacaggatgaaagtgcctcacatgcgataaacacagaaacacccaaggcaccatggaccgaccaaaacagcgatacatcacgctgcatgtacagcatggaccacaaagctacagaccagacggaccaacagcaaagacgaacggacacgcacgacggaccgtgtagagcccggagccgacagaaaagaaaggctgcactgggccgaacgagggacgatcccacagcgacaggacgacccaacactgatccgtatccagagcacagcgaggttcacaacgagcggtcgaccgagccttggatggcagcacacagacagacaaaggctcagaacatgggatggctgatacggccacaaccgaccggttggaatccacatcggaggcctggattgtccgttctttgcagccgttgagcgaattgattgctcggacacacaaattgggcgagggcatacccaatttcacgatggcattccacgtcagcagggtgacaacaggagctaacgcacagtgcgcgcaacggggcgtaggatccgaagatgcgatacatgaatgcatggggcactcagcgaggatccgcagactagtaggtacgccagcgggtcgccacacatcagagcaaaggaacaacaaagagagcagccacaccggggcaacgacacacacaacgcggcgcacgaccgcaaacccacgaggacaccccgaagtcacaccgacatcaacacagaacatcacgacagacagatacagcaccgagacaacatcggcaggcttagacacagtgacccgaggcacagtcacacaagcgacacgaggcagtcagaaac

SEQ ID NO: 582768 - DNA, 271 bp, Homo sapiens
tgcgtgagtagtatgcggtcccagtctctaaaacccagcagacccatcgactggcagcctccatggtagacctaccacgtcactactagacactgccaccaacacagttggaagtcaacctggaggacatccctggtgaggggctgctcatatcctgggccttcactgatcgcccagatctcaccctaacggtgcttccccagcttcagaccagggagagaggtgaagaacaagtggagctctccacaattgaggaactgatcaaggatgc

SEQ ID NO: 582769 - DNA, 422 bp, Homo sapiens
atttgttaattgacagataataattgtgcatattcatgggatacatagtgatgtttttaatacatataatgtatggtgatcagatcaaggaaattagcatatccatcatcctcaaacatgtagaatgttttgtggtggggaccatccggaaccccctcctgggtaattggaaccccggatatattattggtcccttggagtcccctcccgggctgtagaacacaagcaagatccctcttctctagctataattttgtatccttgaaaaaatccctactccttccttccttgcctttactatcctccgttatactttttacttctatgagatcagtgttttttagcttccatgtatgggtgaaaacatggtattcaactttctgttcttacttcacttaatttcctgggaatactatccagcc

SEQ ID NO: 582770 - DNA, 4675 bp, Homo sapiens
gcaggacacagccctgccccacagccaagcccagcagagtggccccactggccagccgagccagcccccaggcacagccaccacgccactggagggtgacggcctctccgcgcccaccgaggttggcgacagccccctgcaggcccaggctttgggagaggcaggagtggccacaggaagtgaggctcagagcagcccgcaattccaggaccacacggaaggggaggaccaggacgcttccatcccctctgggggcagaggcctgtcccaggaggggaccggtccccccacctctgctggtgaaggccattctaggactgaagatgctgcccaggagctcctgttgcctgagtcaaaaggaggcagctctgagcccgggacagaactgcagaccaccgagcaacaggcaggggcctcagcctctatggcagttgatgctgtagctgagccagccaatgcagttaaaggggccgggaaggaaatgaaagagaagacccagagaatgaaacagccaccagcaaccactcctcctttcaaaacacactgccaggaagctgagaccaagaccaaggacgagatggctgctgctgaagaaaaagtcggtaagaatgaacaaggggagcctgaagacctcaagaagccagaggggaagaacagaagtgcagctgctgtgaaaaacgagaaggagcaaaaaaaccaggaagcagatgtccaggaagtgaaggcaagcacgctgagcccgggtggaggagtcaccgtgttcttccacgccatcatctctcttcatttcccattcaatcctgacctccataaagtcttcatcagaggaggagaagaatttggggagtcaaaatgggacagcaatatctgtgagctgcactacaccagagacttgggtcatgaccgcgttcttgttgaaggcattgtctgcatttccaagaagcacctagataaatacattccttacaagtacgtcatttataatggggaatcttttgagtatgagttcatttacaagcaccagcagaagaagggcgagtacgtcaaccgctgtctgttcataaaatcttcacttctgggctcaggagactggcatcagtactatgacatagtttatatgaagcctcatgggagactccagaaagtcatgaaccacatcacagacgggccgaggaaggacctggcgaaggggaagcagattgcgctgcgctcatgctggacagcaccttcagcatcctgcagacctgggacaccatcaacctgaacagcttcttcacccagttcgagcagttttgctttgtcctgcaacagcctatgatttatgaaggacaggcacagctgtggaccgatttgcagtacagggagaaagaggtgaagagatacctgtggcaacatctgaaaaaacacgtggtaccattgccggacggaaaaagcacggactttttgcctgtggactgcccagtgaggagtaaactgaaaacaggcctgattgtcctttttgtagtggaaaaaattgagcttttattagaaggcagcctggactggttgtgtcacctcctaacctcagatgccagctcaccagatgagtttcaccgtgacctaagccacatccttgggatacctcagagctggcggctgtacctggtgaacctgtgccaaagatgcatggacacaaggacgtacacctggctgggcgccctgcctgtcctgcactgctgtatggagctggccccgcggcacaaggatgcctggagacagcctgaggacacctgggccgctctggagggactctccttctcaccgttccgggaacaaatgctagatacgagttccctacttcagtttatgagagagaagcagcatttgctgagcatagacgagcctctcttccggtcctggtttagtctgctacctctgagtcacctggttatgtatatggaaaacttcattgagcacctgggtcgttttcctgctcatatcctggactgtctttcagggatttactaccggcttccgggacttgagcaagtcttgaatacgcaggatgttcaggatgttcagaacgttcagaacattttagaaatgctgttgcgactcctggacacttaccgggacaagattcccgaggaggccttgtcaccatcctacctgactgtgtgtctgaaactgcatgaagccatctgcagcagcacaaagctacttaagttttacgagctgccagccttatctgccgagattgtctgcagaatgattagacttctatctctggtggattctgcaggacagagagatgaaactggaaataattcagtccaaacagtcttccaagggacccttgctgctacgaaaaggtggctccgagaagtttttacaaagaacatgctcacatcttcaggtgcctcattcacatacgtcaaggaaattgaggtctggaggcggctggtggaaatccaattccccgcggagcatggctggaaggagtcgttgctgggagacatggaatggaggctcacaaaggaggaacccctctcccagatcactgcctactgcaatagttgctgggacaccaaaggcttagaggacagtgtggccaagaccttcgagaaatgcatcattgaagccgtgagctcagcctgccagtctcagaccagtatccttcaggggttctcttactctgatttgcggaaatttggcatcgtcttgtctgctgtgatcactaagtcctggcctaggaccgcggacaacttcgatgacattttaaagcatctgctcacgttggcagatgtcaagcacgtcttcagattgtgtggaaccgacgagaaaatactagcaaatgtcacagaggatgccaagaggctgatagctgttgccgactctgtgttgacgaaagttgttggtgacctcctaagtggcacgattttagttggacaactggagctgattataaagcacaagaatcagtttcttgacatctggcaactgagggaaaaaagtctttcaccccaggatgaacaatgtgctgtggaggaagcactggattggagaagggaggaactgttacttctaaagaaagagaaaagatgtgttgatagtctcctgaagatgtgtgggaacgtgaaacatctgatacaagtggactttggagtgcttgcagtaagacactcacaagacctcagcagtaaaagattaaatgacaccatgacagtgagactgtccacctcctcgaactcgcagagggcaacgcattaccacctgagctcccaggtccaagaaatggctgggaagatagacttgctcagagacagccacatcttccagctcttctggcgggaagccgcagagccgctgagtgagcctaaggaggaccaggaagccgcagagttgctgagtgagcccgaagaagaatcagaaaggcacatccttgagcttcaagaggtgtatgactatttgtatcagccttcttacagaaagttcattaagttgcaccaggatctaaagtcaggagaggtcacccttgcagagattgatgtcatcttcaaggactttgtgaataaatacacggacctggattcagaacttaagatcatgtgcaccgtggaccaccagggccaaagagattggatcaaggaccgagtggaacagatcaaggaataccatcacctgcaccaggctgtccacgcagccaaggtcatcttgcaggtcaaagagagcctgggactgaacggtgacttcagtgttctcaacactttactaaattttactgataacttcgacgactttcgccgtgaaacactggaccagatcaaccaggagctcatccaggccaaaaagctgctccaggacatcagcgaggcccggtgcaaggggctgcaggctctgtccctgagaaaggagttcatctgctgggtccgggaggctcttggaggcatcaatgagctgaaggtgtttgtggacctggcctccatctcagcgggggagaatgacattgatgtggaccgggtggcctgcttccatgacgctgtgcagggctacgcatccctgctatttaagctggaccccagcgtggacttcagtgcattcatgaagcatctgaaaaagctgtggaaggctctggataaggaccagtacctgcccaggaaactggtgagtcttattctgtctctaatgcagattttgttgaatagagcattgcttagcaacgttagggcagtgactgtggaaatggtggcacacctgtgtggtaggtttgtacacagccgttttcaatgatatttaaaaagcttttcttcataaatggaaattcaccatcttgttacctagaaagcaggatacaaaattacatgacacatagtaatctctaaggtgcaaaacacacgtggaaaaaagacagaagggaaatatgctgaaacgttgccaggagttttctctgaatggttgtaattgtcattttattctgttactttttgttattttctataattgatagaattttttatcagaaaaaagtaaacatttaaaattagccaggcatggtggtgtgcgcctgtaatcccagctactctggaggctgagacagaattgcttgaacccgggaggcagagatagcagtgaactgagatcacaccactgtactccagcctgagtgacaaagtgagactctgtctcaaaaaaaaaa

SEQ ID NO: 582771 - DNA, 245 bp, Homo sapiens
atttaccgtgccacggatataacccactgcttgaacttttgccagatgattcttccatagatgtctcttctccaagcaccaggtctagctctttctagaccagtctgaagaagccttaagaggccatcttctcgtttcctgagacatctttgtctaatgcatccgtcgaatctactaccttatcttaccgctctggactttgcattggcaatctctgccgcttggtcttgccatatgccatgttc

SEQ ID NO: 582772 - DNA, 537 bp, Homo sapiens
  misc_feature (50)..(50): n is a, c, g, or t
  misc_feature (53)..(53): n is a, c, g, or t
  misc_feature (61)..(61): n is a, c, g, or t
  misc_feature (68)..(69): n is a, c, g, or t
  misc_feature (81)..(81): n is a, c, g, or t
  misc_feature (332)..(332): n is a, c, g, or t
gagatccagtgtggcagaacaagaggttatctggaattcccacggtaacngcnaagaggcngaggtgnnagccactgtgtnactgtgttcttcatctattcaggaaccgacgagaaaatactagcaaatgtcacagaggatgccaagaggctgatagctgttgccgactctgtgttgacgaaagttgttggtgacctcctaagtggcacgattttagttggacaactggagctgattataaagcacaagaatcagtttcttgacatctggcaactgagtaagcatcgagtcgatacgcacttcaggctcctgaggcattaagtagctggaanacacgtttgtgtttgcgtgtgcatttttgtaaaggagataatcatcttagccttgataatgagtatctcttcttgctcataagttgataggggtggttcataattctcaagaacatcacgggacagtgatcaaataatggccatctcgaagaaggggtatgcgcaaaaccatcctagtcttctcctggtggcgggaagaagccga

SEQ ID NO: 582773 - DNA, 142 bp, Homo sapiens
ttgacactctggtgacgacgcgccaccactgccacgttccgcagcttcaggtcggcagcgcagttccgctgagacggcccttcatggctggtatcgctgctgatgccgcttggccaagtgcttacctggccaggtagacacc

SEQ ID NO: 582774 - DNA, 327 bp, Homo sapiens
  misc_feature (129)..(129): n is a, c, g, or t
  misc_feature (142)..(142): n is a, c, g, or t
cgttgaatggcctggctggaaaagacagtacagtgtaaccgtgatgtggtcactttgtcctgatgccagcctttgaagatgcaaaaaaagcagggaccatatgatgtgagtggtcctaccaggaggtantctgggcgcacanaatttatctgagtctgctgctgtgaaggagatactgaaggagcaggaaaaccggaagggcctgatagccgccatctgtgcaggtcctactgctctgttggctcatgaaataggtgcaggaagtaaagttacgacataccctcttgctagagacgaaatgatgactggaggccattccacgcctcc

SEQ ID NO: 582775 - DNA, 482 bp, Homo sapiens
  misc_feature (182)..(182): n is a, c, g, or t
  misc_feature (187)..(187): n is a, c, g, or t
attttaacctcctaacaatgaactcctttcccctgaatgagaatgcccatcttcctcaaggtgggttgtgtaaaatgaaggagggaggccttgtgaagcgcagatcatgcagtgggcctgtggacagggccgtcttttggcggtaggcctgtgtgctgttgcagagtagcgtgttaccctcntcgcnatgctctgtgagccaacctcatggttctgcctctccaggtcttctgcagtgtgcagaggctcagccaggccttcatcgacctgcactctgctgggaatatgctgttcaggacgtggatcccatggcctactgctcccccaagcagagtgtgtccctccaaatggactttggcttggacctggtgacggagcttaaagaaggtggagatgtcactgagctgctggcagccctctgcaggcagatggagcacttccctgacagctggaagagatttcgtacccagcccacggcataa

SEQ ID NO: 582776 - DNA, 116 bp, Homo sapiens
  misc_feature (74)..(74): n is a, c, g, or t
gcggccgcctactactactactgctcgaattcaagcttctaacgatgtacggggacatgtgagcccggccggcnatttcaggccatctcacgtgtacataatcagagccacaataa

SEQ ID NO: 582777 - DNA, 525 bp, Homo sapiens
  misc_feature (146)..(146): n is a, c, g, or t
  misc_feature (150)..(150): n is a, c, g, or t
  misc_feature (158)..(158): n is a, c, g, or t
tgagtttaaaatccactttattaaaatgcttagcagaatatcaggttcccaggaatcacagttcatcttgatcagggagaaacagccatgggggtttgatcatccaattcaggggtaagagcttggtgtgcctgttgtcacagcantggnaaatctangcattgagggagggtggggctgctgggacggtcagtgcttgcagctcacagattctggggttctggttaatgagttccagtccacagtagagctttttcttgcagactgataacttcgacgactttcgccgtgaaacactggaccagatcaaccaggagctcatccaggccaaaaagctgctccaggacatcagcgaggcccggtgcaaggggctgcaggctctgtccctgagaaaggagttcatctgctgggtccgggaggctcttggaggtaaaatcagcctttggggttgcgtggaagtgtggagaaagttttcagatggcgcactgtgtggcattcctaaactctttggcaatacctcccctt

SEQ ID NO: 582778 - DNA, 1056 bp, Homo sapiens
  misc_feature (308)..(308): n is a, c, g, or t
agcggggggtggccgcggccgccgagtcggtctgcgcagcctcctgcgtttcctcgcttggatcttggcactgaagaggcggtggccggcggcgatgcgagaaaagtagcgatgcaacctgcaccaaggggccggactacgctcatgcttcgagagaggacgaggtcagtgacacggaatgatttcgagtgtcgactcagtattctgtgtctgtgctgtatggaatgcgggtccagctggagaaactgagagatgagcgtggagctctactataagcttcgttagaatcacgccagtggatcgtaacntcattcagacaacggattatgcacgaatttggctgaaggtcgttctcaactgaaccttggctctggcattggtacaaaggccctcaagccagcattctctggtgaccttatgggaacaacttacgagcaatgaaggcttctgagccgttagaactccgtttggtcagctgaagggacattcggggccagtctgtgatgaagcgagatgtcgtaaactaagaggacagtaacggcaacaagaaaagcatgtgatggtatagcacggcgtgtgatacgagcttgaatcctcgggtcgacttgtgagagaaagttggagcccgactcttcatactctcaatacgttctataagaatacctcgtgggctactaatgcaagtgagccccctttttgactgggcaagagtttgggatgacgaattgccggcatgaatttgtactcagttaccaggtttccatgctgttcaaagcaaaagggcatgccttcttgccggacccaaatgtaaagacgccgggtattaggctggcattaccagccctgttacagcaagtcgcctggggaagggctccctaatttaaaaagggctttcagaaacgttcttgacgtcgagtttaaattacggggcaccgggtggcggacttcagccacgattggcgcaaaaacacgggaaccggcgggcccttatgtgggccggtactcactggagcccccttagacagggggttataaacccgggtgggaattcccccc

SEQ ID NO: 582779 - DNA, 4815 bp, Homo sapiens
gcaggacacagccctgccccacagccaagcccagcagagtggccccactggccagccgagccagcccccaggcacagccaccacgccactggagggtgacggcctctccgcgcccaccgaggttggcgacagccccctgcaggcccaggctttgggagaggcaggagtggccacaggaagtgaggctcagagcagcccgcaattccaggaccacacggaaggggaggaccaggacgcttccatcccctctgggggcagaggcctgtcccaggaggggaccggtccccccacctctgctggtgaaggccattctaggactgaagatgctgcccaggagctcctgttgcctgagtcaaaaggaggcagctctgagcccgggacagaactgcagaccaccgagcaacaggcaggggcctcagcctctatggcagttgatgctgtagctgagccagccaatgcagttaaaggggccgggaaggaaatgaaagagaagacccagagaatgaaacagccaccagcaaccactcctcctttcaaaacacactgccaggaagctgagaccaagaccaaggacgagatggctgctgctgaagaaaaagtcggtaagaatgaacaaggggagcctgaagacctcaagaagccagaggggaagaacagaagtgcagctgctgtgaaaaacgagaaggagcaaaaaaaccaggaagcagatgtccaggaagtgaaggcaagcacgctgagcccgggtggaggagtcaccgtgttcttccacgccatcatctctcttcatttcccattcaatcctgacctccataaagtcttcatcagaggaggagaagaatttggggagtcaaaatgggacagcaatatctgtgagctgcactacaccagagacttgggtcatgaccgcgttcttgttgaaggcattgtctgcatttccaagaagcacctagataaatacattccttacaagtacgtcatttataatggggaatcttttgagtatgagttcatttacaagcaccagcagaagaagggcgagtacgtcaaccgctgtctgttcataaaatcttcacttctgggctcaggagactggcatcagtactatgacatagtttatatgaagcctcatgggagactccagaaagtcatgaaccacatcacagacgggccgaggaaggacctggcgaaggggaagcagattgcgctgcgctcatgctggacagcaccttcagcatcctgcagacctgggacaccatcaacctgaacagcttcttcacccagttcgagcagttttgctttgtcctgcaacagcctatgatttatgaaggacaggcacagctgtggaccgatttgcagtacagggagaaagaggtgaagagatacctgtggcaacatctgaaaaaacacgtggtaccattgccggacggaaaaagcacggactttttgcctgtggactgcccagtgaggagtaaactgaaaacaggcctgattgtcctttttgtagtggaaaaaattgagcttttattagaaggcagcctggactggttgtgtcacctcctaacctcagatgccagctcaccagatgagtttcaccgtgacctaagccacatccttgggatacctcagagctggcggctgtacctggtgaacctgtgccaaagatgcatggacacaaggacgtacacctggctgggcgccctgcctgtcctgcactgctgtatggagctggccccgcggcacaaggatgcctggagacagcctgaggacacctgggccgctctggagggactctccttctcaccgttccgggaacaaatgctagatacgagttccctacttcagtttatgagagagaagcagcatttgctgagcatagacgagcctctcttccggtcctggtttagtctgctacctctgagtcacctggttatgtatatggaaaacttcattgagcacctgggtcgttttcctgctcatatcctggactgtctttcagggatttactaccggcttccgggacttgagcaagtcttgaatacgcaggatgttcaggatgttcagaacgttcagaacattttagaaatgctgttgcgactcctggacacttaccgggacaagattcccgaggaggccttgtcaccatcctacctgactgtgtgtctgaaactgcatgaagccatctgcagcagcacaaagctacttaagttttacgagctgccagccttatctgccgagattgtctgcagaatgattagacttctatctctggtggattctgcaggacagagagatgaaactggaaataattcagtccaaacagtcttccaagggacccttgctgctacgaaaaggtggctccgagaagtttttacaaagaacatgctcacatcttcaggtgcctcattcacatacgtcaaggaaattgaggtctggaggcggctggtggaaatccaattccccgcggagcatggctggaaggagtcgttgctgggagacatggaatggaggctcacaaaggaggaacccctctcccagatcactgcctactgcaatagttgctgggacaccaaaggcttagaggacagtgtggccaagaccttcgagaaatgcatcattgaagccgtgagctcagcctgccaggtgaacaatctctcctcctgggaaacggattcgggctcacagctgtgttctgccatgacccagctaagggctatgaagcacccgctgggtctcagctcctccgctaactcagagattgggaagtgggcaccctcctccctcgccaagggcaatggcgctgaaatctagttctctccggattcctcagtgtgctgcacagtccctgctgctcgcaccatcctgcatgtgttccatatggaatcacggccgtgcgcgtgtggcacaagtcacacgggcttgcaggccgttcctcagatggccctgtcatcactgtggctgctggtttgattgattgttaacacttgctcagtaggtgtgcgggaagagactccaaaggttgacagaacatttatggaagcaaaatatgtgaaatggaaaattgtatcaatttatttagctcttttcggcaaaggggaagagattgtgcccccctgtctcccaggaacagtctcgcaggcaatgccacatgaggaagctccctgctggccatggctgccctgctcacatttcctaattggacacttaacccctgtacaagcacagccttgcggccacaggggaagtccagaaacattgaggtcattgaattccggggaccaaggggttctaattttttaagtgactgatacctttgataaggttttcctttccctttttcgttaactctttgttgagatattgttcgtatgccatacggtacatctgtcaaaagttccagttcagcaggttttggggtagtcacagatatgtacagtcatcaccacagttaatgacagagcattttcatcacttcaaagagaaacccggcccctttagccatcatcctcctcccctctagtcacccactcccctctgcaggcataaacaattgctgaacataaacaactgcttctgtggctttctctgttctgactgtcatatgaatggaatcatatcatatgtggccttttgggtatggcttatttcactgagcataatgtttttttgttgttggtggtggtggttgtttgttgtttttgggaccgagtttcactctttttgcccaggctggagtgcagtggtgcgatcctggcttaccgcaaccactgcctcccgggttcaagtgattctcctgcctcagcctcccaagtgctggaattacagctactttttgtttaaagagtcttttaattgtttaaagaacaatgtgccgccacactcggttccttttgtatttttagaagagacagggtttctccatgttggtcaggctggtctcgaactcccgacctcaggtgatccacccaccttggcctcccgaagtgccgagattgcaggtgtgagccaccgcgcccggccgagcataatgttttgaaagaccgctcaggctggacacggttgctcacgcctgtagtcacggcactttgggagcccaggagttcaagacaagcctgggtaacagagtaagaccctgtctctataaaaactaaaaaataaacaaaaaaaattagccaggcatggccgggcacacctgtggtcccagctacttgggaggctgaggtgggaggctcccttgggcccagaaggtcaaggcagcggtgagccatgatcgcaccactgcacttcaacctgggggacagagcaagaccctgtctcaaaaagcaataacaacaaaagtccatccatattgtagcttgtgtccgtttacgttaagtattccttacccaaaatgcttgagaccagaagtgttttggatttcagatgttttcaaattttggaatatttgcatttacataatgagatgtcttccagatgggacccagagtctaaccacaaaattcacttgtttcatatacatcttatacacatagcctgaaggtaattttatacaatatttttaacaattttgtgcatgagacaaagtttgtattaagtatttgtatgttgaatttttcacttgtggcatcattatactcaaaaagtttggattttgtagtattttggatttggggattaggaatgctcaacctatatttcatttttttccatggccaaatattccccgtttatccatgtgtccattgacggccatctatgttgcttcttcggctattataaatctgctgatacaaacattagtgtacataaaaaaaaaaa

SEQ ID NO: 582780 - DNA, 4752 bp, Homo sapiens
gcaggacacagccctgccccacagccaagcccagcagagtggccccactggccagccgagccagcccccaggcacagccaccacgccactggagggtgacggcctctccgcgcccaccgaggttggcgacagccccctgcaggcccaggctttgggagaggcaggagtggccacaggaagtgaggctcagagcagcccgcaattccaggaccacacggaaggggaggaccaggacgcttccatcccctctgggggcagaggcctgtcccaggaggggaccggtccccccacctctgctggtgaaggccattctaggacagaactgcagaccaccgagcaacaggcaggggcctcagcctctatggcagttgatgctgtagctgagccagccaatgcagttaaaggggccgggaaggaaatgaaagagaagacccagagaatgaaacagccaccagcaaccactcctcctttcaaaacacactgccaggaagctgagaccaagaccaaggacgagatggctgctgctgaagaaaaagtcggtaagaatgaacaaggggagcctgaagacctcaagaagccagaggggaagaacagaagtgcagctgctgtgaaaaacgagaaggagcaaaaaaaccaggaagcagatgtccaggaagtgaaggcaagcacgctgagcccgggtggaggagtcaccgtgttcttccacgccatcatctctcttcatttcccattcaatcctgacctccataaagtcttcatcagaggaggagaagaatttggggagtcaaaatgggacagcaatatctgtgagctgcactacaccagagacttgggtcatgaccgcgttcttgttgaaggcattgtctgcatttccaagaagcacctagataaatacattccttacaagtacgtcatttataatggggaatcttttgagtatgagttcatttacaagcaccagcagaagaagggcgagtacgtcaaccgctgtctgttcataaaatcttcacttctgggctcaggagactggcatcagtactatgacatagtttatatgaagcctcatgggagactccagaaagtcatgaaccacatcacagacgggccgaggaaggacctggcgaaggggaagcagattgcgctgcgctcatgctggacagcaccttcagcatcctgcagacctgggacaccatcaacctgaacagcttcttcacccagttcgagcagttttgctttgtcctgcaacagcctatgatttatgaaggacaggcacagctgtggaccgatttgcagtacagggagaaagaggtgaagagatacctgtggcaacatctgaaaaaacacgtggtaccattgccggacggaaaaagcacggactttttgcctgtggactgcccagtgaggagtaaactgaaaacaggcctgattgtcctttttgtagtggaaaaaattgagcttttattagaaggcagcctggactggttgtgtcacctcctaacctcagatgccagctcaccagatgagtttcaccgtgacctaagccacatccttgggatacctcagagctggcggctgtacctggtgaacctgtgccaaagatgcatggacacaaggacgtacacctggctgggcgccctgcctgtcctgcactgctgtatggagctggccccgcggcacaaggatgcctggagacagcctgaggacacctgggccgctctggagggactctccttctcaccgttccgggaacaaatgctagatacgagttccctacttcagtttatgagagagaagcagcatttgctgagcatagacgagcctctcttccggtcctggtttagtctgctacctctgagtcacctggttatgtatatggaaaacttcattgagcacctgggtcgttttcctgctcatatcctggactgtctttcagggatttactaccggcttccgggacttgagcaagtcttgaatacgcaggatgttcaggatgttcagaacgttcagaacattttagaaatgctgttgcgactcctggacacttaccgggacaagattcccgaggaggccttgtcaccatcctacctgactgtgtgtctgaaactgcatgaagccatctgcagcagcacaaagctacttaagttttacgagctgccagccttatctgccgagattgtctgcagaatgattagacttctatctctggtggattctgcaggacagagagatgaaactggaaataattcagtccaaacagtcttccaagggacccttgctgctacgaaaaggtggctccgagaagtttttacaaagaacatgctcacatcttcaggtgcctcattcacatacgtcaaggaaattgaggtctggaggcggctggtggaaatccaattccccgcggagcatggctggaaggagtcgttgctgggagacatggaatggaggctcacaaaggaggaacccctctcccagatcactgcctactgcaatagttgctgggacaccaaaggcttagaggacagtgtggccaagaccttcgagaaatgcatcattgaagccgtgagctcagcctgccaggtgaacaatctctcctcctgggaaacggattcgggctcacagctgtgttctgccatgacccagctaagggctatgaagcacccgctgggtctcagctcctccgctaactcagagattgggaagtgggcaccctcctccctcgccaagggcaatggcgctgaaatctagttctctccggattcctcagtgtgctgcacagtccctgctgctcgcaccatcctgcatgtgttccatatggaatcacggccgtgcgcgtgtggcacaagtcacacgggcttgcaggccgttcctcagatggccctgtcatcactgtggctgctggtttgattgattgttaacacttgctcagtaggtgtgcgggaagagactccaaaggttgacagaacatttatggaagcaaaatatgtgaaatggaaaattgtatcaatttatttagctcttttcggcaaaggggaagagattgtgcccccctgtctcccaggaacagtctcgcaggcaatgccacatgaggaagctccctgctggccatggctgccctgctcacatttcctaattggacacttaacccctgtacaagcacagccttgcggccacaggggaagtccagaaacattgaggtcattgaattccggggaccaaggggttctaattttttaagtgactgatacctttgataaggttttcctttccctttttcgttaactctttgttgagatattgttcgtatgccatacggtacatctgtcaaaagttccagttcagcaggttttggggtagtcacagatatgtacagtcatcaccacagttaatgacagagcattttcatcacttcaaagagaaacccggcccctttagccatcatcctcctcccctctagtcacccactcccctctgcaggcataaacaattgctgaacataaacaactgcttctgtggctttctctgttctgactgtcatatgaatggaatcatatcatatgtggccttttgggtatggcttatttcactgagcataatgtttttttgttgttggtggtggtggttgtttgttgtttttgggaccgagtttcactctttttgcccaggctggagtgcagtggtgcgatcctggcttaccgcaaccactgcctcccgggttcaagtgattctcctgcctcagcctcccaagtgctggaattacagctactttttgtttaaagagtcttttaattgtttaaagaacaatgtgccgccacactcggttccttttgtatttttagaagagacagggtttctccatgttggtcaggctggtctcgaactcccgacctcaggtgatccacccaccttggcctcccgaagtgccgagattgcaggtgtgagccaccgcgcccggccgagcataatgttttgaaagaccgctcaggctggacacggttgctcacgcctgtagtcacggcactttgggagcccaggagttcaagacaagcctgggtaacagagtaagaccctgtctctataaaaactaaaaaataaacaaaaaaaattagccaggcatggccgggcacacctgtggtcccagctacttgggaggctgaggtgggaggctcccttgggcccagaaggtcaaggcagcggtgagccatgatcgcaccactgcacttcaacctgggggacagagcaagaccctgtctcaaaaagcaataacaacaaaagtccatccatattgtagcttgtgtccgtttacgttaagtattccttacccaaaatgcttgagaccagaagtgttttggatttcagatgttttcaaattttggaatatttgcatttacataatgagatgtcttccagatgggacccagagtctaaccacaaaattcacttgtttcatatacatcttatacacatagcctgaaggtaattttatacaatatttttaacaattttgtgcatgagacaaagtttgtattaagtatttgtatgttgaatttttcacttgtggcatcattatactcaaaaagtttggattttgtagtattttggatttggggattaggaatgctcaacctatatttcatttttttccatggccaaatattccccgtttatccatgtgtccattgacggccatctatgttgcttcttcggctattataaatctgctgatacaaacattagtgtacataaaaaaaaaaa

SEQ ID NO: 582781 - DNA, 1048 bp, Homo sapiens
gaacccctcctttcgccttccccgctcctcacctccgctcgagcacggcgcgcgcatacggtcccagccaccgtaacactacaggctgttaccccccgccctccacctacacctggcggctcaggcagacggaggaggactgaggcacgaaggcgaatcgccgcacaccctgcatgtcgacggcgacactaccagattaggacagcggagaagcacgatcagcactggtgggacccgaagaatccagagacccacgaaaaagcaccggacagaccctaaaaaacataaagaccaccagatgggcggcaaagaacaactacagactcgcgtaacatgataaggtagtaggtgtaagcaggcacgaaggaacgaacggacagaaaaagacgcacagaagacccccgacagactgaagagaccggggaccgccgcaaccatgacaccgataggcagcgacaacacaagaaaggggcgcaaccacctgggcataggcgaatctacgcgaccacaaagagcgagaatgaacacctaaagcgattcaagacgacacacaaaacatagaacaccacatgaaacccacaatggaaatagactcgcaccagataaaaggacgaccacaaccatatcgcgcaagggaccgaccaaaagaagcagaaacaacaatggacctcggcacacagaacgagccgaaggaacactgcccgagggaaaccgacacaagtgacaccaactcggcaaccaaaggccaacatgacagcaccgacaacccagaaaagcaccacagaaaaacagagaaggaaagcacaaaggacaccaagaacaatgcagagaaaccaccatagagaacataacacatcaactccactgaggacgaaaaccaagaacaaaaagatcaaacgacacaggcaaacaggagagaaaacgaaagagaaacaaccacactaagagcacaaaaacagcaaacgccccaggaaaaaagaacaacgaagggaacaaacaaaacaaagagaacacacacacagaggcacacacataccacagagcagca

SEQ ID NO: 582782 - DNA, 217 bp, Homo sapiens
  misc_feature (78)..(78): n is a, c, g, or t
  misc_feature (202)..(202): n is a, c, g, or t
  misc_feature (213)..(213): n is a, c, g, or t
ggccaagagacagactctggcctggagccttcggaaggcaccggcctgcagaccacttcagacttctgacctccaggnccggaagaggaagcttggtgtggttctaagcggtggcatttgtgatcatttctcaccgcagccacagtagatggaggcaacacccgtgcatgttttgagggatggatgagtgtgtagccatgcncgtggttgganaccc

SEQ ID NO: 582783 - DNA, 2961 bp, Homo sapiens
atgcaggttgactcttgtagagatcccccacggacgacgtagtctggtataatcgctatatctagtcacctggttatgtatatggaaaacttcattgagcacctgggtcgttttcctgctcatatcctggactgtctttcagggatttactaccggcttccgggacttgagcaagtcttgaatacgcaggatgttcaggatgttcagaacgttcagaacattttagaaatgctgttgcgactcctggacacttaccgggacaagattcccgaggaggccttgtcaccatcctacctgactgtgtgtctgaaactgcatgaagccatctgcagcagcacaaagctacttaagttttacgagctgccagccttatctgccgagattgtctgcagaatgattagacttctatctctggtggattctgcaggacagagagatgaaactggaaataattcagtccaaacagtcttccaagggacccttgctgctacgaaaaggtggctccgagaagtttttacaaagaacatgctcacatcttcaggtgcctcattcacatacgtcaaggaaattgaggtctggaggcggctggtggaaatccaattccccgcggagcatggctggaaggagtcgttgctgggagacatggaatggaggctcacaaaggaggaacccctctcccagatcactgcctactgcaatagttgctgggacaccaaaggcttagaggacagtgtggccaagaccttcgagaaatgcatcattgaagccgtgagctcagcctgccaggtgaacaatctctcctcctgggaaacggattcgggctcacagctgtgttctgccatgacccagctaagggctatgaagcacccgctgggtctcagctcctccgctaactcagagattgggaagtgggcaccctcctccctcgccaagggcaatggcgctgaaatctagttctctccggattcctcagtgtgctgcacagtccctgctgctcgcaccatcctgcatgtgttccatatggaatcacggccgtgcgcgtgtggcacaagtcacacgggcttgcaggccgttcctcagatggccctgtcatcactgtggctgctggtttgattgattgttaacacttgctcagtaggtgtgcgggaagagactccaaaggttgacagaacatttatggaagcaaaatatgtgaaatggaaaattgtatcaatttatttagctcttttcggcaaaggggaagagattgtgcccccctgtctcccaggaacagtctcgcaggcaatgccacatgaggaagctccctgctggccatggctgccctgctcacatttcctaattggacacttaacccctgtacaagcacagccttgcggccacaggggaagtccagaaacattgaggtcattgaattccggggaccaaggggttctaattttttaagtgactgatacctttgataaggttttcctttccctttttcgttaactctttgttgagatattgttcgtatgccatacggtacatctgtcaaaagttccagttcagcaggttttggggtagtcacagatatgtacagtcatcaccacagttaatgacagagcattttcatcacttcaaagagaaacccggcccctttagccatcatcctcctcccctctagtcacccactcccctctgcaggcataaacaattgctgaacataaacaactgcttctgtggctttctctgttctgactgtcatatgaatggaatcatatcatatgtggccttttgggtatggcttatttcactgagcataatgtttttttgttgttggtggtggtggttgtttgttgtttttgggaccgagtttcactctttttgcccaggctggagtgcagtggtgcgatcctggcttaccgcaaccactgcctcccgggttcaagtgattctcctgcctcagcctcccaagtgctggaattacagctactttttgtttaaagagtcttttaattgtttaaagaacaatgtgccgccacactcggttccttttgtatttttagaagagacagggtttctccatgttggtcaggctggtctcgaactcccgacctcaggtgatccacccaccttggcctcccgaagtgccgagattgcaggtgtgagccaccgcgcccggccgagcataatgttttgaaagaccgctcaggctggacacggttgctcacgcctgtagtcacggcactttgggagcccaggagttcaagacaagcctgggtaacagagtaagaccctgtctctataaaaactaaaaaataaacaaaaaaaattagccaggcatggccgggcacacctgtggtcccagctacttgggaggctgaggtgggaggctcccttgggcccagaaggtcaaggcagcggtgagccatgatcgcaccactgcacttcaacctgggggacagagcaagaccctgtctcaaaaagcaataacaacaaaagtccatccatattgtagcttgtgtccgtttacgttaagtattccttacccaaaatgcttgagaccagaagtgttttggatttcagatgttttcaaattttggaatatttgcatttacataatgagatgtcttccagatgggacccagagtctaaccacaaaattcacttgtttcatatacatcttatacacatagcctgaaggtaattttatacaatatttttaacaattttgtgcatgagacaaagtttgtattaagtatttgtatgttgaatttttcacttgtggcatcattatactcaaaaagtttggattttgtagtattttggatttggggattaggaatgctcaacctatatttcatttttttccatggccaaatattccccgtttatccatgtgtccattgacggccatctatgttgcttcttcggctattataaatctgctgatacaaacattagtgtacataaaaaaaaaaa

SEQ ID NO: 582784 - DNA, 487 bp, Homo sapiens
ggtgtattgagtggcatgtgatgctgtgatcttccgcccagctgtcgcttatcagtgctatatttatctggaatatagcggctccttttactgttctaaggtgcttgtgctaaggatgaagatcacacattcctcagctcttggtagacttatgggaagctcagctagtggcctgtctccccgatgtggtacttcaggaactctttttcacactcacatcacagtaccatctggagattgtctaagaggcagcctcctgacaccacaccattgcgacccatcggaggactcttcttctcctggtcattccttggtagactactttggaactaacaactaactcaccactgacctgtgattgggtacgactcaccattccatattctcctgtgagtctcacgaagatgcttcatttggtagaacggtgtacgtggtttccattccagcatgaatgtggtcggtcacatggaccactcaatcccgggta

SEQ ID NO: 582785 - DNA, 2914 bp, Homo sapiens
  misc_feature (282)..(282): n is a, c, g, or t
ggaacaggcccgggagtctgcagggcccctctctggggcgtgcttttccccctcagtctcctgggcacagcctggggacctgctcattggcaggacagaggctgcctgggctttcgggggagcacacagatgccgttccctccctccctcttttctcccgtatctcccacgttcagggtgaacccagaaaaccctggggaatggaagtgctttgggaatgtgggctcctgccaaggcctgtggtccctccatcgtagccactccttgagcagcctgtgccancagggaggagaggagggggtgcagcatctcgccgggaacctgagtccacagccgaggatgactgaccctccctcttgtgtgacaacaggattctgcaggacagagagatgaaactggaaataattcagtccaaacagtcttccaagggacccttgctgctacgaaaaggtggctccgagaagtttttacaaagaacatgctcacatcttcaggtgcctcattcacatacgtcaaggaaattgaggtctggaggcggctggtggaaatccaattccccgcggagcatggctggaaggagtcgttgctgggagacatggaatggaggctcacaaaggaggaacccctctcccagatcactgcctactgcaatagttgctgggacaccaaaggcttagaggacagtgtggccaagaccttcgagaaatgcatcattgaagccgtgagctcagcctgccaggtgaacaatctctcctcctgggaaacggattcgggctcacagctgtgttctgccatgacccagctaagggctatgaagcacccgctgggtctcagctcctccgctaactcagagattgggaagtgggcaccctcctccctcgccaagggcaatggcgctgaaatctagttctctccggattcctcagtgtgctgcacagtccctgctgctcgcaccatcctgcatgtgttccatatggaatcacggccgtgcgcgtgtggcacaagtcacacgggcttgcaggccgttcctcagatggccctgtcatcactgtggctgctggtttgattgattgttaacacttgctcagtaggtgtgcgggaagagactccaaaggttgacagaacatttatggaagcaaaatatgtgaaatggaaaattgtatcaatttatttagctcttttcggcaaaggggaagagattgtgcccccctgtctcccaggaacagtctcgcaggcaatgccacatgaggaagctccctgctggccatggctgccctgctcacatttcctaattggacacttaacccctgtacaagcacagccttgcggccacaggggaagtccagaaacattgaggtcattgaattccggggaccaaggggttctaattttttaagtgactgatacctttgataaggttttcctttccctttttcgttaactctttgttgagatattgttcgtatgccatacggtacatctgtcaaaagttccagttcagcaggttttggggtagtcacagatatgtacagtcatcaccacagttaatgacagagcattttcatcacttcaaagagaaacccggcccctttagccatcatcctcctcccctctagtcacccactcccctctgcaggcataaacaattgctgaacataaacaactgcttctgtggctttctctgttctgactgtcatatgaatggaatcatatcatatgtggccttttgggtatggcttatttcactgagcataatgtttttttgttgttggtggtggtggttgtttgttgtttttgggaccgagtttcactctttttgcccaggctggagtgcagtggtgcgatcctggcttaccgcaaccactgcctcccgggttcaagtgattctcctgcctcagcctcccaagtgctggaattacagctactttttgtttaaagagtcttttaattgtttaaagaacaatgtgccgccacactcggttccttttgtatttttagaagagacagggtttctccatgttggtcaggctggtctcgaactcccgacctcaggtgatccacccaccttggcctcccgaagtgccgagattgcaggtgtgagccaccgcgcccggccgagcataatgttttgaaagaccgctcaggctggacacggttgctcacgcctgtagtcacggcactttgggagcccaggagttcaagacaagcctgggtaacagagtaagaccctgtctctataaaaactaaaaaataaacaaaaaaaattagccaggcatggccgggcacacctgtggtcccagctacttgggaggctgaggtgggaggctcccttgggcccagaaggtcaaggcagcggtgagccatgatcgcaccactgcacttcaacctgggggacagagcaagaccctgtctcaaaaagcaataacaacaaaagtccatccatattgtagcttgtgtccgtttacgttaagtattccttacccaaaatgcttgagaccagaagtgttttggatttcagatgttttcaaattttggaatatttgcatttacataatgagatgtcttccagatgggacccagagtctaaccacaaaattcacttgtttcatatacatcttatacacatagcctgaaggtaattttatacaatatttttaacaattttgtgcatgagacaaagtttgtattaagtatttgtatgttgaatttttcacttgtggcatcattatactcaaaaagtttggattttgtagtattttggatttggggattaggaatgctcaacctatatttcatttttttccatggccaaatattccccgtttatccatgtgtccattgacggccatctatgttgcttcttcggctattataaatctgctgatacaaacattagtgtacataaaaaaaaaaa

SEQ ID NO: 582786 - DNA, 151 bp, Homo sapiens
acggaccgtactgctgcgtaactagagggagtgacggatggcgcccccacaccacgccgctcagcgggataggcttcttggcggacttcggagtgggaagcggggaatgtctacgtgcgtatgcacgtggcactctctacgtgtccggcca

SEQ ID NO: 582787 - DNA, 346 bp, Homo sapiens
  misc_feature (70)..(70): n is a, c, g, or t
ttcagcccaaaggccgtgttggttcgctggttgcaggggttacaaaggttgccccgcgaaaagtacttgntttgggctttcgggcaggggcccagccagggcccccccccctttgttgtggccagcattttgggggtggcagccgaggattggaagaagggggcccccttttcttgcttggtgggccccggggccctgccgttggctttcccccagaagccctttggccgcttggggggtaaacccccccatgtcaatgtttttgttgtcatggcggaggtggccggcccctgtttttgagccgcccgcctgtccccccccctgaataaactccttgttcccccca

SEQ ID NO: 582788 - DNA, 4705 bp, Homo sapiens
  misc_feature (4382)..(4383): n is a, c, g, or t
gcaggacacagccctgccccacagccaagcccagcagagtggccccactggccagccgagccagcccccaggcacagccaccacgccactggagggtgacggcctctccgcgcccaccgaggttggcgacagccccctgcaggcccaggctttgggagaggcaggagtggccacaggaagtgaggctcagagcagcccgcaattccaggaccacacggaaggggaggaccaggacgcttccatcccctctgggggcagaggcctgtcccaggaggggaccggtccccccacctctgctggtgaaggccattctaggactgaagatgctgcccaggagctcctgttgcctgagtcaaaaggaggcagctctgagcccgggacagaactgcagaccaccgagcaacaggcaggggcctcagcctctatggcagttgatgctgtagctgagccagccaatgcagttaaaggggccgggaaggaaatgaaagagaagacccagagaatgaaacagccaccagcaaccactcctcctttcaaaacacactgccaggaagctgagaccaagaccaaggacgagatggctgctgctgaagaaaaagtcggtaagaatgaacaaggggagcctgaagacctcaagaagccagaggggaagaacagaagtgcagctgctgtgaaaaacgagaaggagcaaaaaaaccaggaagcagatgtccaggaagtgaaggcaagcacgctgagcccgggtggaggagtcaccgtgttcttccacgccatcatctctcttcatttcccattcaatcctgacctccataaagtcttcatcagaggaggagaagaatttggggagtcaaaatgggacagcaatatctgtgagctgcactacaccagagacttgggtcatgaccgcgttcttgttgaaggcattgtctgcatttccaagaagcacctagataaatacattccttacaagtacgtcatttataatggggaatcttttgagtatgagttcatttacaagcaccagcagaagaagggcgagtacgtcaaccgctgtctgttcataaaatcttcacttctgggctcaggagactggcatcagtactatgacatagtttatatgaagcctcatgggagactccagaaagtcatgaaccacatcacagacgggccgaggaaggacctggcgaaggggaagcagattgcgctgcgctcatgctggacagcaccttcagcatcctgcagacctgggacaccatcaacctgaacagcttcttcacccagttcgagcagttttgctttgtcctgcaacagcctatgatttatgaaggacaggcacagctgtggaccgatttgcagtacagggagaaagaggtgaagagatacctgtggcaacatctgaaaaaacacgtggtaccattgccggacggaaaaagcacggactttttgcctgtggactgcccagtgaggagtaaactgaaaacaggcctgattgtcctttttgtagtggaaaaaattgagcttttattagaaggcagcctggactggttgtgtcacctcctaacctcagatgccagctcaccagatgagtttcaccgtgacctaagccacatccttgggatacctcagagctggcggctgtacctggtgaacctgtgccaaagatgcatggacacaaggacgtacacctggctgggcgccctgcctgtcctgcactgctgtatggagctggccccgcggcacaaggatgcctggagacagcctgaggacacctgggccgctctggagggactctccttctcaccgttccgggaacaaatgctagatacgagttccctacttcagtttatgagagagaagcagcatttgctgagcatagacgagcctctcttccggtcctggtttagtctgctacctctgagtcacctggttatgtatatggaaaacttcattgagcacctgggtcgttttcctgctcatatcctggactgtctttcagggatttactaccggcttccgggacttgagcaagtcttgaatacgcaggatgttcaggatgttcagaacgttcagaacattttagaaatgctgttgcgactcctggacacttaccgggacaagattcccgaggaggccttgtcaccatcctacctgactgtgtgtctgaaactgcatgaagccatctgcagcagcacaaagctacttaagttttacgagctgccagccttatctgccgagattgtctgcagaatgattagacttctatctctggtggattctgcaggacagagagatgaaactggaaataattcagtccaaacagtcttccaagggacccttgctgctacgaaaaggtggctccgagaagtttttacaaagaacatgctcacatcttcaggtgcctcattcacatacgtcaaggaaattgaggtctggaggcggctggtggaaatccaattccccgcggagcatggctggaaggagtcgttgctgggagacatggaatggaggctcacaaaggaggaacccctctcccagatcactgcctactgcaatagttgctgggacaccaaaggcttagaggacagtgtggccaagaccttcgagaaatgcatcattgaagccgtgagctcagcctgccagtctcagaccagtatccttcaggggttctcttactctgatttgcggaaatttggcatcgtcttgtctgctgtgatcactaagtcctggcctaggaccgcggacaacttcgatgacattttaaagcatctgctcacgttggcagatgtcaagcacgtcttcagattgtgtggaaccgacgagaaaatactagcaaatgtcacagaggatgccaagaggctgatagctgttgccgactctgtgttgacgaaagttgttggtgacctcctaagtggcacgattttagttggacaactggagctgattataaagcacaagaatcagtttcttgacatctggcaactgagggaaaaaagtctttcaccccaggatgaacaatgtgctgtggaggaagcactggattggagaagggaggaactgttacttctaaagaaagagaaaagatgtgttgatagtctcctgaagatgtgtgggaacgtgaaacatctgatacaagtggactttggagtgcttgcagtaagacactcacaagacctcagcagtaaaagattaaatgacaccatgacagtgagactgtccacctcctcgaactcgcagagggcaacgcattaccacctgagctcccaggtccaagaaatggctgggaagatagacttgctcagagacagccacatcttccagctcttctggcgggaagccgcagagccgctgagtgagcctaaggaggaccaggaagccgcagagttgctgagtgagcccgaagaagaatcagaaaggcacatccttgagcttcaagaggtgtatgactatttgtatcagccttcttacagaaagttcattaagttgcaccaggatctaaagtcaggagaggtcacccttgcagagattgatgtcatcttcaaggactttgtgaataaatacacggacctggattcagaacttaagatcatgtgcaccgtggaccaccagggccaaagagattggatcaaggaccgagtggaacagatcaaggaataccatcacctgcaccaggctgtccacgcagccaaggtcatcttgcaggtcaaagagagcctgggactgaacggtgacttcagtgttctcaacactttactaaattttactgataacttcgacgactttcgccgtgaaacactggaccagatcaaccaggagctcatccaggccaaaaagctgctccaggacatcagcgaggcccggtgcaaggggctgcaggctctgtccctgagaaaggagttcatctgctgggtccgggaggctcttggaggcatcaatgagctgaaggtgtttgtggacctggcctccatctcagcgggggagaatgacattgatgtggaccgggtggcctgcttccatgacgctgtgcagggctacgcatccctgctatttaagctggaccccagcgtggacttcagtgcattcatgaagcatctgaaaaagctgtggaaggctctggataaggaccagtacctgcccaggaaactgtgtgactccgccaggaacttggaatggctgaagactgtgaatgagagtcatgggtctgtggaacgctcatccctgaccctggccacggccatcaaccaaagaggcatctatgtgatccaggcacccaaaggtggccaaaagatttccccagacacggttctgcacttgatccttcctgagagccctggcagccacgaggagtcacgagagtactctttagaggaggtgaggagcttttnnacaagttgatgctgatgtctggcaagaaggatcgtaacaacacggaagtggagaggttttcagaggtcttctgcagtgtgcagaggctcagccaggccttcatcgacctgcactctgctgggaatatgctgttcaggacgtggatcccatggcctactgctcccccaagcagagtgtgtccctccaaatggactttggcttggacctggtgacggagcttaaagaaggtggagatgtcactgagctgctggcagccctctgcaggcagatggagcacttccctgacagctggaagagatttcgtacccagcccacggcataa

SEQ ID NO: 582789 - DNA, 110 bp, Homo sapiens
caggtacttcacagggattactgtgtgagctccgcccctgccagaagcattacgtgtgtgagctctcgcccccgtgccagaaagcattactgtgtgagctccgccccctg

SEQ ID NO: 582790 - DNA, 231 bp, Homo sapiens
tgctaatggagcacgaagacgacccgatgtggacgagcctttagagactcccttgacatattcttggacgggagcccactttctcagagcaaggcggcctttgaaggatcttgttcttcttgccggagaaggcaaacccgctttgagttgaagaggaaagacaggaacagactaagaggatgtttgagctggtgcccagaagcagcaggagcttgaagaaagagaggaacg

SEQ ID NO: 582791 - DNA, 2031 bp, Homo sapiens
  misc_feature (2)..(2): n is a, c, g, or t
  misc_feature (10)..(12): n is a, c, g, or t
  misc_feature (14)..(14): n is a, c, g, or t
  misc_feature (17)..(20): n is a, c, g, or t
  misc_feature (22)..(22): n is a, c, g, or t
  misc_feature (28)..(29): n is a, c, g, or t
  misc_feature (33)..(34): n is a, c, g, or t
tngctgggannncnggnnnncnccaccnngccnngctaatttttgtatttttagtagagacagggttttgtcatgttggccaggctgctcatgaactcctgacctcaggtgatccgcccatctcagcgtcccaacgtgctgggtgggattacaggcatgagccactgcgcccaactagtttatgactttttaaatgcaatttatgttctgtcattggagtggggtttggcaaagagagtaaataggtgcgtgttttcccactgccatctttacccagaagtttatgatgctttctttatcatgaatattggttaacaaggccaagcggggagggaaagacctgtgaactcttcctgagaaagaaatcctagcagctgtgtgctcttgagttcgctcagagaagtgaggagagaaagtcttaggaaagtgaaataaaatggaatcatgattagagctttgacttctgacactttcttttcgcttctaaagtggactttggagtgcttgcagtaagacactcacaagacctcagcagtaaaagattaaatgacaccatgacagtgagactgtccacctcctcgaactcgcagagggcaacgcattaccacctgagctcccaggtccaagaaatggctgggaagatagacttgctcagagacagccacatcttccagctcttctggcgggaagccgcagagccgctgagtgagcctaaggaggaccaggaagccgcagagttgctgagtgagcccgaagaagaatcagaaaggcacatccttgagcttcaagaggtgtatgactatttgtatcagccttcttacagaaagttcattaagttgcaccaggatctaaagtcaggagaggtcacccttgcagagattgatgtcatcttcaaggactttgtgaataaatacacggacctggattcagaacttaagatcatgtgcaccgtggaccaccagggccaaagagattggatcaaggaccgagtggaacagatcaaggaataccatcacctgcaccaggctgtccacgcagccaaggtcatcttgcaggtcaaagagagcctgggactgaacggtgacttcagtgttctcaacactttactaaattttactgataacttcgacgactttcgccgtgaaacactggaccagatcaaccaggagctcatccaggccaaaaagctgctccaggacatcagcgaggcccggtgcaaggggctgcaggctctgtccctgagaaaggagttcatctgctgggtccgggaggctcttggaggcatcaatgagctgaaggtgtttgtggacctggcctccatctcagcgggggagaatgacattgatgtggaccgggtggcctgcttccatgacgctgtgcagggctacgcatccctgctatttaagctggaccccagcgtggacttcagtgcattcatgaagcatctgaaaaagctgtggaaggctctggataaggaccagtacctgcccaggaaactggtgagtcttattctgtctctaatgcagattttgttgaatagagcattgcttagcaacgttagggcagtgactgtggaaatggtggcacacctgtgtggtaggtttgtacacagccgttttcaatgatatttaaaaagcttttcttcataaatggaaattcaccatcttgttacctagaaagcaggatacaaaattacatgacacatagtaatctctaaggtgcaaaacacacgtggaaaaaagacagaagggaaatatgctgaaacgttgccaggagttttctctgaatggttgtaattgtcattttattctgttactttttgttattttctataattgatagaattttttatcagaaaaaagtaaacatttaaaattagccaggcatggtggtgtgcgcctgtaatcccagctactctggaggctgagacagaattgcttgaacccgggaggcagagatagcagtgaactgagatcacaccactgtactccagcctgagtgacaaagtgagactctgtctcaaaaaaaaaa

SEQ ID NO: 582792 - DNA, 511 bp, Homo sapiens
gtcacagagcagcacagactgagtctgacagaaactctctatacaaatagcacaccttgtcccagctaaaaccctgggccctgggaggacaagacatccctcctctaacccctcgtcactagcccatttgtaaaaaccttgacaggccgggcacggtggctcacacctgtaatcccagcactttgggaggctgaggcaggcgcatcacctgaggtcaggagatcgagaccatcctggccaacatggtgaaaccccatctctactaaaaatacaaaacttagctgagcgtggtggcgtgtgcctggagtcccaactactcaagaggctgaggcaggagaatcacttgcccgggaggtggaggttgcagtgggccaagatcagcccactgcactgcagcctggcgacagaaaaaaaagaaaccttgacatctttactacaacttagcaacccgctcaggccccctctgcaacggagagctcttcttcctttttgcttattaaacttctgctcc

SEQ ID NO: 582793 - DNA, 559 bp, Homo sapiens
tagacaagtccctgaaactgtaagagctgataaaaacaagagcttagcagccactaggcaaagggggtaggggaagcaaacacagagtttcactctgttgcctaggctggagtgcagtggtgtgatctcggctcattgcagcctccaccttctgggttcaagcgattctcctgcctcagccccccaagtagctgggatcacaggcgtgcaccaccacacctgcccaatttttgtatttttggtagagacggggtttcgccacgttgtccaggctggtctcgaactcctggactcaagcaatctgtgtgcctcggcctcccacagtgctaggattataggcgtgaaccaccacacctggcccttgtaccctatgttctaaaagaaaggccttgacttgtctttggcatgaaatgaagaagaagaggaaagttaacatattccctcatggagggactggtcccagtatttacgaaatgctgcatggaggagtgtggtgcttacaattgggcagctccatggcatggcttagagacaaggtagagccgagggggatcctcta

SEQ ID NO: 582794 - DNA, 212 bp, Homo sapiens
gattctagaggatcccgtcatctaccactcctctatctgggacattctcattcattcagatatctcatggattgtctctctatctgggaccgtactctattcatacagtagctacttgtgattgtctgtctatctgggccattctcattcattcagtagctgatggattgtctagtatgtgctgaggagagagggaatagatgcacattgat

SEQ ID NO: 582795 - DNA, 227 bp, Homo sapiens
gatctccaggcgctgttggaggttggctgggttgctatgtatcctttggacctcatgcctggaaaattggtctgcgatatgtagatgttattgcatcagaacagggctttggtctgatggaccttgcactcacagtgatgtgagacagtgccatgccttatcaatgctgcattgcagctccactgcatttcagtcctacaatgtttcctgcaccatgttgtcctacc

SEQ ID NO: 582796 - DNA, 214 bp, Homo sapiens
agcaacaaactgtactaggatactaggaggagtttcagaacagcgatggagaaattcaataatatgcaattaacagaggaactgatacgtcctgagagaaacacattggttgtgagttttgtggacctggattcgcgaccgaacctggattcgcgaccgaacctggattcgcgaccgaacctggattcgcgaccgaacctggattcgcgaccga

SEQ ID NO: 582797 - DNA, 580 bp, Homo sapiens
ggcggacagtaccaagaccagtcttctctgatgccggactgtgtgctggcagtcccatgctgcccagcctgaggccacagtcccaagaagagtgggcaagaaagtggtggtagcaagctcaagccccaagagttcagggaggaaaaaacaggggctagttgaatttagccttgggaaaatccatctccggatgttgatcccatgaacttcttcaggaatctcccgtttcttctggacgtctgaagttggcaagcccatggacttctgtcgctggtcatacatcatcttttcccacccatgctggcgagtctcactgtccaggtctgacagcttggaaattctcagggttaatcttctatggtgttgatctcagggtcactggacaccaagcggctccaccactccatcttattgatcttctccagatgcacagtcaccaccttgccgtcctcaatgagccacgagctctcctccaccttcacttcattgtagagctccccatcaatgatcgctggctgccccttgagccccacccggaggtgccgccgctggatgtcaccaccatgtccttccctttcag

SEQ ID NO: 582798 - DNA, 320 bp, Homo sapiens
  misc_feature (146)..(146): n is a, c, g, or t
  misc_feature (263)..(264): n is a, c, g, or t
catcaaaaactggattcacaggaacctgggagacaaacacctgacaggaaggcctgaggttgcccgtcaacaaaaatcaggcatgttctgtgaaagtcagcatggcttccatctcagacatccttttctgtgcaaaaggaaaaagnttaccagaagtattggtacccaacacaaaaaaggaatttttgtgtgtttatggtccgtggacatttctctcctaacatctattgaacacctatttataaatattctattaaacttgnngggtgtggtaataattctatttcgcaactaaaaaagagtacttaagaatactccta

SEQ ID NO: 582799 - DNA, 695 bp, Homo sapiens
  misc_feature (155)..(155): n is a, c, g, or t
ttagcaggtctttaaagccagagcccaaaaatgcctgttgtattttgggaaacctccaatgttggatcctttagcacctaggaaccattacttcaccggggcatcctgcacctgtacactgttagctcccacatagtaagcggtgtatattacantcagtgtctgtaaattggtagttagatcaactttcacagaaaatagtctttaacgttcgattgtgtagagatatatatcttgcgtttaaaaaaatgacatacagtgtgtgtgacactacccagactttattcagcatctgtattcagtatcaaatgttttgtattttcgaggctgaaaagatatttgtaactttatcatatgccacataccaagacttcaacttttaaacagaattgaaggacatctcccatttgcatgtgcctgccatatatttaaaaaggttttcctgagatccaccccccggcctcagggaggatccacatgaaatgatcctcctgctagatttgatgttatcgcggtatagcctggtatatgtaatgtaaaaattttttcatttcatgttagatggataatgtgctcatggggtaaacaggtttgaaggaggcatatctccatgtgtttggagaaagccattcttcatgcctatgaactgccaaaggatccagactgggaatatttcctggatttaaataagcctt

SEQ ID NO: 582800 - DNA, 658 bp, Homo sapiens
ctagcagatcctacgatgacacttcagctgggtgacagagagagactccgtctcaaaaaaaaaagttgggaggaaattctgtctattcaacttggaaaatctcgacggtcgggctcatataagcccccaccctcatctgtcctgagtctctgtttccttggaaaccaggtgggaggcatggagtgatcacaaggacctagatttgaattaatcctggctctggtctcctgggatgggggacctaggggcggttacctctgcttctctcggccttggtttcctcctctgtacaatgggtttaaccctgcagctataaaagtcctgttgagcaccatgcagggtgaactggtgatttggtggtggaaccaattgccatgctttgaggctgatgcctgaccccaggccctgtacccacggctctctctcctgcaaccccacagcctcactcagggctgtcactgagccagtgctgaagggctcagcaccaggtcatgctgtgccttcaccttggctcagaggaatatttattggcctgggccttgggagcagttgcttgacctctctgaaactcggtttccctatctgtgcacacagtataataggagtaatagagccttcctccttcatcaaatatctgaagtgcaacgtgggtacgagc

SEQ ID NO: 582801 - DNA, 457 bp, Homo sapiens
ctctgtaatgcaagtgtcgggattacaggtgtgagccaccatgcccggctggatgtatatatttgtaaagaaacctaagccgtaggtttgaaaccaaagtttgcaaccttaacagaagccctctacttttcctgtttttgtgagcttgtaagctctcttggccaccagcaaacacaagataaaagggagagactttgtctgggtgacaggcatccctggccgctgtctcctgatgtgtgtgcttctctaatgtcgatggctctccacccgtccatcctccagaagccatctcgtaggagtgaccagcagggatcttcccacagtcccctctgtgcacacctgtgctgagccggccagactgagaacccatgtccagtgctttctgaggcccagctcctattctcagcatcctgcacaaagctgggtaccagttagtccgtttccttccaacaggcca

SEQ ID NO: 582802 - DNA, 183 bp, Homo sapiens
gatcacgcgcgtcataatcatacccttatctgcttcctagtcctgtatgcccttccctaacactcacaacaaaactaactaatactaacatctcagacgctcaggaaatagaaaccgtctggactatcctgcccgccaatcatcctagatcctcacacagatactcccagactacacattctt

SEQ ID NO: 582803 - DNA, 529 bp, Homo sapiens
acatcgttctgtaactgattccagagttatacacgataccaaaagtctctgggacacagctaaagcactggttcaaagggaaatcgatagtgctacatgcccacatcaaaaggttagaaagatctcaaattaacaacctaacaccactcctagaggaactagagaaacaagagcaaaccattcccaaagctaacagaatctcaagaaataaccaaaatcagagctgaactgaagaaactgagtagcaaaaggccatacaaaagatcaagaaatcccacagttggttttttaaaacaacaaagattattagaccactagctagactaataaaggaaacaaaaaaaggcagaaaatcgatataattacaatcagaatgacaaaaagggccttcaccatgggccccacagaattcaaaaacccttcagagactattatgaccccctctatgcacacaaattaaaaaccctagaaaacttagactgggccaaattctggagaacattgcacctcccaagattgccccaggagg

SEQ ID NO: 582804 - DNA, 209 bp, Homo sapiens
tgtgtgtgtgtatatatcagacagcgggaactccaaaagaggggaaggtgggaggtgggtgagggttgaaaaactacctactaggtacaatgttcagttgatgggtaggctaaaagcccagatttcaccaatacacaatatatccctgtaagaaatctgcatctgtaactcccatatctatttttaaaaagagggttacatatcacggt

SEQ ID NO: 582805 - DNA, 1989 bp, Homo sapiens
cagcctcagaccctgccacccccacccacatgccccagatcctcagccccaggtcacttactctctgcttctcaatgaacattcccgtccttctttctgcctgagcctgtacctcttcagggttagctcaggtccctactatccccgtctatgtcccactgtggtgtccttctctccaaaggcctagatgcatgcaggcccatcctggttccactctgagcctggcgcctgacgccagcgctgtgtgccagccttctaccccagtgagaacagattactctgatgtgctggcactcttctgtgattcctctatcggagggtgcagaatacacctaccactcagacgcttcccgggtttctccaggcccttggccatggatggggatggcgtcatccgtctgcacagagcaggcgtagacccaggctatactagagcagagtgcacgagaacaacagtaacctaggaccctgagtaacgctgaacaccctacactggtggtggcagctggccaagagacctgctggaagtaccagggacaccgtgaataggtctctgccagcaaaggcgagactcgacaccagcagtgctcaccggcgacgcgccagaaacctcccacacaagagagatcccagaacccacagcacgcacatgacgatgcgagtgcatgacaccatctgaccaccgccactaaagagagggaccaaccggcgagcaacacgccaacaagccacctatcaacacacaagatgcacagagcacccaacacaaacacgtacaccgaccctagaaagcactcacacacacacgcccccacggcgacaataatagccaacagagttccgccagtgttacggacgagtcacatccaaatgccagcacaaaaacatccagtgcgactgagacaacaacagcatggaaaaacacacgacacaacagaaaccacagcagacacaacaccagatagccacacaagactcaccagagcaccaacccaaccaacaaaccacacaacaacacccgatataatcaccaacacacaaccaacaaccaacaaacaccaccgacaaacgaaaacaacacaccacacacaacaccacgacacacccaccacgaagcaggcaggccaagccacgcaccgcgcaccacgaggaccgagatacggacagagacaacagtcagaagagaagagacgacgaaccacagctacgcaccgtacacgaccttgacggcacgtccgagcacgcgagcgccgcctgcagacacggagagatccgaccgatacggtgagcggggactgacgaccgcacagtgagcgcgcggcgacggagcgaacaacacaggagtccgaccaagcacagcgcagacacgaccagcgaaagacgcacagcacaccgccgacacacacccagaaccgcgaaccgaagcaaacgacacaccgcacccaccacaagacccaaacgcacgcatcgcaacaaacatgagactacctccatacgcgacctgcgcccgccccgtcgggaggacacagcctccggcggagagcgacaagcgagagaccacaccagcccacacacaccgaccatacaccaacgaccacaacgaaccgctcgtgactgccgaacacaagagccgagccgacagcactaccacaacagacaccagcgcctgcaccggccggcccacacgagtgacacccgcagctgaacgcaacacacaccccaagcacacaccgcccagacaccacacgagaacgagcttagcgaaaagacaacgaacacaaatacgcaaaccagcgcaaacacacaaacgactcctaccatcgaagctgcacagagcccgcgacttcggacgcagagaccgcagtaaacagatcgcccgaaccaccagacagaagcagtcagaaacacagacacgagcaacaaacaggcggagagcgcccagactgaacgacacgcagcacgaggcaacagtagagcacagacaaccac

SEQ ID NO: 582806 - DNA, 274 bp, Homo sapiens
tgtagaggtagcaatggatttaattggcccagtgaaggtaccgggtgatagtactatttcagatgaagtttgattatgccctacagacctggctggtcaaggatttgatatacacatattggcttgggattcgagctttcttttttatttaaatcacaaaatttatcatatatattatatatatccatatcatacatagctatatctgtatcatatattgggtatgtttcaaggcatttttttcgcatgagcgcagctgatgcgataaattgac

SEQ ID NO: 582807 - DNA, 332 bp, Homo sapiens
tgagcagcaacacacaggcttccaggaaaccagtgttctgatgaaactaggactgaggagcaaacgaacaaagcagcagtacagcggtgaagataggaaaagagtccaggagccagtacgatcaggcgagggaatctcggaagcagagacagagactgctaacaatatggtgactgacatctagtgaaaaaggatcccagagaaggaacgcgagtgcaatttggtgaacaacagcagcatacaggattccaggaaccagtgtttgatgacgctaggactgaggagcaagcgagcaagcagcagttcgtggtgaacctaggaaaagagtccag

SEQ ID NO: 582808 - DNA, 351 bp, Homo sapiens
  misc_feature (18)..(18): n is a, c, g, or t
  misc_feature (91)..(91): n is a, c, g, or t
  misc_feature (163)..(163): n is a, c, g, or t
  misc_feature (230)..(230): n is a, c, g, or t
  misc_feature (308)..(308): n is a, c, g, or t
agacggggtctcactctntcgcccaggctggagtgcagtggcgcaatctcagctcaccgcaacctccgcctcccaggttaaaacgactctnatgcctcaggctcccgagcagctgggaccacaggcacatgccatcatgcccggccaaccttctgtacttttnagtagagacggggttttactgtgccacacaggctggtcccgaactcccgacctcaggcgatcagctncctcagcctctcaaagtgctgggatcacagacgtaaaccaccatgcggggccccagtcttttcttcagagggctcctnagcacccccaaccccaaacctgaggcctgtgagagtctatccg

SEQ ID NO: 582809 - DNA, 1504 bp, Homo sapiens
gcatataccatctcacttctaggaatactagtgtatcgctcacacctcatatcctccctagtatggctagaaggagtaatactatcggctgttcataatagactactctcataaccctcaagcacccactccctcttagccaatatagtgacctatggccatgactagatgctctctagtcgcgactctggctgaaatgcaatgctggtgggtcatagacctcatactaagtacttcaatgcgtacgcgaacagagtatggtgcatcatgaacttacgctcatcaattaaactctgagaagcctcactgcacaatgggctgataaacctcacagtcgtacccaaaacaatataatcatttatctaactcatctgacctatgcacttctcccataaatacactagatcaatttgagatcatacagcgagacggcccgagcaagcacgtgaatctatgtaagcacatcaagtcctcaccttactaattttatgtctagaggcaaaatttctaagcaaaacaactccgtgattttcagcctgggtatcacccctaaaactattttctcctttcccgtataccacccttagcaaaggccgttccttccttattatacgtaaaagggaggcttagatcatcctttacactctcatcaagcaaatctaatgtggcattagtcagaacgccccacagtgtagtacctaagtggcaacctacctaatcagggcaccgatataacgctttagcatcctgttagttattaatctcatggccgtatccaaatctttccttcataattcattataccagagtaccaggacgcatgagtgggaaatcaccataattctaattatacatagcaatgcggaaaaagccatcaaagtatactagccctatagttttgggccctcagtcactggagccgggagtgaaaggcccaacataggtatagaacagggccggcgtaaagcgccgggcacaatacggttacggcattgcgaagcgatcacagagtacgggaccccctatcacacgggagatcgcaaggcgaataatggtagcagactatggaacaaacaaaccaaaggggggcagaacaacagatgcccacaagcgccaaaccccagaggtgcccacgagaaacttcgagagcactgtagggggaacaacatggatagcccacgggttcaaccacaaggcgtataaacagaaagagaaacgacgtgtcggaggccaaggtagtagtaccaagagagacagtagtaatagcactaatgggggagcgacatagagtcgaggagactcaacaacgcggagagaaaaacgagaagcaagatcagcaggagaggcaagtcaccactccgcagggccacgagacaataagaagacgctcgagataataagccgcggagacagcgaaccgagagggaaggaaggaacgggagaagcaagacactagcaacgagggcatcctcccccaacatccaccactacacgagaagcagca

SEQ ID NO: 582810 - DNA, 132 bp, Homo sapiens
atacgttcatgactgctaaagcatcagcgccgctgactgcatcacgccgctgaccgcatcaacgccgcctgactgcatccaacgccgcctgactgcatccaacgccgcctccctctgtcctggaggagggag

SEQ ID NO: 582811 - DNA, 782 bp, Homo sapiens
acggcgcttgccacccacacctggctagatgttatatattaacagccagagacattgaacaaagaaatgcctcctgtgattgaaattattctaagtagctcttagcccgttctacccaagatcacattagcagataacccctaccctcctgtgatattatcttgcttaaacctgaaccaaatatcaaaagatacaagttctcatgaattcaggatgcaactctattacataggcgcctctcgcgtctctattcgaagctccattgcaacagaccctagcacaacttcccctctccccgacgacgcacacgcggtaacaagacggttgacgcgtgttccattgtacaactataatcctcctaacacctttttctaggcgcaacatctatctgcactacccgggctagtcgtattccatatcccctaacacattaatcaccctagtgccttacctatagcatccttcgaccctttcccaagtttaactctccttatggaggtaataacactcggcggacaacgatatcgtaaccaactcatgacaacctgtgccaccttaccatgctgaattcataacctcctcggtcaaccttcactctgcatctcctcttcctgcacaactcttacttcggccccacgacgggtaacacctacgccttaggccaactcggccaaacccactcaaattgcttgctactatgacagccgcaccacatacaccaaacgtagcaagctcggacccccctccatcgaaacgcagcacagtcctcttgcacctcaccg

SEQ ID NO: 582812 - DNA, 729 bp, Homo sapiens
  misc_feature (206)..(206): n is a, c, g, or t
  misc_feature (226)..(226): n is a, c, g, or t
  misc_feature (231)..(231): n is a, c, g, or t
  misc_feature (277)..(277): n is a, c, g, or t
  misc_feature (294)..(294): n is a, c, g, or t
  misc_feature (306)..(307): n is a, c, g, or t
  misc_feature (313)..(313): n is a, c, g, or t
  misc_feature (341)..(342): n is a, c, g, or t
  misc_feature (354)..(354): n is a, c, g, or t
  misc_feature (358)..(359): n is a, c, g, or t
  misc_feature (376)..(376): n is a, c, g, or t
  misc_feature (387)..(387): n is a, c, g, or t
  misc_feature (389)..(389): n is a, c, g, or t
  misc_feature (392)..(393): n is a, c, g, or t
  misc_feature (395)..(395): n is a, c, g, or t
  misc_feature (397)..(397): n is a, c, g, or t
ttataaattattttctcattgccattggaatagatatctcagattgtgtagatatgctatttaaataatttatcaggaaatactgcctgtagagttagtatttctatttttatataatgttgcacactgaattgaagaattgtggttttttctttttttgtttgttttttttttttttttttttggctttggaccccccattttanctattggccaataccttttnttagnaatgtgctttttttggacacttttttatccatttacattctaaagnagtgtaagtggtatatnacggtttcttanngtacanggaaaaacaataaatcatatggaaattnntattatacttanggtnntccaggctaattgggtnctctaggggcntnatnntnantgaagtatatggtaaataccatcataaatcaatatagcttttcaaaattacatttacaagtaagtcatagcaactttcacagttggtattgtgaattgagaaaagcactgagtttgcctcaaggccataggcttaaaaattgtcgctgcgatcggggggacattcaaaagcaacaaaatttgatcacttttacgcctgccatttattccaaaactttttacacgagcaatttactcccctaagtccaggggcccccctaataaagaactacaattcttaataaggggccattcacatggtattgacacccttttcacaggtgcgttttgaac

SEQ ID NO: 582813 - DNA, 119 bp, Homo sapiens
cgagaacgagccttcccagcgcgccgcgctgcccatcaacagcaccctcagctacaggtagcagagaccagggcgcccgcggcggttgtccaatgacgacccttcgtcccacgcaatcc

SEQ ID NO: 582814 - DNA, 337 bp, Homo sapiens
accatgcacagcatagggagaacactgggggctgctggaggggaagggagaggtaagagtggcttcgcttcacctcttgatgctggcaaggcccatgtgctgtctaacaaggccatgcaggttctccaagctgtatctaccccaagagcattcatttacatggactctaccacgcctcgcttccaaacaatgatcttagagtaacttcacagtacaaagacagggagcattaacggcgttaataccatgaggataggagggtcttcctcttccactgtgtggctccatctaggccagaagggctctagaggggcggatgctattacgtgctgttgct

SEQ ID NO: 582815 - DNA, 894 bp, Homo sapiens
  misc_feature (781)..(781): n is a, c, g, or t
ctacctctcgatactaatctccctacaaatctccttaattataatcattcacagccacagaaactaactcatattgttatatgcttcttacgaaaacacacttatccccgacctgtgatatcagtcatgccgatgaggcaaaccagtcagaacgcctgaacgcaggacacatacttcctattgctacacgcctaggtaggctcgcttgcccctactcagtcgcgactaatttacaatcacaaaaccctaggctcactaaacattctactaatcaatcttcactgggccaagaactatcaaactcctgagctaacaacttgaatatgactaggcttacgcaatagcttgtatagtgaatgatacgctctttacggactccatttatgattccctaaagacccatgtctgaagcccccatcgcttgggtcaaatagtacttgccggcagtactcttgaaacctacggcgggtatgcgtcataatacgcctcacactcattctcaagaccctgagaaaacatatagcgtacccctttccttgtactatccctatgaggataatgtataagcaagctccatctgctatcgacagaatagacgctaagatcgcttcattgatactctgcaatcagccatatagccctcgtagtaacagccagtctaattgcaaaacacctgaagcttcaccgggcgcaggcatctcatcatcgcccacggaatagacatctcattactattctgtaggaaatcaaataagaacgcatcaagtcggttcaaatctcnctcaggattaaatcaatccataaggtctgggatagaaacacgggaacgttccccattacggggaatctggggaaccgccgggaaatcccaagagcaaagggggtccctttaca

SEQ ID NO: 582816 - DNA, 167 bp, Homo sapiens
agtaggaggtggcttggttgctgccccagatctgtccagcagggggcagtaagtgatctgggtagtatcccgggctgctaagccctgggcgggggtggtccttttctaacttcccattcacttaaccagctcttgtggggcatgggggggtctccattcccatttct

SEQ ID NO: 582817 - DNA, 346 bp, Homo sapiens
  misc_feature (9)..(9): n is a, c, g, or t
  misc_feature (12)..(12): n is a, c, g, or t
  misc_feature (142)..(142): n is a, c, g, or t
gaattttgntangaattccctttcccacgggtggcccacccccccccgccccccaggaccaaaaccaggggtggtggccgagggcaggaacgtgacctttcccttcggccagaagatcctccccaagaaagggaaagtggtntgggtcaagggccaggagcccctggagttttcctaccccgggtacctggccctgggggagggggccctgagcatcattgccaaccccggcaatgaggggccctacccctggggggggggccgccaacagggggggttgaccccctactcctggggaggccgggggggggggtgaggccgggtgataaagccctttttttttgga

SEQ ID NO: 582818 - DNA, 385 bp, Homo sapiens
  misc_feature (166)..(166): n is a, c, g, or t
gctgtaaaatttgaaattgaaagccccaggtttgaagcctaaagacgttagacatgaattaaaaacaaacaaaaagtcctattgacaatacacttcaaacacacagacacatacacatccccatatgagatagagtttactttgataaactgtttagaaataagancacactgaatggctctgatgagttgtctgactttggacaagtcacttctccaatctgggcctcaatttcctcatctataaacatgaagattgaattatgtcagtgattatcgaagtgggaacttgttagaaatgtaaattattgggcctcagcacagaaccactgtattaggtcatccacaggggttcccatgaagttctgaaaggctcaatgtccagt

SEQ ID NO: 582819 - DNA, 867 bp, Homo sapiens
ggaaacaagatggcgggttcgtggtgagaagccgtcaaggagtagaaattggtgatgcttagaagtcggattgctagaatagctagtttctcttcagaacatctttgtgcaatacctacttggataagcatcattgtaaacaccatggctgtagcctgccagtgagaaagtgggtgatgtctacacacgcagaacttatcttgaacacatttattgtccagatccaaaaatggagcttgatattgtgtctggtcataaatctacgtatgctcctctaccaaggatgactatatattgcgaaccgtgagagcttgctctgactttctgatggtgcacggtaccaagtaggtaatgtctaccagcacactgtcgtgtggacctagttccctataattgataacagcgatcaagaagtcgtagtcgcctcaggtcacgatcctggtgtcagtagaattgagactgaagaagatcgagcattgtaatcaaggtgctggaaagacgcagagttggaatgaaaaggttgaacaccgttgagagaaggactctatgatagaacaatttttatgacaatgttctttactacttaagcaccgtctcggtattcctcgatggggacggtgatcacagatgttcgtaaagaatttctgagtccttccagtaagggacagatgagtgcgtgagggttcactcgggaggaaagcccacaggaaaaaactgtgccctcattgggccagtttgaagcaacatgctgacagggtgtattccataagtagtatagtcaagggtgaaaagttgattgacctttctttgccttaatttgagaaatggtggtccttcaatatcaagtattctggcatttggacctgt

SEQ ID NO: 582820 - DNA, 1331 bp, Homo sapiens
tcccgggggaaaaaaaaactcttttaaattttttttggggccaaactctccaccccttataaaaattatatgtggtgtggccccccccactctcccccccacttacacagcggggaaatatttcttattttcttcttatttgtgtggggtctctcaaaacccgtgtgtggaccctctcgcggggggttaaaagagagagatttattgtgggcccctgtggaaaaaattattccaaagagagtgtgtgttctcccacagcgcggtgggtttatactccctctctctctatacagagagagaacccccgcagaggggaggagaaccttttctcacaacaaaattatacacctaaaaacacatgcgggtgtgtttttataaacacacacccaaataagagagtctccacacacacacaaaaaaccgcgcgagagaactcgtgtgtgataaagagtgtgtgtgtttaagagaagagagagagtggtgtgcggagacactctctaagagagactgtgtgccgggtgtatactcgtgacgagaccccctctctataagagagaagaggcgtggagtgtgtgtgaacacactctctctctcttgtgtgtctccgagagagtgagtgtatatatttatccacctctctctctcccgagagatatctctctccccaactacgtgtgtgtaacacactgtgtgagacacactctctttgtggagggggcccactctttctagagcgaggaaagaggcgcctcagaaagagggaggggcgcccaacctcttctgcggggtgtctacaaagaacaccctcttacagatagagcacactccccgcgagcgggcaatataaaatactccctgaaaaaaacacccccgccacaagagagacgcgcaacaacaaacattacgcagccctaacagcagagaggagaccccccacccccaccaagagaggcgggggggaacaaacaacggggccccgtgtgtggggcccaaaaagatacaaccacgagagacacaaccccaccgggcggaggggaccacaggaatcccccctccacacaaaaacaaaacacccgaggaaggcgaaacacaggcgcgcccaccacaaacagcggcggggaggcacaccactctcacagatgtctagccccgtcgaccgcagagagggggtgggcctcccccacaagacgagtgaagctacgcacccccacccaccccagtgggctcggccccacatatcaggggcagctggcaaaaaaaaaaacgcgcccccgggggggaaaaaaaaccacctgcgggcagcgccacagacaaaaaaagaccccccgcgg

SEQ ID NO: 582821 - DNA, 1177 bp, Homo sapiens
tgtgtgctgtgagctgcatgagtcgtgcttcgaacctcataggtatggcttagcacataccgccaccgtggcactgcaccggtccgagctgtgcgccggtatcgcgagtgggtagcgagcgccgatgccacggtgcaccacggaactccgataagcatcttttgacacgtcgcatggcatgatacgtgatgcggagatgctcgggcagtagtccgatagctattgcggcatatagaggccatggcatggaagcactcgcaagagcacccggctagctatggagtgcgcatcatacatgtgaacatggcgcacatgtatgcgtatgtaactgcgcgtagaacggccagacacaatttgcgagtagcgcaatagcacgcaggcatcacaccatcagacgcatggcagaaaggaaacttttgcgctcgaagtatcgcgcgttgattgcgacttcaatgcgcccggaaccgggatagctcgagccatgggcaaggatcgggtggagaaaggcggccgttccgacgcgaactcggaccttaatttaacatggggggccatagcgtaggtttaggctgtcaagcgcacgcagaaaacttgtttcgatccgccaggggactccccaggacaaaccgtcgaaactcgaagtggcgtagagacccagactggatgcagttcccctagggcaaaggtacacctccgaggtctgggtacatcagccgtggatggtgcagcccccttggggtaaactaccgctcatatgttgcaaggaaacttgggcgcgtacgggggaacgtttgactcttctgcacgtgaagagctctaacggaagggaacccgagcagggggcaccgtttagcagaggtctagggggaaggcccggacgtccacacgaactatcatgactttcccaagtctggtaacctcctgattgagtcgatcattccccctagggggggtcacgagtgcaccaattcgctcaacggagggaacggcgggaaaggggggcactcttcggaggccacccgggacatagggacaatggccggctcagagtatgggcgacgccccgttataattctcgggcgcgtcatgcggattgccccttggagagccagtctcccaagcagattttcttagcccttattcacatatcgcatggagcatcgcacttcgcttaggc

SEQ ID NO: 582822 - DNA, 1027 bp, Homo sapiens
ggaacgcgtgagatcgtaacgccgacgcgttgccgtattcccagacgatcaagatcgtacaggaagatgacataacatgatgacgacataactggcgtattgttgttcctgtaatatgaagcagatagagatagcttcaaggaatactcacatctgagggcatagactgagtaatcttgcaaacaccgtttacctcctggaaagcaaaggcaatgatctccattaaaattcagcaataatacttagttattatagcaattacaaagccataggtctttcctatctctaatatgttttaaacctttttaaatacattagtgtctataccatattagaactatttggttctaatcttatgactctaataaaagagataaaccaactcagtgaggctataggacaagagaccagagtcttgacatatattatttctataataaagtcatcattatctgggcagtcctgaggttccaaagtcgatatatcaaggtgaagcaatatctctctctatccacccagtcaaaattacccctagaaaactttctaaacccctataaagtacaccatatatacgtttggcatattcagatttctataaagtacattcctttgactgtccttattgagacaggatcttgctctgtcaatcaggctggacgtgtagtgggagactcttgagctcactgaaggcgtggattcccagggtcgagtgatcctccatttagcaatccgagataccatggacataccaggccaatgcaccatgcccaggaattacttaagtcaacataacatgggttcaacatgttgccaagcacagccactcctactgacatggcccctaagggtggaacacggcaacggccctgcggccacgattatagataatagccagtatcacgataacagatcttaggcgaatataattacccacctattgtgcaacagaccagcgcagcgaacatcatctagcacgcacctaagagagagatcacatattgaacactaggctacacacacacacttg

SEQ ID NO: 582823 - DNA, 145 bp, Homo sapiens
  misc_feature (6)..(6): n is a, c, g, or t
  misc_feature (32)..(32): n is a, c, g, or t
  misc_feature (64)..(64): n is a, c, g, or t
  misc_feature (113)..(113): n is a, c, g, or t
tcgaanttcaaagcttctaacgaatgtacggnggacatggggaagcccctgtgtgggaagcttngtggagtgcggagtcacgtgacctgtgcaagaaacccgccctctgtggnctgcatttgaaataaaacccgacccagcagca

SEQ ID NO: 582824 - DNA, 164 bp, Homo sapiens
gtgtgaagatcacttagaaggcgctaaaacaggaattaaaacacatgtcatgtagcctctggaaaatcccactgtacactcatgaaagacaaataatatctctctttttttttttttttttttttttttttttttttttttttttttttatttttttttttttt

SEQ ID NO: 582825 - DNA, 143 bp, Homo sapiens
tctcccaagctggagtgcagtggtgtgaacacagctcactgcagcctcgacctcctggactcaagtgattcctggctcagcctcccttgtagctgggaccccagacccattacattattaaatgtttttcaaagatggagtta

SEQ ID NO: 582826 - DNA, 1246 bp, Homo sapiens
tcactaataagcgggcacgaccccgtctgattatatcataccggggggggcgaatatttttacacggggctcgtctttgcacgtcgccttttggcggccccttatagacgcggttgcaacaaacgcggcggggttgccccgcggcgatttccgcgggaagttttgggctcacaagcgcgtgggcgtgatccaaggagaatcacctgcttcccatgggaggttcagccgcgatggagagttgtgtcacagatgggctactgttgggggtctcgccaccctccggacgaccccctgttgggtaaagcgccttttatgacagcccggggggctccctctcccccggggggggggaacaacaaacccgagcagcaggcgccgcggggtcttggggtgtttcttggacacagaagctccatccctcagcgtggggtgcaccccgcgagtgcactcttcccgggaagaagtcctcgggggacaccaccccccgggggaaaaaccacagtgtggtggggcaccaacaacaagcggggttattaacccccaacgtgttttaccaggggggggacatgatgtgtccgcgtggtaacaccccggagaggggcacaccgcgagaagagaggcgttctcaccccctctctttgtcccgggggggacacctccgtggggagccctgttggcccccccccccgccaaggggcccccacacagggtgtgataaggtttcctcccggggaggagtgtgcgcggagagagacctccgcggggtctcttctctgggggcgccttgtagtgggagggaatgggcctttttccccctctggtggcgccctcgagtaagggccgcccccaaagactttcccacacccacccctctccctgcggggagaaacttcccgagaagaacctcacagacgcaccccgcgcgggccgcggtggcttctttgtggggggagaggaggggggacccgccctcctccttctcctccgggcgcctgtgggtggggccacacaccagactccctccctccacaggggtaggcgcgggtgttttttgtgatgatgtctcctctttgtgttttcctctctgttggttgccctctcttttccctcccctcggggttctcttggtgagtgttcggcggggaggtttggggggagggtgcccccccctgctcgggccccctccccccccgcgctgtggtttttttgtccccttttttcaaaaaaaaaaactttttggttttta

SEQ ID NO: 582827 - DNA, 364 bp, Homo sapiens
agagaaggagaggtcgacgtggtatgttctccgcttcttcagctgtctctgtaggatctcaccttagctgaggtagtccaccaggtcctggagcctgagaatattctgcggtcttcctcagttggtaagtgagttccttcacttttctctcatgtttgcgtagacccttgacagcttcaacattgcgcttctgttcactttcaacttcaccgtcaagttcacgaaccctggcctccagtttctggatctgcttcttcccacccttcaggcccagctgctcagcctcatccagacgatgctgcaggtccttcaccgtctgttccaggttcttcttcatccgctccagatgggcgctggtgtcctg

SEQ ID NO: 582828 - DNA, 645 bp, Homo sapiens
ggtgacaacatgctggatgccaagtgctaacatgccttggcttcaaggcgatggaaatgtcacccgtaaggatggcaatgccagtggataccacgctgcttgagtgctctggactgggtcctaccaggcaatctcgaccaacatgacaaggcccttggcagcctgcctactccaggatgtcttacaagatcattctggaggtattggtactgtacctgttgggccggagtggacgactggtgtactcaaacccggtatggtggatcacccttgtgctccagtcaaatcgttagcaacgagacacggtacccactcatgtcgaagatgcacgcatgaagcattagaagatgaaagctgcttcctggagacacttgtgggcttcaatgtcaatgaatgtgtcttgtcaagggatgtactgtcgtgaggaatctgttgctggtgacgagcaaataatgacctcgactaatggaagccagatgatttcacatgcgtcagtgtgatcatccatgaatcatgatggcaaaataaagctgactgggtatggtcgctttattggattgcaagagggggtccaagttgcatgcaagataggggatgtgaagggaacagattgatcgggtgttctggtgtacatagctggaagat

SEQ ID NO: 582829 - DNA, 262 bp, Homo sapiens
ttgtgggtgatctgaggatccgccccggtagattccttcaactggcgctccaacattggccacctgttggcacaggcgccgggtgcgagcatttttttcatcacgccgcgggcttcgtcgataaacaggcggccggcagggtcagttccacgtcgcgatgccgacgcacaaacagcggcacggccaaccattcttcgagctgacgcacggtgtagctgatggccgacggtacacggtgcagttcctgggcggcggcgctgaa

SEQ ID NO: 582830 - DNA, 411 bp, Homo sapiens
  misc_feature (11)..(11): n is a, c, g, or t
  misc_feature (21)..(21): n is a, c, g, or t
  misc_feature (70)..(70): n is a, c, g, or t
  misc_feature (114)..(114): n is a, c, g, or t
  misc_feature (131)..(131): n is a, c, g, or t
  misc_feature (214)..(214): n is a, c, g, or t
  misc_feature (216)..(216): n is a, c, g, or t
  misc_feature (308)..(308): n is a, c, g, or t
  misc_feature (379)..(379): n is a, c, g, or t
  misc_feature (410)..(410): n is a, c, g, or t
gggacctaggnaaaatactgnaagacataagtcctgcctggtttttcctgccctacccttgtaacatccngggtcctcactctgtcaccccaggctggagtgtagtggcacaancctcggctcacctgcanccctccgcctcccgggttcaagcgattctcctgcctcccaagtagctggtattacaggtgcccatcaccacaccctggctaantnttgtatttttcatagagacagggtttcactatgttggctcagctggtctctgaacttctgatctcaagtgatccgcccgcctcggcctcccnaagtgctgggaatacaggtgtgagccagcgcacctggctgacatccacaacttaaggctagaaatgtaaantgttggttcgcagtgtaacaagcacattccna

SEQ ID NO: 582831 - DNA, 358 bp, Homo sapiens
  misc_feature (12)..(12): n is a, c, g, or t
  misc_feature (37)..(37): n is a, c, g, or t
  misc_feature (87)..(87): n is a, c, g, or t
  misc_feature (99)..(101): n is a, c, g, or t
  misc_feature (104)..(104): n is a, c, g, or t
  misc_feature (226)..(226): n is a, c, g, or t
gagagcacatcncggtgttagaatctgctggtaggcncttggagaggcgggttatttagagtggagactgcagaaaggcccctgganccgtggttttannngancgaaagatcatttttggtgctcttttaaaattttctcatatatccccgccaccccagttttttctgatgatggtctatgcaagttttgccctttgtttgtttgtggcggctgccggggcctntgtccctatggcccctcatttctttcaggctggcctgctgtctgccttgggctccctgcttttgctgttttggctgatggccccccctctttcccctgttcctgctctgaatagactgggacttcttgttgg

SEQ ID NO: 582832 - DNA, 158 bp, Homo sapiens
gctcgactaacaaccttatgatgttagatattatatatccacatattacagattagaaaaaaggaacaacatggctaagaaatgagtgtaaaatatttaggacaatgcttggcacataacaaacacaatacaggtcttagctgttatttttgtcgacg

SEQ ID NO: 582833 - DNA, 413 bp, Homo sapiens
gggaagcgcaggtattcactcccgcatcctggcatgcatagccacccgccaataccgcatcgcagcgatggaggcgcacacggagcggctcaaggccaacgacagcctcaagctctcccaggagtatgagtccatcgcgcctggagagcagttcacatgggcacattccagcctggaagtgaccaagccgaagaagcgctatgccaaggtcatcgcctatgaccactcccgtgtcatcctccagccccttgaaggcatcatgggcagtgattacatcgctgccaagtacgtggacggttaccggcgtcagcacgcgtccctggccacgcaggggccgctgcctgagccctttggggactactggcgtctggtgtgtgcgccgcggtcggcgaacatcgtcatgaggacgcggc

SEQ ID NO: 582834 - DNA, 900 bp, Homo sapiens
gccgggcgccatggatagagcaggaggggccggagtattgggaccgggagacacagatctccaagaccaacacacagacttaccgagtagaacctgcgcaccgcgctccgctactacaaccagagcgaggccgggtctcacacttggcagacgatgtatggctgcgacctggggccggacgggcgcctcctccgcagggcataaccagtttagcctacgacggcaaggattacatcgccctgaactgaggacctgagctcctggaccgcggcgtgaccaccgcggctcatcatcaccctagctcaagtggggagagcggccgtgtggctggagcagctgagagcctacctggagtggctgagtgcgtggagtggctccgctagatacctggagaacgggaaggagacgctgcagcgcgcggatcaggagcagaagtccctgtttccccgctcagagactcgaacttgccatatgaataggagattatcccagacccgcccaaatgtacgacacgtgagccaccattcccagtctctgaccatgagggcaccctgaggtgctgggccctgggcttctaccctgcggagatcacacctgactggcagcgggatggggaggaccaaacttcaggacactgagctgtgtggaggaccagacagcagtgaggatagaagcttcccagaaagtgggcagctgtggtggtgcttctggagagagcgagatcctatgcctgttgccgcttgaggggggccgagccctcaccctggaggggcctcttccgggcccgtccctcgtggcctgtgtggcggtgcctccaggtgctcggctggcccgtggggtcgagcatctgcggggggctcgcgtgcccccgtgttgccccacactgtcgcgggttcctgg

SEQ ID NO: 582835 - DNA, 144 bp, Homo sapiens
tgtcttcgttataccaataatcgccggtgcatggtataatattctgaaaatacatctgtttgctcctgttgtttctattctaactgtttcttaatcagctttaaaattttctctcagcattttcacccataaatctacttcccg

SEQ ID NO: 582836 - DNA, 200 bp, Homo sapiens
tccataagaaaaaaaaaattagccgagtgtggtggcccccccctgtaaccctacctacttggaagggtaaggtgggaggttcgcttaagcccaaggaagttggggctgcggtgagctatatcccgatactgcatcccatccagcctgggtaacagagccccccctctttaaccagtaaaaagaaaactaaggctgcctta

SEQ ID NO: 582837 - DNA, 187 bp, Homo sapiens
  misc_feature (26)..(26): n is a, c, g, or t
  misc_feature (47)..(47): n is a, c, g, or t
  misc_feature (116)..(116): n is a, c, g, or t
  misc_feature (143)..(143): n is a, c, g, or t
  misc_feature (168)..(168): n is a, c, g, or t
  misc_feature (177)..(177): n is a, c, g, or t
tactgtggtgtactgtctcctgtgtnacacacctatagtcatcaggnaacacacttggagtcaggtaactgcctttacattattccccacaaacctcacatctccagcctttgttngtgtcacctggctttgggtaagatggngaaaaagtaaggcgcattgcagaanacccttggnagagggctcc

SEQ ID NO: 582838 - DNA, 104 bp, Homo sapiens
atttacagatgctgacaatacttggggacctgaaggaaaatttagattgtccagattgatttaagcgtttcttaactctcagcaaggctggcaaagaaaaagtg

SEQ ID NO: 582839 - DNA, 321 bp, Homo sapiens
ggttaaggcaaagctagggccaggatggtggatccctcctgtattcccagcatttggggagggccaacactgtattacctgacagaaacttcactacatgataccaaaagtcaaatccttatataaaattcacccaaaacattcactttgggcgggagcatggctcatgcctataatcccagcactatgggaggctgaggctggcggatcatgaggtcaggagttcgagaccagactgaccatcatggtgaagcccaatctctaatagaaacacaaaaattagctggccctggtggcaggcacctgtactgccagctactc

SEQ ID NO: 582840 - DNA, 359 bp, Homo sapiens
  misc_feature (9)..(9): n is a, c, g, or t
  misc_feature (17)..(17): n is a, c, g, or t
tcacccagnctggagtncagtggcatgatcacagctcactgcagccttcacctcccaggcttaagccatgctcctgcctcagcctcctgagtagctgggaccataggcatgcaccactatgcccagctaatttttatgtattttttatagagatgaggttttgccattttccccaggctggtcttgaactcctaggctcaagcaatccacccaccttggcctcccaaagtgctgggattacaggcgtgagtcacagtgcccggcctccatatctactttttaaaaataaaaagaaagctctcagcagtctgtcttggagacaggctgttttcactccagccttgcactgaagctcgtgc

SEQ ID NO: 582841 - DNA, 523 bp, Homo sapiens
  misc_feature (10)..(10): n is a, c, g, or t
  misc_feature (17)..(18): n is a, c, g, or t
  misc_feature (26)..(26): n is a, c, g, or t
  misc_feature (59)..(59): n is a, c, g, or t
aggaacaaanccaaagnngaaaaaantttgttttaatagcgggagcgccaaccacacgnacatccaaaaaattcaaggtttactcaacgtcaaccaagcaaaagaaaggaaaagtcaaaaatttcctgaaatagctaatggggccttgggtttcaaaccatcccgacaaatgaaagttgacttaactgaaagaaatggaaagaagaaatgaaaaaagtggagcaattcaaaccttggcttttcaacaagagacttgggcttttctaatctcttggactaacactgaaattcaccccccaactgaaaaaagatgaagtatgcccttgccgtgtgaaaccatgtgactttgttcacaggccaaaaaaagtaaagggggaacgaagacatgtaagcaacaatcatggaaggtttgaagaaaccccaatttggattggatgaaatccaaaattctgcttgcctggttttaaaaaaatgagaagcctaaaccacttacaactttatgcacaaaaaggaaggttaaaaa

SEQ ID NO: 582842 - DNA, 825 bp, Homo sapiens
  misc_feature (9)..(9): n is a, c, g, or t
  misc_feature (28)..(28): n is a, c, g, or t
  misc_feature (35)..(35): n is a, c, g, or t
  misc_feature (47)..(47): n is a, c, g, or t
  misc_feature (75)..(75): n is a, c, g, or t
  misc_feature (100)..(100): n is a, c, g, or t
  misc_feature (113)..(113): n is a, c, g, or t
  misc_feature (200)..(200): n is a, c, g, or t
  misc_feature (230)..(230): n is a, c, g, or t
  misc_feature (254)..(254): n is a, c, g, or t
  misc_feature (256)..(256): n is a, c, g, or t
  misc_feature (520)..(520): n is a, c, g, or t
gacattaantagcgtcctacctgcgccngcgcgcngcccattcgtcngcgcagacccacccacgacgtctttacngtcctcaacaccccgacactcgggnatgtgtgtgtcgntcgcgctgaccgcgagcgcggtatatatattaatgtgtctatcgagcgtcttatggatagccggtaagtattgagttcactctcctntcccccacctcctgtatttgcgctgtctcnagccccaccccactcctcccccgngnccgccgccaccacgaactgcgaatgaattctcctcactctgtttcgtctccgttcgccccccatcaccctaccccaaccacacaaaagaaaagtgatcaggacgcctatttacaagtggcctatgaatatgcgtgatttcataaagatgcatacaccccacagccacacctccaaccattcccatttatcatcttgtcaacgggtcccgccctgcccgcgcgacgcagtgtgtctcatctacccaacagcccttcatctctcantcacaagagtgagaccacccccaccgcgacgcccccgtcaaccttcgttcgccgtatatgttcaacgaggatggctcgtcagcgcacgcggctaccaataccatcctcctagacagtcgcacgcccatgaagtgcacagacgggaactgcgcaaggtgtgcagtcatctaccgaacatccctccacggcgtctaggacacgtaacaactgctgtgaccgctacggccattgtaccacttactcacgtatacttgttgctttaatagatacttatataacaagctcccactatactacctatcact

SEQ ID NO: 582843 - DNA, 141 bp, Homo sapiens
gatagtcatacctctcacaaatgaatgaattgagcttgccagttcaaggaaacagtgacagtatttatttgccaatgataaaactcagactttcaagcaaaagttaggattttgtgaagcttttatccacataactgatct

SEQ ID NO: 582844 - DNA, 432 bp, Homo sapiens
agtgtgacccccaaacaccgcaatctcaaaataatgaatgggaacaatggctggcaaagattgtgctatgtatgtatcactgaagcactggaaacaggagcgtggcatactgtttctgttagagcattaataaaataactgtcacacactgtgttcgatgtaagtcagacactggataaacacttctatattatcagtattaaccccaaccaaagcatttaacgtgacattatgacacccagaatacatatggaggaattgagaaacagaggtgaaacaactttcctccacaccacacagctagtaagtataggaactggaaatttgaacatattctcattccaagtaaatgcacttaaccactaccctgtggaaaggagattctaaaaggatgaaatgatcaaacaaaaaatcttctacacagcaaaggaa

SEQ ID NO: 582845 - DNA, 220 bp, Homo sapiens
acagctgttctcagtgtggggtggccactccttctgcattggggggtgtgtgcctgtgcccccgtgtgtgggtgtgcacatgtgtgtcgggtgtgcatgtgcacttgtgtggtgtgtgtgcacttgtgcgtgtggtgtgcctctgtgtggcctgtctgtgtgtggggcgtgcctgtgtgtggcgtgcctgtgtgtgtggcgtgactgtgtgtggtgtgcc

SEQ ID NO: 582846 - DNA, 315 bp, Homo sapiens
  misc_feature (40)..(40): n is a, c, g, or t
  misc_feature (62)..(62): n is a, c, g, or t
  misc_feature (106)..(106): n is a, c, g, or t
  misc_feature (187)..(187): n is a, c, g, or t
aagtagtcctccagccctccagactttgtgtgtgtatganacagagtctcgctctgtcaccnggctggactacagtggtgtgatttctgctcactgcaacctccgnctccctggttcaagagattctcctgcctcagcctcccgagtagctgggactacaggcacatgccaccacactcagctaatntttatgtttttagtagagacagggttttcacatgttggccaggatggtgtcgatctcttgaccttgtgatttgcctgacttggcctcccaaggggctggggattataggcgttacacgcaacggcccg

SEQ ID NO: 582847 - DNA, 119 bp, Homo sapiens
ttctttgcctgtaacttctgaatcaatgtatatcatggactgcatgcggtgggtgaccgcaggaaattagatggagctgctcatcaaaactaagaatggagaatgcccaccttcatccc

SEQ ID NO: 582848 - DNA, 146 bp, Homo sapiens
tcaagaaagtatacaaggtatagagtacaaagctcctcttaatatatacctagttctaatcccccggcttactacgttattggtgaatcctttcaaagtttctttctacatatgcaagcaaatacaaacacatactcttactcccc

SEQ ID NO: 582849 - DNA, 696 bp, Homo sapiens
agcggaagttatcattgactagtgctcacttcgggccggggcgcgggaaggtgcgggttgtggctgaggcaagcctgtggacacgagcgaggcgatgtacaggcgggcaggaccgtcttgcacggcgaacagagcgcataccagtctagcgcgttgcgcagaccacgaatctttcgctgccagaaccgacgaacactcgggagtacgtgcggagtgattaatcacggatctgacgtgtgaataagagagacacaccacgaaagcgcttagaatcaagaatctcgttacaggaacctaaaagaaacccgggactgacacgtcaaacgagaatgtaataaaaaaacgacagaagaacacactacctaaaccaacaagaacagcaagaaaaaaaaaaaaagaaaataaaaatacacacacgagcccagagagacaccaagccacaaaaaagaggcacccaggacaccaccgaaacaaagaggagaccacagatgagaaaacaacaggaataagaccacagcaaacaaaaagaaggaaaaacagagaacacaagcaacaacgaagagagaagaaaaaaaaaacaaaacggtagctacgaaaaaacaagacacgacacgaacggagataaaaaacaaagaaaaaaagcccaaaaacaacaaaagaaaccaaaaaagaaaggcaacgagaaaccacaaaaag

SEQ ID NO: 582850 - DNA, 157 bp, Homo sapiens
cattgtcggagaataggcagggagtgagacggctctccaccatcctcagccagtgcaacccattccctctgcttctctctctctctctctctctgtctctctctgtgtgtgtcgccactgaataatctttaagcagaagtatgtgggagttagagac

SEQ ID NO: 582851 - DNA, 449 bp, Homo sapiens
  misc_feature (308)..(308): n is a, c, g, or t
  misc_feature (390)..(390): n is a, c, g, or t
  misc_feature (402)..(402): n is a, c, g, or t
  misc_feature (410)..(410): n is a, c, g, or t
  misc_feature (431)..(431): n is a, c, g, or t
  misc_feature (437)..(437): n is a, c, g, or t
ttatttatttttttgagacagggtctcgctctgttgcccatgctggagtgcagtggcatgatctcggctcactgcagtctccacctcccgggctcaggcaatcctcccaccttagcctcctgagtagttgggactacaggtatgcaccatcacgccccagctaggttttataatttttgtagagacggggtttcaccatgttgctcaggctggtctcgagctccggagctcaagcaatccacctgccttggcctcccaaagtgctgggattacaggcatgagccactttacctggccctaacttttgnttctttacccagatttttaaactgggaagactgaaccatgtcctacattgtctggcttcttaaaactgcactgtacacatancaagagcttaanaaaatgcnggggggaaaaaaaagattttnagtgcntttttacctcta

SEQ ID NO: 582852 - DNA, 168 bp, Homo sapiens
ttttttggggggggggggttttccccttttttccggggggggggggctttattcctttccccctttaggggtttccccggcgggggggggggtttttttccccggtttttttttttttcccccccccccccctttcccccccctttttacccccctttgggtttccca

SEQ ID NO: 582853 - DNA, 1110 bp, Homo sapiens
acccattctaatcgcaatggcattcctaatgctttaccgaacgggaaaaattctaggatagatacaactacgcaagaggccccagcgtgtaagcccctacgggctactacaacacctttcgctgagcgccataaagctcttcaccaaggagcccctaaaacccgccacatctacgcatccacgccatgctacatgaccgtgcccgtaccttaagctcctcaaccgatcgctctgtctagctagtgaaccccgcactctcgccagttactcagaaacacacctgggtcaaataatcaatgcctagtgcactgccctaagttgatgtcatagacccgacgctcctaaggcgtagcccgcaagggtgcaattcctgctgatcaggggtgacacatgcggaagctcaaattagactctggactcgggacacctgagatcctcgctaagctcaaagaaacagatgtccggtattgggaaattttgccacctttaaagcacaatcaattttatagttctaattgcatcactttacataggttacttgaggcatcccatattatagggtttatcccaggcaactatagttcatgggttgggcacactgacattagggctcaagattgggcttctcatgaccagacgatatgaacccctggggacattaatagtgcctacatataatcgcagcacatagccgagaaggacataacagccttcacattgcgagcgaagcccacaaggggagaagtaaggaaccagcactcagagcgtacacactaccgatacatcgcaaggaaggcccacgtacaacccctatttcaatgcaagtgggccgggccatatacgaacgcctgctcactagattacgcttcctctcccacatacggaaccctggctaaccaaaacaaatcatgaaacaaactcggcctgcactttatacaaaattactttgggagcgcaaaacctaggtataccccacctgcctgataaaatctggcccacattacgacgacttacgatgaacaaccgagacctcctaaaaacccaggaaacccgtagctgaacatagcactgccacacttactcgaaatccgcacaatcacacgcgctaga

SEQ ID NO: 582854 - DNA, 94 bp, Homo sapiens
cccattgctggcacttaattctacagagaaagatacgagcaatcagtaggaagtacacgacatacagtgttgagagtagtcctgctatgaagac

SEQ ID NO: 582855 - DNA, 212 bp, Homo sapiens
tgtccacttaaggcctgatgtgtgcctggggcctgattgtccacctggggactgggtgtccaccttgggtctgatgtctacctgaagttatttatctacctaaggcttggtgtctacctgtggcctgatgtccacatgagtctggggttcggttggggcctgctgtacatctgggaccttggtgtctatctgaggccagatgtctacctggt

SEQ ID NO: 582856 - DNA, 243 bp, Homo sapiens
ctttgccatgtcatttggaataaaacttgaaattttgatttttggaaaaaaaagttttttattttttgttgaaatcccctgttacccttgtttgtaaactgaaaacttttttgctttttttcaggaaaacagttttcaactgttgttttgcttttgatagaaactgaaaagcagcaatctgtatttgtggaggaaagtccttttttttgcaaattttaataaatgagccgggtttgcccccca

SEQ ID NO: 582857 - DNA, 394 bp, Homo sapiens
ggacccctcacggattactcaaacataagaatcctagaggaaaacctaggaaaacactctggatgtcaaccttgggaaagaatttatgactaagtcctcaaaagcaactgcaacaaaaacaaaaattgttaagtgggacctaattaaactagaaagcttctgcacagcaaaagaaactatcaacagaataaatagacaacctacagaatggaagaaaatattcacaaactatgcatccaacaaagctctaatatctataatctataaggaacttaaacaattgaacaagcaaaaaacaagtaactgcattaaaaagtggggaaaggacatgaacagacacttcctaaaagatgacatatgaggtaggtggactacttgaggtaatccgtgaggg

SEQ ID NO: 582858 - DNA, 611 bp, Homo sapiens
gggatctgtggaagcgcctcttcacggcactgggatccgtatctgcctgggatcatcaggccctagaagctgtgttgctttaaattagggctgccgtttgctgttatctccctggggctgcggaaagccagaagatgttatctatgcttatacaaggctgctggtgttccctctttattaccacgagggtgtttgtggctgcaattgcatgaaatcccaataggtgtagaccagtggcgatgggatctagagagtttaccaactgagtacaggttcttcaactgtctttcttgtcaggtccttgctggggactgaaaacgcttctgtgagacttgagtaatagctcctctggtgcacaagtgtgggtagcgtattgacaactaaatcgagcaagctatggatctacgtgaaaagccatttgatgtatgcggtcagagaagaagtggatggtcctcaaagagcaaatcaatgaagtactagagaaaaattcccagctggggcaggagatccatctgctgaatacactggccagtcctgagcagcttgccagttctcgggcccagctgcaatgggggctccgcccgtgtggccagtcctggggcccgaatttt

SEQ ID NO: 582859 - DNA, 353 bp, Homo sapiens
cagagtccaaacagtgcccagagtgcaaacagtgcccacctcctcgaaaactccacagccaccgtgagcgaggcgcagagaaaggcgcacgtgtactaccgcgcgcgcgtgagcgagaccacgatctcggagctcaaggccacacctctaatggagttgattgagaggcttgggggctggaacataacaagtccctgggcccagggcaacttccacgacaccctgccggtgggtaccggccactaccggaccttacccttcttttttgtctatgttagtggcgattcccagaactcgaaccgcaacctgattcaagtggaccagtctggcctgggcttggcctcccgagacta

SEQ ID NO: 582860 - DNA, 152 bp, Homo sapiens
tctgtaaggatggaaggactggccaggcctggtggtgcacacctgtaatcccagctactcaggaggctgaggcgagagaatcgcttgagcctggggggcagaggttgcagtgagctgagagaacggcgggcggcagagcgagactccatctc

SEQ ID NO: 582861 - DNA, 133 bp, Homo sapiens
ttactcaaaagactgagccctgaggactatgtgaatacacaccccgtaaggcaaatattatccagcaagcagttctaccctgtcctttgcaattgctctgctccacgtctttcctgctacaagtgtattagat

SEQ ID NO: 582862 - DNA, 205 bp, Homo sapiens
acatcacttatgacattgactagccaagtggtatactcaatgtcatctgctgtgaacaagagtacggaacaagagaacaagattactatcatctaatgacaagggccgattgagcaagagaagacatagaacgtattggtccagagaagctgagaaagtacaaaagctagaaaatgcagaagcacgagggcacacaggtgctcat

SEQ ID NO: 582863 - DNA, 699 bp, Homo sapiens
  misc_feature (188)..(188): n is a, c, g, or t
aacttttttcttcctgaatgaatttggtaattttttttaattttaaaaattagtgcatttgtcaaatttacaaacagcttttcatagtactgttcccttgttatcctcttcaggtctgtggggttaatagtgatgtttcttctctcatttgatgtttctaattgcatcttatttttcttggtcatccnggctagaggtttatcaattgtgctgaacttttaaaataatcaacttttagtttcattaattttctctatgtttttctgtttccaatttatttgagttctggtcttctaataatactttccttccttctacttactttgggtttattctgttctttttctagttttgtcacttgcaagcttagatccttgatttgagatgttgttcttttccaatataagcattataaatttctctaaatcaccgttttaaatgccttctgcaaattttgatatgttgcattttctctttcatttacttttctaaattcctttgtggctttccttttggcccatgggtaatccagaagtatgttggtgtattagtccgtgcttgcattgttataaagaaatgcctgaggccaggcacgggggtcatgtctgtaatcctaagcactttgagagactgaagttagagatgcttgagattaagctcagcaacatggcaaaacccgtctctacaagaaaaaaaaaa

SEQ ID NO: 582864 - DNA, 562 bp, Homo sapiens
tacttgatcatctactcaatgcatacttaaacatcactcaataacatacacacaattaacaaaaaaatgtgacaaaggctagatcttaaaacggctctgctataaattgtctagaatatacagaattacaaagtcaagtattttattatcaaaatatacacccctccctgaaactaacacaagctatcaacattttaaatgaatacaattatagaaaatatttgcaaaattattttttcatgtataaatattctgccatatttactttggtctagaattatcagcatacaagtccacttaaaaaatatccacatataagggctgggagagagacatcactacaggtaatttaatatttggggttaactcgaatcaaaatgactagaatatacagtaatgtctttgattaatattattaactgataaaacaaattagtggatcataggattgcttattcaatattctaattatcaattcaacaatgattttcgtacgccctttgtgactatctcttaaataaaacccaaatgcatagtgtcgggtgtacatatatacaatgta

SEQ ID NO: 582865 - DNA, 102 bp, Homo sapiens
ctagaggacccgtgacatcaggtgatggccaattgggtgtgaggagtcagtatatgtttgggatttttaggtagtgggtgttgagcttgaacgctttcttaa

SEQ ID NO: 582866 - DNA, 375 bp, Homo sapiens
cttttttttccctccctaacttttctggcctattgtcattgttgtttttttaaacttaaggagagaaaaccaaaaatgagattcctcccctttgcctaattgagcccctaccaggttttttggcagctgtggccccattatttgtgagatgattttttttttttatgttcagagtgacttttgattttgattctttatgttttgtatggaggggcacttttatttgtgttttagcagaactgttcctttgtatcctttacggtttttgtttggttttgtttcctttttaaatagttccagcatttttttggtgtggatccggccacaccgttgaaggcccttgaggccacaaagaagaaaaagaaacagtttggg

SEQ ID NO: 582867 - DNA, 1054 bp, Homo sapiens
  misc_feature (359)..(359): n is a, c, g, or t
  misc_feature (385)..(385): n is a, c, g, or t
  misc_feature (430)..(430): n is a, c, g, or t
  misc_feature (492)..(492): n is a, c, g, or t
  misc_feature (505)..(505): n is a, c, g, or t
  misc_feature (512)..(512): n is a, c, g, or t
  misc_feature (514)..(514): n is a, c, g, or t
  misc_feature (912)..(912): n is a, c, g, or t
  misc_feature (945)..(945): n is a, c, g, or t
  misc_feature (974)..(974): n is a, c, g, or t
accgcagagttgttcctgtctgtcaacacttttcctctggcacgcagcactttatggcacatagtgctcatgtaactttctacaagtaaatggaatatgccgtattatctttggaaagcctgttttcaggcagcatgtcttgacatgtctcacgtggaaccgggaaccaccttcttttcccagcagttattctgacgtgtggatgcaccttgcttcgtttaaccagccctgcaccgatacttctttggatggtttccgccttttcccaatcacagacggtgttctgatgaatttccttacacacatcacttggtgctctgtgcctgcatttctgtgagatgttcctggaggtgggctgnctaggatcagagggggatctgtgctnaatttgcatcctgtgcaaaattccatccagtcatccggctccccnagggctcacatggtactgtcctctgtagacatcatcttctgcagatgatggcacgaccgccnctctttcttttantcacacnantctgcacctcggtgtcctggggtgggggggtcccagcccctacccacttgtccccgcagaccctgctaacggtccccccagcccctgctaacagggactctggcttccgagctctggcagactgcctcactctggagaagtttgctttctcaaacattcctgacaatgttactgcagatctcgaggcctgcctttgccttcttcagtttcctcaaaagtaaaatggggataatgtgatactactgtctgcatcctagagctgccatgagggttcagtgagatcactgttgacagcacgttcacggcgccggccttgtgcgcagtcagcacgtgtggggcagggctgttgctgatacgtggttgactgtcattgctagactgtggctttaccgggggcnttgtcttagtgccgagcccagagccacccctantactgctgtgttatagagtgattgagtgncagggtcagagactggggcaatggcagcagaaacagaggaaagaagtggggcttctaatagttcctgcactagtgtccag

SEQ ID NO: 582868 - DNA, 854 bp, Homo sapiens
atactccttgttttcgaatacggaacctcgatatgcgggtattgatggtggccttgctatatggatgatgccccggtttgaccggtggccatcaccgtaatgaactagaaggctaggtatgatgtgtggtattgtataggcatgagagtgctgctgaggggtgctcgtatggtgaatactgctttgctgtacaatgtgtgataagtgcatccaagcagtatataaatagcttccgatagagagaaggaataatcctctgggaatgcgaatgatattccatatggcacttgtaatctacaaaattattgtgacagtgatttaacttactgttttatggggtaggccttgattgttttgtggaaaagagtcgagtgctccaggtactcattcccatgggaattgggaaggggagggtaatattcagattgttgaaggggtaagttctggtttacaagaaagaatgctagtatgatccaagttggaagaccgaggtggaacgatgggagagaatgtcatacgctgggggggaaaattttattcagtcgggttgccaccgtgttgggaccagttatcctaacataactaaggatgggcgtagtagtttattgtgtgggggaggagagcccgggtggaaggtacttgaaggaacacatggggctgtggaaagaccatttgtagaaggcctgggggggcatgtacagtagtaattaagtgatcaagactggtggttaacatgtgtttgtgtcttgtaacattacataggtgcgttgtaaaggggttcccattttgggtggttgctcagaaaatgaatcatttaaatagcttaagagaaaacttggagggagataaattca

SEQ ID NO: 582869 - DNA, 189 bp, Homo sapiens
tggctgagcccaaggatgggggcaggccctggagctgaggctcacactccctgcgcctgcagatgactgtccacaacctgtacctgtattgaccggatatggatgtgtgtcttgcactacagcagaatggcaccgcaacgaagcaatgcagggattcccagacggagtgaggagtataacgctagatgt

SEQ ID NO: 582870 - DNA, 980 bp, Homo sapiens
ggcattggagctggcatgcagcgagccggggaccccggggccgcccgcgtcgcggtgggactggggctgcgtgtcccggccgggtgtcgggctcctgggacacagtgacctgaaggacggacgagcgaggccggtgcggacgtggctatccagcctggagaccgggcagcggccccgctctgagacgccctgcctccccgcaggccccgtctgaggtctggcagtcaagagaacagcctgggctgcccacggcccgagcgcccacggcagcaccatgccctgcactccatggagctgccccaagctttccaactgccatggaccagggcagctgcaacggcaagattatgatggagcgggagcgcaagcggcaggaggacagacgaggtggatacgcatgatggaacagaagcatgaaggacgaacaggagagcaaggcagaccgacggcagatggcacagagcagcaatgtcatctcagaggagaccaaggcacgaaaattctgaagtaaggaaggcagcaagcgtacaggctcataccaggaaaggagaagcgaccaggcttattcgcctgcgagctcgaagcacaaggtttacacatggaaggcacagcaccaaaccggaggccggagaggggacacaagaggtggagcctgacgcacccgtagacaatcgaggcatggcaattacccagacacagaagccttgacgttgataccaacaacagagggaaaacatcaatctaccgtaccagcaattgcaagggagaaggcccatggaaacggaacacacacaatctaggcacccacagtgggaacaccacgaaccaaaatgaggacaagagccgagagaacgacagacaagccaacgacacaccaaaaaagatcgcttactggggaaccccccccgaaagacgcaggacacttaacgagaaaacacaccagaggcacgacataaaccagtttgaagtgcactcaacag

SEQ ID NO: 582871 - DNA, 297 bp, Homo sapiens
  misc_feature (1)..(1): n is a, c, g, or t
  misc_feature (87)..(87): n is a, c, g, or t
  misc_feature (107)..(107): n is a, c, g, or t
nttatgaagaacagtagatgatcagcttcactaggcgcacatcaaagggtgtccaattctctgaaaggggtgagacgtctgtggcanactcttgaaggggtggagangggggtacctaccaacattgtcaaagccactagtggagcaattcctgctatgatgaagattaaatagaagaataacagttccaggataacattgattcctgacaacagcgtggagatttcaacagaacttgtttggaacaaatactcacttagagcgtgggggggaagaaaaattacttagtccttaggc

SEQ ID NO: 582872 - DNA, 86 bp, Homo sapiens
  misc_feature (49)..(49): n is a, c, g, or t
  misc_feature (58)..(58): n is a, c, g, or t
agagagcagtggcatgatctctgctcactgcagcctcaaccagctgcantcaagcaancctcccagctcagcatcctgagtggctg

SEQ ID NO: 582873 - DNA, 401 bp, Homo sapiens
  misc_feature (303)..(303): n is a, c, g, or t
  misc_feature (360)..(360): n is a, c, g, or t
  misc_feature (397)..(397): n is a, c, g, or t
cctggtcctgggatgctttccaaacagcccaggcctttagcctccatgggtgatgacctcagctttcaccctggtgaagtttgtgtacccataatgcagccccattccatggggcccctgaaaaccccctgaggaattccgtagggttttgtttccccgaccggagtgctggctctcccagtgaattttgatgcatttaaaataagattttgatgccagactgttaaaataggcgctggttttgaagccccgatggaaacagatttatgcaaatggaaggaggaagggagactgggccccctnatttccagcccccccatgtgtgctgttttcaaatgtgattgaggggtgttttgcccngcctcccctgtcccagcctttaataaaaatgtgaatnttga

SEQ ID NO: 582874 - DNA, 1095 bp, Homo sapiens
  misc_feature (357)..(357): n is a, c, g, or t
gttttgacggtgacggctgcttccactgcacccaattgcattcggcttcactcgcacgtccgcacggatgcgtggtggactcgaatcgggagacgggacggaggctcaatctcgcgcgtaggagaaaggattgtcttgcaaaaatccggtggaaaggggagggagcgtgcgagagatgtgcagtcgccaggaggcccaccagaagggaatctcgttgatcccgtatatgcatctcgagtaattggccagtcggcgaaggcagtcacttcgagaccgcgagggccccctgagggcacatccaacaagatactgcggtggcctgtgagtcggactggtggctcggtgtcctctatggcntgatgaaggagtagctctaggttgcggtaaatccgaaggaacgtctctggaaaggacgacgcgatgaattgtcggcgtgtgttcggacgccacgaactggctctgcgtatccaccattgattccgagtagagctggtagtgccactaccaccaagctggcgcggaagcgggccaagatcagagacgagaacaccggggcgagcttagaagacctagagctcgcacaagatcgcggagagctagatctatacattgatggtcgcgctcacctcaagatgggatgggctcgatatttgggggctgtggcgacaaatgtggttgctgggggcaaatggtgcttaggaaatcggcttgaggctgaacggggcattctggccgagataccatttcgaagtcaatagtatttggacagccccacggtggtcgagacgtcgagcttgtacgggggctcgaaaggggggtctaagggagcagtgggagttgcccgaatcccttgaacgcccgaaggacacctagagccccttttgaatccctcccaagatgtgggccctctgttccctcgaaaatttggcccaaaagatccaccggaatggcactcggaacgcagaaaggaacgcaaactcggattacaacgggtccaacgactaccaggccccttccaaatgcggagtctgtggcattggcccttgggacagggaaaggccttagttaggggggatgggttttcatttctccttg

SEQ ID NO: 582875 - DNA, 814 bp, Homo sapiens
gagcggcttaacccctctgtagggaaagagggtccgccatgttccccgtgctggctgccgccgcttggctctggtagccgcctgccccatgaattacccatgtacgaagaaggaggaagacagagcaagagggcacaagccagtaagcaagaagggagcagacagacacaaagagaaagaacaacaccagcagacagcagagacagacaacaagagacacaacacagaatacacacgcagacaggagagaaaaaagagcccaaaaagaacgcagaaaagaccggcggaggcgaggcacagagcaccaagcaagcacaggccagcggagcctcctggaggcaaggacgacaacacgcgaacgggagagcagaagacaaagacacgagcgcgaccacagagtagacagagaaggacgcagagcgtagagatgcacaacacggcgcagagagacaaactgggcagaacaagagaggaaaagaaacgcgacacacggaggacaaacaagagaaaacgaaagagaagacaaaaagaagagcagaggacagagagcgacacaaaagaggagaaaacagacaacaagaagagaggagacgacaggaacagtaagcagggacgaaccaacaggatgagcaagagaaagcaagacgaacacagcgaacagaccaacacacaggaagcgcgatgagcgccagtgcgagatgaaaggagcagagtagaaacaagcgacaaggaaagaacaacaagaggaacaccagaagagcaaacaaaacggaaacacacaacccagcaaaaaagcagagcagccggaagaaac

SEQ ID NO: 582876 - DNA, 1104 bp, Homo sapiens
cggtgccctccttcgggtgctgtgatgggccagcgtttgatgctgttactcttcttcccgcgtctgtcctgatgtgagagcctgctgtgtccttccaggggtgtctgcgtgtgtgtccctcccctgcccccccgagtgtttttgttttgcccaccaatcctcgttttggggcccccctttggccccttgcccgtgtcccccccccctctgcttgcttgggaaacctcgtgggttctccccatgggctccacttttgccccgtgtgaacacaggctttccttaagtggagactattttgcctgtgcaacccctgatgtgtgtcaccttgagggtgcaccttttgccctgtttggcggctgcacaaccatgacctcggggggggaaatgggtttggccaacagctggtcccacaggacccggagtgtaggaatatgattaagggcccttgggagtcccacacccggtttcttgccacatgcccctggactttgggctttaatgggcacgaggaatgccctgttgctgggccacaggggtctcaaaggaagactggattggcacaaggctgtcaatgcccgtgttcctgccctttgccccaactccccggtgctgaggctgcatcacgacccctggtaaggaaggggttccgcacgcccgcttacggtatgtgctctccttcagccctcttcccttcggagggaacgtggttttgccccccgtccctttgcctccactgctgaaggtcggtgctgtatttcacgagggagggtccctttcacttctcctctgctttgtaatttaaaggactggggcactagcactgggggcacgtcccccacgagcctcttcagttccccctcctgtggtgagggctaaggtgtgatcacacacctttttttttccacttcccttcctgctttttttactggtgggggatccacccacggtcattctaggctctggccctatgttgaaaggggcacccccttttctctgtgcccaagaggagttcatcctgggaagaagggggccaaggtggaaatgcagattactcacatgcttaaagggacttgggtaggtaaattaaagctatacatggttgga

SEQ ID NO: 582877 - DNA, 238 bp, Homo sapiens
  misc_feature (52)..(52): n is a, c, g, or t
  misc_feature (123)..(123): n is a, c, g, or t
tctagcaggatcctcagacatgcggaccccatcgggttcaagttttggagancctacttcaccgtctctgggatcaggtcgatacatgaagatcattgagaaaagtggttaccaggccctccntgggttcgctacatcacccagagtggcgattaccaacttcgtaccagctagaagggagaagagatgggggtttgaactgtgtgactaccttatagacccggttgcagattttgcg

SEQ ID NO: 582878 - DNA, 124 bp, Homo sapiens
atatgtaacaggcacaatatatgtagaagaaaaatatttttacattaaacctttactaaaaatgtaaatagaaaaataatttggttttgtatcaagaacaacacttatcgttacatatgacggt

SEQ ID NO: 582879 - DNA, 294 bp, Homo sapiens
  misc_feature (292)..(293): n is a, c, g, or t
gcccccattccccccattctttccctcccaccttgggcataaaattacttttgggcccaaaaaattaaaaaaaattttgttgggacccttttttaaattttaaaaaaaattccccaaggggttaaaagaaaatacctttaaaatttttttaggtggttttttggccccccccttttttgtttggaaatttccaagggttgcccttccgggtttgggcccccggccaattccttaacccctgggtttttttcctttttttttttcccataaaaactttttttttggccctttnna

SEQ ID NO: 582880 - DNA, 106 bp, Homo sapiens
ctgtcgtcgcctcatgcttatacttctcaacgcttatacttctcaacgctttatacttctcacgctttataccttctcaacgctttatacttctcaacgctattat

SEQ ID NO: 582881 - DNA, 315 bp, Homo sapiens
tgtgcccggcgcactatatatagtatccgcaggggggagatgagagagagattataaccaagcatcatatagcaaggactaacccctataccttctgcatcatgaatgttaatctagaatataacttttgcaaggtagagcgaaatgcttatacccccgtaatccagacgagtctacctacagatactagcttagagcagcacacccagtctatgttgcgacaatagtgggaagatttatagtgtagaggcgacgaacctaccgagcctggtcatagctgggcgctcgtctaggagtgtccaagttcaactttaa

SEQ ID NO: 582882 - DNA, 510 bp, Homo sapiens
tactctaagaacaatccttcctggtgatagctattactcaaatgacaaaagctgggggaaataccttgtaaatatcagaaaaaaacttctcctcctaagtagtttaaaaatatgcagataggcgggcacagtggctcacacttgtaatcccaacactttgggaggccaaggcagacacatcactcgaggccaggagtccgagaccagcctggccaatgtggcaaaaccccatctctacaaaaaaacacaaaaattagctgggcgtaattccagctttttaggagggctggaggataagaatttgcttgagcccgggaggcagaggttgcaatgagctgagattggaccactgcactccagcctgggaaacagagcaagactcatttgtaggtgcttaataaatattttgttgaatgattgtttaacttaagtactcttccaaaatagttgtaaaaaaaaagttataattcaaactgtttgttttcttccaggatagttacgtttttgtac

SEQ ID NO: 582883 - DNA, 101 bp, Homo sapiens
ctccaccttactaccagacaacttagccaaaccataaccaaataaagtataggcgatagaattgaaacctggcgcatagatatagtaccgcaagaaaagtg

SEQ ID NO: 582884 - DNA, 887 bp, Homo sapiens
  misc_feature (33)..(33): n is a, c, g, or t
  misc_feature (69)..(69): n is a, c, g, or t
  misc_feature (71)..(71): n is a, c, g, or t
  misc_feature (86)..(86): n is a, c, g, or t
  misc_feature (97)..(97): n is a, c, g, or t
  misc_feature (103)..(103): n is a, c, g, or t
  misc_feature (112)..(112): n is a, c, g, or t
  misc_feature (126)..(126): n is a, c, g, or t
  misc_feature (152)..(152): n is a, c, g, or t
  misc_feature (162)..(162): n is a, c, g, or t
  misc_feature (166)..(166): n is a, c, g, or t
  misc_feature (174)..(174): n is a, c, g, or t
  misc_feature (200)..(200): n is a, c, g, or t
  misc_feature (211)..(211): n is a, c, g, or t
  misc_feature (213)..(213): n is a, c, g, or t
  misc_feature (217)..(217): n is a, c, g, or t
  misc_feature (220)..(220): n is a, c, g, or t
  misc_feature (223)..(223): n is a, c, g, or t
  misc_feature (229)..(229): n is a, c, g, or t
  misc_feature (233)..(233): n is a, c, g, or t
  misc_feature (304)..(304): n is a, c, g, or t
  misc_feature (316)..(316): n is a, c, g, or t
  misc_feature (336)..(336): n is a, c, g, or t
  misc_feature (345)..(346): n is a, c, g, or t
  misc_feature (362)..(362): n is a, c, g, or t
  misc_feature (369)..(369): n is a, c, g, or t
  misc_feature (410)..(410): n is a, c, g, or t
  misc_feature (418)..(418): n is a, c, g, or t
  misc_feature (423)..(423): n is a, c, g, or t
  misc_feature (431)..(431): n is a, c, g, or t
  misc_feature (441)..(441): n is a, c, g, or t
  misc_feature (446)..(446): n is a, c, g, or t
  misc_feature (455)..(455): n is a, c, g, or t
  misc_feature (460)..(460): n is a, c, g, or t
  misc_feature (467)..(467): n is a, c, g, or t
  misc_feature (469)..(471): n is a, c, g, or t
  misc_feature (476)..(476): n is a, c, g, or t
  misc_feature (480)..(480): n is a, c, g, or t
  misc_feature (496)..(496): n is a, c, g, or t
  misc_feature (520)..(520): n is a, c, g, or t
  misc_feature (583)..(583): n is a, c, g, or t
  misc_feature (585)..(585): n is a, c, g, or t
  misc_feature (602)..(602): n is a, c, g, or t
  misc_feature (618)..(618): n is a, c, g, or t
  misc_feature (641)..(641): n is a, c, g, or t
  misc_feature (645)..(645): n is a, c, g, or t
  misc_feature (657)..(657): n is a, c, g, or t
  misc_feature (664)..(664): n is a, c, g, or t
  misc_feature (670)..(670): n is a, c, g, or t
  misc_feature (676)..(676): n is a, c, g, or t
  misc_feature (681)..(681): n is a, c, g, or t
  misc_feature (704)..(704): n is a, c, g, or t
  misc_feature (716)..(716): n is a, c, g, or t
  misc_feature (719)..(719): n is a, c, g, or t
  misc_feature (722)..(722): n is a, c, g, or t
  misc_feature (725)..(725): n is a, c, g, or t
  misc_feature (739)..(739): n is a, c, g, or t
  misc_feature (750)..(750): n is a, c, g, or t
  misc_feature (766)..(766): n is a, c, g, or t
  misc_feature (783)..(783): n is a, c, g, or t
  misc_feature (866)..(866): n is a, c, g, or t
tttgtcagcagatcaatgttaataacaaatcangttttttttttaaaaaaaacagtgaacagtgttttntncaagcatattgactntttctttcttnaccttnaacattctnaacgtaaaattgtnaagaagattctcctgagttatctttnatgatatttntttnattttctncctcttcccaaaagaaaatttttttnaattttttttntnaatnctnttntctgtnatcngcgtttgatttaaaaatattaaaacccacagggcgtgacacagaatattttctcaataaattgtggctgancaaattaacgangcatccacagagccctcaanacattttannagggcagtcttagggngcaggcnggcgaaggggacaatagtctttgggggcgagcacataggcntttcctangggcnaacattcnacctttaatntctcnatttgccantcagntttcttngnnnttttncacnaatcttaatacaatcntttctttgggttgttttcgttatnttcagagagggaccccaaagaaaatatactgattgtgacataacaaaaaaaaatcaatgattntnggctttaacacagtttntaaccatagtgtcctnataagacataaataataatcttnaatnaatttagttatntacagtnccattnaatgtnagtgncaatgagatgtggaaaagaagtnttttcgtcattnttnttnttnctgagaactacttngatatcatttngttttgttttttaatnagaaagggcattaattngaatgggaacgtaactttttccagtcacaaaccccgtacagttctctcttgaggcactagcctctttgcatccatcttggttncagatagctaaaattagctat

SEQ ID NO: 582885 - DNA, 1265 bp, Homo sapiens
  misc_feature (584)..(584): n is a, c, g, or t
gtacagatctcccagtaatttttctatattcagcccataatctctttgaaggtttatactacaattcagcaatcccctcatcgttactccattcttctctaccatgcatttctcgttcttttactgggtctaaagggctatgccctccatcttcagagagcgttccaactacttctcttgcatacttctaaattcatacctatgagcaatatcatgcctagttcattcattgtctcaatataactgtcttagtacaccataaaactgggtggattataatacaatcatgaaatcttctcacgtctccttggaagagtctggcaaggtccaatggtcatacggcacgcaagcaagaatttggtcgtctggtgaggtgtcctcttcctcaacagggtgccttctctagctggtgtcctcactatgactggaaagggactagctgatccgctagtgggtggtctatctttgataaatgggctacttaatccctcattccattgagaagcgagacgcctcccatgtgcctcaattcacctttgccaaggaccccaaccttactattctaagagtacacatacacgctngcgtgacatacggtttccaacattagcgaaattgaagggtgatgcgacaactatcttggggaccaaacacgacatttgaatcccttgatcataaacctagaggtctctacttcgacgtccttttaatgcgatctaatcgcgtaccacttcttttggggcttggagcatccacacatactccgtggagatctgggtcatcaacgaagactcggcgtggggtgtcaatacaccctcggtccgcaattccggtcaaagaggattaccttatattacggcaacgttaaagccccctgaagaacgctacctacactctttcaacattacggaatgggccgagattagaacgcatttaatccctatcaggctgtccttgtcaccaaacccgagcattttatcttgcaattatacgcgccccaacgggaaacatcgggtccatcccccagtatggaggttccatgaaagctccgtctctcccccatttttgagcgtgaacgtgccataaccacacttcgttgccacggtgcgagtataaggaggacaaaaccaatgcggctacttaaatgactaggacccatttcggctacgaacggacacttcaatcccttctgataacattgagacgacgccaattttgggcgaataataattattaaacccgtgaggcaattgcacacacacagc

SEQ ID NO: 582886 - DNA, 929 bp, Homo sapiens
tgacagactataggcctcctcatatgcttagtactgttcaaatcttagattcagaatggcagcagtgtacgcggatgttaactactctttccaatggataatgggggcccgaccctagtctgcctagtggcatcctactataataatgtatcttattgataggatcatcatatgaactcactctatcaatgaagttcgtctgacacatggccgattgctttcatcacacataagccatgatacgagtatgaataggtttccagcatgtcggacagtagctgtgtgatagcccaatcataatttgattgactcgctccgtcagaccttatagtcatgagacattgtagcacgttgcagatagaacatgggagtctccatctgagacgcagtcccatggcaaggaataaggcggaaaagatagcatcgtcaaatgataaccgaaggacgtatgaatggcatttatcgacgcagattgctggaatagttcattttgccaaacacgagaagccctgccaacgtgggataagcagatccaatcacttggtttccaagtgaataacctttggagacaaattagtcgaacagcaccagaatggacaagcacgaagccatggaaggccaagaatggctcagagaatccgtcgcagaacttctgtgcgacgagtgaccatcatattatcccaatggtggtgccagatcaaggtttgacctattctccaataggcatttctgcatcattgaccctttaatacagtattccaactcaccctgttagaatgctgggcaaatcccggtcgtaccagacgccccatttatctcgcagccaggaagttacgccgcatctaagaatatggtaagttccccattatatatacagggggccccagggtatacagcggaaccagatgttctggaagggtttcttaaac

SEQ ID NO: 582887 - DNA, 261 bp, Homo sapiens
aaaagggggggggttttttttttcccctttttttttttccccaaaaaaaaaaaaaaaaggcccccttgggggggaaaccccccccccccccccgggggaacggggccgggggggggggttttttaattgggggtttttttttttttttttttaaacccgggggaaaagggcccccctttcccctttgggggaatcccccccttaacccccggggggggggggggggaattttttttttaaaaaaagttttttcccctttta

SEQ ID NO: 582888 - DNA, 144 bp, Homo sapiens
agcggggaacaatcactttctagcctagggagtcttaggagattcttgaaactagtcccttagttggggctgcgcttgtgctccaaatgctctctggcacctgcagtcttttcctgggttctggacagtcgcaggctccatttc

SEQ ID NO: 582889 - DNA, 1149 bp, Homo sapiens
  misc_feature (949)..(949): n is a, c, g, or t
  misc_feature (953)..(953): n is a, c, g, or t
  misc_feature (961)..(961): n is a, c, g, or t
  misc_feature (977)..(977): n is a, c, g, or t
  misc_feature (1011)..(1011): n is a, c, g, or t
  misc_feature (1035)..(1035): n is a, c, g, or t
  misc_feature (1039)..(1039): n is a, c, g, or t
  misc_feature (1044)..(1044): n is a, c, g, or t
  misc_feature (1048)..(1049): n is a, c, g, or t
  misc_feature (1051)..(1051): n is a, c, g, or t
  misc_feature (1057)..(1057): n is a, c, g, or t
  misc_feature (1066)..(1068): n is a, c, g, or t
  misc_feature (1072)..(1072): n is a, c, g, or t
  misc_feature (1077)..(1077): n is a, c, g, or t
  misc_feature (1124)..(1124): n is a, c, g, or t
atgcggattagcggccgcgggcggctggcggcagcggttggaggttgtaggaccggcgaggaataggaatcatggcggctgcgctgttcgtgctgctgggattcgcgctgctgggcacccacggagcctccggggctgccggcacagtcttcactaccgtagaagaccttggctccaagatactcctcacctgctccttgaatgacagcgccacagaggtcacagggcaccgctggctgaaggggggcgtggtgctgaaggaggacgcgctgcccggccagaaaacggagttcaaggtggactccgacgaccagtggggagagtactcctgcgtcttcctccccgagcccatgggcacggccaacatccagctccacgggcctcccagagtgaaggctgtgaagtcgtcagaacacatcaacgagggggagacggccatgctggtctgcaagtcagagtccgtgccacctgtcactgactgggcctggtacaagatcactgactctgaggacaaggccctcatgaacggctccgagagcaggttcttcgtgagttcctcgcagggccggtcagagctacacattgagaacctgaacatggaggccgaccccggccagtaccggtgcaacggcaccagctccaagggctccgaccaggccatcatcacgctccgcgtgcgcagccacctggccgccctctggcccttcctgggcatcgtggctgaggtgctggtgctggtcaccatcatcttcatctacgagaagcgccggaagcccgaggacgtcctggatgatgacgacgccggctctgcacccctgaagagcagcgggcagcaccagaatgacaaaggcaagaacgtccgccagaggaactcttcctgaggcaggtggcccgaggacgctccctgctccgcgtctgcgccgccgccggagtccactcccaggcgggncaanaggccaanggcgcaccgcggaaanaaacccaccccggagaggcccagcagacacggcnggcggggggaaaaaaggggggggngcangcacnagtnngncggacnggggggccnnngcanggggnacacaccccccacgccgcccgcccccccgggcgccgggaccgggccnggaggagcccccgcccccaaacggg

SEQ ID NO: 582890 - DNA, 230 bp, Homo sapiens
gatgttctgtctgtgacttgaatggaaacatcccaaagaagtttctgagaatgcttctgtctagattttacctgaagacaatcccgtttcccacgaaatcctcaaagctatgcaaatatcctcttgcagattctacaaaaagagtgattcaaaactgctccttcaaaacggtggttcaattctcttagttgagtacacacgtctcatataagtttctgagaatgaaccac

SEQ ID NO: 582891 - DNA, 764 bp, Homo sapiens
atgcggattagcggccgcgggcggctggcggcagcggttggaggttgtaggaccggcgaggaataggaatcatggcggctgcgctgttcgtgctgctgggattcgcgctgctgggcacccacggagcctccggggctgccggcacagtcttcactaccgtagaagaccttggctccaagatactcctcacctgctccttgaatgacagcgccacagaggtcacagggcaccgctggctgaaggggggcgtggtgctgaaggaggacgcgctgcccggccagaaaacggagttcaaggtggactccgacgaccagtggggagagtactctcgtgcagtctatccttccaccggagtcgccatgaggtcgactgggccaaaacattccacgctcgcaccggtgcgctcccaggaacgtgagacgtgcgtgtcgcatacgtctgctcaagataccactatccaatcgcgaggcggtgcacgacagtgcaccattgcgtagagtcgtgctaaagtccacgcagtccatgtcgccaacacgtggtacaacactgaagcatggaagcccttggttacgaaagaatcgacttgagcgtcttcgatgtgacaagggccgctcgatttgaatctgtgctcccagaaggatgcaagagattcttcagtcgacgattcgctccgctaggtgccgggtccagattgctacaacattttgaagacaaccttgaaaccattggatgtgcccagatcccccagtgccaatgtaaccctg

SEQ ID NO: 582892 - DNA, 163 bp, Homo sapiens
atgcggattagcggccgcgggcggctggcggcagcggttggaggttgtaggaccggcgaggaataggaatcatggcggctgcgctgttcgtgctgctgggattcgcgcgcccacaacccacgcgcccacgcgccccaaccggggagtccgtctagaggcgacc

SEQ ID NO: 582893 - DNA, 1628 bp, Homo sapiens
  misc_feature (1591)..(1591): n is a, c, g, or t
  misc_feature (1599)..(1601): n is a, c, g, or t
  misc_feature (1603)..(1604): n is a, c, g, or t
atgcggattagcggccgcgggcggctggcggcagcggttggaggttgtaggaccggcgaggaataggaatcatggcggctgcgctgttcgtgctgctgggattcgcgctgctgggcacccacggagcctccggggctgccggcacagtcttcactaccgtagaagaccttggctccaagatactcctcacctgctccttgaatgacagcgccacagaggtcacagggcaccgctggctgaaggggggcgtggtgctgaaggaggacgcgctgcccggccagaaaacggagttcaaggtggactccgacgaccagtggggagagtactcctgcgtcttcctccccgagcccatgggcacggccaacatccagctccacgggcctcccagagtgaaggctgtgaagtcgtcagaacacatcaacgagggggagacggccatgctggtctgcaagtcagagtccgtgccacctgtcactgactgggcctggtacaagatcactgactctgaggacaaggccctcatgaacggctccgagagcaggttcttcgtgagttcctcgcagggccggtcagagctacacattgagaacctgaacatggaggccgaccccggccagtaccggtgcaacggcaccagctccaagggctccgaccaggccatcatcacgctccgcgtgcgcagccacctggccgccctctggcccttcctgggcatcgtggctgaggtgctggtgctggtcaccatcatcttcatctacgagaagcgccggaagcccgaggacgtcctggatgatgacgacgccggctctgcacccctgaagagcagcgggcagcaccagaatgacaaaggcaagaacgtccgccagaggaactcttcctgaggcaggtggcccgaggacgctccctgctccgcgtctgcgccgccgccggagtccactcccagtgcttgcaagattccaagttctcacctcttaaagaaaacccaccccgtagattcccatcatacacttccttcttttttaaaaaagttgggttttctccattcaggattctgttccttaggattttttccttctgaagtgtttcacgagagcccgggagctgctgcctgcggccccgtctgtgctttcagcctctgggtctgagtcatggccgggtgggcggcacagccttctccactggccggagtcagtgccaggtccttgccctttgtggaaagtcacaggtcacacgaggggccccgtgtcctgcctgtctgaagccaatgctgtctggttgcgccatttttgtgcttttatgtttaattttatgagggccacgggtctgtgttcgactcagcctcagggacgactctgacctcttggccacagaggactcacttgcccacaccgagggcgaccccgtcacagcctcaagtcactcccaagccccctccttgtctgtgcatccgggggcagctctggagggggtttgctggggaactggcgccatcgccgggactccagaaccgcagaagcctccccagctcacccctggaggacggccggctctctatagcaccagggctcacgtgggaacccccctcccaccnaccgccannntnnagatcgcccccacctccaccctca

SEQ ID NO: 582894 - DNA, 723 bp, Homo sapiens
ctggagggatctttctcttctcccctcccttcttaggatcccgggatccttgatttcttcctgggggcctctctcgaaggatgagctttttaagattatctcctgtcccggaatcagtacccctgccggcccagcgccacccaggttccagcgccatttgttgctatccgggactaccatgtccccctccggtcttgggtggttaagtgctcccaggaggtggcccccccccttccgtggggcccatcatcctggcccagctcttcccatctgtccccctgccccagaggctactgggggcaccagatcggccagcccccccctgtccccttgccaggtgacccggccccttcggctctgtgctggtacgcctcattcctgcacccacggggcactggcactcgtctccgcaccctgtgccttagagagctgctcactgatggctggtatcgagtgactgctacaccctcagcccggggctgccctgcccaccctgggccacttcgcccaggccccctttgatgccctttttatagacctacacagctacctgagcccccgagccttctggaaggagactgtattcccccagtctccctatcaggagttccctgaccccctcgtccagacccccccccgagtttccctgcagcggactccggctcccactgtggctaccacctagggtttttataccagaaaaattaagtgaattaagcgtga

SEQ ID NO: 582895 - DNA, 324 bp, Homo sapiens
gcgtcgaccaacgctctaatcccggccttggctttcaagtgaccaacccccatcctgaagctggccagggactgccagccatcaatcaatcattagcatgcaaaaagacatactttggagactccaaggattttaggaattctatggcagaaaatggagatgaacaccaaatagaaggccgggcacagtggcaggcgcctgtaatcccagctactcaggaggctgaggcaagagaatcacttgaacccaggaggcggaggttgcagtgagccgagatggcgccactgcattccagcctgggcaacaagaacgaaattccgtctc

SEQ ID NO: 582896 - DNA, 1677 bp, Homo sapiens
  misc_feature (1640)..(1640): n is a, c, g, or t
  misc_feature (1648)..(1650): n is a, c, g, or t
  misc_feature (1652)..(1653): n is a, c, g, or t
atgcggattagcggccgcgggcggctggcggcagcggttggaggttgtaggaccggcgaggaataggaatcatggcggctgcgctgttcgtgctgctgggattcgcgctgctgggcacccacggagcctccggggctgccggcacagtcttcactaccgtagaagaccttggctccaagatactcctcacctgctccttgaatgacagcgccacagaggtcacagggcaccgctggctgaaggggggcgtggtgctgaaggaggacgcgctgcccggccagaaaacggagttcaaggtggactccgacgaccagtggggagagtactcctgcgtcttcctccccgagcccatgggcacggccaacatccagctccacgggcctcccagagtgaaggctgtgaagtcgtcagaacacatcaacgagggggagacggccatgctggtctgcaagtcagagtccgtgccacctgtcactgactgggcctggtacaagatcactgactctgaggacaaggccctcatgaacggctccgagagcaggttcttcgtgagttcctcgcagggccggtcagagctacacattgagaacctgaacatggaggccgaccccggccagtaccggtgcaacggcaccagctccaagggctccgaccaggccatcatcacgctccgcgtgcgcagccacctggccgccctctggcccttcctgggcatcgtggctgaggtgctggtgctggtcaccatcatcttcatctacgagaagcgccggaagcccgaggacgtcctggatgatgacgacgccggctctgcacccctgaagagcagcgggcagcaccagaatgacaaaggcaagaacgtccgccagaggaactcttcctgaggcaggtggcccgaggacgctccctgctccgcgtctgcgccgccgccggagtccactcccagtgcttgcaagattccaagttctcacctcttaaagaaaacccaccccgtagattcccatcatacacttccttcttttttaaaaaagttgggttttctccattcaggattctgttccttaggattttttccttctgaagtgtttcacgagagcccgggagctgctgcctgcggccccgtctgtgctttcagcctctgggtctgagtcatggccgggtgggcggcacagccttctccactggccggagtcagtgccaggtccttgccctttgtggaaagtcacaggtcacacgaggggccccgtgtcctgcctgtctgaagccaatgctgtctggttgcgccatttttgtgcttttatgtttaattttatgagggccacgggtctgtgttcgactcagcctcagggacgactctgacctcttggccacagaggactcacttgcccacaccgagggcgaccccgtcacagcctcaagtcactcccaagccccctccttgtctgggggggggggggggggagaggggggggggggggggggggggggggggggtgcatccgggggcagctctggagggggtttgctggggaactggcgccatcgccgggactccagaaccgcagaagcctccccagctcacccctggaggacggccggctctctatagcaccagggctcacgtgggaacccccctcccaccnaccgccannntnnagatcgcccccacctccaccctca

SEQ ID NO: 582897 - DNA, 560 bp, Homo sapiens
  misc_feature (16)..(17): n is a, c, g, or t
  misc_feature (68)..(68): n is a, c, g, or t
  misc_feature (350)..(350): n is a, c, g, or t
gtgacggcggcgtggnncgagccagttccgtggtcgtcaacttcagcgatgcgcagacggcggaagancccgcaaggtgctcgccgcgtcggtcaccgaactgcaatgggcgacccagcccggcggcggcggcacgaggttcgtcggtacgttcacgccggccgtgcagaaatccgtcgaggacgccgcgctcaagcagaacctgacgacgctccacaaccgcgtgaacgaactcggcgtgtccgagccgatccttgcagcagcaaggcagcgaccgcatcgtcgtcgaacttccgggcgtgcaggacaccgcgaaggcgaaggacatcatcggccgtaccgcgacgctngaggcccgcctcgccgatccgatcaacacgcacccgaacccgaacgaccccgttccgccgggcgaggagctgttcacgcagggcatccaggcgcccgtgctgctgaagaaggacgtgatcttcaccggcgaccgatcatcgatgcatcggccggcttcgacgaacaccagcgtccgtcggtcaacatccgcctcgaaccgcggcggcccc

SEQ ID NO: 582898 - DNA, 298 bp, Homo sapiens
  misc_feature (85)..(85): n is a, c, g, or t
ccatcaactgttcacgttgctcggtgtcctgggccatcagctccagggcttcttgcagcagcaggcgtgattcgcccagctgctnatgctccagggcacgctgctcttccagctcagccaattcttcctgcaggcgccggcggcgcaattcgacctgctcggcgcgggcacggctggccgacaggctggcattgagttcgccatgcaggcggttttcttcctggctgcggcggcgcagctgttcgcgctgctcttccaggcccagctgctgctcgcgcagggtttggggtaccgagct

SEQ ID NO: 582899 - DNA, 295 bp, Homo sapiens
agaaacccaggcttcagcccacctcctaatgtgactgcttcccccagcatggcatggacttattggcagagacccacaaatgcgatcgaagctcctccgcaacaagtttccatatcaaccaaattatggaactgggacaacaaccatatccagcctttggtccagtgtctagtcctcccaatgcaatgatgtcgtcaagaatgggtccctcccagaatcccatgtatgcatgacccgcaggctgcatccatctatcattcctcagaaatgaatggctggccatcacgtactttgg

SEQ ID NO: 582900 - DNA, 1685 bp, Homo sapiens
  misc_feature (1280)..(1283): n is a, c, g, or t
  misc_feature (1287)..(1287): n is a, c, g, or t
  misc_feature (1289)..(1289): n is a, c, g, or t
  misc_feature (1292)..(1292): n is a, c, g, or t
  misc_feature (1297)..(1297): n is a, c, g, or t
  misc_feature (1303)..(1303): n is a, c, g, or t
  misc_feature (1306)..(1306): n is a, c, g, or t
  misc_feature (1308)..(1308): n is a, c, g, or t
  misc_feature (1310)..(1310): n is a, c, g, or t
  misc_feature (1318)..(1318): n is a, c, g, or t
  misc_feature (1648)..(1648): n is a, c, g, or t
  misc_feature (1656)..(1658): n is a, c, g, or t
  misc_feature (1660)..(1661): n is a, c, g, or t
atgcggattagcggccgcgggcggctggcggcagcggttggaggttgtaggaccggcgaggaataggaatcatggcggctgcgctgttcgtgctgctgggattcgcgctgctgggcacccacggagcctccggggctgccggcacagtcttcactaccgtagaagaccttggctccaagatactcctcacctgctccttgaatgacagcgccacagaggtcacagggcaccgctggctgaaggggggcgtggtgctgaaggaggacgcgctgcccggccagaaaacggagttcaaggtggactccgacgaccagtggggagagtactcctgcgtcttcctccccgagcccatgggcacggccaacatccagctccacgggcctcccagagtgaaggctgtgaagtcgtcagaacacatcaacgagggggagacggccatgctggtctgcaagtcagagtccgtgccacctgtcactgactgggcctggtacaagatcactgactctgaggacaaggccctcatgaacggctccgagagcaggttcttcgtgagttcctcgcagggccggtcagagctacacattgagaacctgaacatggaggccgaccccggccagtaccggtgcaacggcaccagctccaagggctccgaccaggccatcatcacgctccgcgtgcgcagccacctggccgccctctggcccttcctgggcatcgtggctgaggtgctggtgctggtcaccatcatcttcatctacgagaagcgccggaagcccgaggacgtcctggatgatgacgacgccggctctgcacccctgaagagcagcgggcagcaccagaatgacaaaggcaagaacgtccgccagaggaactcttcctgaggcaggtggcccgaggacgctccctgctccgcgtctgcgccgccgccggagtccactcccagtgcttgcaagattccaagttctcacctcttaaagaaaacccaccccgtagattcccatcatacacttccttcttttttaaaaaagttgggttttctccattcaggattctgttccttaggattttttccttctgaagtgtttcacgagagcccgggagctgctgcctgcggccccgtctgtgctttcagcctctgggtctgagtcatggccgggtgggcggcacagccttctccactggccggagtcagtgccaggtccttgccctttgtggaaagtcacaggtcacacgaggggccccgtgtcctgcctgtctgaagccaatgctgtctggttgcnnnntttntntgnttttntgtttnttntntntttgtttnttttgtttttttttttttgccatttttgtgcttttatgtttaattttatgagggccacgggtctgtgttcgactcagcctcagggacgactctgacctcttggccacagaggactcacttgcccacaccgagggcgaccccgtcacagcctcaagtcactcccaagccccctccttgtctgtgcatccgggggcagctctggagggggtttgctggggaactggcgccatcgccgggactccagaaccgcagaagcctccccagctcacccctggaggacggccggctctctatagcaccagggctcacgtgggaacccccctcccaccnaccgccannntnnagatcgcccccacctccaccctca

SEQ ID NO: 582901 - DNA, 1626 bp, Homo sapiens
  misc_feature (1099)..(1099): n is a, c, g, or t
  misc_feature (1217)..(1217): n is a, c, g, or t
  misc_feature (1274)..(1274): n is a, c, g, or t
  misc_feature (1589)..(1589): n is a, c, g, or t
  misc_feature (1597)..(1599): n is a, c, g, or t
  misc_feature (1601)..(1602): n is a, c, g, or t
atgcggattagcggccgcgggcggctggcggcagcggttggaggttgtaggaccggcgaggaataggaatcatggcggctgcgctgttcgtgctgctgggattcgcgctgctgggcacccacggagcctccggggctgccggcacagtcttcactaccgtagaagaccttggctccaagatactcctcacctgctccttgaatgacagcgccacagaggtcacagggcaccgctggctgaaggggggcgtggtgctgaaggaggacgcgctgcccggccagaaaacggagttcaaggtggactccgacgaccagtggggagagtactcctgcgtcttcctccccgagcccatgggcacggccaacatccagctccacgggcctcccagagtgaaggctgtgaagtcgtcagaacacatcaacgagggggagacggccatgctggtctgcaagtcagagtccgtgccacctgtcactgactgggcctggtacaagatcactgactctgaggacaaggccctcatgaacggctccgagagcaggttcttcgtgagttcctcgcagggccggtcagagctacacattgagaacctgaacatggaggccgaccccggccagtaccggtgcaacggcaccagctccaagggctccgaccaggccatcatcacgctccgcgtgcgcagccacctggccgccctctggcccttcctgggcatcgtggctgaggtgctggtgctggtcaccatcatcttcatctacgagaagcgccggaagcccgaggacgtcctggatgatgacgacgccggctctgcacccctgaagagcagcgggcagcaccagaatgacaaaggcaagaacgtccgccagaggaactcttcctgaggcaggtggcccgaggacgctccctgctccgcgtctgcgccgccgccggagtccactcccagtgcttgcaagattccaagttctcacctcttaaagaaaacccaccccgtagattcccatcatacacttccttcttttttcccacccttcccttttctccattcacccttctcttccttccctttttttccttctccactctttcccgccccccccgnccctcctccctccccccccctctctcctttccccctctggctctccctcctcccccgctgggcccccccccctctcccctcccccgcctccctcccccctccttcccctttctggccnctcccccctcccccccggccccccctctcctccctctctcccccccctgctctctgnttcgccatttttgtgcttttatgtttaattttatgagggccacgggtctgtgttcgactcagcctcagggacgactctgacctcttggccacagaggactcacttgcccacaccgagggcgaccccgtcacagcctcaagtcactcccaagccccctccttgtctgtgcatccgggggcagctctggagggggtttgctggggaactggcgccatcgccgggactccagaaccgcagaagcctccccagctcacccctggaggacggccggctctctatagcaccagggctcacgtgggaacccccctcccaccnaccgccannntnnagatcgcccccacctccaccctca

SEQ ID NO: 582902 - DNA, 944 bp, Homo sapiens
gctccagcctagcccctagcccccaattaggagggcaccgtgggccgcaaaggcagtcagcccgctaaatcccactagaagtcccatcctaaacacatccgtattactgccgcatcaggagtatcaatcacctgagctcacgcatagtctaatagaaaacaacgaaacaaataattcaagcactgcttattacacgtgtttactgggtctctatgtagaccctcctacaagcctcagagtacttcgagtctcccttcaccatttccgacggcatctacggtcaacatttgtagtagccacaggcttccagggacttcacgtcattatggctcaactttcctcactatctgcttcatccgccaagtaatatcatcactttagcatccaaacatcactttggcttcgaagccgacgcctgatactggcattttgtagatgtggcttgactatatactgtatgtctccatctattgatgagggtcttacccgcacacccaccccacccccacaacacaccgcaccacacaatggatacagaaaacgccgaaaaacccacggaccacactcaacccccgcaggcccacaacaccccgagcgcaacccgccacgcacacactccccgctccaacacccacacaaggttcaagaacggcaccgggggacgaaccacgactacacaccagaacccgcaaccccggcagctcgctaaaccaccgacacaagcccacagccaacaacgcacatgaaggaaccaacacgagcaagatcacgcatcaacaaacgaacacactaaccacagaacaccgcagccgtaccgccagccccgcgatacaaccccacacaaacacccacccagcgcccagacccgacaaccgcagacacagaccgacacacgcaagtgcagcacaaacagcacacgacaacccaccccaggacacacaaca

SEQ ID NO: 582903 - DNA, 638 bp, Homo sapiens
aggctgagaaagggccatatgagtgaagagtctaacgcagcctgagaaccaaactgaacgaagacctgtttgatccattcatagtgccaacaatactaggcgtacactcagctgcactgcacatactatgaacagctatattgatcctcaccttcaaatagcgcatgaagaacctaataattaacagggaataatgactaagcaaactaacctgaaagcagatgatgaccgtacacaacattaaaggacgaaccagagtgcttatactaatatccttgatcattaccattgacacatataagctcttgggactcgttgctcactcattgacactaaccacctaactagtgatcaacctagtcatggtgatcagcttatgatcgggcgcagtgatcataggctgatgctctaagatgttactagagattattgaaaccatcagcctactcatataaccaatagacctgaccgtacgcataaccgttaacattactgtgagggagatactgatgcacctaatcggaagcgccagactagcatgtcaatgcattacacttcctctacacttatagggtcacagtaggaatactactactatcatagaaatcgtttagacttaatccaagctacagtgtacc

SEQ ID NO: 582904 - DNA, 1515 bp, Homo sapiens
  misc_feature (1478)..(1478): n is a, c, g, or t
  misc_feature (1486)..(1488): n is a, c, g, or t
  misc_feature (1490)..(1491): n is a, c, g, or t
atgcggattagcggccgcgggcggctggcggcagcggttggaggttgtaggaccggcgaggaataggaatcatggcggctgcgctgttcgtgctgctgggattcgcgctgctgggcacccacggagcctccggggctgccggcacagtcttcactaccgtagaagaccttggctccaagatactcctcacctgctccttgaatgacagcgccacagaggtcacagggcaccgctggctgaaggggggcgtggtgctgaaggaggacgcgctgcccggccagaaaacggagttcaaggtggactccgacgaccagtggggagagtactcctgcgtcttcctccccgagcccatgggcacggccaacatccagctccacgggcctcccagagtgaaggctgtgaagtcgtcagaacacatcaacgagggggagacggccatgctggtctgcaagtcagagtccgtgccacctgtcactgactgggcctggtacaagatcactgactctgaggacaaggccctcatgaacggctccgagagcaggttcttcgtgagttcctcgcagggccggtcagagctacacattgagaacctgaacatggaggccgacccaggtgctggtgctggtcaccatcatcttcatctacgagaagcgccggaagcccgaggacgtcctggatgatgacgacgccggctctgcacccctgaagagcagcgggcagcaccagaatgacaaaggcaagaacgtccgccagaggaactcttcctgaggcaggtggcccgaggacgctccctgctccgcgtctgcgccgccgccggagtccactcccagtgcttgcaagattccaagttctcacctcttaaagaaaacccaccccgtagattcccatcatacacttccttcttttttaaaaaagttgggttttctccattcaggattctgttccttaggattttttccttctgaagtgtttcacgagagcccgggagctgctgcctgcggccccgtctgtgctttcagcctctgggtctgagtcatggccgggtgggcggcacagccttctccactggccggagtcagtgccaggtccttgccctttgtggaaagtcacaggtcacacgaggggccccgtgtcctgcctgtctgaagccaatgctgtctggttgcgccatttttgtgcttttatgtttaattttatgagggccacgggtctgtgttcgactcagcctcagggacgactctgacctcttggccacagaggactcacttgcccacaccgagggcgaccccgtcacagcctcaagtcactcccaagccccctccttgtctgtgcatccgggggcagctctggagggggtttgctggggaactggcgccatcgccgggactccagaaccgcagaagcctccccagctcacccctggaggacggccggctctctatagcaccagggctcacgtgggaacccccctcccaccnaccgccannntnnagatcgcccccacctccaccctca

SEQ ID NO: 582905 - DNA, 354 bp, Homo sapiens
aagtgtaggagatcaattgtagtacttttcgaaaagaaaaggttgtcgaacccacgaggagcagaaggaattagcgtgaagaaagcaaaggaacaataaaagtaaaagtgtgtagtgcgtgatttttgtggtgattgcgagtaaagtaaagtgcggaaagtaaattgcagcaagtaaaatatctcaaagagagacaagagcccaatcctctatatgcaagaggacaagctcgcaagtgtgtgtgtgtgaacaatgagagaaaaacgttcccgagggctacatggatttaggtggcatgatgattcattacataacatgttcgtgtatcttgtctaatttaattcctcttcggac

SEQ ID NO: 582906 - DNA, 1106 bp, Homo sapiens
gccccacaaataccactacatcgacgacctggtggtcatcctggcccagaacgtctgggagcacctgtacaacagattcgggggtgtgcccctgccgtgaaccacctgtactgtgtgctccatctgccaggtgtgagatctgaggcactgtgtcaatgctgcaggaggatcgagatctgacactcttcatacaagttgaacaacggcctatccaggccgagtgagtcgcacgtggcgtcatactactgcatcagcaatgcaagtggttccggtgagttgggaggctgttctgtcacggggaaggacaaccgagccccccgggcccattgacaacagcaggatcgcacaggtcaaccggcagcggacatgtccagactgaagcagggagctgactacagggcagataatcggaggagacctggaacatacctgaaacagcactgtactggaggtggccccgagaattgccatccgccagcagtgcaggcagcagaccgatgggcccaagagaacctgcaacggggaagccgaacgatcgcacaccgtgacgctgtagccgtcggtgatctggctagggcatagttctagcaggctccctgcaaagaacacttcctggcaggatgtggactgcacctgcgacatgccactggaacccacttgctgaactgccagattaaccaacaagaaccgatggtgccccccacccaccggcgcctactagcgcatttttgatgccacacatagctacactccatgatacagctagacatatacaccccaccgacgctatggaaggtgacatgcattgactatcactgcctacttacgacctgctcaaccatccctatccttccccacgtccccgccgccaacgaacccaagacaaatctggaacaaatacctccgactaagtcgcccatgcacgcgcctagagtgatgcagcattccacacgcatgaccactcacacatcgcagccaactatccaactcaccaagcccggacgccggcagtcaaaccctcctcccgccacagtcgcagaccgcggctagtctcggtccacccgagcagcccgccgaaccactagcactacaccaccgtgaactgc

SEQ ID NO: 582907 - DNA, 887 bp, Homo sapiens
gtctcatgttgcccaggcttgcctcaaactcctgggctcaagcaatctcctgcctcagcctcccaaagtgtttttctttttgagatggagtcttgctgtgtcacccaggctagagtacagttgtgcaatctcagctcactgcagcctctgatcccgggttcaagcgattctcctgcctcagcctcctgagtagatgggattacagatgcccaccaccgcgcccggctaatttttatatttttaatagtgacgggatttcaccatattggccaggctggtcttgaactcctgacctcatgatccacctgcctcagcctcccaaagtgctgggattacaggctgtgagccaccgtgcctggctaagcctagctaatttttcaaattatatttatttatttatttatctttgagacagagtcgcccaggctggagtgcagtggcacagtcttggctcactgcagcctccacccctggggttcaagtgattctcctgtctcagcctttctgttagctgggattacaggtgcccgccactgtgcctggctaatttttagtagagatggggtttcaccatgttggccaggctggtctcaccacgcctggccttatttatttatttatatttttaaacatttatttatttattttcgtgtgacagagtctcactctgtagcccaagctaaagtgcagtggcatcatcttggctcactgcaacttctgactcctgggctcgtgattctcatgcctcagcctcctgagtagctgggattataggcgcatgcaccaagccccagtatttcggatcatacgtagaggtgtggttcaccatgtgggccaggtggtgtaaactctatcaactcaggtcatccaaccacctcaactcccag

SEQ ID NO: 582908 - DNA, 138 bp, Homo sapiens
gctggccagaagggtacaagagccggtactctttatctcatggagtcgtatcaacgctatgaacgcaaggcggtgatatggaaccagaaggctgtctgaacttttgaaaccttggtgtggagattgactggtggtgcc

SEQ ID NO: 582909 - DNA, 735 bp, Homo sapiens
acaaaaaagaaatacgaccgaaaagtcgtgttatcggacaggcggggcgcatgtatgcccgaagtatgccccctgcctggcagacctttctcaaggaccaccgcatctactacatacaagaagcgggccctatcttggagggctgcgcctgcaccccggagcggatggacgaggctggctatcatccactgccccactgagaacgagccagactatggcccagtgtttcttctgcttcaaggagctggaaggctgggagccagatgacgaccccatagaggaacataaaaagcattcgtccggttgcgctttcctttctgtcaagaagcagtttgcacagaatataaccctatggtgcaattattatgcgaactagggacagcagcaccagcagcccacgcacacaaaatttgcacaaggcaaaccaaccaatcaagcacagcacacagcactcttgcaggcaaactagcgcaagcaaagtaggcgccgtgcccatcagcagcagctggctagccatggattgaggcctctggccggagctgcctgtgtcccagagtggctgcaccactatccagggtttatatccctggtgccaccagccttcccgtgggaccccttagcaatgtctataggaaaggagatcaacacttttcaaattagatgtttccaactgtgactctatgtatagtcttgaaagtggacaccagaggtgctatctgctgttgcagcggggtg

SEQ ID NO: 582910 - DNA, 130 bp, Homo sapiens
tgtgggtacagtcagagtcatagataataactgtgtcagcagtggacagattgatttcgaggcccccagctcaagtggaaagcaagaagcagaacttgtgagcaaccggtgcattgaaccggatagcttg

SEQ ID NO: 582911 - DNA, 907 bp, Homo sapiens
ggtggctgggcaacagtggctcatgtctgtaatcccaataatttgaaaggccgaggagggcggatcacctgaggtcaagagttcgagaccagcctgccaacatagtgaaaccccgtctctactaaaaatacaaaaattagctgggtgtggtgtgcatggctgtaatcccagctactcgggaggctgatctggggtaaatactttttatctcctgggttggggatgggatgtgtccttatcattttctaagttccatgagtgtgtgacccttagtattgcctaatttatcgctcttacagactttcttgatgtagggcatttaatggtattgaacttttccttcttagcagtgtttttggcgtaatcccaagaaggtctttgataagggttgtgtcgtcaactatctaagtgtcacagttacaaaggaatttttacaatttcccaattttgatttcatgtgttgaccacaatgatcattcaagagcaggttatttaattctatatatttgatggatcgagggttctttgagttgattccaattttattccatgtggtctgagagaacatggatacgatttcaatttcttaaattaatggtcttgttgtgtgggctatccatattctatctgggagaatgttcaatgtgtggtgatagaaggtaggacatcaagttgtacaagattgaaggtaattttagtgaatagtgcttaatacacacgtaaacttggatcagtgcttttgggaataagctggattcggatactaagagagaagaccgatcagatggtggttacccggagagacaaaaaaaaaaaatgtggggcggaagtaaattgtggggagaaagaatgtcaagaggagtgtcaaacgggcgcacatgttcttacctgcggtcagtgtctacaa

SEQ ID NO: 582912 - DNA, 102 bp, Homo sapiens
gggtggtattggcgatcacgagttgccatttaggggacagcattaggtacagccctttaggtaacagccatttaggtaccagccatttaggtaacagccatt

SEQ ID NO: 582913 - DNA, 303 bp, Homo sapiens
aaaccaaaccccccccaaaaaaaactgtttaaaccccccccctgttccccccccttttgggcccccagggtctggggggattttaggggtttccccccccccccccccccccgggttcttcagggcccccctttttttttggtttggggttgggggggggttgggggcccccttttcccccccccggggccggggggccctaagggccccccccggccaaaaaaacccccactgggccccccccccgggtttccccccccccttttcccaaaccccctttttttttaaattttatttttttta

SEQ ID NO: 582914 - DNA, 462 bp, Homo sapiens
gaccacctcatcctgcccggctagagcagcgatgtgcagggccgtgttccccttttggttgtcgtttctagaatgatttctttgtgcagaagttcaaccaccattttcacatggccttccttagaagccagatgcaagccattcaacccattctgtaaagagcagagaggcgggaagggcatggttagtcaaatggtgctttctgcacgtcccagtgggggcccaggccccttcccagccctgaggtgttcacagcactggagaaaaggagtggagtgtgtctagaggttggaaggggcacagggcagggccacccagcctccccttcacgcctcaggtcacaacagagcagagatggaaaggaagggcaagaactagcccgccactcccagatgtgaattaggcagtaagctctcacaacacccatggtgaccttgaaattcatgtcgaggccaggcttta

SEQ ID NO: 582915 - DNA, 421 bp, Homo sapiens
gctcgacggactttaaactgtactgctatgtagttagagattaagttgttgatacggtttggctgtgtcctcccaaatctcatcttgaattgtagttcctataatccccacctgtcatggaaaggacccagtgggaggtaattgaatcatgggggtggcttcccccatgctattctcgtgacagtaagttctcacaaggtgtgatggttttataaggggcttccccttttgcttggttctcattctctctcctgccaccatgtgaagaaggatgtgttcacttccccttccaacaaggactgtaaggttccctgaggcctccccagctgtgtggaactgtgagtcaattaaacctcttttctttataaattacctggtctcgggcatttcttcatagcaacatggtaatacaggtcgacgc

SEQ ID NO: 582916 - DNA, 204 bp, Homo sapiens
gtttccttttaaaaaatggaattgttccttggtgggggaagaatgttgtaatttttacttattaaaggccccttgttaagttttttaggttttcctggtgggttttcttgttggtttcctgctagcagggccaaaattgttaaattttttggtttaaaatttgggggcctttttgtcctttttggaatggggtgcttttaccca

SEQ ID NO: 582917 - DNA, 335 bp, Homo sapiens
aatgcaccttggcctccacctgtgggtgcttcatgccacgcaagaagcctatagcgcagggtggtccccaagtagacctccgtgttggggttcttctcctcctctggcatgcgattgagaaagaagccaatagagtcccgtgggaaattgggatccagcgtacgctggttgtgctccaccttctgtggctatgaagtcctccagcccttacagcacttgaaaggcctgttcctgtgtgtcctggcagtgtgtttcatcaccgaagagaccctctcatagagctgccccgtagaggttcacgtgatctgaaagactccgagcctcatgcgccacag

SEQ ID NO: 582918 - DNA, 323 bp, Homo sapiens
  misc_feature (2)..(2): n is a, c, g, or t
  misc_feature (16)..(16): n is a, c, g, or t
  misc_feature (180)..(180): n is a, c, g, or t
  misc_feature (213)..(213): n is a, c, g, or t
  misc_feature (220)..(220): n is a, c, g, or t
  misc_feature (246)..(246): n is a, c, g, or t
  misc_feature (279)..(279): n is a, c, g, or t
  misc_feature (297)..(297): n is a, c, g, or t
  misc_feature (321)..(321): n is a, c, g, or t
tnaaagcatttcctcntgaatattttattcagaaaaaaaaacacaaaaagataagacagaaacaaaaatcccagtcatctgcagtatctgtcggttttcaatttggttctcttttttaaataaagaaaaatagtaaaattaatctatgtaaaacatgccatatatattcaacgtgctacntaaatataaaaagctttaaaacctgtgtgttcnattttgngttattgtattaccacaacacttatnttaaaacatgtatacttttaaattgggtttccntaaaaaaatggattctantcttataaaacgttatttcctaanta

SEQ ID NO: 582919 - DNA, 1478 bp, Homo sapiens
tttgtgaccccagtgctgcggccgcaaggtgcgcagtagtggtgctggtgcctggggcaccagtcgggttttggtttttgctcctgccctggcctgatgctgcatgtggacctgcactggtgccctgggtctcccgcctgcagagtgagcctgctggccctgtggcctgtgggtgatgcctgtgcgctgaccacctgcgctgctgtcccctgcatgtgcagcctggcctgcctgccatgtgcctgaccaccttgatgctcgcctgagtggctacctgcctggtgcagatggcctgcctgtcctgcctgctgtgcctgcccatgtgccctcatgctgctccgtgactctgcctgcctgtactgctggtgccctgtgtgccttgtgacatgttggtgcttgatgtgcctgctggtggtgtgctccgcctgtgtggcctgcctgcctgcccctggcaaccctgtgtggcccttggctgtactggtggcccttcggtgcctgccttgtcctcctttccatgcacctttctctggcctgttgcccttctctgcctgtgcctgctgtggtgcgatcgctgcacccttgccagcgctttgttgtgctgaccgcatgtacaccctgggcccgctgctgggcctggtggcccacccaactgctcctgcggggaagggccccccccctgtggggcccccgcaatgaccatcgatggcacaaaatagctgccgagcaacgcccccagcccggccaggacccggctagacacacgccccttgagggccgcggcacttggcaccggcctagaaacctccagtcctgaaccgaacggcgaaggcgaggccttgaccacggttcacgacattgagaacgcgcctttgggcaacagcactccatgtgcgcgcttgagcagcccctagcgtgattctgccagcccagagcacaatatgcacaccagagaacgctacctttccccattagtctgacccaacagcacaagcccagaaggttccagaaccaattgcgcttaccaatccagcaaagcctatcggagagcgcgtccgacgcagccacggccccagcaccagggcacatcaccagtcgcagcgcctgtgccttaaatcgggctcacagaggagccagggcagccacctgacaccgagctagccaagtcccagagcacagcaagagcgcgtcacacaggggagccccggacaagtcgttcctctcggcacgagacaacaccactgcaaccccaggccgaccctgggccccgcagagccggcagcacactccagagcgaagtggtaagaaaacacgcagccagcaagtgaaaacgccaagggcgccagcgagaacactcgaaccgtgagcaaccccaggtgcggcaacctacgacgcatagaagccacagagtacgaacagcagcagagagtggcaaaaaccacagcatgcccagcagcgcccgcgcgagccagcggagacat

SEQ ID NO: 582920 - DNA, 712 bp, Homo sapiens
gcaggagggctggcaccgagctcgctcagatgactacttgagcctgggccacccgttctggcgaggcactggggccagggcactggtgtcaccccgctttgagcggtgtggctgggcttcccagcgttcgtctgcccgcacccccgctgccaatcgggacctgccagggcccaggcccaccccgttggcctgcagggctggatgacctcgggtacgatctggctaccgggagctacgagccatcattccagcgccggtagcggcctcctccatgctgctctccttccgtgactcgaccctttgggggggcttgcgttaccctttcgaacccttggcccagtccccttgccgtccatttcccacccagagggcctccgggctcaccaaggggttgtgcgggccggtacacccctaggtctcccggggcccgtgagatgccgataccgtgccggaagaaaaccgctggccactgacggtgggtcctatgaagcggcacgaaaagcacgccccgagcggggccgcaaagcgttcatggcttgagccccccgcgagaggaaacagcgcatgacccgccttgcgattaccgtggcgaccgagggtccccaagaagcaaaagcgccagatgggcagaagtgggaacgccctgcgacagggagaacggggggacccatgtggccccaccacagagagaactcacgagggtaaccacaac

SEQ ID NO: 582921 - DNA, 835 bp, Homo sapiens
tgtgtttgtcctccgcccttgggcgtcccccccttcccggccgcttatttgccccccggggcttttaacatgtccgccccgttcttatatctggccggcccctgttataccgtccccgcatcctgggttggctccgcccttcccatcgccgacagagtcccgtgtggcgtatcgcaccccaagctgtcttgtcgccactctcgtttatcaccctgggggtcctcatacaccgttgttgccgaggatgcgagaaaatctttggggcccccaggaggcgcccccctttgggccacctcatgtcccccccacgccgtctcccctgctcccccctcccacccggggtgctgtggccccccctccgcgtggttatttacgaggcttcccccccaaagtcgacccgtttgctgtacagtagagcagcaccgggaacccctcgttcaccggtgcttctgcgagggcctccatcccctatgcgcgatgaacttccggggctggtcttcccgccaccaagccagatgtccgcccccctgacttcttccttgtgcgcggtgtcacccgctgacaagcaccttctgtgcccacgatctgtgctcccgctgcagggcacaaaaaaagtgctgttcttccacacaggccgacgcagccgctgagactctctctcccccgcagtaagggtcctcccccctcgccccggcactgtggcaaaacaagcagacgaccccaatattatggcggccccccacgacacccgaggtgaacaaggcgctccccgaggcaaaacatgcgaacatcgtgttcagattccaaaaactagggccgggtaaaaccccatgac

SEQ ID NO: 582922 - DNA, 318 bp, Homo sapiens
cgcacatgcacagaatggtgattgtgaagctcttgcccggcagagtgtctcgagtgtacctgcagtgcgccgtatagctggacatgatccactctcgcatgtgcgcagtggcgcagactgacgggtactgcttcattgagcaaggcaccatcaatgctctgggtgaggtctatcggaccgcacgagaagcggagctagcgtgttcgagaactgacggacatggatcctagtgatctgccatatatagagtgagacatgttgattacgagagtgtaggctatggactcatggggaccgattgagctgactgatggtact

SEQ ID NO: 582923 - DNA, 185 bp, Homo sapiens
  misc_feature (19)..(19): n is a, c, g, or t
ccccccctttcaggggtanaaaaaggaacccccccccccatttcccccccctcaaacccacccccaaggttgtcaactttggatttctggggcccggccccctggaggggatacttaggggtttttaggttttttttttaaaaaataaaaactaggggggttttatgccctttttactttggcca

SEQ ID NO: 582924 - DNA, 129 bp, Homo sapiens
tacaggtgtcgagactatgcctggtaactttttcgatttttagtggcaggtttcaccatgttggcaggctggtcttgaactcctgacctcaaatgatccactcaccttggcctcccaaagtgatgggat

SEQ ID NO: 582925 - DNA, 130 bp, Homo sapiens
atatatttttctttaaaaagtcaagggttctctattgtgagtacattacatgtacatttgtgttgtgtgatgataagatgtaatgactgtttcattgtccatcacacaatatagaacccttgacttttta

SEQ ID NO: 582926 - DNA, 111 bp, Homo sapiens
aatggcttagcgggaggtcttggtggttttgtattcatttcacttgttgccccaggctccggtgtactcgtgcagccatcgacagtgacgctgtcccaacggtgaccggcg

SEQ ID NO: 582927 - DNA, 786 bp, Homo sapiens
  misc_feature (409)..(409): n is a, c, g, or t
ggaggaggaggaggagaaggctctgggctcctctgcaaaaataacaataaaaaaatcacatcaacacattttacacaacaataataaaaattcactatatacacatataagcgaaataacaaaggaagtctcagttcacaaaaacaaacaaacaaaaaacaaaacaaaaaaaacaattttgggggggcgcggcgcctcgcgcgcccccgagagagaaggttttcaaacccccactgggtggggggcggcgccggcggcgcccccagacgaattacaacggtcaacacacctattgtgacaacaaaagagcgatgtgggcgcaccaaaaaagagaaagaaccccgcgagggccaagagacacaaatagggggggaagggtgatattctccacacccaaggaaatacaganaacagccgccgcggggggcggaaaaaacccagaggagcgagcttccggacgacacacaacaccccaaacaagaaagggcgggactataccagggagaagggagcacaataaaccaagggggggcgaactacaatacaaacaacacaacggggggaggtctcccaaccaagcgaggaaaggacggccgagcggagtaaacaacaaaagattacagaccgaccccaccagcggcgtgttggtgagaagaacaacagacgaacggcaaacaacacgaatgaccagatcgcagcacaccaagcacacaaaccaatcaaagacagcacagcagagcagagcagcacaaagaatgaacatacacgcaacaacgacaaagagcg

SEQ ID NO: 582928 - DNA, 205 bp, Homo sapiens
cgataactatgctgtccacaggatcacgccacctctcttcctgataccgacgcttcctcagtgtacacaaggaccacgccacctcatcttcctgattcaccgagtactttcctcagtcatccacaaggatcaggacacctcctcttccttgtcaccgagccatttccttcagttatccagcaggatgacgaccacgttccatctg

SEQ ID NO: 582929 - DNA, 107 bp, Homo sapiens
actcactgagtccgtgctactttgtgtcttttagtagaggtttcaccatgttggccaagctggatctggagagctcctgacctcaatgcgatccacccatctatggc

SEQ ID NO: 582930 - DNA, 639 bp, Homo sapiens
gtgagtcgtcggggtttcctgcttcaacatgtgcttgtgactgtgaaccctgtgctgctctgttcacccacccctgtgcctggcctgcccatagccatgccctcctgtcacctcttcacctgcaccctcgtgactgccccaaggccccctgcctgccgctccagcgccgcgcatgccacctgactgctgcctgccgcctctccttatgtcgccgccatgacagacctgcgtccacctcgcagtgtgcgccagaactaccaccagtgactcagatggcctgcatcaacccgccataatcaacctggagctctacgcctcctacgctttacctgtccatgtcttactacttcgaccgcgcatgactgtgcgcctttgaacgaacttctgccacatacctttcttcaccaactctccatgaggagagggaacatgctgaccacctgatgaagctgcagaaccaacgaggtggccgaatcttccttcaggatatcacgcacaccagactgtgatgactgggagagcgggctgaatgccatggagctgtgcattacatctggcaacacaatgtgaatcagtcactactggaactgcgcaaactgcccacctgcacaccacctgaccccccacttcgctgtccac

SEQ ID NO: 582931 - DNA, 143 bp, Homo sapiens
acgcactgtgcagcctccttgtcgctgtgcgacgcttgttgaaggacaggctgaggaggtgtatcgtctgtactcagaactcgcccctctcctcccaccccgtggtgcccctgtcagagctcagcaccctctgtgctaactcc

SEQ ID NO: 582932 - DNA, 379 bp, Homo sapiens
  misc_feature (356)..(356): n is a, c, g, or t
cctgaacttcataggaaagtatcgtcttactggtgttcaccgaagaaaggatctcgccggtactcacattgacgacgcgcaggttcacggcaatctgatcgagctggtattgcgtgtcggcaccgatgccaaaatatcttgccccaaccccgccagatttgacgttgctttcataaccgataatcgaaccttcaaccatgatatttgccgccgttaaagattgcagcgggattcggttattaatggcaaccgtgccgttttcttgtgccgcacgaataatcttgcgctcgttaagcaggttttgtaagccctggcgctccagcggtataaaccagcgagaatctttcagtgccgtnaccagcattgccgtggcgctttg

SEQ ID NO: 582933 - DNA, 325 bp, Homo sapiens
taaattcgcggccgcgtcgacccttgggcaaaaaagttttaggccaggcatggtgactcacacctgtaatcccaggactttgggaggccaaggtgggagggatcgcatgggcccaggagttcaagaccagcctgggcaacacgggatgatctcatctctacaaaaaataaacaaaatcaaccgggtgtggtgacatgtagctgtagtctcagctactccagaggctacggtgggaggatctcttgagaccaggagattgaggctgcagtgagccatgattgcaccactgcactccagcctgagtgacagagcaagaccctgtctc

SEQ ID NO: 582934 - DNA, 138 bp, Homo sapiens
  misc_feature (48)..(48): n is a, c, g, or t
ataaccagcttgtggatgttgaggaaaaacgcagacaggttactccantaagctgtagtatatataaattggagtagtccaaagaaatactttaagagtcttcgtgagaaaccgcaggctgttgagagccacctatgg

SEQ ID NO: 582935 - DNA, 775 bp, Homo sapiens
  misc_feature (161)..(161): n is a, c, g, or t
gctgaagcatcctggtgtcgacatggagcgtcgccccgcgccgttgttatcggtattgtaaagaagcaagccgtagccaaagtctcgcttctgccgaggtgtccctgatgccacagattcgcatttcatgaatctggtggccggagacagagggcgacatncgtgtggtatgcaggtattcctgccgttgtgttgcgcgccatcaatggcatgtcatgcagtgaagtagtgcagtgcagcctgctgcctgctgcacaggccctggcgaggatggcccggaagtgttggtggccaaagtaagttagcaattgggtatacaaaaagtttgatggcaaagagattcgagctttccaatatccgagaggttagccggctctcgacccctctttccactgttcactcgcagctagtcgagacaacgagtagtagtcgcatgatgctgagggcttgacaaggcatccaatacagggcatagctgtggtgcaccttatgggaaaacgccccaggggcactgttggacgcagggtatcacatttgatccatacggttatcatgggtccgatctcgacactcaatgcgtgcaagaaccaagttggaagcattgtgacttgatgcgccctggcgcaagtgggccaaagttcaagttttccttggctcgatcaagaatgatccatcatcttcataagaacgtgagggttgtgcacccaaggttcaatcgcgtgagtgaattgttgaatgacatggttggctgaaaagaggcgtgctcatgaccaga

SEQ ID NO: 582936 - DNA, 243 bp, Homo sapiens
ctgtggtgtacgtagcctactgtacatctcgtctcttgtcagcgcttcctcttccatcagctcctaagtgctgggcttcttacagctcttttctcatcctgtggccagaagcaatcactaggtccagcccaggctcagtgggtggggtcacacacagggcatgaatggcagagatgggccactcgttgaaggccatcttagaaagccctccctgtgtctttgctctctccatcccacggtaac

SEQ ID NO: 582937 - DNA, 1128 bp, Homo sapiens
cccgtcatctaactctgaccagtgcttcgcaggcacactcatcacgagcgctaaagctcgcactgattttttacctgagtaggcctagaaagtaaacatgctagctttttagttccagtttctaacccaaagaaagataagagcgcgtcgttccacagaagctgccatcaagtatttcctcacgcaagcaaccggatccataagtcgcttcgtaatagctatcctcttcaacaagtatactctccgggacgaatgaaccataaccgaatactaccaattcaatactcatcattaataatcataatggctatagcgaataaaactaggaatagcccccgtttcacttctgagtcccagaggttaggccaagggcacccgctctgacatcgcggcctggcttgcttctcagcatgagcaaaaactaggcccccatctcgaatgcatataccaaatctctccctcgactaaagcgtaagccttctcctcactctctcaatcttatccatcatagcaggcagttgaggtggattaaaccaaacccaggtacgcaaaatcttagcatactcctcaattacccacataggatggataatagcaattctaccgtacaagcctaagcataagcattcttaatttaactatttatattatcctaagctactaccgcattcctactactcaacttaaactccagcacagcgacctactactatctcggactgaaacaagctaagatgactaacaaccttaattccattcacctcttatactaagaaggctgccccggtaaccggctttggccaatggcatgtctgagaatttcctaaacataggttttatacgcacatttatgcgcacatactcttaaatctatactaataacagcaaattaccactcaaatgagaagtctcaaatctgcacggggaataacgagggtggaaaatataaacgaagtgacaacagaaagacggcaaaagaagacaaaacccgtagacaactgataagcaaaacaacacagcggaagtacacacagaagactcagcaagacacaggagaggtagctgaaacacagcacgcagtagtataatactacggagacgagacacagcaagcaagagacgagtagg

SEQ ID NO: 582938 - DNA, 212 bp, Homo sapiens
ctggcaattatagatcactctcttgtggtcttcccttttgaacatcctaactctttagggttaaacactcatttgagcaaggacaagcttctaaatatacccactcctcaagccccccgccccactgtgcagcaggttttcctgttgataggacagtggacgtatgagtttgagtgtttggcagatgtttgcatgattcttagatcagtgct

SEQ ID NO: 582939 - DNA, 134 bp, Homo sapiens
aaaatcacgcaatttggccggattctgaatgagttaaagattgatattatctttgccaactcaccacaggctaaaggtcgcgtagaacgcgcgaatagaacccttcaagaccgtttgatcaaggagatgcgtct

SEQ ID NO: 582940 - DNA, 321 bp, Homo sapiens
  misc_feature (33)..(33): n is a, c, g, or t
  misc_feature (92)..(92): n is a, c, g, or t
gtttgggggctgccccttgggttttcagggttntgcatttaggggtccaggcccccccccccgccaaccatgcccctccccaggaattccantattgcctttgtgattggccccggaggaaaacccggcccagctcaaaacccctcccctgccctggggtgtgggggttttagtttaaagccccccaccctaggccccgtgccaaaggggaaaaggcttactccccggggaaaaggggaagccctgttattttccccgtcattttccccccagcccctcctgcccttttgatttgggcccccataaaggggttttttgtta

SEQ ID NO: 582941 - DNA, 171 bp, Homo sapiens
acgtcgcatagtacgctccgcaggcggcgacggcgcggacggactcgcagggccacctcatcgtaaatgcagatagcttcgaagacagtcgccaacgggtgaaagccgtcgggcgcaagggcgccaaccccgagcgccagattgaccttggcgctgacccgcaccgtcacg

SEQ ID NO: 582942 - DNA, 368 bp, Homo sapiens
  misc_feature (127)..(127): n is a, c, g, or t
  misc_feature (245)..(247): n is a, c, g, or t
ttaaagggtttttttttcaacgacttttgtttggattgggagcgtactgggtgttcggagatcttaaacaagatcacgttttttggggtggaatcccgcggctttttttttttttacagaaagtttnttgtggcaaaaagaaggtgggagaaggggaagttttttttttgttttgtgagggatggggttttggaaaaccattaaacgcagaaaggctttttccttttttggggtaaatggggggnnngggcgggcaagcccccgtttcccgggtttttgggtttggaaggggatgtttgggaggtcccccctgtaaattttttccgggggcccgggatggaaataaagcccccagggttgccttggga

SEQ ID NO: 582943 - DNA, 756 bp, Homo sapiens
cctagctaaccagctaacattggagaggcactcgttgggcactccttggtattgacgcactggggataccattgatgaactatgcacagatggaacaaagcttgctcttcttaatgtgagtatcccaggagtgtgtagcgcttaaatccacgttgtcgtccctaggagcatagtatccagtgtaggccttgcgtagatagtggcccgtcggcgggccatcgctgactcgttcatgtgcgccctcggggcctataatgctgtaccgaagtggaatccagacttttgtagctaccatctaacagggacgggcccgtcatcactgtcttaggcgtccccgtaccgtcttacacacagatgccgcaacttcctcaaggcagcaggctggaatacccatgcgggacctagttccagattcgtgagaatgactttcttaccttcgatgccatgcgccacagctggcaccagtcgtgtggattcgcggccatcaggggcaagacggactacggcctcatggtctttgcctgacaagcaggtcttgacccgtagaggtacaagacgggggaagctgccccgcatggatccaggagcacctcacagatgccaacctcaacctgaccgtggacgagggtgtcacaggtggccaagtacttcctgcggcagatggcacagcccttccacacgggaggatcagctgggcctgtacctgctcagcctggagcagcagaatcagaggagatacgcacagaggtagagcaa

SEQ ID NO: 582944 - DNA, 386 bp, Homo sapiens
accaggcaggacctgccctctggtggctgggagagacggccctagatgaaggctgccggactggatggattcctatatctctgttaccatcagtgactacctctgtctgggtggttggtacatgtttgaatttcatttctaagttactgtctactacgtttctgcaatatagccttcactcttcttttattcatgcagaagtgaatcgtaattgatttgttagaaagggagagaaagaaagagagagggagggaggaaagaatggagggaggcagggaaagagacagagagagttcaatccagccaacggtacatcctgaatagcttggtttgcttcatccatgcctgtaaataactgcttggtttgcaataatttctctcccgga

SEQ ID NO: 582945 - DNA, 230 bp, Homo sapiens
ctcgcgctctctgtgtgatcagagatgtgccctctcgtgtgtgttcctggggcgtgtgtggcccgcaggctggcagagtctgcgtgtgtgtactgctgtgtggtgttcagagaggtgtgctgagtgggcgaccaccgccgcttggcccggtgtagaggtgcgcgagtcgcgaaagagaagagagagcgtgtgtgtattgtgtgagagcccgcaagtacaaaagaaaacaa

SEQ ID NO: 582946 - DNA, 146 bp, Homo sapiens
ctgggggctcactatgttgctcaggctggtctcgaactcctggcttctagcaatctgcccacctcagcctctcaaagtgctaggattccaggtgtaagccaccacattcagctaaagtgcacaaatcttatgtggacagctcgagg

SEQ ID NO: 582947 - DNA, 1130 bp, Homo sapiens
cgtgcgccctttttttttttatttggaaatggaaccggggagaagcctaggtcggggttctcaggcatggcggaggcccgtctgggggagctctatgacggggaaacaatgcccctgaggggctccatgtgccccccaaaagacccgttacccccagggcttggcatacacaacgaaattactctgaggcatgacggtttccttccccaagggagagctggcacccaaggtactccagggggagagatggggccagcaattccaaagggggtctggggcaggaccaagagctcccggacttagggcagcataacaacacaaacatagagcagacaggacagcatacacataccggggggacaatggtggacgaggaagaggagggccacagacatacaggccaatgtggcacacgcgcgcgcgcacacacatacacacacacacacataaatatacacgtatggtaccggtaacatcccttccatatatccacaggatattgggagaagtcctaacagggggggtcaagggagagagtgtccccaggaaaggtccctagccactggccacccccagtgactccaacactactataactggacaagaagaacaggccgggcacagggggcacaacgccggaaatacccagacacatgggggaaggccagagagacgagagaggaaccactaagagagcacaggaagtgggaagacacagctcggtgccaacggaagagacgaaacccgtgagatccaaacacaaaacatacaaaacaataacagcccgacatgggggccgggtgccgaaaaacccacaacaaccgacaaggtcgaaccggacacaacgtagaaccggagaggaacgaggaaaaacaaggcaagagaccccagaccccacccaccccgagtgacacagagaacccccccctcaaacaacacaaaactagaaacggccaccaaaaccgtagcaaaccaaagcgggaccgaacacaccccacacacacgagcacagcgacacacgaaaacaccaaccgaaacaacaaaacaaaaaagcgaaaaacagcgcaacaacaaccaccaacacgaacgaccccacccacccacaaacgagacacaataaaaacacacag

SEQ ID NO: 582948 - DNA, 281 bp, Homo sapiens
cacgtaccccatggacctctcacgaggaccctctgagcaactggactatctttccagagtccaggggattccaggttgaatacaaagactttccccaaaaacaacaagaacgaatttgttatctcttatcaattgctcctcttcagccacctcttgatcagccatggtatcggcaaggatgtggagtcctgcccatgatatggctgcgctgaacatcttaaaggtgctgtctgagttgggaccacaaagtacagagatgccaagaacaggaaacgggccaa

SEQ ID NO: 582949 - DNA, 175 bp, Homo sapiens
ctctacgaggatctcccgctagcatatcaggacaagatagggggcggctgggctggtttcttctgcaagtgggcttatgccgccaaggcaggacagtggacttggctcacatccaggtctacccccagcccgcttctccccgtgcttgtccgtgctgatgctaggtcgggggtac

SEQ ID NO: 582950 - DNA, 179 bp, Homo sapiens
tcgataaggccaagctacttctggagtcttagtttctacttctccctgccgtgaagatgatatccactaacttgtatggctgttgtcaaggttagatgagaatgaatgtaaagtgcttagcacaatgcctcgtatggtgtaagtgattattcaatgataaccatttggcccttatcgag

SEQ ID NO: 582951 - DNA, 171 bp, Homo sapiens
gatgactgtgtaaactagtaggcccatatatggtctctctaatatagctgctatccattcagcagagtggatgggtggaatcaggatctggattcaagattacaacagtgggggtgagaaggcaaatgggattctgttttctagtaactttctcagacgttggtaatgggg

SEQ ID NO: 582952 - DNA, 1253 bp, Homo sapiens
  misc_feature (265)..(265): n is a, c, g, or t
  misc_feature (535)..(535): n is a, c, g, or t
  misc_feature (1249)..(1249): n is a, c, g, or t
cttttacactactatttcatgatgtgcctgtctactaatgctgggtataattgatcacctctattctccagtttaccttctcgtccagataccgatctaaaggagctctctgcctggtctctgtggagtgagcgtgactcgttcactcagaccacccttcacatgaccgcgactgctcctgcgtctgagccctagagtgatgtgctggcctcacttggcacgagtcatgtgaggattcttgtgtgcgcgcgtgcctgagagcagncagcctcgtcgcgcgtagtacgctaagcttaactctcagactgtctcacaacacctatagtgcgtccttgaggaagcgtagcgctaacagtaaacgcctaagatctctacgcgtgcgcatagtttggattagggccctagactgcggttcgccaaggatagaatgaatagttcacactacactaggcatgaacaccctgacacattgacccccagaacatgggcacccttacatatctctagagatcacaggggtagacgctaagacccnctatggaggacgcgtaaagagtctcatatcaagctaggtacgacttcgcgcaacgcgtttaggataagtaatttccctgtagaaccctaggaggattaccacaacgaaagcgaacaaacgcgttcactccttgagggggtcgctcttgccccccggataggcacttttaactacgcctccacggtaacctcacccatgagatccaaatcttcgaacgcgaaagccctaggactaagacttaagcagacggtaatccgtgttacgagttacggcgtaacacccccggctttgccgggacaacaacattcgggtgcgtaacaaccatgttccccatgtgcggttacccaaggcatattttggtaacccagaagttgaacacacggcattgcttggggtgccattgcgcattggtaacgttgcaaaaccttttcttcaggcacactccgatacgtattttatgcgcagagaactcccttgaaccgcctaagtgaccacagtgcttcgccgtctttagaatgttagttaggagacaggtggcgcccaggacaacagatttcaacattgggagaccccttaggtctgccaattgagtggttgggcaatttgggcgtactttgaacgtctttgcgacacacactttggaggcgccctttgaaaagttccgcggaaccacttacgttgtaggcgaacttacacttcgaattttttgggacngcag

SEQ ID NO: 582953 - DNA, 348 bp, Homo sapiens
aggaaaagatgcccagacctctgtgtggggagtcttctatgccacaccctcctagatgacatcatctggccctaagttttcagtatgagtcaatgtgttggtgatgcccagattcccacctccagccctgatttcttccaagtgctctagagtcatatacttatttgcctgcttgatgtcccttcttggatgtcaaacagtcatctcaaaattcaactcttgatcctctcccctgctccaaacttcgccatctcagtaaatgcgttatattcctcctggttgcataggcttcaaagctaggagtcatacttgaatagaccctctttcttgcctccgcgtttgagctat

SEQ ID NO: 582954 - DNA, 471 bp, Homo sapiens
  misc_feature (348)..(348): n is a, c, g, or t
  misc_feature (444)..(444): n is a, c, g, or t
  misc_feature (467)..(467): n is a, c, g, or t
agtagtataaactccatatggtcagatttccctttatagggattgtaccaattttgcattcccattagcgatgtgttagagtgcctgttttcctacagcctaaacagcgtgtggccttcttagattcttttttctgatagatttcccaagaaaaagaattaaccgtaattttaatgtacgtttctcttacattgagtgaagttgaacatcttttcatttatttatatttatttttctatgaccttttcatgtacttttttgtctattcggtacattatgcagattttaaaaattaaattaattttgtgataatatattcacagggagtttttttttgtttttttgggnttttttgtttgtttgattttttgaaatgggagtcttcccctggcaggctgggagtgcagtgggtgccaatcttgggctcactgcaacctctggccncccgggtttcaagcaattatccnggtt

SEQ ID NO: 582955 - DNA, 113 bp, Homo sapiens
tgagaggtctgtcatatctttgcacatttaaaattgggttgtttcttaccattgagttgtgtagttccttatatatttggatattagcttcatcaaatgtatggtgtgaaaat

SEQ ID NO: 582956 - DNA, 226 bp, Homo sapiens
actttatccttctcattgtgttgccaggtgctctcgaactcctgggctcatgccatcctcccgcttgggttccaaagtgctgggattacaggtgtgagtcactgtgccctgctggaactaccgtctttatttttagagacagagtctcgctctgttgcccaggctggagcacagtggcatgatctcagctcactgcagcctccgcctcctggattgaagcacttct

SEQ ID NO: 582957 - DNA, 714 bp, Homo sapiens
  misc_feature (19)..(19): n is a, c, g, or t
  misc_feature (21)..(21): n is a, c, g, or t
gcccccttgaaacctagancngatgagaccttgaacgctctgaccattattacgccaagcttggcacgaggcctcgttccatgaaacttaatctggttatctaccacaagcgcctccgctgtcgaattcgtggagtcagcctatttgagaaaggctgtgggaaactggagacctacattaaactggacaaactgggcgagggttcctatgccaccgactacaaaggcgaatgcaagctcacagacagcctagtagactcaatgagattagactggaacatgaagagggggcaccctgcaccgacatccgggaagtgtccctgctgaaggacctcaaacacgccaacatcattacgctacatgacattatgcacacggagaagtccgttacccttgtctaagagtacctggacaaggacctgaagcagtacctggatgactgtgggaacatcatcaacatgcacaacgtgaaactgatcctgttccagctgatccatggcctggcctactgccaccggcagaaggtgctacaccgagagctcaagccccagaacctgctcataatccagaggggagagctcaagctggcttacttgggcctgacccgagccaagttaatcccaaccaaagacttattggaaatgagggtggagccactggtggtaccggcccccatgacatccctgttagggtccaactgaattatcccatttaa

SEQ ID NO: 582958 - DNA, 736 bp, Homo sapiens
gggaccgttggggctgggaggctggtgtgtggcggcggcgcgcgactgcggcgcagtgcagttgttgcaggcgcggacgcgcggcggagctggaactgctgcagctgctgccgccggcggaggaaccttgatccccgtgctccggacgaccccgggcctcgccatggctgaccagctgactgaggagcagattgcagacgttcgaaggacgtgccttctccctctttgacaaggatggagatggcactatcaccatccaacggacgttggggacagtgatgagatccctggggatcatgaaccccactgaagcagagctgcaggatatgatcgagtgacggtggatgcagatgggaacgggaccattgacgttcccgtgagttcctgaccaatgattggccagacgagatgaaggacacaggacagtgcggaggagatccgagaggcgttccgtgtctttgacaaggctgggaatggctacgtcaggcgccgcagagctgcgtcaggtaggtgacgaacctgggggagaagctgaccgatgaggaggtggatgagattatcagggaggctgacatcggatggagatggtcaggtcaattatcgaagagtatgtacgcgattgatgacttggataggtgaagggctccccgggtcaggtggctgatgccctgttcgtcgttgatctctcgtcttctcgcagcgcgcagtctctcttcaagactcccctgagtagccg

SEQ ID NO: 582959 - DNA, 572 bp, Homo sapiens
  misc_feature (4)..(4): n is a, c, g, or t
  misc_feature (63)..(63): n is a, c, g, or t
  misc_feature (109)..(109): n is a, c, g, or t
  misc_feature (366)..(366): n is a, c, g, or t
  misc_feature (500)..(500): n is a, c, g, or t
  misc_feature (503)..(503): n is a, c, g, or t
  misc_feature (529)..(529): n is a, c, g, or t
tganacaggatcttgctctgtcttgatcttgtcatcaacaatttttttttttaattttgtaanaggcaagggtatcactgtgttgcccaggcttcagtgcagtggcacnatcgtagctcactgcagtctcaaactcctgggctcacacaatcctcctgcctcagtctcctgagtagctgggactataggcccataccaccacacctggcaaattattttatatgtggatactgagtctccatatgttgcccaggctgatcttggaactcctgcccttccaaagtgccgggattatggatatgagccactgtgcccagccaagtcttttacttcagtatatctgaatggataaagaaaataaaagtngattaaaggaaaaaggcatagtaaaatgctataataatatattcctctttctcaaaaatgattataaatttgggtctacctccagatgtggtaattgagtgtggacatatttgtgttaatattttgtttaaatncantgaagtacttattgagcatgtctcantgctaaccaatgtgttaggttttacagaaaatacaaaaattag

SEQ ID NO: 582960 - DNA, 407 bp, Homo sapiens
  misc_feature (32)..(32): n is a, c, g, or t
  misc_feature (74)..(74): n is a, c, g, or t
  misc_feature (107)..(107): n is a, c, g, or t
aagaattttgtggtgtgtgtgttacatattgnacttggttctgcattattttttgtctttttctcttcaccctnctgatatggtttaggtctgtgtccctacccaanatctcatgtcaaattataattctcaatgttggaggaggggcctggtgggaggtgattggatcatgggggcagacatcccccttgctgttctctcaataatgagtttttatgagatctggtcgtttgaaagtgtgtagcacctcctcctttgctctctttttcctgctggccatgtgaagatgtgcctgcttccccttcgccttccgccatgattgtaagttttctgaggcctctccagaagcagaagcctgtatagcccacagaactatgagtcaattaaacctcttttctttataaatt

SEQ ID NO: 582961 - DNA, 140 bp, Homo sapiens
actcaatctgtgctcgtgcccgattgtctgtggacgactgcacgatgtgacagcgcagtgaccctaatgctcttggttcacctcaaggccactcggaactctgtgcctgtgccatgccactggtgtattaagtgcaagta

SEQ ID NO: 582962 - DNA, 254 bp, Homo sapiens
ctcctcgctaacaatttactttgtgctttctgacaatttacttcccacttccttcatgaattttaaccccattttctgttaatttcatatttcctcttttcttttatgttctagaaattttaagttccatttatttttgagaccattcttaaattataacatgcataaagataaatcaatactcttgaaagagtaaaggattttaaatgtcttgttggtcatatttgcagaaaagaaaacctaaatagcacttg

SEQ ID NO: 582963 - DNA, 402 bp, Homo sapiens
atccgtgagttgtgcatattctgctgtccatagacatactggggatcaggttctctccaaaatgtaaacaggagtaccccccgtcccgctcgcaaacgctgaagtgttacggcacgtctctagagtgagcctggtgtctgcctcattcttaatggccccaacggaggacggggacgccacgccggggcacaggtgacgtcacgggcacagatgaccacgttgcgggtacggagcataccacaggtctgggctcacacgaggggaagcattcacactgtgttctctctacagggtcaggtcgtttttcttcatgtccgggcgggaaaaggaattccttttgccttttctaaggcaagctgctggtgtagtattcaatctgcttatcatgtaagaacttacatc

SEQ ID NO: 582964 - DNA, 413 bp, Homo sapiens
ccctttgcgcctatgtgtgggcagcagttcctcccggaagacattggcgccggacgtgcattgtcagccgctgagcacttccgtcatactacccgtcggacgacgcatcatcctcatcgttttcctccgcgtcctccttgccgtctggccgctcagcctcgtggggcagtgtgaccgttcgtgactggtgaaaccgtggcttgatgtcctgctcactgtcggggacagcctcatcctcctccacatcccccttgagcaggatgatgtcaatttccgagtacttcatcccattcaccaagatggggatcaactggaccagatgggaggccaggacttccttgcagatgggctgctcggccagcgtcagccagaactcacaggcctcaagggcaacgttctcatcatggtcctgg

SEQ ID NO: 582965 - DNA, 178 bp, Homo sapiens
catacttcaagtcctggttactggttagcacacacttcctttgatatgacacaactcctctctcttctgcttcaagttgatagcttgatgtgaggttcgctcttctcccgtgaccccgttaactcgagccgtctggttggatgcgcaagaagaagcccccgtttttgcagtacagccg

SEQ ID NO: 582966 - DNA, 283 bp, Homo sapiens
tgctattataggtgtgagccattgtgcctggccggctaatttttgtgtttgtagtagagatggggtttacccatgttggccaggctggtctcgaactcctgacctcaggttctctgcccacctcggcctctcaaagtgctgggattacaggcgtgcgccaccgtccccagccaacaatgccctttatatgtgctctgtgttcaggaccctggcaggaaacactcgaattgggtgatttgaggagattgtggtaaggggacagtttacaaagctgtgggcatgt

SEQ ID NO: 582967 - DNA, 141 bp, Homo sapiens
atggaagcttgctcggagcgctgtgaccactgtgctctggaggctgtgtccgcaagttgagcaaccaccgatgtctttgttcctctcatcccttgcaatcgtcacaaacccataggtgcattataaaaacttggtggtgca

SEQ ID NO: 582968 - DNA, 488 bp, Homo sapiens
gagcgttctagaggatcccagaacttatatctagctcaggcattgtaaatacaccaatcagcaccctgtgtttagctcaaggttagtgagtgcaccaatcgacactctgtatctagctgctctggtggggccttggagaacctgtgtgtggaaactctgtatctaactaatctgatggggacgtggagaacctttctatctagctcagggattgtaaacgcaccaatcagcgccctgacaaaacaggccactcggctctaccaatcagcaggatgtgggtggggccagataagagaataaaagcaggctgcccgagccagcattggcaacccgctcgggtccccttccacactgtggaagctttgttctttcgctcttgctactgctagctctttgggtccacgctgcttttatgagctgtaacactcaccgcgaagatctgcagcttcactcctgagcccagcgagaccacgagcccaccgggagga

SEQ ID NO: 582969 - DNA, 984 bp, Homo sapiens
ggactttaatgagacagtgttagcaaatggcctagcacatagcaagtacttaaaaaatggaatcctgttattattaataataaaaattatatcgtgcgattatttataattaacataaataaatataataaatatatgtgtatataatacatattactatgtatacttaacatatcacttgtaggcccctattttgtcttgtggctgtgtttatctgctatgtgtcttgacttaaactatttaaaagtagatcctgctatatggaaatttccaagtaaagaggagagaggatttaaaaaacttggtggcccatggtagagtgatcaaagtcattgaagccttgaattcccggggctcagatgatcctccaacctacagctttcaaatagcgtgggaccacagggcgcattaccaccaggcccgaataattagggaatcacggtagagatggttaggctatgtggcccaggtgggtctcaaactcctgggctcaagcaattagccgtgctaagctccataaagtgcgggacctatgggtgtgagcatcacatgttgccaggaagaaggcatttacactattaaatactctaaatacgttggtcgcaaattacagtttaataaagggtaaaggacatgtcaagaacttatctggaaggagtaaccagctgtcaaatcaggaattgggaaacataccaatccagcacattaagtactttgaggacataaacagtttatccaaggcatgagttaaaagagaacccgcgagacttaaatcagagaacactatccaggataataaaaagaggggaacaaccaaacaaaaacacaacaaaaaaagcgcagtctaatcacctttttctcccttctaattcttatttttctgtgaaaaacaaacacacacaactacgcaaatcacacaacacactacccacacaacaccaaaacacacacaacacacaacacacaaccacaaaccaacacact

SEQ ID NO: 582970 - DNA, 863 bp, Homo sapiens
gggcggtgagggatgcgcgccgggtgctggtgtcggcggcaggtgcgctctgggttctcgatgacgtgcaggcttttcgggcccgaaactggtggtgttgccatgcgttgatagtgtgtggacgaatgaagaggccagcgctagcatcattgttaacatgacagactcgttcactgagcaggctgaccaggtgactgctgaggtttggaaagctcttgggtgacagagacaggtggatgcaattctttgctgttgctggatggatggcgccgggggcaatggcaaatccaagtctctctttacagaactgtgacctgatgtggaacgcagagcatatggatcatcgaccatctccaggcatctggctaccaagcatctcaaggaaggaggcctcctgaccttggctggcgcaaaggctgtcctggatgaggactcctaggtattgatcgagtgtacgtgcattggccaagggatgctgttcatcagtctctggccagagacctggctagggcaagaatcagcgtgatgcctgtccagggagaagacgctcatcgcatgtgctcccggttaccctggataccccgatgaacaggaaatcaatgcctgaggctgacttcagctcctggacacccttagaattcctagttgaaactttccatgactggatcacagggaaaaagcgagcgagctcagtgaagcctaatccaggtggtaaccacagaaaggaaggactggaactcaccccagcatatttaaaggcctcatctcagtgcctattaggggcctgcagaaaagtcactaacctgtctcagtgtggcctgtccagccttgtgttactgtaacccctgtttggtgtacgagat

SEQ ID NO: 582971 - DNA, 471 bp, Homo sapiens
aataaccgacttgacgttgggccttattatctcggattctttcatcttccttgggttgttccttaattctggcatctttgctgcccattacctctctcttcaaaggttggcaaagggacatagcaacaattctggtaaacagagcaaatggaaatggaaatgagccagaggtgtgctcagtagaatgtcatgtcatgtattgatcaaatggcacagagaacccaggctctggagtcaagactgggaagctattgtcataaactattctacattggcccgtaacttgagccttaacaaatcatacaacctcagagacttcatctataaattgaaagtgttaatatcatataccttttaagattttttggccagatgcagtgctcatgcctgtaattccagcacttcgggaggatcacttgagctcaggagttagagaccagtctgggcaacatagtgggaccctgtttctac

SEQ ID NO: 582972 - DNA, 613 bp, Homo sapiens
  misc_feature (310)..(310): n is a, c, g, or t
  misc_feature (363)..(363): n is a, c, g, or t
cggcaggagaggttgtggtgctagttgctcataagccatccagggccagtcctcgtcgcgtggagcgacacacgctctcgccgccgccatgactgagcagatgacccttcgtggcacccgtcaagggccacaagggcgtgggtaacccacgatcgctactaccccgtgagttcccggaacatgatcctcatccgaccgtctcgagatagagcaccagtacaattcatgtggaaagcgtgaccgagggagtgaggaccaaactatggacattcctacagcgctgctctgcggagggtcactccgcacgttngttgacgtgggatgtcggttgatcgtcctcaggatgggccgaggtttgccctnctcaggcgtccgtgggatcggaagcccgtggccggccctcctggggggacttctccaatccaaaaccgcgtggcgaacgcgagctctaatcggcccaggggccggaagttatgtggcctggaggaggccccggaattaaaccccaaaaacgggagaatgggttggccccttggcaaaggagtggtttggggacccccttgtccttttccccgttcgtggaaaaccccaaaacaccgggggcccagggcga

SEQ ID NO: 582973 - DNA, 447 bp, Homo sapiens
gcataaaatattttgtatggcccacacaattgttgattgaccactgacattttggctatttcagaaaaattactactgaaactgtgattccaactcagtgtaattgttaaagtagaaaagattttttcttgaccatgttcttcttcagttactaacaaactaggtatgacttgcccttggcaagatttgctctgtctgattggacatagtcgctatacgtgatttttaatttcttttatgaaggacatggcagggattttgaaagattaatgttgtcaaattgaagtctgaatgcccccaggaaaatatgccaagcaaaacatatgcatggcaagtttcctgaaatcactggtttttaaaaatgtatattttagttataatccaaacagatatgatacagtgaaaactttaattagtattaatgtaaacaccagacagcaaaaaaaa

SEQ ID NO: 582974 - DNA, 238 bp, Homo sapiens
gcagacttatttgcaggaggactggtcaggatggagacttagggcagtgaggactggtcagggaggagtaaggggaggaggactggtcaggaaggagttagggcaggaggactggtcagggaggagtaaggggaggaggactggtcagggaggagtttagggcaggtggacaggtcagggaggagttcgggctggaggatcggtcagggaggagttagggctgtcgggctagtcgggg

SEQ ID NO: 582975 - DNA, 1052 bp, Homo sapiens
tgatgtagtagcggccaggagaggggggacaacaggcagcggactcttggtgttttgtttacttgttgccgcagctgtcgtgtgggtttcttctttggttggtgtttgcgtttaaacgttggtgtgtgctgcccgcggtggttgtctcccccctccgtgggcgcgccgtttttttttgcgcgccgataatatttgcgcctgcgcggctcttcccttggtgccgttgtgagtgtttctgggcgtaaaggctgcgggtgtggcgccactttgtgtgttgttgggggtggtgccgccccggcgtgttttttgtgtcgcgcgcttgttaccaggggcctttgtggtgcatgtttgtcctcggcgtgccgcctccgccgcccgatgtgacgccggttgtgtgtcgccccgcgaaacgccgaccggattatttcttgtttctctttgttggggagaaatttcgtggtggtctggaaacaatattctgcgggggacagttgtgccgctctccctcccttggggttgcccccccgagaggggcgcctcttggtgcacttattgctcgtgcttgtctcaccaccggggtggggtgctcaccgatggcggaggttcttctcttttgcgagggaattttctgggctctcccccccgccccccccccacagaagaggtttcaaacactgtgctctcatattcacctcgcgggaaatatatagggaatatattcggtaaacttcctccacaatgtctgtggccccacctctctcgcaaaagaggtatacgtttttaattttcccccgccccattgtggaacttatatcaaatttctgaaataatgttcacacgcccccgcgttgatacaagcaatcttttcgacccaaaacgccccgtcctccttataaactctctcctatattctcttatggcggcccaccccacggggttttacttgcccactgaaaagtgtctttggcccccctctcttgaaacgtgtcacctccccttattcaacccgagtttctctccgttcaccacacattttgaaaacgataacaaga

SEQ ID NO: 582976 - DNA, 211 bp, Homo sapiens
aagggcctgataaacagctttcattatccactgtctccatacactgtttagacacacacacacactcacacagggggaaagggcctccaggaggagcacagggactcattgttttgtcaaaccctgcgcttaaagggcctggaccaaaggctgctgcacaggggtagcgcattaaaagggcctggagagcaagcaccctcggaccgaattc

SEQ ID NO: 582977 - DNA, 887 bp, Homo sapiens
  misc_feature (745)..(745): n is a, c, g, or t
  misc_feature (887)..(887): n is a, c, g, or t
ttctgactaccaaggaaaatatgttgtgtcttctgattaccctcttgatgttcagcctttgtgtgctcccacggatatcatagctttcagtgatagggccagaaagaatttaagaaactcgacattctgccaaacgctagtattggatgctgtctgtggaattctcacttctgtccatctatcatggttcaattgcacctaagaaatatggaggattgccaactccatgaatattcttttgatatctagtacccgaagcgcaccagtctgctccaagataatggtggatctgaaaggtccgatgaaggcatctcgttcaggggccttttgatcattgttggagaagaggggtattcttagcgaatgatcgactttgtaaagtgagcttccctgattggggcgtgtctgtgcgattggataggttagaagactaatttaagagtcttacagattcggatgacatagacagtaggggaaggttgtgcctcatgtttggtgggaaagaatggaatgtgatatcgagtcttatgcctgatgtccaaagtgagcgatacgaatagtctctgcaagtagaagtgacgagctgggggtgtatgtacgtagcgatggctcggtggcaggtgaattcagtgagatacaaaaagctccttctgtattggagaattccgatggagtgaatacatgtgatatcctgaattcaggcgaatctgtggttgtcttacaaggggaaggacttgcctgacgngtggtgtggagacaagcttgttccttggaggaatggttggctaggagtatgtgcgggactgatgtttgtgttttattaagacccgtattttgggtgggttaatgaatgtgaaaaaaataaaaaaaatggggtgcgaaatgtn

SEQ ID NO: 582978 - DNA, 739 bp, Homo sapiens
  misc_feature (628)..(628): n is a, c, g, or t
gttggtatcgattggggccggggacgcggatcacgcgtgtgcacgtggtctgcgggctaggcgtgggccgtccagacttgcgtgcctcggggtaccgtctcccgctgctttggtcaccagctccctgtccctgcccgaccctgctccgttctcctggcctgcgagccctgtcggccggactttgcgccagtgtccggcgctgctgctgtgctcgtgggccccgctcggcgccggcggtgacgcgggtaagcccagcttcaaaggggcaagctcggtgaccctggcccctggtatggctgaagtcagcattcgtaccatgtcctaagtcgtgcctgagagtcaaggaagtatgtccgagattttgctgtcctggtaggactcacaccctggctcactagcctgctaggtaacaagtagcattgacgcatcagtttggcatcggaacgttgcatgcggaagccgtattggtccagtgatgtatctctcaggtgtgctaatcaagggtccaacgaggacagactctgaaagcgcaggcccagctctccagaagcgctaccatagaccttgaaccagcaaggactgttgaacgttgctcctggaagagttcagtgagaagtctggcgtagtngacggcacgagacgacgacgcattcaggagagagatggattgaggacttagctcgaccttgcgcgatgaaaaggaggttaccccgtgacagagtgagccgaggaaagtgac

SEQ ID NO: 582979 - DNA, 347 bp, Homo sapiens
gtcaacttttgtgagagagttcttcgaacacttggttgataccacactgcactgtgtgagttcgtaatggaggatgatcctgaatttaccggcttgcgcatctgcttggatcgtgatgctgtttacttaatttctgattttcaaaggcccttgggcctctctttagggagtgacattgctgaagccaggtagtgtagtttaagattttaaactgatacatattgtgagaaactgtgcggcagcctatgatgtgattggggtcccgcggatgggaaggaaatagtaagtagagcagactagaattcctatagatgggaattaaagtagaaaagaatttcttaggtttt

SEQ ID NO: 582980 - DNA, 168 bp, Homo sapiens
accccgggggccccctttttgcaagcttccccggtccccaaaaggaatttcacttggggggtttgggttttttattttttggaagggtcatttgtaaaactttaaaggcccatgataggggtttcaaacgggaaaaagggaaataaaataattcggtttgcggcccca

SEQ ID NO: 582981 - DNA, 688 bp, Homo sapiens
cgatgctgctcctgtgagcgccctgaggagtcgtacccgtccaccgtccgcgagctggtagccagtctgccccgtcgcctcgactccctttcaccaaacatccgacacccacattgacacctccagtccggccagccgctccactcgttgcctttgcatctccacacatgagacgtcctccgcgcaagacgctagagggctcctccgcggggacccgcggtccccaccgtgcagcgtgggcatcatcaaagatggtcctctcagggtgcgccatcattgtccgaggtcagcctcgatggtagggcctcctcctgagcggcagatcaacctcagacaacaattccgtgctgagaacaatctttgcatcagcctgcggcatatgccctgcccacatccataccttgtattgccactacttgataacttccccttgaaatgcaagactctcttgtgtgtctcatatattcccgacacttccgaaacaaagttatccgtttccgcacacaaatgaaaacgcctggactatatgtgtgtacagggcacaggtacttggttattcaacccgactcatgacacaaatcgcatgcgcaacattctcccccaagaatgtggccaacgaactgttactgggccctttgtacatccataagcacatatgggacacaagcatagactaacccaataatgg

SEQ ID NO: 582982 - DNA, 406 bp, Homo sapiens
  misc_feature (68)..(68): n is a, c, g, or t
  misc_feature (125)..(125): n is a, c, g, or t
  misc_feature (148)..(148): n is a, c, g, or t
  misc_feature (159)..(159): n is a, c, g, or t
  misc_feature (173)..(173): n is a, c, g, or t
  misc_feature (185)..(185): n is a, c, g, or t
  misc_feature (248)..(248): n is a, c, g, or t
  misc_feature (300)..(300): n is a, c, g, or t
  misc_feature (349)..(349): n is a, c, g, or t
  misc_feature (394)..(394): n is a, c, g, or t
gcagttcctggcctggaacttcgaggccttgacgcaggccgaggctggcccagtgtccccacagaccngctccaactgctgctgcccaggagcgacctggcggtgccagcgagctggccctactnaaggccgtggacacctggagctngggggagcgtncctcccatgaggangtggagggcttngtggagaagatccgcttccccatgatgctccctgaggactctttgagtgcagttcaacctgtncctgtactggagccacgaggccctgttccagaagaagactctgcaggccctngaattccacactgtgccctttcagttgctggccctgtacaaaggccttnaacctcaccgaggataaccttacaagccccggattttacaacttngtccactgggaa

SEQ ID NO: 582983 - DNA, 476 bp, Homo sapiens
gggaggaaaggtttctatgaaggcaatagcccaatatcatcccaatgtgaccaaccaggtcccagtaaaatgaggacaaatatttacctataggaattagcaatcagaaaaagtggtttcagtgtggaggtaaaaacagaagctagatgctctgggttgaagattaaagacgagggaaagtgcgggaagaccattcctttgagagatctgaataagaagagaaggcaagagatttgttgttagagatgtcattagataaagggaagagtctttgaggataggggagacttggccctcgtataagctaagagaagagagcacagaagaggagaacgtaaagatacagaagagaatggcaataacagacaaatcacagaggccagaggaagcgattagggcctaggcaaggacctcctttgcactctgtctttgatgtagtgtgctccttgcagttcagaatatattatacctcacaa

SEQ ID NO: 582984 - DNA, 180 bp, Homo sapiens
gagtcggcacctgtttactgggcgtatgaggttgagtgagcaagagtgccagtgcactccagcctgggcgacagagtgagactccatctcaaagtaaataaataaatactccagcctgggcgacagagtgtgactccatctcaaaatacatacatacatacatacatacatacatatgtt

SEQ ID NO: 582985 - DNA, 406 bp, Homo sapiens
  misc_feature (406)..(406): n is a, c, g, or t
gactgtgcgcagccccggcgctcacagatggagggtcccagtgcctagtgacgcagccccagcgggaagctccagctggccgtgaagaggccgagtcgagagccgggaggcgcgctgggggtgggctgctgcagcctgcgggttgtttatctggagtacggagtgggtgagtggggggagcctggaaaccgccccgtgtcccatttcctcctcttgttttctgctccggattctccatgtttggacccaaactgagtgagcccgtgagctgctgctggcgggatcgtgggccggtggtgcacccgtgggtgatgcctgctgccctgggcctgcctgccctattgtacagtgcctgcctcaccttccctggtcctgggtgaggaaagcgagaggggcggcatgtgan

SEQ ID NO: 582986 - DNA, 731 bp, Homo sapiens
  misc_feature (209)..(209): n is a, c, g, or t
  misc_feature (300)..(300): n is a, c, g, or t
cttttggcgtcggcaggcgaagccacatcggctgagacaacatggggaaggtgaaggtcggagtcaacggatttggtcgtattgggcgcctggtcaacaggggctggttttaactctgggtaaagtgggatattggttggcatcaatggaaccccttcattggaaccttcaactacatgggtttacatggttccaagtatgtattcccnaaccatgggccaaaattccatgggccaccggtccaagggctggagaaacggggcaaggcttggtcactcaaatggagaaatcccaatcaancaatctttccaaggacggcgaagaatcccgtctcaaaaatctaaggtgggggcgaatgcctgggcgcctgtaggtacggtcggtgggaggtccaactgggcggtctttcaaccaaccaatgggaagaaagggctagggggctcactttggcaggggggggaggccacaaagggggtcaatcaatctctggcccccctctggctggaacgcccccactggttcggtcatgggttggtgaaaccaatggagaacggtatgaacaaacaggccttcaaggaattcatcaaggaaatggcctctctggaaccaaacctggcttaagcaaacccatgggccaagggggtcattcaatggaacaacgtttggggaatcgggggggaaggggctccatggaacacaaggttcaaagggccatcaacggggcccagggc

SEQ ID NO: 582987 - DNA, 593 bp, Homo sapiens
tcccgataacagcccaagatctacttttaaccaacaagtcactatatccctcactggcaacgcaacatttgtatgctcataaggaaaggttcaataaggcaaaaggaactcaccaaatcttaccccagctgtataccaaaaacatcacctctagcataaccagtgttagaggcaccgcctgcccagtgacacatgtctaacggtcgcggtaccctaaccgtgcaaaggtagcataatcacttgatccttaaatagggacctcgatgaatggctccaagagggatcagctgttttttactgttaaccagggaaattgacctgcccgtgaagaggcggaaatgacacattaagacgagaagaccctatggagctgtactctattaatgcaaacagtgcctaacagacccacaggttctaaacataccaaacctgcattaaaaatttcgggtggggcgacctcggagcagaaccaaacctgtgaaaatacatgctaagacttcaccagtcaaggcaaactactatactcaattgatccaataacttgaccaacgaaacaagttacccctagggattacaagcccaatcctattctt

SEQ ID NO: 582988 - DNA, 141 bp, Homo sapiens
gcatggtaggacggtgttaatcggacgaggaccacacccagctcatatattgtatttttacgcagagatggggtttcaccattttgcccaggctggtttggaactcctgacttcaaattacccacctgcctcagcctccca

SEQ ID NO: 582989 - DNA, 400 bp, Homo sapiens
  misc_feature (212)..(212): n is a, c, g, or t
tcacccacccggactcacattctccccagaggccgagatgcgggtcatggcgccccgagccctcctcctgctgctctcgggaggcctggccctgaccgagacctgggcctgctcccactccatgaggtatttcgaacaccgcctgtgtccctggcccggaccgcgtgagaagccccagacttcatctcagtgggggctaaccgtggacgaancgcagttcgtgccgggttcgaccaggcgacgtccgcgaagtccgaacgaggggaagcctgcgtggcgcccgtggggtgggagcaaggagggggcccggaagtattggggaccgggagacacagaagtacaagcgccaggcacaggctgacggtgagcctgcggaacctgcgcggtatacaacagagcg

SEQ ID NO: 582990 - DNA, 699 bp, Homo sapiens
ggcgggggttgcagtgagccgagattgtaccactgcactccaacctggcgacagagtaagactacaacttaaaaaaaaaaaaaaacacccggatttcaacttgggcaaaaaaaaaaaaaaaaataaaaaaaaaaaatatttgtgtggcgcgcgcgcgctctgggcccctcgagaaaattttttaaaaccttcgtgtgtggaggggcgccgggcggccccaagtatggtgaaacggagaacactgggggacaaacggtgggtccccaaagaagacaaccccgtgggcacaagacaaaggcggcgggaggtgttctccccacagcataagaagaaaaacccgccgggaggggaacaacccagaggtgcgtctcgcagaaaaacatccccagaagggggggctgatcacagggggagcgaaataaccgcgcagagggcatatataacacaaaggagagcgctctcacagagcgagaaaggcgcgagaaatctatcaaagatatattagcgccccgcggtgcttggggtgtaaaaaagacgatgacaaatcagacatacagacaatgaaataagaagagaagcaaaacaacagacgccgaagctagaacagaaacgcaacgacagagagcgaacgaagagacaaggaagagacagaaacaaaaccaatcagaatacaaaaagcaggaaaacacagaagaaaaa

SEQ ID NO: 582991 - DNA, 542 bp, Homo sapiens
gaagatcaggatggtcctagatgtcagtcttatttctgggctctctattctgttccattggtttatgtgcctgtttattgcagccacgtaccactactgctttttttctatggccttgtagtatagtttgaagtcaggtaacatgattcctctatctttgttctttttgcgttggattgttttgggtattggggacatattttggttccatatgaattttagaacagttttttttctagttccatgaagaatgttgttggtagtttgacaggaatagcactaatttgtaaattgcttcagacagtatagctattataatgatattgattctccctatccatgagcacattttttttcccattccataggttgtgtgtttacttcgttagtttttttttgttgttgtcgttgtttctttgttttttttggttgtgcagaagctcttaagtttcattagatcccacttgtcattttggctttagttgggattacttttggtgtctttgtcatgaaatctttgcccattcctatctccagtatgg

SEQ ID NO: 582992 - DNA, 290 bp, Homo sapiens
ttactagagactagtttcaccatggtcttgatctcctgatctcgtgatccacccgcctcggctcccaaagtgctgggattacaggcgtgagccaccgcgcccggcccagttctgttttttggtttggtttggtttcgtatttcgtgtttttcttgagatggagtttcactctctgttgcccaggctggagtgcaatggcgcgatctcagctcaccgcaacctctgcctcctgggttcaagcaattctcctgtctcagcttccccagtagctgagacaaggtagagccgag

SEQ ID NO: 582993 - DNA, 702 bp, Homo sapiens
ttttcttggcaggagccgcaggcgtagcaaccatggcgcccagccgaatggcatggtcttgaagccccacttcacaaaggactggcagcggcgcgtggccacgtgtttcaacagccggcccgtaagatcgcaagacgtaaggcccggcaagccaaggcgcgccgcatcgccccgcgccccgcgttgggtcccatccggcccatcgtgcgttgccccacggtttggtaccacacaaaggtgcgcgccggccccggcttcagcctggaggagctcagggtggccggcattcacaaaaaggtggcccggaccatcggcatttttgtggatccgaggaggcggaacaagtccccggagtccctgcaggccaacgtgcagcgggtgaaggagtaccgctccaaactcatccttttccccaggaagccctcggcccccaaaaagggagacagttttgctgaaaaactgaaactggccccccagctggccgggccggtcatgcccgtccggaacgtttataaaaaggagaaagctcgagtcatccctgaggaaaagaagaatttcaaagccttcgctagtttccgtatggcccgtgccaacgcccggctttttggcatacgggcaaaaaaagccaaggaagccccagaacaggatgtttaaaaaaaaaaataaagccctcctgggggcttggaatcagtcggccgtcca

SEQ ID NO: 582994 - DNA, 459 bp, Homo sapiens
ggaaaacaggtacagaggatgaggtgtctttccccttcctcaggtccgcttgaacctcgagttccttttgagacagttccagatgaatgacgcgagacggaaaagaaaacaggctgggattgtctcgctcactccgtccactaaggcagatggtggagtgggcaccacggcccagccattatcagtgcggaaaaccgtgaagggccttgacgatctggacgccgatgccgatgatggctgggcaggccgtccatgaagaagtggactattctgagaaactgaagttcattgatgatgaagaggaggaagaagttgtgaaggacggcaggccatagtgttgggaccctaggaggcagtggcagttgtcaatgagctctgcagacagtgcggacgctaagcggactcgagaggaagggaaggactgggctgaagcagtgggtgcgtcccgaaactgaaaca

SEQ ID NO: 582995 - DNA, 504 bp, Homo sapiens
tagtcaatggctgcgtcacctccgtatagcaaacaatcataaggtaaaaatagtactctacccaaagacgacacacattatctatggcagcaatgtcaacagtacattacatacagaagccctaggcatatataggcttgtttaacgccaggaaactccatttactgctcgaggatgggccagatacacaaaagaaaagtcaatttctcctatgggaatagtaaaactgaacttaccatctggagaagtaacagctgtccgccagtttactacattataccaaaccttcaaaagacagtcatccttcccagcagtggcaaaaaattctccatctggtgaaaatttcattaaatgaacttgggaagcagttttgcaatgccaaatgcatttccaatctccaaagttcagatctgtatttatttaaatcttcatctacagttgacttactcgcgcgagagtaagtccaaaaaagcaatgggctgggcataagtgaacatgcctgtc

SEQ ID NO: 582996 - DNA, 531 bp, Homo sapiens
  misc_feature (7)..(7): n is a, c, g, or t
  misc_feature (453)..(453): n is a, c, g, or t
  misc_feature (485)..(485): n is a, c, g, or t
tatacangatccccctgacgagtcctaactgttggaacagaaatcacataccagagaccagggagtgtgggagtgagtataagatgtgtgtgtgtcggggggaaatgggcaaacacaaacacaaatgatataaaggaatccgtgggggatcacagggtgtgctgccatggtctctagaaggcattgataactaagagactgctgcgtgacttggtgagagtagtttcagcagaggccaaatggtagtggtttgaggaatgagtggaaggtaaagaagtgggaggaggctgggcacggtggctcccgcctgtaattccagcactttgggaggccaaggcaggcggatcacctgaggtcaggagtttgagacccgcctggccaacatggcaaaaccctgtctctactaaaattagccaggcgtggtggcacgcacctgtaatcccagctacttgngaggctgaggcaggagaatcgcttgaacctgngaggtggaggttgcagtgtgccgagattgcgccactgcactccagc

SEQ ID NO: 582997 - DNA, 160 bp, Homo sapiens
aacgcaacaagacacacgagcattgcacgacaatgatccaagattacgacggcattcttcatcgaccttgatgaaagtcagcgcagagatttcttcctgctcgataggctttttccagggtcatgccgacttcgaacgggatcatatacgacaggcggtc

SEQ ID NO: 582998 - DNA, 693 bp, Homo sapiens
cgggactgctttggcagatcattaagatcggttcgttcgctgacattgaattagtgcaggaatgaagccttggctgtttactccgagatggtgagacttggaggaacttatgaaatgtctccagaagagcttctagcttcagatgggcaaacttgcattgggaaaactcgggctggcaaaagaattaacaacttagaggtgctgacatcaaggattccgaaagcctatttccatcttctcaatcaaatcgcgaccaaagaggacaacccaggaaggtgaaccacggatagatcattaacatgtcaggtttcgaatgaaacagatgattcgaagagagctgagagtatgcttcaacaagcagataaacttaggttgcagacagttgttacccctgctgatgttgtcagtggaaagcccaaactcaagcgttagcgtttacgtggctaacctgtttaataaagtacccagtcactaactaagaccagagaaccaggatatttgacgtggactctattagaaggagaaactcgtgacagaaagaaccttccgtaactgggatgaactctcttggtgtcaatcctcacgtaaaccatctctatgctgaccttgcaggatgccctggtactcttacagttatatgaacgaattcaagttcctgtgacgggcagtacggttataaacctcccataccga

SEQ ID NO: 582999 - DNA, 485 bp, Homo sapiens
  misc_feature (273)..(273): n is a, c, g, or t
gcccccagtctccctaatttttataagtttcttcaagcttggcttcctgcagaatgttacatataaatctttccaatatccacctcccacctcaagtggctctctttcttttttttttttttttttttttttgagatggagtcttgctctgtcacccagactggagtgcagtggtgcgattttggctcactgcaacgtccgcctcctgagttcatgccattctcctgcctcagcctccccagcagctgggactacaggcgcacactgccacgncctggctactttttttgtatttttagtagagacagggtttcaccgtgttagccaggatggtctcgatctcctgacctcatgatcagcctgcctcggcctcccaaagtgctgggattacaagtgtaagccacagtgttgggcctcaagtggctctatttatttaaaaacttccatgtttgtagttagctgggtctcagaatctgaaaaaaaaa

SEQ ID NO: 583000 - DNA, 407 bp, Homo sapiens
  misc_feature (4)..(4): n is a, c, g, or t
  misc_feature (16)..(16): n is a, c, g, or t
  misc_feature (39)..(39): n is a, c, g, or t
  misc_feature (76)..(76): n is a, c, g, or t
  misc_feature (396)..(396): n is a, c, g, or t
ccantggatttaattnggttcaaggaaattaaattaccngaataattttcacccagggtatgtaaaaaatgaatcnaaacgggaaattcttagaaatagaaaacataataaattaaaaatgtaaggccaggcacggtggctcatgcctgtaatcccagcactttgggaggccgaggcgggcggatcacgaggtcaagagattgagaccatcctggccaacacggtgaaaccctgtctctaccaaaaatacgaaaaaagtggccgggcgtggtgcgggcgcctgtagtccctgctacttgggaggctgaggcgggagaatggcgtgagcctggggggcggagcttgcagtgggccgagatcgcgccactgcactccagcctgggtgacagatgtggntccgtctcaaa

SEQ ID NO: 583001 - DNA, 957 bp, Homo sapiens
  misc_feature (521)..(521): n is a, c, g, or t
ggggaagatttgagctgagagagaaatggactggatgtactagagagcccagtgataagagttgtcgaacaatgttaaaggtcagcatgtgctatgttgggaatctagatgtagcttagatttcctatgggttagagtattgtgctataacaaagtgaagtgcaatgacaattatatattcctactcgtgtcatacgtggcacatgggcgtgcggttctcttaaatagtactcacgtaatgaactcaaagcctctggctattaacataccctagtttgccgtatttttaatggccatgagccaaatacttcttggtatacaattgatccatttattttaatgggctggccttttcatttccatcttttcttgctgctacccatctatgtatgtagtcattggggggaaaatgtagccacattttttatgggaagactttgtgttacacagtgaacatttgaaggtttaactggtgaaactagcctggaataatgccaccagagactgagtggaaactcgcncccttttgacaggtgccattcttatgagccaaaagtttgtccctttacagagttccatttgacgggaactaacatggtcattattaacttcggaactaacagggtatagtaaccttacaacaggaaccttataacttgattgtcgtgaacggggctgactttcgtcaccactgagagtcacccttggagtaaaggttttccatgcactgtgcaaccgtggtttcactatagaatttctacgctagggaaccggcattcaccttggggcacatggggaggttccctaacagaaccttttctttaccaaacataaaggcccatacgttaacccttgagacacaccacgacgtacagcacaatgaaacaaaacatcgtggcgaggccactgaccactagaacaatcttatacaccaacattgtgagcgggccccaagat

SEQ ID NO: 583002 - DNA, 394 bp, Homo sapiens
gccaattaaacctttttctaaaaaaaaaaattacctagtctcaggtatttatagcaatgcaagaataaactaatacagtgaatattgctgcagtaaacatggatgtgcaaatatttctgtcagatatactttgcatattttgaataggatgctcagaagtagaattagtgggtcatagaataacttcattttttttttggaggaacccctatacattttttaggggctgcatcactttcttcccaccagcagtgcacaagggtttcaattcatctacattgttgacatttgttattttttgtttgcttgatattggccattccaattaatacacgataatacctcattgtggttttgctttacatttttctaaagattaaaaattttttcaata

SEQ ID NO: 583003 - DNA, 178 bp, Homo sapiens
gtcggttctacatattgatgcgaacttagtgcggacacccgatcggcatagcgcactacagcccagaactcctgggctcaagcgatcctccacctcagcctccgagtagctgggggtaacaaagcgcacaacaccggcacccgggctattttttttgtatttttaagtagagatgggg

SEQ ID NO: 583004 - DNA, 141 bp, Homo sapiens
tctcatagaccgatcccctagtgggtcctgccatctccttggcctatcaggcagctgagagtgtatatcttgaagacggcagccacataaactcccagcacgagacaagcttggtgatatgagaggctctagtcatctatg

SEQ ID NO: 583005 - DNA, 454 bp, Homo sapiens
ctcatcatttttctttatttcctctaaaaaaaaaatgagatacgttggcagaatgtgcaggtttgttatataggtatacgtgtgccatggtggtttgctggccctactgacccatcctctaagttcgcccgctcaccccctaccccctgttgtgtgttttgttaccctctctgtgtccgtgtgttctcagcattcaacttccatttatgcgtgagaacatgcagtatttggttttctgttcctgtgttagtttgctgaggatgatggcttctagtttcatccatgtccttgtaaaggacatgatcccattcctttttatggctgcatagtattccacggtgtatatgtaccacatttcctttatccagtctatcattgatgtgcatttggattggttccatgtttttgctattgtaaaatagtgctgcaataaacattatgtgtgcatatgtca

SEQ ID NO: 583006 - DNA, 306 bp, Homo sapiens
aggtactctagcggacctttgcactgttcggatatacttgagggcgtatgtaagtgaaacaagccagcacagaaaggccaatgctgtatggtgcacttctgcgatgttcttacagtagtccaattcatagagacagaaagtggctgattggtttgcacgggctgggagagaggggcatgggagttagtgttcaatggctagagattcaacttgagatgagaccacggttctggcgatggctggtggtgatggcagcacgataatgtgaatgtacttaatgatgtccacttacttggttcaagtggt

SEQ ID NO: 583007 - DNA, 273 bp, Homo sapiens
atcagtcgtaccatcagactgtcttccaagggagacaagtcctggctacatccagcctgtggttacgatgtgcaaagtggcccatcgggaatttaaatcttttcccacctcagctgatcggtgcgtggaattccaggcaccacttctgattcgattcctctgtgactcctgtccgatggggatcctctatagctcgcacctgacatggctgtgttcgcttggccactggctcgctcgttctacaaggttgcgattgagtcgaacccgtggggg

SEQ ID NO: 583008 - DNA, 421 bp, Homo sapiens
tctgtgatgcaagtctcgctcttgcagtgagtggatgtgtgagacattcagacaggtacgcagacagtgacgtggtctacaactaaaacgtggctagcactgggtgaggctggcagttaccactcaattccacacaatgccatcaatgcccaccccctgctgactgtgtgcggggttgctgggatggacggacagatgacacaggagtgctgttcttgatgagcctggacttggtgtgctgctagctgatgctgtggtgctgagcgcaacagctcccagatcagacccctgctccggagcttgagtgctcttccacattaactcgggtgtgctctgcatgagtcccatgtttccccaatctgtcaaaatgaggaggataacagtgcccaccatcacaaggctgcagaaggacacaatgaga

SEQ ID NO: 583009 - DNA, 196 bp, Homo sapiens
gccaatatgcggtcgaatcgaagctgtagccacaagcctacaccacagccacagcaatgcgggatctgagccacgtctgcagcgctacaccacagctcatggcaatgccggatccttaacccactgggcaagtccagggatcaaacctgcgtcctcatggatgctagtcaggttagctaaccactgagccatgatg

SEQ ID NO: 583010 - DNA, 681 bp, Homo sapiens
gtcttgagcgtgacaaccccccaccgctgttgccggcgcgtctttggccgctcccctgtgggcccctctttcacacacgaccgtgttgttgctcgccgaggtttgggccccactctcctcccggctggcttttggggcacaaccattgtgaaccggtgggcgctccccgttgcaggccccccactggtcgctggtctactgcgcatgatccctcggttgtgtgtgacaaccccttctccgcgcaacccaccagagtgggggtttgtcttctgggccccttcttgtggaagcgccacgcgctgttattggggccacccaaccccttggcgcctcttcgctgcccccaaaggggggcaaccctataacccccgtgtggctacgacaccgtgcgggaataaaacttgcctcaactgctcgcgcttagggaaacgggcggtgtgcgccccaacactgttacaccacacaccacgggtgatggcgctcacgttcgacacaccacacaggggaggcgccctccaccaaaggagttgggtgacgggtggcacttatctgtacaatggtcggaaaggcgccggcacataataagagagggtgggggatatgcctggaattccccccccccttttaaatatctttttggggaaacacaggggggaaaccaaaaacaaaaccccaaaaaaa

SEQ ID NO: 583011 - DNA, 680 bp, Homo sapiens
cagctttctcgagtgttggctccattttgggctgaggggcgcctttggaggtctttagcgaccggggctggggggtggttttcgagaaatcgcgccctgtttcagtgaccgcgcccttattttccagtcgggtatagtctggattcttggggcggtagggacccccgagaggccgcggtagaatggtgacctgtctccttcgaggcctgggccggccgcgacctcccaacatggcgccagttgaacgctgccttggctcataacccctcccaatggagggagttcctctttgcccctaaaactggcagcgcgggttttcgcccggcacaagaggcgctctcgttcgggctctcccagtttctgtccctcggagttgaccaagcagagctttcaaactatcggactatcgaacgtcttcacttttcgtgtgtacccgtgctaaagaggccgtctcggatttacttacgtaagcccaaacctggttaaagtgcatgtcactcttagtcattcacactcgtaagggctttccggcgcgttcctcttcaagttcacgcagcgtgtcggctgcgcacgaaccattccagtcgattctgccaaccgttcaccaggccgggcgcgctgggtcacgcctgttatccccgccagttgcgaggccacgcaggcggtccctgcagtaagca

SEQ ID NO: 583012 - DNA, 160 bp, Homo sapiens
accctctgtgtatcctctctgccgtcagctcctccgattcgaggcttgtacttggtcatactacctcctccagggtaatagaggcgcacggccgggcactcttccttcttcaggccaaagaactacgaggatagcgctaggttgtacggtagtggtcgct

SEQ ID NO: 583013 - DNA, 373 bp, Homo sapiens
  misc_feature (19)..(19): n is a, c, g, or t
  misc_feature (50)..(50): n is a, c, g, or t
  misc_feature (55)..(55): n is a, c, g, or t
  misc_feature (81)..(81): n is a, c, g, or t
  misc_feature (109)..(109): n is a, c, g, or t
  misc_feature (122)..(123): n is a, c, g, or t
  misc_feature (169)..(169): n is a, c, g, or t
  misc_feature (268)..(268): n is a, c, g, or t
  misc_feature (278)..(278): n is a, c, g, or t
  misc_feature (311)..(311): n is a, c, g, or t
  misc_feature (317)..(317): n is a, c, g, or t
  misc_feature (340)..(340): n is a, c, g, or t
  misc_feature (366)..(366): n is a, c, g, or t
ctaagagttttaataaggnatggattttatctcttacgaaatcccttttnagctnatatagagctctcataaattcttccntattaattgaagctgaaatgaaggttcntgcacagccatanngcctcttcatatcctctacatgcccctagtcccttgtgccaggacntgaatacctctgcagatagcctaaaggtgaggcttcaaggtctgcgtgctaggcgtggttctgaacgccttctcaagctgcccaagcacatgagagtcntgagaggctntcctttacagagaaagaaagtaggccatatccnctctcngtgccattataagagagagctcntgggcacagcagcacacagagcacangagccct

SEQ ID NO: 583014 - DNA, 125 bp, Homo sapiens
catggtatcatcacactgggcgcatggagagatctgcacacaccttctacactgagctcgtgtgctccgagcagcacccacctgctcacagagccccgctgagcccaggccaaccggagagttct

SEQ ID NO: 583015 - DNA, 156 bp, Homo sapiens
aggaaatgaaacctgaaggcactgctactgaaagggggtggaaaggatgattttactggtgagccataaggttttgcttaagcttgaggaatagaaaaacacacaaagcaaacgacttgcgcaagatccagttatttgagacgcccccgctcattt

SEQ ID NO: 583016 - DNA, 146 bp, Homo sapiens
agtgggaacgtggggggtacatatgccctcgcctccccgtgtacaagagttgtggttgtccatcggatccttccactcttgtcagtgtgaagatgggggcctggtatctcaggcagatagttgaattcctgtgctatcccttctct

SEQ ID NO: 583017 - DNA, 672 bp, Homo sapiens
  misc_feature (65)..(65): n is a, c, g, or t
  misc_feature (87)..(87): n is a, c, g, or t
  misc_feature (130)..(130): n is a, c, g, or t
  misc_feature (139)..(139): n is a, c, g, or t
  misc_feature (149)..(149): n is a, c, g, or t
  misc_feature (166)..(166): n is a, c, g, or t
  misc_feature (169)..(169): n is a, c, g, or t
  misc_feature (181)..(181): n is a, c, g, or t
  misc_feature (186)..(186): n is a, c, g, or t
  misc_feature (191)..(191): n is a, c, g, or t
  misc_feature (200)..(200): n is a, c, g, or t
  misc_feature (234)..(234): n is a, c, g, or t
  misc_feature (268)..(268): n is a, c, g, or t
  misc_feature (406)..(406): n is a, c, g, or t
cttgagttcaggagttcgagaccaccctggccaatatgtgaaaccccatctctactaaaaatacnacaaagttagccgggcgtggtngcaggcgtctgtaatcccagctgcttgggacgctgaggcaggngaatcaccngacccctggnggtggcggctgcagtgngcncagcccatgccncggcnccccngcctgggcnacaaaagcgacacttcgcctcaaaaaaaaaaaanaaacacatagaattggatcctttggtcgggttcncccaaattcttttgaggtgtccatggtcaactgcttcagctttgttttggcaaccccctgcccgaagtcgcatataggctgttcttcaccttgtttccaaggctgaggaacagaaagtagcctctgttttgaggaggnggaagttaagtatacatttattttttactgtgacttgttcaggaccacattttacaaaaagccttggttccctcattggtactggaaaggaaagttctaataaaaattgttaaactttggaatatagaaaaagtttttttaaataagggcttaattttgaaaaaaaatctggggttaaattcaaaaggaatgcccaaaaacccttccaaaagtaaggggaaatatttcaaaaaacaggtttgttggggaaaccaaaagggccttaa

SEQ ID NO: 583018 - DNA, 867 bp, Homo sapiens
gctacacacatgcggtatataggttatatctctggttgaatccctcgaacaatagacagtgaacctttcgcccccctttgtcatggaccatttgattggtctgccatttgcagagaactaagtatgaccgatcctatctcagatcttaataaaaagaaaataaaaaaacgcattcagggttaaatttgggccttaatatacacaatatactggttacgcaagcgtgtgtgacacgagagtggggaaagctacatcattgaatatttggataagactttaccgactggagttgggttaatttttcccttttcctaaattaactagcaactgactgtaatttatttccctgtttcacgtctctcccttccattctgcaggagttttacgctattgagatcgtggaccatcagttcggcccttggtagagagtggtttctggactctaaacctgttttatcagaaaatttggttttcttggatcttagctggaaaaatctgccaactttacacagtatttacttggtttggacccacagaatatagcacgtgtgtgcaacactgttcgattcaagcgaaactttaaaaaaagacaacgaaactactggaggagcttagtaacttgctgtttctgtacgtaagttgtttattcttcccaagcacatctaagggtctgccagtttcctaatgggcatgtgtaggctggtctgtgcattgagaattctaaaccagtttaacccttagggagaatccttgtgttggagtttcctatctcccggaactgtcctcacaattgtgaccacgttttatgataacactcccgtatgtattttcaacatacctttttttaatgggcgcttaaagccagag

SEQ ID NO: 583019 - DNA, 117 bp, Homo sapiens
cttctctgttgagctgccccactggcaatattttcacaatttctctaataaatctgcccttctttacctacaactatcttggtatatggctttaccacctgcaaaactgaccctagg

SEQ ID NO: 583020 - DNA, 1414 bp, Homo sapiens
gccgcaataaaactctatactctctatactaaatctccctatcaaatctccttaattataacattcacagtcaccagaatgtatgtcaatattctgatattcttccttcggaagaccagcactgtatccccaaccttggcctatacagtcacaccgcactgaggcaagccagtacagcaacgaccatggacaccgcaggcgacatacttaccctacttcgtacaaccacttcaatacggactaccctatacacccatagcgtcagtcgtcaactacagtttaccattcacacacaacgcgtaggcctcaactaatacattactatgtcactctactctacaacctgtcgcgaaggaagcgtactcaatacttaccgtgagtcacatacacatcgtataattagtgaacctactgcatatacactaaggtagacttaatcactacgcctgacatgtactaaccgtccttgtaccggaggctcctcactatcatggcacttctcgcttcatacacgccgctagtagtcccgaaaggcgcactccaaatcagcgtaggggtcccaactaagtacatttggaccagcacagttaacgtcattctcaagacacatcaggcgcatggactatatgggtcactaagtaactgtcaccgttctagcaagctgtcgaagtctctttcaaagagcacgcgcactatgtatccacagagtaggaaagcattatgggccccataagcccgctcgtattcccggttatgtttaccttaatgttcccccgttaactgaacgtggccagtacatcttatagtacatctaccaggtcgatctcaggtccatggcccgttaacggaaagcagaacctaggaaacccttaggcataattcgcctttcgaatatggtcaataaccttccgtgttcaaaatcccaaggcgccaccatttaaggcgcgcttcgttaagttaacaccaagtgccagtattctgccaattccccaaacaatgtcccccactgcgatagtctgtttaccacccagaggcgccaaagtgaccagtctcccttcacagggtgaacaagttccggtgcttctccgcatgggggaagacccttagtaagccatgttcgccctttctaaatgtaacgcgtaaaatgttcactgggcgcccttaatgttcgcaaaactgagttccaagagaatctgtaacatggacaaatagggggcccggcgttcgcccccaaggggattcgggtccgattactataatactctctccctcgtctcgctgcatatccccacgcgcgtagacgtatctacaacaacaccatagttataccatgtcccacatctcgatgagtacagcccctattagtgatgtaattgagacccctatcacttcagggcgaaagacaccccactga

SEQ ID NO: 583021 - DNA, 764 bp, Homo sapiens
tcatgatgcattcaatgaagttcatatccatgaattcactcctaatataccctaataaagtggttgatcacctacattatctgtctataagaaactgccttgcactgacaatgtaaattattttaagcataaattttcctaatagtttattagagctactaatggcaaaattcatgtcttcaatgtggccataacataggtctgggaggggtggtgagaaaataaggtatttacttgtagtagttaagtgattctgaggacaattagaaacagactataaaactcaactacactgtaatcaatagacaactattggaaatatggcatatgttgacaaacacttaactagggaaatcaaagatataaatcatgtttataaaaaattaggcacgcaatcatgtgattcatgcttcaagaaaatatatgaaaaaagtgttactccattatgttataaactagcagattttccctatttgaaatgcatgtaaacgggctcgtgtgattctgaaatggtactgtatccttggtatttacttatatggtcaaatacttgtcttgtaaacagtgatgggttctgatacctgttgatcaacacataagatacaaagcttcagaaaatgggtaaagtgcaaagccagtttaacgtccgtgaatccattgatgggtgttcctccaggccacaagcatgcccagcaagagcttagacttacacgattccggaccggggaacgtcttcaccaaaacgtgacgttttcacgcagggc

SEQ ID NO: 583022 - DNA, 1530 bp, Homo sapiens
atctttagtgaagagcctcactggtccaaaccatcactccttgtagtgtcgagcccagtgtgatcatccattgtagaatgtcaaaggccgaaagattctacatgaccaaggcagggtatcccagcctggaccgagctgcgatcgtgactcatttgccgcgcagaacagtcgtggacggatggctcgacactcatctcagcagtacagacatcacagacaagagctccatcccttgtcaccctgagtgtttgcagccttgctgaggctggacattcattgatgctcttcgtctccggcgcagcattgcgccgagcataatacttactgacgacaacgatgactctgccgcgacaacgctgcgtcatgcgtcgcacgttcatcgcctcggtgacttgctcatagtctgcccgcaacgaacgaacgctgctgtggtcacacccaaccacaccatgcaggtcccagatgaaggaatggctcaaaacgtacgaaggctgggtatcctctatacccttgcacatcggccaagactcttcgcttgtctcgcaaggttcgcccccgggtgcgtcccacttgggcaagaccctaccaaatatagcagtttgttcgctcttttacaattggcacctcggccaggtcagcgcaagacaactatacacatagacaacaaaaagggctgcgggccacgtctcctacacgagtttaactacgtcttgcgatcagcggcgcgacccccaggagattcacaccgacgagtgttaacccccccacggctctaatctgcttgcgctctcacaaaccgcgacaggagttccacacatcactaccgctcgcgaacagatcgccatcatttccactccacccccctgacgtcaaccccgctcaggcccctcgcgacgcagttctcactcgcacacaccgcgcctacgcgccagccacccgtgggcccacaacattcgcctcgccccacaccctctctgcagcgccagtcccattcccgctgacaaacccgcagaccagcctccacctggcccttgccgagccctgcttgaacccctctacccgctgcagcccgccatccttcacccctacccgaacacccatttaccaaacagagcttcctacgcgtggcaccctttcatcaccaaagccttcacacgcgcggccacacaaccgcgcgcccccccccaggcaccgcgccagacaatccccgcgccgggacccacgaacaacgctccggcacacacccccccccgcgccctcccgcaacccacttctttatcaccgacccacccactatcataacaacccccccaccccacacccccccccctcccccccaccataccacaccacccaccccctaccaacaatcaatcaccactaactccctcccaccccacccacaccccacaaacccaacccacccccaccccaccctcctccacccaccctcctcaccaccccactcccccctccttcaacatcacactcaccacactcacccaccgcacaccccaccccccccacccc

SEQ ID NO: 583023 - DNA, 1246 bp, Homo sapiens
taaaaaaaaacaaaatttgaaaccctttcccattttgtgaaattcacaaaaataaattatttcgggaatttccgggcctgtctccctttcacggggtttcattatacggggcggggagggaggaaacagttctcggaaaattcagagtggtgccaaaagccgagttcccataaaccccagtgtggattttttttattttattatttttgttttttctctccacattttcgcgtgggcggcggggcggtgggtgggacacacaaaccatctggggcgctcccccggggggaggagaggcgccaaaaaacaaaaacacacccctcctcagaggcggcggccgccgtgggggctgagagaaaccccgcgccctagacaaacaaaatttctcttccagcaaaatcagaggctccccaccccgcaggaagagagaggggcgtcatggctcccacgagaggaggcgcctacagagggaggcaccgcgcgcacaagagacaactggggcgagccagcggagacacgtacgcccctgtatagggcgccccctctctacctaagagaaacacaaagcggcgcgccgccccccccgaggagggagttttcacgcgagaacacacgcgcgaagagagacccacaccgggggcgagtctatgaggggggaccactgtggaataaagcgcgcccccccacaagaaggggcggggaagacattttgccgcgcgcaaccacctggtaacgccgccccccacagctctcttacttggccccaccgccgccgacctactagaagaaaggagcccctacccgaccagagacaccacaagactcgcgtagacctacatagcgaaggaccaaacaaccacacaccccaccacggaggaagcccgcgagcgagacatcaccaacaaaaagcgggggcgccccaaccgacgctaccatgtgggagctgccacgacccagagaacaaccaatcatgcgcccactcttcaacaaacaacaacatacatagcatccgctttgtcgctataatctatttactgtctttttgtcacaacactcaacattgtgcgtgatatcaccccaccaacacacactccgaatcatccttatactcaacacacaccaacacattctcctcgatcaacaccctgccacctctcccatactatttgagtgtctcatcggtccacaccaccaccactataaaatcatctaccaactcaacgttgattttgtctatctcccacat

SEQ ID NO: 583024 - DNA, 1243 bp, Homo sapiens
ggtggtcgtgtagagtgtgctgacaggggtggatgccgcgcttgcctcagcctggcctcacccctcccgcccgggacagggtggctggagcgctgctccgctccgccagctgcgagtgggagcgagggagggcctggtccctggacggtctgccgccagctgcgagtggaagtgagcgagggctacgtccccggaccgtctgggccagggggtaccggcggcagcagactggtgtaccgatgtgcgggcaaaacaacaatgctcctgtaaccggagggggccccccgccagagcccctgtgtcggcagccggggcctgacgggacgtggcgcgggccctgtggggaagggcccatgcaggccctatccggtggactcccgccctgacggcacgaattgaagccccaccggataacattcgcaggatgcaaacttcaaagacaggacacacaaacagcagatacccattcgagatggcccatcagacagggagacttgctaagaaatacagtggcttgagtaagagtcgcaagaactgtacttcttgcccaaggggaacaggggatccttatactacgcattggtctggaggcgcagggatcaaaaggaccactacaccctctttcggctcagggaaccgtcgtaagcccggactgattggaattgactgggcatgaacacccgatcaacttcgcacgcctagcaacctgcacaatgactcacagaagtaggaaacattaggctcatacattgagcagcggcccagcaggcacatggcacgcgaccacgacgcacaacaagggagacatccgcgccaaacagggcggagcgaagtggacggggaaaggccatggggaagggaaatacacgggcacaatagctcatgggacggggaggagcccaacacgccgcacggcgcgaggaaggggtcacacgtcccaacgagggcgagagacacatgcccagagcgagaaagcagagacacacacgcagagacaagaggacaaacgaacaccaggggaacgctaagaacacaccgagaacacaactacagagaagcaagtagatggaacacagaggaccaggagaggaagaaaaaacacacaagccacaggacaaataagcagtgcacgacaaggccaagaacacagaacaccaaaaaaccgaacgcaagccacaagagacaaccagaaaagagacgcaacgaagggcagcgaacgacagagcgacgggaacgccaaaaa

SEQ ID NO: 583025 - DNA, 315 bp, Homo sapiens
gctcgacgtcagcgccaccggaggccatgccaccggaggcctcgaactgtggaaacaggcggggctgggccatgtgcgcctgctcaatacctacggcccgacggaaaccaccatcaccgccagttacctggagtgtgacgcttatgttcgcggcgaattgcccaagccgtcgtcgatgccgatcggtcggccgctgggtggcggcgcatgtatatcctcgacagcgatttcaccccggcggtccagggcgccacgggcgagttgctgatcggcggtgcttgctggcccggggttatcacggccgtcgacgcggcg

SEQ ID NO: 583026 - DNA, 305 bp, Homo sapiens
tcgatcgagccggtacccctagtttagaagttcactaggataatggctgcaggtctatccatgtctggggcaatgacaggagagctacttgttagaggctaaataagtattctaattatctatctatagagtctctctatgtcacagtttctttatccattggcccattgatgaacacctaggttgtgtctgtatcttgactatggtgaattgtgctgcaataaactggggagtgcagagataatctcattcccttgggggatatacccagaagagggattgctattgaaacttctaaaactagg

SEQ ID NO: 583027 - DNA, 82 bp, Homo sapiens
catggaatttgctggtgcagtacaactaggcttatagggacatgtccctattagcttgaattcgagcttctaacgttagaag

SEQ ID NO: 583028 - DNA, 113 bp, Homo sapiens
tattgagtgctccgggtgggagtggtaaagctcatgtgcaacaggaagttgtattcagcaaggtccagtgaaatgatccagcagaatctggcagacatctgtgggtgaatgtg

SEQ ID NO: 583029 - DNA, 101 bp, Homo sapiens
actaggcgaagactgtggggcgtacctcctcacgctgcggctgtcgcccgtatccgagcgctcgcgcacagtcttcccctgatccacagtcttcgcctgat

SEQ ID NO: 583030 - DNA, 325 bp, Homo sapiens
aagataggacatgacctaaccccctggaacctggaaacaggactttgtttgctgaaaaagtctttgaagatgtgatttaagggttagggatgagatcatcctggattagggtgggtccaaaatccaatgacaggtcacttctgagagacagaagaggagacacagacacagaggaggaggccatggggagacagaggcagagactggagtagatggggccacaagcccagggacgcctggagcccccaggagctgggagaggctggagggatcctcccttagagcctcccagaaggaactggatacaattgaaccggatagcttg

SEQ ID NO: 583031 - DNA, 130 bp, Homo sapiens
gctgcaggctgttctagaggatcccaatgcagtggaatcggagggaagtagcaataaataacatggacagacagagctccctccagacagatgagggtaaaggaggttagagaggagcgtaatgatgggc

SEQ ID NO: 583032 - DNA, 408 bp, Homo sapiens
ttggcactataagggaggttatgtcaaagagttgaatattggacttacagatttcacaagtcaagtggtttccagggctaacaatctagtcctcctttggggagtagattggtgatttagggaattgttggagtcacgaagattaagaagacgtatgactagctcttggattgatgcggaagctatccagagatgattgactcatagggtagtatgtgaaagggtcctacatgcacactagttgtcacacagtcggcattgagttgttgcttgaacctgaaccatgtgatctacgacagagtatataacgtagcactatcaagccatcagctgcctcgagagtgacgtgcattctgcgcaatgttcgaaccatctcttccttgactccgttatgttgtgctgccttcc

SEQ ID NO: 583033 - DNA, 267 bp, Homo sapiens
ttcttggtcttcttgaaggcactgacttcttgggttcgtcgctcttggtagccggaaggccccgatggctccacccctttgtctgcttgaggacaccggtggtacccaggcgcttgatggacaacttgatctgcgagtcagcgttctcacccaccttgtagtgcctcttgatatacttctgaatggactggcgcgaggcgccagccgcggttctttctcgggcctggattgcagccaccgacatgttcggggtaccgaggctcgaat

SEQ ID NO: 583034 - DNA, 727 bp, Homo sapiens
tccccaaaaaaggtttttttttttttccaaaaaccggaaaaaaaaaaccaaaaaggggccccccgggggggcaccaatttgtggttacccccccccaaaaagagagcggggagagagggtgcccccaatctctccttgtgtggtgcattgcgcgcccccttgctcacttatggttgtgcactcttcttgaggggcgagtcccccactgtccctgtgaagcggtgttatcgtgcagccccactctgtgtctcgtcccacactcttctttcccccaaataatttttttgttgggggcgggggcattcgtggtgcaacaacaagcggggcaccatgggggatcaacactttggggcgtctggtacccacacctcaatgtacggtgttgttctaaaacagtggtacctctctgacacaaaaacccacccctagttctccaacaaggtttttgtgcaaccacgagaaaattgggtcccccacactctgggggcgccgtgaagagacaacagggggtgggttggcgaaccggcctgggggagccctcttgtgtgtggtgtgcccccttgtcggggggggcaacgtgtcgactgggggacaccaatcttgtgtttggggtactgccccgtccccccttggggttgggcccccagggcacttttggccacgacgtgtagaaaaggtgctgctcttcccccccacattttttcctaaaccccgggcgggggacgcg

SEQ ID NO: 583035 - DNA, 653 bp, Homo sapiens
  misc_feature (528)..(528): n is a, c, g, or t
  misc_feature (560)..(560): n is a, c, g, or t
ctggcgtcatgcttcctcagtgccaggtcagggtttggtccctcttctaggggtggtttcattctttatcctgaagtgaggtggaagtctagccacaacggctggacattggagaacactgacgcgtagggacatacgacagtgtctccttaggttgatatttaatgatacaccttgtgagatgtaccctgggaatattgatatgtaatgatatattttaatgacataccttgtcagatgtgccctgggaatagttgctcattccacagtttccgcttgtttcgcagctgcgctgaacctgctcccttggccgccttggatgcaggtttgtccccagcctccatctccttcacagctaccctgccgcgtgctgggaaggagaacaggactggagcgaagcctttctggtttggcagaggccttgtggaggaggtagaggctggggatgagcctgcacatgaagcagccctgtcgcagttctgaagggcagtgtgctgtgtttcctttctagcccccacgagataattntttatatactttcatttttttaatggattgcngtttcgctattgttgcccagcttgactttgactccttggctcgcaggtcttcctctcagccctctgagtgtcttggactacaggtgcacaccc

SEQ ID NO: 583036 - DNA, 629 bp, Homo sapiens
gatcagctcgtacctattagacacatcagaaagtgacaggacagcccgtaaataagaacaaatattttcaaagcacacatctgataaggaactcacatccagaatgtgagaactcaacaataaaagacaagtttaaaaggacaatttaaaatgggcaaatagtgttggttttgcaacaatgtaaatgtactgttcacagtatatatacattttgatgtaacaaatagtaagttttgttatatatatttaaccctaattttaaaaataaatttttttaaatgggcaaacatttcagtaggcatttctacaaggaagatacccaaatggtcaacaagcacatgaaaagatacttaacattatttgtcattagggaaatgcaaagcaaaaccataatgaaataccacttcacacccaccaagaaattgaaaccctcatacattacttgtggtagtgtaaaatggtgtaactgctttggaaaacagtctggcagttcctcaaaatgttaaacatagaattagcgtatgacccagcgatttcactcctaggtaaatacccaagagaaatgaaaatatatgtccactcaaaaacttgcattcaaatgttcatagcagcattatttatactagcca

SEQ ID NO: 583037 - DNA, 500 bp, Homo sapiens
gttattttccaaaggcaaactaattcatactcctacgtgaacatccttttaacacaggcttaggcacagtacgtccaattaatttaaaattggtgaataacgcctgttggccacaaattttttggttttccaccctttacctggaaaaaggagggggcctgtcttccagttttttccttctggacttccctgtgtgtcactttacaaattaaataatgctagctgttaacatctacatagcagttgacatgtgccaggcctgtttaccagttaatcttctccatgatcctatgaggaaagtgctattgctgtctccatttcatagatgaggaaaatgaggcacagaggagacgttatgtagccactaccactgcaacttgctcaaacttccggccaagtcggctctagtccagacagcctgactcctcagcctgcgtctgtatgctgcctctcctaattcattatgtttattaataatttttccccgttttgttaacact

SEQ ID NO: 583038 - DNA, 160 bp, Homo sapiens
cgctgattctgagtcatgcgccaggctcgggtaggcacaggcgtacactccagatgtgctgcgtgcttgtgagactgcctgttcagggaccagcccctgtggctcttccaccaagtatttggtagagggtccccctcatgcctctacacagacagcccct

SEQ ID NO: 583039 - DNA, 154 bp, Homo sapiens
  misc_feature (54)..(54): n is a, c, g, or t
  misc_feature (62)..(63): n is a, c, g, or t
  misc_feature (125)..(125): n is a, c, g, or t
gacgtatatcctaacgcagagcagtatatctataactactcatacgagactccnccttcttnntaatttcttcttttctgttagtatgatatatcaaaatgcgggatcttttccctgccatctgncagagttagaattgtacaaaaggacagtc

SEQ ID NO: 583040 - DNA, 100 bp, Homo sapiens
tgacccatgcacattgtatcaggtgtaaacattaacaaaatatatagtacacttagcatacttagcctaccaacatcgggtctaagtactagagcacact

SEQ ID NO: 583041 - DNA, 1288 bp, Homo sapiens
gccgaggctggcggacactcagctgatgcttggagtcgggctgatctgtgaccatctttccaccgtagcaaaaggacacaaatggagaagcttctgctgggctgtggtgttatccttccacgacagccacattacacggaaccctgctgctgagaaaactgctgcctctacacgatgacaacaacactctctccagtccctctctgctccttctggctcacgtaccagaaccaacactggccttcttacctactcaccaaccaacttgcacactctatccacgacttcttcctccactatctctgaacaacacgcgtgcaccctcacttcttcccctactctcgctcccctgaccccgcccccacacgcactatcttaaacccacacggagcgacacgctatgccatgtcccttccaccctaagcgcacctatctgctgttacgacgctcctcagccatttttggtttgaccccaaaggccttggaacgcctgccacgactgcgcgcgccgaactcctctgaggccatccaccgtgcgcaaaccacctccatgagcacgtcaccttggtggctctccaaacagtcgcaattctacctccgtactgccccccctccaaagcagccctctccccgcaaggttaactacccttgcaacggcaagtctcacccacacgaagaccttgtgctcagccccttgcaaacgatacgaactggtcgcgcacagccctcccaaggcagtgttcaaacagaaagttggacattgtcgcacggcaagcacatccacgttcccatttgggccccacggctgcatccattccagccacaacacgaggcggtccaattagtttgcgccacgaaagtgttggcacacccaacaaccagccgatgcacacatccctctctgcccccctttcacactaaacctaggactactaccctcggaatctgccccccccgcaccacgtaaggtggcccaattagccccatagaggccccactgagcagcaatgtcccaaattagacacaaaccgacaaccccttaggctcaaattccccctcacacgactacatatgtcgaaacaacgctgggaccaacacagcctctgggaccaaattgactcacctaacgagaaacagacaagcgcgccgccaccctactcaaactatgaccgacacatacagcctcgaaaacccacatcgcatacacatccctggcggtcgcagccaccgttgatcatatccgtcgcagacccccccacacgcgaacgctcccctacgcaagcgcccg

SEQ ID NO: 583042 - DNA, 147 bp, Homo sapiens
cgtgatgtcgcttcgacgtcacacgtcaccctgcacgccgacgccatcaccgcggagggggccagatcatccccgcagcacggcgctgcctctacgccagtgtgctgaccgcccagctcacgcctcatggagcccatcttccttgtt

SEQ ID NO: 583043 - DNA, 685 bp, Homo sapiens
aggctcgggatgtggcgcttgtgtggttgggtgcgtgaaagattgtgggccccctggtggatgggccggccggcctcgctgtggctggggcactgttgggcggcgctcgcgctgaggggcgcctctgttgtgatgccctgtcggtgtttgccccccgcagtcgtcgggatgggggtgcgctgcgccctcgcatccgcgtcgtgggggtaacgagcgactgctgtgtgatctgccgctgcaagtggtgctgggggggcgggcgggagcctgtggtaggcgtcgcggcgcgccggccggggggagccgtcgtcgcgccgggggtcgcacgcgctgtctgtcaggcgctttgcgcgtctctgggcctcgcgccgccgttcttcgctgcagtcactcgtgtggtgttctcctctgccggtgtcagtcccccctcgaatttgctcgctcgcgagtgagcccgcgtcactcccccccgcgcttcatgcccgttcgtacagagagcggagcggcccagggtacgactctcgtcgagtgagcggatgctgcagcttactcacgtggccgtctacgtcctcgggccgccacgccccgcaccgagccgaggctgcagccgatgttcatgagatgtcgatggaacccggaccggcagaacattcagtataacataccttatccgccgttatcaact

SEQ ID NO: 583044 - DNA, 236 bp, Homo sapiens
cgtgaattcccggcgtcgagccacgcgtccgactatctgtacttataacgtggttcccctctctcagcgaactggtgttcgtgaatggtgcacaggaactgtccccattggtcaatttcttgtcaacaatgaagatggtgctcataaaatatacaggccaaatgatttcagtgcctttcactgccaaaagaaaatgatggaggtgcaaaaaaagtcttttgaagacaaatatgaag

SEQ ID NO: 583045 - DNA, 879 bp, Homo sapiens
ggagcaacgctaggaatgggcgggcagaaaggtgcacgctcttgtgaggtgactacaggttaggagaccgttgaacctggaggggccctaggatggagcccgtggaaagattcagagactgcgccctctccctggcgccgcttcccctacacgcggcgggtatattctcgttgcagttggcccaggacctgttttcaagactctgccccctcgcacattcctgtccctcctggtttcgtaaacgtgatgctcatagtgaacccccaacccgagtgacaactactcgcagctcctggctgacttctagatcttctgtgttgaatgctgcgcctttagatgacacgaacctaactacccctgttaccagcggatgcccgggcctggagcccacagaattcttccagtccctgggtggggacggcagaaaggaaccgttcagattgacgatgtgccatggcaccacaccaactgctcgccttcaagttccagcatggagttgattgcagcagcttggattctcggcgcctcagctgggtcctacattagtgccttacggggtgaacaacggtgattgaggattaacccttcacctgctatgtgcaccagtgtatggatgtgcaagcagactgtcaaggtacttgggaagcgccatgctgggcacagggaattgcatgcgttgtacactactcctgacgcacattggaaggaatcgttgcttccacagctggccccggaagccctcaacggctgctgtcccaccattgattgctgccaagtaccgggggcaatggtgcccccctcatattatacgcagtcattgatcttgtggcttggcgatcatcgccgggtccggagcactaccacctacgttgaattacc

SEQ ID NO: 583046 - DNA, 1011 bp, Homo sapiens
aatccttgtcacgtgaacgatcctcggtggtgcaggtcaattgtgctctcggtctccactctgcttggtcgagccatggtgcgaactatgagtgagacaaagtgacgagcaatttgggagggtgctcgggtggtctggacccgcaagtaaagggggctgggtgtcgttccgacctctgagcaccggaagtgctgccagtcaggtacggtcaaggaaaggctgagagtttgctattgcggtgagaggacactcgcgtatgcatgcgcggaagcgtcccacagtgtggccccgggaccttgcgtgaattgcttgagaccttgtgcccctagatgattctagagctgagcagacatctgtgtgctctgttgagtgcttgtacaactgtggtcttcgaaggcataatagcagccaagacgtaaacaggcatcgtcactctgtgcataggcgtgtagtcaacgtcgagcaactagatcctttaattggagttggcaccgtgctctctgtggctatgcgttcggacctcaatcgtgtccgtccgttgggcgatcgtccggcatattgctttagaagtgtcaatcattggaacgtcaaatggtggtgccgttcctacgagacgtcgatttggtccgccactcggcatttagtctgacccaagttttggagtcgtcccgtttgatgcgcgttccaaggtgccggtacgtcttgcggcagctatgacgacgtgcggtctccagtagctgactcgtgtcccttggcgtgcgctgtcccagagtacgcgcggctggttgcgcccgtataatgcgacataacgtgggcgagggcctgggttgaacccggttcgttggtttgccgtgctatcttaccccggttgtttgtcgttcggggattttgcgtagagttgttccggtttgtcccacgttctgctttggcgggggcgaactggagtgcgcgcaggggcccccttggcgctgtgacaaggcgggggcttgtggcagccgccacccattgttt

SEQ ID NO: 583047 - DNA, 705 bp, Homo sapiens
agaagcggtctccttctcttccaagcatttctatcttttacatacctactgtacgaggcagagggggtaaacagtgggagggacctgaaagagtagagaagaagaaaacattgttatgagctatgtttaatagccaacgcatgtagggttggccaggtagtacgacagccccgggaagccggggccgtcttcctagtcccccccacgcgccgcgcggaacgcgtggatcgaagaagaagaatcattgtgaaagcatttgaagtgcaacgtcatgaccgcttctggccccgcgtaccacagcgcgaaaagagtctgcggcggaaaacaacgaccagtacaaaaagagggtcgcaaccagaaccgaacgataagacgtacggcattgagtaaaacatgggtttgtgtgcgccctacctccacggccatcctttcacaaataggaatacgagaccaaacgctcccgtgtagagtgaacgacgaggggatgatgacacggaaggtgaaaaagaattttgcttccccctccctccgtgattgtcaagggcgctatatggatgaaggaactctagaacgcgaatacaatatagctttcttcaccctctgccgccacacgctcacaggcacaaaggacgagtataacgctcctacaactacatacataccgctcacgtcgggcagacgagaagcgtgtgcggagtaggtaat

SEQ ID NO: 583048 - DNA, 770 bp, Homo sapiens
acagattctagctattcctatcaaagtatcaacattatttacagaattagaaaaaaacctattttaaaattcatgtggaaccaaaaaaatggcctgaatagccaaagcaatcctaagcaaaaagaacgaagctggaggcatcacactacctgactttaaactatactacgaggcaacagctaccaaaacagtacagtactggtacaaaaacagggatatagaccaatggaacaggttagagaacctagaaataaagccacacacctacaaccatttgatctctgacaaagtcaacaaaaacaagcaacaaagaaagggctccctattcgataaatgatgctgcaatagctggctagtcatatgcagaagattcaaactgaatcccttcttttcatcatatacaaaaattaactcaagattgattaaagacttaaatataaaacctaaaactataaaaactctagacgaaaacctaggaaatgccattttggacataggctctggcaaagattttatgacaatgattccaaaagcaattgcaacaaaaacaaaaattgacaaatgagacccaattaaactaaagagcttctgcacatcaaaagaaagtatcagagtaaccaagctacagagtaggagacccctatttgcaaactacacctctgacagttggtctaatattccagaatctataagtaacttaacaagcaaaaaaaaaatcttcattacataatgggtacacggacctgagcagacacttcttctaaagaaga

SEQ ID NO: 583049 - DNA, 269 bp, Homo sapiens
gctgttcagaggatcccacaaaacatgatacatacctcgggataatcacatgagtatgctagatctaggctacgggttcgatttgaagtatgttccagcttttgtgttcttcgagtcgatcccttatgtgatagtcccgaggtatgtatcatgttttgtttacttcgggatctatgtgcgagcatggtaggaaatggatagaaactacttaggatagatgtcattgtacctacgtgcttgggaatcgtagagcataacaccacacaatt

SEQ ID NO: 583050 - DNA, 251 bp, Homo sapiens
caagggtttgtgggagcttaggaagggcttcctggaggaggcggccattgagctggaagatggatgggaggtggacggggaagagaatggcacctggcgggctagggatactttgcttgtgaggtacgggtgcaaaagtccatggagtgcctgacggggtgagccaatttacttggataacatcatcgggtcattgaaactttgtgtgtgtgtgtgagagtgtctgtgtgtatatgatcgctctttgggac

SEQ ID NO: 583051 - DNA, 133 bp, Homo sapiens
gaagtcactcccgatatatatcagtaaagtgttatatgatacatgtcagcacgtgtacttttcatttggtagaaacatattcacgttcatgcataagacggcatataactgttagcaagattaatcctttttt

SEQ ID NO: 583052 - DNA, 889 bp, Homo sapiens
  misc_feature (151)..(151): n is a, c, g, or t
  misc_feature (196)..(196): n is a, c, g, or t
ggtgcactgtgggaaagagcttgtcgctgcggtgttgctgttggagactcgattgtggtgacagcgaaagaacgataacaaaatgccggagcgagatagtgagccgttctccaaaccctttggcccccgatgggccacgatgtggatgatnctcactccttccaccaatcaaaactcaccaatgaagacttcaggnaacttctcatgaccccagggtgcacctacctctgcaccaacttctaagtcacgtcaccatgagatgccaagggagtacaatgaggatgaagacccagctgcacgaaggcaggacacacacgaaagagttattatgccaagctaggccaaacaaagaaatgagagagagagagagctagcagagaagtaccgggatcgtgccaaggacacgggcgagatggcgtgaaccacagcttatgaagaaaccgagctaatcagaccaagtaaactatagggctgtgggccccactggtgaggcggacaaatcaggtgcagagaagagacgacagttgatccaggagtcccaattctgggtggtgcattgcacacacccatttggttggaaggctgggattggctctggttcaaaaggtacgaggctgagattgcagccaagagaaagaggagcaggaactgatgcgaagccagaaagaaacaggaagatggggctctgcaaataatggttttcaacacgttggcggaaggtacgaagctttagagcaagcttgacggaagagtttcatgcgggagatgcatagtgtaactggtaggttttgcaagttcacattatggaggtttgccagggcgactgccatttgttggggcattttcggggcgagaggaagggcaccgggtttagtgtcaccacaggggg

SEQ ID NO: 583053 - DNA, 481 bp, Homo sapiens
gaagcgccgcgcgcatcctcggttcccgccgcgccgttgccgccgctcctctccctcctcacctccccgcaagctgagggagccgcctctggccttgtgccagcccagaaaggggctcccacagtgcagcggtgagctgaagggttcctcaatgctgcggccagaggtgggcgccaaggccgaggaggcgcccagagccagcgagggcttgccagcaagcttgtcacctctcaataggaaacttggtaaccaaacctacttacgaaagcaagttattctgttcttaacctggaaacctgggggcaaaaaccaacatgaactgttcgtctatctataatcgctccattattctttttacccctcatggcattgaaaacaaaattcttcaccaggcaacacacaaggacatgttaaacgcaaaaggaacgccagcacctttacctactcagcgggagggccacccctcaacggaggccatttg

SEQ ID NO: 583054 - DNA, 121 bp, Homo sapiens
caggtagccacggatgttctgggtgttgggcggcggctgcaccggcgacgcttcgtgcagcgtccagtagtacgcggcctcttcgcgcagggcagcgcccaccaggctgtgcttgatcacc

SEQ ID NO: 583055 - DNA, 381 bp, Homo sapiens
ggttttgggtatattcaaaaccagttgagaattgtacaactactaccataattttagaatatttttgtcactccccaaaggaacctgtttgactccccatgactccccattttcccccagttctccctgccctaggcaagtccaagtctattttctgcctctatatatctgcctattttgaactttttacgtaaatggactaatgtattttttgtgtgtgatttgtttccagcataatgttttcagggttcgtctgtgttgtaaccatgtattagcacttcatttttaaaattattgagtaaatgtccattgtcaaatgaatgggtaatctcatgtaccccataaatacatacacctactatgtacccccaaaaattaaaa

SEQ ID NO: 583056 - DNA, 630 bp, Homo sapiens
gggaggctgtgtctgtgttgggtctcgggccggctcggtcctacccagccaccatcacgaccatctgggacggaatgaaggtcgtgtctcactctgtggtctgccacaccgagagtgcaggggtcattgccggagcctttgtgggcatcctcctgtttctcatccccggagggggcaagatccccaagcgaattgggtcaaccagaccagcaggaccaatgagacgtggtacaaagtggaggcccttcagctttgtaaggaagatgagagagagtcggccgttgatggtgcagactgaggctcagtacgtattcctgcatcagtgcatcctgcggttcctccaacagtcagcccaggccccagccgagaaggaagtcccgtatgaggatgtcgaaaacctcatctacgagaacgtggccgccatccaggcccacaagttggaggtctaagtgacgagggggctgggtcggcagcccaggcatcctcaagctctggacacccacttgagcccagattcctggaagagcagagggctgggctcccagactcctgggtgctgtgggaggagggggctggtatcccaaatctggtttccccaggagagagtggtctggtgggcttcagatgagt

SEQ ID NO: 583057 - DNA, 1149 bp, Homo sapiens
ctgagtgagcccggctgaggctgccagtacccggcccggtccgcatttcgccttaccggcttacggtttccctcggcccagcacgccccgggcccgacccagcccatcctgatcacctcgacagtccggactccggactgacacgactactgacagacgcaatgactgatgataggcgctgacgcatacgaccattcagcggcacgaatcgcccgtgaatgttccacgcctgtgacggaccgactgtgcgaagttcatacactgaatccggcatccgacgggtgcggacaactaccatcacgctagtgcttacccgaacggcttctcctgctacacacgacgaatacccactgtcaacatcatgcgacggccgaacatcagcacacatgatgcgaaagacgacgcgacacgacaaactacgtaagcaatcacggtcaaccaacatgggcgtcacaccaggccacgagcaacacacaacgccctacaagcgaccgctaccagcggacaatccaaccgagcgaccattaccacacaggaacgcatatccacttaagcccaaccaaaacacccaaaggcaaacggacatagcaaaacacaccccacgattgggccgtacgatgacaagacacgaaacagaccaccactaccaggccgcacacaccgatcggggagaaacacgcaatcgccacattctcccatccgcggcaactttcggcgtcgcacaaaccagagcaactagcacagacaacagcgagctaaccgacaaactacaggcccatagctacgcaatccccaaccctcccacagcccacccatgcgaatagactcccaccacaccacagcacatacaatacccttacacaaagaagggatacacaacacgcaagacaacacgcggcaccccccacacgacagcgggaaccacccaggacaccacacgatggacggacgatcaacgccctcgaagacgccccccataggacgagcgcccacagacacccaaacacatgtaccaccccccacatccacacacccgctgcagaacgaggcaagttcaggcgccctagccaatgccaaccaaactagagccccattccacccagaacacaaaacccccaacacattcgaagaacccaatacgcccggaaa

SEQ ID NO: 583058 - DNA, 365 bp, Homo sapiens
  misc_feature (32)..(33): n is a, c, g, or t
  misc_feature (60)..(60): n is a, c, g, or t
  misc_feature (79)..(79): n is a, c, g, or t
  misc_feature (247)..(247): n is a, c, g, or t
  misc_feature (312)..(313): n is a, c, g, or t
  misc_feature (318)..(318): n is a, c, g, or t
ggcaccagcctcagcccgaacgacccttggcnntaaacccgtgtccatccacagaccacntcctgctactctgtcggtntggccactgtgcatgtggccagcgctgctgaggcaacggagcggcagctcggtccgccccccggcccgtttcgtggccactgatcggaaacgcggcggcggtggcgagcgctcacctctcgttcgctcgcctggcgcggcctacggcgacgttttccagatccgcctngcagctgccccatagtggtgctgaatgcgagcgcgccatccaccaggccctggtgcagcagggcnnccttncgcgaccggccgtccttcgcctccttccgtgtggtgtccggcggccc

SEQ ID NO: 583059 - DNA, 1063 bp, Homo sapiens
aatcgtggttgtgatgaaggtagctgagcagacacccctcagcggcctctatgtggccaaactgcagtcaaggaggctggtcgttatccccctggatgttgcgtcaacaattgtgctctgagatttgggccccacgagctgagaagtcttgcattcgaactcccatgaggatgtgggacaaagtggcattcagcaggctccactgagatttggtcgcgtaatccagtgttgctgctgggagcagacaaacctacaagagagtgagcttgagagctggggtggtgaaggagcccctaaacatcatcatgtccacgatgcctgatatggattagggccggtgggaacaggcccatttcgccctgttcttcaacaaggagccagtgctgttttgtgccggctccccgtgacctttcgtgccggaaggacatctatagatgaaggtaatgtcgagatgcgggcagccgttgcccgggccaaggatctcagggtggatcgttggaaacccgctttgaataggccaagaaccagaagacaggggtgccgcacggatggactgcaacatcagcttttaacgaaacgattcgctacgtgataaccattcgataccacgggggaaatcccaacagaccgcggagcgaaacacagggccagttgcttgcgcagaacaagccaatttggagtggtgaggcagtgcggttaacattcattccaaggccaccttgggattgcgcagatctgtgcatttgactgggcctctgactcatcggtcacacgaaggacgattcattcgcggacccagattgatggcacagtccatggagcgtttcaaggaaaccaataaaaagggcacgagtggattggggaagaagccaacagagattccagatatcgtgggacttgcggacgatagttgccaatacagaaaaggcaatatagcacacagggccgagtgtaccaatgtttccaaaagaccccataccataagactggtaaacttggcatcggtctcacacgacacagaaaacttaaggcaagccagaggcacccaattgggaggaaaaac

SEQ ID NO: 583060 - DNA, 367 bp, Homo sapiens
ggtgatcttagaggatcccgatagagcaggaggaggctttcgaatgccatcttgacagctgttggtagggatgagccagccattgtggccgtcactgaagtccatacagggtgtgctgtagaccggctgacggtcaccagtatatgcaccggcttcactaggagcgcttcgatgagagcggcatgggcaagggcattccgggatggctggacatctctggacgacagtggctacgtaagcgcctacaacaatgcaggcacctactatgcctaggtgaagaagtgaggcttgggaagaccgccctgcctagtgcggcttcccctgccataggctcaggcctgggtctatggggcgcgttcagcaggag

SEQ ID NO: 583061 - DNA, 238 bp, Homo sapiens
acaacctaggatcagttttgtcaggtggtaagccatttatcaagatagttgtaggtaaagaagggcagatttattagtagaaattgtgataatatgttgcactgggcagctcagcagagtaatgggctacctgcaaaggaggcaatgggctggtaggaaagttttatacgggtcctgactgaacgggtgctacgtagtggactgagtgtcattgctgcccgtcaggtttgtcatgtga

SEQ ID NO: 583062 - DNA, 299 bp, Homo sapiens
gagcagtatctatcatgcatactagcacacactcacacatgtacaccacacccacacacgcactcttgcacacacacacacatgcacacacccccacacacacacacgcactctcgcacgtgcacacatcctctcaatgctctccaccccaccacccctcgaatcccagacccgcattatgacagattgtcgaatgtcctgtgacaacatcgcactctggctactccctgctcacggtgctgcaatactccgaagaggctgaatcacttgagaaccggcaggacattcgaccgcaataa

SEQ ID NO: 583063 - DNA, 296 bp, Homo sapiens
cgttcccaaaccagggtgcagtttcactgtgttaggaatctctttgatataccctatattgtggctgtttatattgacatttcactttatatttcagattagtcatagctatttcctgatgtcgaaagatcatttattcacagaaagagaaacggtttagggaaccttttacaatgcacctgggtcctcatcccaactctgcctgtagggtgccagtggtcttaggcctacaacttaagcctcttaagactcaccaccaacaagcaatgactgggttgattgggttgacgtcaggc

SEQ ID NO: 583064 - DNA, 1061 bp, Homo sapiens
tatgtgtatactagttatgttaaatgctacaaaaccaatgtgaatcccatggaatgcaaaaaacacacattggtcgtagcattaccatcacactcgccatgtcgtatatatatatgtgtatatgattgacaatctctcaaccagatactgtactcccctcacaaaagtcgacaagtccgctacgcttctagctatgaccaccgtcagtgccaatcattatctacttcttcaatattgttgcttgatcttaccgcacgcgatcattccctcaactacaaatcgtactgcatcgtcataccaaccgctccgccacaaacaaacaccacactcaccaacacaccggcccgagcccccccaaaacaacaatcacctcaccgacggcagacaccacaacgacactaccgcgcatcaccacagtattcacaaccgcaccaacagaagcgactccccccaacaacgccaagacaccaccactcacacaactccaaccgagtacccgtcgccccccacccccatcccaccaccacatccctcgtctactgtcctccatccacccccccccgactccgcccactatcctcctcccaacacgccatccttcccccccacctcagcacccgctgcccccccaccaccggcacaccccacctcacccccaccacgacgcagaccagtcaacgacacaacaccaagagcgggaaccagcatcacacgcacacacccaccagcaaccgtcacaccccacgcgcgtgatcgaacatacgctaacttgctcataacctgctactgcccagaccaccagacgcaaacactcgcggcacacacccgagcagcaccgaagaaccgcacgcaacacgctcgaacctcaaaccccgcgacgcgatcagctactaatcacctcggcgccgctgacacacaaccaaaggcaacacacggacaccgatcacaatcatgaaccacactatcgctgacatcaaacaaacgaacatgcagccgcacaaacacacaacacgacgaccctcgaccacctaccgtcgagaaccccacaccgagacaagaac

SEQ ID NO: 583065 - DNA, 273 bp, Homo sapiens
  misc_feature (48)..(48): n is a, c, g, or t
  misc_feature (130)..(130): n is a, c, g, or t
gccatcggactttatcaacgatgccaccgacgtcaacgatgccctggntatgtgacccgcttctaccgcgagcctcgtccggcgctgcaagaagaggctgctgctcttctcagatggcaactcgcagggnccacgcgcttgccatcgagaaggccgtgcaggaagccagcggagggcatcgagatcttcgtggtggtcgtgggccgccagtgaatgagcccacatccgcgtcctggtcaccggcaagacggcccgagtacgacgtggcctacg

SEQ ID NO: 583066 - DNA, 992 bp, Homo sapiens
gatcagtccactgatggcggtctgcaatgtagtctacggttcttcggtcagttcccgttctatcagagacgatattgcacgaagtggcataaaaggactgagcgagggctacaaatttgctcgagtggccatgtcgttgtatgtaccgaagatgaattatagacactttacaatggtgcgcatccgtgcccttgcatttatgcgtgggccatcaaagtatttccttcatcgacaaagccagaactaatatcacgcctgacccatgtcataatgtcgtatccttcattcacccagaatctcctccggccgttgaatctatgtaacaaataataactatcaactggtcttcataattccatcatgaactgggctgtatggccctggaagcttagcgcaagttgtctacgctaaaacatgttccatagatgtccactataggcgatttccacgttggttacttccatacgtaggctatacgagcggtcttttgcattgtttttctccacattggaacaatattgataagctctcccaactacgtccaacccaagtaatggaccaaaatcctttcaactacatttaaattctgaagtgcgaattcttccactactttgcttttcaatcttatcaccctttctagtcatgtgaagaggtgtgggattaaaataatcaccaagtgctaaagtaacaacctttaaagtatacagccatcccatgctgctcatacagtgagctgacaatcgtactgaacctgttattacctatattgtaccccacttaagtttttccgagttctagggagtgctacttgcgtacccacttctttctacttgacatggactgccgttcaaagatccatctggtatctcccacctgaattagggttactacgtagaaccgtgggcaactgtctctgccgaaagagttgctccaaacagtaatttccaaagccatgctgttccccttcttaaaagtgggaccttcaaagagcg

SEQ ID NO: 583067 - DNA, 987 bp, Homo sapiens
ggaataccagtagtgttcgatagcaacgccattgcctactatgtgagcaaggaggagctgcggggcacctactccagaggcggcgagtcccatgtgggtgcagggggtgagcttggctggattccgatatggtgcccccacccagtacctgggtgttccccaccttgggccatcattgggaccgacccataaacaggccagcctgagtaatgccaagaggagggagaggtgaggcggaaattcgtggggcctgcctgggatggcttgactatgacactaccgcatgcacctttatttctgggtgcgcgccgaaacggagctggaccatgggcttgtacatctgcagtggtctgcacccttgtggtggctcgtataagccacgccttctagagcccttccttccccgggcgaggccctttgtccccaatttagctcacaacgcgcgtaggtttgcgctccacgcatggcgattgaacgcgaagacacgcacatgtttcgcgggagactcgttctttggcggtgaagtagaaacctgtgtgagaagatggtctcagtcagctgactaatttgagtgtgcatttagtgccccccatttctgagaggaggaccgcagccacgcgggtggacgcaagtggttcacggggaccgagaagcagaaagcccgcgaggagctagagccgggaacggatgtgaggaaaacacacggcgggctcgacaccgcgggctccatgaatcgaggaagactggactagaactgtaggagcaaaggccgcatggcttgcatggagcccgaaggggcaaaggacgccccattcgcttaagcttagcgccaaggacgtaccctccggtggtagtgagcggcacgtcaacgacgcaaactacacccacatgagggacccacacaccgtgagggccctagaccaaaatacctgggcagcactccgatacagcacgggtaggtcctgctggaccaagtatgcaccggaa

SEQ ID NO: 583068 - DNA, 492 bp, Homo sapiens
aatcaggcaggcactgaacttgtgttctttctgtcttggcctctcaaatgcagccatttgaggtttgtcggaccaggctgggccaggcttcctttttttcccctcccagtacaagaaaagggccttgtgcacgttgggcaagtatctcttgttgttgctgtcatttttaaagactataatagctatggatatgtgtgtgtatacatatattacacatacacacaaacacatatatgtatatattttaattgtgtctagagagttggctcagcagttaagagtacttcttgttcttgcagaagacccaggtttggctcccagtagctacatggtaggaacctacctgggtagctcacaaccaccctcactacacttctaggtgatccaactctctttcatggtccctgcaggcaccaggcacacacatagtacacatacacacatgcaggcaaacactcatatacatgaaaataaaacctatttttaattatt

SEQ ID NO: 583069 - DNA, 1333 bp, Homo sapiens
  misc_feature (392)..(392): n is a, c, g, or t
  misc_feature (1092)..(1092): n is a, c, g, or t
  misc_feature (1098)..(1098): n is a, c, g, or t
  misc_feature (1103)..(1103): n is a, c, g, or t
  misc_feature (1106)..(1106): n is a, c, g, or t
  misc_feature (1112)..(1112): n is a, c, g, or t
  misc_feature (1114)..(1115): n is a, c, g, or t
  misc_feature (1132)..(1132): n is a, c, g, or t
  misc_feature (1135)..(1135): n is a, c, g, or t
  misc_feature (1139)..(1139): n is a, c, g, or t
  misc_feature (1153)..(1153): n is a, c, g, or t
  misc_feature (1159)..(1159): n is a, c, g, or t
  misc_feature (1171)..(1172): n is a, c, g, or t
  misc_feature (1208)..(1208): n is a, c, g, or t
caggttccgggggaggcgaattgatttcacaacggtcgagaaggaggaccccgcccacttcgtcatttctcggaagcccagggactcgccggaagagcggctcaaaagccggaaaaccggcaaatccgagtctcccggcgcatgcgcggcgcaatcggcttcgcgtggttgcagtagagaggatccctccgccagccactgcatccggcggccggatctaacttacccgctagcgttttacccttgcgcggccgtggcgtagggcggtcttttcccttggtcctccgcggcgccgcctcttgtgacgtaagccgcagaatcctctgtcttagttcggctctatgccgcgagcttgactcttcctgggtctgaggaaaagtaaaagtaatttngtcatttcctgaaacttcaagttaaacctttaagctgttcatttcctaaaagggtgaaaacgcgggcacccctcgagctagttcatcgccttttaacctgtgagttctgttaaaaggaagtaactgcaaaatgtcttcgctgttaggtttcttggaagtttgggtgtgttcatgcgttctctcggcgtgtgaactgggagaaagtggagtgccagccatatgaaatgacaactgtatatggaggctgggaagtataatgcgcattctggcttgatgaaattaatgaaattttaattaagtttaattttcatttgaattacccaggaatagcatcttgaaaggcggggcataaaaagcagttaaagagcttcgagaaacggttactcgttttgtaaactaaagaccaaatgaaaatccagctgcactagaaaagaaagaaacttataagggccgaaggttttgtctgcaatttacagctaattagtctcaaagatttctgtgatttgcccaagagaggtggagttggggccactggtttacccaggacaccgccgcggcccgcttgaatactgccgccgttaggacccgccgtacctggccgtccagggcctcttttcttgtcttccactctcacttgtcttttctcccctttccatgtttttggttcctttcctgagtttcccttgtctccactcccctncccctntgttnctntatctntnnaacttctgttttttganggnggancaactttattcccntaaaangcctaggaatannataatttttgtcttttataaggcttgttttcttgtnttgcctgttttttggggggggtgaaaagttcatatgcagatagacataacttcttttggtaaaagctgccctctagtttcttccatagctgatctgtgaaagtaagagtgtgtgtgaatggtgaa

SEQ ID NO: 583070 - DNA, 278 bp, Homo sapiens
cctggtaatactgtagagggagtctagggctgtgattgtatgttgagtcctgatacgtggtagagtcgatctttgtatctgagcagaacgctggttactacgcacagagagcttcgtcccaggtacggttaataggtgtgggggtcaggcgaggttagcgaggctcgtctaaagtcatcctgaagctatgagtgggagtagagttcgaagtccttgaagagaggattatgagtgcgactgtgtagtgcgttcgtcgcaagaagatttcgcaatgagag

SEQ ID NO: 583071 - DNA, 166 bp, Homo sapiens
agacggcttcactatggcaggtgtctcaactctgactcagtaacactgctcagctccacagtgctggataccgggcttgacccacacaccagccagccagaggtactttgaatatacgaaggttcacagcctggcggctagtgagggacctccctagtataagcat

SEQ ID NO: 583072 - DNA, 177 bp, Homo sapiens
  misc_feature (98)..(98): n is a, c, g, or t
ccttacgagagaaacgtcagctcttgtaagagtagcggtgccgacatcgacgcagtggacattaagagcgtgcctccccgctcatccacgccgtgaanacaacagccttagcatgtgcagctgctgctgcagcacggcgccaacgtgaacgcgcaaatgtactccggcagctccgcc

SEQ ID NO: 583073 - DNA, 154 bp, Homo sapiens
agaggatctcggctcccacttggttgcacctcatctgatcgttcataatgattctagtaggagagatggaaagaagtccctgggctttctagctttgcctaaaatgggttgatttcctatgtatagagtagatagatttttcatactctggcaa

SEQ ID NO: 583074 - DNA, 982 bp, Homo sapiens
  misc_feature (318)..(318): n is a, c, g, or t
atgacgtgatggtgtagtgtcaattcttgtaaatgtgcagataatagttctagggacaaaattatcacatttgctcatgcaacagatgcctctccttccggagaagcaatggtgtgcagaaatccattctatcagcacgtagcgccagagaatagctttgcactagctcccctctggatgcgtgcaggcggtacttaacaagatgacatttatctctattatacctttcatgcatgtgtaggggtatacaaatgtcccgtgacaatcaaattttcttgatccttccaatcatgtgtcactgaatgcatgtgcacaaanatgtgctttagagaaggtccttcctcaacttgtagttcataatatctcatgcattttggggttgctatgaagggcttcgcttttgacataactcggtagtaaatggtatatggactgtctccatggccttcagtagcctatggaatctgtctcatactcctagcactacaagaacagaagcggcataaggtgaattaatatggtttaaagagaatttcgtttgtccccttagtggaatgtgggagaatcgcaggagtaaatcctgtggactatgttaggctgggggctgtatgtcgagcgtgtatcatacagtcactcgattgctaaccattaatgcactggagatcaatgtactgccggctctctttccaagttatccactagatttacctgtgttcgaaacctacttatttcttggcaagcgcttgtgtcgtctggctgtcgactcccggcagaagtagcttcgtgcgagctctcactcgggggctggagggactggacacggacctattgggtggcaccatcagcggggggtcggccgcttcccctgttggggccgggggccccaatggggggccagccgccgcggaaggccgcgcctcagggtcggccacaccgtgcccgggccgtctttcccgactgtccccctccggggggccaacct

SEQ ID NO: 583075 - DNA, 347 bp, Homo sapiens
ggaggacagacactgagtgcttggtcctgccgtttgctgtttctgcatggttggaaaggattctgcttgtagattgcttatttcttgctccaaatttataaattaacccatttctttctttagttcaaatagccattaagatattgtagagcttattccttcctcaaattccagctggtttggaggtgggatgcagaggctctgtgtcttagaggatcaattatgtagttgaagaagccaagaaacatacgaaatacaaccctctttttagacgtttccaatttctaaattttaaaagcttttattcccggatgtctcccaagttttatttaaaaaataagcagcct

SEQ ID NO: 583076 - DNA, 131 bp, Homo sapiens
aatgccgggaggcccagcccaagcctctccactaggcctctgccaggatctaagcccatgagcacagggacatggctagtcccacgaccgtggacagatgcggctgctcaataaacactggtggaaccatc

SEQ ID NO: 583077 - DNA, 631 bp, Homo sapiens
tcgggagagcgagcagtgagcttgctggattgccgagcgcgagtgagtggagcctgagcctgcccgcctgccgccgcctccgcctcccctcctgctgaacatgtgatgccctgtgtgcctgtgtgtgccctgtgcactgcctgtcccatgccctgtccctctgtgctgtcatgtgcctgctgatggtgtagctgctgctgctgagctgagctgagggcggagtgtgagatgctgatgctgagctgcctgggtgatgggatgtgctgtgcctgtgagcgctgatgctgtgtgcttgccctgctgctgttgttggctggtagaggggggtgaaatgccctgcttgtgcaccactggagaaaatttgagcacatacacctatttataactacatcacactctacatcgctcacacaaaactccacgccgatcaccattgatagctactattacccccccctcacgccactcagactccagccacccgtccctcgcgccacatctacaccacaacagttacaagctactttctaactcccctcacccagcacaccagcgcgtacttaaaaacaccctcttctcccttcctccaaacactcaccacaccccttccacacacgacctacatcataac

SEQ ID NO: 583078 - DNA, 413 bp, Homo sapiens
cacatcctaaggaaacaggacagcagagtgaggggtcagacgtggagactccaggctacagacatttcatgaaccactgacaaataacaacactgggagggaactccaaatcgcgatttggccacatatagacgtatgcacacacatcacaatcaacccatcacaaaagaaagaacctatcaccaagaaaaaaaatgcaacgaacagcatctcacaatgaaggtatatctcattaaactgaattcaattaagtttctgaggtgttcattgcaatggccctattatccttactcactgacaatggggcatgctgggagaatacagtgagaagagtataaaaagagagacaacaaaaatatgcaggaagtaatagtgcaaggcatgtgtgagcctcagagaacaagaatagaagg

SEQ ID NO: 583079 - DNA, 889 bp, Homo sapiens
gcggagatcacctgctgcccgcagaccttgtcccttcctcccggaccagcagctagaggctctgactccaggcaagagcagtgaatggccttgaagtggctcccgccaggtcgtgatcactcaacttctaccctggccacggcagagcaaattgtggccaggagactgcctactggaagaacatgctgttcggctccttctaccttctagagttttatcctggcttgagtttggcaaatagccgtggctctgtgggttgtttcactcgcgaggacctacgaagtccagggaccccggtccgaacgtgttccttgatgcatcgtggccgtggctcggacttgtcgtgcgtgctggtcctgcccacccgcctggtctaccagttctctgggaaccacttggccgatatggggaaatcgcgtgcccgtctcgaccggcttcctcttctacctcaacatgtacgccgagcatctacttcctcaccgtgcatcgagctgccgaccgtttcctggcgcattgtgcacccggtcaagtcccgtcaagctccggtaggccccgtctacgcacgacctggtcctgtgccttcctgtgggtggtggtggcgtgtggtccatggccccgctgctggtgtagcccacaggaccgtgctagaccaatgcacacggtggtctgcctgcaggctgtaccgggagaaggcctcccaacatgccctggtgtccctggcagtggccttcaccttcgccgttcatcaaccaacggtcagctgctacctgctgatcatccggagcctgcggcaggggcctgcgtgttgggagaagcgcctcaagaccaaggaagtgcgcatgatcgccatagtgctgggcatctaccggggtcatgcgtcggtgcccta

SEQ ID NO: 583080 - DNA, 247 bp, Homo sapiens
  misc_feature (199)..(199): n is a, c, g, or t
tgagtgccttagacaatggagtgggagatgttgttggagacagagatcagccaggatttctttcaggtaagactctaggccttcatttttgaggcatccttggtgttgtggataacagtgcctggtcagtggtttccttgggcaaggtttctataacctttctgagcctcagtttcatcctaccagtgtgggagttaantaatacctgtctctacagaatggttagtgacgaagttaagatgagttg

SEQ ID NO: 583081 - DNA, 156 bp, Homo sapiens
aatcagatcgaattaatacaatggtggagagctatatagtcaaaatacactgctgttctctataacgagtcagctcatctggagtggattagaacaagtatgacatggagaatttgatagcaaataccttaccatcctccctttttccaagtctgt

SEQ ID NO: 583082 - DNA, 885 bp, Homo sapiens
aggtcaaagacttgaggtagacatttctccaaagaatatatacaaatgaccaacaagcatatgaaaagatgcccaacatcaccagttatcagggacatgataatcagaaccataataagataccagttcacacctattagaatggccactatcaaaagaagaaagagaaaatgacaaatattgatgaggatgtggagtacttggaacccttgtacactgtgctaggaatgttaaactagtgcagtcactatggaaaacagtatggagtttccttaaaaaattaaaaatagaattaccaaatgatccagaatcccatattgtgtatatttccaaataatgggaacaaatctctaagagatatttgacaccatgttcattgagcattatttacaagagccaagaggtggaagtaaactatgtgtccatcagcggacgaatgaataaagaaaatatggtatatatacacattggaagattattccacttagaaaagaaggatgtgtggtatctaaattagtcaaattgtagaaaaaagaagctaagggcaggtgcagtggtcacactgtaatcccagcacattgggaggccaaggcacggggatcaccgggaaggtcaggacgtcgagacaagcctggccaacacggagaaactccaatctcctagtaaagaataccaaaactcagatcgggttgtcggcggcgatgcctgtacacacaggtacccaaagaaggcctgaaggacagaaacacagcttgcaaccgggaaagccgcaggtgaacagacccacaatcgggccacgaacccacagactgggtgacggaccaccatacgctcccacaacaaacacacacacaaaccaccaaggggacacacaaaaaaaaagag

SEQ ID NO: 583083 - DNA, 963 bp, Homo sapiens
aaagcggcgggagcggtgcgggagaggggttggacccagtggctgatggcaggcccccccctccctcccgcctctagtggatcatgcccatgggcggcagcggcggcgtgttgcgggggtgtgatgtgactgggctgtgtgccggcgcctgtgagacgatgcctgtttccagttacaacacatgggatcacaacaaacacaacctgccacaagaaggcagctagtggcattacttctcctatcagcttagcagcccccaaggagactgactgcgtacttacacagaaactaagttgagacattgaaaccctttgggcgtctaggaagaggcagaggaactgcagcgcaggatttcaattttgggaaaactaaataacctggtaaacgagtggatacgagacatcagtgaaagcaagaatcttccacaatctgtaccttgaacaatgtgggaggcacacacaatttttacatttggatcttacagattaggcagtgcatacaaaaggtgctgatatagaatgcgatgtgtgttgcacccaagacatgttgatcgaagtgactttttcacctcattctatgataagttgaaattacaggaagaagtaaaagatttaaagaactgttgaagaggcattcgtaccagttattaaactctgttggatgggatagagatgaatattggtttggcagataagcactgcatgacaaactccctggaagcattgggatctacgaaaatgacaggctgcttacacaatttagacactaagacggtttaaggagggtcttaaacgcgagacacagggtaaccgaagtaaaacttttcatcttggtacccaaaattgtgacaactcagggtataaccgtgaaagcaaataaaaatagtgcgcacagggcggacgatttttccacaaataagagccccgcagagggaccacagacgaaaactatgcataaaatcac

SEQ ID NO: 583084 - DNA, 1039 bp, Homo sapiens
ctaagttctagatgtaagcttccttatgacctccacagtgagtacattaactacattttcacaaacagaaaacttacatacattaaactgtaatccaaatgggacaatctgataagactttatgcattgttagttaaataattaaattgctagagcttagcttgaaattatgttagaaaacatatgattccatgggatgaatatacatatggtaattgtcttcaaatgagactccttctcaccattaaagtagtcatatatcaattgaacttataggaaataagcatactatatgttagctgtttaacaaggtaccagatgtaagagtcataaatatatgcaattaaagaagttcatagatttcacatgagatgtaaaatgtgtcatatggagacatgtcttgtaaacagttgaatgtatgtaagttatcctgctaccgctgaaaactgtacgttaatgtactcactggtggaggtcactcaggaagctaacatctcgcaaccaccacccggccacctacgttagaacgcatcctacccggacactgccgccaccgtacaaaagccccgccaacggcggcccaccacgcacgcaccacacaccaaagctctacacctatgcaaagagcccacacgcccaaaaacacaagacccagaatgccacgacaccacacgcgcacccactatccacacaatcccaccaccacagcaacaacgctccgacgtcaacatcatggcgcccgagaccccaaccattctgagcagcgccacaacggacgagcccacaacgcaagctaaacaacacggcacaaccccaactcaccacatcaccacgggccacaccgtaccaaccgcgggccacaccaccccccacattaatgaacgaccaacagcgcacaggcacaacaaaccagccgccaccagcagaccacacgacaggccagccaagccaaagcgagacacccacagaacacaacaagacgagcacacccccacgcggggaccacaacgcgaaaccacgagctcaacagtgaaagcat

SEQ ID NO: 583085 - DNA, 125 bp, Homo sapiens
gaggatcctatgctactccacaaacaggtggttggtgttaaataggcgatgagtaggggaaagggcgcctactagtggtgtagactagtgacgtctgtgcctgctgtacagtgcgtcctggctgg

SEQ ID NO: 583086 - DNA, 318 bp, Homo sapiens
  misc_feature (21)..(21): n is a, c, g, or t
  misc_feature (39)..(39): n is a, c, g, or t
  misc_feature (74)..(74): n is a, c, g, or t
  misc_feature (129)..(129): n is a, c, g, or t
  misc_feature (133)..(133): n is a, c, g, or t
aataaagtgcagtggctcgtnctcagcccactgcaactnctgcctcccaggctcgagcgattctcccgcctcancctcctgagtaggtgggattacaggtgggcaccacacactcagctaatgtttgtntttncagtagagacagggtttcaccatgttggccaggctggtctcaaactcctgaccttagatgatccacccaccttggcctcctaaagtattgggattatagttgtgagccaccatgcccggccctgccacctgccatcttttgagttcttccctggaggacctaggacctgaaccctgcttgcttgt

SEQ ID NO: 583087 - DNA, 114 bp, Homo sapiens
taccatctatgacaataaattaaaagaaaagacaggaccatttaattctgctgtctggttatctcctgcaatgcttcaaattatgtgtgctcattcaacacaaaattatgtgtc

SEQ ID NO: 583088 - DNA, 321 bp, Homo sapiens
  misc_feature (10)..(10): n is a, c, g, or t
cacataatanaagtattcttcaggagtttttgacctgcagggggctgggtgtggtggctcacacctataatcccagggctttgggaggctgaggtgggaggattgccagaggccaggagtttgggaccagcctggacaatttagtgagaccctgtctgtacaataaaataaaataattagcctgctgtggtggcacacacctgtgttcctcgctattctggaggctgaggtgggaacatcagccaggagtttgaggttacagtgagctgtgatcacaccactggactccagcctgggcaacagagcaagatctgtttctta

SEQ ID NO: 583089 - DNA, 338 bp, Homo sapiens
  misc_feature (79)..(79): n is a, c, g, or t
  misc_feature (310)..(310): n is a, c, g, or t
gtcagtgaagacagactcggtcaattagaagcagaatcccaaaggcttcttaaaatttatgaagagactttgccaaatnagagtccatgggacccaggcacggtggaggctgaggtgggcagatcactttgaggtcagaagtttcagcctggccaacatggtgaaacctcgtctctacttaaaatattaaaaattagtcggacatggtggcatgctagtctcagctactcaggaggcttgaggcaagagaactgcttgaactcgggaggcagatgttgcagtgagccgagatggcgccactgcactccancctaggcaacagaatgaggccccatctc

SEQ ID NO: 583090 - DNA, 427 bp, Homo sapiens
ttttaattcaggacaaataaccagtgtctattcactgtgaaaacagtaaggaaccttagcactatttcagttcaacaccatttctttactgaatattttcttcacttctggcataacttcttaaatcatcctcattctccgagacaggtctgagaatagaatttagctcacctcatttcataaatttttaggtgatgttaattatggccactatttggcagtctccttcaaatagccctccactttgtgtttttctttacattgaaagatatttttaaattgatttttaattgacagataataactgaatatatttatggggtatgaaagatttcttttaatggaagaggttgtgaaagagagcttttccttataatgtatgtgcgttgttgccctgagaaaagcctgtaaagatattctaaaaaaa

SEQ ID NO: 583091 - DNA, 857 bp, Homo sapiens
gttttattcttgaaaattgtgtaattgataagatcatacttcttgacgagcgtggtggctcacgcctgtggtcccagcactttggaggccgaggcgggtggatcacgagggcaggagatcgagaccatcctggctagctcggcgagaccccgtctctattaaaaatacagaaaaatagccgggcgtggtggcacgtgcctgtaatcccagctaatctggaggctgaggcaggagaatcgcttgatcccggagggcggaggttgcagtgagccgggatcgtgccaccgcactccagtctgggtgatagagcaagactgtctcaaaaaaacacacaaacacaaaattccagagatctttacaggggttgtaagctatcctaggacactcggaaacaactgtgatttgactcccgtggaatatataagttacacataaagtagaaaattcgcgggtacagaaaccactctcgtgggaaatctacacaacacaacaagtgtcaaatcccagcgagatcacacatcagttgagaaaaacaatccagacggcaatccactcaaacgcgcagctccaacaaagagggtcttcacaaacgagccacaaccaatctccgaaccacggggccaaaggggcgcaaacaaatagagagaaggggcaacaacacaagtgaaagcccgcaaacagtagcgcacagacaatgccgggctcttccaccgaccagctgacaaatacacgcaagaggaaacgaaaacgggagcacacatacccaggagcacacaaacggacgccaacagtccaagcacacccagcaaacacgcgagagctcagccgcatggcgagccatgaacaccacacaaacc

SEQ ID NO: 583092 - DNA, 159 bp, Homo sapiens
ggttgggttttaaaaaaaccgaagggtttttttttaagggccccctttctggaacccggaaaagttataaaaactgaaccgtttgggcgagtctttgtgggttatattcccaggaaaattgaaaggattccgaaatttaaatattttttgatatttgga

SEQ ID NO: 583093 - DNA, 481 bp, Homo sapiens
cctaatttttaagccaagaaggtgtaataggtgatttaatcacagggatgaaacaacagctgaattttttagagcactgtaggtgtgactgatgttaagtaagtttttcaaggcaggaatgtctgatattcagccattcaattaatgcataaaatcccctttcagtcatgaaaatttgtatgtcttttctccctttgctgacttaaaataaaataaactggtggtttggctaactattttaccatatggggttggctggttttaataaataatgttttgggttatcataggatctgtaagtccaaaggatattctgtttctatctgcaatgcatttgataatcattcctatgaaatgtattttatttaatcagataagctaataagcgaattggttacatcgtttgtatctgttggcctagtggacagctgtgcctggtgcacctctggcttttaataaatactcattggttgaaaaaaaa

SEQ ID NO: 583094 - DNA, 433 bp, Homo sapiens
ttccgtacattccactccactccactccactcaatccactccattccactccattccagtccactccattccattctactccattccactgcagtcaattacattccactccattccgacttcactccactccactcaactccactcacctccattgaactccactccactccacttcactccactccactccactgcaatccatctactccattcctttccactccactccattccattgcattccattccattccactgctctccattccattccccacaaatcttctccattctactccattccattccatttcaccctattccattcctctccactgcactccattccactcccctatactctactccacttcactccactctgtcccagtccattgccctccattccactccattccactccaattcc

SEQ ID NO: 583095 - DNA, 284 bp, Homo sapiens
tggtcccggggtccagagactggatgggcattctttcacctcatcagaacccaaccagcgcacagatctccttgggttgcttatgcttcatgttcttcatcatctggtactagcattttgagagttctggttgttgatatttcttggatatgtcgggcatgccagggtccaagtgcgtccttgtcctccttgaactgttcctgcaaggccttggacattaggccgatgttaggtcctgttagaagtattcttgcgatgttcctgtcatcgatctcgcattgcaa

SEQ ID NO: 583096 - DNA, 114 bp, Homo sapiens
tgtctttccatatgttacgggaatgtaaataataacttaatgcctactacctctggaatagtttccctgttattagagaggtgagatatgaaaacaaagaacaacaaaaaaaac

SEQ ID NO: 583097 - DNA, 985 bp, Homo sapiens
gacaagtatcaatggtttggatctttttaaaaacatacgagtacatatataagtgaatgtagtcatgtctgtcatataacagacagagaaatccacatggtgtgtactaaactcggttacgacattcaaaattgccgttgtatataatggagtagcccaggtagcaggtggtcgacgaagcagcatttctcttcgttagctgaggctcatagcttgtatagcaaagcaaggaattaaggccgagcatatggaggtgtcgtggaaaggacagttttcgtatccacgtcattatttctgtagagtcagaaggtgggagtatggtccaaataaatccattaggttactcctgcagcatgcgcttatataggttctctctatgactgaggatcaaatatccctttgtgagctggccctcagctccttagctcatgtgtacaaacctcagatgtaactacatatttatatctaccagagctatcaagcaacagtatagaaccactagcctttgaaataaacttctgccccattactgatgtgcagataatgagtgcactatcataaatagccagattacgtagcactacttaaggtaaaataggtaatctataagcgaagacatcctagaagagtcagggacagaaattaatgaatagacaagcaccttgtaaacactctactaatgaacggaccggccagtgaaggcctagaagacatggatcaggcgccaatatccaggaagacacgggaacaaaaaacatccggaaatgaatactgacagaatagtgaaaaaagggacatgtatgaattaaaagtagaggcatatgaacattcgattaaattatgagagggaatagaaagagttaaaaagtgactgaatggaaaaagtaacagagaaacagtgtaatgaaaaagtaagaccaaaagtgaatgaggactatcaaacatagcgaaaagggagacatttcatagtctatataaaaaaaat

SEQ ID NO: 583098 - DNA, 879 bp, Homo sapiens
  misc_feature (1)..(1): n is a, c, g, or t
  misc_feature (83)..(83): n is a, c, g, or t
  misc_feature (95)..(95): n is a, c, g, or t
  misc_feature (131)..(131): n is a, c, g, or t
  misc_feature (145)..(145): n is a, c, g, or t
  misc_feature (150)..(150): n is a, c, g, or t
  misc_feature (157)..(157): n is a, c, g, or t
  misc_feature (159)..(159): n is a, c, g, or t
  misc_feature (205)..(205): n is a, c, g, or t
  misc_feature (223)..(223): n is a, c, g, or t
  misc_feature (237)..(237): n is a, c, g, or t
  misc_feature (244)..(244): n is a, c, g, or t
  misc_feature (247)..(247): n is a, c, g, or t
  misc_feature (250)..(250): n is a, c, g, or t
  misc_feature (279)..(279): n is a, c, g, or t
  misc_feature (283)..(283): n is a, c, g, or t
  misc_feature (350)..(350): n is a, c, g, or t
  misc_feature (353)..(353): n is a, c, g, or t
  misc_feature (376)..(376): n is a, c, g, or t
  misc_feature (388)..(388): n is a, c, g, or t
  misc_feature (397)..(397): n is a, c, g, or t
  misc_feature (403)..(403): n is a, c, g, or t
  misc_feature (415)..(415): n is a, c, g, or t
  misc_feature (733)..(733): n is a, c, g, or t
  misc_feature (814)..(814): n is a, c, g, or t
  misc_feature (845)..(845): n is a, c, g, or t
ngaaggagagccgcagggagaagctacctcatcatgggaaaattgtgggagcgggaagagggagggggagacccagccatccngttctgacttcnagcaatttcttctgccctcagtcatgaggggctccntatcctcccatccnatggncccaggngnagcaatgagagaggggaagggaagagagaaaggaagacaagttggngccaggggaaggcatctntgctctgcatagcnatttggnccnggncatgactacaagcaaaagtgggtgcaganggcngggccaagggcggggggagggaggggatactcagtaggcatgggtggcaatgtagagggactgtgcngcngctccaccatcttctccacggcnttcatacttgcncggggcggnaagcanttcacctcagcncgcgtgaggaactccgcaggggcagccccagcattggcccgtggccctcgccaggcattgagtgcgagaggcttgcagggcacgcccataggagaagggaagcgcccagggtcggggaagggggcagcggttgatggcattgaggttgaatgatgcctcttcttcgctctgacccccagacaggaaggtcactcctgggacagctgggggcacagtgcgacgcaggcagtgacagttgccatggcaatctcctctggggtatacttgatgggacaggcatggcccggggtcaccatgttgggcttgagcagggtcccnccaggtatacatgatggtcactcagggccttgtacacagcagccaagaccttctctgtaacatactgacaacgtttgaggncgtggtctccatcaggcaatatttcagggtncacaataggcacaaagccattctgctggcagata

SEQ ID NO: 583099 - DNA, 408 bp, Homo sapiens
acaatgaggaaacgatggtcttttcaataaatggtgtgggggaaagctagataactatatgcagaagaatgaaacaagattcctctctctcgctatacacaaaaatcaaatcaaaatggattaaaggcttaaatctaagacctgaaactacaaaactagaagaacacactggagaagtgctccaggaccttggtctgggaaaagatttttttgttaagacctcaaaagcacagacaacaaagcaaaaacagacaaatgagattacattaagctaaaaagtttctgcacagcaaaggaaacactcaacagagtgggggagacaacccacagaatgagagaaaacattttcaaactatccatccgacaagggattaatgaccagaataaagagaccaaacaatttaagcc

SEQ ID NO: 583100 - DNA, 386 bp, Homo sapiens
  misc_feature (59)..(59): n is a, c, g, or t
  misc_feature (121)..(121): n is a, c, g, or t
cccacctggtcctttcccatcgcccccaaaaaggggggccccagggacgagcttagctnagctgggaggagcagggtgagggtgggcgacccaggattccccctccccttcccaaataaanatgaggggactaaagttgtcttggtttttattttaataatattttttcccttttccagtatactagcttgtcttttaagaaagggggtattaaaaaaaaaaaaaagaccaaagtgtttttaaaaaaaagccacccccccccctgtgtctgtatatagtcagcttatctcgtgttcaattttttgatctctacaaaaagaagtggaaaatgctgtatcaagggtggggttaactgtgcctttccaataaagatgtgagaagcttca

SEQ ID NO: 583101 - DNA, 191 bp, Homo sapiens
  misc_feature (22)..(22): n is a, c, g, or t
  misc_feature (29)..(29): n is a, c, g, or t
  misc_feature (55)..(55): n is a, c, g, or t
  misc_feature (116)..(116): n is a, c, g, or t
  misc_feature (154)..(154): n is a, c, g, or t
tcaaaaagtttcaaatgacatnccttacnctttggttttcagaggcattcaagcnaaatatcacagtggtcttttgttttctgaccaatctaaaaatacctgtgattaaatttaanttgttagtgtaaataaatttcttgccaatgagtattantgttgttagacaacgaatgcaataaaaagaaatactg

SEQ ID NO: 583102 - DNA, 133 bp, Homo sapiens
catcagaacacattcccattgttatccaatgcatgactgtataacggtcctatggattaaattttttatgtaattcaactggaaagtatttttatgttattttgtaataaataaatcaatcacaattgtaatc

SEQ ID NO: 583103 - DNA, 119 bp, Homo sapiens
  misc_feature (112)..(112): n is a, c, g, or t
ggctggtacggcctggaattatgggatctccccttcgactgcagctcgctccgtgccttctgcgcgcctgggatccggagcctgctaggttctgtgcgctcccgcccaggcnggtgccc

SEQ ID NO: 583104 - DNA, 895 bp, Homo sapiens
cagcagctgtggtgaccatggaaaaatgatgcagctgcccatggcgcccagactggcgagcgcgccggggtcagtgctggctgtgttgccgccgatcaagctgcacaccaccagcggcaagatgatcatccgcagcagactgcagcagcagctcgcccgggaagacgaaggcgctcaagctgctcctggtgcccaactgccatgcgcaccccctgtgccccggactaccccctatgtcccagctgccacgcctggccaccacgtgccaccatctgtcatgcacgcacagagcaggttggctcgacaggcagcctggctgcacactgtgtcccgtggaacctgctatgtatagcctgccatgcttgcctgctgcccttgcgtccctcgactgcgagtgccatgtctgccatgtgtccaccagttcggccgtgtggcgcatcctgcctgctagccgatgccaccgttgcgacgtcgtcgacggacgcgactcaggctcacgcactgcatcgggaacagcaccagtgggctttcattacgcatgccatggcacacgctggcttggcgacgcagcattggcgcatccgttcccagggacccggacgttacctacgcacttgagcttgcacgctaacccagcaacctgcgagcactggacaccttcgcgacgcggctccttaccagcttgctgagttccacagcccctgaagcttcccttggcctcttggcaacgcttgggagttgtgctaaagtataccccaagggcatgagcccgcacagagagtcttcctacttgccacttgacacacgtgagtgccagaattgtcgcgacaagcctagggaagtaacgtgcagtcgcaccggggctaacccttgggcctcctagtgaagcctaggg

SEQ ID NO: 583105 - DNA, 1006 bp, Homo sapiens
  misc_feature (257)..(257): n is a, c, g, or t
  misc_feature (261)..(261): n is a, c, g, or t
  misc_feature (267)..(267): n is a, c, g, or t
  misc_feature (271)..(271): n is a, c, g, or t
  misc_feature (294)..(294): n is a, c, g, or t
  misc_feature (316)..(316): n is a, c, g, or t
  misc_feature (338)..(338): n is a, c, g, or t
  misc_feature (341)..(341): n is a, c, g, or t
  misc_feature (343)..(343): n is a, c, g, or t
tggattatagtgaggagttgttacggagtacagatattaaaagattatttgtaattccagccagctcatttgataccaaattactacagcctatgtttctaggagtggtcaatggaattatgctaaaatagtatttttcttgcttgttttatattttataaatcgctttccagcactgaatttttaaaatcttttattttcaagtatctcttgaatctcaaaaatctattttcttttccctgctgactgatcctggncccnggaatnaggntgcagataagtcatgttacacangaatgaaggtgggtcaaagtangggtactgtcgcagagtggatnacncnctcattccctgcaaagcaaagtaagtggccttgtctgaaccttcctgcttcacagactagagcaatggtacacttccagctacacattctgatttattccagttaaagggaaagtgcatttggtcatcaatcatttgacaaacatttattgagtaactactatgtgccatgatgtgggctaggtaccgagtctaaaacaacaaataagaaatggcttctttcttcaagtatctcatggtgggtgcttcagatgacacaaagcacagtcattgttgggtagaatgaatggttgtgatggaacatgccacaaagaatgggtctggttagaaatttgtccagggatttcccagtataaatcagatgctttctcaatctcatgtttttccttgtaagattcagagtagaaatatttatctacccagaggaataacagatgcagtgcttgaacagttttttaaactttcagtagaattacataaagaaaaaatacaatatgaaaatattgacaattcatctgaagagtttgttagttttagtactgatatccgggaaaacactatagaacagcacaccagaagaacttgggatttttctatggtttaattctgcaattttgagatgagttttaaaatccaattatagattaaactctttgtacctgct

SEQ ID NO: 583106 - DNA, 317 bp, Homo sapiens
tatgcaacaactagggtcagttttgcaggtggtagccatttaccaagatagattgtaggtaaagaagggcagatttattagagaaattgtgatcatatgttgcagatgggcagctcattggagaaggggctacctgctaagaggcaagggctggaggaaagttttatagggtcctgctgaagggtgctacgtgtggaatgaggtcattgtgcccgcaggtcgtttgtgattagctgtctctaacaattgttgcatacaataattgttcattattgttctcaacttggggctctccccaacctggggacccttcctta

SEQ ID NO: 583107 - DNA, 440 bp, Homo sapiens
acccatgccacctctctcttcgcactgtgtaccagagtacacctaggagctctctccttactctgtccccatgtctccagtcctctctccttactctgtcccaatgtctccagtcctctctccttactctgtccccatgtctccagtcctctctccttactctgtcccatgtctccagtcccctctctccttactctgttcccatgtctccagtcctctctccttactctgtcccatgtctccagtcctctctccttactctgtccccatgtctccagtcctctctccttactctgtccccatgtctccagtcctctctccttactctgtccccatgtctccagtcctctctccttactctgtccccatgtctccagtcccctctctccttactctgttcccatgtctccagtcctctctccttactctgtcgtcgacgc

SEQ ID NO: 583108 - DNA, 827 bp, Homo sapiens
gccgcagcagcggtactggcagcacggcttatgggctggtggggtccccgtgctggctttcgccttgtcatacctggaggagctgtctcgctaccgcggcggaccaggggacccgggcctgtacttggcgttgctcggccgtgtctacgatgtgtcctccggccggaggcactacgagcctgggtcccactatagcggcttcgcaggccgagacgcatccagagctttcgtgaccggggactgttctgaagcaggcctcgtggatgacgtatccgacctgtcagccgctgcagatgctgcacagcttctaccaatgggctttccattcatatgagcaagcaatgatgtgtgtgttgggagggtgcacaggcacggtatctcacggcagcaggcatgggctagcccaggccgcggcactgaccccaggtagaagctgcgatcagcgagaggcttcggaggccaagcaaactagcagctgcaagagaagcagacattgcccgtccgtgcaactgcggagatggagcatcagccaggggcagccggatctggtgcatcccagaacgagtggaggtgtgagcagagactggattggcgtccccaggaagctgtataagccaggtgcacacggagccccagatgggtgagtgatgagaaccaacggtcgcccctagaggccagatgccggaaaagcgtcagaacgagaaatcgatggggacctgtaaccagccaaagatgggcagagtagacagggctgcaccaacggatagccagtcacagtgcatcccttgccggtcgtagcacggaagacctagtactgataaagtaga

SEQ ID NO: 583109 - DNA, 373 bp, Homo sapiens
cggggtaggcagccgtccgggaagagcagaggagtccagcaagcccacaggagaacttggcactcacgctcatgaaaggatgaatgattctaaatgtgactttgaaaaatgcttagtttttctgactatagaagtaaaaaccatatgaaagacacatgtacaaaaccagccaaaactgtttcgaaagaccagtgagggaggacagggaactcgccagccagcacagtcaaaggacaccacgatgctacagggggaggggcgggcggcgctcacgctggaaggcgcggtggagcaacaggtgcatgaagcgtggtgggggagctgggtacacatctaaggagagcatatgaagtcagtgggggcgatgccaatt

SEQ ID NO: 583110 - DNA, 700 bp, Homo sapiens
gtccccgaggggtacgtcgttctaaaatattgggacccccgggcgcggaatgccccgacgaaataacttgcgaggatgacccgccccaggcggcaagattattttgttttataaagagcagggggtcctcgagtggccagggggggtaaacccatataaggatggtttcccaccgcaggctccccaatggggggacaacaggaggaaattccggcccgacggcgacacaaggttttttcgtcaaaaaatttcttttgcaaaaagagggcagttaagaaaagactttgagggtgtttgggtgagagaaaaataccgattcctttttgtgggggacggccctggttttttattgggggaaaaaaaccggaccggaaagccgtttccccccccttgatggagaggtaaagaagggcgctccttttacgaagatttttcgtattagcaccccgggacccgggtgttagtaagacgaggacaggggcctgggggtgtgcatactaggcaccgccgagagggagagtgggtggtccgatttttcagccgcgggttttttaatggatacaaaaattggggagggtgtatttggttttggaaaaaaatgagggggggatctggagagggaggcaaatccgcccaggctatgggcaaagaaaaggaaaaaaaaaaaagcgagcagaaaaaaaaaacaataaaaggtgag

SEQ ID NO: 583111 - DNA, 361 bp, Homo sapiens
ggatagctgcgtgatctgatggacgccgcgcacctgctgggcgccagcacctggcatagccgcgctcgctggttattctgccccacctgcgctaatggcggcatgatagccgtgctgctgtcgttctccttcttaatcggcgacttcgtcttcgccaacctgttggccaggggccgctacgaaacgctagaggtatattggttcaacatgcgcaatggcagcgggccacttcaccagcgcattggttatctcctatatcgatggtagtcctgatttaccacctggattgctaacgtgctgaacatgggaaagagcgtaaaatgtcatattgacaggtcactaaactctataagcattacgg

SEQ ID NO: 583112 - DNA, 289 bp, Homo sapiens
cgccgggcagagcgccaccgagggaggccaaggcgtccacatcgccgatgacaaagaaagccggcccggtcttacgcagggcgcgccaggtcttgaccacgatctcgggcccgacgccggcgggatcgccgaggctgacggcgaggggagctggcggagccggtctcaaggcagggatcgcttacttagcctcgatggtcgcggagttgcgcagatcccgcaggaagcgcttggcgagcatcgaaatctgttcgccgcgcaggcgatcctcgatggactcgcgcgacgg

SEQ ID NO: 583113 - DNA, 117 bp, Homo sapiens
agtagcaccgaatgttcgaagcgccgaattttctcttctgttcgttcttttgcttctaacacagccatgaatgctcatcctcctgttttagaagcagaaagaacgaacagaagagaa

SEQ ID NO: 583114 - DNA, 881 bp, Homo sapiens
ggaaggcgcgtggggtttgatgcgagaacgggccttgctgtcaccaacatggagactttgtaccgtgtcccgtcttagtgctcgaatgtcccaagctgaagctgagagaagccgccctggttgcatatgccgtcgggaatgactgtgtatgctctggtggtggtgtcttacttcctcatcatcggagaaataatttatgatgttattgttgagacctccaagtgtcggttctatgagtgatgaacatgggtgatcagagcgacagtagctttcttggctacagagtaaatggacaatatagttatggaagggattgcatccaggttcctatttacaatgggaggttgaggtttcgataatcctggaccgatcgaatgcaccaaatatccaaaattcattagattccttcttctgttcattggatgcgtctgtgtcctatgtgagtgttgtcatggctagagtattcatgagaatgacattgcgggtatctgatgggtgagagtggcgttgagaagaaatcagtggctggtggatttgtcctgtcaatgaagtttaggggtgtaccaatcctctatatgcgtgtggaaagaatgagagcagcagtaatacgaatatctagtgaaaacgggagcgtatgaaggttggactaaaattctcttgcttaggaggaccagttattcagaatttccgggggctattgtatacgaagaggtggggagttcttcaggttcataaaatatcttttgattaattcataagggtgtttgacctcaattgggaatttggtgagaaataaacaaaatcggaatgaggagaatgtggaaggggatatatatatgggaggggagtaaaaaaacacggttctgcacaactatcgtgaa

SEQ ID NO: 583115 - DNA, 1012 bp, Homo sapiens
  misc_feature (10)..(10): n is a, c, g, or t
  misc_feature (62)..(62): n is a, c, g, or t
  misc_feature (99)..(99): n is a, c, g, or t
  misc_feature (102)..(102): n is a, c, g, or t
  misc_feature (104)..(104): n is a, c, g, or t
  misc_feature (133)..(136): n is a, c, g, or t
  misc_feature (143)..(143): n is a, c, g, or t
  misc_feature (148)..(148): n is a, c, g, or t
  misc_feature (150)..(151): n is a, c, g, or t
  misc_feature (159)..(159): n is a, c, g, or t
  misc_feature (188)..(188): n is a, c, g, or t
  misc_feature (193)..(193): n is a, c, g, or t
  misc_feature (197)..(197): n is a, c, g, or t
  misc_feature (204)..(204): n is a, c, g, or t
  misc_feature (207)..(207): n is a, c, g, or t
  misc_feature (210)..(211): n is a, c, g, or t
  misc_feature (213)..(213): n is a, c, g, or t
  misc_feature (216)..(216): n is a, c, g, or t
  misc_feature (218)..(218): n is a, c, g, or t
  misc_feature (220)..(220): n is a, c, g, or t
  misc_feature (231)..(231): n is a, c, g, or t
  misc_feature (276)..(276): n is a, c, g, or t
  misc_feature (315)..(315): n is a, c, g, or t
  misc_feature (334)..(334): n is a, c, g, or t
  misc_feature (338)..(338): n is a, c, g, or t
  misc_feature (354)..(354): n is a, c, g, or t
  misc_feature (358)..(358): n is a, c, g, or t
  misc_feature (373)..(373): n is a, c, g, or t
  misc_feature (380)..(380): n is a, c, g, or t
  misc_feature (388)..(388): n is a, c, g, or t
  misc_feature (390)..(391): n is a, c, g, or t
  misc_feature (395)..(396): n is a, c, g, or t
  misc_feature (413)..(413): n is a, c, g, or t
  misc_feature (419)..(419): n is a, c, g, or t
  misc_feature (425)..(426): n is a, c, g, or t
  misc_feature (440)..(440): n is a, c, g, or t
  misc_feature (446)..(446): n is a, c, g, or t
  misc_feature (457)..(457): n is a, c, g, or t
  misc_feature (505)..(505): n is a, c, g, or t
  misc_feature (516)..(517): n is a, c, g, or t
  misc_feature (536)..(536): n is a, c, g, or t
  misc_feature (560)..(560): n is a, c, g, or t
  misc_feature (590)..(590): n is a, c, g, or t
  misc_feature (632)..(632): n is a, c, g, or t
  misc_feature (667)..(667): n is a, c, g, or t
  misc_feature (742)..(742): n is a, c, g, or t
  misc_feature (880)..(880): n is a, c, g, or t
  misc_feature (933)..(933): n is a, c, g, or t
  misc_feature (935)..(935): n is a, c, g, or t
  misc_feature (941)..(941): n is a, c, g, or t
  misc_feature (945)..(945): n is a, c, g, or t
  misc_feature (987)..(987): n is a, c, g, or t
actaatttantagaacaatgactaaaactgaactggtatttgtatgtgaatccacaggagtntaagcatcaaatccagccaagaaattaaaaaaaatcnctntnaacattgaatctaaataaactaaaaaaannnnatcaacnctganannccccaacncggcttggcgctggctgacgacatgaganaaganagcnttctcanacnccnncntcntncngggctccagtntatcaagatatccccttacacccgcatagataacagccacttgtncttcaatagccatgggagactactgtccttgcttcagcnactcagttagacgcacgcnacgnctcaaaagttgttgantggnagcttcgaggtcagntccgttntgggcaantnntgcnncctcacgttattgagcnaatttnagcttnntggtacctgctacntgcttnatagccctggnttgggcagcggatccgacacgagttatagatagaccaacgttaattgngggggggatanntttgtggaacagttgtgtntccaagaggatctgtgcgtgagtnatggaaatgacatttgttggaatgtaagcngacacatcaccagcctgtgtttctgtgactggcaaagcagtnaaggagccaccaccaaaagcatcgttcattttggntgctctctccagcaaccgggagtgtaggtagaacacatcaccaggataggcctcacgaccagggggtcggcgganaaacagagacatctgacggtaagcaacagcctgtttggataagtcgtcatagatgatcaaagcatgtttgccattgtctctaaaatactctcccatggaacagccagagtaaggagccaggtactgaagtggggcagntccgaggccgtagcgacaccacaatggtgtacttcatggctctgcatctgtantntcttcnccantggggcaaatggatctcttttgaccatagcaaataaatacanacagcttcttcttttctcagatcca

SEQ ID NO: 583116 - DNA, 397 bp, Homo sapiens
cgcggcatttaaactcacaatctaccgatacagggctgtttgtaccgtccagatccactggtccctatgttgcccatacaggcattagatagcattaagctaggtcaatacactgctcaggcacatgtctgtgtacagatgatcaggtctagatcccttacagtaagggctcgtacatatgtcggttcatatctcccgcccacatacaagcacccacagtgtggcagaaagcttggctgtgggtcttgtaaaataatcaatctacatgcgtacaagtgtgtcccatgttgaagtccaaaggcaagaatgctagtttgtccatcccaatatgtgtagatatccagtttcaatgtgtctctagactatgcagctagtgtgtgagcatccagctaacaat

SEQ ID NO: 583117 - DNA, 685 bp, Homo sapiens
  misc_feature (71)..(71): n is a, c, g, or t
  misc_feature (266)..(266): n is a, c, g, or t
  misc_feature (292)..(293): n is a, c, g, or t
gcagacggaagtgagcgacacactctgcgtcctcgcctcaccaggaaactactaaagttcctggggaagcnaagtagaatttcatacagaacaaaatggatggagaggagaaaacctatggtggcatgtgaagggagctgatgccatgtatgtcaaattgatatcatctgatggccatgaatttattgtaaaatagagaacatgcattaagatcaggcacgataaaagccatgttgagtggaccaggtcagtttgctgagaacganaccaagtgaggtcaattttagagagnntaccttcgacatgtgcatatcgaagagtatgcatgtagttttacgtacaaggttcgctagcagctaacagcttccaccgagattcctgaatttcccaatgttgcacctgaaattgcatctggaactgctgatggctgcgaacttcttagattgttcaacatataattgcatgtgataataaactgttaagtcttttcagtatttaatacctgtagttcagttagtaagctttttcatatatagcatgtttgcgctgtagtgcaggttgaactatataaaggttcattgcaaagcagattatcgtgtatctggcataggaatcaaagttgaaattcgttgcgacagtcaacaaattaaggacattttcacaaactgagagataatcaatatgg

SEQ ID NO: 583118 - DNA, 693 bp, Homo sapiens
  misc_feature (71)..(71): n is a, c, g, or t
  misc_feature (274)..(274): n is a, c, g, or t
  misc_feature (300)..(301): n is a, c, g, or t
gcagacggaagtgagcgacacactctgcgtcctcgcctcaccaggaaactactaaagttcctggggaagcnaagtagaatttcataagagacggggttgacggttgttgggggtgtggagggggtgggtgggggttgtgtggggtggtgcgtggtcgggcctgcgggtggtgggtggtgggggcgcgtgtggcgtggtggggtcgtggtggggtggtcgagggggggcggttgggtcggtttggggtggccgtcgggatgcgttgcggatcganaccaagtgaggtcaattttagagagnntaccttcgacatgtgcatatcgaagagtatgcatgtagttttacgtacaaggttcgctagcagctaacagcttccaccgagattcctgaatttcccaatgttgcacctgaaattgcatctggaactgctgatggctgcgaacttcttagattgttcaacatataattgcatgtgataataaactgttaagtcttttcagtatttaatacctgtagttcagttagtaagctttttcatatatagcatgtttgcgctgtagtgcaggttgaactatataaaggttcattgcaaagcagattatcgtgtatctggcataggaatcaaagttgaaattcgttgcgacagtcaacaaattaaggacattttcacaaactgagagataatcaatatgg

SEQ ID NO: 583119 - DNA, 313 bp, Homo sapiens
aggacacaggcaggaaaagctggttcttgctggtcggggccaggatcatcatctcctactactccaccacctatatctgggtacaaaaacaattccggggggccaggcatggtggctcacgcctgtaatcccagcacttggggaggtgaaggtgggcggatcacctgaggtcaggagttccagaccagtcgggccaacatggtgaaaccccatctctactaaaaatacaaaaattagccagaggtgggggcaggcacctgtaagcccagctacccaggaggctgaggcagaagaatggcttgaacccaggagg

SEQ ID NO: 583120 - DNA, 936 bp, Homo sapiens
  misc_feature (936)..(936): n is a, c, g, or t
tgcggtggtgcactcctgtaatcccagcactttgggaggctgaggcaggaggatagcttgagcccaggagttcaagaccagcctgagcaacatagcgatactccatctctattagggaaaaaaaaaaaacgtggagccaacaacatgatagggataggggtctggctatgggcagcaattcaaacaacagggctcaagcaatctctataaaagggtctgggaacaagaatttaccggagtgggcttatcatgaagctacagatttttgttcctggtaatatcaccctattcggtcccagaaacacttcctggaaaattccctttatcatggtcacacagaatttattgagaaagtccttaaatacttattacctcggtatcaaaggtcgtggtcggaccgttaaatgagccttagtaatattaacccgaggcactaaaggaattcttgactggcagaaagtagaacatcaacctgggtggacctcccataagtagccaaccccgttcatgaccaaggtcacgtccactgtcctacaacactacagcaggcaaaaacttgatggccctaaccagttttcccaactagacttattctcgcgcataaaagtccttatgccgatgcgattacaacagagtttcggcctgtataacccttacttctccctatacagctttttcgttacctgactgtttccccgacggttttggccgttggtccacacctttgggattgtacaccggattccgcactttctatactacaacaaccagtttccccttcgcaacctagaacgtgcaaccttccacattggcgtacgacacgtggctccagaaacagttccaggttacgggccgcacaacactcgtcgacacaaacgcggtggccgggaggcacctctgtgcacgatttgatcctctgtctgtattagtatgtgn

SEQ ID NO: 583121 - DNA, 481 bp, Homo sapiens
  misc_feature (58)..(58): n is a, c, g, or t
  misc_feature (70)..(70): n is a, c, g, or t
  misc_feature (72)..(72): n is a, c, g, or t
  misc_feature (83)..(83): n is a, c, g, or t
  misc_feature (92)..(92): n is a, c, g, or t
  misc_feature (106)..(106): n is a, c, g, or t
  misc_feature (123)..(123): n is a, c, g, or t
  misc_feature (125)..(125): n is a, c, g, or t
  misc_feature (127)..(128): n is a, c, g, or t
  misc_feature (131)..(131): n is a, c, g, or t
  misc_feature (133)..(134): n is a, c, g, or t
  misc_feature (143)..(143): n is a, c, g, or t
  misc_feature (148)..(148): n is a, c, g, or t
  misc_feature (163)..(163): n is a, c, g, or t
  misc_feature (165)..(165): n is a, c, g, or t
  misc_feature (172)..(172): n is a, c, g, or t
  misc_feature (178)..(178): n is a, c, g, or t
  misc_feature (246)..(246): n is a, c, g, or t
  misc_feature (261)..(261): n is a, c, g, or t
  misc_feature (274)..(274): n is a, c, g, or t
  misc_feature (283)..(283): n is a, c, g, or t
  misc_feature (299)..(299): n is a, c, g, or t
  misc_feature (303)..(303): n is a, c, g, or t
  misc_feature (313)..(313): n is a, c, g, or t
  misc_feature (317)..(317): n is a, c, g, or t
  misc_feature (339)..(339): n is a, c, g, or t
  misc_feature (346)..(346): n is a, c, g, or t
  misc_feature (370)..(370): n is a, c, g, or t
  misc_feature (372)..(372): n is a, c, g, or t
  misc_feature (385)..(386): n is a, c, g, or t
  misc_feature (388)..(388): n is a, c, g, or t
  misc_feature (391)..(392): n is a, c, g, or t
  misc_feature (395)..(395): n is a, c, g, or t
  misc_feature (400)..(400): n is a, c, g, or t
  misc_feature (481)..(481): n is a, c, g, or t
gtgcacagtctggtacccgtggcggtgctggcaacacaagcaccagctgcggggactncaaaagcatctncncggccccctcnacgatgtcnaaggccgaggaggnaagaagctgccgggccncncnnttntnnagaaaaaanttatnaataaataattgctntnaattgtnaagttntttttataattgtccatgctgtgcagcgaatagctgaaagggtgaagcaagaaaatctaaacctcgtntgtattcccacttcnttcaaggcccgcnagctcatcntgcagtatggcttgancctnagtgatttgnatanaaaaccataaatacaaattgcnatcgatngtgctgatcaagtaaatcttcatntnaattttataaacnntncannagnttgcntcaaaaaccacaacattctccttccttatcttagttcttttattctcatacttgattttagcaaaaattcgaaaatcttcn

SEQ ID NO: 583122 - DNA, 436 bp, Homo sapiens
tgtattcggcacgagttgtgagagagtgtgagagagagagagagagtgagagagagagagagagagtgtgtgagagactgcgcttgttctactctgtgaaccccttccccttctgacttttcgtgtttttgcctgctcaatttggctgccttcccatctctcctttactttttctccaaggcccttcgtttgtttatccctttctgtgccctggctgttatttttcttgtttcctgcccctattccttcctgatacttttatccctcacatcctattttcttccttgtcctctctttgtttctgtttatttatgtgtacctctttcgcttattcctgttattctctttttccctcctctcctcatcaccctgtcttcttttcatgccttttttttttcttctaccccttttttctttcctctttctattctttctt

SEQ ID NO: 583123 - DNA, 246 bp, Homo sapiens
gtgggggccggaacccctcttttttgggccaaaggggggccccttccctcccttttgggccccttaaaagggggtttttggcccaggcccccccttcccaagggggggggggggtttgggtttccctttttttttttttttttgggggtcctttggggcccgggttgggggggggagggggggggtttggggggggtttttttttggccccgggtttttgggtataaatttttttgggttttttta

SEQ ID NO: 583124 - DNA, 187 bp, Homo sapiens
ctctttgggtggctctttgtgaagggcagggcgccctggaatgggttcgccccaagagccccaccatgagccacgccatgagccacccaaagcgccccccaaagagccacccaaagagccaaccatactcccccaagcgccacacaaagagccgcgcgaagggccacgccatgagccacacaatggg

SEQ ID NO: 583125 - DNA, 178 bp, Homo sapiens
  misc_feature (5)..(5): n is a, c, g, or t
cgggngttatagtgaggagttagtgtacaccagtaataagttagtctggccaagaattggtctggaatttggattgtcgatacctccagagttagatcggcttgatgccctgcggttacttacgaaactccttcaggaaagctagtttttccctgcttcagtttctgtgccggatgtg

SEQ ID NO: 583126 - DNA, 259 bp, Homo sapiens
  misc_feature (28)..(28): n is a, c, g, or t
ggtcggacctcagtcttcgtcctcaggntgaagcaaagttctttgatgtaaccccgcctacattggcttcttcaatgtaatgagtcagtcgtactgatgggagcaagaccatctggcgtcccatcagcgcacaaactttttttttttttttggaaatggattttggctctatcactcaggtgggagtaaaagggtgcaatctccattcattgtaccctctgcctctcgagttccagccatttctcctgcttcacccttc

SEQ ID NO: 583127 - DNA, 110 bp, Homo sapiens
accgtacgccacatgactgcgtatgatgttcacctattggagctcccagtgggaagtcaacctgaccgtcctcagggagccagagtgtggaaacacccccaacgccatga

SEQ ID NO: 583128 - DNA, 394 bp, Homo sapiens
  misc_feature (104)..(104): n is a, c, g, or t
  misc_feature (120)..(120): n is a, c, g, or t
  misc_feature (394)..(394): n is a, c, g, or t
gcctaggagttttaatccaaaactgtttcctttccttgtccctttcactgcccctaaaacttgccaatcaagttcctcagattaatttatcaaaagtcagagancggccgggccgccagntgtcacgccctgtaatcctagcacattgggagaccgaggcgggcagatcacgaggtcaggagttcaagaccggcctgaccaacatggtgaaaccctctctctactaaaatacaaaagttagccaggcgtggtggtgggcacctgtaatctcagctgctcaagaggctgaggcaggagaatcgcttgaacccaggaggcagaggttgcagtgagctgagatcattccacggcactccagcctaggagacagagcaagactgtgtctcaaactttn

SEQ ID NO: 583129 - DNA, 240 bp, Homo sapiens
tctagagtatccccctaaaagcaatatcaattgagacgactctaactcagatcgttataccacagatttttctatattctaggcatctaagctagacactgtttatatcactgtttaacgttattagagatcctcccctcaaagagctagatcaataacacatacagatccttcagcaatgtgacaagtgctaaaatacgatatgtaaagggcacagcatacaggattacagagtcataa

SEQ ID NO: 583130 - DNA, 263 bp, Homo sapiens
  misc_feature (1)..(1): n is a, c, g, or t
  misc_feature (37)..(37): n is a, c, g, or t
  misc_feature (52)..(52): n is a, c, g, or t
  misc_feature (127)..(127): n is a, c, g, or t
ntcacacccagtagtccccagctacttggggaggctngaggtaggaagactngcatgagccccaggagttccagcaactatagtgagacctcatctctacctaaaaattttaaaaaatggctgggcngtggcagtgctcacccgtaatcccagctactcaggaggctgaaatgggagaattgctcgagcctgggaggttgagactgcagtgagccgtgatcatgcgcttgactccggcctgggtggagagcgaagtccatctt

SEQ ID NO: 583131 - DNA, 129 bp, Homo sapiens
cttccgcggtgactcagcccaggacactcgctgatacctgcccccttcacacctggcaagcagggatgcccggcatcagaagaatgtttcgtgtacgaaattggttagaggggtttagggtttattatt

SEQ ID NO: 583132 - DNA, 652 bp, Homo sapiens
  misc_feature (15)..(15): n is a, c, g, or t
  misc_feature (23)..(23): n is a, c, g, or t
  misc_feature (60)..(60): n is a, c, g, or t
  misc_feature (68)..(68): n is a, c, g, or t
  misc_feature (104)..(104): n is a, c, g, or t
  misc_feature (112)..(112): n is a, c, g, or t
  misc_feature (131)..(131): n is a, c, g, or t
  misc_feature (145)..(145): n is a, c, g, or t
  misc_feature (150)..(150): n is a, c, g, or t
  misc_feature (158)..(158): n is a, c, g, or t
  misc_feature (179)..(179): n is a, c, g, or t
  misc_feature (182)..(182): n is a, c, g, or t
  misc_feature (188)..(188): n is a, c, g, or t
  misc_feature (191)..(191): n is a, c, g, or t
  misc_feature (204)..(204): n is a, c, g, or t
  misc_feature (237)..(237): n is a, c, g, or t
tgagaccggatcccnaggatccnccgggcccatccccccattcccctaagggagggaccncccacccngttcccaccagatggcccactggggttgccaagttngccagagnctgggtgtagtggctcacncctgtgatctccancattngggagccngggccaggtgattgcttgagnccnggagtncangacccagcctggncaacatggtaaaacctcgtctctacaaaaaatncaaaaaaattagctgggtatggtggagtgcgcccgtggtcctagctacttggaaggctgaaggagtctggggagtttgaggctgatattgcgccattgcactccagactcggcaattggagtaagaccctgcctcaaaaaaaaaaaaaaggaaagtatagaaaaatatatttagaaaaggtaagagaagttgagttcccagttatctagaggcaagctaatatggatattttggtatatatctttccatttttttattattaaagaaaaaattttatagttttaaatttgtttttctacatatttattataaactcagctataattatgtctcatgactttttcactttatattattatgtgagcagtttctcttgttatatttttctaaaacagctttatttagatattattca

SEQ ID NO: 583133 - DNA, 589 bp, Homo sapiens
ccaagaggcgtttttgagagtggaaaagaaatttaaacttcccgaaagaaggtccaccatcaggagatgaatatggaacatctcctatgtaccaggcactgtgctaagtgctggaatacattatctcattgaattatcacaacgaccttttcaagtaggcattatcaccatgcgacaggttgaggaccgtgaggcacgctggagttatttgactcgacttgcccagggtcccaggtcagtgctcctcaaacctgaacatgctaagagtcacctggaggtccagttaaaaatgtacatctggccgggcgcggcggctcacgcttgtaatcccagcactttgggaggccaaggcgggtggctcacctgaggtcaggagttcgagaccagcctggccaacatggggaaaccccgtctctattaaaaatacaaaaattaggccaggcgcggtggtgcacacctgtaatcccagctactcggaggctgaggcaccagaatcgcttgaacttgggaggcagaggttgcagtgagcagagatcgtgccactgcactccagcctgggggacaagagtgaaactacatctcaaaaaaa

SEQ ID NO: 583134 - DNA, 321 bp, Homo sapiens
agaaggttgcagatggctcatacctgtaatcctagctctttgggaggccgaggttggcggatcacttaggccaggagttcgagaccagcctggccaacatggcgaaacactgtctctactaaatatacaaaaattagccgggtgtggtagcgcacacctgtaatctcagctacttgggaggcggaggtgggaggatcaactgagcctggagaggtcaaggctgcaatgagctgagatcacgccattgcactccagcctgggcaacagagtaagactctaacttaccaccccccgaaaaaaacaagggggtaccggagctcg

SEQ ID NO: 583135 - DNA, 571 bp, Homo sapiens
  misc_feature (547)..(547): n is a, c, g, or t
tcttctgccagatatcctaaatcctctctgaagtttaaggttccacagatctctagggcaggtgcaaaaatgctgcagtctcttgctaaagtatagcgagagtgacatttgttccagttcccaataagttcttcatctccatctgagaccacctcagcctggactacattgtccatatccgtatcagcattttggtcaaaagcattcaacaagtctcttggaagttccaaacttttcctcatcttcctgccttctgagccctccaaactgttccaacctctgcctgttactcatttccaaagtggcttccacattttcagattatctttgcagcagtaccccactctgctggtaccagttctctgtattagtccatgttcacactgctataaagatactacctgagactgggtaatttataaagaaaggagttttaattgactcacagttctacatggctggggaagcctcaggaaacttagaattatggcagaaggggaagcaggcatcttcctcacaaaggtggtaggagagagagagctcaggngaaactgccacttttaaactatca

SEQ ID NO: 583136 - DNA, 223 bp, Homo sapiens
gcccaagatccctccgatatcttccccctctgtcctccgtccggaccagctcgttatgctgtcagaggatggagagccactctcaagaggcacctcccaccatccggctccccgactgcagcccgggcgcgcccatcctatcgccctcccgacagctccacgcggttggccccgcgcgcaccgccactcgccgcgtgttgacccgattattgtctatcgcaga

SEQ ID NO: 583137 - DNA, 479 bp, Homo sapiens
  misc_feature (99)..(99): n is a, c, g, or t
  misc_feature (118)..(118): n is a, c, g, or t
  misc_feature (165)..(165): n is a, c, g, or t
  misc_feature (196)..(198): n is a, c, g, or t
  misc_feature (223)..(223): n is a, c, g, or t
  misc_feature (229)..(229): n is a, c, g, or t
  misc_feature (264)..(264): n is a, c, g, or t
  misc_feature (273)..(273): n is a, c, g, or t
  misc_feature (279)..(279): n is a, c, g, or t
  misc_feature (289)..(289): n is a, c, g, or t
  misc_feature (300)..(300): n is a, c, g, or t
  misc_feature (308)..(308): n is a, c, g, or t
  misc_feature (321)..(321): n is a, c, g, or t
  misc_feature (338)..(338): n is a, c, g, or t
  misc_feature (353)..(353): n is a, c, g, or t
gcgaaactgggtttcaagttaaaaaaagaaagcaaggaaagagtaatttccaacgaaggaaaaaaacccccagcacccccttcgcggctgtcagcgctntcctaatgtcacagtggcngggtgtccttggggtgggtaaggtgtggggagcccagcccctggccntgcctcccgggccccgctccccttttttttnnnattgggttaagccaaagcgaggccnccgctngtttcaaaaatgaatttgttttatagattataaanaggcaaaancagggnatgtataaancagaaggcccncctttccnggttattttttgncccaaattgtaaattanattatttattttttnccaattttgggaataaaaggtgttttggttatttaatataataaaagctgttaaacttttgtttaaatttccagttcaacttgtaaatgtttttattgggcataaaaacaaactaatgttgtttta

SEQ ID NO: 583138 - DNA, 427 bp, Homo sapiens
tcgaagatggcggttgggcgcgagggagtgaggtgcagagaaacctcctgaggtacagaagtgggggcgagactggagagcggagagcaccccagtggccccacagtctggcggcagggctgaataccagaggcctcccacagttccagaagctggcgactttaaaacataaagacatccctggaattctgccagggctaagatcccaagctctgctgaagggaaagtcctaattctactctgaacacatttaaagccggtggtaaagaaactccaataaaagctgcccctaaactttttttttttttcaagaaagaaacaaataaagaataaatattttttttacagatgaggttcacacagcccctccctcttgtggctcaacaggagaaatgtgtgccattttcttatttgtttatttgtttta

SEQ ID NO: 583139 - DNA, 516 bp, Homo sapiens
tctgtggtacgacgactgcaggagactgaaatgacacgaatcatttgggaattgattacagagaaactcatttttccctacgtggaattggatctacatagctatgatttaggcatagagaatcgtgatgccaccaacgacaagtcaccaaggtatgctgcagaagctatcaagcagcataatggtggcgtcaaatgtgccacgtatcactcctgatgcaaagagggtagaggagtcacagtcgaaccacatgtggaaatcaccaaatggcaccatacgaaatatcctgggtggaccggtctacagagaagccattattctgcaaaaatataccccggtcgagagtgacatgggtacaaacctatcatcatagttacgatcatgctatatgggggactcaaaaccacaacagatgaatagtagtcatgggactggaacacctccacctcacctacccaaaagtgacgaacccaacacgtacatacctggtaataaaatggaggcttacattcaaag

SEQ ID NO: 583140 - DNA, 716 bp, Homo sapiens
  misc_feature (527)..(527): n is a, c, g, or t
  misc_feature (562)..(562): n is a, c, g, or t
gagcttcataacatgcaacctgaccttgcagaggtcgcgtgctgtgggatgacagcgggacgggagctcacaagtgctttcactgaagatttgttcatatactgtgtattgattgttgtgtaatatatcatcattgcttttgtaaatacgtaaaactgtaattttttaatggtgtgcttcccttatacttttttgatcagagaattttggaaagtaccaaagaagcaggggaatcattggccagtgttacgttttcacattgtctgtctcccaccctcactgatcacgcctgccccagagcagtgtgtggcggtgacaccgtcacccagcatgcgccacgccgtggctcccaccagcagtgccaccgtcaccacaccccagatcccacccaccttgcagtggcctttccttgtcatcagagtacagaatgcacaggtgttggtgagggcgtgtggctgaacactacatgtcaagttcagagtcagtttctatcccatttctcctgcaggcttgagacggatcttgtnttcaatgtcagacaaaagaggctttttttgtgctntgaccatctagcactttaaggattaaagggatgggaaaatcctgatgcttgatggagtttttttttggggccacacgtgggaaccccaggctttactccatcccaatggaggcttttcttttttgataagcgcagggaaggacaactatggtgg

SEQ ID NO: 583141 - DNA, 420 bp, Homo sapiens
  misc_feature (2)..(2): n is a, c, g, or t
  misc_feature (15)..(15): n is a, c, g, or t
  misc_feature (405)..(405): n is a, c, g, or t
anttcggcacaggantttttatttggggctgaattatttttaaatgtaaagcaagatgtctaaattacattaatatgttactaaattactatgatttttccagaaaaatattagcccatgcaatattctttaattcctgtgattaagttggtcttctgcaaagaaatttctgttgacttccttagattaaatgcagccctgagataggtgtgcaggtccaggaagtggcctgtgcagttctccctgtgcctgcaggggtggcttcttgaggatactttcgcagtaagggcttagcaatatgcgcatgtctaaggagtctatcagaaaactacctccactgtggaagggcttggggatttgtattttttgtgcttttgaagcaccctgtacacttgctgttaactnccatttaactgaaga

SEQ ID NO: 583142 - DNA, 161 bp, Homo sapiens
ggttattgatgaggcagatcggggagagtagatcgacgcctgaaggtcaggattgtggaggccagatggaagacgttgttctcaacgcccatgtccgcatacagctgagcaagacggacaaaactctggttggtagtttcgaagtcagcgatggcatcggg

SEQ ID NO: 583143 - DNA, 175 bp, Homo sapiens
acgagtgaggaaagaaggtagacgagtgaggaaagaaggcagactagtaagaaagtgactaataaggaaagaaggcagactagtaaggaaggaagactggtaacaaagtgactaataaggagagaaggtagacgagtgaggaaagaaggtagccaatattctgagcttgaagttt

SEQ ID NO: 583144 - DNA, 285 bp, Homo sapiens
  misc_feature (2)..(2): n is a, c, g, or t
  misc_feature (18)..(18): n is a, c, g, or t
  misc_feature (22)..(22): n is a, c, g, or t
  misc_feature (109)..(109): n is a, c, g, or t
  misc_feature (189)..(189): n is a, c, g, or t
  misc_feature (213)..(213): n is a, c, g, or t
tnatcactaagaattgtntgtnaatgcttccgtttggttttaagatgaagttatttcctttactacagtaggcctcaaagcagtccaaatctccaatcgcagattctanaaaaagattgtttacaacctgctctatctataggaatgttcaacactgtgactcgaatgcaatcatcacaaagtagtttntgagaatgcttccatctagttttnatgtgaagattttccttttccaccacaggcctcaaagccctcccctggcctatccctggaaataaagaacag

SEQ ID NO: 583145 - DNA, 737 bp, Homo sapiens
aatcccagcactttgggaggcagaaggtgggtggatcacgaggttcaagaaatcgagaccatcctggccaacatggtgaaaccccatctctactaaaaatacaaaaattagctgggtgtggtggcacgcgcctgtagtcccagctacttgggggactgaggcaggagaatcgcttgaacctgggaggcggaggttgcagtgagccgagatcacgccactgtactccagcctggcgacagaacactccgtctcaaaaagaaaaaaaaaaagatataacatttgaatccataacaagaccattgtgaccatgctaaggacttttaaatatgaaagcaaaatgcacgtggaaagaatgtgtgagtgggagagaagagctcaaatgcaggaaaaggaaagaccatttcctccttggacaatcttttagaaggaggggcccacatcccttcttccagtacacagggccctcacacatgaagcgggagcgccacctctgcgctgtcagaaatctgggagatgtgtgaattctccctcctgctatatcatgaacaaaggaaaccaaatccatcttatcaccttttacaacaaaccactttgggtaagaaaatcagcttacaccatagaacctatgagaaacaaatgacaatggcccttagtcttctaagggtcgggaggaacctgcctaaatctaaccggagtatcaacatttttagcctttaaaactatgtcacccttcagaa

SEQ ID NO: 583146 - DNA, 342 bp, Homo sapiens
  misc_feature (248)..(248): n is a, c, g, or t
gaagcgggaaacactacgggcactattccagaagagagtcaccggtccagctccatggagccttgagatggagcccctgagtcctttgaggatgtggctggcacagaagatgagtcagtctgacagtggggtggacctgagatggggattctcagagtgtcatcaaggtcccatgcagccagcgcaagttcccactgatgagaggactcaacgggggcagcaagagggaccccccatagaggcctggnaggctcctacacccctagaatgctgttaccttggtgagggtccaccatggctcttgaacctccttaggagaccaccactctgcccccctacgat

SEQ ID NO: 583147 - DNA, 217 bp, Homo sapiens
ggtcgctcagaggatccccgcgctagcggcatagtgaacgaaggcctgtggtcctcatagtagttattattttttctttttcttttctttctttccttcttcttttttttttttttccgtctttttagggctgccccctgggcttttgtgggtccccgggctgggttcgaccggggggtttcgccaggggccctacacccgtttcatttagtggccg

SEQ ID NO: 583148 - DNA, 227 bp, Homo sapiens
ccaccttcacttagtcgctagggtcagtgctggaaagcgccctacactacctgcgctgacaagggccctatctactactgtcgtgtgggagtggttccgggctagagggagctagctccttagcacctgataaagaaggtgtctctttcatccatggttaagtcataaaaagcttattggtttaggtttagactcacctgaaagttttttttggtttaaaagaagaa

SEQ ID NO: 583149 - DNA, 499 bp, Homo sapiens
tagatccgggaaaagttggccatgtgatgaggacgactgggaggcttgaaatctccgttcaacaagaaaagtattggcatgtgtctatagagaattaccgatgacagagtcgtacgatggatcgagacaagtcgtatacatacttgaggaacgcatggcacaagaatgaacgagttgtttgtcagccaatactgtggaagaaattatggaaaagttacatggagatggtacatcttttggccctgagagcaattgaaggtaatgtaatgaagaatgtctcctaatgatctcgtagaacgatcgacactaaggcaactcatggaggggtctacaaagacttgcaagaagtactaagctatggagtatcggctaaggtcaagcccgtatgaggaggtcatgagtttcatgataggcgtttagagcttgttgtgaacttggataaagaccaggagtaccaaaagtggaaaccagatgactctacaaagaagtaactgaggag

SEQ ID NO: 583150 - DNA, 728 bp, Homo sapiens
  misc_feature (10)..(10): n is a, c, g, or t
  misc_feature (101)..(101): n is a, c, g, or t
  misc_feature (117)..(117): n is a, c, g, or t
  misc_feature (139)..(139): n is a, c, g, or t
  misc_feature (176)..(176): n is a, c, g, or t
  misc_feature (182)..(182): n is a, c, g, or t
  misc_feature (186)..(187): n is a, c, g, or t
  misc_feature (193)..(193): n is a, c, g, or t
  misc_feature (197)..(197): n is a, c, g, or t
  misc_feature (201)..(203): n is a, c, g, or t
  misc_feature (206)..(206): n is a, c, g, or t
  misc_feature (209)..(209): n is a, c, g, or t
  misc_feature (214)..(214): n is a, c, g, or t
  misc_feature (216)..(216): n is a, c, g, or t
  misc_feature (223)..(223): n is a, c, g, or t
  misc_feature (226)..(226): n is a, c, g, or t
  misc_feature (229)..(229): n is a, c, g, or t
  misc_feature (231)..(231): n is a, c, g, or t
  misc_feature (234)..(234): n is a, c, g, or t
  misc_feature (237)..(237): n is a, c, g, or t
  misc_feature (241)..(242): n is a, c, g, or t
  misc_feature (249)..(249): n is a, c, g, or t
  misc_feature (313)..(313): n is a, c, g, or t
  misc_feature (329)..(329): n is a, c, g, or t
  misc_feature (333)..(333): n is a, c, g, or t
  misc_feature (337)..(337): n is a, c, g, or t
  misc_feature (340)..(340): n is a, c, g, or t
  misc_feature (343)..(343): n is a, c, g, or t
  misc_feature (355)..(355): n is a, c, g, or t
  misc_feature (357)..(357): n is a, c, g, or t
  misc_feature (364)..(364): n is a, c, g, or t
  misc_feature (368)..(368): n is a, c, g, or t
  misc_feature (370)..(370): n is a, c, g, or t
  misc_feature (373)..(373): n is a, c, g, or t
  misc_feature (378)..(379): n is a, c, g, or t
  misc_feature (381)..(381): n is a, c, g, or t
  misc_feature (390)..(390): n is a, c, g, or t
  misc_feature (392)..(392): n is a, c, g, or t
  misc_feature (438)..(438): n is a, c, g, or t
  misc_feature (449)..(449): n is a, c, g, or t
  misc_feature (457)..(458): n is a, c, g, or t
  misc_feature (466)..(466): n is a, c, g, or t
  misc_feature (470)..(470): n is a, c, g, or t
  misc_feature (479)..(479): n is a, c, g, or t
  misc_feature (484)..(484): n is a, c, g, or t
  misc_feature (506)..(506): n is a, c, g, or t
  misc_feature (509)..(509): n is a, c, g, or t
  misc_feature (531)..(531): n is a, c, g, or t
tttcttcctnatttttagcaggtttagaggctgcagcttgagctacaatcaggagggaaattggaaggattagcagcttttaaaaatgtttaaatattttntttttttaatttgttnatccttattaatttcatttttncaaaatttatttttccttcttttttccccattttttncttttntaanntattcnttantttnnntanttnccctnancttcatncancantnttnatntttnnccatttntctggtttccatgtattctaggccaggtaggcaacacagagccaaggcgggtgctggaaaccanacggaacagtgttggncagnaagntgnatnctgttgtcatgnanctgtggnagtngncantcgtnngntggtggccntntcgggtcacatgttcacagtgcagctcctggcagacttgggttttntctttggtggnttttaaanngccttatntgcnaacaacttnttttntccttcaggaactgtgaatggntanaagaaggaggtcagtaaactanaagtccagggttgcttggtttactggtttataagaaatctgaaagcacctctgacattccttttattaactcacctctcagttgaaagatttcttctttgaaaggtcaagaccgtgaactgaaaaaagtgttggcctttttgcgggaccagatttttaagataaaataaatatttttacttctgtaaaaaaaaaaaa

SEQ ID NO: 583151 - DNA, 1419 bp, Homo sapiens
gcctgggcctgcccacactggagcctgctggctgctgcactgtgaatgctgtccctgcctgccacaattgctgctgtgctgaatgcaggctgtgcctgcgaccttggctgaggtggtccctaactgtttgcctgctctggcatcctttagaacctgtgccgccccgtgacgcctgcgcggggaccccagtctgccctgctgcgccccatgcgctcactcttcgtgtagccctggacccggtgcccggacgccaatcgacagcaacgctggaagcccagcagccggagttgacaggtgacactatggcctggcatagcatggctgccaccatgggacacaaagaaccacgcaccacaagagcaacaagaaggagaacacgacgacacgcagcatcggagaagaccacaccgagcatcacaacacagagaaaccaagcacaataacaaagaaagagacagaccgagacaaaacacgaaatgacccacaaaagttgcacacaaccctcgaaaaagcaaaacaagacaaccacaaaaagacagacgcacgcacacacaccacacccacagaataagaaacacacactaaattatccctaaataatcacataaacaaatactattcaacaaaaaaaataaattgaatacacaacaaataccaacataaatacacccacattatcataaaccaattaaccattatgcacacccacaataataataaccaatcaaccatcaatcttaacaaaacattacaaaaacaacacaccagcggtcacgacgaagaggactggataccagtaaagtaatgaagaaagccgatgacgagcaaggcgccaggacaacgccaagagcaagagaagcaaatagaaaagagcagtggccgacacaggcaccggatgcgaaaagacaaagacaagccgaaaaagagtacataaggacagggacagtcggagtaaaaatgacacatatcacacaaacaacaactacacaaactcacatgacactacccatacaacaccacacaatgagaccaccacatccagacagaccatcaaacacaaccaaccatcacacactaagaaaacaacaaatcaaaatataacacacaacccacaaaactaatatcaaatcaaaaataatatattatcagtcactatcaacttatacatcatacatacatctaaacataataccaagacacacaatctgtcgattcaagatcttaataaccacatcgatcctgttaccgatatatccgtagctaagaatcaaaaataagagaaagacacttgaacatcgaactcgacacatcataaatctctacaactaaaaggactatacctcacaagagagaagtaaaactacaggaatatacatgaagtactatacatgctaattagcatacatctgacaaatagtc

SEQ ID NO: 583152 - DNA, 175 bp, Homo sapiens
tggcagatggagtttcactcttttggcccaggcgggagtgaaactccatctcaaaaaaaaaaaacaaaaacatctttaagggtttagttttattttgtgggttttctctggctcaaagaggcgtgggaacgaggaagcaagcattggagttgcacaaagggggaggtgcctcccc

SEQ ID NO: 583153 - DNA, 166 bp, Homo sapiens
agatttaattccaggcagggtggggatagaaataattgacacgctcttcagctaaatttattctttacttgaaaacttctgtctggccaggcacagtggcccacgcctgtcatcccggcacttggggcagccgaggcagatggatagcctgaggtcagtatagata

SEQ ID NO: 583154 - DNA, 138 bp, Homo sapiens
tagaggataccaccacacacaagacaggatgtgaaggatgcagaagtagcaggcagattgttgtcactgaagaggccatctttggatctcaagaatttaagaagaatcagggaaccgtactaaaattgaccagggcca

SEQ ID NO: 583155 - DNA, 228 bp, Homo sapiens
ggcacgagcgccccaataatgcaaagtagcttaatcttgctcacaatataaaatttgtggccaggcacagtggctcacgcctataatcccagcactttgggacgctgaggtgggcagatcacctgaggtcgggcgatcgagaccagactaactaacacgaagaaaccccgtttctgctaaaaatataaaattagccaggcatggtggtgcatgactgtaatcccaact

SEQ ID NO: 583156 - DNA, 269 bp, Homo sapiens
aaaaatatgaccccccttatactctcataggtagactgaactgtttactgagcacatatggaagcattgtattaacttgtcgtaatattgtcaaagttaaggatccaagagaaaactccagctgtgaaagcaacataaatggattttaaactgtctacggttcttaacctcatctgttaaggttcccatgcctggagaagctaatgccaactcatcatgtgataattcaatttgcacaataaattatgaacccggaagaagaaaatgat

SEQ ID NO: 583157 - DNA, 494 bp, Homo sapiens
gcggatgatcacatgtctcggaatatcgatagtggtgatgtttacacaacaatgtgactatactaaaaacacttaatgtacaattttaaaaggtcgatttgatggtatatcaactatatctcaaaaaagctattatagaaaacatttcaaaagcaaattttaaaaagcttatatggcatttaatatttaaaactgatttacatgagtaattacacaaaaccatttacgttttatttttgagacagagtctcgctctgttgctcaggtaggagcgcagtggtgcgatctcagctcactgcaaccttcgcctcctggttcaagcaattctcctgcctcagcctcccgagtatctgggattacaggcacatactatcatgcctgggtaattttttgtatatttagtagagatggggttcaccgagttggccaatctggtctcgaactcctgtactcaaatgttcccccgtggccggccatgaataagatttgaatag

SEQ ID NO: 583158 - DNA, 181 bp, Homo sapiens
aattggcgcacggaagatttccgtatgttaaaaaatggatctttttggaggctaccaccattaaatccgtacttgcatggcatgtcacaggagcaagacacacaggcttttttaagaggacccttgtaaaagggcgcacttatggaggaccacagggatacttggaggacattttcgggga

SEQ ID NO: 583159 - DNA, 102 bp, Homo sapiens
gaaggatggttgtctttgggtatactacagcgatggctattgaggagtatctgaggcatgggggtcagggtagaggtctggagagtgtaaagtggggtagcg

SEQ ID NO: 583160 - DNA, 158 bp, Homo sapiens
ctggcttatgttagaatacaaatctttattattctgaaaaccacagcaaaggcacctcagtaatctccagtgtaccctagtctcagtatgcctgttcatgtggggacagagagtgtgtgctgattggcataggtcatacgccttgtctagtgtctgca

SEQ ID NO: 583161 - DNA, 532 bp, Homo sapiens
gtattagtatatatatatctacatactagtctcatacatgtgtataattgcaatgtttcccaatgtgtggatgtggttctttaacagtttcttttggcccaaaacttatattttgaatgaagtgcagttattctatttattcttttcttgcctgtgcttcaggtgtcacatctgaaagaaaccattgtctaatccaaggtcacgaaagtttaccctgtgccttctgctaagagtcgtatatttactcttacatttaggtctgtgatccattgggttcattctgtgtatgagggaaaggtccacatcagttcgttggcgtgtggatatccattggcccaggacctgttggttgaaaagatcattcttccctcatcattggttatactttcacctcagtagttgtgtagcgaagtatgtatattaaatcttttataggcaaccttgcattgaaactttgtgctctgaaccatctaactgtattcaggctgggtgtggtggtcattcctgttatcccagaactttgggagatcca

SEQ ID NO: 583162 - DNA, 521 bp, Homo sapiens
gtagaaacttatgttttataaaggcagaacctcgatcacaagaagcatgcgccctccacaggtgggggttgggggctccaggactacactgccagggtcccactcccggctctgtacgggctatggggtgcccgtgcacaaagacgggcggggcctccatttgcttcttcctgaaaagggcgtgagacgtttcccacgggcccttggtccttggtgagagcgaccaggccgactccaaacattatttgaaagtcccccccctcggccgggaacatctttcgccgcccttcagccgaatttcctgaagcccggggatccactaaattttaatcggcccccaccggggcggaaatccagcatttggttcctttagtgagggtaaaaacgcgccccgccggaaaacaaggccaaaactgtttccccttagaaatggtattctgtccccacccccaaacaaataaaaaaccgtggaaccctaaagtgtaaaccctgggggtgccaaataaagggagcccaattcc

SEQ ID NO: 583163 - DNA, 804 bp, Homo sapiens
  misc_feature (27)..(27): n is a, c, g, or t
  misc_feature (86)..(86): n is a, c, g, or t
  misc_feature (138)..(138): n is a, c, g, or t
  misc_feature (160)..(160): n is a, c, g, or t
  misc_feature (168)..(169): n is a, c, g, or t
  misc_feature (181)..(181): n is a, c, g, or t
  misc_feature (224)..(224): n is a, c, g, or t
  misc_feature (278)..(278): n is a, c, g, or t
  misc_feature (337)..(337): n is a, c, g, or t
  misc_feature (352)..(352): n is a, c, g, or t
  misc_feature (420)..(420): n is a, c, g, or t
  misc_feature (423)..(423): n is a, c, g, or t
  misc_feature (428)..(428): n is a, c, g, or t
  misc_feature (462)..(462): n is a, c, g, or t
  misc_feature (492)..(492): n is a, c, g, or t
  misc_feature (564)..(564): n is a, c, g, or t
  misc_feature (572)..(572): n is a, c, g, or t
  misc_feature (579)..(580): n is a, c, g, or t
  misc_feature (582)..(582): n is a, c, g, or t
  misc_feature (593)..(593): n is a, c, g, or t
  misc_feature (650)..(651): n is a, c, g, or t
  misc_feature (666)..(666): n is a, c, g, or t
  misc_feature (681)..(681): n is a, c, g, or t
  misc_feature (684)..(684): n is a, c, g, or t
  misc_feature (713)..(713): n is a, c, g, or t
  misc_feature (736)..(736): n is a, c, g, or t
  misc_feature (742)..(742): n is a, c, g, or t
  misc_feature (751)..(751): n is a, c, g, or t
tgcctccaaatgcagtcatgacttgcncataatgtgaatttggcagcaaacacattggagggaccactgcagtagcatcttgaaantttaacatttctttccaagtatctgtatcaaaaccaaggaaaaaaccaaagnaaaacactaccaacagtatgantggcaagnngtacccgcaganggtttctacctccaagccagaaaacccaaatgcactgtctccntccacacagatgatccattgcccagggcttctatctttagccaccacggcagcngcaatagcaaatcccaaaccaacacccattgttccgaaagtaccagcatcaagcctgtnacgaggaagggagtnctgaagcacagtccgtccaatgtccatagtgatttgctccccacctacccacgaaacagaaacaaggnagnaaganactagaacatgggagaatactgtgtaaacaattncataggcagggaatttttagaagcccagtnccctcgggatgcagcctcattgctcttcattttttctctcagagttttccaccacccgctccccggaggganaccgccanggggggnntnaacaagtgccncctaaaagctgcttagtgacagcatgtaagtatcctagcaaagaaacagcggggccnnacattattccccaantcttctgccacaganatnaacctgggataacttcacatctggcgganatctgggaggcaggacaaaaagnaaaacnatatagacnggcacaaatacacaatacacagcaatagcaagcctggatctggctgcactaca

SEQ ID NO: 583164 - DNA, 230 bp, Homo sapiens
ttcccctttttttttggttcgaaccttgcaatgccgtcatgtttggagatgggtcagccctcttgcaaattggaggcagcaaggctgagggaaatgccctcctgcttcagagggcagaatggaaagaggagccttagatggccatggttcggttgggcagctgagtcaggtctggggcccctgcctttcggtttcaagggagaaaaataaacccctgtttgttggcctca

SEQ ID NO: 583165 - DNA, 333 bp, Homo sapiens
ttttttttagtttggatgctttttatttctttattttgtctgatcactctggcttggatgtcccatactgtgttgaataagagtggtgaaagtgggcatccttgtcttgttccagttcttagaggaaaagcttttcaatttttcccagtgagtaggatgttagctgtagattagtcatatatgccttttcttatgttgaagtgttccttctatgcctaatttgttgagagttttcatcatgaagcaatggtaagttttaccgagtgatttttctgcatctgctgagatgatcagatagtttttgcctttcatcttgttgatgtgatgtatcac

SEQ ID NO: 583166 - DNA, 244 bp, Homo sapiens
acgtctagagggagatgtcgacaagtcaccgcattcgaggtgccacaggcagggactgtcaagtagtccaggatttctctgagaacgggatatgtggcctttcaggttgcttgtaatctttcatctggaaacggggtgagggtctaccccaggagtactggcagacggcccaacacaggggggggtatgggctgcagggcagggaaggcatggccgactagataaccgtgtgagctgggcggga

SEQ ID NO: 583167 - DNA, 700 bp, Homo sapiens
  misc_feature (20)..(20): n is a, c, g, or t
  misc_feature (73)..(73): n is a, c, g, or t
  misc_feature (78)..(78): n is a, c, g, or t
  misc_feature (81)..(81): n is a, c, g, or t
  misc_feature (125)..(125): n is a, c, g, or t
  misc_feature (132)..(132): n is a, c, g, or t
  misc_feature (149)..(149): n is a, c, g, or t
  misc_feature (158)..(158): n is a, c, g, or t
  misc_feature (164)..(164): n is a, c, g, or t
  misc_feature (171)..(171): n is a, c, g, or t
  misc_feature (185)..(186): n is a, c, g, or t
  misc_feature (197)..(197): n is a, c, g, or t
  misc_feature (247)..(247): n is a, c, g, or t
  misc_feature (271)..(271): n is a, c, g, or t
  misc_feature (273)..(273): n is a, c, g, or t
  misc_feature (292)..(292): n is a, c, g, or t
  misc_feature (294)..(294): n is a, c, g, or t
  misc_feature (303)..(304): n is a, c, g, or t
  misc_feature (309)..(309): n is a, c, g, or t
  misc_feature (311)..(312): n is a, c, g, or t
  misc_feature (337)..(337): n is a, c, g, or t
  misc_feature (341)..(342): n is a, c, g, or t
  misc_feature (352)..(352): n is a, c, g, or t
  misc_feature (376)..(376): n is a, c, g, or t
  misc_feature (407)..(407): n is a, c, g, or t
  misc_feature (441)..(441): n is a, c, g, or t
  misc_feature (462)..(462): n is a, c, g, or t
  misc_feature (471)..(471): n is a, c, g, or t
  misc_feature (501)..(501): n is a, c, g, or t
  misc_feature (685)..(685): n is a, c, g, or t
acataagtggagacttctcnactttgtacacaattattctcactctccacagaaaggctgcttaacttctcanatggnggnggcaagcactaaaatcctgattttaacagaatagtagtaaaaanacctcantaatttaagtagaaaanagtacactngtacanaaatctngaacccagtatcannaatgtacaaanattttttattcaaaaatacaaaataaattatctgtaggcatggccaatgncagccgtcaaccattatatatttngncaactgccacccgtccctncnggttatcgnnttttncnncccgcctttttcttctttttctccncctnncttctctggngtttttgggggggggcactgcctngggcttcctgtcccagttcattaataagggnaaggccctagtctaggggttagaacaagccaccncccataccacctcccattccncccattgcncccattccagggtccttctcttctttaggnttttctgtgactacaacttctgctgtagttaacagaggggccaccccggcggcctccaataaagcagttctcacaacctttgttgggtcaatgattcctttttcccccatattcacaaaatctccagccatagcatcataaccaacttctggggggctttgcataattttctcaactatcaaanatccttcaacacctg

SEQ ID NO: 583168 - DNA, 886 bp, Homo sapiens
  misc_feature (477)..(477): n is a, c, g, or t
  misc_feature (488)..(488): n is a, c, g, or t
  misc_feature (490)..(490): n is a, c, g, or t
  misc_feature (492)..(492): n is a, c, g, or t
  misc_feature (515)..(515): n is a, c, g, or t
  misc_feature (517)..(517): n is a, c, g, or t
gctctgtaagccattaaacctttggaagaggcagctttgctggtagagtcgtaagtgaaattggaccaaaagtgagtttatgaagactggtgggcaggagctcaacagcgtgcgagggattgtccgtgcagccagtgtctgtatgtgccccagcatgggaaagcatgtatgaagtagctgagtatctgtatctgtggacctgagatgttgatccctcgcttcagattgacagtacctgatgcgctcagtgagagagacaaagtcaaatttacatgtgcacacaagagacgcagtacgtgcccagcgtatcgatgagcccagagttttctgttacaagggcgaacgatgaagactttgtgtggctacatgacactcttattgaaacaacagactatgctgggcttattattccacctgctcctacgaagcccgactttgatggtcctcgagagaagatgcagaaactgggagaaggtnaagggtctatnancnaagaagaatttgccaagatgaancnagaactggtaagctgagtatctcgctgtgtgaaaggaagactgtgtcctcccatgaagtcttgcttcagcgggtttcgttctcaccctgttctcagtaagagatcgcaagctttcatgttcttcctggaatatgagtcaggatctaagtgttaggcggaaataatactaaagagatgttcggtgggttcttcaaaagtgtggtgaaaagttgctgagtgaagttctttttactggagttgaaggaggtagattgagttcgatgaggcaagagaagaatttccttattaagtattacagtaggatcagagattctggtgtgaaatgctgacaaaagtgagatgatctcataaaaatgttgccgatgacta

SEQ ID NO: 583169 - DNA, 1296 bp, Homo sapiens
tctgtgtggagaatctgcagtgaatctagcgtcgctcggatatcacgggtaaggagatcggtcagccttgcgatggtatccgaggttggatgggagctgcccctaggatcgacaaggatctagcctatgacaacgtcctagcgaaatatagtggatagttagtaagccgagtccaatggtacgcctctttcgagtgtagaactctcacaacgtcacgttgagtgcatcattgcttcgcgagtactgaatttcgatccacggtgcgcaaattcgcaatgtacgacacagtacaatagtcatcgaagtcacaggcgtaaagcgtttagttcgcatccattgcgtgaaagaattctcattcaacgctttcgttttcgcaacgcgaaagcgtgagcactcctctgtcgccaaaggcatctagttgattgagggagtcggatttgctttggggcaggcctatgatatgcctacccgttcgagctagagaggtttcccctatcgggcgagctattttcccacccgaggacacctagagacggagagaaagctttgcgaggagcacttccaatgtctaagcgaacgaggttgggtgaccggcctatttggtttgggagctctaggtccaccattcgtgccataggcccgccctccaattctttgcgattggtgggtgcctcaacccttaattggcttttgccagatcccgagtgtggccatggcctaggcaaagcactatggtggaattgaccacaggttacttcgtaaacccttaggcttgtggcaccttaccgacagttgacgttccaattctggagacacaatcctttggggccgttcccttctgaggacgcccacaccaccgaaaaccacttgccggtgtaaagcgcacaccgccctcggcgttgttggccccttaaattgggggtacgacatttcccaatttgggaacaccaacactctgttactatggcggatttaattttcagggtttggggcaaatatgccggtaaaccgttaccaagattaggtaaaaccccacaccttttggggtaaacctccacatgaggggcctctcaatattagccaaaggcaataggaacggcatatccaacccgcgaggcgtaaaaaaggacaggcataagggctaggaggaaaattcggggggaaccggccgcccccgtaaccctctcgcccgcggttatgggacacacaccttttggatgtgggtgtgccccgaattgggacggtagtaaggccacgccggttaaggggggccgagggaccattgccgtgtgccac

SEQ ID NO: 583170 - DNA, 127 bp, Homo sapiens
gttatgacagaacatggcctgtcttggtggctcaagaggggtcagagacacctttgtgaagggtgggggagacagcagggtttcacatttggcagggcagggcagaacgggaagggcttgggggaga

SEQ ID NO: 583171 - DNA, 294 bp, Homo sapiens
tgcgcagcaaccaccagaccgtcatgtacgaacagtaccaacagaacctgcaaaaacaggcacaaaaacaggccctgagaccaggccgaagcaacgcgcgtaacctgtccaaccccaaatgccagttctggctgcaacaagaccagaacgcccccaatgaaaagacgcgggccaatgtcctgcaattctgcgattgatgtcaaataccgccatgaataaacacgccgtgctccagttgatcctggaaaagctcaccgtcgacctcgacatcgtccaacgcgccgcgcagagttt

SEQ ID NO: 583172 - DNA, 230 bp, Homo sapiens
tgaggaatggagaacacaaagcagggaaaggggattctctgtagaatgtggatttgattattattaccctgcaggggacggctggcgagtctgagggtctgagacccaggagagtcgagggggtcagctccagtctgagtctgacggggtgaattctagtgtgagtcagaaggcctgagacccaggagagccactggtgtgagttccagtctgagtctaaagtcctgaga

SEQ ID NO: 583173 - DNA, 336 bp, Homo sapiens
cgtcacagtatctgggccgcgtacgccccgccgttttctccgcgtcttgtcatcgcgcaggcctgaggagagtggataaatgtcttgagtgcaatacaaggacgagaatgagagactgggaggtcctagtgggtggggagccagcaaaaaaaaaaaaaaaaaaaaaaaaaagctagggctcgattttacccaagcgctgatctcaggtgaaagagcagcaggtgggaattccacaccttgagagagggagaaaagacttgcgttcgtctcgctccgggttttggccaaagttattacccggcactaattcactccattgttgggccttctggagaa

SEQ ID NO: 583174 - DNA, 155 bp, Homo sapiens
ggacagagcgggatgccaccagcttgtccaaagggaagttccaggagctcctggtgggcatcgttgttggagattgacgttggccgcggcgagatcaccgagttgaggcaggtggagggaagagctctcgtcacaacacccacagagaaaactct

SEQ ID NO: 583175 - DNA, 202 bp, Homo sapiens
  misc_feature (56)..(57): n is a, c, g, or t
  misc_feature (179)..(180): n is a, c, g, or t
  misc_feature (186)..(190): n is a, c, g, or t
tacctacctatccatccatcatctatttatcatctatgtatctcatctattatctnnctctctgtatctctaaattatctatctaatctatctaatgtcagtcaatggatctgtatctattgtctagttattaatcatctaatatgcttattatgtcatcaaatctatttatctattanntatatnnnnnacggtaggtatg

SEQ ID NO: 583176 - DNA, 152 bp, Homo sapiens
agctagcagaacaggagctcagctggtcacacacagcaacgaatacagacttgataagtcagagaagttaccaaacagtggtaaccataacatgtaccacatgaactatggggagggaggagatctgattacagagtaccacatatatacta

SEQ ID NO: 583177 - DNA, 502 bp, Homo sapiens
gtaaggttacacgtcccggccgtcgtttgcggcctacactgtctgccgtcgcggtcgcacggtatactataggcgtggggaagatagcggcaggcaccgcagtggagcggctccgagatccccggggggctcgcaggcgcgcatccctcctgactgggacgtcgcctccgcagacccctcggaggctgaagcgacgccggaggcaggcaaagaaacaagtgaagaaagcaaatagagagaacccggacgttaaggggccattcccaagagtcgagagatcaatgcctggacacgggttaggggtccagaccggtagcctcaagaagacgcccaagggttgggtttggagcacaagctgaacggtcgggaaagcctgaaggcgacttcttatgagttcaaggcggaagaacagagtctcggcgggaaactcaggtggaccttccgggaccatatcctgtaccaggcttttctgctgaagcaccactggtgtgacggaagccac

SEQ ID NO: 583178 - DNA, 431 bp, Homo sapiens
  misc_feature (407)..(407): n is a, c, g, or t
  misc_feature (431)..(431): n is a, c, g, or t
ttgacttcctctcttcctatttgaatactctttatttccttctcttacctgattatcctggctagaatttccaatactatgttgaataggagtggtgagagaggacacccttgtcttgtgccagttttcaagggaaatgcttccagtttttgcccattcactatgatattgactgcaggtatgtcatatacggctcttaatattttgaggtatgttccttcaatacctagtttattgagagtttgtaatatgaagggatgttgaattttattgaaggcctttttttgcatttccaaatagatttttaaattcttggtttaattctaattattattctttttttttagattcaggatgtacatgtccaggttcgatatgtgggtatactgtatgacattaaggtacgngcttcttgatcctgctgctcatgn

SEQ ID NO: 583179 - DNA, 117 bp, Homo sapiens
gaccttagaggatcccggcttaggaggtatacagcaatcgcacagcaggagcttgtcatcctcatcccctcgagtaacacatccgacagacatatgactcaataaactgggcattgc

SEQ ID NO: 583180 - DNA, 169 bp, Homo sapiens
catgcatgcatcgtgcttgattgaagtaatgggggctgtctgtgaactctgcagcagtacagcccaggtaatttgctgagcctagagggtgtcagggtcagtccaagtgaaagtgaagagaggctgggacgaggggtgcaggggaatagtgaaaaaagcatctttaaga

SEQ ID NO: 583181 - DNA, 369 bp, Homo sapiens
  misc_feature (119)..(119): n is a, c, g, or t
gattttaagtagagacagggtttcaccgtgttagccaggatggttcgatctcctgacctcatgatctggccgcctcagtctcccaaagtgctgagattacaggcgtgcagcgtgcctgntaatttttgtatttttagtagagacggggtttcaccatgttggccaggctggtctcgaacccctgacctcaagcaatccacccaccttggcctcccaaagtgctgagattacaggtgtgagccaccgcactttgggaggtcgaggtggtagtatctcttaaacccaggagttcaaaataagcctgatcaacatagcaagactctgtctttacaaaagaaaaataaaaaattcagctgggtgtggtggtgc

SEQ ID NO: 583182 - DNA, 102 bp, Homo sapiens
ctgatcatagtgacgtcttgtcgtacgctctggatcatcagggtcagctctgtgtacgaaggggaaatgtaggtgaaggggcctttaggcaggctcttggcc

SEQ ID NO: 583183 - DNA, 160 bp, Homo sapiens
  misc_feature (121)..(121): n is a, c, g, or t
tttagtttacttctgttccaccttttattgaaatattagttgttaggctgaaagcctccagttaagaacttgctgagtttttttgttcagcaacttgacatttactatgcgcattatatanctcaattatgtctgttttttatgctaagtaggaaaacca

SEQ ID NO: 583184 - DNA, 278 bp, Homo sapiens
  misc_feature (22)..(22): n is a, c, g, or t
tagagatcctgttgctaggtgnagtgggtgggggatctcggctcatccaactttcactcccgggtcatgcattctctgctcagctgtgaatagctgtgatacagggctgcatatgccgactgatttttctatttttagtagagagcttcctgatagctgaacatgcagaggctgctgggaagggcatagaatctctgcagtccttctcacataccttatcctatgtatctcttcatctgtatcctttgtaatagccttcataataaaccggtaaacat

SEQ ID NO: 583185 - DNA, 209 bp, Homo sapiens
cgtccacgtatgatcccctgcacagccgatctgtccatcctccgcggagggggccagatcatccccacagcacggcgctgcctctaccgccagtgtgctgaccgcccagccacgcctcatgtgagcccatctaccttgtaggagatccagtgtccagagcaggctagatcagtggcatctacggagatatcgaacaggaaagcggggcc

SEQ ID NO: 583186 - DNA, 189 bp, Homo sapiens
cgagttcccatcatagaggccacggagacggtgacagggttcactggtcccaggggtcgaaatagtagcctattgtagtgaggactcaggtccactctcgcacaaaaatatacggccgtgtcttcagatgtgagacccctcaactccatgtaatttgtgcgcgttgactcgtccgtggcctctactaat

SEQ ID NO: 583187 - DNA, 1329 bp, Homo sapiens
acgcggcagcgcctctgtctcgctttttcttatttttcccccctttcccctttcttatattttatattttcttattcttttctcaccctcccccccttacaaaatttccccatacggaaggcgcttatcccgcgggacaggggcagaagcgggtctcacccaacggaggaagataaaacgggaacaacgaaaaacaagaagagaaaaagagaagaaacagaagagaaaaagagaggaggagaaaagagaagaaaaagaagagaaaaagaaccagaagacccatacaaagcagagcaacacacgcgagaacaaggagaaacgcacacaaaagcgaaagacagaaagaaacaagaaagagaaacagcggagcaagaaaaacaccagcaaaacaaagaaaacagaccacgaaaaaacaaacaagacaaaaccacaacacgacaacaaaacagaaacagaaagagaaaaaaaaagacaacacagaaaaagaacaacagacaaaacaagaaaacaaaaaaaagaaaaaacgaagaaagagacaaacaaagagaaacacacagcaagagaaaaacagagcagaaaaacaacaaagagaaaaaaagaaaaaagaaaaaaaacacaagcaaaaaaaaagagaaagaactacgacagaaaacacacaaagaaacaaaaaacacagaaacaagaaggacaagaacaacaaaagaaacaaaaagaaaaaaggagacaaaaagcaaacaaaagaacgaaaaacagcagagaaacgccaaacaaaaagagacaagaaacaaagaaaaaagaaagcaagaaaaagaacgacaaagagaaaagaggaaaaaaaaaaagaaaaaaacaaaaagaaagagagaagaaacagaagcagaacaacacacaccaaaggcggacaaagacagcaagacaaaacaaagcagagaacaaacaaagacagagcaacaaacaagagtagagaaagaacagacagaacaaaaaaacaaaaaaaaagaaacaagaagaaaaaaaagaaaaaaacaagaacaaagaaaagaaaaagaaagaagaagaaaacaacaaggaacaaaaaaaaaaaaaacaaaaaaagaaaacaaaaaaaaaacaaagacaaaagaacaagagaaagaagagagaaaaaaaaaaaaaaaaagaaaacgaaagaaaaagagagaaaaagaaggcgcgtgaaacaagaaggaagcaagagagtcaactagaacagaaaagaaaaaaaagaaacaacaccgcacagcatcagcaaaagagaacgacacgagacaaatagcgaagtaagactcgtgcgccgcgctgggtagcaaa

SEQ ID NO: 583188 - DNA, 525 bp, Homo sapiens
ttctgaagcttcacctattttgtttacatttacaaaagccgggctcgggggcgggataatacaccaatagcctctctccttgtacacttgatatagggatccacaaatgaaaacccttcacgctggtttaacgaggaatttggggcttatgagagatattttcctaagagcgaaaactcttctaaggaccacaggatcagaactactctatgcgctcacccatgggccccttgagctgttttccagtcccctaagggtgagacccaatgtcctctatccccggcctatatcgaaaaagcgcactggtgtatctgccatatgcggacctggccctgggtcaaaacgggcgaaaaagccttcatgcgttaacccggcttttacccagacccgttctgctagccccataccctctaaaacctttgaattattggacctcgcttgtgcccgcgcaggtcatcttatcctgaacgagtcctataacctgaacttcctttcaccaaggttggaaggagggggccgggtaac

SEQ ID NO: 583189 - DNA, 191 bp, Homo sapiens
gatcagctgttactagctatgatcatgtcatgctcatcctcacgctctaagtgagtatagtgaaatccggtcttcaaaatacgtcaatcgatctaattaaggaacaaagttaaaccgtacatcaggatctctcacacccttccaatattgccatctaccaccacttagctcaacccattctcccatctctt

SEQ ID NO: 583190 - DNA, 830 bp, Homo sapiens
  misc_feature (830)..(830): n is a, c, g, or t
gctcatgactatccatcgacgtgagtgaaggctactcgtcttcaccagctacgggacgaagacgggaaaatcgtgcgcgaatctcggagaaacgctgtgctacgtcgccctggacttcaagcacgcaggatggccgccgacgccctcctcctcttctactgggaagcaacgagccttatgcaagactgccgcggagtaggtcgctagagctcagtctactgcgagtatgggcgaatggagcggttccggtgtcccggtaggtcgtcggttccaagcactatccttcctgggtatggaatctggcggaatccacgaaagccaacttcaagtccatcaagatgtgtgacgatggcatcgatgccgcgaagagatcgctgtacagtcgaacaacagtgtgctgtcgggcggaaccactcatgtagtccgggtattgccgacaggatgcagaaggagatcaccggcctggcgcccaggaccatgaaaggatcacatgatcatcgctacccccagagcgcaaagtactctggtgtggatcggtggctccatcctgagcctcactgtccaacttccagcagatgtggattagcagagcaggagtatgagagtcgggtccactccatcgtccactcggtaaatgctttctgaaacggactcaggcagatagcgtgagcgattgcggcatgggttaatggagaatagaatatttggcccctggaaaatggcaaaactcatgttagctcacgaaatggaataagccttcgaaaagaaattggccttgaagcttgtatctgatatcagcgctggatgtgagaaatgttgctgatttgacn

SEQ ID NO: 583191 - DNA, 827 bp, Homo sapiens
gagccgtggaccagactgacacggctggtgctggtgaatgccctctacttcagcggccagatggaagactcccttccccgactccagcatccaccgccgcctcttccacaaatcagacggcagaactgtctctgtgcccatgatggctcagaccaacaagttcaactatactgagttcaccacgcccgatggccattactacgagatcctggaactgccctacccgacggggtacacccctcagcggtgttcgattgctgccccttatgagaaagaggtgcctctctctgccctcaccaacattctgagtgcccagctcatcagccactggaaaggcaacgatgaccaggctgtcccgcctcctgggttctggccaagttctccctggagactgaagtcgatctcaggaagcccctagagaacctgggaatgaccgacatgttcaggactagtttcagggcctgacttcacagagtctttcataccaagtagtcctctccacgtcggcgcaggctgctgcagaaacgtgaagatcgaggtgaacgagagtggcacggtggctcctcattcacagactgtcatagatctcagccgcatgggcccgaggagatcatcatggacagacccttcctctttgtggtcgcgggacaaacccccacaggaacagttctttttcatgggccacggtgatgggaacccctgaacctgggggaaaagacggccttgcatctggggacaaagacttggggatgcctcgggacacaaacacacactccggagaacaacaatttgggggggaacggcccccctgcggaggagacaaaatc

SEQ ID NO: 583192 - DNA, 323 bp, Homo sapiens
  misc_feature (63)..(63): n is a, c, g, or t
  misc_feature (93)..(93): n is a, c, g, or t
  misc_feature (102)..(102): n is a, c, g, or t
  misc_feature (119)..(120): n is a, c, g, or t
  misc_feature (152)..(152): n is a, c, g, or t
  misc_feature (154)..(154): n is a, c, g, or t
  misc_feature (229)..(229): n is a, c, g, or t
gtcctgttttattggaccccccctcccagccccaggggtgcctgtgggggtccatttgggtangtttgggcccccactttcaccagtttttgnggccttccnccgggcttgaaccacannggaggagttccgttaagacctccccacccccntngggggtgggggcgggtgtccgtccggaaataaaggaatagcccaaggcccgggctggggtttatttaaactgttntgtgtgggtttggggagggaaagccccttaatattattggggttggttggggtggggcaggatttcacccataaagtgccagtttgcttagtta

SEQ ID NO: 583193 - DNA, 713 bp, Homo sapiens
taaaaaataaccaacctttattttataatagtcttacaggaagcaaaatttcatttaatacaactgtgaggctgctataattctaatcgggcatcgtacctatccttacgggtcaaaggcaacgggaaaaatttgtccaattatagttgaactagtgtccctaatcggggtctcgggtggccagctttaaatgggttataactttctggtgaaccgaacagaaccaccaccgagagccccctccccctctccccaggtatcctgcaacacctgtgtgatatctataaagactgatctgaaagagtatagcgcctgcgtcaaataacaaacatggtaatgtttatactatcgtgtaggacaaaagaggttatacctacaaaggcaagagttctacccaaggtgttcaagggagccagcggagatctcggccgggcttaacgtctcacctcggtgtctcgtaggcaccctcgggattcctcctccataggggacgagacccatggggctagaaagtttcacccagtgtctatgtctcgaaaatccaatgccagggagatcttggaattctcgcgggaaatcccactgtttgaggtcgatctcattcacctcaacaggtctcttcagagctgctgtgcccaaggtgggtgcttccaggtggttatcctatgagcgccttaaagctccgggaacaacgatcagactccgctataggg

SEQ ID NO: 583194 - DNA, 1027 bp, Homo sapiens
  misc_feature (610)..(610): n is a, c, g, or t
tcaaattttttatatttttttaaggaaaaaaatttaaaaaagggtttttttcccttttaaataaaaaaaaaaagacaaatacccccatattctttctgttaaaagagaggagggggagagaggggaggcccatttagtgaagaagagaataggtcccatcatataccccaattttaagttagaatgggtggttctctacatttactgccacacagagagatagtaacatgagcaggggtgaaagagctctcccttactatcccacgagtatgctgcgtgttcaacaaataaaagcagtcagcacgacgtatgtcaggcggccttcctacattacgccgtcagcgagggaggaacaaatagatcacgtgcggcagatatatctcatcggagagggagagcgtgcggagaattgtccgatcatctgtctgtttcaactacaatagttaattaggggcgcaaccaccctctctccggggcgcgagatatatcgagcaagggttgattctcccccccaatggcttctggggtttttttgatcaacagatcctcctcggtgataatatgaagggagaccgacgaaccatttggtataatatagatagtagagcgnggaaagcccacgttggaggagatagtaacaaacaccccgcttgggcgcgcaagaaaaatcttgcgtggacagagaaatataagcaccattggggtaggagcgagccccagaagcgagaagagctcctgtcagtaagaaggaccaccacgcatcattagtggcgggagaagtggtccacccagggcctgtgagagcagcacgacgacgagaggatgtgggggctcccccaaaaattaagtgcgagaacagcgaacacaccactatctgtgggcgcggccgaccaaaaaacaaacaccggcctaaatgacagtaggcaagtgtcgtcactaacggggaccacccaagaggtggtaactaccaagtattcagccacaggggagaaaaaaatcggctaggaagcaccgaaggagactatct

SEQ ID NO: 583195 - DNA, 377 bp, Homo sapiens
tcgaatcaaaggctagccaggttataggagtcaacaggtgcaagagaagttaactgaaggatctacctggcaaccaaaggtagcaccaagcgagcgcttggaatgctgcaacaatgaatggaatccattatatcacacaatacgcaccccctgtaatggcctatcctgctacaacaccaacaggcatgataggatatggaaatcctccacaaatgggaagtgtacctgtcatgacgcaaccaaccataatatacagacagcctgtcatgagaccaccaaacccctttggccctgtatcaggagcacagatacagtttatgtaacttgatggaagacaatggaattactccaaaaagacaagtgcacaagcagcaaaa

SEQ ID NO: 583196 - DNA, 416 bp, Homo sapiens
gcaaaaacttgcattctgggacgatgctattctaagaaatgaaaatgcttcattccgaaaaataatgcaggaagaaaacaatcaaattttactattcaacatctgtgtacagtatcttatagaatgatgatgtgagacagggataatgttgaatttctttccctcataatgttgtaacctaagcccagacctactagaatgtacatacattcatgcactcattaattcattacacaaatatactttagtgccaccaaaaattaatataagagcaagggctctgatcttaagaagaatacaacccaaggggaaagagaggcctcatgcaagtatacacaacagttcagatcatcaaatatactctgaagaaaataaagcaagattatgtgacagagtactgaggagtcaaagaggat

SEQ ID NO: 583197 - DNA, 751 bp, Homo sapiens
aaggctggtaccggtctggagggtgtaaggatcagttgacagcacaaacaaagtcccggagatccgtgatgtaacaatggattgagcgaagtcggtgcccactcccacatcggggactgtggctggacgatgccttgcgagacctcggcagagcttcgcaagtgcatggtgggtcagctggcggtacgagcgggcggcgtggcgtggtgctggagatgatccagggaacgggaacgattgccggtcgggcagtccttatttgctggccagctcgggcacggtgaagacggccatcgccatgggcatggcgcaggccctgggccctgactacgccattcacagccatcagcctggcagatgaaatcttctccctgtgagatgagcaacgaccgaggtcgctgactgcaggccttccggcggtccatcggcgttcgcatcaaggaggacgacggagatcatcgaaggggaggtggtggagatccagattgatcgagcagcaagagggacgggctccaatggtgggctaatactgacgcctcattgagcacagagatggagaccagtctacgatctgggcaccgatgatgattgagtccctgaccaaggtcctgggtccaggccggggacgtgatcaccatctgacaaggctgacggtgcaagatctccaagctgggccgttccttcacactgcgcccgcagattacgactgctagtgggactcccaggaccaagttcgatgcaagttggccag

SEQ ID NO: 583198 - DNA, 817 bp, Homo sapiens
accgcggcggacatggcagctcagatcaccaatgcgcaagtgggaggcggcccatgcggcgggagcagccagagagcctacctggagggccggtgcgtggagtggctccgtcagatacctggagaacgggaaggagacgctgcagcgcacggacccccccaagagtacatatgacccaccagcccatctctgaccatgaggccaccctgaggtgctgtgccctgggcttctaccctgcggatgatcacactgacctggcatgcgggattggggagagaccacgacccatggacacggagctctgtgtgacgaccagtgcctgcaggggatggaaccttccagaacgtgggcggctgtggtggtgccttctggagaggatgcagagatacagctgtccatgtgcaagcatgatgcggtctgcgccaagtcccctgcaccctgagatgggaggctgtctattcccaggcctcaccatccccattcgtggtgcagttcattgctggcctggttctccttggtaagctgtgaatcactggagtctgtggtcgctgccgtgatgtggaggaggaagagctcaggtggagaacggggtgaaagatagaaaaggagggagttacactcaggctgcgaagacagttgacagtgcccaggcctctgatgtgtctcttacaagcttgtaaagtgtgagacagtgtcttgtgttgggacttgagaggcaagagttggtccctgcccttccctttgtgaccttgagaaccctgaatttgtttctgccaagggcccctgcatgtgtctggttccggtggcctatggccgg

SEQ ID NO: 583199 - DNA, 1046 bp, Homo sapiens
cacatacaatggaagaagaggaggatgatgactggggagaagatacaactgaggaagctcaaaggcgtcgaatggatgaaatcagtgaccatgcaaaagttctgacactcagtgatgatttggaaagaacaattgaggagagggtcaatatcctctttgattttgttaagaaaaagaaagaagagggtgttattgattcatctgacaaagaaatcgttgctgaagcagaaagactggatgtaaaagccatgggccctcttgttctaactgaagttctttttcaatgagaagattagagaacagattaggaaatggcgcctgtatttcttaatctggttctctaactcttctcattaagaaatacaggcgccatttcctacgatgtttgtcacaacaacaaaaaagcccaacggtaccttcttcatggttaggagtgtgtggtagcaatgcatcaagctcagcttatctccaagattccacatatcttgaaggagatgtacgatgcagaccttctagaagaagaggtcatcatcagcctggatcggaaaaggcctctaagaaatatgtctccaaagaactgccaaagagatcgcgtcaagccagaaccagtatataaaatggagaaggaggcagaggaaagcactccaccggcgccgcacgcaacgaacgacggcacagatgaaaaccatagaacgtggcgaataccaacggcagacagagagccgcaaccgccgccactggcaacgcagacagcacaggcaagacgacaacgaccttgaagcaaagaaaaagagccacccaggcaacctaccgcagcagacgaaactccaccaaaatacccccaactaagcaggcagccagggcacaccgaacgccgcccacaagcgcaaaatgggccacaacacacgcgaacacgcgcgcgtaacaaaccaaaaggagcaacagacaaggaacaaacagcacggacaacacaaagcaggacacaccccaccgcagcagcacacagaggagcaggacaacgcgccgccgcgaaccacgccggcaca

SEQ ID NO: 583200 - DNA, 323 bp, Homo sapiens
gaggatccccatcgggtgaacaatcacttataagttagagtagtttgagtagccagtggaatagtaagtgcgaacgttgttctgaaactatgcccctgtgcaattttctgcaatgaaaaggagcagtaggtcattctcttataatgctcagcctccgacatagaacactggaggcaagaaattaataatttagtaacagtgaagctccagctggtcattacgtcacttcatgtagctatcagagcgcttgatctgcatggtggacctaatgctgctgctcagcactcgtatagacgcacgagaggtagaaccaagttagaggc

SEQ ID NO: 583201 - DNA, 187 bp, Homo sapiens
aggggtaataccatgcagtaggacaatgcatctactagacaatctcttctatatcagaggaactaagtcttctaggacctttactcccttcactctaccatgagggggttaccaacctcctttaaatgtgtatgaatcaagacctaaatcagcaccctccaattcaacatcaataataattataagt

SEQ ID NO: 583202 - DNA, 993 bp, Homo sapiens
  misc_feature (565)..(565): n is a, c, g, or t
taaccatactgcaactactattaggacgaacctgatctcttaattctagatatccattaatcatttttaattgcgctacaactaacctcctcgtgactccatgcctcacgtacatttactaccgaacactacactcaaacatatcttataacacctagacctatggcctatccctcttatgagcagcgcgcacagctgattctaggctttcagcttcctaagcatttaataaatgccctagcccactttcttaccactaaggtcacacctacaccccttatcccctatactagattagtcatcgaaatccatcagcctactcattacaacctaatagccctggaccagtaacgctcataaccgcgtaacgattactgcattgcctatcatactcatgtcactcttaattggaagcgccagacctagacaatgatctaacgcattcaaccttgccctctaccatcttatcatctttcacaacttctatattctcacgtgagctgatccatagtaaatcggctcgtcgaccttaatccaagactctacgttatatcacgacttactnatgtaatgcctctaaccttgcacggacagagcatcagaaacccaccaaagctggttttcaagccaactttcctttgggcctccatggacttttggaaaaagtcttttagaaacccaattcgacgtgtgaggggcaggagggtccccaggagggtgttagtgggccacaactggtgggaacaactacgtctggtagaaccccaaaaggagaaaaatccgacgcgtcagatagacacaatagcggggcaggaggatatcacacacaagcgacgaatagaaaaaagaggggcccccgggagagagaacccagggggcgtttcgcaaacaagcatctgcgaaagttgcgacgtcaagggaggcacacaagcgcggggggataaacaccacaggagtctcaaacacaagaccccgagaatgaaaatagcgcaa

SEQ ID NO: 583203 - DNA, 239 bp, Homo sapiens
tcgtcttttgatagggaaaaaaaatgaaatgagaaataaggaggaaagactactctgacaagagttaagctagaaagagaatgaactagagccaagaacatcctataaaacttctatagagagatgacgcatggcagtaggaatgaatatgaaaggactgataggacctagtgacaaactgcatgttagaagttacgataagtggatggggattcctaaggcatcctatcaaaagacga

SEQ ID NO: 583204 - DNA, 333 bp, Homo sapiens
ggatgttttattatcaaacatgaaaacattaatctccttctgcatctccatcagagcttttgggtgaccaagtgcactgtcaatgggtgtagtattttgaaaggaatgtttttttctgagcagtagttctcaacagagggcttaaaatattcagtaaaccatgctgtgaacaggtgcgctgtcatccaagctttgttgttccatttctagagcacaggcagagtagatttagcataattctcaagggctctaggattgaagcactggcttcaacttagccaccagtggccaggtgcagtggctcaggcctgcaattccagcactttgggaggc

SEQ ID NO: 583205 - DNA, 612 bp, Homo sapiens
atgcgccagcgctagcattctaatatgcatgcgcatcaacagggtagcgtcaaccctctgcacagattatatttcaaagtttgtttgtgaatgactgcggtttataaattaaagtgagatcaaagacctctacatcttgatagttgcaacgcgtcaaaaacacgataacaaggtaagcttgcatagattgtaactcagaattattgtggcgcacatgctaaaaaaattagcaattcaggtgttataattatagaggaaattgagcacagtttgtaatgtctattgttgtgtaagggtgacaaataacctgtagaaccagatgatatcacagtttttggtctttaatacagaatatatgtagtaactgtaagcagttgtgtatgtacagatgtccagcgcatatggagctgtgtatggtagaatgaagtgtgaggtcatctaacagtacctatattgaagttagtactagggtcttgatgtcttagtaccagtaagtgtcatgagctgtgaatctctaacatccctagcctagagatgataccggtctttgtgttcgaactcggttgtcatgccacccgcttgtacaaggcttgtagtgcaaatgaatcttgg

SEQ ID NO: 583206 - DNA, 325 bp, Homo sapiens
tgcgctagagtaggctgtggcccatgccgcaagatgctgcgacggacaaggctcaagagagacccttgatgtgcggctggggtcatggaggagtgagatgtgtgagaaagcgctctgcctggccgtcagatgggaaatatcacacagcagacattcttatcttttccacagggtattaagttgagcaggaagactgacatggcatcaacagaatgaagatcttagaaacgctacttagtacacatttagaagatgaccacagaagatgactgtgggtccagaacataatgcactgcatttgaagaaaaccacaaggcacgccagc

SEQ ID NO: 583207 - DNA, 3083 bp, Homo sapiens
  misc_feature (20)..(20): n is a, c, g, or t
  misc_feature (30)..(30): n is a, c, g, or t
aaagcaggctggtactgccntggggtgcantggccggctccagctggggccggagaggctgagtggttggtacgctgctcgctggcctcccagtcttcccagcaaccggtgacactgcccgcgccagactgaccactagccgacgcgggcgagagggacaggagcgtgacctccccatcccgaggggccggacgctcgggcgcctccccgctccccccactcggaggccgcgcgcgccgttagccccttcctcgctcccccgccccagtcccgcagtccgggaggcgggggtcggcagccggctgagtgggaaccgcgcggtgtctgaggaggcagtcggcgaccggtttccacttcaagcgtgacccttttgcctgtgggatgagctccagcatggggtgaggtacagaagagagacttgaagagcgtgccttgggactcaagcgccaaacctgtaccctagcgagtgtcctactccgcatccgtaatggaaggaaatgcacatcttactccagaggcacaagaggaggacatcccatgcggctactcctgcccagcgtggtggggcagcagaagctccagagcccagacttgcaggctcacggtgcagggtgaacctggccacagctcaccctggaacagccacaatgtctgccccttagagaagaaccctgaaatcagaccagtttttgcggcctccccctttcctctctgttacagtgccctttccaggccttaagagaagtaaaacttagctgcagcgtcaggaggtggaccccagagtgtgagtggcacgcttccctgtgaacccgtcctcaccatgtttgccacatctggggcagtggcagcggggaagccttactcgtgcagcgaatgtggcaagagcttctgctacagctcagtgctgctgcgacatgaacgagctcacggcggtgacggccgcttccgttgcctagaatgcggtgagcgctgtgcacgggctgctgacctccgagcgcacaggcgcacgcatgctggccagaccctctacatctgcagtgagtgcggacaaagcttccgccacagcggccgtcttgacctacacttgggcgcacaccggcagcgatgccgcacttgcccctgccgcacatgcggccggcgcttcccgcacctcccggcgctgctgctacaccggcgccgccagcatctgccagagcggccccgccgctgcccgctgtgcgcccgcaccttccggcagagcgcgctgctcttccaccaggcgcgggcgcaccccttggggacaacctctgaccctgctgccccaccccaccgctgcgcgcagtgcccgcgagccttccgaagcggcgccgggctgcggagtcacgcgcgcatccacgtgtcccggagccccacgcgaccccgtgtctcagacgcccaccagtgtggcgtgtgcggcaagtgctttggcaagagctctacgctgacgcgacacctgcagacgcactcgggggagaaacccttcaagtgcccggagtgcggcaagggcttcctggagagcgccacgctggtgcgccaccagcgcacacacacgggcgagaagccgtacgcatgtggcgactgtggacgctgcttcagcgagagttccacgctgctgcgccatcggcgcagccatcagggcgagcggccacatgcgtgcgccacttgcggcaagggtttcgggcagcgctccgacctggtggtgcaccagcgcatccacacgggcgagaagcccttcgcgtgccccgagtgcggccgccgcttcagcgaccgctcggacctcaccaagcaccggcgcacgcacacgggcgagaagccctaccgctgcgaactgtgcggcaagcggttcacgtgcgtgtccaatctcaacgtgcatcggcgcaaccatgccggccacaagccacacaaatgccccgagtgcagcaaggccttcagcgtcgcctccaagcttgcactgcaccgcaagacgcacctgggcgaacggccagcggagtgcgcagagtgcggcaagtgcttcagccacagccgctcgctgtcacagcatcagcgggcccacacgcgcgcccgcaccgctgccgccgttgccatccagtccgcagtgggcactgccctcgtctttgaggggccggctgaacaggaaaagccagggttctctgtgtcctagttgagggaggcttgctgaggcttctctaaaggtggttgggcaagcacctatatagtatcacggggacagttgaggcaactcgtagatggagatttgggaaaagacgatgtggcctcctacctttccagtttctgttggcagcccttcacgtagcctcctgcctcgcctctacacctactaccctgtcggcccttttgccatgctgtcctcgtataactcggattctctcctcaggtgtaggtgcagggagtcagggaacccttagactcccctgtgtgcaagagcccaggtgttggtgtgtccctttaatgctactgtgctctctggtgtttctgattttcctgcctttattctgtcttctcttgtcctatctcattccagcccacatcttctcctttcctgattacttttgttgtcctgcctcttcaggtaatggtcacagatttggctgtaggcacgttaccagccctgtggcttcttgactcttggttccctgttaactctgtttctgagaaatgtgggtatggaggtgggtgggaaagctcacttccatgaaggatgtctccatgctaggagctgcctgcaccctggcagaggtggccagtcacgtgaaggtgggcagggcccttagcatggccacacatgtccccagggcagatcaaggggcctctcagaaccatgttccccagccaggtgaggaccattttcactgggacccaggccaaaaccatgtgggtgcacaaagccaggcactgccaagtggaacatgaggttatttccaaatcatgggagccaccagcagggagagggcaggatggaaaatcccctggagccggtcaactttttgctcatggctagtgaaataaagttgtttgagtactagatgccaagtgccgcctttatc

SEQ ID NO: 583208 - DNA, 1367 bp, Homo sapiens
  misc_feature (20)..(20): n is a, c, g, or t
  misc_feature (30)..(30): n is a, c, g, or t
  misc_feature (867)..(867): n is a, c, g, or t
aaagcaggctggtactgccntggggtgcantggccggctccagctggggccggagaggctgagtggttggtacgctgctcgctggcctcccagtcttcccagcaaccggtgacactgcccgcgccagactgaccactagccgacgcgggcgagagggacaggagcgtgacctccccatcccgaggggccggacgctcgggcgcctccccgctccccccactcggaggccgcgcgcgccgttagccccttcctcgctcccccgccccagtcccgcagtccgggaggcgggggtcggcagccggctgagtgggaaccgcgcggtgtctgaggaggcagtcggcgaccggtttccacttcaagcgtgacccttttgcctgtgggatgagctccagcatggggtgaggtacagaagagagacttgaagagcgtgccttgggactcaagcgccaaacctgtaccctagcgagtgtcctactccgcatccgtaatggaaggaaatgcacatcttactccagaggcacaagaggaggacatcccatgcggctactcctgcccagcgtggtggggcagcagaagctccagagcccagacttgcagattcatcatattcaaaccttcacaaacaacttggatatcctgacaattattatagaatggatgccccttgattctccccagcctttcctgaaaatgggaaaagtgttcttggataatgccaccaacttttaataatgttttttgtgaattatctatgctcccgtttttacccctttactgggtcctgagttgctttctcaactttggggctgtatactggcatggggtagtgtgtttatcaagtgctgtcaaaagccaaggaacaatatnttggggtttctcaaataccttcccttggccaggccccagccccttcagtaacttcagggtctgagccctttgcctaggctgttgctgctggacctgtttgtgcttcatcacattacccgctttgttcttccagcccaagtctggctgggttcatgtcagtgactcaggaaagctgggtttcggaggaaggcgtggtatagtctaaacgcaggcgacttctcactgccccatcctgccttggtcatttcctaatgcattccccagacaaggatccccatctaaggccagcgaacaggcttggggttcctttccctcagagcagtgttgatgggttccagggctaaatggcgaggctcccttttgagtccattcctgtttgtgctcccaggcgacttgtttggttctctcctgagctttccaagtgggtcatgagaccccttcctttttccgggatgcccatggtttgggctgctggggaaagggaatctcggggatggtac

SEQ ID NO: 583209 - DNA, 151 bp, Homo sapiens
ttgccgcgtcaactgggatagcataaacaaggaccagagagcatcatcgcatccgtgacctccagacaagggagccaccagattggatgggagcccacactcctcttaaaacacactctgcgatgctaagtctacgccgccgaataaccag

SEQ ID NO: 583210 - DNA, 200 bp, Homo sapiens
gaactgggtgttggtgctgggaccctgtagatagtgtgagtgtgagaacggggcgtcggtgcggggaccctctagacacgtgtgagtgtgagaactgggcgtcggtgctgggcccctgtggacactgtgagtgtgagaattgggcgtgggtgcgtgggaccctgtagacactgtgagtgtgagaccttgggcgtcggtgc

SEQ ID NO: 583211 - DNA, 1467 bp, Homo sapiens
  misc_feature (834)..(834): n is a, c, g, or t
  misc_feature (1008)..(1008): n is a, c, g, or t
tcattcctgtgggaagattctccccccctgccatattagggctccctttgttgtgctgttgtgtatgagccgatccgtggtggtgccgccccccaccggaggggccgtgttgttccaccccaacaatgtctccctccatgatttgctcgcctgttcccgcccccaccagtgctcttcttttgggggggggtgtatgtattttataagtcggggggctccccccctcttccccccgtggtgggagactgctctcgtgaagctttgttgtgctgttgtgcctcgtggtccacaccggggaggagggggacgtccttcgcgggtgtgtttttgtccccccccaggcgcccccacgatgagcacgccctgcggcgttttcatctcggagaaaataagtggtgaagtaatcaccaggggcgcgtctcattctgatgtagaggtggacgactaccctccaccaccactgggggcacaaccacaacagtgtctctgtataagtagggccaccgcaccacagcccttgttggtggccctcataagaagatctcgtcggggtgctcaccagctggtaataatatatggcggcggcccacaggtttcgtccctccgtcccctctcctcctctcgtctctcttctggggcgcccctcctcctgggggcgcacgcctcttttgggtgattatagttaatatatcgccaccccccacccgcgcgggccctctgggttataatagagctgcccccctctcgctctctcgtggggaccacactctctcacagaggatttctcaccccaccgctcgtgtttatgcctcgagttctcacgcgagatatttntagtagaggcatctctctctcgtctctcggggctgctcgggggggagagagcggggagaaattgtggcgcacacgcgccccaagccccacagtgtccttcttcccgcgtgtctctgcccctcctttggcgtcacacacttcttagagaggttgtcttggagacacacaggtttntgggggatatattggtgtcgcctcgtgtgagcacataacaccccacaccgtctgccacgccctgcgggagacacactccacactcgtgttctctctctctcttctcacacgcctcaagaccctctcgcctgagagacccccgcgcgtgtgtgtgttgtgagagagttatgagagggtggggtgtggagagagagggtgttgccacacttgtgcgggagaatgtgggcccccgccacgacttgtaccctggaaactcgcttacaccacaggttgttcccctcttctgggggcttaaagaaacctgggaccccgaccccacataaaggcccctggtgcctggttggggtggggccctccaccagaagatcttagattaccgcatttccacttcccaaaaaaagtaggtttgttccactgagtttcccccatttcaaaaaaaaatgaccttcttaaacaaca

SEQ ID NO: 583212 - DNA, 1279 bp, Homo sapiens
  misc_feature (398)..(398): n is a, c, g, or t
  misc_feature (779)..(779): n is a, c, g, or t
catttgtatccaaacacataaggaccctgtatatgggggtatattaaccaaagttctgagctatttatgatgaactttcatctgctaagaagaaagtgacagctgaccattttgtttgtgtcctctcccgcatctgttgagcgacaaggggctatactgtactagcaactagacctaatctccagtaaggctggagactgacctgtggcccctgagagaagtcgtcagtgctgaggccaggtgaggagggcagccacattgtgctcttgactagagggcatgtgaggttctgtgcacatactacaaaggctgaccctgttcccagacagctgcccggagcaacctgtcagaagcaattcagggatatcatgtgagacaaataggataatagagcaganttggtctccgtaaaggagtttttctgctactccagattctcagattcctgtggctgagacagtgaggaaatgctgcagaatgttcataaacaatatgtttttcttgatcagattcatcatattcaaaccttcacaaacaacttggatatcctgacaattattatagaatggatgccccttgattctccccagcctttcctgaaaatgggaaaagtgttcttggataatgccaccaacttttaataatgttttttgtgaattatctatgctcccgtttttacccctttactgggtcctgagttgctttctcaactttggggctgtatactggcatggggtagtgtgtttatcaagtgctgtcaaaagccaaggaacaatatnttggggtttctcaaataccttcccttggccaggccccagccccttcagtaacttcagggtctgagccctttgcctaggctgttgctgctggacctgtttgtgcttcatcacattacccgctttgttcttccagcccaagtctggctgggttcatgtcagtgactcaggaaagctgggtttcggaggaaggcgtggtatagtctaaacgcaggcgacttctcactgccccatcctgccttggtcatttcctaatgcattccccagacaaggatccccatctaaggccagcgaacaggcttggggttcctttccctcagagcagtgttgatgggttccagggctaaatggcgaggctcccttttgagtccattcctgtttgtgctcccaggcgacttgtttggttctctcctgagctttccaagtgggtcatgagaccccttcctttttccgggatgcccatggtttgggctgctggggaaagggaatctcggggatggtac

SEQ ID NO: 583213 - DNA, 784 bp, Homo sapiens
gaaaacacaggctcgcagcgctggagcccggggccgcggagccgggccggggcagcgccgtctccgcctcggggccgcctgggggcgccactgctgagctgctacccacgtgctgtccgcgccatctcgacgggcgaccccagcaggccaatggaccccggccggagcggcatccctgggcgcccagaactaggccacacacaactttgggccgaagtttagcctggcgcctctccccgacccccacgcggcgcgccggggccgcggaccggaaggcggcccccggggatgcgccttacccggggtacccctggcgcgccctgcgctgctgctgctggctgccggctgcatcagcgaccgcatgactgggaaacgtggatgcagccgacacgaagcctggcggggatccagccggtgcgggctggccgggaacggggcagggatgacccggagggagagcacttgcaaggcgggcacaggaggaacgcggcgaacaggcaaatcaaggactttcgaagcctgggcggccgaagccccgggaccgggccgaacccattccggtcttcacttaaacccggcctgaacttaccaacgaaacgggcatgggtggcaaacgggaccttgaccacggggaccccttggacccccccttggcgggccgacggcattggagcagaaaacaggcggggccccaggcagacagagagatagcccagagaggccacataccgtggcagcaagcggtgagagcgccaacgctttggcccagggcgccgaaagcgca

SEQ ID NO: 583214 - DNA, 1441 bp, Homo sapiens
  misc_feature (255)..(255): n is a, c, g, or t
  misc_feature (807)..(807): n is a, c, g, or t
ggcgcggagccgcctcgtttgatgtgtgtgtcttccgggggggcacacactttggtggggcggcagacctcgttgagaagacgggagagaatttttgggggggaaaaaaacgagcgatgattggtggggccccctccctgaccgcgtggttcagcacgggtgtttctggtggttggagcagaagcaccccccctttttgtgcaatgggtgtgtagcgcctgttgcgtgttggcctcgttggggcgctgttgttgnatcacacgcccgtgggtggtagccccccctgggtttgcgggcgccccccccttgtttgttgcccaccaaatgagccggtgggtttcgcccgttccgggttgaaattaaagcacttcccggggggaagtgtcctctcgtccgccctccaagcggggtttttttttagaggctccccacacggggggaatattccaaggggggacaccaccccgcgtttgaggacgtctcccgcccccctgtgtggtgcgccacaaggaaagaccccccacgaggttgtctttggggttggtggctccccccgcgtgtgttaaaatgcgttagccattggtggccttctcttcttcggggggggttttccgtggaatgttgtttccccgggccccgcgtgtaaatgtgcctgggtgcctttccttcccttgtggtggccctcaaatgcgtccactgtggcccacggcccccaaacatatgtgtttgctcccctggtttgcccctgggagtgtaagaccttttttgggctttggtttccctggcgcgctctcttctcacggttanaatggggttcacacacgagattttgggcgctcgttaaaggacacacgcttatccccacgcccccctcggttggggctcttttctagaactctctttgggttttcccgtcgtgtaacactctctcgttgttctcggaggaaaaatgttgtggatatatgggaaggttgtggtgggagaaagcctcacctctccacatgaaaaggaatggtcctccaatggcataaggagagctgcccgtgcacaccctggcacagaaggtggggcccacagtcaccggtgaaaggtgtggcacagggccccttatggcacatggcgcaacacacacatgtccccacagggcaagaatcaaaggggcctttctaagaaaccacatgttccccacgccacaggtgagggagccacttttcaactgggagcccacggcccaaaccacatgtgggtgcaccacaagccacggcacctgccacaagtggaaacacatgaggttaatttccacaaatcactgggaagccacccacgccacgggaagaagggagagggcaggatggaaaatcccctggagccggtcaactttttgctcatggctagtgaaataaagttgtttgagtactagatgccaagtgccgcctttatc

SEQ ID NO: 583215 - DNA, 245 bp, Homo sapiens
gaatgagcaccgtggccatgccgcccccatgcctgataaaatggcgaatacggtcttttcttttttcggagcacgtttgaaccgcggcattcgaatgccccaatacatgttacgagcattacgattccgaaaataaaccctagcttcattactttttcacctcttgctccggaaacccttgtggagcggcgttcatgcccggccggcgggcgtacgcttttgttttcaccacgatttcaacgggt

SEQ ID NO: 583216 - DNA, 383 bp, Homo sapiens
gctcgaccaactcctcaaaaagaaaaccagcctaagggctggtgcggtggctcacgcctgtaatcccagcactttggaaggccgaggcaggtggatcacttgaggtcagtagttgggagacgagcctggccaacatggtgaaccccatttctgctgaaaatgcaaaaattagccaggcatggtggcacatgcccgtaatcccagctacttgggaggttgaggcaggagaattgcttgaatctgggaggcggagattgcagtgagctgagaccatgccatcacactccagcctgggtggcagagcgagactgtctcaagaaaaagagagagagagagagagagagagactgtctcaagaaaaagagagagagagaaaaaaaaaa

SEQ ID NO: 583217 - DNA, 130 bp, Homo sapiens
tcagacagcggacccttcttcatgatgcctttgaaacgggtagctcaggccatggactggaagcctccagacttcttcttcttcttgttcttgggcacgcaccaatctcccgggggtccggctgtcatga

SEQ ID NO: 583218 - DNA, 552 bp, Homo sapiens
  misc_feature (20)..(20): n is a, c, g, or t
  misc_feature (30)..(30): n is a, c, g, or t
aaagcaggctggtactgccntggggtgcantggccggctccagctggggccggagaggctgagtggttggtacgctgctcgctggcctcccagtcttcccagcaaccggtgacactgcccgcgccagactgaccactagccgacgcgggcgagagggacaggagcgtgacctccccatcccgaggggccggacgctcgggcgcctccccgctccccccactcggaggccgcgcgcgccgttagccccttcctcgctcccccgccccagtcccgcagtccgggaggcgggggtcggcagccggctgagtgggaaccgcgcggtgtctgaggaggcagtcggcgaccggtgaggggactgaagggcaggggagggcaagggtggctcggggcagcagtcctcagctgtggctagtcttctcccatctgcctcgggcgactggtgtctgcggcggtcgggagcgccgcccgggctgcgagtgacgcggggatactgcggggcgagcgattggccggacacgtccgcgcggcctgctcctcccaggccttcccctc

SEQ ID NO: 583219 - DNA, 480 bp, Homo sapiens
aggcacgttaccagccctgtggcttcttgactcttggttccctgttaactctgtttctgagaaatgtgggtatggaggtgggtgggaaagctcacttccatgaaggatgtctccatgctaggagctgcctgcaccctggcagaggtggcctcctacctttccagtttctgttggcagcccttcacgtagcctcctgcctcgcctctacacctactaccctgtcggcccttttgccatgctgtcctcgtataactcggattctctcctcaggtgtaggtgcagggagtcagggaacccttagactcccctgtgtgcacaaagccaggcactgccaagtggaacatgaggttatttccaaatcatgggagccaccagcagggagagggcaggatggaaaatcccctggagccggtcaactttttgctcatggctagtgaaataaagttgtttgagtactagatgccaagtgccgcctttatc

SEQ ID NO: 583220 - DNA, 230 bp, Homo sapiens
aggtatctagagatcccttgacgggtgctgattaggctcaacaggcattcgaggtgcctttgaaagccccaggccactgtggccaggtacacattggccaaggtcatcatgtccatccgcaccaagctgcagaacaagggagcatgtgattgagtgccctgcgcagggccaatgtccaggtttcctgtgccgccagaaagatccactatctcaatagacagtggtggctt

SEQ ID NO: 583221 - DNA, 915 bp, Homo sapiens
  misc_feature (415)..(415): n is a, c, g, or t
agcgggccagacactgagccgccgtcaaggattcagcagtctgccccctgaatttttctgctactccagattctcagattcctgtggctgagacagtgaggaaatgctgcagaatgttcataaacaatatgtttttcttgatcagattcatcatattcaaaccttcacaaacaacttggatatcctgacaattattatagaatggatgccccttgattctccccagcctttcctgaaaatgggaaaagtgttcttggataatgccaccaacttttaataatgttttttgtgaattatctatgctcccgtttttacccctttactgggtcctgagttgctttctcaactttggggctgtatactggcatggggtagtgtgtttatcaagtgctgtcaaaagccaaggaacaatatnttggggtttctcaaataccttcccttggccaggccccagccccttcagtaacttcagggtctgagccctttgcctaggctgttgctgctggacctgtttgtgcttcatcacattacccgctttgttcttccagcccaagtctggctgggttcatgtcagtgactcaggaaagctgggtttcggaggaaggcgtggtatagtctaaacgcaggcgacttctcactgccccatcctgccttggtcatttcctaatgcattccccagacaaggatccccatctaaggccagcgaacaggcttggggttcctttccctcagagcagtgttgatgggttccagggctaaatggcgaggctcccttttgagtccattcctgtttgtgctcccaggcgacttgtttggttctctcctgagctttccaagtgggtcatgagaccccttcctttttccgggatgcccatggtttgggctgctggggaaagggaatctcggggatggtac

SEQ ID NO: 583222 - DNA, 141 bp, Homo sapiens
  misc_feature (21)..(21): n is a, c, g, or t
gcctactactactaaacggcngatagaagacgacagaagggagagggcaggatggaaaatcccctggagccggtcaactttttgctcatggctagtgaaataaagttgtttgagtactagatgccaagtgccgcctttatc

SEQ ID NO: 583223 - DNA, 767 bp, Homo sapiens
ggggcccagcccattacacggacctgctgtcgcatggatgctcatggccggaccttcttcatcgccttcttcctgcgcaaattcatagaacagacggttctttccatggccggatccggcgggtgattggggactttggggtgcccatcgcacatcctcatcatggtgctatgtggattacagtattgaggacacctatacccagaagctgagcgttcccagtggattcgtcggtgactgccccagaaaagaggggctgggtcatcaacccccctgggagagaagagccccttccctgtgtggatgatggtttgccagcctgctgccccgcacatcctggtcttcattctcatcttcatggagacacagatcacacacgctcatcatctaccaagaaggagcgcatgctgcagaagggctccggattccacctggacctgatgactcatcgtggccatgggcggacatctgtgccctctttggcctgccctggttggatgatgccacatgtccgctctgtcactcacgcacaacgcgctcacttgtcatgagcaggctgtggcacctggggacaaagccccaagattcaggaagtcaaggagcaggggtgaaggtgctgtgggttgcctgctagtgggactctccatgtttcggcgatctgatcgggaaataccctggcggagccctagggaataactgtcatggaagcacatcctaaaggaccaacaagagagagaatagtgaatgcgccaaaacacaatgcagga

SEQ ID NO: 583224 - DNA, 3057 bp, Homo sapiens
  misc_feature (20)..(20): n is a, c, g, or t
  misc_feature (30)..(30): n is a, c, g, or t
aaagcaggctggtactgccntggggtgcantggccggctccagctggggccggagaggctgagtggttggtacgctgctcgctggcctcccagtcttcccagcaaccggtgacactgcccgcgccagactgaccactagccgacgcgggcgagagggacaggagcgtgacctccccatcccgaggggccggacgctcgggcgcctccccgctccggcgcgcgaggtcgagcggcgccgttccttctcgtcccgcggcagtccggcgagggatcggcggctatgggaaccgcgcgttgtctgaggaggcagtcggcgaccggtttccacttcaagcgtgacccttttgcctgtgggatgagctccagcatggggtgaggtacagaagagagacttgaagagcgtgccttgggactcaagcgccaaacctgtaccctagcgagtgtcctactccgcatccgtaatggaaggaaatgcacatcttactccagaggcacaagaggaggacatcccatgcggctactcctgcccagcgtggtggggcagcagaagctccagagcccagacttgcaggctcacggtgcagggtgaacctggccacagctcaccctggaacagccacaatgtctgccccttagagaagaaccctgaaatcagaccagtttttgcggcctccccctttcctctctgttacagtgccctttccaggccttaagagaagtaaaacttagctgcagcgtcaggaggtggaccccagagtgtgagtggcacgcttccctgtgaacccgtcctcaccatgtttgccacatctggggcagtggcagcggggaagccttactcgtgcagcgaatgtggcaagagcttctgctacagctcagtgctgctgcgacatgaacgagctcacggcggtgacggccgcttccgttgcctagaatgcggtgagcgctgtgcacgggctgctgacctccgagcgcacaggcgcacgcatgctggccagaccctctacatctgcagtgagtgcggacaaagcttccgccacagcggccgtcttgacctacacttgggcgcacaccggcagcgatgccgcacttgcccctgccgcacatgcggccggcgcttcccgcacctcccggcgctgctgctacaccggcgccgccagcatctgccagagcggccccgccgctgcccgctgtgcgcccgcaccttccggcagagcgcgctgctcttccaccaggcgcgggcgcaccccttggggacaacctctgaccctgctgccccaccccaccgctgcgcgcagtgcccgcgagccttccgaagcggcgccgggctgcggagtcacgcgcgcatccacgtgtcccggagccccacgcgaccccgtgtctcagacgcccaccagtgtggcgtgtgcggcaagtgctttggcaagagctctacgctgacgcgacacctgcagacgcactcgggggagaaacccttcaagtgcccggagtgcggcaagggcttcctggagagcgccacgctggtgcgccaccagcgcacacacacgggcgagaagccgtacgcatgtggcgactgtggacgctgcttcagcgagagttccacgctgctgcgccatcggcgcagccatcagggcgagcggccacatgcgtgcgccacttgcggcaagggtttcgggcagcgctccgacctggtggtgcaccagcgcatccacacgggcgagaagcccttcgcgtgccccgagtgcggccgccgcttcagcgaccgctcggacctcaccaagcaccggcgcacgcacacgggcgagaagccctaccgctgcgaactgtgcggcaagcggttcacgtgcgtgtccaatctcaacgtgcatcggcgcaaccatgccggccacaagccacacaaatgccccgagtgcagcaaggccttcagcgtcgcctccaagcttgcactgcaccgcaagacgcacctgggcgaacggccagcggagtgcgcagagtgcggcaagtgcttcagccacagccgctcgctgtcacagcatcagcgggcccacacgcgcgcccgcaccgctgccgccgttgccatccagtccgcagtgggcactgccctcgtctttgaggggccggctgaacaggaaaagccagggttctctgtgtcctagttgagggaggcttgctgaggcttctctaaaggtggttgggcaagcacctatatagtatcacggggacagttgaggcaactcgtagatggagatttgggaaaagacgatgtggcctcctacctttccagtttctgttggcagcccttcacgtagcctcctgcctcgcctctacacctactaccctgtcggcccttttgccatgctgtcctcgtataactcggattctctcctcaggtgtaggtgcagggagtcagggaacccttagactcccctgtgtgcaagagcccaggtgttggtgtgtccctttaatgctactgtgctctctggtgtttctgattttcctgcctttattctgtcttctcttgtcctatctcattccagcccacatcttctcctttcctgattacttttgttgtcctgcctcttcaggtaatggtcacagatttggctgtaggcacgttaccagccctgtggcttcttgactcttggttccctgttaactctgtttctgagaaatgtgggtatggaggtgggtgggaaagctcacttccatgaaggatgtctccatgctaggagctgcctgcaccctggcagaggtggccagtcacgtgaaggtgggcagggcccttagcatggccacacatgtccccagggcagatcaaggggcctctcagaaccatgttccccagccaggtgaggaccattttcactgggacccaggccaaaaccatgtgggtgcacaaagccaggcactgccaagtggaacatgaggttatttccaaatcatgggagccaccagcagggagagggcaggatggaaaatcccctggagccggtcaactttttgctcatggctagtgaaataaagttgtttgagtactagatgccaagtgccgcctttatc

SEQ ID NO: 583225 - DNA, 3035 bp, Homo sapiens
gcgttcccttctttcatctggagcccacagttcgcgcaagtggagctatggaaggcccatgctgtgctgttctaatcatgtgagggattcttaggggtgagggggaaggactgaaaacggctgcagaccgtttaggatgcctggagtggagacaggagttaagccccttactcagagtcgctcttaagaactgcccagggccgggcacagtggctcatgcctgttatcctagcacttgggaggccaaagtgggaggctctcttgagctcgggagttcaagaccagcctgggcaacatggtttccacttcaagcgtgacccttttgcctgtgggatgagctccagcatggggtgaggtacagaagagagacttgaagagcgtgccttgggactcaagcgccaaacctgtaccctagcgagtgtcctactccgcatccgtaatggaaggaaatgcacatcttactccagaggcacaagaggaggacatcccatgcggctactcctgcccagcgtggtggggcagcagaagctccagagcccagacttgcaggctcacggtgcagggtgaacctggccacagctcaccctggaacagccacaatgtctgccccttagagaagaaccctgaaatcagaccagtttttgcggcctccccctttcctctctgttacagtgccctttccaggccttaagagaagtaaaacttagctgcagcgtcaggaggtggaccccagagtgtgagtggcacgcttccctgtgaacccgtcctcaccatgtttgccacatctggggcagtggcagcggggaagccttactcgtgcagcgaatgtggcaagagcttctgctacagctcagtgctgctgcgacatgaacgagctcacggcggtgacggccgcttccgttgcctagaatgcggtgagcgctgtgcacgggctgctgacctccgagcgcacaggcgcacgcatgctggccagaccctctacatctgcagtgagtgcggacaaagcttccgccacagcggccgtcttgacctacacttgggcgcacaccggcagcgatgccgcacttgcccctgccgcacatgcggccggcgcttcccgcacctcccggcgctgctgctacaccggcgccgccagcatctgccagagcggccccgccgctgcccgctgtgcgcccgcaccttccggcagagcgcgctgctcttccaccaggcgcgggcgcaccccttggggacaacctctgaccctgctgccccaccccaccgctgcgcgcagtgcccgcgagccttccgaagcggcgccgggctgcggagtcacgcgcgcatccacgtgtcccggagccccacgcgaccccgtgtctcagacgcccaccagtgtggcgtgtgcggcaagtgctttggcaagagctctacgctgacgcgacacctgcagacgcactcgggggagaaacccttcaagtgcccggagtgcggcaagggcttcctggagagcgccacgctggtgcgccaccagcgcacacacacgggcgagaagccgtacgcatgtggcgactgtggacgctgcttcagcgagagttccacgctgctgcgccatcggcgcagccatcagggcgagcggccacatgcgtgcgccacttgcggcaagggtttcgggcagcgctccgacctggtggtgcaccagcgcatccacacgggcgagaagcccttcgcgtgccccgagtgcggccgccgcttcagcgaccgctcggacctcaccaagcaccggcgcacgcacacgggcgagaagccctaccgctgcgaactgtgcggcaagcggttcacgtgcgtgtccaatctcaacgtgcatcggcgcaaccatgccggccacaagccacacaaatgccccgagtgcagcaaggccttcagcgtcgcctccaagcttgcactgcaccgcaagacgcacctgggcgaacggccagcggagtgcgcagagtgcggcaagtgcttcagccacagccgctcgctgtcacagcatcagcgggcccacacgcgcgcccgcaccgctgccgccgttgccatccagtccgcagtgggcactgccctcgtctttgaggggccggctgaacaggaaaagccagggttctctgtgtcctagttgagggaggcttgctgaggcttctctaaaggtggttgggcaagcacctatatagtatcacggggacagttgaggcaactcgtagatggagatttgggaaaagacgatgtggcctcctacctttccagtttctgttggcagcccttcacgtagcctcctgcctcgcctctacacctactaccctgtcggcccttttgccatgctgtcctcgtataactcggattctctcctcaggtgtaggtgcagggagtcagggaacccttagactcccctgtgtgcaagagcccaggtgttggtgtgtccctttaatgctactgtgctctctggtgtttctgattttcctgcctttattctgtcttctcttgtcctatctcattccagcccacatcttctcctttcctgattacttttgttgtcctgcctcttcaggtaatggtcacagatttggctgtaggcacgttaccagccctgtggcttcttgactcttggttccctgttaactctgtttctgagaaatgtgggtatggaggtgggtgggaaagctcacttccatgaaggatgtctccatgctaggagctgcctgcaccctggcagaggtggccagtcacgtgaaggtgggcagggcccttagcatggccacacatgtccccagggcagatcaaggggcctctcagaaccatgttccccagccaggtgaggaccattttcactgggacccaggccaaaaccatgtgggtgcacaaagccaggcactgccaagtggaacatgaggttatttccaaatcatgggagccaccagcagggagagggcaggatggaaaatcccctggagccggtcaactttttgctcatggctagtgaaataaagttgtttgagtactagatgccaagtgccgcctttatc

SEQ ID NO: 583226 - DNA, 392 bp, Homo sapiens
ttagtggttccagatctgcttcattttcatccatgtgtagtcatcttctcctctcagttactgctggtttctcccttccccggcagcagaaactgagaggagaagatgactacaacatggatataaccaccctaacccttctaaaggtcagatttgctacgtgatcaacaggggtacttgaatcgaatcgacacaggcacagcagtgtgtacagggcttatgagtgtaggcaggtggttcactttggtcatcatctccatttgcccacctgattcacacatgagaatggcatctttcactcaccagcaacagccagtattataggaggtgtaggaggcattcttggcacttgtagcacaagcacatggttgtgtcagcaacttccattgact

SEQ ID NO: 583227 - DNA, 869 bp, Homo sapiens
caaaaacaaaaccggggggcccccagccctcgcagaggggctcgtagaattgtgacgccccccctgggggaacccgggctcccaccaaggattaccagacaggggcaaacacacaggagtggaccaacccttggaggggtaatagcaaatgacaagaccagtctttatgggccgcccgcccttgcatgttactccacggcaacaaaaaaagtgatgcgtagcgatattatttgcgaacagagccacccaaacccctgttggccgaaaggaaaatttcccgcctcttatggaactagaccaccccctggatcctacgagaaagtcacggacgttcatactaagagacaacccggtgagagtcttagggagagggacccccaccgcgggggacatacatgaaagacgaggtacgccaatgacgcggcgtaagagacacgaggtgtcaagaagccctcatgtggatacacaaagaaagtggtgattctacccgcgaaatcgctgtgcaaagctccaccaaaggcccatggctgcggcaaagtgagagctaccgcaagacgtggcccaggcccgcgcctctgtcataacgagcggagaaggaaccctcaaacgcctgttctaaaacgaacgatatctcacaccaagtaatgacacaatctgttatgagggataccgccggaaggcggaggatagatggaagacccgccaggttgaccccaacataacgaggcgagcaaaaaacacgggtgggatcaacagaagggcccaaaacccaaagtatgaacaagtcgcggaaaccgaatggaggaagagttcccaatgggcccaaatgcgagcgggcaaacatggaaatttccccggcgggcatgaca

SEQ ID NO: 583228 - DNA, 252 bp, Homo sapiens
cttcgactggcggtcacttacagggacttgatttttgttttgttttgttttgagacagagtcccactctgtcacccaggctggagtgcagtggcacgatcttggctcactgcaacctccgcctcccaggttcaggtgatcctcctgcctcaagctcctgagtagctgggactacaggtgcacaccaccaagcctggctaatttttgtatttttagtagagattgggtttcactaagttgcccgccaatcgaa

SEQ ID NO: 583229 - DNA, 191 bp, Homo sapiens
ttttttttaggcccctgcctgtttgcccatttgcccctcacccacccaaggttttgccccccgcctggacctgcccacccctaaaaaattggcccctggctccccgcccctcggtttccacgtggtgtatggatttgtggtcattgtccctttgcaaaataaaaattgctcaggcctgcctggcaaaaaaa

SEQ ID NO: 583230 - DNA, 147 bp, Homo sapiens
tcaagcttctaacgatgtacggggacatgaggaaagagatgctcctcccacctaaggtccaggaatctgagaacaggactgtgctgagtctcccagaggcaagggggttcccctaatgctctatcaataaagaatattgagcctgga

SEQ ID NO: 583231 - DNA, 150 bp, Homo sapiens
ttttctcgtgctgtggttgctcactggggattgtcattttctatttggccagcttttctataccacagttggggtaccctgtatgttatttatttaacaaggttactgggttcccgaaatcaaccaggcctcaaactcttcctctctccg

SEQ ID NO: 583232 - DNA, 381 bp, Homo sapiens
gctgggactaaggagttgcacccacccgacaaatgttgtattttaatagagatggggttcaccatgtggtcaggctggtctcgaactcctgatctcgtgatccatctgcctcggcctcccaaagtgctgggattatagtcgtgagccaatgtgcccggccctagcctgcgttatatgtcggtgtgtttgcaatccatagcatcttcagcgtcctgcaactgatcagttgatgtaaatggacacaggcaaaaataaagccatcaacgcaactctgcactcattgccaggccagttcccatatacattatgttgtggtacatatttaggtatttaacagaatacagaatactacttgatgttcatttgcgaatgtgcagtcat

SEQ ID NO: 583233 - DNA, 202 bp, Homo sapiens
gtcccctgaaaaggaagtcctttttccccccccccccccttttttccaaaggagggcatcaaggaacttaacccgcccgcctggggggtttttatttaaaacatttttgggattatatttaacccgcaattgggctttgggttaatgtttagcccccgggacttgtaaaagattaaaattcaataaaccccttttttaagta

SEQ ID NO: 583234 - DNA, 450 bp, Homo sapiens
  misc_feature (42)..(42): n is a, c, g, or t
  misc_feature (307)..(307): n is a, c, g, or t
  misc_feature (332)..(332): n is a, c, g, or t
  misc_feature (340)..(340): n is a, c, g, or t
  misc_feature (354)..(354): n is a, c, g, or t
  misc_feature (369)..(369): n is a, c, g, or t
  misc_feature (388)..(388): n is a, c, g, or t
  misc_feature (437)..(437): n is a, c, g, or t
  misc_feature (445)..(445): n is a, c, g, or t
gtctctattgaaaatataaaaattggtcgggcctggtggggngtgctgtagtcccagctgctcgggaggctggggcaggggaattgcttgggcctaggaggggaggttgcagtgagccgagatcacgccattgcattccagcctgggcaacaagagtgaaactccatctctaaataaataagtaaataaatagatgaatttttctcctaaggcaaattgaaaaagcttcttgtgtactccaaaattggaacagagctacctttttgacttaaaaatgttcattttttaattgaggcagtatttttcntggaacacaaaattttgtaccaagngtgttctnccattggcatttanttttaatttttgttnattaatttttttcccccantggaagggggaaaaagtatttttgtaggctccccccttcccctaagggnaaatttcntttaa

SEQ ID NO: 583235 - DNA, 1084 bp, Homo sapiens
gccctgttacgacagctgtcccgcgtggcccagcctgagcgccatctcacgcctgtctggaggagctgcagaggctgtgagacagagattgtggccaacccgcatgagctgctgtgaatgtgacacctgtggacctgtggtgaatagtgcttgcgcagctgcactctgatggtgcctgtgcccagacagggcctgtgtggacaccactagactcaccatccctatgatatgtccaacacagaaaacaccaagcacataacagatcagacaatctgcataggagatgtgtatccattgcaacgagaaggagtgccctgttgtggctccaaaccatagaagcctcaaagccattgtgaacacagactgacactagacgtatagtgtgcgtctaaacgcacacgagtcactgtggggtcacacatggatcaaagatgcgttgtcgcctagacgcagtcgataacagaacacgacgacacacattgattaatcaaagggccccaaggatatccccagagaaacaacgcgcacagcaggaaaagattagaggaacaaacaacgagggtatctcctaatcacgaagaggggaccaacccctacacttaggttgacccacacagcaacatagatggtgatggacgctccctacttctactatgaacacagacacctattggtcgcaacagagcacacccagcaattggggaatatcacacgtcaggccgttgtcgaaatccacaatgtaacacccaaaagtgaatcgccaactgagacatttgcagcgttacccactaacaaggagaaccataacaccgggttggttgctgaatcatccccacatgaaagaaattgcacaacatcggagagtagcatatccaaccatcagtcaaaccatttatgagcacgtcgtcaagatgctagcgacacgtagcacattggaatctatgccaaccgccatggagtcacaacaggccacacccaaccgattacctgcggagacatacgtcaccccccatatcaacaaaaccatgcggtgatgaacaacgacgaagacgaggcgccacatcaaaatagtcagaacgattgc

SEQ ID NO: 583236 - DNA, 386 bp, Homo sapiens
caagagcaaatgttagccaattccttgtgaagagggcctggggctgacgccctgctctcacctggcttccagacatttcttgtgctgtcatccagtccctactcgccatgctctgagagtgtcttgctctctgacgtcctcctggtctcatgggctcgcccacccagtagcagggcataatcactagaggaactcctctctccctcttcggaaagcatatattattccccataaaagttcctaaaggccaggcaaggactgattctccaattccacatcagagagagctgattctgcagggaaacggctggggaggctccagctctttcctccccacaaccatttactgggaagtagtgtatacttggcagtgtgggatgaaggta

SEQ ID NO: 583237 - DNA, 564 bp, Homo sapiens
  misc_feature (15)..(15): n is a, c, g, or t
  misc_feature (262)..(262): n is a, c, g, or t
cccaaccccaaaggnccaatatggatgttcccctaatatgaggtaactggagtagccaattcatagagccagaaatagaagttaccaagggttacggggaagaggcaatgatcagttactgtttaatggatacagagtttcagtttgggatgatagaatagttcagatctggaaatggaccgttgcacattgtctattaatgccacttaattgtacacgtaaaaatggctaaaatggaaattttcatgtgtatattttaccncaatataaaaaaaattaggccggacacagtggctcacgcctgtaatcgcagcactttgggaggccgaggcaggcggatcacaaggtcaggagatcgagaccatcctggctaacacagtgaaaccccatctctactaaacaaaatacaaaaaattagccaggcgtggtggtgggcgcctgtagtcccagctacccgggaggctgaggcaggagaatggcatgaacctgggaggcggagcttgcagtgaggccgagatcgcaccactgcactccagcctgggcgacagagcgagactccgtctc

SEQ ID NO: 583238 - DNA, 173 bp, Homo sapiens
ttagaactctgcgctgagttcgattccagtcgggctctgttccttctggctcctcatctgaggcaggacgtatctccaggccgagtgagaggagctattcagtcaacagtcaagaggtgaggagacaccaaatttgtgattgttactgcctagtagtgccaggttaggggtag

SEQ ID NO: 583239 - DNA, 462 bp, Homo sapiens
ctaaccagtattccactgtatggatagactacattttgtgtcttccatgttttagctattgtgagcaatgctgctatgtttatttatttattattctattttttttgagacaaagtctccgccctgtcacccaggctggagtgcagtggcacaatctcggctcactgcaacgtccgcttcccgggttcacaccattctcctgcctcagcctcctgagtagctgggactacaggcgcctgccaccacgcccggctaattttttgtatttttagtagagacgggtttcaccgtgttagccaggatcgtctcgatctcctgaccttgtgatccgcccgccttggcctcccaaagtgctgggattacaggcgtgagccaccacacccggtctactatttttttaagacagtctcgctctgttgcccaggctgaagtgcaggggtgcaatcttggctcactgcaacc

SEQ ID NO: 583240 - DNA, 441 bp, Homo sapiens
ggaaattcggccttattggccggggaccttaccggtatttaaggccggttttggtttccaaatggcggggcttaaaatggccttggcttaaatccaatttttaggaggtggaatggttagtggggttttcctggatttttaccagggaattattcaggaattttttctttaggttaatctgcaaggccagcttgggtcctgtaaagggtttttaacagcatttccggttaaccggaaaccggtattcagggaaacctaagtcccagaccagggattttttggaaaattatggccggccttaattcaggtcagccttctgggtagaagcagttttaatcccccaattgcccaatggtaattttggaccacctaatttttcttccggaaggatcctgttaaaaggcttgcactttcaatggattggccactggttcctggttc

SEQ ID NO: 583241 - DNA, 210 bp, Homo sapiens
  misc_feature (47)..(48): n is a, c, g, or t
  misc_feature (107)..(107): n is a, c, g, or t
tgtggatggagatcagttgcattggttcattaattcgtataagcatnnaacaggtatataaaaagcttccatgattctatttatatgtacatgagaaggaacttccnggtgttactgtaattcctctacgtattgtttcgacagccctcatttgatgcacgatatacgctagatgaagttgtactttgttgagctattgctgttctctgg

SEQ ID NO: 583242 - DNA, 546 bp, Homo sapiens
  misc_feature (459)..(459): n is a, c, g, or t
  misc_feature (482)..(482): n is a, c, g, or t
  misc_feature (504)..(504): n is a, c, g, or t
  misc_feature (509)..(509): n is a, c, g, or t
  misc_feature (535)..(536): n is a, c, g, or t
tatccgagattgtgcctggacaacaagagcggaactctgtctcaaaaaataataataaaataggctggcgcggaggctcatgcctgtaatcccagcactttgggaggccgaggcagacggatcacctgaggtcgggagttcgagaccggcctgaccatggagaaacctcatctctactaggaatacaaaattggccgggtgtggtggtgcatgcctgtattcccagctattcaagaggctgaggcaggagaatcacttgaatccgggaggtggaggttgtcatgagccgagatcacaccattgcattccagcctgggcaacaaaaagcgaaactccgtctcaaaaataaataaataaacaaatgtatgacaaaatttgccattttaaccatttttaagtgtacaactcagtggcattaattatattcacaatattgtacaaccgtcaccactatctatntcaaaacttttccatcaccccanacagatgctctgtaaccataangcaantactggcatccccccttccctttagnnccctgatact

SEQ ID NO: 583243 - DNA, 153 bp, Homo sapiens
ctgctcccgttaaggtgcagtgcatacacaatggcacacctaccccttatccccatactatgttattatctgaaaccatcagcctactcattcaaccaatagccctggcctgtactgcctaacctgctaacattactgcaggccacctactca

SEQ ID NO: 583244 - DNA, 443 bp, Homo sapiens
tctcttttcttttctccccttccccccctttcacgcaattgcccctcggaggcgctttccccgggcaaggggcagagccgggtctcaacccccacgcctctccccggccaggccgccctatggcgaaagggagcccccatcccaaacgccgggactcaagcggcgagaggcctcaaggccgggggggtcaatcacgggaaactgaattcgggtgaccgaccaaagcggcacggaaaccagtagcattcccgcgtacgaagcgccagggcccgagagaccacgagggccaccgcagaaaaagagaattaacacactttaactccaactctctcaaggtggcgcccgaattacggtccacgagacaacaaagcgcctaccgtagcgcctactggagcaatgagggtggtaacacgggaccccgcggatgaccccgcggtagaacg

SEQ ID NO: 583245 - DNA, 948 bp, Homo sapiens
ggtgtttgtaacgactcttgagtttctctagagactatgaaagatttgttgccctccaacgatcgtttttttagttgcccatcccctgttgtgcggatatttgttgcgtgtcccccccataagcagcgcctgcatgttttcctcccccacttgtggggtgtttatcattccaggttcgccccgcattgaaatgtcttcggcaagcagtgggtctcgcggatgcgtctcccagaattactgcgcaataataaaggcctttgtgcaccttcatgaattatttctgcgcgcttgctcttcgctggaccgagactgttgtctccacacagtagtgtatttaagttcgaagggggccctcttttggtaccaaataagggttcccccctttccttcatttgcgggttattctttttctttcacaaatggagtcagttggccccccctttttatgctccccagttagatgtgcgcattaggaaaacaagcatgtatccgcccattagtgcgtttccaccctgtttcgtgtttgttctccaagctataatctttgattgcatttgtctttgtttctgctcgaagcaccgtttttgtgatgttccatctgttgaagaagtttgttctgaatgtagtttttatgtgggaccaatacttgaggcattcttttcggggagctatttgcatagaaatcatcccgtattgttataatagagcaccttatttttcctaatacaagacggttctttagggatatttctctaaacgccgcattgtgtttagtggaggggtcccgttcttgttcgaagaacaacaagatgtacagcctccgaggagtttttttcccggctgctcatctttgttcatattggcagacttttctggagggaagctcggaaagtactgctcccggggggaacccgaaccaaaacacccacagggctcccaacatgacaa

SEQ ID NO: 583246 - DNA, 3043 bp, Homo sapiens
  misc_feature (232)..(233): n is a, c, g, or t
  misc_feature (301)..(301): n is a, c, g, or t
  misc_feature (318)..(318): n is a, c, g, or t
  misc_feature (2429)..(2430): n is a, c, g, or t
  misc_feature (2447)..(2447): n is a, c, g, or t
aaaattctgccccgattagaggatccctgtggagatgggtctcattactgtcacccagtggagtacagtggcacaacctctgctcactgcagcctccacctgccaggctcaagcaatgctcctgcctcagcctcccgagtagctgggattacaggaagtgagctcacaatgactcaagctgccacatagtgttgattgtgaaatgccagttgaagctatgtcctgcgagttnngggtgctacagttgaccactgcagcagtaaagatgactctgaagaatggcgtgggatggatcctttcnaatgcacttgagcagcngtctccaaccacagggccacagagctggagctggatctaccatgaaagacttctgaatccaggaagagagactgactgggcaacatgttatctcaggtctccctctgttgtccaaggctggagtgtagtagtgctatcgcagctgactgcagcctcaaccttccaggctgaagcgatcctcccacctcaacctcccacgtggctgagactacaggtgcttgccactatgcccaactaatatttggaattttcgtatacgtggattccagaggggtgacagcgaaacaggtgacctcacagtgactcaagctaccacttactgttgattgtgacgaaatgccagctgaggcacatgccttgggagctaagtggttgctgcccttgaccactgtgaagactggtgtgggaagggtcgttttggatgcacttgagcaggggtccccaacccctgagccatggagccgcaaggagccacacagcaggaggtgagcggtgtcgagtgagggagtgagggaagcttcgtctgtatttacagccactcccctttgctcacattcccgcctgagctccaccttctcagatgagcagcagcattagattctcataggagaacgcaccctgttgtgaaccgtgcatgtgagggatctaggttgcgctgtccttatgagagtctaatacctattgatctgtcactttctcccatcacgctcaggtgggaccatccagttgcaggaaaacaagcttaacacgcccactgattctacattatgctcctacctcccggcagcctctccaggcccagaactttctccagtcagcctctacagaccaagctcatgactcacaatggcctatttaggcccataccctacgtcacggcagtctccgcagatgagcctactgcctcacaacagcctccacaggcacagctccatcgttacaatggcctctttagacccagctcctgcctcccagccttctctccaggccctgaactttctcaagtcgacctcaccaggcccagctcatgcttctttgcagcctctccaggcccagctcctgcatcttggtggcccctccaggcccagcctctgcctcccgtcagcctctacagtcccaacgtctgcctcacagcagattcttcacgcccagcatctacctcactgtggaccccccaagccaagctcccaacctttcagcagcttctacacacccagctcctgccacccagtggcctctttaggccaagctcatgcttcacaagggcctttccaggcccaacttttgtctcatggcaaccttccctggccagattcctgcctgtctcccagcagcctagacaggcccaggtcttgcctcacactggcctctctacatccagcttatgcctcacggtggcctctccaggcccaactcctgtcccaggacgtcatctccgggcccaaaacttactcaagtcagactctctagtcccaactgctgcctcctggtggcctatgaaggcccaaaatctcctcaagttgacctttccaggcccagctcctgcctcctgtcagcgtctacaggcccaacctctgcctcatgggggcttctccaggcccacctcttcctcttggctgggtctacaggcacaactgctgcctcacaacagccttttttggcccagttcctgtccagctcatggcggccaatgtaggcccaaaacttcctcaagtcaaactctccaggcccaccttctgcttcccggtggcatgaacaggcccagctttgacttgagaacagcctctgcaggccctgctcttgcctcccaggggctttttccaggcccagctcttgcctcatggcagctgccccaggccaaatttctgcctgcctgccagcagcctcaacaggcatagctcctccctcacagtggcccatttaggcccaactcatgactgtcgggccatttccaggcctagtgcctgcctcgtggctgactcttgaagcccaaaacttcctcaaatcagccttttgcccaacttctgtctactgtcggactctacaggccagcctctgcctcacagtggaccctccagacccagatggtgtctcactgtggcatcctcagnngaagctcctgcctttcngcagcctctccaggcccagctcctcctgcctcccagtggcctctttcggcccagcccagctcatggctctcggcggccttcccaggccccgcttttgacttttggcagcctcttcaggcgcagaacttgatctccagtcggcctttgcaggcccggcctcctgcctctcgaaggcctgcacgggcccggcctcggcctcggcctcacagcggactctccacgcccagctagctctcgcctcactgcggcctccccagtccaaagctcctgcctttcggccacttcggcaggtccagctcctgcctgccagtggcctctttaggcccagctcattcctcacgtcggccattccaggccccgtttttcccttccggcagcctcttggcctctaatttgtttatcttttgtgtataaatcccaaaatattgaattttggaatatttccaccattatgtaaatattttggtaggtaatttatttggagtgagtttctgcgccaagcccgaattttttattttattttccttattatttggtgttaaacaggtttaatgacggtcatggcaactttttggcacaatgaaaaatatcgccca

SEQ ID NO: 583247 - DNA, 2288 bp, Homo sapiens
  misc_feature (30)..(30): n is a, c, g, or t
  misc_feature (38)..(39): n is a, c, g, or t
  misc_feature (1674)..(1675): n is a, c, g, or t
  misc_feature (1692)..(1692): n is a, c, g, or t
ttgatgtaacccggtcatctggcaaccgcnagaggcanncagcaggaggtgagcggtgtcgagtgagggagtgagggaagcttcgtctgtatttacagccactcccctttgctcacattcccgcctgagctccaccttctcagatgagcagcagcattagattctcataggagaacgcaccctgttgtgaaccgtgcatgtgagggatctaggttgcgctgtccttatgagagtctaatacctattgatctgtcactttctcccatcacgctcaggtgggaccatccagttgcaggaaaacaagcttaacacgcccactgattctacattatgctcctacctcccggcagcctctccaggcccagaactttctccagtcagcctctacagaccaagctcatgactcacaatggcctatttaggcccataccctacgtcacggcagtctccgcagatgagcctactgcctcacaacagcctccacaggcacagctccatcgttacaatggcctctttagacccagctcctgcctcccagccttctctccaggccctgaactttctcaagtcgacctcaccaggcccagctcatgcttctttgcagcctctccaggcccagctcctgcatcttggtggcccctccaggcccagcctctgcctcccgtcagcctctacagtcccaacgtctgcctcacagcagattcttcacgcccagcatctacctcactgtggaccccccaagccaagctcccaacctttcagcagcttctacacacccagctcctgccacccagtggcctctttaggccaagctcatgcttcacaagggcctttccaggcccaacttttgtctcatggcaaccttccctggccagattcctgcctgtctcccagcagcctagacaggcccaggtcttgcctcacactggcctctctacatccagcttatgcctcacggtggcctctccaggcccaactcctgtcccaggacgtcatctccgggcccaaaacttactcaagtcagactctctagtcccaactgctgcctcctggtggcctatgaaggcccaaaatctcctcaagttgacctttccaggcccagctcctgcctcctgtcagcgtctacaggcccaacctctgcctcatgggggcttctccaggcccacctcttcctcttggctgggtctacaggcacaactgctgcctcacaacagccttttttggcccagttcctgtccagctcatggcggccaatgtaggcccaaaacttcctcaagtcaaactctccaggcccaccttctgcttcccggtggcatgaacaggcccagctttgacttgagaacagcctctgcaggccctgctcttgcctcccaggggctttttccaggcccagctcttgcctcatggcagctgccccaggccaaatttctgcctgcctgccagcagcctcaacaggcatagctcctccctcacagtggcccatttaggcccaactcatgactgtcgggccatttccaggcctagtgcctgcctcgtggctgactcttgaagcccaaaacttcctcaaatcagccttttgcccaacttctgtctactgtcggactctacaggccagcctctgcctcacagtggaccctccagacccagatggtgtctcactgtggcatcctcagnngaagctcctgcctttcngcagcctctccaggcccagctcctcctgcctcccagtggcctctttcggcccagcccagctcatggctctcggcggccttcccaggccccgcttttgacttttggcagcctcttcaggcgcagaacttgatctccagtcggcctttgcaggcccggcctcctgcctctcgaaggcctgcacgggcccggcctcggcctcggcctcacagcggactctccacgcccagctagctctcgcctcactgcggcctccccagtccaaagctcctgcctttcggccacttcggcaggtccagctcctgcctgccagtggcctctttaggcccagctcattcctcacgtcggccattccaggccccgtttttcccttccggcagcctcttggcctctaatttgtttatcttttgtgtataaatcccaaaatattgaattttggaatatttccaccattatgtaaatattttggtaggtaatttatttggagtgagtttctgcgccaagcccgaattttttattttattttccttattatttggtgttaaacaggtttaatgacggtcatggcaactttttggcacaatgaaaaatatcgccca

SEQ ID NO: 583248 - DNA, 112 bp, Homo sapiens
atagcggctgaagtatcattaggagatggctgatacctcgtaaaaggatgatttatagtaagagacaaagaatgtgtgtgtgtgtgtatacgtatatatacgtatgaccagg

SEQ ID NO: 583249 - DNA, 247 bp, Homo sapiens
tggccaggctggtctcaaactcctgggtcagggatccccctggcctcggctcccaaagtgctaggattaacaggcatgagccaccatgcctggccaatatttcagtttttaaatgtgccatcttatatgcacaatgttaatgttttatgtgctttctctgtgccttttgtgtatatgtgatcactatgtgttcgatgtttgcccatccatttttattttcctgagcgtctgagtctaaatgcaatca

SEQ ID NO: 583250 - DNA, 2737 bp, Homo sapiens
  misc_feature (2123)..(2124): n is a, c, g, or t
  misc_feature (2141)..(2141): n is a, c, g, or t
gctggactgtagtggcatgatcatgcctcactgcagccttgacctcccaggctcaaacttccgcattccgaatagctgggactacaagtgtgcaccaccacccccagctaacttttttcttcttttggatggagacagggtctcactgtgttgtccagaccggtctctagctcctggccttaagcaatcctcctgcattagcttctcaaattgctggaatttcaggcatgagccaccatgcctggcctgggctagtcctatattctctagagttctctttactttgtgctagccaatctctcattatgctgttcacctgttataatgaataattctctgtattaaattttaccactttaaacttttgagtggtttatgcttcctgattggactctgactaatatgttaggaagggtcccaggagataaacccacacagatgggatttgggcataggtttggtttcccagggggcagtgctgagctctttgccagtgggaaatgggatgctggtgatttccagtaggtgacctcacagtgactcaagctaccacttactgttgattgtgacgaaatgccagctgaggcacatgccttgggagctaagtggttgctgcccttgaccactgtgaagactggtgtgggaagggtcgttttggatgcacttgagcaggggtccccaacccctgagccatggagccgcaaggagccacacagcaggaggtgtgggaccatccagttgcaggaaaacaagcttaacacgcccactgattctacattatgctcctacctcccggcagcctctccaggcccagaactttctccagtcagcctctacagaccaagctcatgactcacaatggcctatttaggcccataccctacgtcacggcagtctccgcagatgagcctactgcctcacaacagcctccacaggcacagctccatcgttacaatggcctctttagacccagctcctgcctcccagccttctctccaggccctgaactttctcaagtcgacctcaccaggcccagctcatgcttctttgcagcctctccaggcccagctcctgcatcttggtggcccctccaggcccagcctctgcctcccgtcagcctctacagtcccaacgtctgcctcacagcagattcttcacgcccagcatctacctcactgtggaccccccaagccaagctcccaacctttcagcagcttctacacacccagctcctgccacccagtggcctctttaggccaagctcatgcttcacaagggcctttccaggcccaacttttgtctcatggcaaccttccctggccagattcctgcctgtctcccagcagcctagacaggcccaggtcttgcctcacactggcctctctacatccagcttatgcctcacggtggcctctccaggcccaactcctgtcccaggacgtcatctccgggcccaaaacttactcaagtcagactctctagtcccaactgctgcctcctggtggcctatgaaggcccaaaatctcctcaagttgacctttccaggcccagctcctgcctcctgtcagcgtctacaggcccaacctctgcctcatgggggcttctccaggcccacctcttcctcttggctgggtctacaggcacaactgctgcctcacaacagccttttttggcccagttcctgtccagctcatggcggccaatgtaggcccaaaacttcctcaagtcaaactctccaggcccaccttctgcttcccggtggcatgaacaggcccagctttgacttgagaacagcctctgcaggccctgctcttgcctcccaggggctttttccaggcccagctcttgcctcatggcagctgccccaggccaaatttctgcctgcctgccagcagcctcaacaggcatagctcctccctcacagtggcccatttaggcccaactcatgactgtcgggccatttccaggcctagtgcctgcctcgtggctgactcttgaagcccaaaacttcctcaaatcagccttttgcccaacttctgtctactgtcggactctacaggccagcctctgcctcacagtggaccctccagacccagatggtgtctcactgtggcatcctcagnngaagctcctgcctttcngcagcctctccaggcccagctcctcctgcctcccagtggcctctttcggcccagcccagctcatggctctcggcggccttcccaggccccgcttttgacttttggcagcctcttcaggcgcagaacttgatctccagtcggcctttgcaggcccggcctcctgcctctcgaaggcctgcacgggcccggcctcggcctcggcctcacagcggactctccacgcccagctagctctcgcctcactgcggcctccccagtccaaagctcctgcctttcggccacttcggcaggtccagctcctgcctgccagtggcctctttaggcccagctcattcctcacgtcggccattccaggccccgtttttcccttccggcagcctcttggcctctaatttgtttatcttttgtgtataaatcccaaaatattgaattttggaatatttccaccattatgtaaatattttggtaggtaatttatttggagtgagtttctgcgccaagcccgaattttttattttattttccttattatttggtgttaaacaggtttaatgacggtcatggcaactttttggcacaatgaaaaatatcgccca

SEQ ID NO: 583251 - DNA, 246 bp, Homo sapiens
agcctgaaaggtactggaagtcctagttgaaggtcctacccagtgaggaaaacataattggtgaccacttaagaaatgcagtctagccatattttttgcaggacagctctgctattcagagtgtaccacttccgcccccagtttattttggattctaccaaatgccatgaatggcttggaacatgctacacgtcacaccaacacatgcatgaaattgtggctttatgggtgtacctgatgcctcga

SEQ ID NO: 583252 - DNA, 326 bp, Homo sapiens
tgcgtgcccaccaacataaccatttagtgaaagcaaacataaaaggataaacctcttgtggcatgatgcaagggcggagctaggacttggcctgtgcctttggaagctgaggcaggaggaccatctgagcccaggagcctgagaccagcctgggcaacatagagaatccgtctcaacaaaaaaaaattttagccaggtgtgctgtgagctgtagtcccagctacaaggcgggaggattgcttaggcctgggtgattgaggatgcaatgagctgtgattgtgccaccacactccagcctgggcaatacagcaagactgtctcaaaaa

SEQ ID NO: 583253 - DNA, 906 bp, Homo sapiens
  misc_feature (11)..(11): n is a, c, g, or t
  misc_feature (149)..(149): n is a, c, g, or t
  misc_feature (198)..(198): n is a, c, g, or t
  misc_feature (200)..(201): n is a, c, g, or t
  misc_feature (272)..(272): n is a, c, g, or t
  misc_feature (409)..(409): n is a, c, g, or t
  misc_feature (412)..(412): n is a, c, g, or t
  misc_feature (416)..(416): n is a, c, g, or t
  misc_feature (422)..(422): n is a, c, g, or t
  misc_feature (459)..(459): n is a, c, g, or t
  misc_feature (464)..(464): n is a, c, g, or t
  misc_feature (488)..(488): n is a, c, g, or t
  misc_feature (491)..(491): n is a, c, g, or t
  misc_feature (511)..(513): n is a, c, g, or t
  misc_feature (590)..(590): n is a, c, g, or t
  misc_feature (833)..(833): n is a, c, g, or t
  misc_feature (885)..(885): n is a, c, g, or t
gaaatgggaantgggaaaaaaaaaaaacaaaaagcattggaattggatttgggggaacagcaaaaaaagagaagtatcattcccccttgtcaaattaaacggtttccaaacatttgggaaaaaaataaccggaatgtggtcggtcaccngcaccgggggacaagattagaacaagaggaacacagagggagtcaaatngnngtggggggagtgcagagagagggtggcctaaaaaaagcaaacagggccaacggccacaccaaagtcctgancaggaccaccaatgtcagagggggcaatagccacaacagggaggcccacagcccggcggggccgagacccaaagaccggcgcgccccaccccccagggcgtctcgcgcaaccaccccccagaaccggggaggggaanccnccancccccncagccctgaacccaccctcacccgaccccaccagccncaggnccccccccacaaccccaccggccnganccatggaggcaaggccatgnnngcagggagaggggaggggcggggaagcgcggcgcggagagaagtcgaaggaatgccagccgcacatcaaggacaacnccaggaagttcaggattgccgtagccaaaccgaaaacacaccacccaaggacgcgccaaaccaaacgtgtttcttctcagcactagaatctgtccaccagtgtttccgtggaacattcaaaggattggcacttatgcatgtttccccagtttccatattacagaataccttgatagcatccaatttgcatccttggttagggtcacccagtattctccactcttgagttcaggatggcagaanttcaggtctctgcagtttctagcggggtttttacgagaaccatcaggactantgaggctttctatttgtccat

SEQ ID NO: 583254 - DNA, 2818 bp, Homo sapiens
  misc_feature (232)..(233): n is a, c, g, or t
  misc_feature (301)..(301): n is a, c, g, or t
  misc_feature (318)..(318): n is a, c, g, or t
  misc_feature (2204)..(2205): n is a, c, g, or t
  misc_feature (2222)..(2222): n is a, c, g, or t
aaaattctgccccgattagaggatccctgtggagatgggtctcattactgtcacccagtggagtacagtggcacaacctctgctcactgcagcctccacctgccaggctcaagcaatgctcctgcctcagcctcccgagtagctgggattacaggaagtgagctcacaatgactcaagctgccacatagtgttgattgtgaaatgccagttgaagctatgtcctgcgagttnngggtgctacagttgaccactgcagcagtaaagatgactctgaagaatggcgtgggatggatcctttcnaatgcacttgagcagcngtctccaaccacagggccacagagctggagctggatctaccatgaaagacttctgaatccaggaagagagactgactgggcaacatgttatctcaggtctccctctgttgtccaaggctggagtgtagtagtgctatcgcagctgactgcagcctcaaccttccaggctgaagcgatcctcccacctcaacctcccacgtggctgagactacaggtgcttgccactatgcccaactaatatttggaattttcgtatacgtggattccagaggggtgacagcgaaacaggtgacctcacagtgactcaagctaccacttactgttgattgtgacgaaatgccagctgaggcacatgccttgggagctaagtggttgctgcccttgaccactgtgaagactggtgtgggaagggtcgttttggatgcacttgagcaggggtccccaacccctgagccatggagccgcaaggagccacacagcaggaggtgtgggaccatccagttgcaggaaaacaagcttaacacgcccactgattctacattatgctcctacctcccggcagcctctccaggcccagaactttctccagtcagcctctacagaccaagctcatgactcacaatggcctatttaggcccataccctacgtcacggcagtctccgcagatgagcctactgcctcacaacagcctccacaggcacagctccatcgttacaatggcctctttagacccagctcctgcctcccagccttctctccaggccctgaactttctcaagtcgacctcaccaggcccagctcatgcttctttgcagcctctccaggcccagctcctgcatcttggtggcccctccaggcccagcctctgcctcccgtcagcctctacagtcccaacgtctgcctcacagcagattcttcacgcccagcatctacctcactgtggaccccccaagccaagctcccaacctttcagcagcttctacacacccagctcctgccacccagtggcctctttaggccaagctcatgcttcacaagggcctttccaggcccaacttttgtctcatggcaaccttccctggccagattcctgcctgtctcccagcagcctagacaggcccaggtcttgcctcacactggcctctctacatccagcttatgcctcacggtggcctctccaggcccaactcctgtcccaggacgtcatctccgggcccaaaacttactcaagtcagactctctagtcccaactgctgcctcctggtggcctatgaaggcccaaaatctcctcaagttgacctttccaggcccagctcctgcctcctgtcagcgtctacaggcccaacctctgcctcatgggggcttctccaggcccacctcttcctcttggctgggtctacaggcacaactgctgcctcacaacagccttttttggcccagttcctgtccagctcatggcggccaatgtaggcccaaaacttcctcaagtcaaactctccaggcccaccttctgcttcccggtggcatgaacaggcccagctttgacttgagaacagcctctgcaggccctgctcttgcctcccaggggctttttccaggcccagctcttgcctcatggcagctgccccaggccaaatttctgcctgcctgccagcagcctcaacaggcatagctcctccctcacagtggcccatttaggcccaactcatgactgtcgggccatttccaggcctagtgcctgcctcgtggctgactcttgaagcccaaaacttcctcaaatcagccttttgcccaacttctgtctactgtcggactctacaggccagcctctgcctcacagtggaccctccagacccagatggtgtctcactgtggcatcctcagnngaagctcctgcctttcngcagcctctccaggcccagctcctcctgcctcccagtggcctctttcggcccagcccagctcatggctctcggcggccttcccaggccccgcttttgacttttggcagcctcttcaggcgcagaacttgatctccagtcggcctttgcaggcccggcctcctgcctctcgaaggcctgcacgggcccggcctcggcctcggcctcacagcggactctccacgcccagctagctctcgcctcactgcggcctccccagtccaaagctcctgcctttcggccacttcggcaggtccagctcctgcctgccagtggcctctttaggcccagctcattcctcacgtcggccattccaggccccgtttttcccttccggcagcctcttggcctctaatttgtttatcttttgtgtataaatcccaaaatattgaattttggaatatttccaccattatgtaaatattttggtaggtaatttatttggagtgagtttctgcgccaagcccgaattttttattttattttccttattatttggtgttaaacaggtttaatgacggtcatggcaactttttggcacaatgaaaaatatcgccca

SEQ ID NO: 583255 - DNA, 307 bp, Homo sapiens
cgcgagcgccacaaggggctggaactacaggatcatgccatcatgcccagctaatttttgcattttcagtagaaatggcatttcaccatgtcgcccacgagggtcttaaactgctgagctcacgtaatccaccctctttggcctaccaaagagctgctattataggtgcgagccaccacgcccggccagactaatatattaatgccacttctgtaacaaccacaactgcctccattaccttatacagaacagaatcgagagccattgacatgtgtattaggatattgaacaataggtatccattcta

SEQ ID NO: 583256 - DNA, 305 bp, Homo sapiens
gcagccagcacatacctgtccttgaatgctcgctcataccaacctactcgggcacctttacgccatccccaccaagccccacctactagagcctccacccaacgcaaagtccttctatagaaaactttcctggatcactcaaccacaacaatcattaccatctacacaaaattccagacctacaaccagacaattcacttagtacgcgccaactactgctgcatactctacacaacatgctccctgagagcagacaccaagtctgacatgccccagcatcaccgcaacagactgactaagtgacc

SEQ ID NO: 583257 - DNA, 2494 bp, Homo sapiens
  misc_feature (5)..(5): n is a, c, g, or t
  misc_feature (1880)..(1881): n is a, c, g, or t
  misc_feature (1898)..(1898): n is a, c, g, or t
tgtantcacatgttcccagactgttctcaaactcctgagctcaaagcagtccacccaccttggcctcgcaaagtgctgggattacaggtgtgagccatcttgctcattctagtttaaacttttgagtggtttatgcttcctgattggactctgactaatatgttaggaagggtcccaggagataaacccacacagatgggatttgggcataggtttggtttcccagggggcagtgctgagctctttgccagtgggaaatgggatgctggtgatttccagtaggtgacctcacagtgactcaagctaccacttactgttgattgtgacgaaatgccagctgaggcacatgccttgggagctaagtggttgctgcccttgaccactgtgaagactggtgtgggaagggtcgttttggatgcacttgagcaggggtccccaacccctgagccatggagccgcaaggagccacacagcaggaggtgtgggaccatccagttgcaggaaaacaagcttaacacgcccactgattctacattatgctcctacctcccggcagcctctccaggcccagaactttctccagtcagcctctacagaccaagctcatgactcacaatggcctatttaggcccataccctacgtcacggcagtctccgcagatgagcctactgcctcacaacagcctccacaggcacagctccatcgttacaatggcctctttagacccagctcctgcctcccagccttctctccaggccctgaactttctcaagtcgacctcaccaggcccagctcatgcttctttgcagcctctccaggcccagctcctgcatcttggtggcccctccaggcccagcctctgcctcccgtcagcctctacagtcccaacgtctgcctcacagcagattcttcacgcccagcatctacctcactgtggaccccccaagccaagctcccaacctttcagcagcttctacacacccagctcctgccacccagtggcctctttaggccaagctcatgcttcacaagggcctttccaggcccaacttttgtctcatggcaaccttccctggccagattcctgcctgtctcccagcagcctagacaggcccaggtcttgcctcacactggcctctctacatccagcttatgcctcacggtggcctctccaggcccaactcctgtcccaggacgtcatctccgggcccaaaacttactcaagtcagactctctagtcccaactgctgcctcctggtggcctatgaaggcccaaaatctcctcaagttgacctttccaggcccagctcctgcctcctgtcagcgtctacaggcccaacctctgcctcatgggggcttctccaggcccacctcttcctcttggctgggtctacaggcacaactgctgcctcacaacagccttttttggcccagttcctgtccagctcatggcggccaatgtaggcccaaaacttcctcaagtcaaactctccaggcccaccttctgcttcccggtggcatgaacaggcccagctttgacttgagaacagcctctgcaggccctgctcttgcctcccaggggctttttccaggcccagctcttgcctcatggcagctgccccaggccaaatttctgcctgcctgccagcagcctcaacaggcatagctcctccctcacagtggcccatttaggcccaactcatgactgtcgggccatttccaggcctagtgcctgcctcgtggctgactcttgaagcccaaaacttcctcaaatcagccttttgcccaacttctgtctactgtcggactctacaggccagcctctgcctcacagtggaccctccagacccagatggtgtctcactgtggcatcctcagnngaagctcctgcctttcngcagcctctccaggcccagctcctcctgcctcccagtggcctctttcggcccagcccagctcatggctctcggcggccttcccaggccccgcttttgacttttggcagcctcttcaggcgcagaacttgatctccagtcggcctttgcaggcccggcctcctgcctctcgaaggcctgcacgggcccggcctcggcctcggcctcacagcggactctccacgcccagctagctctcgcctcactgcggcctccccagtccaaagctcctgcctttcggccacttcggcaggtccagctcctgcctgccagtggcctctttaggcccagctcattcctcacgtcggccattccaggccccgtttttcccttccggcagcctcttggcctctaatttgtttatcttttgtgtataaatcccaaaatattgaattttggaatatttccaccattatgtaaatattttggtaggtaatttatttggagtgagtttctgcgccaagcccgaattttttattttattttccttattatttggtgttaaacaggtttaatgacggtcatggcaactttttggcacaatgaaaaatatcgccca

SEQ ID NO: 583258 - DNA, 3032 bp, Homo sapiens
  misc_feature (2418)..(2419): n is a, c, g, or t
  misc_feature (2436)..(2436): n is a, c, g, or t
gctggactgtagtggcatgatcatgcctcactgcagccttgacctcccaggctcaaacttccgcattccgaatagctgggactacaagtgtgcaccaccacccccagctaacttttttcttcttttggatggagacagggtctcactgtgttgtccagaccggtctctagctcctggccttaagcaatcctcctgcattagcttctcaaattgctggaatttcaggcatgagccaccatgcctggcctgggctagtcctatattctctagagttctctttactttgtgctagccaatctctcattatgctgttcacctgttataatgaataattctctgtattaaattttaccactttaaacttttgagtggtttatgcttcctgattggactctgactaatatgttaggaagggtcccaggagataaacccacacagatgggatttgggcagtgctgagctctttgccagtgggaaatgggatgctggtgatttccagtaggtgacctcacagtgactcaagctaccacttactgttgattgtgacgaaatgccagctgaggcacatgccttgggagctaagtggttgctgcccttgaccactgtgaagactggtgtgggaagggtcgttttggatgcacttgagcaggggtccccaacccctgagccatggagccgcaaggagccacacagcaggaggtgagcggtgtcgagtgagggagtgagggaagcttcgtctgtatttacagccactcccctttgctcacattcccgcctgagctccaccttctcagatgagcagcagcattagattctcataggagaacgcaccctgttgtgaaccgtgcatgtgagggatctaggttgcgctgtccttatgagagtctaatacctattgatctgtcactttctcccatcacgctcaggtgggaccatccagttgcaggaaaacaagcttaacacgcccactgattctacattatggtgaattctataattattttattatatattacagtgtaataatggaaatgaagtgcctaataaatgtgaatgtgcttaaatcttttggcccagctcctacctcccggcagcctctccaggcccagaactttctccagtcagcctctacagaccaagctcatgactcacaatggcctatttaggcccataccctacgtcacggcagtctccgcagatgagcctactgcctcacaacagcctccacaggcacagctccatcgttacaatggcctctttagacccagctcctgcctcccagccttctctccaggccctgaactttctcaagtcgacctcaccaggcccagctcatgcttctttgcagcctctccaggcccagctcctgcatcttggtggcccctccaggcccagcctctgcctcccgtcagcctctacagtcccaacgtctgcctcacagcagattcttcacgcccagcatctacctcactgtggaccccccaagccaagctcccaacctttcagcagcttctacacacccagctcctgccacccagtggcctctttaggccaagctcatgcttcacaagggcctttccaggcccaacttttgtctcatggcaaccttccctggccagattcctgcctgtctcccagcagcctagacaggcccaggtcttgcctcacactggcctctctacatccagcttatgcctcacggtggcctctccaggcccaactcctgtcccaggacgtcatctccgggcccaaaacttactcaagtcagactctctagtcccaactgctgcctcctggtggcctatgaaggcccaaaatctcctcaagttgacctttccaggcccagctcctgcctcctgtcagcgtctacaggcccaacctctgcctcatgggggcttctccaggcccacctcttcctcttggctgggtctacaggcacaactgctgcctcacaacagccttttttggcccagttcctgtccagctcatggcggccaatgtaggcccaaaacttcctcaagtcaaactctccaggcccaccttctgcttcccggtggcatgaacaggcccagctttgacttgagaacagcctctgcaggccctgctcttgcctcccaggggctttttccaggcccagctcttgcctcatggcagctgccccaggccaaatttctgcctgcctgccagcagcctcaacaggcatagctcctccctcacagtggcccatttaggcccaactcatgactgtcgggccatttccaggcctagtgcctgcctcgtggctgactcttgaagcccaaaacttcctcaaatcagccttttgcccaacttctgtctactgtcggactctacaggccagcctctgcctcacagtggaccctccagacccagatggtgtctcactgtggcatcctcagnngaagctcctgcctttcngcagcctctccaggcccagctcctcctgcctcccagtggcctctttcggcccagcccagctcatggctctcggcggccttcccaggccccgcttttgacttttggcagcctcttcaggcgcagaacttgatctccagtcggcctttgcaggcccggcctcctgcctctcgaaggcctgcacgggcccggcctcggcctcggcctcacagcggactctccacgcccagctagctctcgcctcactgcggcctccccagtccaaagctcctgcctttcggccacttcggcaggtccagctcctgcctgccagtggcctctttaggcccagctcattcctcacgtcggccattccaggccccgtttttcccttccggcagcctcttggcctctaatttgtttatcttttgtgtataaatcccaaaatattgaattttggaatatttccaccattatgtaaatattttggtaggtaatttatttggagtgagtttctgcgccaagcccgaattttttattttattttccttattatttggtgttaaacaggtttaatgacggtcatggcaactttttggcacaatgaaaaatatcgccca

SEQ ID NO: 583259 - DNA, 460 bp, Homo sapiens
attctagagtatccctcatttaggccaattgtactgttgtctgtgtcaattgcaaatgacaacactctgaacaaattgaagaatggcggtcacgagtcagcccagtttgaatagcattgtggactaatgatggcaatgttcactcgggtctccattagtgccaatcaggacaattctatatgacatgtatctcctatgtgtgggatatcaacgagtatcatgtctcatggtgaggacacccgtacggtggttagggtgtcgtagtcattcttcagcacaattcttaattggagaccaagaaccctgggcctttagaggtggtctagcgggagagttccagcgtttgctgccaattgatggggcaaatgatctcttttttcagccacctccactgactcctacctccaaagtttatactatcagaccttattttcctaaggatgaggcatccgtgtacaag

SEQ ID NO: 583260 - DNA, 2427 bp, Homo sapiens
  misc_feature (15)..(16): n is a, c, g, or t
  misc_feature (22)..(22): n is a, c, g, or t
  misc_feature (34)..(34): n is a, c, g, or t
  misc_feature (71)..(71): n is a, c, g, or t
  misc_feature (1813)..(1814): n is a, c, g, or t
  misc_feature (1831)..(1831): n is a, c, g, or t
taccccggagctctnnaggccnagaacttttcantcagcctctacagaccaagctcatgactcacaatggnctatttaggcccataccctacgtcacggcagcctccgcagatgagcctactgcctcacaacagcctccacaggcacagctccatcgttacaatggcctctttagacccagctcctgcctcccagccttctctccaggccctgaactttctcaggtctccctctgttgtccaaggctggagtgtagtagtgctatcgcagctgactgcagcctcaaccttccaggctgaagcgatcctcccacctcaacctcccacgtggctgagactacaggtgcttgccactatgcccaactaatatttggaattttcgtatacgtggattccagaggggtgacagcgaaacgtgggaccatccagttgcaggaaaacaagcttaacacgcccactgattctacattatgctcctacctcccggcagcctctccaggcccagaactttctccagtcagcctctacagaccaagctcatgactcacaatggcctatttaggcccataccctacgtcacggcagtctccgcagatgagcctactgcctcacaacagcctccacaggcacagctccatcgttacaatggcctctttagacccagctcctgcctcccagccttctctccaggccctgaactttctcaagtcgacctcaccaggcccagctcatgcttctttgcagcctctccaggcccagctcctgcatcttggtggcccctccaggcccagcctctgcctcccgtcagcctctacagtcccaacgtctgcctcacagcagattcttcacgcccagcatctgcctcactgtggaccccccaagccaagctcccaacctttcagcagcttctacacacccagctcctgccacccagtggcctctttaggccaagctcatgcttcacaagggcctttccaggcccaacttttgtctcatggcaaccttccctggccagattcctgcctgtctcccagcagcctagacaggcccaggtcttgcctcacactggcctctctacatccagcttatgcctcacggtggcctctccaggcccaactcctgtcccaggacgtcatctccgggcccaaaacttactcaagtcagactctctagtcccaactgctgcctcctggtggcctatgaaggcccaaaatctcctcaagttgacctttccaggcccagctcctgcctcctgtcagcgtctacaggcccaacctctgcctcatgggggcttctccaggcccacctcttcctcttggctgggtctacaggcacaactgctgcctcacaacagccttttttggcccagttcctgtccagctcatggcggccaatgtaggcccaaaacttcctcaagtcaaactctccaggcccaccttctgcttcccggtggcatgaacaggcccagctttgacttgagaacagcctctgcaggccctgctcttgcctcccaggggctttttccaggcccagctcttgcctcatggcagctgccccaggccaaatttctgcctgcctgccagcagcctcaacaggcatagctcctccctcacagtggcccatttaggcccaactcatgactgtcgggccatttccaggcctagtgcctgcctcgtggctgactcttgaagcccaaaacttcctcaaatcagccttttgcccaacttctgtctactgtcggactctacaggccagcctctgcctcacagtggaccctccagacccagatggtgtctcactgtggcatcctcagnngaagctcctgcctttcngcagcctctccaggcccagctcctcctgcctcccagtggcctctttcggcccagcccagctcatggctctcggcggccttcccaggccccgcttttgacttttggcagcctcttcaggcgcagaacttgatctccagtcggcctttgcaggcccggcctcctgcctctcgaaggcctgcacgggcccggcctcggcctcggcctcacagcggactctccacgcccagctagctctcgcctcactgcggcctccccagtccaaagctcctgcctttcggccacttcggcaggtccagctcctgcctgccagtggcctctttaggcccagctcattcctcacgtcggccattccaggccccgtttttcccttccggcagcctcttggcctctaatttgtttatcttttgtgtataaatcccaaaatattgaattttggaatatttccaccattatgtaaatattttggtaggtaatttatttggagtgagtttctgcgccaagcccgaattttttattttattttccttattatttggtgttaaacaggtttaatgacggtcatggcaactttttggcacaatgaaaaatatcgccca

SEQ ID NO: 583261 - DNA, 352 bp, Homo sapiens
acggcatgggattgggcagggtagctcccaccaacggccccagtgcgagatccactaggtgaagccagctgggctgctgagtctattagggacttggaaaatctttatgtctagctaagggattgtgaatacaccaatcggcactctgtatctagctcaagttttgtaaatgcaccaatcagcactctgtgtctagctgatctggtggagacttggagaatctttctgtctagctaagggattgtaaatacaccaatcggcactctgtattctagttaatctggggggacttggagaatctttatgtctagctaagggattgttatacaccaatcagcactcttaatctaac

SEQ ID NO: 583262 - DNA, 541 bp, Homo sapiens
ggatctcttgagctcatgatctgtccacctcatgcccgctcaaacgtgcctgggactttacgttgaatccacaccggcctcatgcctcccaaagtgctgggattacaggcgtgagctgtgcctgggccaccccagcattttttaacgatgtatgtattcagttagttcatgatgtttcccacgatgatatccttggtccgttaacaaccgggtgggaactcggcagtacatttggttatcgggattcctggacttagttaagcgacaacagccaaggttacacacccacagggatggccagtaatttatcaccccagcggggtacatttaatgatggacgcttgtgcgcgcccattattaaattttcacacacggcattgtttcccaagccacaatttctcacaccgttgggttttcccacccaacagtgggttgccgtggcacattcccatgcttcagccattccccatgtggccaaggggtcaccctggttatatcatgcggcagcacacacaggtccccaggtggcttggtgcacagg

SEQ ID NO: 583263 - DNA, 248 bp, Homo sapiens
aactggaggatccccagcgatgggtctactgtatcttctcatttgaatattcagcttcagctaacaatagtctgaatgattggccagtggggaccgtgctgtatagcacagataattctacccaatggtcagtctatgctggaaggaatctgaaagagaatggatgtgggtacatgtataactgggtcactttgttgtgcagcagaaatgaccacaatcttgtaaatcaactctacccatcggcgttg

SEQ ID NO: 583264 - DNA, 2381 bp, Homo sapiens
  misc_feature (30)..(30): n is a, c, g, or t
  misc_feature (38)..(39): n is a, c, g, or t
  misc_feature (1767)..(1768): n is a, c, g, or t
  misc_feature (1785)..(1785): n is a, c, g, or t
ttgatgtaacccggtcatctggcaaccgcnagaggcanncagcaggaggtgagcggtgtcgagtgagggagtgagggaagcttcgtctgtatttacagccactcccctttgctcacattcccgcctgagctccaccttctcagatgagcagcagcattagattctcataggagaacgcaccctgttgtgaaccgtgcatgtgagggatctaggttgcgctgtccttatgagagtctaatacctattgatctgtcactttctcccatcacgctcaggtgggaccatccagttgcaggaaaacaagcttaacacgcccactgattctacattatggtgaattctataattattttattatatattacagtgtaataatggaaatgaagtgcctaataaatgtgaatgtgcttaaatcttttggcccagctcctacctcccggcagcctctccaggcccagaactttctccagtcagcctctacagaccaagctcatgactcacaatggcctatttaggcccataccctacgtcacggcagtctccgcagatgagcctactgcctcacaacagcctccacaggcacagctccatcgttacaatggcctctttagacccagctcctgcctcccagccttctctccaggccctgaactttctcaagtcgacctcaccaggcccagctcatgcttctttgcagcctctccaggcccagctcctgcatcttggtggcccctccaggcccagcctctgcctcccgtcagcctctacagtcccaacgtctgcctcacagcagattcttcacgcccagcatctacctcactgtggaccccccaagccaagctcccaacctttcagcagcttctacacacccagctcctgccacccagtggcctctttaggccaagctcatgcttcacaagggcctttccaggcccaacttttgtctcatggcaaccttccctggccagattcctgcctgtctcccagcagcctagacaggcccaggtcttgcctcacactggcctctctacatccagcttatgcctcacggtggcctctccaggcccaactcctgtcccaggacgtcatctccgggcccaaaacttactcaagtcagactctctagtcccaactgctgcctcctggtggcctatgaaggcccaaaatctcctcaagttgacctttccaggcccagctcctgcctcctgtcagcgtctacaggcccaacctctgcctcatgggggcttctccaggcccacctcttcctcttggctgggtctacaggcacaactgctgcctcacaacagccttttttggcccagttcctgtccagctcatggcggccaatgtaggcccaaaacttcctcaagtcaaactctccaggcccaccttctgcttcccggtggcatgaacaggcccagctttgacttgagaacagcctctgcaggccctgctcttgcctcccaggggctttttccaggcccagctcttgcctcatggcagctgccccaggccaaatttctgcctgcctgccagcagcctcaacaggcatagctcctccctcacagtggcccatttaggcccaactcatgactgtcgggccatttccaggcctagtgcctgcctcgtggctgactcttgaagcccaaaacttcctcaaatcagccttttgcccaacttctgtctactgtcggactctacaggccagcctctgcctcacagtggaccctccagacccagatggtgtctcactgtggcatcctcagnngaagctcctgcctttcngcagcctctccaggcccagctcctcctgcctcccagtggcctctttcggcccagcccagctcatggctctcggcggccttcccaggccccgcttttgacttttggcagcctcttcaggcgcagaacttgatctccagtcggcctttgcaggcccggcctcctgcctctcgaaggcctgcacgggcccggcctcggcctcggcctcacagcggactctccacgcccagctagctctcgcctcactgcggcctccccagtccaaagctcctgcctttcggccacttcggcaggtccagctcctgcctgccagtggcctctttaggcccagctcattcctcacgtcggccattccaggccccgtttttcccttccggcagcctcttggcctctaatttgtttatcttttgtgtataaatcccaaaatattgaattttggaatatttccaccattatgtaaatattttggtaggtaatttatttggagtgagtttctgcgccaagcccgaattttttattttattttccttattatttggtgttaaacaggtttaatgacggtcatggcaactttttggcacaatgaaaaatatcgccca

SEQ ID NO: 583265 - DNA, 199 bp, Homo sapiens
gtgactctgaggatcccagtacaaagtttgctctgctaccagtgctagattgcagtggcatgatctcaactcactgcaacctccgctcccgggctcaagcgattctccctgctcagctaccgagtaactgggattacaggcgcctgccaccacgcccggccaatttttgcactttcagtagaaacagggtttcaccacc

SEQ ID NO: 583266 - DNA, 693 bp, Homo sapiens
ggttcgcgtcgactgcccagtagtccgcgaatcctccgttccgaacccgttcgtactcccccgatcccgagtgttctctcctttgaaaacactagacgaagtaagtgtcactgcgatctagtttttacatatggagccaaatcaccttgtcagtgcctggcacgaaggggattctgtactcagattgccctcgagtcccaataatcactgaagtgcacatctgtaaggaagaacgggagccagtggggtgaaagctcattgacacttcaaagggagcacaacggaacacatcacagggtatgtgaactggggctccccaagagcgaccgcattgtcactttgtgggtagacatagaccggcaaatgcctaattgtctggagacgtccacgaacaacgcatgggttgtcagagcgaagccaaccccttggtggatccttgagaaattaaatacggcgcagcttaactttcttggtcgacaaggtggtccccccccttaggagacacaacactttgtggctcgttgggagaaggtgtgacgcaacgaatctcaaattatctggtattgggtaaactttatgcagttcttgcaacaattgacttcggtgggtttgaagcaaaaggcacatttcaaaaaatgcccgcattccgcttcccaagtcccttcactttgggattgggacattcccaaacaa

SEQ ID NO: 583267 - DNA, 146 bp, Homo sapiens
ccagattatgaaccagatataagtagcacaattctcgtggctacttccacttcagcagtgtcatgtctattgatgtggagctttctgaatagggaggttaaggcacacctggtgagtaaaacaaatatttcttgtgtagcgttcca

SEQ ID NO: 583268 - DNA, 3034 bp, Homo sapiens
  misc_feature (2420)..(2421): n is a, c, g, or t
  misc_feature (2438)..(2438): n is a, c, g, or t
gctggactgtagtggcatgatcatgcctcactgcagccttgacctcccaggctcaaacttccgcattccgaatagctgggactacaagtgtgcaccaccacccccagctaacttttttcttcttttggatggagacagggtctcactgtgttgtccagaccggtctctagctcctggccttaagcaatcctcctgcattagcttctcaaattgctggaatttcaggcatgagccaccatgcctggcctgggctagtcctatattctctagagttctctttactttgtgctagccaatctctcattatgctgttcacctgttataatgaataattctctgtattaaattttaccactttaaacttttgagtggtttatgcttcctgattggactctgactaatatgttaggaagggtcccaggagataaacccacacagatgggatttgggcagtgctgagctctttgccagtgggaaatgggatgctggtgatttccagtaggtgacctcacagtgactcaagctaccacttactgttgattgtgacgaaatgccagctgaggcacatgccttgggagctaagtggttgctgcccttgaccactgtgaagactggtgtgggaagggtcgttttggatgcacttgagcaggggtccccaacccctgagccatggagccgcaaggagccacacagcaggaggtgagcggtgtcgagtgagggagtgagggaagcttcgtctgtatttacagccactcccctttgctcacattcccgcctgagctccaccttctcagatgagcagcagcattagattctcataggagaacgcaccctgttgtgaaccgtgcatgtgagggatctaggttgcgctgtccttatgagagtctaatacctattgatctgtcactttctcccatcacgctcaggtgggaccatccagttgcaggaaaacaagcttaacacgcccactgattctacattatggtgaattctataattattttattatatattacagtgtaataatggaaatgaagtgcctaataaatgtgaatgtgcttaaatcttttggcccaatgctcctacctcccggcagcctctccaggcccagaactttctccagtcagcctctacagaccaagctcatgactcacaatggcctatttaggcccataccctacgtcacggcagtctccgcagatgagcctactgcctcacaacagcctccacaggcacagctccatcgttacaatggcctctttagacccagctcctgcctcccagccttctctccaggccctgaactttctcaagtcgacctcaccaggcccagctcatgcttctttgcagcctctccaggcccagctcctgcatcttggtggcccctccaggcccagcctctgcctcccgtcagcctctacagtcccaacgtctgcctcacagcagattcttcacgcccagcatctacctcactgtggaccccccaagccaagctcccaacctttcagcagcttctacacacccagctcctgccacccagtggcctctttaggccaagctcatgcttcacaagggcctttccaggcccaacttttgtctcatggcaaccttccctggccagattcctgcctgtctcccagcagcctagacaggcccaggtcttgcctcacactggcctctctacatccagcttatgcctcacggtggcctctccaggcccaactcctgtcccaggacgtcatctccgggcccaaaacttactcaagtcagactctctagtcccaactgctgcctcctggtggcctatgaaggcccaaaatctcctcaagttgacctttccaggcccagctcctgcctcctgtcagcgtctacaggcccaacctctgcctcatgggggcttctccaggcccacctcttcctcttggctgggtctacaggcacaactgctgcctcacaacagccttttttggcccagttcctgtccagctcatggcggccaatgtaggcccaaaacttcctcaagtcaaactctccaggcccaccttctgcttcccggtggcatgaacaggcccagctttgacttgagaacagcctctgcaggccctgctcttgcctcccaggggctttttccaggcccagctcttgcctcatggcagctgccccaggccaaatttctgcctgcctgccagcagcctcaacaggcatagctcctccctcacagtggcccatttaggcccaactcatgactgtcgggccatttccaggcctagtgcctgcctcgtggctgactcttgaagcccaaaacttcctcaaatcagccttttgcccaacttctgtctactgtcggactctacaggccagcctctgcctcacagtggaccctccagacccagatggtgtctcactgtggcatcctcagnngaagctcctgcctttcngcagcctctccaggcccagctcctcctgcctcccagtggcctctttcggcccagcccagctcatggctctcggcggccttcccaggccccgcttttgacttttggcagcctcttcaggcgcagaacttgatctccagtcggcctttgcaggcccggcctcctgcctctcgaaggcctgcacgggcccggcctcggcctcggcctcacagcggactctccacgcccagctagctctcgcctcactgcggcctccccagtccaaagctcctgcctttcggccacttcggcaggtccagctcctgcctgccagtggcctctttaggcccagctcattcctcacgtcggccattccaggccccgtttttcccttccggcagcctcttggcctctaatttgtttatcttttgtgtataaatcccaaaatattgaattttggaatatttccaccattatgtaaatattttggtaggtaatttatttggagtgagtttctgcgccaagcccgaattttttattttattttccttattatttggtgttaaacaggtttaatgacggtcatggcaactttttggcacaatgaaaaatatcgccca

SEQ ID NO: 583269 - DNA, 216 bp, Homo sapiens
aaaccgccccccttgcggcgcactttggctcctccaccgcggcacggaggccgggccggtccccgcggaccgccaaattctccgagcagcgcacgaagtcgtcccccgtacgagctgtcggccgttcagaaaatagtgaggcaacgtcccggcctcgagcactcggccgagctcgtctagcagcccgaggagcaggcgcccgcattttctggccgc

SEQ ID NO: 583270 - DNA, 2761 bp, Homo sapiens
  misc_feature (232)..(233): n is a, c, g, or t
  misc_feature (301)..(301): n is a, c, g, or t
  misc_feature (318)..(318): n is a, c, g, or t
  misc_feature (2147)..(2148): n is a, c, g, or t
  misc_feature (2165)..(2165): n is a, c, g, or t
aaaattctgccccgattagaggatccctgtggagatgggtctcattactgtcacccagtggagtacagtggcacaacctctgctcactgcagcctccacctgccaggctcaagcaatgctcctgcctcagcctcccgagtagctgggattacaggaagtgagctcacaatgactcaagctgccacatagtgttgattgtgaaatgccagttgaagctatgtcctgcgagttnngggtgctacagttgaccactgcagcagtaaagatgactctgaagaatggcgtgggatggatcctttcnaatgcacttgagcagcngtctccaaccacagggccacagagctggagctggatctaccatgaaagacttctgaatccaggaagagagactgactgggcaacatgttatctcaggtctccctctgttgtccaaggctggagtgtagtagtgctatcgcagctgactgcagcctcaaccttccaggctgaagcgatcctcccacctcaacctcccacgtggctgagactacaggtgcttgccactatgcccaactaatatttggaattttcgtatacgtggattccagaggggtgacagcgaaacaggtgacctcacagtgactcaagctaccacttactgttgattgtgacgaaatgccagctgaggcacatgccttgggagctaagtggttgctgcccttgaccactgtgaagactggtgtgggaagggtcgttttggatgcacttgagcaggggtccccaacccctgagccatggagccgcaaggagccacacagcaggaggtgctcctacctcccggcagcctctccaggcccagaactttctccagtcagcctctacagaccaagctcatgactcacaatggcctatttaggcccataccctacgtcacggcagtctccgcagatgagcctactgcctcacaacagcctccacaggcacagctccatcgttacaatggcctctttagacccagctcctgcctcccagccttctctccaggccctgaactttctcaagtcgacctcaccaggcccagctcatgcttctttgcagcctctccaggcccagctcctgcatcttggtggcccctccaggcccagcctctgcctcccgtcagcctctacagtcccaacgtctgcctcacagcagattcttcacgcccagcatctacctcactgtggaccccccaagccaagctcccaacctttcagcagcttctacacacccagctcctgccacccagtggcctctttaggccaagctcatgcttcacaagggcctttccaggcccaacttttgtctcatggcaaccttccctggccagattcctgcctgtctcccagcagcctagacaggcccaggtcttgcctcacactggcctctctacatccagcttatgcctcacggtggcctctccaggcccaactcctgtcccaggacgtcatctccgggcccaaaacttactcaagtcagactctctagtcccaactgctgcctcctggtggcctatgaaggcccaaaatctcctcaagttgacctttccaggcccagctcctgcctcctgtcagcgtctacaggcccaacctctgcctcatgggggcttctccaggcccacctcttcctcttggctgggtctacaggcacaactgctgcctcacaacagccttttttggcccagttcctgtccagctcatggcggccaatgtaggcccaaaacttcctcaagtcaaactctccaggcccaccttctgcttcccggtggcatgaacaggcccagctttgacttgagaacagcctctgcaggccctgctcttgcctcccaggggctttttccaggcccagctcttgcctcatggcagctgccccaggccaaatttctgcctgcctgccagcagcctcaacaggcatagctcctccctcacagtggcccatttaggcccaactcatgactgtcgggccatttccaggcctagtgcctgcctcgtggctgactcttgaagcccaaaacttcctcaaatcagccttttgcccaacttctgtctactgtcggactctacaggccagcctctgcctcacagtggaccctccagacccagatggtgtctcactgtggcatcctcagnngaagctcctgcctttcngcagcctctccaggcccagctcctcctgcctcccagtggcctctttcggcccagcccagctcatggctctcggcggccttcccaggccccgcttttgacttttggcagcctcttcaggcgcagaacttgatctccagtcggcctttgcaggcccggcctcctgcctctcgaaggcctgcacgggcccggcctcggcctcggcctcacagcggactctccacgcccagctagctctcgcctcactgcggcctccccagtccaaagctcctgcctttcggccacttcggcaggtccagctcctgcctgccagtggcctctttaggcccagctcattcctcacgtcggccattccaggccccgtttttcccttccggcagcctcttggcctctaatttgtttatcttttgtgtataaatcccaaaatattgaattttggaatatttccaccattatgtaaatattttggtaggtaatttatttggagtgagtttctgcgccaagcccgaattttttattttattttccttattatttggtgttaaacaggtttaatgacggtcatggcaactttttggcacaatgaaaaatatcgccca

SEQ ID NO: 583271 - DNA, 935 bp, Homo sapiens
ggaagtctatgtacaaggacttttagcaaagatctttgagttggaaaagaaaacggaaacagcgtgctcattcactccgcacagcgagacaataaaagcctgaatcagaaggttatcttcaagaagagaagcagaaatgttactagacgatctcttgggaagtgcaaaagaaagatcttgaggttgaacgaaaagccataactcgagcgtgagttttgaactgagtgaatttcggaagaaaggtatgaagaaacccgaagaaagaagttcagaatttaacatcagctgttgtattcacaacagtaagggcagatgtgcaacatctggaagatgataggcatagaacagagaagatacaaagaacgtcaggcaagagaatgatattgctaggggaaaacgtttgaagaagagaagaagagatccgaagagctcttatctcaggtccagttgtctttgacacatctctgctatagcagcaagaagaacaaacaagggtagctctgttggaacaagcagatgccggcatgtactttagacttttgacacaatgagcaaactcgacgtcaacatgtgcagcatcaatgtgcatgtaattcttaaggagctccgaaaagcaagaaatcagataacgaacagttggcaatccttgaaacgagttcatgagtttgccatcacacgagccattagtcactttccaaggagagactgaaaaccagagaacaaagtttgccgcctcacaaaaaagtccactgctgactcaatgaaagcctggtggaaatgtcccaagtgcaatacaccaggtatccagcaatgaacattgggaactggttgtcatgtggaatactgtgcaaagtagcacagtagtattggggggagatacaagatcagtaaggtttgcggtaatgggggattgaaattattttgctttggtaaag

SEQ ID NO: 583272 - DNA, 276 bp, Homo sapiens
  misc_feature (16)..(16): n is a, c, g, or t
  misc_feature (108)..(108): n is a, c, g, or t
  misc_feature (138)..(138): n is a, c, g, or t
  misc_feature (172)..(172): n is a, c, g, or t
  misc_feature (208)..(209): n is a, c, g, or t
  misc_feature (228)..(229): n is a, c, g, or t
tgtcattgactcaggnctgtgtgcggcttatagggtcctcgtccctgaagagtgtgaggttgtgcttttggatgtgtcccagcagcaccgtgtcctctgctgctccangggtctggaggacactgcttacagccccantgggctccgccttggcttttcccagtaacactgnggtccatactgcgagcgagcattcagcagctatgtnntctgcagacaccctgtatnngcgagaaccttctactggcagactcaggaaaccgcgatctatgccct

SEQ ID NO: 583273 - DNA, 107 bp, Homo sapiens
atcgtcccgaggtactctccaaaacacgcccacgattttagctggagtcaggtccaggcacccaggactcacctacaaactcacggaccgttacatgctaaccctcc

SEQ ID NO: 583274 - DNA, 305 bp, Homo sapiens
cagaccgtggtgtctgactagctcggtcagagcgtggtgagtctgcactgacacgctcgtaggcagaaggtgcacctgggctgtgaggttgcacagacaatgctgagcactctagcactgtgaggctcgcggggcaaagctgcggcggttctggagccggccatattcacaggagctgtggcatactctcaaacgcagagaggagaagcaacggaacggtcgtcatctagcaatgaccacgaagtgatcctgaactcctacttacgtcatgcataactcaagacgtgttcattcccggactccgc

SEQ ID NO: 583275 - DNA, 162 bp, Homo sapiens
tccggatcgtataggagtactgagatgtagcagacaatgaagacgtattcagtcacgtgtccggccactacgtgtccggccacgtggccgacacgtagtggccggacacgtgcagcagaaagcatatgcacttttctatagacttgatttgtacgtgtccgg

SEQ ID NO: 583276 - DNA, 159 bp, Homo sapiens
ggtgcctttgccttttccttccagctgtgcatgtgcacacctccttctccttgcgtctcttcttgcatcgcctggcaggctggccgcattccctagtggctcacggtggtgtgcatctaggcagctgctgtctagctgcaggcaggggtcacgcagctc

SEQ ID NO: 583277 - DNA, 137 bp, Homo sapiens
tggccggacacgtagtggccggacacgtcttgacttgctcagcttttctttaacgtgtgtggccgacacgtagtggccggacacgtgcagcagaaagcatatgcacttttctatagacttgatttgtacgtgtccgg

SEQ ID NO: 583278 - DNA, 367 bp, Homo sapiens
atcccttctcagacagagaattcaagatagctatgttgggacacttaataactcagctacatcatgagaaggaattcagaattctatcagataaatctatcaaagagattgaaatcctaaaagagaacctagcataaattctggagtttaaaatgcagttgaaagactgaagaatgtgtgttttttaactagctgaattgatcaagaagaagaaagaattggtgagcttcacgacaagctatttataagatacaaaataattaagaatgacacatgcctagaagactctagaataatgcctctaaagggcatctctccgagttcttgaccattaagaagtggtagagagaagtatagcgtgacagtc

SEQ ID NO: 583279 - DNA, 232 bp, Homo sapiens
gctttgagagcgtatggctatttcaaaagattttattgaaacaagaacatatgattgagctaattttgctacttcacagcagtaaaagttactaaaagatcattagataatcaatatgcaaatcaaattaataatttaatttcacaaaataatgctgaaattaattctattaacaaaagagaaatagaattagataaaattattaaagaatatgatcaaaaaaaaaaagctt

SEQ ID NO: 583280 - DNA, 256 bp, Homo sapiens
  misc_feature (110)..(110): n is a, c, g, or t
gctgggtgtggcggctcacggccctgtaatcccagcactgtgggaggctgaggtgggagatctttttgagccctggaattcaagaccagtctagtctgggaaacacagcnaagacccgccttgctgggcgcggtggctcacgcctgtaatcccagcactttgggaggctgaggcgggcggatcacgaggtcaggagatcgagaccatcctgactaacacagtgagacactgtctctgctaaaaaaatagtcgacgc

SEQ ID NO: 583281 - DNA, 746 bp, Homo sapiens
gtgtgccgtggagatggggttcgccatgttgccaggctgtctcttaactcctggctcaagcaatccacccaccccagctcccaaagtgctggattacagatatgagccatcaacccagcctagatctctacttttaatatttcactttttatccctattaacaactacagtgcctggcatatagaagtcactcagtgaccaggtggtacggataatatgggtattaagctacaaccagattgcaaaaatactttcttttttaacggcagttatcagttggggtctcaaaggaagatagtgtgtctgctgctgcaactatttctccaacttttatcatccagataccaccttcacaattttgcagattcttgtgccacctgttaatattaattaaactctcacttttcacaattatttactcagtaatagatatagtctttcacaagtcatagttctaataaaagccttaagacaaaaagtcacctatcccagaggcaaccactttgtgagttccgcgttcctttccatattcctacattaatatctataatatactgatattcttggattggggacttctcaacgggtaattaaccttatggtaaacctgattaaccttcttggtgttcatcacattcatttcaatttccctaacttctggataccttaacattttctccgtggccctttgttttgcacactttcacagcacgaacgtcgacccactttaggaacccttttacaca

SEQ ID NO: 583282 - DNA, 383 bp, Homo sapiens
gaggcgagtggttttcggaaagccgccttcggtgtaaccgtggtggcgcaggaatttcgcgagaagggatatgccatcgatctcgcggtggtccgccgtcatgcgatcgtgcaccacgccgcgtggatccacgagctcgctgccgatcgtggtgtcctcgccttgctggtgcaagagatcgttatagtagccgagccagtcgcgcgatctggcccggtacacgctgaaagtcatgcctatgattttaaggcatgcgggagaacgcggctactgccgcgcgcccttacccggtagccggggcttcagagagcgcagctttcgctcgcttccaccacggtaggagtggtggtccaatactcgccgccggggcagtcaccgttgtt

SEQ ID NO: 583283 - DNA, 628 bp, Homo sapiens
tgaatcaggcaagatagtcccatataattcatgaattttgtttacagcactatcataatacagcattgggtcattgcatgtagccgtggtcgtaattaagtccacaataaaatattctgtagcccgaacaccagaccaactaaaatcaccaactgctcacgagccataatggtcagtgcaagaagttgcggtctctgtagtgacctccaagatgggtaaggctcttctgccagtgagtctctgaactatcgagcggctccttctcttgctcagcgaggacttggccgtcctcacttggagtcttggtcttcctattcatcctaacgggccggagtggctccccagctgtttcagttcatccaccacgtcccccttctggtgcatctgcagaatattgtcactgccccctacacagctcgccatggaggtcccttgcgggatgctgggccggttggaatactctttaatgccttgtcggagctccgggtcgtccagcacgttgtaggccgcgtaatcgcggccgccgtgcagccgcagtatctgcccggggggtgcttaagcggctggggctcccggggtcctgtagaaaccccactgttctctcccggggccaatttccgcggcgcgc

SEQ ID NO: 583284 - DNA, 175 bp, Homo sapiens
  misc_feature (3)..(4): n is a, c, g, or t
  misc_feature (35)..(35): n is a, c, g, or t
  misc_feature (39)..(39): n is a, c, g, or t
  misc_feature (141)..(141): n is a, c, g, or t
  misc_feature (147)..(147): n is a, c, g, or t
  misc_feature (151)..(151): n is a, c, g, or t
  misc_feature (162)..(162): n is a, c, g, or t
ttnnacccctccccaagtaggtgaaaacgtgcttntctnacacaaagacaaatggatcttctattcccagaggacagtggacaccaaaacctccctcttcagaatggaggtagacagataaaaatgagaggggcttgagtntcacangacnatctgaaagtnataattacgggct

SEQ ID NO: 583285 - DNA, 221 bp, Homo sapiens
  misc_feature (205)..(205): n is a, c, g, or t
tggacatcgaagactgagtgcagtagaatttattaagcgaaaaggaaaggtctcagcaaaaagaggggtcctgagagcaggttgctggttgcccccttcccagttgactacaagtggcttttacatatgaagctgagtggggctgggctcccgtgtttgcatacaggagcgaatttctgtgtggctccaccccgattcccccatngtgtataggggaccct

SEQ ID NO: 583286 - DNA, 1027 bp, Homo sapiens
aagtcaatacttgggtggtacccaaatctgcttccccatgaaacaaaaaaaaaaaaaaaaaaaaaaaaaaaaaaattttgggcggccctgggccccaaaaattttttaaaccattccgttgtgggcgcgcgggcccagtaaggttaagtatcgaaagtggctcatagcggggtctcctaaggaaagaacccgggccacgacaaagcgcgtgggattctcctcacaccaaaataaaaaacgccggcgggcacacggagcgtttgtggaaaaacatcccaaagggcagctcccgaggccacacagggggacctcacaacgcagcgcagcttccaaggcggagcctcgaatatatcaaattacacgccccgcactggacgacatcaaacgcgcagagcacgggccggacacatcccaatacaaccatgtgggccggcagcctggagacacgaccaatccaacgaacgacggcagtgattggcaaacacgaggcaaaccggcccaggggcgacactcaagcaccccgtggccgaccccatgtggcaggtacatacatatttcggcccacgtggctggcaacaccgcggggccccgaaccagatgtaggccgcagcagatggggcaccagttacaaagtccacaaaccggcgtggacacaccaccaaggcatgcgctgcaacagacagcagaaatatccgaaataccccttcggggacaaaaggcccagggctcgcacacggaaaaggcaccggactgaggcgcacagcttgtggtgtaaacaacgcgccgacaaagcggatgggacgtacatcgagacaccagaaaggtgcgcatgtgcctcggcacaggcgtttccaaggggtccaccatccaccgatatcccagcaacgggtacagctgcacaggaaacacgagaggtcatacaggcagagatatgcaccagggcaggggcaccagcacacagtgctccaacgtgtcgacacaccacagggataggagaccgagcagaacgagacatcaagcgtaacgg

SEQ ID NO: 583287 - DNA, 1935 bp, Homo sapiens
aatccattgcagctcgtcttatcaatgctacctttttatttttttcttttttgagttagggtctcactctgttacttaggctggaatacagtggcatgatcacggctcactgcagccttaacctcctggggtcaagccatcctcccacctcagcctcccaagtagctgggactacaggcacatgccaccacgcctggctaatttttgtattttttgtagggacggagtttcgccatgttagccaggctgcttttgaactcctgagctcaagcaatctgcctgcctctgcctcccaaagtgttgggattacagaggtgggccactgtgcctggccttctaatcaatgatacctaattctgtcttcggtcagtggaactcaactcaatttgtctcctgagtccttttgaaactattctaatcttgtcagtttcctcgctttctggtatggtaagatttccaggatcatgttgtacattttcagtccagatctgaaatcagtcatttctccaaggagccctggttttgttggaaatggtatttagcaaccagtctgggcaataagcaaattcattgccacttgtttggtcataggccttttcggtggacagagctaggaaaatattacctgattctccctctagccacacaaatcatgttaccttctggtcatctgaaggtcctctcttctccaagcggaaaccctctcaaccctgcctcagtcagtgccacagttttgaatctcctaactatatgttgtctttctgcactcttaatttgtgagtgccactcttttttttttttttttttttctgtgacagagcaagactgtctcaaaaaaaaagaaaaaacagaaaactacgtgggggcgagtgcggtgtcccacacctatgggaggccaaggtgggaggagttcaaggagttgaaggccaggaggcagaggttgcagtaagccaagatcaccccactgcactccatcctgggcgacagagcaagactctgtctccaaaaaaaaaaaaaaaaaaaatgccttaccagatgtgtggtagattacattactataagaaatatttattgtctcccttttctgcatttatgagtacttccctcacttgatgttggccaatggaatttagcaggcatgatctatttggtaggctgaatgatgccctcccccaccccccaaaaggtccacgagctaatctccagaacctgtgaatatgtaacttaacattgtaaaagacactttgcagatgtaattaaataacgttctggagatgtaattatctggctaggcccagtgtaatcacaaagggaggctttttttttgactctccagcctcccttataatctagagaggctggagagtcaaaaatcagaaaaagttggtgtaaaactggaagcaacagtagattggagatgctctactgtcagctctgaagatggacggagccacggaacaaggaaacggattctccctaagggagcacagccctgccgactccctgactgggcccatgcctccctccctcccttgattggcccagtgaaacccatttctgacttttgacctccagaaccataagacaataaatttgtgttattaggttggtgtaaatgtaattgcagtttttgccattactttgaaaatattttaggccgggcgctgtggctcacgcctgtaatcccagcactttgggaggccgaggagggcggatcacgaggtcaggagatcgagaccatcctcactaacatggtgaaaccccgtctctactaaaaatacaaaaaattagccaggagtggtggcgggcacctgtagctccagctactcgggaggatgaggcaggagaatggcgtgaacctgggactcggaggttgcagtgagccgacatgtgccactgcactccagcctgggtgacagagcaagactccatctc

SEQ ID NO: 583288 - DNA, 741 bp, Homo sapiens
  misc_feature (464)..(464): n is a, c, g, or t
cagacaccatagggagaaagtacatcagccaggtggcagtgtcagagacgcagcactgggagaggaggacatcgctcaggcgtggcccccaggactccgaggggggaaaggcggggcaacgcgcaaaccttttggccaaagaaacccgggcggggcctttggcgaacaatcccccgttagcccaaaggcgcgcgccaacggggaccctttaaggccaggcgtgctgcggcccaaggaggctaggcctttttaggccccacgggcccctatagctaggcgggacgcgacgcgagcgaaagcgggcacgcggcggcgcccagttgggggcccaacaattccttgaacccaattgtggcgcccagggataccccctagccttggaacttgagtgctccccaacctccttaagggaaagcccccacaagttagagcccccaaggaagcctttagcgagttagttgctnagaccgaagctacggcgttggaatccaccctaacttggggagtttggcttggagccaggcaacttagaaagcgaacccgtgagcgaaaccccgggtgggaacccttaatttccaatcaccccccttaaagtacgtggccaacagctggaggaacttttctagagggccgttccctctcggggccaaccttccccacaaaggggaccttggggcgaacagcctggggaagtatccttggctccgtagggggcaaggccaagttgaacttcaagacctg

SEQ ID NO: 583289 - DNA, 877 bp, Homo sapiens
gaattcgtttgaactttttaggccaaaggcagcatgtaggaaactaactttaaatgggtatgtggtagaatataactgtatattttactgttactgcaatagcatctttaatgggatttattaggtgatatactgcatccttaatgtaattgagtgtagcaacactcatgtatcatgtgtagaaattaacacttgcagttaactgctaaaaaaaacaacacttagaacaattggtgcagggctaagtaagattccattaaccgttattttcaaaaggatgggcatttttaacaccaaactagcaattttattttctcaatgagcaggtatcgggaactccctaagccatctactcttacaccaaccccttcatcggacccaaacacctctctgatgctcagagctcaactcctagtaccctttaagccaccctatccccacgattccaggctgcaactcctcagccacactttgttaattacagttggctcacgcagcaaaggtctcctgagcacaggccatgctgtcaacaaccatccttattttccacaattggtacctatctaataactcccaggacacccacggcacacaccaggtctatggcaaaactctgtgtggacttaaattattaacggtgggggcatgatgtggcggccaagtatgagaagtggttaaaccatggtggcgtgtacacatgtgtgctaattccttgaggaaaacactgaaggtttaccctaggagttgtaccatgtatgccattgatgagccattaacagggttcttgtgttcaacttctagtctggcctacaactcaaacagggactattatccaattacgcaacaggtccgtacacaacgtcacatctacacacat

SEQ ID NO: 583290 - DNA, 414 bp, Homo sapiens
  misc_feature (279)..(279): n is a, c, g, or t
tgggtaaaagcctgtgagcctaagagctaatcctgtaacatggctcctttacctacacactggggatttgacctctatctccaactctcaattaatatgggtggcctatttgctcttattaaaagaaaaagggggaactgtgggaagccgcccccacattcgccgtcacaagatggcgctgacatcctgtgttctaagttggtaaacaaataatctgcgcatgagccaagggtatttacgaccacttgtactctgtttttcccgtgaacgtcagctcgnccatggctgcagccaatcagggagtgatgcgccctaggcaatggttgttctctttaaagagggaaggggttttcgttttctctctcttgcttcttgctctcttttcctgaagatgtaagaataaagctttgtcgc

SEQ ID NO: 583291 - DNA, 2395 bp, Homo sapiens
  misc_feature (15)..(16): n is a, c, g, or t
  misc_feature (22)..(22): n is a, c, g, or t
  misc_feature (34)..(34): n is a, c, g, or t
  misc_feature (71)..(71): n is a, c, g, or t
  misc_feature (1781)..(1782): n is a, c, g, or t
  misc_feature (1799)..(1799): n is a, c, g, or t
taccccggagctctnnaggccnagaacttttcantcagcctctacagaccaagctcatgactcacaatggnctatttaggcccataccctacgtcacggcagcctccgcagatgagcctactgcctcacaacagcctccacaggcacagctccatcgttacaatggcctctttagacccagctcctgcctcccagccttctctccaggccctgaactttctcaggtctccctctgttgtccaaggctggagtgtagtagtgctatcgcagctgactgcagcctcaaccttccaggctgaagcgatcctcccacctcaacctcccacgtggctgagactacaggtgcttgccactatgcccaactaatatttggaattttcgtatacgtggattccagaggggtgacagcgaaacgtgggaccatccagttgcaggaaaacaagcttaacacgcccactgattctacattatgctcctacctcccggcagcctctccaggcccagaactttctccagtcagcctctacagaccaagctcatgactcacaatggcctatttaggcccataccctacgtcacggcagtctccgcagatgagcctactgcctcacaacagcctccacaggcacagctccatcgttacaatggcctctttagacccagctcctgcctcccagccttctctccaggccctgaactttctcaagtcgacctcaccaggcccagctcatgcttctttgcagcctctccaggcccagctcctgcatcttggtggcccctccaggcccagcctctgcctcacagcagattcttcacgcccagcatctacctcactgtggaccccccaagccaagctcccaacctttcagcagcttctacacacccagctcctgccacccagtggcctctttaggccaagctcatgcttcacaagggcctttccaggcccaacttttgtctcatggcaaccttccctggccagattcctgcctgtctcccagcagcctagacaggcccaggtcttgcctcacactggcctctctacatccagcttatgcctcacggtggcctctccaggcccaactcctgtcccaggacgtcatctccgggcccaaaacttactcaagtcagactctctagtcccaactgctgcctcctggtggcctatgaaggcccaaaatctcctcaagttgacctttccaggcccagctcctgcctcctgtcagcgtctacaggcccaacctctgcctcatgggggcttctccaggcccacctcttcctcttggctgggtctacaggcacaactgctgcctcacaacagccttttttggcccagttcctgtccagctcatggcggccaatgtaggcccaaaacttcctcaagtcaaactctccaggcccaccttctgcttcccggtggcatgaacaggcccagctttgacttgagaacagcctctgcaggccctgctcttgcctcccaggggctttttccaggcccagctcttgcctcatggcagctgccccaggccaaatttctgcctgcctgccagcagcctcaacaggcatagctcctccctcacagtggcccatttaggcccaactcatgactgtcgggccatttccaggcctagtgcctgcctcgtggctgactcttgaagcccaaaacttcctcaaatcagccttttgcccaacttctgtctactgtcggactctacaggccagcctctgcctcacagtggaccctccagacccagatggtgtctcactgtggcatcctcagnngaagctcctgcctttcngcagcctctccaggcccagctcctcctgcctcccagtggcctctttcggcccagcccagctcatggctctcggcggccttcccaggccccgcttttgacttttggcagcctcttcaggcgcagaacttgatctccagtcggcctttgcaggcccggcctcctgcctctcgaaggcctgcacgggcccggcctcggcctcggcctcacagcggactctccacgcccagctagctctcgcctcactgcggcctccccagtccaaagctcctgcctttcggccacttcggcaggtccagctcctgcctgccagtggcctctttaggcccagctcattcctcacgtcggccattccaggccccgtttttcccttccggcagcctcttggcctctaatttgtttatcttttgtgtataaatcccaaaatattgaattttggaatatttccaccattatgtaaatattttggtaggtaatttatttggagtgagtttctgcgccaagcccgaattttttattttattttccttattatttggtgttaaacaggtttaatgacggtcatggcaactttttggcacaatgaaaaatatcgccca

SEQ ID NO: 583292 - DNA, 2428 bp, Homo sapiens
  misc_feature (15)..(16): n is a, c, g, or t
  misc_feature (22)..(22): n is a, c, g, or t
  misc_feature (34)..(34): n is a, c, g, or t
  misc_feature (71)..(71): n is a, c, g, or t
  misc_feature (1814)..(1815): n is a, c, g, or t
  misc_feature (1832)..(1832): n is a, c, g, or t
taccccggagctctnnaggccnagaacttttcantcagcctctacagaccaagctcatgactcacaatggnctatttaggcccataccctacgtcacggcagcctccgcagatgagcctactgcctcacaacagcctccacaggcacagctccatcgttacaatggcctctttagacccagctcctgcctcccagccttctctccaggccctgaactttctcaggtctccctctgttgtccaaggctggagtgtagtagtgctatcgcagctgactgcagcctcaaccttccaggctgaagcgatcctcccacctcaacctcccacgtggctgagactacaggtgcttgccactatgcccaactaatatttggaattttcgtatacgtggattccagaggggtgacagcgaaacgtgggaccatccagttgcaggaaaacaagcttaagacgcccactgattctacattatggctcctacctcccggcagcctctccaggcccagaactttctccagtcagcctctacagaccaagctcatgactcacaatggcctatttaggcccataccctacgtcacggcagtctccgcagatgagcctactgcctcacaacagcctccacaggcacagctccatcgttacaatggcctctttagacccagctcctgcctcccagccttctctccaggccctgaactttctcaagtcgacctcaccaggcccagctcatgcttctttgcagcctctccaggcccagctcctgcatcttggtggcccctccaggcccagcctctgcctcccgtcagcctctacagtcccaacgtctgcctcacagcagattcttcacgcccagcatctacctcactgtggaccccccaagccaagctcccaacctttcagcagcttctacacacccagctcctgccacccagtggcctctttaggccaagctcatgcttcacaagggcctttccaggcccaacttttgtctcatggcaaccttccctggccagattcctgcctgtctcccagcagcctagacaggcccaggtcttgcctcacactggcctctctacatccagcttatgcctcacggtggcctctccaggcccaactcctgtcccaggacgtcatctccgggcccaaaacttactcaagtcagactctctagtcccaactgctgcctcctggtggcctatgaaggcccaaaatctcctcaagttgacctttccaggcccagctcctgcctcctgtcagcgtctacaggcccaacctctgcctcatgggggcttctccaggcccacctcttcctcttggctgggtctacaggcacaactgctgcctcacaacagccttttttggcccagttcctgtccagctcatggcggccaatgtaggcccaaaacttcctcaagtcaaactctccaggcccaccttctgcttcccggtggcatgaacaggcccagctttgacttgagaacagcctctgcaggccctgctcttgcctcccaggggctttttccaggcccagctcttgcctcatggcagctgccccaggccaaatttctgcctgcctgccagcagcctcaacaggcatagctcctccctcacagtggcccatttaggcccaactcatgactgtcgggccatttccaggcctagtgcctgcctcgtggctgactcttgaagcccaaaacttcctcaaatcagccttttgcccaacttctgtctactgtcggactctacaggccagcctctgcctcacagtggaccctccagacccagatggtgtctcactgtggcatcctcagnngaagctcctgcctttcngcagcctctccaggcccagctcctcctgcctcccagtggcctctttcggcccagcccagctcatggctctcggcggccttcccaggccccgcttttgacttttggcagcctcttcaggcgcagaacttgatctccagtcggcctttgcaggcccggcctcctgcctctcgaaggcctgcacgggcccggcctcggcctcggcctcacagcggactctccacgcccagctagctctcgcctcactgcggcctccccagtccaaagctcctgcctttcggccacttcggcaggtccagctcctgcctgccagtggcctctttaggcccagctcattcctcacgtcggccattccaggccccgtttttcccttccggcagcctcttggcctctaatttgtttatcttttgtgtataaatcccaaaatattgaattttggaatatttccaccattatgtaaatattttggtaggtaatttatttggagtgagtttctgcgccaagcccgaattttttattttattttccttattatttggtgttaaacaggtttaatgacggtcatggcaactttttggcacaatgaaaaatatcgccca

SEQ ID NO: 583293 - DNA, 2427 bp, Homo sapiens
  misc_feature (15)..(16): n is a, c, g, or t
  misc_feature (22)..(22): n is a, c, g, or t
  misc_feature (34)..(34): n is a, c, g, or t
  misc_feature (71)..(71): n is a, c, g, or t
  misc_feature (425)..(425): n is a, c, g, or t
  misc_feature (459)..(459): n is a, c, g, or t
  misc_feature (1813)..(1814): n is a, c, g, or t
  misc_feature (1831)..(1831): n is a, c, g, or t
taccccggagctctnnaggccnagaacttttcantcagcctctacagaccaagctcatgactcacaatggnctatttaggcccataccctacgtcacggcagcctccgcagatgagcctactgcctcacaacagcctccacaggcacagctccatcgttacaatggcctctttagacccagctcctgcctcccagccttctctccaggccctgaactttctcaggtctccctctgttgtccaaggctggagtgtagtagtgctatcgcagctgactgcagcctcaaccttccaggctgaagcgatcctcccacctcaacctcccacgtggctgagactacaggtgcttgccactatgcccaactaatatttggaattttcgtatacgtggattccagaggggtgacagcgaaacgtgggaccatncagttgcaggaaaacaagcttaacacgcccactnattctacattatgctcctacctcccggcagcctctccaggcccagaactttctccagtcagcctctacagaccaagctcatgactcacaatggcctatttaggcccataccctacgtcacggcagtctccgcagatgagcctactgcctcacaacagcctccacaggcacagctccatcgttacaatggcctctttagacccagctcctgcctcccagccttctctccaggccctgaactttctcaagtcgacctcaccaggcccagctcatgcttctttgcagcctctccaggcccagctcctgcatcttggtggcccctccaggcccagcctctgcctcccgtcagcctctacagtcccaacgtctgcctcacagcagattcttcacgcccagcatctacctcactgtggaccccccaagccaagctcccaacctttcagcagcttctacacacccagctcctgccacccagtggcctctttaggccaagctcatgcttcacaagggcctttccaggcccaacttttgtctcatggcaaccttccctggccagattcctgcctgtctcccagcagcctagacaggcccaggtcttgcctcacactggcctctctacatccagcttatgcctcacggtggcctctccaggcccaactcctgtcccaggacgtcatctccgggcccaaaacttactcaagtcagactctctagtcccaactgctgcctcctggtggcctatgaaggcccaaaatctcctcaagttgacctttccaggcccagctcctgcctcctgtcagcgtctacaggcccaacctctgcctcatgggggcttctccaggcccacctcttcctcttggctgggtctacaggcacaactgctgcctcacaacagccttttttggcccagttcctgtccagctcatggcggccaatgtaggcccaaaacttcctcaagtcaaactctccaggcccaccttctgcttcccggtggcatgaacaggcccagctttgacttgagaacagcctctgcaggccctgctcttgcctcccaggggctttttccaggcccagctcttgcctcatggcagctgccccaggccaaatttctgcctgcctgccagcagcctcaacaggcatagctcctccctcacagtggcccatttaggcccaactcatgactgtcgggccatttccaggcctagtgcctgcctcgtggctgactcttgaagcccaaaacttcctcaaatcagccttttgcccaacttctgtctactgtcggactctacaggccagcctctgcctcacagtggaccctccagacccagatggtgtctcactgtggcatcctcagnngaagctcctgcctttcngcagcctctccaggcccagctcctcctgcctcccagtggcctctttcggcccagcccagctcatggctctcggcggccttcccaggccccgcttttgacttttggcagcctcttcaggcgcagaacttgatctccagtcggcctttgcaggcccggcctcctgcctctcgaaggcctgcacgggcccggcctcggcctcggcctcacagcggactctccacgcccagctagctctcgcctcactgcggcctccccagtccaaagctcctgcctttcggccacttcggcaggtccagctcctgcctgccagtggcctctttaggcccagctcattcctcacgtcggccattccaggccccgtttttcccttccggcagcctcttggcctctaatttgtttatcttttgtgtataaatcccaaaatattgaattttggaatatttccaccattatgtaaatattttggtaggtaatttatttggagtgagtttctgcgccaagcccgaattttttattttattttccttattatttggtgttaaacaggtttaatgacggtcatggcaactttttggcacaatgaaaaatatcgccca

SEQ ID NO: 583294 - DNA, 2020 bp, Homo sapiens
  misc_feature (1406)..(1407): n is a, c, g, or t
  misc_feature (1424)..(1424): n is a, c, g, or t
gaccccttagccgctagaggcccgggtgccgctagaggcccgggtgccgctagaggcccgggtgccgctagaggcccggatgccgctagaggcccagaactttctccagtcagcctctacagaccaagctcatgactcacaatggcctatttaggcccataccctacgtcacggcagtctccgcagatgagcctactgcctcacaacagcctccacaggcacagctccatcgttacaatggcctctttagacccagctcctgcctcccagccttctctccaggccctgaactttctcaagtcgacctcaccaggcccagctcatgcttctttgcagcctctccaggcccagctcctgcatcttggtggcccctccaggcccagcctctgcctcccgtcagcctctacagtcccaacgtctgcctcacagcagattcttcacgcccagcatctacctcactgtggaccccccaagccaagctcccaacctttcagcagcttctacacacccagctcctgccacccagtggcctctttaggccaagctcatgcttcacaagggcctttccaggcccaacttttgtctcatggcaaccttccctggccagattcctgcctgtctcccagcagcctagacaggcccaggtcttgcctcacactggcctctctacatccagcttatgcctcacggtggcctctccaggcccaactcctgtcccaggacgtcatctccgggcccaaaacttactcaagtcagactctctagtcccaactgctgcctcctggtggcctatgaaggcccaaaatctcctcaagttgacctttccaggcccagctcctgcctcctgtcagcgtctacaggcccaacctctgcctcatgggggcttctccaggcccacctcttcctcttggctgggtctacaggcacaactgctgcctcacaacagccttttttggcccagttcctgtccagctcatggcggccaatgtaggcccaaaacttcctcaagtcaaactctccaggcccaccttctgcttcccggtggcatgaacaggcccagctttgacttgagaacagcctctgcaggccctgctcttgcctcccaggggctttttccaggcccagctcttgcctcatggcagctgccccaggccaaatttctgcctgcctgccagcagcctcaacaggcatagctcctccctcacagtggcccatttaggcccaactcatgactgtcgggccatttccaggcctagtgcctgcctcgtggctgactcttgaagcccaaaacttcctcaaatcagccttttgcccaacttctgtctactgtcggactctacaggccagcctctgcctcacagtggaccctccagacccagatggtgtctcactgtggcatcctcagnngaagctcctgcctttcngcagcctctccaggcccagctcctcctgcctcccagtggcctctttcggcccagcccagctcatggctctcggcggccttcccaggccccgcttttgacttttggcagcctcttcaggcgcagaacttgatctccagtcggcctttgcaggcccggcctcctgcctctcgaaggcctgcacgggcccggcctcggcctcggcctcacagcggactctccacgcccagctagctctcgcctcactgcggcctccccagtccaaagctcctgcctttcggccacttcggcaggtccagctcctgcctgccagtggcctctttaggcccagctcattcctcacgtcggccattccaggccccgtttttcccttccggcagcctcttggcctctaatttgtttatcttttgtgtataaatcccaaaatattgaattttggaatatttccaccattatgtaaatattttggtaggtaatttatttggagtgagtttctgcgccaagcccgaattttttattttattttccttattatttggtgttaaacaggtttaatgacggtcatggcaactttttggcacaatgaaaaatatcgccca

SEQ ID NO: 583295 - DNA, 187 bp, Homo sapiens
ttcatcttgtctacaccagaggtttccacttttgcttcttcctcatttatctcttgctgctgccatgtatgaagtgcctttcacctcctgccatgatactgaggcctcccagccacgtggaactgtaagtccaattaaacctcttttttcttcccagcagcgtgaaatgggtatgtctttatcaaca

SEQ ID NO: 583296 - DNA, 314 bp, Homo sapiens
  misc_feature (127)..(127): n is a, c, g, or t
attccgcagcgttagacggcgacaccattattcagtatatactaaacctactggaatgcaaaagcattcatcatcgttcatattggccatcagtcaatgtattcattggcgatagcagcctcacaanccagcatcacaggtcatcaataggcaatttatagttcaatacacatggcatttgaaatcagtaaatccaaggccagtttatcaatatgtggtactacaataattggccgtgtttctcgcacgcgcgagctattgtatccactatcccacaccacatactgacacgcattccatggcggtacaagctt

SEQ ID NO: 583297 - DNA, 2405 bp, Homo sapiens
  misc_feature (15)..(16): n is a, c, g, or t
  misc_feature (22)..(22): n is a, c, g, or t
  misc_feature (34)..(34): n is a, c, g, or t
  misc_feature (71)..(71): n is a, c, g, or t
  misc_feature (1813)..(1814): n is a, c, g, or t
  misc_feature (1831)..(1831): n is a, c, g, or t
taccccggagctctnnaggccnagaacttttcantcagcctctacagaccaagctcatgactcacaatggnctatttaggcccataccctacgtcacggcagcctccgcagatgagcctactgcctcacaacagcctccacaggcacagctccatcgttacaatggcctctttagacccagctcctgcctcccagccttctctccaggccctgaactttctcaggtctccctctgttgtccaaggctggagtgtagtagtgctatcgcagctgactgcagcctcaaccttccaggctgaagcgatcctcccacctcaacctcccacgtggctgagactacaggtgcttgccactatgcccaactaatatttggaattttcgtatacgtggattccagaggggtgacagcgaaacgtgggaccatccagttgcaggaaaacaagcttaacacgcccactgattctacattatgctcctacctcccggcagcctctccaggcccagaactttctccagtcagcctctacagaccaagctcatgactcacaatggcctatttaggcccataccctacgtcacggcagtctccgcagatgagcctactgcctcacaacagcctccacaggcacagctccatcgttacaatggcctctttagacccagctcctgcctcccagccttctctccaggccctgaactttctcaagtcgacctcaccaggcccagctcatgcttctttgcagcctctccaggcccagctcctgcatcttggtggcccctccaggcccagcctctgcctcccgtcagcctctacagtcccaacgtctgcctcacagcagattcttcacgcccagcatctacctcactgtggaccccccaagccaagctcccaacctttcagcagcttctacacacccagctcctgccacccagtggcctctttaggccaagctcatgcttcacaagggcctttccaggcccaacttttgtctcatggcaaccttccctggccagattcctgcctgtctcccagcagcctagacaggcccaggtcttgcctcacactggcctctctacatccagcttatgcctcacggtggcctctccaggcccaactcctgtcccaggacgtcatctccgggcccaaaacttactcaagtcagactctctagtcccaactgctgcctcctggtggcctatgaaggcccaaaatctcctcaagttgacctttccaggcccagctcctgcctcctgtcagcgtctacaggcccaacctctgcctcatgggggcttctccaggcccacctcttcctcttggctgggtctacaggcacaactgctgcctcacaacagccttttttggcccagttcctgtccagctcatggcggccaatgtaggcccaaaacttcctcaagtcaaactctccaggcccaccttctgcttcccggtggcatgaacaggcccagctttgacttgagaacagcctctgcaggccctgctcttgcctcccaggggctttttccaggcccagctcttgcctcatggcagctgccccaggccaaatttctgcctgcctgccagcagcctcaacaggcatagctcctccctcacagtggcccatttaggcccaactcatgactgtcgggccatttccaggcctagtgcctgcctcgtggctgactcttgaagcccaaaacttcctcaaatcagccttttgcccaacttctgtctactgtcggactctacaggccagcctctgcctcacagtggaccctccagacccagatggtgtctcactgtggcatcctcagnngaagctcctgcctttcngcagcctctccaggcccagctcctcctgcctcccagtggcctctttcggcccagcccagctcatgcctcccggcggccttcccaagccccgcttttgacttttggtggcctctgcaggcctcgacaaggcccagcctcctgcctctcgaaggcctgcacgggcccggcctcggcctcggcctcacagcggactctccacgcccagctagctctcgcctcactgcggcctccccagtccaaagctcctgcctttcggccacttcggcaggtccagctcctgcctgccagtggcctctttaggcccagctcattcctcacgtcggccattccaggccccgtttttcccttccggcagcctcttggcctctaatttgtttatcttttgtgtataaatcccaaaatattgaattttggaatatttccaccattatgtaaatattttggtaggtaatttatttggagtgagtttctgcgccaagcccgaattttttattttattttccttattatttggtgttaaacaggtttaatgacggtcatggcaactttttggcacaatgaaaaatatcgccca

SEQ ID NO: 583298 - DNA, 289 bp, Homo sapiens
tccccctttttggtccctttccccaaagccaccaattgggtgggatgatggttggacggggaaagaggaggggtaggaggatgcagggatgaggggatgaggggatcgagggatgtatggataaatagatagacccagtcatctgaagcaactaaaaaatggtagcctggactcctggagagggtaaattccgatccaggaaacttttatttagccccggccagaggccaaaaattttatccatttaaacactcagataggttcttaaaaggggggaccctcatagagt

SEQ ID NO: 583299 - DNA, 2427 bp, Homo sapiens
  misc_feature (15)..(16): n is a, c, g, or t
  misc_feature (22)..(22): n is a, c, g, or t
  misc_feature (34)..(34): n is a, c, g, or t
  misc_feature (71)..(71): n is a, c, g, or t
  misc_feature (421)..(421): n is a, c, g, or t
  misc_feature (429)..(429): n is a, c, g, or t
  misc_feature (447)..(447): n is a, c, g, or t
  misc_feature (450)..(450): n is a, c, g, or t
  misc_feature (456)..(456): n is a, c, g, or t
  misc_feature (459)..(461): n is a, c, g, or t
  misc_feature (465)..(465): n is a, c, g, or t
  misc_feature (1813)..(1814): n is a, c, g, or t
  misc_feature (1831)..(1831): n is a, c, g, or t
taccccggagctctnnaggccnagaacttttcantcagcctctacagaccaagctcatgactcacaatggnctatttaggcccataccctacgtcacggcagcctccgcagatgagcctactgcctcacaacagcctccacaggcacagctccatcgttacaatggcctctttagacccagctcctgcctcccagccttctctccaggccctgaactttctcaggtctccctctgttgtccaaggctggagtgtagtagtgctatcgcagctgactgcagcctcaaccttccaggctgaagcgatcctcccacctcaacctcccacgtggctgagactacaggtgcttgccactatgcccaactaatatttggaattttcgtatacgtggattccagaggggtgacagcgaaacgtgggancatccagntgcaggaaaacaagcttnacncgcccnctnnntctncattatgctcctacctcccggcagcctctccaggcccagaactttctccagtcagcctctacagaccaagctcatgactcacaatggcctatttaggcccataccctacgtcacggcagtctccgcagatgagcctactgcctcacaacagcctccacaggcacagctccatcgttacaatggcctctttagacccagctcctgcctcccagccttctctccaggccctgaactttctcaagtcgacctcaccaggcccagctcatgcttctttgcagcctctccaggcccagctcctgcatcttggtggcccctccaggcccagcctctgcctcccgtcagcctctacagtcccaacgtctgcctcacagcagattcttcacgcccagcatctacctcactgtggaccccccaagccaagctcccaacctttcagcagcttctacacacccagctcctgccacccagtggcctctttaggccaagctcatgcttcacaagggcctttccaggcccaacttttgtctcatggcaaccttccctggccagattcctgcctgtctcccagcagcctagacaggcccaggtcttgcctcacactggcctctctacatccagcttatgcctcacggtggcctctccaggcccaactcctgtcccaggacgtcatctccgggcccaaaacttactcaagtcagactctctagtcccaactgctgcctcctggtggcctatgaaggcccaaaatctcctcaagttgacctttccaggcccagctcctgcctcctgtcagcgtctacaggcccaacctctgcctcatgggggcttctccaggcccacctcttcctcttggctgggtctacaggcacaactgctgcctcacaacagccttttttggcccagttcctgtccagctcatggcggccaatgtaggcccaaaacttcctcaagtcaaactctccaggcccaccttctgcttcccggtggcatgaacaggcccagctttgacttgagaacagcctctgcaggccctgctcttgcctcccaggggctttttccaggcccagctcttgcctcatggcagctgccccaggccaaatttctgcctgcctgccagcagcctcaacaggcatagctcctccctcacagtggcccatttaggcccaactcatgactgtcgggccatttccaggcctagtgcctgcctcgtggctgactcttgaagcccaaaacttcctcaaatcagccttttgcccaacttctgtctactgtcggactctacaggccagcctctgcctcacagtggaccctccagacccagatggtgtctcactgtggcatcctcagnngaagctcctgcctttcngcagcctctccaggcccagctcctcctgcctcccagtggcctctttcggcccagcccagctcatggctctcggcggccttcccaggccccgcttttgacttttggcagcctcttcaggcgcagaacttgatctccagtcggcctttgcaggcccggcctcctgcctctcgaaggcctgcacgggcccggcctcggcctcggcctcacagcggactctccacgcccagctagctctcgcctcactgcggcctccccagtccaaagctcctgcctttcggccacttcggcaggtccagctcctgcctgccagtggcctctttaggcccagctcattcctcacgtcggccattccaggccccgtttttcccttccggcagcctcttggcctctaatttgtttatcttttgtgtataaatcccaaaatattgaattttggaatatttccaccattatgtaaatattttggtaggtaatttatttggagtgagtttctgcgccaagcccgaattttttattttattttccttattatttggtgttaaacaggtttaatgacggtcatggcaactttttggcacaatgaaaaatatcgccca

SEQ ID NO: 583300 - DNA, 88 bp, Homo sapiens
gccaccctcccatccctgagccaggcagagccgcaggagctccctccttcaggaaggcctccgacacagctgcgtccctgagtcaccg

SEQ ID NO: 583301 - DNA, 1527 bp, Homo sapiens
  misc_feature (15)..(16): n is a, c, g, or t
  misc_feature (22)..(22): n is a, c, g, or t
  misc_feature (34)..(34): n is a, c, g, or t
  misc_feature (71)..(71): n is a, c, g, or t
  misc_feature (913)..(914): n is a, c, g, or t
  misc_feature (931)..(931): n is a, c, g, or t
taccccggagctctnnaggccnagaacttttcantcagcctctacagaccaagctcatgactcacaatggnctatttaggcccataccctacgtcacggcagcctccgcagatgagcctactgcctcacaacagcctccacaggcacagctccatcgttacaatggcctctttagacccagctcctgcctcccagccttctctccaggccctgaactttctcaggtctccctctgttgtccaaggctggagtgtagtagtgctatcgcagctgactgcagcctcaaccttccaggctgaagcgatcctcccacctcaacctcccacgtggctgagactacaggtgcttgccactatgcccaactaatatttggaattttcgtatacgtggattccagaggggtgacagcgaaacgtgggaccatccagttgcaggaaaacaagcttaacacgcccactgattctacattatgctcctacctcccggcagcctctccaggcccagaactttctccagtcagcctctacagaccaagctcatgactcacaatggcctatttaggcccataccctacgtcacggcagtctccgcagatgagcctactgcctcacaacagcctccacaggcacagctccatcgttacaatggcctctttagacccagctcctgcctcccagccttctctccaggccctgaactttctcaagtcgacctcaccaggcccagctcatgcttctttgcagcctctccaggcccagctcctgcatcttggtggcccctccaggcccagcctctgcctcccgtcagcctctacagtcccaacgtctgcctcacagcagattcttcacgcccagcctctgcctcacagtggaccctccagacccagatggtgtctcactgtggcatcctcagnngaagctcctgcctttcngcagcctctccaggcccagctcctcctgcctcccagtggcctctttcggcccagcccagctcatggctctcggcggccttcccaggccccgcttttgacttttggcagcctcttcaggcgcagaacttgatctccagtcggcctttgcaggcccggcctcctgcctctcgaaggcctgcacgggcccggcctcggcctcggcctcacagcggactctccacgcccagctagctctcgcctcactgcggcctccccagtccaaagctcctgcctttcggccacttcggcaggtccagctcctgcctgccagtggcctctttaggcccagctcattcctcacgtcggccattccaggccccgtttttcccttccggcagcctcttggcctctaatttgtttatcttttgtgtataaatcccaaaatattgaattttggaatatttccaccattatgtaaatattttggtaggtaatttatttggagtgagtttctgcgccaagcccgaattttttattttattttccttattatttggtgttaaacaggtttaatgacggtcatggcaactttttggcacaatgaaaaatatcgccca

SEQ ID NO: 583302 - DNA, 2084 bp, Homo sapiens
  misc_feature (15)..(16): n is a, c, g, or t
  misc_feature (22)..(22): n is a, c, g, or t
  misc_feature (34)..(34): n is a, c, g, or t
  misc_feature (71)..(71): n is a, c, g, or t
  misc_feature (817)..(817): n is a, c, g, or t
  misc_feature (1041)..(1041): n is a, c, g, or t
  misc_feature (1196)..(1196): n is a, c, g, or t
taccccggagctctnnaggccnagaacttttcantcagcctctacagaccaagctcatgactcacaatggnctatttaggcccataccctacgtcacggcagcctccgcagatgagcctactgcctcacaacagcctccacaggcacagctccatcgttacaatggcctctttagacccagctcctgcctcccagccttctctccaggccctgaactttctcaggtctccctctgttgtccaaggctggagtgtagtagtgctatcgcagctgactgcagcctcaaccttccaggctgaagcgatcctcccacctcaacctcccacgtggctgagactacaggtgcttgccactatgcccaactaatatttggaattttcgtatacgtggattccagaggggtgacagcgaaacgtgggaccatccagttgcaggaaaacaagcttaacacgcccactgattctacattatgctcctacctcccggcagcctctccaggcccagaactttctccagtcagcctctacagaccaagctcatgactcacaatggcctatttaggcccataccctacgtcacggcagtctccgcagatgagcctactgcctcacaacagcctccacaggcacagctccatcgttacaatggcctctttagacccagctcctgcctcccagccttctctccaggccctgaactttctcaagtcgacctcaccaggcccagctcatgcttctttgcagcctctccaggcccagcctcctgcctcccgaaggcctgcacaggcccagcctctgcctcacagcggactctccangcccagctagctgttgcttcactgcggcctcccgagtccaaagctcctgcctctcggccgcttcggcaggcccagctcccgcctgccagtggcctcttcaggcccatggggctcattcctgacaacggcctttccaggcccagtttttcccttccggcggcctctccgggcccagaacctcctcaagtcggcctctccagacccacttgcaccctccgggcgtnctctccgggcccagctcttcttcctggttgcgtctccaggcccgactcctgcctcccaacaacgtctttggactcagctcctgcccagctcccagcggccctggtaggcccacaacttccctaagccaagctccccaggcccagctcaggcctcncggtggcctctccaggctcagctcctggccctccgatgacatctgcaggccccaaatggcctccggtcggtgggctcctctaggcccagcttgggcctcccggcggcctctgcaggcccaaatcgtcccgaagtcagtctctccaggcttagctccagcctcccggcggcctctgcaggcccaagtcgtcctcaagtcggcctggaagtgggcctggaagagcagcaagtcggcctccccgggcccagctccgtcctctcggcggcctctccaggtgcaaaacttcctcgagtcagcctctccaggcccagctcctcctgcctcccagtggcctctttcggcccagcccagctcatggctctcggcggccttcccaggccccgcttttgacttttggcagcctcttcaggcgcagaacttgatctccagtcggcctttgcaggcccggcctcctgcctctcgaaggcctgcacgggcccggcctcggcctcggcctcacagcggactctccacgcccagctagctctcgcctcactgcggcctccccagtccaaagctcctgcctttcggccacttcggcaggtccagctcctgcctgccagtggcctctttaggcccagctcattcctcacgtcggccattccaggccccgtttttcccttccggcagcctcttggcctctaatttgtttatcttttgtgtataaatcccaaaatattgaattttggaatatttccaccattatgtaaatattttggtaggtaatttatttggagtgagtttctgcgccaagcccgaattttttattttattttccttattatttggtgttaaacaggtttaatgacggtcatggcaactttttggcacaatgaaaaatatcgccca

SEQ ID NO: 583303 - DNA, 318 bp, Homo sapiens
  misc_feature (115)..(115): n is a, c, g, or t
tccttcggcgcgagcacttgcggcactttcatttacctacacacacacaaatgcacaaatcacattacattactgacacgaaaattattgtggagggagagaaagagggaggatnctttgaatcatgacacactgccaatattagaactcccttttggccaggcgcgatggttcacacctgtaatcccagcacgttgggaggctgaggagggcggatcacgaggtcaggagatggagaccatcctggctaacacggtgaaaccccgtctctactaaaaacacaaaaaaaactagccgggcgtgctcggcggccggcag

SEQ ID NO: 583304 - DNA, 782 bp, Homo sapiens
  misc_feature (17)..(17): n is a, c, g, or t
  misc_feature (72)..(72): n is a, c, g, or t
  misc_feature (233)..(234): n is a, c, g, or t
  misc_feature (236)..(239): n is a, c, g, or t
  misc_feature (256)..(256): n is a, c, g, or t
  misc_feature (270)..(270): n is a, c, g, or t
  misc_feature (276)..(276): n is a, c, g, or t
  misc_feature (317)..(317): n is a, c, g, or t
  misc_feature (349)..(349): n is a, c, g, or t
  misc_feature (392)..(392): n is a, c, g, or t
  misc_feature (398)..(398): n is a, c, g, or t
  misc_feature (440)..(440): n is a, c, g, or t
  misc_feature (446)..(446): n is a, c, g, or t
  misc_feature (452)..(452): n is a, c, g, or t
  misc_feature (501)..(501): n is a, c, g, or t
  misc_feature (507)..(507): n is a, c, g, or t
  misc_feature (530)..(530): n is a, c, g, or t
  misc_feature (534)..(534): n is a, c, g, or t
  misc_feature (571)..(571): n is a, c, g, or t
  misc_feature (586)..(586): n is a, c, g, or t
  misc_feature (589)..(589): n is a, c, g, or t
  misc_feature (619)..(619): n is a, c, g, or t
  misc_feature (687)..(687): n is a, c, g, or t
  misc_feature (771)..(771): n is a, c, g, or t
atttatttgaacctatnttttcactatgatgaaaattattcttcaacattgatccaagctcccacatttganggttagggaaaatattgcactttgcattttctagcactcctcatacacggcaaaaagttttaaaaacattctgctagttttgttttatacaatctcccaaattcatgcacacaatcattccaaaccaatgtgaggttatcccaaaaaaagggaaaaactcnngnnnncataaccttaaaattgncactaaaactctgntaaagnaaaaaaatataataaatggcgtcttatacaaattgtgcagnaacatttagaggtgtgcttggcgcaagagagngtagttttattattgcgctcatcgctcattttcattctcttgnaccagnagtcgctgtctgcagtctgctcaccctcgcaaccgggtcagnctcggnatatgnattagcgctgaagcgcaacatcctgcaagcatggaaggcagcggctggnaactgntaatgggtgttttgctagatttncttnccagacatggagttacgttttcgagtttataaacttncatgcaggcaagttnttncggtttaaaaaaattcgcttggactacttncttaatggggtgaaccagaattcttttaatgttcatgaattctaatgcccaggatggagggctaatanttgggggttcaaaacgggatgttgggctggcagggcagtttttacccacatggatttatgctgtctttccaggaaggcattctnaatggcttcag

SEQ ID NO: 583305 - DNA, 2084 bp, Homo sapiens
  misc_feature (15)..(16): n is a, c, g, or t
  misc_feature (22)..(22): n is a, c, g, or t
  misc_feature (34)..(34): n is a, c, g, or t
  misc_feature (71)..(71): n is a, c, g, or t
  misc_feature (817)..(817): n is a, c, g, or t
  misc_feature (1041)..(1041): n is a, c, g, or t
  misc_feature (1196)..(1196): n is a, c, g, or t
taccccggagctctnnaggccnagaacttttcantcagcctctacagaccaagctcatgactcacaatggnctatttaggcccataccctacgtcacggcagcctccgcagatgagcctactgcctcacaacagcctccacaggcacagctccatcgttacaatggcctctttagacccagctcctgcctcccagccttctctccaggccctgaactttctcaggtctccctctgttgtccaaggctggagtgtagtagtgctatcgcagctgactgcagcctcaaccttccaggctgaagcgatcctcccacctcaacctcccacgtggctgagactacaggtgcttgccactatgcccaactaatatttggaattttcgtatacgtggattccagaggggtgacagcgaaacgtgggaccatccagttgcaggaaaacaagcttaacacgcccactgattctacattatgctcctacctcccggcagcctctccaggcccagaactttctccagtcagcctctacagaccaagctcatgactcacaatggcctatttaggcccataccctacgtcacggcagtctccgcagatgagcctactgcctcacaacagcctccacaggcacagctccatcgttacaatggcctctttagacccagctcctgcctcccagccttctctccaggccctgaactttctcaagtcgacctcaccaggcccagctcatgcttctttgcagcctctccaggcccagcctcctgcctcccgaaggcctgcacaggcccagcctctgcctcacagcggactctccangcccagctagctgttgcttcactgcggcctcccgagtccaaagctcctgcctctcggccgcttcggcaggcccagctcccgcctgccagtggcctcttcaggcccatggggctcattcctgacaacggcctttccaggcccagtttttcccttccggcggcctctccgggcccagaacctcctcaagtcggcctctccagacccacttgcaccctccgggcgtnctctccgggcccagctcttcttcctggttgcgtctccaggcccgactcctgcctctcaacaacctctttggactcagtgcctacccatctcctggcggccctggtaggcccacaacttccctaagccaagctccccaggcccagctcaggcctcncggtggcctctccaggctcagctcctggccctccgatgacatctgcaggccccaaatggcctccggtcggtgggctcctctaggcccagcttgggcctcccggcggcctctgcaggcccaaatcgtcccgaagtcagtctctccaggcttagctccagcctcccggcggcctctgcaggcccaagtcgtcctcaagtcggcctggaagtgggcctggaagagcagcaagtcggcctccccgggcccagctccgtcctctcggcggcctctccaggtgcaaaacttcctcgagtcagcctctccaggcccagctcctcctgcctcccagtggcctctttcggcccagcccagctcatggctctcggcggccttcccaggccccgcttttgacttttggcagcctcttcaggcgcagaacttgatctccagtcggcctttgcaggcccggcctcctgcctctcgaaggcctgcacgggcccggcctcggcctcggcctcacagcggactctccacgcccagctagctctcgcctcactgcggcctccccagtccaaagctcctgcctttcggccacttcggcaggtccagctcctgcctgccagtggcctctttaggcccagctcattcctcacgtcggccattccaggccccgtttttcccttccggcagcctcttggcctctaatttgtttatcttttgtgtataaatcccaaaatattgaattttggaatatttccaccattatgtaaatattttggtaggtaatttatttggagtgagtttctgcgccaagcccgaattttttattttattttccttattatttggtgttaaacaggtttaatgacggtcatggcaactttttggcacaatgaaaaatatcgccca

SEQ ID NO: 583306 - DNA, 2395 bp, Homo sapiens
  misc_feature (15)..(16): n is a, c, g, or t
  misc_feature (22)..(22): n is a, c, g, or t
  misc_feature (34)..(34): n is a, c, g, or t
  misc_feature (71)..(71): n is a, c, g, or t
  misc_feature (1781)..(1782): n is a, c, g, or t
  misc_feature (1799)..(1799): n is a, c, g, or t
taccccggagctctnnaggccnagaacttttcantcagcctctacagaccaagctcatgactcacaatggnctatttaggcccataccctacgtcacggcagcctccgcagatgagcctactgcctcacaacagcctccacaggcacagctccatcgttacaatggcctctttagacccagctcctgcctcccagccttctctccaggccctgaactttctcaggtctccctctgttgtccaaggctggagtgtagtagtgctatcgcagctgactgcagcctcaaccttccaggctgaagcgatcctcccacctcaacctcccacgtggctgagactacaggtgcttgccactatgcccaactaatatttggaattttcgtatacgtggattccagaggggtgacagcgaaacgtgggaccatccagttgcaggaaaacaagcttaacacgcccactgattctacattatgctcctacctcccggcagcctctccaggcccagaactttctccagtcagcctctacagaccaagctcatgactcacaatggcctatttaggcccataccctacgtcacggcagtctccgcagatgagcctactgcctcacaacagcctccacaggcacagctccatcgttacaatggcctctttagacccagctcctgcctcccagccttctctccaggccctgaactttctcaagtcgacctcaccaggcccagctcctgcatcttggtggcccctccaggcccagcctctgcctcccgtcagcctctacagtcccaacgtctgcctcacagcagattcttcacgcccagcatctacctcactgtggaccccccaagccaagctcccaacctttcagcagcttctacacacccagctcctgccacccagtggcctctttaggccaagctcatgcttcacaagggcctttccaggcccaacttttgtctcatggcaaccttccctggccagattcctgcctgtctcccagcagcctagacaggcccaggtcttgcctcacactggcctctctacatccagcttatgcctcacggtggcctctccaggcccaactcctgtcccaggacgtcatctccgggcccaaaacttactcaagtcagactctctagtcccaactgctgcctcctggtggcctatgaaggcccaaaatctcctcaagttgacctttccaggcccagctcctgcctcctgtcagcgtctacaggcccaacctctgcctcatgggggcttctccaggcccacctcttcctcttggctgggtctacaggcacaactgctgcctcacaacagccttttttggcccagttcctgtccagctcatggcggccaatgtaggcccaaaacttcctcaagtcaaactctccaggcccaccttctgcttcccggtggcatgaacaggcccagctttgacttgagaacagcctctgcaggccctgctcttgcctcccaggggctttttccaggcccagctcttgcctcatggcagctgccccaggccaaatttctgcctgcctgccagcagcctcaacaggcatagctcctccctcacagtggcccatttaggcccaactcatgactgtcgggccatttccaggcctagtgcctgcctcgtggctgactcttgaagcccaaaacttcctcaaatcagccttttgcccaacttctgtctactgtcggactctacaggccagcctctgcctcacagtggaccctccagacccagatggtgtctcactgtggcatcctcagnngaagctcctgcctttcngcagcctctccaggcccagctcctcctgcctcccagtggcctctttcggcccagcccagctcatggctctcggcggccttcccaggccccgcttttgacttttggcagcctcttcaggcgcagaacttgatctccagtcggcctttgcaggcccggcctcctgcctctcgaaggcctgcacgggcccggcctcggcctcggcctcacagcggactctccacgcccagctagctctcgcctcactgcggcctccccagtccaaagctcctgcctttcggccacttcggcaggtccagctcctgcctgccagtggcctctttaggcccagctcattcctcacgtcggccattccaggccccgtttttcccttccggcagcctcttggcctctaatttgtttatcttttgtgtataaatcccaaaatattgaattttggaatatttccaccattatgtaaatattttggtaggtaatttatttggagtgagtttctgcgccaagcccgaattttttattttattttccttattatttggtgttaaacaggtttaatgacggtcatggcaactttttggcacaatgaaaaatatcgccca

SEQ ID NO: 583307 - DNA, 125 bp, Homo sapiens
aattcaagcttctaacgatgtacggggacatgtgtgagcctcagtttcctcatctgtaaggggggcaatgatacctacctcacaggggtgttgtgaggattaaatgtgaggaggatagtgaaaaa

SEQ ID NO: 583308 - DNA, 100 bp, Homo sapiens
gttgattgaggatcccccccgcgcgcgttctgcggtccgtgccgctctgcacccaaccttgtgcctagtgtgagcaatgggcaatggcgcgcgagggggt

SEQ ID NO: 583309 - DNA, 944 bp, Homo sapiens
tggagggggccccactttttattaaggccggccctaacccctgcctgggggaaaggccccccgaaaccaaatccggggtcccagggggtgcaggacacaaaccggtgcttggaggggttgccccaagccggcggctcgaaaatgagacctcaaccactgtgggcgccccaggggcacaggtgtctgtggcatcgccgcaggggcaagcaagaagcgccaccatttcggtccacgaaagaaagtgtggcacagatgcttttcgtgggccaaaaaagcgccacaggtgtaagacgctggcaaacaggggcgcggccatcttggcccttgttggaagtccagaagggcccaaggtgccgcacgccgaccaacactcccagaaaggcgttctccgaggctggatctgggaattgatgccgctgtcaacaaccgccaacccctctggttgggaactctcccacggggcttggaaacccatttacaatacgctgtccagaaaagaaataacttgcgggattatggtcccacagagagggcggtggttcccaccccggggcacaacgggggggataaaaacgtggggggccgtaaacgcccctctgttgccgaaacttgttgtacccgggaaaaaaagtcccttatggactgagatcttcgactctcttgggccttgtgaaaacccatcttagtggaaggagacccccccacttggaaagtcgaaaggcggggggataccaccaacaacccgttaaaaaaagggaccgaaatccgggggccccagcagttgtggggcaagtaggagatccaaagtgcttagcgagaattgagaatagcacagcctcatctacaatagggtcagacccggccaagccctggcttgaaaacgtgccgggccatggactgcccggccaacgggccgcataagtgcacacgaggcaccgacaaaa

SEQ ID NO: 583310 - DNA, 160 bp, Homo sapiens
tcgtgcagcaaggtggggcaggcaagcaggcaggcaggcaagcaagcaaggtgcattggtgcaggcaagcaggcatggcagcatgcaagcatgcaggcacagcgtgcagtccagcatcacggtgccaagctggagccaggttgcaagcatgcatgcaggc

SEQ ID NO: 583311 - DNA, 1506 bp, Homo sapiens
  misc_feature (798)..(798): n is a, c, g, or t
tttcacgaggcgtctgctgttagtgttgttgttgacagccgccgttgtttgtcttggttgtctggcatatacatacaccttgattggggcggcctccctctcctcatatagtgcgcgcccgcttcggtcggtggttgttttgtcgccctgcctcatcatcacttgtagcggctttttacggtctggtcgtatcgcgcgtctcgcattggttgttgctcatcgcccaccccgccgctggtgggtttttttgctgccccccgcacgttttaaatagctctctgccggggcctcactaattgctcccttgtgagacccggggggaaatcatcctttgggtgaaggagcgacaaagaaccttttgggagttggggggcctccccttggaaactgtccatagctgccgaaatgttaaggacacctcgccaactaaaggggcccgtccccacatacacaaaagaagtgttgtgggaagaaattttctttcttaacgggtaatttaaaaggggcccccacagaggacccctgcttttttcctgccgcgtgtgtcgcaaaacccgaactatgcaaggattcttccttttgctgggggtgggattatgtgctcaaaacccccctcctcgagtaaggtgcttttaaaatagcccgggatttcttcctggacccaattgggaggttgggagaaaaaaccggggggaattttttccctcacccaagtgggcgccctctcggggtgtacaaaaatttaagcgccacgtgtcctcttgtaacgcgaaaagggttttcacaacagagtttganttctttaacagaaagaatatttggaaagaagtgatagacccagaataatagcgtttggagatatggggataccaccctctccccacgtgttccaagggagcatatggtggacacatatttcgggagaaaaaaaagtgtttccattttacaagggggcacccggtgttatacacataccatatgccgcagaaataccatagggtggaccgagaatatgatatataccccacctcgggagcccgcttatattaggagagaacccagagattgtgtttctcgggaaacctcttcgccatatcttgggacccctcggaatatggaaaaattatactcgtgggaccactttagaataaatgggcgctaggtttctttaccaatgaaaatggttcttcttaggagattcttataaaatatggccaggtacactttacactaatggttacctggtacccccgccaggtggttgaatttttataaaatagagttttctctgccagtatagcttttagtcttaagaaaagccaccagatgggagccaatacatttccttcttttgaagagaatcccccaaagttagttctcatccttaaagtgccaataattgtttaatcttttaaactgggccaactttggaagaacttttaacagaagcctccatgatgatcactttgaattgcttgtgatttccaaaataaagccgtgaagcca

SEQ ID NO: 583312 - DNA, 1097 bp, Homo sapiens
gggacgcgggtagccgtctgaggtgccggagctgcgggaggatggagccgctgaaggtggaaaagttcgcaaccagccaacaggggaaacgggctgcgcgccagtgaccccgctgcagccccggagagctactcttaccgctacggatccctatggcgtacacggtgtgcaacggggacgtcgtggcgtcgtctgacgagcgcatgccttactcgggaacggaaacagctgactgcgatgctctcacgtgccgcgtacgccaaagtactgatagatgctaagtgtcagacagaaagcttgagccagaccacacagcgggactgcaaatgccttaaaaagctgcaaacaccagatatcctccagactccgtatcgaccttcttggcagagttgtcttacacacttctggcatggagcaccttacagaccttccgcagaacagcttacactccattatctcgatactggacgtccacatccattaaccacaactgcacctgcacagcatcggaacagcaggcctcaggccaccatcgtcattgaccatatccaacatttcatgaagaaaagaaaataaggatggcatctaagatgccaacatgcattataaacttattagaaagccttttgcaaaagatgatattcaagtctattcagcaatactgtaaatgataagatgcagaaagttagaagtaaggacatattataccaaaatcaacaaaagcagcacaaaacagaatggaatccacaaacatggtcggacacgcgtcaaagggacccacacataacggagagaacgcagaagaaaacgagggagacgaacgggaacacgacagagacatggaaaatgagaagacaaagacaagcacgaaaccacgaaggaccacaaacggatgaacgtgagaggaacaggtcaaccaaggacagaatcaactgcaacgggtaacaacacagaggagacacacacagcaaacgtgagaaaaaaacagaagacaagacaacaggcgggcaagacatagacaggacaagaagaggaagcaaaaaaagaggaaagaaagagtgaaccacagaaggaaacgggtcctccatcggaggaaa

SEQ ID NO: 583313 - DNA, 141 bp, Homo sapiens
ttcgaatttgagtctcggtcccgtaattgtgcataccctggaggtgcggggctcaggtggcgggaacagagcctcaattcactcgaaaaaagccgtcacgcgaccgtaatgtcgagctgctggttggcgcgcggtgatgca

SEQ ID NO: 583314 - DNA, 281 bp, Homo sapiens
  misc_feature (51)..(51): n is a, c, g, or t
  misc_feature (161)..(161): n is a, c, g, or t
tgagatgttctgtgaccaggagcctgtgttcagcccccacttggtcagtcngggcagctttagaaaatccactgtagaacactttagtaggtcctttaaagtgttctcctttgggtgggtgtagaacacagaggacctccagtgctctttttttcccccangaatatgagccccaaggagcagttctggggtagacaggttctcaggcggtctgcagggagagctccatatcaggaaaatgatggctattgcccagatttggagctgagtgattcagaggc

SEQ ID NO: 583315 - DNA, 317 bp, Homo sapiens
  misc_feature (53)..(53): n is a, c, g, or t
  misc_feature (71)..(71): n is a, c, g, or t
ttgggcctgtggcccccctaccccaaaatcctcatccttgaaattaataagcnccccaataatccccccanattgtgggaggggacccaagtgggaggtaaattggatcatgggggtgggtttccccccatactgtactcatggtagtgagtctcatgatatctgatggttttataaagggcatttcccctgcacatgttctcttgcctgctgccatgtaagatgtgcttttgctcttcctttgcctttcaccatgattgtgaggcctccctaaccatgtggaactatgagtccattaaacctctttttcttttcaa

SEQ ID NO: 583316 - DNA, 151 bp, Homo sapiens
  misc_feature (45)..(45): n is a, c, g, or t
  misc_feature (102)..(102): n is a, c, g, or t
tgatctacaggatcttggcgtagtgcatggctggaatggacccancttcccttgggcactagttctctctgggcagccgacgcagcctttaccagtgcactnggtggctagctgcacatggacttttggcagcttctagatagttctgctc

SEQ ID NO: 583317 - DNA, 154 bp, Homo sapiens
actgagcaaccgatctggagacaccgtgagaaattcaaggtgacgtacttacgtaaaacgtatgagctcaggccacggtgctggacgtgttaccaggcagagtgtgatgactatgtgcccgaaaccagacgaggtacctaagacagctaagaga

SEQ ID NO: 583318 - DNA, 1597 bp, Homo sapiens
  misc_feature (1393)..(1393): n is a, c, g, or t
ccatgtgggggggcgacccacatgtgtggggcggcttgtttctgctgtatgggttcgctaccagacggataagtgtggtggttgccgtgctcccaagtgggtgtgtggtgtggtctgtgtctggtggctgccttacaacagcgttttgtgctgtggggttgtcccccctacgccccttgtgtatatgttgtgtcgcctgccgccgtgcctcccctgatgtgtgggtctgcgacttcccggcaccttggggcggtgtgtgtcgcgtccttctggtgtgtctacaccggcggggtggggagaggttgatggtgccccctgggtgggatccccccgctgttgccccccgaggggcgcctcccgcatagtttgtatggggctcctccccgcggggtctatatgtggggcgcccccccctgcggtgaatatgtggtggagtctcttctcaccacccaccccgtcgcggggtcgtttgctacgcacgacgtcgtggtcccaacgatgggggcacaagggtgttgtgttgtgccgtgggaagcagcgccttcgccaacagcggcggtgtgagtagtatgggcactgcttaggcatcgtcccacacccctgtttgctgcgcgggtgatgttatataagctgttctgggagaaagattgtagggccgccctcgtcaatgagttgtctcctcctgcagaatagtcgtcttctcgcgtcgccgactcgtggtcctctcgccgccgcgtcttgtgttgttgtgtagtagtattgtggggtgtcgtcacctctggggactacataggcccccactagggtgctgtggtgtgttgtgcagagcagcgggctgttgtctgcctctacctcagtctttagtagccgccacccactcttttgggcggcgtgatcatccctctgtgcggcctctgttgtatccgctggtaattagatgatggaggttacaccacgcagcacaacagctttttgcccgcgctgcggtgggggttcaccgtcccacaggccacgcgtgggggagcctcacagagacagcgcgctcgccttcgcgcagcgcctcggtccacacgcgctgccacccccaggcgtgtctcggcgccccacagcgcacacgcgctctcacagcaagagggtgctcattataatgtagatacacatttactctcaccttatatatacaccctctctccacacccacacactctctctgtagctgcgcacagtgtggtgcgctatatatacactcaggtctctctcagatgatacgcgctcgttgcgtctctctcacaattgcgccaccactctgtgataagtttgtgagatctagagtagataaagagactcgcgcgcactagacgatccaccacacagtgcactgtcgtcacaaccnctctccacagagaaggacaacaggagaatagttttgtcgcgacaccccctctgggcttttcttttttgcgccctcgcgcaccgcccaaaggtaattaagcctcttcttaacactccactactcttttccactcggaacacccccttgtaccccaaaacttgtccccagaaattttgacaaccccctttaaaaaagtttaatgta

SEQ ID NO: 583319 - DNA, 163 bp, Homo sapiens
taggctgccctgaggatcccaggcaaagctctaccatcagatttcgtgagaccattcactattacaagaacatcacggaaagaccgcccccatgattcagtcatctcctaccaggtcctttccacaaacacatggggaattacggggagctaacaaagaatga

SEQ ID NO: 583320 - DNA, 269 bp, Homo sapiens
  misc_feature (26)..(26): n is a, c, g, or t
  misc_feature (30)..(30): n is a, c, g, or t
  misc_feature (35)..(35): n is a, c, g, or t
  misc_feature (44)..(44): n is a, c, g, or t
  misc_feature (51)..(51): n is a, c, g, or t
  misc_feature (58)..(58): n is a, c, g, or t
  misc_feature (74)..(74): n is a, c, g, or t
  misc_feature (123)..(123): n is a, c, g, or t
  misc_feature (176)..(176): n is a, c, g, or t
  misc_feature (230)..(230): n is a, c, g, or t
ccttctacgtctcatctctggtaggnccanaatgnaggtgccancttagcntcatagngtagtgacttgactcntgaattttatatattgattactttgtatttgttttatttttaaagtctntaagataatagatttgtgtgtgtgtgtgtgtgtgtgtgtgtgtgtgtgtgcanccggagttcccattgtggtgcagcggaaatgaatttgtctaggaaccatgaggntgtgggttcagtgatagacgtaaataggggtacagctcg

SEQ ID NO: 583321 - DNA, 1626 bp, Homo sapiens
ggaggcggtacacaaaactgccaccgtcccattacccaacagcctgcctctgttgaggggctttcctgggacttcagactggcaccctcattgtgcttgcagctgtcatgtttccttgcccagattgcccatagctgcttccctggcctcggccttgaacccctctagccagcaactgcccaggtaacactttataaaactgagccgctgtccctgcttggagccttcagagtagacttcagacctaggcagagtatccactcagctctgccgtttctcctgctccccacttcgggcctgcacgcttcccgccgctcggcatgctccttccccttctccgagaatgacgtgctccccgcactccccacactgccgccttgggaccaagaaggtgcctctcacaccttactgctctcctccaggcttcgtggttgcttttcagcctttttccctggatttgaactttaacaaaggtaagatggaggtttatttttcaccacttggctgtgagttccttgaggataggaacttgtgttttactcagatctgaatctccattgctttagtggtgtgctcaatacatggtaggggtgaatatttaatgaatgaatgagtgaaaatatctaaattttgcacaggagagcaattagagaggcttaaacaggaaggaagtcttctaattccttaaaagcattatctcatatttgaagagttcaagtttgatgcaacataaactgataaagtttgaaataaaaagagacaggttggtaggaaagaccattcatatcctatccccaaactggcttaagtccactcccactgcccccagctaccacctttttactttattctacctgctatttctttggccaccggaataataagcctgatgtaaattctgtttcatactcccacaggtcaactttttttggagtttgacaataattattccaagtcaagtaattcattgattttagtggaagattgttttccaggtgttattcttccatgcgcctcacccccatctcataaagtagaaaagagatgatttaatttatgggtctagaaaataaaaatgtaaatacttgcttgttaaattaatttttttctaccttcatttttacctttaatatttcaagataatattggacttaattctctgagacacacaaacatcctgcataagtatattgacaacatacattttatatgtaagtgaaccatatgggtgagcctctgctttctccctgacagcgctgttctttaagaaattaaggctaaccaggtctataggttttaatgggagatgtctcctaacttttcaaagaccagatgttcttgttatactgataaaaacttattaaaaaaaaaaagaaatagggattgatgatgttcaacattattctctttgaacaaatacatcatttgttcatacttggtttctcagtatttcaacaataaagcatgttttaatgatttgtctttagaggagtgagcactcctctgggggtatattacaactgggaaaaaaaatatagtttgaaaataaaataactgtttacccttaaagaaattaactctatggtgccttaaggttacatttgcaataaacttttttacatcaaa

SEQ ID NO: 583322 - DNA, 270 bp, Homo sapiens
actctaaggatccacttcgctcgccggcaggtctcatagatttggtgttactccacttgaagggattccaagccaggaaccaagctgtgaaggtggggggctcgtgtcctagttaacaaaatgatgggggtctcaaggtcacgcccggtggaatgggtcttgaggtattcctggtgcagtggttgctgggggcttcttcttcttcttcgttgggattgttccccaatcaagaagaagaactggtcccagaaattctggaaggaacccacg

SEQ ID NO: 583323 - DNA, 321 bp, Homo sapiens
gtcgaccccgaggatctgcgcggcacctacgtcggccatgcgcaccccgcgacgatcggcacctcaagcgactcggcatcaccaccgtggagttgctcccggtgcaggcctcggcatccgagccgtacgtcgtccagcggggcatgacgaactactggggttacaacacgctcggattcttcgcccctcaccttccatatgcagctgcgaccgacccggtcacgccgtggcgagttcaaaggcatggtcaaactgctgcacgccgagggcatcgaggtggtgctcgatgtggtctacaaccacacctgcgagcagtcgacg

SEQ ID NO: 583324 - DNA, 1091 bp, Homo sapiens
  misc_feature (230)..(230): n is a, c, g, or t
  misc_feature (500)..(500): n is a, c, g, or t
  misc_feature (568)..(568): n is a, c, g, or t
ctgccgcccttttttgttgtttttttggtggattatacgttttataaaactcgggaggggtagtggcagggctttcactcaggtgttcccttctcaaatttaaaaaaaaaaatacaaaagctacgttagaaacaacgtctcagactcagacgacttaacatttctcccgacctcgagggcccaagtttcttctggagccgtgcgcctcctcggagaaccgcctggcggangttcgggctcctccgagaggatacgggggggcgcgggcgcgcgggcgcgggggatagataggcgcctctctttcctctcctctcctttcctgtggggggggggtcctcctctccttcttcctttccggagccccttttcttctccttcaacaaggcctctcctcacagagttagcgccgcgcgccatctctatataggggggaggtgtccccgcggagaccttggagagcgccgtgttgtgtcccgagaggggtgtcccccgggggatancgcggtggtgtgtgtgtgcggcgaccctgtgggggtgttcggcgccagcgagagcggcgcgtgcctcncccgagagagcaccttgagaaagtgctccctgtccgagataccgtgcgggggggggctccccccgggaggatcgcgtgttgggggagaaagtgtcccctctacgagaagctgttcggtcttcttgtggcggtccaattagagagtgtggtcgttgtaccccaggtgatatgagcaggggactccgcgcgggggcggcgcatttgtgtagtgcgccccgggggattcttcccgttcacccacacacaaataataatcctgcgggctgggcgacaagccaccctgtggacatccatccaatctcgcggtgagcgggggcaccacaccggggtgggggcgccttctacaatggtggctccacacaacacatgggtgttgctttctctcgcctcccaaaagagagattggtcccccgctgcggtgtggggaccacaagacgtttatgtctgtgggttcttgaaaaccagcacaacaaaacattgtgacaccccacacaccacaattgtggtgaaacgaccaacagcg

SEQ ID NO: 583325 - DNA, 1971 bp, Homo sapiens
  misc_feature (1357)..(1358): n is a, c, g, or t
  misc_feature (1375)..(1375): n is a, c, g, or t
tacagctacgggtgaggtacagctacgggtgaggtacagctacgggtgaggtacagctacgggtgaggtacagctacgggtgaggtacagctacgggtgaggtacagctacgggtgaggtacagctacgggtgaggtacagctacgggtgaggtacagctacgggtgaggtacagctccatcgttacaatggcctctttagacccagctcctgcctcccagccttctctccaggccctgaactttctcaagtcgacctcaccaggcccagctcatgcttctttgcagcctctccaggcccagctcctgcatcttggtggcccctccaggcccagcctctgcctcccgtcagcctctacagtcccaacgtctgcctcacagcagattcttcacgcccagcatctacctcactgtggaccccccaagccaagctcccaacctttcagcagcttctacacacccagctcctgccacccagtggcctctttaggccaagctcatgcttcacaagggcctttccaggcccaacttttgtctcatggcaaccttccctggccagattcctgcctgtctcccagcagcctagacaggcccaggtcttgcctcacactggcctctctacatccagcttatgcctcacggtggcctctccaggcccaactcctgtcccaggacgtcatctccgggcccaaaacttactcaagtcagactctctagtcccaactgctgcctcctggtggcctatgaaggcccaaaatctcctcaagttgacctttccaggcccagctcctgcctcctgtcagcgtctacaggcccaacctctgcctcatgggggcttctccaggcccacctcttcctcttggctgggtctacaggcacaactgctgcctcacaacagccttttttggcccagttcctgtccagctcatggcggccaatgtaggcccaaaacttcctcaagtcaaactctccaggcccaccttctgcttcccggtggcatgaacaggcccagctttgacttgagaacagcctctgcaggccctgctcttgcctcccaggggctttttccaggcccagctcttgcctcatggcagctgccccaggccaaatttctgcctgcctgccagcagcctcaacaggcatagctcctccctcacagtggcccatttaggcccaactcatgactgtcgggccatttccaggcctagtgcctgcctcgtggctgactcttgaagcccaaaacttcctcaaatcagccttttgcccaacttctgtctactgtcggactctacaggccagcctctgcctcacagtggaccctccagacccagatggtgtctcactgtggcatcctcagnngaagctcctgcctttcngcagcctctccaggcccagctcctcctgcctcccagtggcctctttcggcccagcccagctcatggctctcggcggccttcccaggccccgcttttgacttttggcagcctcttcaggcgcagaacttgatctccagtcggcctttgcaggcccggcctcctgcctctcgaaggcctgcacgggcccggcctcggcctcggcctcacagcggactctccacgcccagctagctctcgcctcactgcggcctccccagtccaaagctcctgcctttcggccacttcggcaggtccagctcctgcctgccagtggcctctttaggcccagctcattcctcacgtcggccattccaggccccgtttttcccttccggcagcctcttggcctctaatttgtttatcttttgtgtataaatcccaaaatattgaattttggaatatttccaccattatgtaaatattttggtaggtaatttatttggagtgagtttctgcgccaagcccgaattttttattttattttccttattatttggtgttaaacaggtttaatgacggtcatggcaactttttggcacaatgaaaaatatcgccca

SEQ ID NO: 583326 - DNA, 1339 bp, Homo sapiens
  misc_feature (15)..(16): n is a, c, g, or t
  misc_feature (22)..(22): n is a, c, g, or t
  misc_feature (34)..(34): n is a, c, g, or t
  misc_feature (71)..(71): n is a, c, g, or t
taccccggagctctnnaggccnagaacttttcantcagcctctacagaccaagctcatgactcacaatggnctatttaggcccataccctacgtcacggcagcctccgcagatgagcctactgcctcacaacagcctccacaggcacagctccatcgttacaatggcctctttagacccagctcctgcctcccagccttctctccaggccctgaactttctcaggtctccctctgttgtccaaggctggagtgtagtagtgctatcgcagctgactgcagcctcaaccttccaggctgaagcgatcctcccacctcaacctcccacgtggctgagactacaggtgcttgccactatgcccaactaatatttggaattttcgtatacgtggattccagaggggtgacagcgaaacgtgggaccatccagttgcaggaaaacaagcttaacacgcccactgattctacattatgctcctacctcccggcagcctctccaggcccagaactttctccagtcagcctctacagaccaagctcatgactcacaatggcctatttaggcccataccctacgtcacggcagtctccgcagatgagcctactgcctcacaacagcctccacaggcacagctccatcgttacaatggcctctttagacccagctcctgcctcccagccttctctccaggccctgaactttctcaagtcgacctcaccaggcccagctcatgcttctttgcagcctctccaggcccagctcctgcatcttggtggcccctccaggcccagcctctgcctcccgtcagcctctacagtcccaacgtctgcctcacagcagattcttcacgcccagcatctacctcactgtggaccccccaagccaagctcccaacctttcagcagcttctacacacccagctcctgccacccagtggcctctttaggccaagctcatgcttcacaagggcctttccaggcccaacttttgtctcatggcaaccttccctggccagattcctgcctgtctcccagcagcctagacaggcccaggtcttgcctcacactggcctctctacatccagcttatgcctcacggtggcctctccaggcccaactcctgtcccaggacgtcatctccgggcccaaaacttactcaagtcagactctctagtcccaactgctgcctcctggtggcctatgaaggcccaaaatctcctcaagttgacctttccaggcccagctcctgcctcctgtcagcgtctacaggcccaacctctgcctcatgggggcttctccaggcccacctcttcctcttgtttgagtctgtataactgcgtg

SEQ ID NO: 583327 - DNA, 2167 bp, Homo sapiens
  misc_feature (15)..(16): n is a, c, g, or t
  misc_feature (22)..(22): n is a, c, g, or t
  misc_feature (34)..(34): n is a, c, g, or t
  misc_feature (71)..(71): n is a, c, g, or t
  misc_feature (1553)..(1554): n is a, c, g, or t
  misc_feature (1571)..(1571): n is a, c, g, or t
taccccggagctctnnaggccnagaacttttcantcagcctctacagaccaagctcatgactcacaatggnctatttaggcccataccctacgtcacggcagcctccgcagatgagcctactgcctcacaacagcctccacaggcacagctccatcgttacaatggcctctttagacccagctcctgcctcccagccttctctccaggccctgaactttctcaggtctccctctgttgtccaaggctggagtgtagtagtgctatcgcagctgactgcagcctcaaccttccaggctgaagcgatcctcccacctcaacctcccacgtggctgagactacaggtgcttgccactatgcccaactaatatttggaattttcgtatacgtggattccagaggggtgacagcgaaacgtgggaccatccagttgcaggaaaacaagcttaacacgcccactgattctacattatgctcctacctcccggcagcctctccaggcccagaactttctccagtcagcctctacagaccaagctcatgactcacaatggcctatttaggcccataccctacgtcacggcagtctccgcagatgagcctactgcctcacaacagcctccacaggcacagctccatcgttacaatggcctctttagaccccctgccacccagtggcctctttaggccaagctcatgcttcacaagggcctttccaggcccaacttttgtctcatggcaaccttccctggccagattcctgcctgtctcccagcagcctagacaggcccaggtcttgcctcacactggcctctctacatccagcttatgcctcacggtggcctctccaggcccaactcctgtcccaggacgtcatctccgggcccaaaacttactcaagtcagactctctagtcccaactgctgcctcctggtggcctatgaaggcccaaaatctcctcaagttgacctttccaggcccagctcctgcctcctgtcagcgtctacaggcccaacctctgcctcatgggggcttctccaggcccacctcttcctcttggctgggtctacaggcacaactgctgcctcacaacagccttttttggcccagttcctgtccagctcatggcggccaatgtaggcccaaaacttcctcaagtcaaactctccaggcccaccttctgcttcccggtggcatgaacaggcccagctttgacttgagaacagcctctgcaggccctgctcttgcctcccaggggctttttccaggcccagctcttgcctcatggcagctgccccaggccaaatttctgcctgcctgccagcagcctcaacaggcatagctcctccctcacagtggcccatttaggcccaactcatgactgtcgggccatttccaggcctagtgcctgcctcgtggctgactcttgaagcccaaaacttcctcaaatcagccttttgcccaacttctgtctactgtcggactctacaggccagcctctgcctcacagtggaccctccagacccagatggtgtctcactgtggcatcctcagnngaagctcctgcctttcngcagcctctccaggcccagctcctcctgcctcccagtggcctctttcggcccagcccagctcatggctctcggcggccttcccaggccccgcttttgacttttggcagcctcttcaggcgcagaacttgatctccagtcggcctttgcaggcccggcctcctgcctctcgaaggcctgcacgggcccggcctcggcctcggcctcacagcggactctccacgcccagctagctctcgcctcactgcggcctccccagtccaaagctcctgcctttcggccacttcggcaggtccagctcctgcctgccagtggcctctttaggcccagctcattcctcacgtcggccattccaggccccgtttttcccttccggcagcctcttggcctctaatttgtttatcttttgtgtataaatcccaaaatattgaattttggaatatttccaccattatgtaaatattttggtaggtaatttatttggagtgagtttctgcgccaagcccgaattttttattttattttccttattatttggtgttaaacaggtttaatgacggtcatggcaactttttggcacaatgaaaaatatcgccca

SEQ ID NO: 583328 - DNA, 1146 bp, Homo sapiens
ggcttagaagttctcgtccgtttcatgactatgaatgagttgctggaagtgaacctcggtgggtctcgtactaccaccctctgagtgcgagcacgttcgtagtacccagaggcatcgcgatcgacatcttatcatccgtgacacgctccgtgaacatgaggccacaagcggtacacctcgaacggcccagttgcgcagccagcacggggcgactatgagcaaccacggaacaggcctggcgcagaagctgtcgcatcatcgcgttgagatctgccagaccttgtgatgacacgccagtctctacacttgcgtctcgtggtgtcgctgagtaaactgatcattcatcgcacttgcgaatagagcttgccttgcggtcggggacatcaaccatggagctttgtcgatatcttaactgaaagagctcatggtgccgatggtcgtgtatctgactttatcgaactcggaggtatggaagtcgataggtcttagaagaaagctataaaggcaatcctgaattttctttgatctgatctacaattgacgggcagaggaagttattgtaaaattggaggtaaagctggtcgaacaccacaaacgaaggctagagcccttgacttgcttttccttgcgtgtgataatgcgggtctatgcccatcaatgccgaatgcaactgaggtgacaagcgggggccttgtagatgagcctatggacttaattgattgcttttaaaacctttcgtgggagccttcaaaggtggtaatcctttaaggtcactctacctaggtagagtctgttagataagacctgggccttgtgtgcgaagattctttaatgcgcccaaatcgaagttgattacttaacatgtggatcatcccaagttacccaatttaaattgatgccagggaagatcccagcaatcaaagagaatttaggatgacccaaggttgaacccaaagtttgggcgcaacggattaggagagggcggccgaagatctgggcctatagggcgcgaacataatcttgctttgaaccaaggcaaacctctgggtgacggaaccagtgattatttgaaaagggctaaggcttcgccgaataaattgtcccattagaccgtgcgcgtgacttccccgggatccccgatgatgg

SEQ ID NO: 583329 - DNA, 1099 bp, Homo sapiens
  misc_feature (20)..(20): n is a, c, g, or t
  misc_feature (103)..(104): n is a, c, g, or t
  misc_feature (211)..(211): n is a, c, g, or t
ggcaagcgccctaggtaccngccgctccggatagtttcccagcgtgactccctgaggctaggcactcataccacggcccgggaacctctgcgccccggacctnnccaggtcccaacaacgtctttggactcagctcctgcccagctcccagcggccctggtaggcccacaacttccctaagccaagctccccaggcccagctcaggcctcncggtggcctctccaggctcagctcctggccctccgatgacatctgcaggccccaaatggcctccggtcggtgggctcctctaggcccagcttgggcctcccggcggcctctgcaggcccaaatcgtcccgaagtcagtctctccaggcttagctccagcctcccggcggcctctgcaggcccaagtcgtcctcaagtcggcctggaagtgggcctggaagagcagcaagtcggcctccccgggcccagctccgtcctctcggcggcctctccaggtgcaaaacttcctcgagtcagcctctccaggcccagctcctcctgcctcccagtggcctctttcggcccagcccagctcatggctctcggcggccttcccaggccccgcttttgacttttggcagcctcttcaggcgcagaacttgatctccagtcggcctttgcaggcccggcctcctgcctctcgaaggcctgcacgggcccggcctcggcctcggcctcacagcggactctccacgcccagctagctctcgcctcactgcggcctccccagtccaaagctcctgcctttcggccacttcggcaggtccagctcctgcctgccagtggcctctttaggcccagctcattcctcacgtcggccattccaggccccgtttttcccttccggcagcctcttggcctctaatttgtttatcttttgtgtataaatcccaaaatattgaattttggaatatttccaccattatgtaaatattttggtaggtaatttatttggagtgagtttctgcgccaagcccgaattttttattttattttccttattatttggtgttaaacaggtttaatgacggtcatggcaactttttggcacaatgaaaaatatcgccca

SEQ ID NO: 583330 - DNA, 101 bp, Homo sapiens
  misc_feature (77)..(77): n is a, c, g, or t
tgacatccaacatgtgcgtctgctgccggtcgttcttcaacagggagtcgatgccggcaccattcattcagaagtanaaagggcgagctcttggttcaaga

SEQ ID NO: 583331 - DNA, 1505 bp, Homo sapiens
  misc_feature (15)..(16): n is a, c, g, or t
  misc_feature (22)..(22): n is a, c, g, or t
  misc_feature (34)..(34): n is a, c, g, or t
  misc_feature (71)..(71): n is a, c, g, or t
  misc_feature (913)..(914): n is a, c, g, or t
  misc_feature (931)..(931): n is a, c, g, or t
taccccggagctctnnaggccnagaacttttcantcagcctctacagaccaagctcatgactcacaatggnctatttaggcccataccctacgtcacggcagcctccgcagatgagcctactgcctcacaacagcctccacaggcacagctccatcgttacaatggcctctttagacccagctcctgcctcccagccttctctccaggccctgaactttctcaggtctccctctgttgtccaaggctggagtgtagtagtgctatcgcagctgactgcagcctcaaccttccaggctgaagcgatcctcccacctcaacctcccacgtggctgagactacaggtgcttgccactatgcccaactaatatttggaattttcgtatacgtggattccagaggggtgacagcgaaacgtgggaccatccagttgcaggaaaacaagcttaacacgcccactgattctacattatgctcctacctcccggcagcctctccaggcccagaactttctccagtcagcctctacagaccaagctcatgactcacaatggcctatttaggcccataccctacgtcacggcagtctccgcagatgagcctactgcctcacaacagcctccacaggcacagctccatcgttacaatggcctctttagacccagctcctgcctcccagccttctctccaggccctgaactttctcaagtcgacctcaccaggcccagctcatgcttctttgcagcctctccaggcccagctcctgcatcttggtggcccctccaggcccagcctctgcctcccgtcagcctctacagtcccaacgtctgcctcacagcagattcttcacgcccagcctctgcctcacagtggaccctccagacccagatggtgtctcactgtggcatcctcagnngaagctcctgcctttcngcagcctctccaggcccagctcctcctgcctcccagtggcctctttcggcccagcccagctcatgcctcccggcggccttcccaagccccgcttttgacttttggtggcctctgcaggcctcgacaaggcccagcctcctgcctctcgaaggcctgcacgggcccggcctcggcctcggcctcacagcggactctccacgcccagctagctctcgcctcactgcggcctccccagtccaaagctcctgcctttcggccacttcggcaggtccagctcctgcctgccagtggcctctttaggcccagctcattcctcacgtcggccattccaggccccgtttttcccttccggcagcctcttggcctctaatttgtttatcttttgtgtataaatcccaaaatattgaattttggaatatttccaccattatgtaaatattttggtaggtaatttatttggagtgagtttctgcgccaagcccgaattttttattttattttccttattatttggtgttaaacaggtttaatgacggtcatggcaactttttggcacaatgaaaaatatcgccca

SEQ ID NO: 583332 - DNA, 1939 bp, Homo sapiens
  misc_feature (1325)..(1326): n is a, c, g, or t
  misc_feature (1343)..(1343): n is a, c, g, or t
tacagctacgggtgaggtacagctacgggtgaggtacagctacgggtgaggtacagctacgggtgaggtacagctacgggtgaggtacagctacgggtgaggtacagctacgggtgaggtacagctacgggtgaggtacagctacgggtgaggtacagctacgggtgaggtacagctccatcgttacaatggcctctttagacccagctcctgcctcccagccttctctccaggccctgaactttctcaagtcgacctcaccaggcccagctcctgcatcttggtggcccctccaggcccagcctctgcctcccgtcagcctctacagtcccaacgtctgcctcacagcagattcttcacgcccagcatctacctcactgtggaccccccaagccaagctcccaacctttcagcagcttctacacacccagctcctgccacccagtggcctctttaggccaagctcatgcttcacaagggcctttccaggcccaacttttgtctcatggcaaccttccctggccagattcctgcctgtctcccagcagcctagacaggcccaggtcttgcctcacactggcctctctacatccagcttatgcctcacggtggcctctccaggcccaactcctgtcccaggacgtcatctccgggcccaaaacttactcaagtcagactctctagtcccaactgctgcctcctggtggcctatgaaggcccaaaatctcctcaagttgacctttccaggcccagctcctgcctcctgtcagcgtctacaggcccaacctctgcctcatgggggcttctccaggcccacctcttcctcttggctgggtctacaggcacaactgctgcctcacaacagccttttttggcccagttcctgtccagctcatggcggccaatgtaggcccaaaacttcctcaagtcaaactctccaggcccaccttctgcttcccggtggcatgaacaggcccagctttgacttgagaacagcctctgcaggccctgctcttgcctcccaggggctttttccaggcccagctcttgcctcatggcagctgccccaggccaaatttctgcctgcctgccagcagcctcaacaggcatagctcctccctcacagtggcccatttaggcccaactcatgactgtcgggccatttccaggcctagtgcctgcctcgtggctgactcttgaagcccaaaacttcctcaaatcagccttttgcccaacttctgtctactgtcggactctacaggccagcctctgcctcacagtggaccctccagacccagatggtgtctcactgtggcatcctcagnngaagctcctgcctttcngcagcctctccaggcccagctcctcctgcctcccagtggcctctttcggcccagcccagctcatggctctcggcggccttcccaggccccgcttttgacttttggcagcctcttcaggcgcagaacttgatctccagtcggcctttgcaggcccggcctcctgcctctcgaaggcctgcacgggcccggcctcggcctcggcctcacagcggactctccacgcccagctagctctcgcctcactgcggcctccccagtccaaagctcctgcctttcggccacttcggcaggtccagctcctgcctgccagtggcctctttaggcccagctcattcctcacgtcggccattccaggccccgtttttcccttccggcagcctcttggcctctaatttgtttatcttttgtgtataaatcccaaaatattgaattttggaatatttccaccattatgtaaatattttggtaggtaatttatttggagtgagtttctgcgccaagcccgaattttttattttattttccttattatttggtgttaaacaggtttaatgacggtcatggcaactttttggcacaatgaaaaatatcgccca

SEQ ID NO: 583333 - DNA, 1971 bp, Homo sapiens
  misc_feature (1357)..(1358): n is a, c, g, or t
  misc_feature (1375)..(1375): n is a, c, g, or t
tacagctacgggtgaggtacagctacgggtgaggtacagctacgggtgaggtacagctacgggtgaggtacagctacgggtgaggtacagctacgggtgaggtacagctacgggtgaggtacagctacgggtgaggtacagctacgggtgaggtacagctacgggtgaggtacagctccatcgttacaatggcctctttagacccagctcctgcctcccagccttctctccaggccctgaactttctcaagtcgacctcaccaggcccagctcatgcttctttgcagcctctccaggcccagctcctgcatcttggtggcccctccaggcccagcctctgcctcccgtcagcctctacagtcccaacgtctgcctcacagcagattcttcacgcccagcatctgcctcactgtggaccccccaagccaagctcccaacctttcagcagcttctacacacccagctcctgccacccagtggcctctttaggccaagctcatgcttcacaagggcctttccaggcccaacttttgtctcatggcaaccttccctggccagattcctgcctgtctcccagcagcctagacaggcccaggtcttgcctcacactggcctctctacatccagcttatgcctcacggtggcctctccaggcccaactcctgtcccaggacgtcatctccgggcccaaaacttactcaagtcagactctctagtcccaactgctgcctcctggtggcctatgaaggcccaaaatctcctcaagttgacctttccaggcccagctcctgcctcctgtcagcgtctacaggcccaacctctgcctcatgggggcttctccaggcccacctcttcctcttggctgggtctacaggcacaactgctgcctcacaacagccttttttggcccagttcctgtccagctcatggcggccaatgtaggcccaaaacttcctcaagtcaaactctccaggcccaccttctgcttcccggtggcatgaacaggcccagctttgacttgagaacagcctctgcaggccctgctcttgcctcccaggggctttttccaggcccagctcttgcctcatggcagctgccccaggccaaatttctgcctgcctgccagcagcctcaacaggcatagctcctccctcacagtggcccatttaggcccaactcatgactgtcgggccatttccaggcctagtgcctgcctcgtggctgactcttgaagcccaaaacttcctcaaatcagccttttgcccaacttctgtctactgtcggactctacaggccagcctctgcctcacagtggaccctccagacccagatggtgtctcactgtggcatcctcagnngaagctcctgcctttcngcagcctctccaggcccagctcctcctgcctcccagtggcctctttcggcccagcccagctcatggctctcggcggccttcccaggccccgcttttgacttttggcagcctcttcaggcgcagaacttgatctccagtcggcctttgcaggcccggcctcctgcctctcgaaggcctgcacgggcccggcctcggcctcggcctcacagcggactctccacgcccagctagctctcgcctcactgcggcctccccagtccaaagctcctgcctttcggccacttcggcaggtccagctcctgcctgccagtggcctctttaggcccagctcattcctcacgtcggccattccaggccccgtttttcccttccggcagcctcttggcctctaatttgtttatcttttgtgtataaatcccaaaatattgaattttggaatatttccaccattatgtaaatattttggtaggtaatttatttggagtgagtttctgcgccaagcccgaattttttattttattttccttattatttggtgttaaacaggtttaatgacggtcatggcaactttttggcacaatgaaaaatatcgccca

SEQ ID NO: 583334 - DNA, 276 bp, Homo sapiens
  misc_feature (43)..(43): n is a, c, g, or t
tcgttatgtggtcgtctcacaacaggcatttttaccgaaatanaggaattttttcaatacaatcagttagaaatacacacaaattacttgaaaaaaaaaaaaagaggaggccagaataggagctcagccacttgtccaagaagcagctgggtccccccaaccaggctccaccgcttgagggtcctgaactttagctggtcagccccgtggcctgctcaaaactgcaaacggttcatacaaagggtggtctaggggacccagcacaaaattaattaa

SEQ ID NO: 583335 - DNA, 556 bp, Homo sapiens
gtctcattctgtcacccagactagagggcagtggtgcaatcacggttcagcacagtcgctcaacctccgtgggcctcccaggtagctgcgatcagaggtgtgcaccagactatgtcccgagctaattttctatttattaattattctgagattgtgtacagacagggtctggctggtgttggccaggtctgggtctcgaagctcctgggctcaagtgtgtccgtcctcgacctagagcttccgccgaaatactgggattataggtgtgagccacgtgtgcccaaggctttgccatcaatcgatcattccgcacaggcctgcggacaggcagttttgccaaaagctgggcaaaaggaccaaaggcagttcccgagcaggagggcgatagcgaggtggaaatacatgtaagacaaagacaaaacagacagacaacgtcgcagggcggtagcttctaatggtccgtcgcgcagcgcgagatcgaacatgagcgagtagactagcaacacaggcgcagcacatgcgggcaaaacgaccggtgggtctaccccgtgagacc

SEQ ID NO: 583336 - DNA, 239 bp, Homo sapiens
acaactaccaaagaggcctgtaggagacaccaggggggcggccaccacacagtacctgaccaatactgctgagaaaggcgcagtctgctgagtatgcaatctcagatctacttgactgcttgccaaatggctctaacagagcatatagtgagcgagaggtagagccgcaggtctaatagctgatgcctcaagtctctcgttcacacccagatctacacagaaccatgtgctccctctgc

SEQ ID NO: 583337 - DNA, 1931 bp, Homo sapiens
  misc_feature (15)..(16): n is a, c, g, or t
  misc_feature (22)..(22): n is a, c, g, or t
  misc_feature (34)..(34): n is a, c, g, or t
  misc_feature (71)..(71): n is a, c, g, or t
  misc_feature (1317)..(1318): n is a, c, g, or t
  misc_feature (1335)..(1335): n is a, c, g, or t
taccccggagctctnnaggccnagaacttttcantcagcctctacagaccaagctcatgactcacaatggnctatttaggcccataccctacgtcacggcagcctccgcagatgagcctactgcctcacaacagcctccacaggcacagctccatcgttacaatggcctctttagacccagctcctgcctcccagccttctctccaggccctgaactttcaggcccagctcatgcttctttgcagcctctccaggcccagctcctgcatcttggtggcccctccaggcccagcctctgcctcccgtcagcctctacagtcccaacgtctgcctcacagcagattcttcacgcccagcatatctacctcactgtggaccccccaagccaagctcccaacctttcagcagcttctacacacccagctcctgccacccagtggcctctttaggccaagctcatgcttcacaagggcctttccaggcccaacttttgtctcatggcaaccttccctggccagattcctgcctgtctcccagcagcctagacaggcccaggtcttgcctcacactggcctctctacatccagcttatgcctcacggtggcctctccaggcccaactcctgtcccaggacgtcatctccgggcccaaaacttactcaagtcagactctctagtcccaactgctgcctcctggtggcctatgaaggcccaaaatctcctcaagttgacctttccaggcccagctcctgcctcctgtcagcgtctacaggcccaacctctgcctcatgggggcttctccaggcccacctcttcctcttggctgggtctacaggcacaactgctgcctcacaacagccttttttggcccagttcctgtccagctcatggcggccaatgtaggcccaaaacttcctcaagtcaaactctccaggcccaccttctgcttcccggtggcatgaacaggcccagctttgacttgagaacagcctctgcaggccctgctcttgcctcccaggggctttttccaggcccagctcttgcctcatggcagctgccccaggccaaatttctgcctgcctgccagcagcctcaacaggcatagctcctccctcacagtggcccatttaggcccaactcatgactgtcgggccatttccaggcctagtgcctgcctcgtggctgactcttgaagcccaaaacttcctcaaatcagccttttgcccaacttctgtctactgtcggactctacaggccagcctctgcctcacagtggaccctccagacccagatggtgtctcactgtggcatcctcagnngaagctcctgcctttcngcagcctctccaggcccagctcctcctgcctcccagtggcctctttcggcccagcccagctcatggctctcggcggccttcccaggccccgcttttgacttttggcagcctcttcaggcgcagaacttgatctccagtcggcctttgcaggcccggcctcctgcctctcgaaggcctgcacgggcccggcctcggcctcggcctcacagcggactctccacgcccagctagctctcgcctcactgcggcctccccagtccaaagctcctgcctttcggccacttcggcaggtccagctcctgcctgccagtggcctctttaggcccagctcattcctcacgtcggccattccaggccccgtttttcccttccggcagcctcttggcctctaatttgtttatcttttgtgtataaatcccaaaatattgaattttggaatatttccaccattatgtaaatattttggtaggtaatttatttggagtgagtttctgcgccaagcccgaattttttattttattttccttattatttggtgttaaacaggtttaatgacggtcatggcaactttttggcacaatgaaaaatatcgccca

SEQ ID NO: 583338 - DNA, 993 bp, Homo sapiens
  misc_feature (217)..(217): n is a, c, g, or t
agcggatgtcgagaatgacccaactagatggcccatctcagatgacccagtagaagctgggtggacaagatagttctcatgtcatggaatcagaacttcgctaattaagggtgcttatagatagcctcacttccgtaacacttggaagtagacttacgcgaaaggattgatcatgacatcataaaggggaacttaccgagctatgaagacggtagangacgcaatagagcaagacaaactgaacaatagaaagatagatttggaactgaaacccaaaagtagcataatagcctaggcgtgcatagcaaaaaacctattctacttaagtatttccaacacgtatgcggtacgatacgaagacacaacctaatgtggtagaatcacgtgacttggacgggcttctcctcttagaggtaactaaaggaaactatggagatcgcgactcactatttaactctcgaaatcaaataccctacctggcgttagatcaatcattacgccgcgaatacgtaaatagcgcacatatccagatgatggtatggaacaaagcatcatcatgcacactgcttctaatgatgcctaacgtgggttagactacttaatcctattcacattgagtcccaagggatttaatggtgaagcgaacgtttacaagtttgttccaaatcccaaatcgagtatcggaatgcatgcataatatggttgttaaaaactgttgggttagcgagttaattgagcaacgatagtggggaaggtaactttgttttgccagttccaatagaaaaacaccgatattgaaggaaaactggttcctatttataggctaaagcaaaagcagtagggtttggggtacaccttggtggaaggggaaccctatgaattgctaaacgaccgttgcacgacttaaaggccctgagggcctcaaaattagcagccaaagatttaacaacaattggttacatccaccttccaataaagttgggaggaagccga

SEQ ID NO: 583339 - DNA, 953 bp, Homo sapiens
  misc_feature (15)..(16): n is a, c, g, or t
  misc_feature (22)..(22): n is a, c, g, or t
  misc_feature (34)..(34): n is a, c, g, or t
  misc_feature (71)..(71): n is a, c, g, or t
taccccggagctctnnaggccnagaacttttcantcagcctctacagaccaagctcatgactcacaatggnctatttaggcccataccctacgtcacggcagcctccgcagatgagcctactgcctcacaacagcctccacaggcacagctccatcgttacaatggcctctttagacccagctcctgcctcccagccttctctccaggccctgaactttctcaggtctccctctgttgtccaaggctggagtgtagtagtgctatcgcagctgactgcagcctcaaccttccaggctgaagcgatcctcccacctcaacctcccacgtggctgagactacaggtgcttgccactatgcccaactaatatttggaattttcgtatacgtggattccagaggggtgacagcgaaacgtgggaccatccagttgcaggaaaacaagcttaacacgcccactgattctacattatgctcctacctcccggcagcctctccaggcccagaactttctccagtcagcctctacagaccaagctcatgactcacaatggcctatttaggcccataccctacgtcacggcagtctccgcagatgagcctactgcctcacaacagcctccacaggcacagctccatcgttacaatggcctctttagacccagctcctgcctcccagccttctctccaggccctgaactttctcaagtcgacctcaccaggcccagctcatgcttctttgcagcctctccaggcccagctcctgcatcttggtggcccctccaggcccagcctctgcctcccgtcagcctctacagtcccaacgtctgcctcacagcagattcttcacgcccagcatctacctcactgtggaccccccaacgcgcaaggctctttccaattcagaaccggccaagtgcacgggcttttacatctggaatcagctatgacatga

SEQ ID NO: 583340 - DNA, 1379 bp, Homo sapiens
  misc_feature (15)..(16): n is a, c, g, or t
  misc_feature (22)..(22): n is a, c, g, or t
  misc_feature (34)..(34): n is a, c, g, or t
  misc_feature (71)..(71): n is a, c, g, or t
taccccggagctctnnaggccnagaacttttcantcagcctctacagaccaagctcatgactcacaatggnctatttaggcccataccctacgtcacggcagcctccgcagatgagcctactgcctcacaacagcctccacaggcacagctccatcgttacaatggcctctttagacccagctcctgcctcccagccttctctccaggccctgaactttctcaggtctccctctgttgtccaaggctggagtgtagtagtgctatcgcagctgactgcagcctcaaccttccaggctgaagcgatcctcccacctcaacctcccacgtggctgagactacaggtgcttgccactatgcccaactaatatttggaattttcgtatacgtggattccagaggggtgacagcgaaacgtgggaccatccagttgcaggaaaacaagcttaacacgcccactgattctacattatgctcctacctcccggcagcctctccaggcccagaactttctccagtcagcctctacagaccaagctcatgactcacaatggcctatttaggcccataccctacgtcacggcagtctccgcagatgagcctactgcctcacaacagcctccacaggcacagctccatcgttacaatggcctctttagacccagctcctgcctcccagccttctctccaggccctgaactttctcaagtcgacctcaccaggcccagctcatgcttctttgcagcctctccaggcccagctcctgcatcttggtggcccctccaggcccagcctctgcctcccgtcagcctctacagtcccaacgtctgcctcacagcagattcttcacgcccagcatctgcctcactgtggaccccccaagccaagctcccaacctttcagcagcttctacacacccagctcctgccacccagtggcctctttaggccaagctcatgcttcacaagggcctttccaggcccaacttttgtctcatggcaaccttccctggccagattcctgcctgtctcccagcagcctagacaggcccaggtcttgcctcacactggcctctctacatccagcttatgcctcacggtggcctctccaggcccaactcctgtcccaggacgtcatctccgggcccaaaacttactcaagtcagactctctagtcccaactgctgcctcacagcagattcttcacgcccagtatctacctcactgtggaccccccaagccaagctcccaacctttcagcagcttctacacacctagctcctgccacccagtggcctctttaggccaagctcatgcttcacaagggcctttccaggcccaacttttgtctcatggcaaccttcctggccagattcctgcct

SEQ ID NO: 583341 - DNA, 243 bp, Homo sapiens
acccgtagggccctataaactggatgaccactgtcaaatgaaattaaggctgttgaggcagaaatgatttgataaaagtttattggaagccaaatgtgaggatgaacccagggaaacacaccaacaaagttgagagtgttctggagtctgttacaagttgggaagttagaagacaggagggggactcttcatacaggagttgtcctttttcactggagggtacaatacaaaggttacatatta

SEQ ID NO: 583342 - DNA, 808 bp, Homo sapiens
  misc_feature (808)..(808): n is a, c, g, or t
catggtcggtgtcgagttcctgctcctaatctgttagactgctacttcgtgatgttgccatctgccatcgcatcgtaggccctgctggtgtccatgattgcgtgagtagccttgccttgggtagcatctatctcgtcatggtcgaccttgcgcatcccatgcctcgcatgcgacacgagtagtcggtcctcgtacgtggcaccatccgtggcacgcgattatgattcgcttccatgccattctgccctgcatcgagttggtcctttaccgtcgttgctgcctccgcggcactgtgccttgaggtttgtctctgtgagagcctcgcatgaggtgctcttccgtgtagcataggtctcgcctgcgatggcctcccctacgcgggccacgcctcattacacaactccctggcagcctaggtctcgactgcacatggcccggaggtatgacttggcgtggcattgacgcctatggcctccgattcggcccttggcaccactttgcccaggggcattgtctgttggaccctttgttgtccgagacctgtaggttccgctagggcctgaggttgcgctctcgttggctcctgggtcccctcggtgcgctccttctggtctatctccactactctcttgcttcggcggaacgtggctgcgtggaatccctacccttgctgttgttccactgctaactgtgctagtccactggtgaccccgtgcggaagcatagctcctcgcctttggtagtttcctcccatgtcccccactagctccgggggttttctcgaagctgttctttggagccccttagn

SEQ ID NO: 583343 - DNA, 204 bp, Homo sapiens
gcacgaggcgagagcatgaccgatggattccagttcgagtatggcggtcagggctccgaccctgtcgatgtggccattcagctgaccttcctgcgcctgatgtccaccgaggccttccagaacatcacctaccactgtaagaacagtgtggcctacatggaccaccagactggcaaccttaagaaggccctgctcctccagggc

SEQ ID NO: 583344 - DNA, 276 bp, Homo sapiens
atagattagtgtctgctcaaacaactgggtacctgcctagccacactgacataaaactcaccatcaccgtccatccttggtcagctggacatctccctaaactatacttcgtttccacataaagacagaagcaaagtcatacttctgcctaatatgatacaacaagcctgactacaccaagcagtgcatgcgcccttccccagaacaggcatcagagtcttggcaggggtgcttcgtcttcgtctagatctcttgtaacttcaaatactatcatca

SEQ ID NO: 583345 - DNA, 264 bp, Homo sapiens
gctggcttcttgatggcagactgagctggaactggcttggtccatcaccccaggagtaatggctggcttaacagcccacagcaaattctgtggttcactggaccgagcagcatgttccaggacagctgtggggtcagttggggccatctttggactcagcctgagtgtcagctgtctcatgcccacatcctggcactcacaggagccagtaaaactctctccaggccagtggctgcgaccctgtctcctaaactcagaaagcca

SEQ ID NO: 583346 - DNA, 996 bp, Homo sapiens
aactcttgacctgcttatctgattctcggagatccatgtgcccagttccccctagacgagatcataggctacctaatccctaatacctcatgtatgcaccgcattgtggttacttcttggagaggtttggacgtttatagcgtatgtgatgctttaagacagagattataacgacgacatggcatagggggcaagacactgttgggatgttcttgaaagctactacgatggcttacggtcaattagagacatgcaaagatgtttgtcgaagtcgactctgtatggattgtggtgtgaagagatctggaaggaagaccaatatagcaagagtattccaggaaataagtagaaccttgaaataacgcgtattgaggggattggatgagaagtttaggtgagctgaacttgagggtggatatacgtgagtgtgatgggaaactgtgtagatggtacatgcatcagtggtgtatgggcaatattctatcggacaagtccaggattcgagagatcttgagattttcttccgagcaataccagaacagcaatccaagtgaagactgtgttatgacacggaagatgaacacttggaggaagaagacaagaagagagtgtgagacgtggaaatgcaaatgaaaacatgatcatcatgctacacgcagtggtgtgcataacccgtgggcgaacgcatgatttcaggtgcgcttagcaccagtcttatagtacaccacaccggggtcacaactggagcgaaccagttgcagactggggcagcagcaggatgttgcacattcgtttgaggcggggcaagagaactagaaatgaccctcccaaatgcaaaagcggggggaaaacggggtcacaccccagaaacgggaacccagtgctagccacgcagacacaggcttcggcaagaagggcacgggcaacaacccgccgcgaggacaccacaacaacgactagtgcataacgataaacaagaaaggaacaatacagaaa

SEQ ID NO: 583347 - DNA, 864 bp, Homo sapiens
gctatatcatgcgttgggtcgcgcggccccagatgcgtcgatgaccttgggcgtcgctgtgggcctaggactagtcctggtcctgactcaggtgctggcgcatagcttcgatcaatataggaataccgacccggcggaaaaacgacgaccgttactgcacgctagaatgcgcatgatgagtacgcgggctgactgtctcgacggggatcgatctactggaggccgagccactgtcgatatggatctcacggccccgatcggtatttgcatggagtacttgccaataatttgactggctggagaactgtcttggcatgtagaggacgatatatccttttttgatgtccagtttatttctggcatctgtggcagccctgagtgccatgatctctctagaaattccgcaagtcaaccatcatgaccaaaaatggatctgctgagtaaaaaacgcaaccccagggaactggagaaattcttagatccagaccatgtattctttattacgaagattctacaagtgacttacgaagcaaaacaattcacgacaactgactaaaagttattatgtgggactgatgtgatgactacagcaatggttcgaatttgtaccttacgatcagtcagatgaacggaaagcatgaagcatggtattggcagcattatgcattggccattcactatgggggagacctagaatttaacgaacccaagggacgtgcaagcagcagtcttccctcatatggttggcgaactctttcaacatgccgggtgcatggagcggttcctaaaggaaccctttaagaagtggggcaaaccagaggaatcttctcctcagggggcaggcaacgctttttcgcgcacacg

SEQ ID NO: 583348 - DNA, 141 bp, Homo sapiens
agagtatagtctgagaagcagaatgaggtctgagagctcatgcaggaatgaataacttctggatcctttgggatatagtgattcttcaaactcctggtaggtgtcaatggccagctaggtgcccccgtcatgatctctgga

SEQ ID NO: 583349 - DNA, 603 bp, Homo sapiens
agcccagcacgtgtttgagtaacttagtcatctcggggctatatccatttggacaagcacataccatccaggaagagacagcggagtgggggcttgggagtgaactggagctgtggaaagggctgccatgggcatcggagctactaattcaccagcaacactgccactcagggacaaggtttaacctgtagattgctctacaagtttgtagttcttgcattcaacagatatttgtagagtatcctcagagtgctgggcattttgtctcaggctggggacaccaggttaaacagaacagatcccgaacccaagagagagagagctcgtcaagtccataggcagttaaaatgtggcatggcgcaggggagggagtgctgggggagatggagcacaggggagtttgcagacagtgaaacgattccgtatgacactgtgatggtgggcgtgtgatgaagaacttgacagcacaaagaattgacctaatgtatgcaaattgagaaaaaaatttaggaggtcaagtgatcctagcaggaaatgcagaatgtgacagtaatcgaaatgtattacaggtcctccctgaagtgggtaggggaatacaaaata

SEQ ID NO: 583350 - DNA, 886 bp, Homo sapiens
  misc_feature (886)..(886): n is a, c, g, or t
taatgcttgatgataaaagaatcaaactttttttttttggaaagtggagtctcgctctgtcacccaaaactggagtgcagtggtgtgatcactgctcaggtgcaacctctgcctcccaggatcaagcaattctgactcagcctcccaagtagctgggattacaggtgcaggccaccatgcccggctaattttttggtattttagtagagacggggtttcaccatgctggccaggctggtctcaaacacctgaccttgtgatccgtccgcctgggcctcccaaagtgctgggattacaggcgtgagccaccggcttggccaaaacaacattttacgtagaagatccaggtttcagtgcagcttctgccgttaactaggttaataattcacaaccttggggccacagtggccttatatgtaacatgaaagtgttaccacataacaatagttaactttccttatttttccctgtggtggctgccctgtggaaacagtttagaatattgtccgtgtgtaggaccctagtgtgttcagtttcctggtgtccccagtgatagtgatgcctgataaattcaggggcacttactcattctacaggagattgactttacagcatcagattttctgtccattccggcttgctggtagaggagtttgcgaaaaaactgatcttagacgtaattttagttccgaaggcataaccaaatacgatgttcttctacacaagcgtacctgtgactccttggggcaccccggtaaactctcgtgagaccgttgtaatgcgtgacagaaactctgcagggctacaacacgagagtatatgatgaggtgctgaaacaaaaaacgtcttttcgcgagcggttatgcatttatctcctgtctgtggn

SEQ ID NO: 583351 - DNA, 490 bp, Homo sapiens
ggttttaaaaaagggggaaaaaaaagggggggatgggggggccacccaaataaaaagagtttttttttttgggaaaaaaaattttttttaaaggtttgtcccaaaaaaaaaaaaggggggccccggttttttgtgttttttaaaagggccaggggggggggttttttttttgggaaattttttttggggggggaaaaagggaaaacccccctgggtttgggccccccttttttaaaccaaggggcccctttaaaaaaatttttaaaaaatcccccctttcaaaaccaaaaaaaaggccccggggctttggggcctttaaaaaaaaccccggcccccctttttttcccccccccaaggggggttttggggggcccccccccgggggggggccccgggcccccccccttttttcccctggttttaggggcccttccccccccttttttttttcccaaaaaaaaaaaaaaagggggggtttttcccccgggga

SEQ ID NO: 583352 - DNA, 260 bp, Homo sapiens
agtcatcgctcaaaaagtcaaggccggtgtggtgaacggcacgggggcgccgggccagagccctggggctggccgggcctgcgagagctgttacaccacacagtcttaccagtggtattcttggggtccccgctgctccgggctgggaggccgtggggactcatgttactgcggtttggtcctggcctctctccatctaaccgggttggcattttcaagccaccatatttcttccaatatgtccaacaagatgcgcagag

SEQ ID NO: 583353 - DNA, 309 bp, Homo sapiens
tagaggatccccgttaacaggctgatgcaggagaatcacttgaactgagaggcagaggttgcagttagctgagaccatgccattgcactccagcctgggcggcagagcgagactctgtctcaaaaaaaaaaaaaaaagaaaagtaccagtcctacggaaatattaagaaaccaaaaaatccaccttttggaggtgtacaatggagtgattttcgggtatagttcacatattctgtgcagactatccacacccttctaactcgcaggaacattttccttcaccccgcgaggagaaacctcgcttaaccaa

SEQ ID NO: 583354 - DNA, 1528 bp, Homo sapiens
  misc_feature (1)..(1): n is a, c, g, or t
  misc_feature (134)..(134): n is a, c, g, or t
  misc_feature (170)..(170): n is a, c, g, or t
nggcccggcgggtattgtatgccgtcggagtgatgtgttcgcgccccgccactccttcgtgtatggagccacccagcctctgtgtttttgatgcaccccccccgcgcgtgtggtggtggtttggttgttaatanaagggcgaggttctctcctcccatcttcacaggggnggggtatgtatagaatgagtggcttgcccccccctcctttctttttggggggggccacccccacttgtttttatgaagtgctgccgccgctgcatgttagggggtggggccacactcatatatcaccccccttcgtattggtggttggcgctcggcgtgggaatcaagcattgtgtttgtccgccaccgcgaaggcttgtttttctctacgtcggagggaggccgccctctctttgttgtgtgggcggctgcctctcttctccgcgcccgccacgattttgtttgttgttgctcgccgccgccccgcctggggttgcgggcgcgatatatgatatatatgttggttcccgccgtccgttctttcttcttctcccccctctgtgaaggtgtgttccccccccccgtctggtgggtggtgttctgacgaacgaacaccactgccgttgtgatatcccgtccccctctctgatatgaggggaagtctcttctcccccccctctctagggggagatataaagagagagaataaaaagtttttatgagagatatttatattgaccccactctcgcggagtgtctccacacaaagtgtgatgtctgtcgcgacaccacacaacatttgggggggagacacccccgccccctctcgggtgacaccaccgcgcgtatatatgtctcttcgcgggggtgatccccccctccccgcgcgtgttgtgtctccccccctctccaatatctgtatatgtgttcctctccacacatatatgtgtgtctctctccacgcctcttgtgttatatgtgatgcgaaagagtgtgagagagacttctttgtctcacgcgctgtgtctccacgcgcggtatattcttgtgagtgtgtatacaacaatgagagagagatagtccccccctcacacactctatagagagagtggttttttatagacaccctcacacacacacacatctgtggggtgtttgttgtgtacaccccccagagagagttgttacacacactctctcttgtgaccgcagtggaggagagccgacaagaaatacactgtgtgcacacactgtgtgtgtgctgtgcgagagagagagtctgtgtacacacactctgtgtgtcccccacacactgtgtgtattttccctcttccccgtgtgggccacaagtgagagtgtgaaaaagtagtttaaaacaccctttgtgtgtatttttatttcctctcttttgtgtggttccgcgcttaaaacccgcgggtgtgtaaacccccacatttgtagtgtttctcccccccgcgggggtttttttataaaggtgtccctttttttttaaaaacatgtgtgtgagaaaatttata

SEQ ID NO: 583355 - DNA, 838 bp, Homo sapiens
  misc_feature (15)..(16): n is a, c, g, or t
  misc_feature (22)..(22): n is a, c, g, or t
  misc_feature (34)..(34): n is a, c, g, or t
  misc_feature (71)..(71): n is a, c, g, or t
taccccggagctctnnaggccnagaacttttcantcagcctctacagaccaagctcatgactcacaatggnctatttaggcccataccctacgtcacggcagcctccgcagatgagcctactgcctcacaacagcctccacaggcacagctccatcgttacaatggcctctttagacccagctcctgcctcccagccttctctccaggccctgaactttctcaggtctccctctgttgtccaaggctggagtgtagtagtgctatcgcagctgactgcagcctcaaccttccaggctgaagcgatcctcccacctcaacctcccacgtggctgagactacaggtgcttgccactatgcccaactaatatttggaattttcgtatacgtggattccagaggggtgacagcgaaacgtgggaccatccagttgcaggaaaacaagcttaacacgcccactgattctacattatgctcctacctcccggcagcctctccaggcccagaactttctccagtcagcctctacagaccaagctcatgactcacaatggcctatttaggcccataccctacgtcacggcagtctccgcagatgagcctactgcctcacaacagcctccacaggcacagctccatcgttacaatggcctctttagacccagctcctgcctcccagccttctctccaggccctgaactttctcaagtcgacctcaccaggcccagctcatgcttctttgcagcctctccaggcccagctcctgcatcttggtggcccctccaggcccagcctctgcctcccgtcggcctctagcggcacccgggcgagctcgattta

SEQ ID NO: 583356 - DNA, 147 bp, Homo sapiens
gaagaggtcatctggggtcccttatctggtctctgacttgagtcctctacatcaggtatggtgaaagtaaagtcctcactagtaccactccttatctgtgctctgagctgagcgggggagccagacggccccctgacgagcaggacc

SEQ ID NO: 583357 - DNA, 147 bp, Homo sapiens
  misc_feature (112)..(112): n is a, c, g, or t
  misc_feature (138)..(138): n is a, c, g, or t
attgtgggttgctgggcggcccggtctcggagaagaggggagagtggcgggccgctgtataagcttccaaaaagaagacccgtcggttagccttttttaagaggggactganagctcccaaggcatccccccccttgngagtaacat

SEQ ID NO: 583358 - DNA, 946 bp, Homo sapiens
  misc_feature (15)..(16): n is a, c, g, or t
  misc_feature (22)..(22): n is a, c, g, or t
  misc_feature (34)..(34): n is a, c, g, or t
  misc_feature (71)..(71): n is a, c, g, or t
taccccggagctctnnaggccnagaacttttcantcagcctctacagaccaagctcatgactcacaatggnctatttaggcccataccctacgtcacggcagcctccgcagatgagcctactgcctcacaacagcctccacaggcacagctccatcgttacaatggcctctttagacccagctcctgcctcccagccttctctccaggccctgaactttctcaggtctccctctgttgtccaaggctggagtgtagtagtgctatcgcagctgactgcagcctcaaccttccaggctgaagcgatcctcccacctcaacctcccacgtggctgagactacaggtgcttgccactatgcccaactaatatttggaattttcgtatacgtggattccagaggggtgacagcgaaacgtgggaccatccagttgcaggaaaacaagcttaacacgcccactgattctacattatgctcctacctcccggcagcctctccaggcccagaactttctccagtcagcctctacagaccaagctcatgactcacaatggcctatttaggcccataccctacgtcacggcagtctccgcagatgagcctactgcctcacaacagcctccacaggcacagctccatcgttacaatggcctctttagacccagctcctgcctcccagccttctctccaggccctgaactttctcaagtcgacctcaccaggcccagctcatgcttctttgcagcctctccaggcccagctcctgcatcttggtggcccctccaggcccagcctctgcctcccgtcagcctctacagtcccaacgtctgcctcacagcagattcttcacgcccagcatctgcctcactgtggaccccccaagccaagctcccaactttcagcagcttctacacacccagctccaaagcctgatagggtaccgagctc

SEQ ID NO: 583359 - DNA, 397 bp, Homo sapiens
taaaggggtgcccacacaaaaaaaaaaagggtttggggggggaaaaggacaaactcccatccgtggccgggacgggaggggccttcaaagggggcctaaaaaaagggtggggaaaaacgggcccaaaaaaggggaggggggggatgtgaaaaccctttttttaaagtccgggcgtgttttgggaaaccctaaggtttcttttttttcccctgggcgggcgggggatttctttaaggggggggttaactcaccacctttgggaggggggtttatttaaaaaggccctgggcttttaagccccaaaggggtgggaaaaaaccagcgccggtgtacaattaaactgggagggcccttttggccttatgacttttctaaccggaccccggggggggccccg

SEQ ID NO: 583360 - DNA, 484 bp, Homo sapiens
cccgggccaagtcttcctccaaattgggtttctaaggtccgccccgccatggagtaggggggcccttctgctaccccactttcacctgcgcttggggaccctgagaacacccccggggtgttcacggactcccgtgacatcattcagcgcatgcccctttgtcagtcggagttgctctaagaaggggacccccaaatttaattaaagccttaagcccaattaattaaaagggaaagggaattggccaagcggttaatccccccccatagggcatgattaacaaagcaacctttcccttcccccggggggttttgggaaacccccttttcccttcagctgggttagatgttccaaatttagaaagcttaagggggcctccagaaaaaggaaaaaaggccccaaaagttccctctccctttcgggaaaaataaataaacccgccgccgccacccaataaaatgaaataaaaggacccaatggaata

SEQ ID NO: 583361 - DNA, 2502 bp, Homo sapiens
  misc_feature (15)..(16): n is a, c, g, or t
  misc_feature (22)..(22): n is a, c, g, or t
  misc_feature (34)..(34): n is a, c, g, or t
  misc_feature (71)..(71): n is a, c, g, or t
  misc_feature (817)..(817): n is a, c, g, or t
  misc_feature (1041)..(1041): n is a, c, g, or t
  misc_feature (1196)..(1196): n is a, c, g, or t
  misc_feature (2358)..(2358): n is a, c, g, or t
taccccggagctctnnaggccnagaacttttcantcagcctctacagaccaagctcatgactcacaatggnctatttaggcccataccctacgtcacggcagcctccgcagatgagcctactgcctcacaacagcctccacaggcacagctccatcgttacaatggcctctttagacccagctcctgcctcccagccttctctccaggccctgaactttctcaggtctccctctgttgtccaaggctggagtgtagtagtgctatcgcagctgactgcagcctcaaccttccaggctgaagcgatcctcccacctcaacctcccacgtggctgagactacaggtgcttgccactatgcccaactaatatttggaattttcgtatacgtggattccagaggggtgacagcgaaacgtgggaccatccagttgcaggaaaacaagcttaacacgcccactgattctacattatgctcctacctcccggcagcctctccaggcccagaactttctccagtcagcctctacagaccaagctcatgactcacaatggcctatttaggcccataccctacgtcacggcagtctccgcagatgagcctactgcctcacaacagcctccacaggcacagctccatcgttacaatggcctctttagacccagctcctgcctcccagccttctctccaggccctgaactttctcaagtcgacctcaccaggcccagctcatgcttctttgcagcctctccaggcccagcctcctgcctcccgaaggcctgcacaggcccagcctctgcctcacagcggactctccangcccagctagctgttgcttcactgcggcctcccgagtccaaagctcctgcctctcggccgcttcggcaggcccagctcccgcctgccagtggcctcttcaggcccatggggctcattcctgacaacggcctttccaggcccagtttttcccttccggcggcctctccgggcccagaacctcctcaagtcggcctctccagacccacttgcaccctccgggcgtnctctccgggcccagctcttcttcctggttgcgtctccaggcccgactcctgcctcccaacaacgtctttggactcagctcctgcccagctcccagcggccctggtaggcccacaacttccctaagccaagctccccaggcccagctcaggcctcncggtggcctctccaggctcagctcctggccctccgatgacatctgcaggccccaaatggcctccggtcggtgggctcctctaggcccagcttgggcctcccggcggcctctgcaggcccaaatcgtcccgaagtcagtctctccaggcttagctccagcctcccggcggcctctgcaggcccaagtcgtcctcaagtcggcctggaagtgggcctggaagagcagcaagtcggcctccccgggcccagctccgtcctctcggcggcctctccaggtgcaaaacttcctcgagtcagcctctccaggcccagctcctcctgcctgccagtggcctctttaggcccagctcattcctcacgtcggccattccaggccccgtttttcccttccggcagcctcttggcctctaatttgtttatcttttgtgtataaatcccaaaatattgaattttggaatatttccaccattatgtaaatattttggtaggtaatttatttggagtgagtttctgcgccaagcccgaattttttattttattttccttattatttggtgttaaacaggtttaatgacggtcatggcaactttttggcacaatgaaaaatatcgcccatgatcaacgtgttctcttctggggaagggggcaaaggcagggtgaatcactttcttaaaaagtatagctcaagttgggagtgcagagggaatggggagaaaacccttccgctgcctgtgtcgaagtgcaggagcccccacccccatactcacctgagtccagcccctctggggaaagaaggggtgcatgaactccccttagtccacaggcgcctccctgtggcccaaggccctcttcacactccatcttgtagccccagcaggagctattttccgaaaagtgaaaagctctgaaggtcccacaattcatggtatgtacaggggctcggaggagggaaactgcccagctttcccccggcacagctgcaggggtagggggtatagataagaggagcaggccttggccaggcgtggtggctcacgcctgtaatcccagcactttgggagggggaggcaggcagatcacgatgtcaggagatcgaaatcagcctggccaagatgatgaagccccgtctgtactaaaaatacaaaaattagccggacgtggtngcgtgcacctgtaatcctagctacccggaaggctgaggcaggagaatggcgtgaacccggtgggaagagtttgcagtgagccaagatcgcaccactgcactccagcctgggcgacagagcaagactcggtctcaaaaaaaaaaa

SEQ ID NO: 583362 - DNA, 1487 bp, Homo sapiens
  misc_feature (15)..(16): n is a, c, g, or t
  misc_feature (22)..(22): n is a, c, g, or t
  misc_feature (34)..(34): n is a, c, g, or t
  misc_feature (71)..(71): n is a, c, g, or t
  misc_feature (817)..(817): n is a, c, g, or t
  misc_feature (1041)..(1041): n is a, c, g, or t
  misc_feature (1196)..(1196): n is a, c, g, or t
  misc_feature (1450)..(1450): n is a, c, g, or t
taccccggagctctnnaggccnagaacttttcantcagcctctacagaccaagctcatgactcacaatggnctatttaggcccataccctacgtcacggcagcctccgcagatgagcctactgcctcacaacagcctccacaggcacagctccatcgttacaatggcctctttagacccagctcctgcctcccagccttctctccaggccctgaactttctcaggtctccctctgttgtccaaggctggagtgtagtagtgctatcgcagctgactgcagcctcaaccttccaggctgaagcgatcctcccacctcaacctcccacgtggctgagactacaggtgcttgccactatgcccaactaatatttggaattttcgtatacgtggattccagaggggtgacagcgaaacgtgggaccatccagttgcaggaaaacaagcttaacacgcccactgattctacattatgctcctacctcccggcagcctctccaggcccagaactttctccagtcagcctctacagaccaagctcatgactcacaatggcctatttaggcccataccctacgtcacggcagtctccgcagatgagcctactgcctcacaacagcctccacaggcacagctccatcgttacaatggcctctttagacccagctcctgcctcccagccttctctccaggccctgaactttctcaagtcgacctcaccaggcccagctcatgcttctttgcagcctctccaggcccagcctcctgcctcccgaaggcctgcacaggcccagcctctgcctcacagcggactctccangcccagctagctgttgcttcactgcggcctcccgagtccaaagctcctgcctctcggccgcttcggcaggcccagctcccgcctgccagtggcctcttcaggcccatggggctcattcctgacaacggcctttccaggcccagtttttcccttccggcggcctctccgggcccagaacctcctcaagtcggcctctccagacccacttgcaccctccgggcgtnctctccgggcccagctcttcttcctggttgcgtctccaggcccgactcctgcctcccaacaacgtctttggactcagctcctgcccagctcccagcggccctggtaggcccacaacttccctaagccaagctccccaggcccagctcaggcctcncggtggcctctccaggctcagctcctggccctccgatgacatctgcaggccccaaatggcctccggtcggtgggctcctctaggcccagcttgggcctcccggcggcctctgcaggcccaaatcgtcccgaagtcagtctctccaggcttagctccagcctcccggcggcctctgcaggcccaagtcgtcctcaagtcggcctggaagtgggcctggaagagcagcaagtcggcctccccgggcccagctccanctctcgcgcccctccttgtcctcatacatccgtaata

SEQ ID NO: 583363 - DNA, 1493 bp, Homo sapiens
  misc_feature (15)..(16): n is a, c, g, or t
  misc_feature (22)..(22): n is a, c, g, or t
  misc_feature (34)..(34): n is a, c, g, or t
  misc_feature (71)..(71): n is a, c, g, or t
  misc_feature (817)..(817): n is a, c, g, or t
  misc_feature (1041)..(1041): n is a, c, g, or t
  misc_feature (1196)..(1196): n is a, c, g, or t
taccccggagctctnnaggccnagaacttttcantcagcctctacagaccaagctcatgactcacaatggnctatttaggcccataccctacgtcacggcagcctccgcagatgagcctactgcctcacaacagcctccacaggcacagctccatcgttacaatggcctctttagacccagctcctgcctcccagccttctctccaggccctgaactttctcaggtctccctctgttgtccaaggctggagtgtagtagtgctatcgcagctgactgcagcctcaaccttccaggctgaagcgatcctcccacctcaacctcccacgtggctgagactacaggtgcttgccactatgcccaactaatatttggaattttcgtatacgtggattccagaggggtgacagcgaaacgtgggaccatccagttgcaggaaaacaagcttaacacgcccactgattctacattatgctcctacctcccggcagcctctccaggcccagaactttctccagtcagcctctacagaccaagctcatgactcacaatggcctatttaggcccataccctacgtcacggcagtctccgcagatgagcctactgcctcacaacagcctccacaggcacagctccatcgttacaatggcctctttagacccagctcctgcctcccagccttctctccaggccctgaactttctcaagtcgacctcaccaggcccagctcatgcttctttgcagcctctccaggcccagcctcctgcctcccgaaggcctgcacaggcccagcctctgcctcacagcggactctccangcccagctagctgttgcttcactgcggcctcccgagtccaaagctcctgcctctcggccgcttcggcaggcccagctcccgcctgccagtggcctcttcaggcccatggggctcattcctgacaacggcctttccaggcccagtttttcccttccggcggcctctccgggcccagaacctcctcaagtcggcctctccagacccacttgcaccctccgggcgtnctctccgggcccagctcttcttcctggttgcgtctccaggcccgactcctgcctctcaacaacctctttggactcagtgcctacccatctcctggcggccctggtaggcccacaacttccctaagccaagctccccaggcccagctcaggcctcncggtggcctctccaggctcagctcctggccctccgatgacatctgcaggccccaaatggcctccggtcggtgggctcctctaggcccagcttgggcctcccggcggcctctgcaggcccaaatcgtcccgaagtcagtctctccaggccctgcctcccagcaagtaagcaagctcttttggctcaactcctgcccagctcccaaccgcctttgtaggccccgaactttctccagccaagctctgagggcccacctcctgccttctggtggcctgtacagttctagcactggttggag

SEQ ID NO: 583364 - DNA, 425 bp, Homo sapiens
acagagtgacaccctgtctcaagagatagtaataatttttatatttgggggataattttagatttatggaaaagtgcaaagatagtccagagaattcccatataccccttccccagcttcccctaatgttaacatctcacaataccatggcacatttgtcaaaactaagaaaccagcatcagtagatcattattaactaaaccctgggctttatttggatttcattggtctgtctactaatgtagtttttctgttttaggatctcgttcaggatgccatatggtattttgtcattagttattatgtctccttagtctcccctggtcaatgacagtttctcaatctgtttctgtttttcatgaccttgacagtttcaaggagtagcggtcagatatttcgtagaatatccctcaatttggatttgt

SEQ ID NO: 583365 - DNA, 783 bp, Homo sapiens
  misc_feature (15)..(16): n is a, c, g, or t
  misc_feature (22)..(22): n is a, c, g, or t
  misc_feature (34)..(34): n is a, c, g, or t
  misc_feature (71)..(71): n is a, c, g, or t
taccccggagctctnnaggccnagaacttttcantcagcctctacagaccaagctcatgactcacaatggnctatttaggcccataccctacgtcacggcagcctccgcagatgagcctactgcctcacaacagcctccacaggcacagctccatcgttacaatggcctctttagacccagctcctgcctcccagccttctctccaggccctgaactttctcaggtctccctctgttgtccaaggctggagtgtagtagtgctatcgcagctgactgcagcctcaaccttccaggctgaagcgatcctcccacctcaacctcccacgtggctgagactacaggtgcttgccactatgcccaactaatatttggaattttcgtatacgtggattccagaggggtgacagcgaaacgtgggaccatccagttgcaggaaaacaagcttaacacgcccactgattctacattatgctcctacctcccggcagcctctccaggcccagaactttctccagtcagcctctacagaccaagctcatgactcacaatggcctatttaggcccataccctacgtcacggcagtctccgcagatgagcctactgcctcacaacagcctccacaggcacagctccatcgttacaatggcctctttagacccagctcctgcctcccagccttctctccaggccctgaactttctcaagtcgacctcacggtctccctctgttgccaaggctggagtgtagtagtgctatgctttatgctcatctgtgtggctgg

SEQ ID NO: 583366 - DNA, 837 bp, Homo sapiens
  misc_feature (15)..(16): n is a, c, g, or t
  misc_feature (22)..(22): n is a, c, g, or t
  misc_feature (34)..(34): n is a, c, g, or t
  misc_feature (71)..(71): n is a, c, g, or t
  misc_feature (787)..(787): n is a, c, g, or t
taccccggagctctnnaggccnagaacttttcantcagcctctacagaccaagctcatgactcacaatggnctatttaggcccataccctacgtcacggcagcctccgcagatgagcctactgcctcacaacagcctccacaggcacagctccatcgttacaatggcctctttagacccagctcctgcctcccagccttctctccaggccctgaactttctcaggtctccctctgttgtccaaggctggagtgtagtagtgctatcgcagctgactgcagcctcaaccttccaggctgaagcgatcctcccacctcaacctcccacgtggctgagactacaggtgcttgccactatgcccaactaatatttggaattttcgtatacgtggattccagaggggtgacagcgaaacgtgggaccatccagttgcaggaaaacaagcttaacacgcccactgattctacattatgctcctacctcccggcagcctctccaggcccagaactttctccagtcagcctctacagaccaagctcatgactcacaatggcctatttaggcccataccctacgtcacggcagtctccgcagatgagcctactgcctcacaacagcctccacaggcacagctccatcgttacaatggcctctttagacccagctcctgcctcccagccttctctccaggccctgaactttctcaagtcgacctcacaacgtcggtggggtttgttctttgggaatgagggaataaaaactttcatgggggtgcaagctcgggaatnagggtgggttcccctctttgcaaagttcaataagctgttatgcccagggg

SEQ ID NO: 583367 - DNA, 895 bp, Homo sapiens
gggtgcgcatgcccgtgaggctgccgcgggcccagacatgtccgtccttgtagagttaaaagcttccattggaagccttgcttcctaatcaaagatgcaaattaatacggattccggaactgagagactgaaaaacagcgtctctatctcaaaagatacccaagtgctggtcattgacgagctatgagaaaattcagatcgcatggggaactcacacggtctgagtgcagttgatacgcctttccaagccaggcagtgaatctctttgggaacccattaacctttgctattcctccatcaagattggatcaaccttcccaccctgaggctccccaaaggctttgaacagttcttcagtgatccttacagaaagacacccctctccaaacaaaacgcagcatttatatacagtccatttggctctctaggaaacaccagaattatcagtgaagaatatattaaatggctcacgggctacctgtaaaggcatatttctatggctgtgagagtaaactcctagaaccagttcctgttctgtaacaagatgttcctttagagtcaatgagaaacacaacacaagctacaaagttcatgcgggggaacatcctggaagttctctgagaaaacgaagaaacctgaagatgccttctgtgtgtgggaataccaatgattgatctttacccaagagactcgtggaactttgtctttgaacaggcctccttgacagatgggtgtggggattatccggcttggccaggattgcgcgattataggcaggaactattagggaaggtaaaaactcagaaactctccgtgcatattcatttcgcacctttttccaaaacgtgttcaactcaccggtattacctgaggcctttgggaacccggggtccaa

SEQ ID NO: 583368 - DNA, 155 bp, Homo sapiens
gggcaggcacaagtgcgaggcgtaatgtggcggacagttgagagcctacctggaggggcacgtgcgtggagtggctccgcagatacctggaggacgggaaggagacgctgcagcgcagggacgccccccaaaaacgcatatgactacaccacgct

SEQ ID NO: 583369 - DNA, 1193 bp, Homo sapiens
gctggactgtagtggcatgatcatgcctcactgcagccttgacctcccaggctcaaacttccgcattccgaatagctgggactacaagtgtgcaccaccacccccagctaacttttttcttcttttggatggagacagggtctcactgtgttgtccagaccggtctctagctcctggccttaagcaatcctcctgcattagcttctcaaattgctggaatttcaggcatgagccaccatgcctggcctgggctagtcctatattctctagagttctctttactttgtgctagccaatctctcattatgctgttcacctgttataatgaataattctctgtattaaattttaccactttaaacttttgagtggtttatgcttcctgattggactctgactaatatgttaggaagggtcccaggagataaacccacacagatgggatttgggcagtgctgagctctttgccagtgggaaatgggatgctggtgatttccagtaggtgacctcacagtgactcaagctaccacttactgttgattgtgacgaaatgccagctgaggcacatgccttgggagctaagtggttgctgcccttgaccactgtgaagactggtgtgggaagggtcgttttggatgcacttgagcaggggtccccaacccctgagccatggagccgcaaggagccacacagcaggaggtgagcggtgtcgagtgagggagtgagggaagcttcgtctgtatttacagccactcccctttgctcacattcccgcctgagctccaccttctcagatgagcagcagcattagattctcataggagaacgcaccctgttgtgaaccgtgcatgtgagggatctaggttgcgctgtccttatgagagtctaatacctattgatctgtcactttctcccatcacgctcaggtgggaccatccagttgcaggaaaacaagcttaacacgcccactgattctacattatgctcctacctcccggcagcctctccaggcccagaactttctccagtcagcctctacagaccaagctcatgactcacaatggcctatttaggcccataccctacgtcacggcagtctccgcagatgagcctactgcctcacaacagcctccacaggcacagctccatcgttacaatgccccttttccagagcttgagatcctctagagtaa

SEQ ID NO: 583370 - DNA, 94 bp, Homo sapiens
aattcaagcttctaacgatgtacggggacatgtgaagaggcatcgtggacttttttctactcaattccagccaatgttgaaaagaaaaaaaaaa

SEQ ID NO: 583371 - DNA, 281 bp, Homo sapiens
gtcaccgatgctcgagtgcaggagtatgatcacggctcagggcagattcaacctctcaggctcaagtgatcttcccaactcagggctctcaagtagttgggagcgcaggtgcacaccatcatgcgtggctgtttgaagaatacttggtcgagttggggtctatgttgcctaggctgttctcatactcttgaactcaaacaatcgttccatctcagcctcccaaagtgctgagattacagatgtgagccaccacaccatgattgtattcctgggtaagcctt

SEQ ID NO: 583372 - DNA, 664 bp, Homo sapiens
  misc_feature (15)..(16): n is a, c, g, or t
  misc_feature (22)..(22): n is a, c, g, or t
  misc_feature (34)..(34): n is a, c, g, or t
  misc_feature (71)..(71): n is a, c, g, or t
  misc_feature (425)..(425): n is a, c, g, or t
  misc_feature (459)..(459): n is a, c, g, or t
taccccggagctctnnaggccnagaacttttcantcagcctctacagaccaagctcatgactcacaatggnctatttaggcccataccctacgtcacggcagcctccgcagatgagcctactgcctcacaacagcctccacaggcacagctccatcgttacaatggcctctttagacccagctcctgcctcccagccttctctccaggccctgaactttctcaggtctccctctgttgtccaaggctggagtgtagtagtgctatcgcagctgactgcagcctcaaccttccaggctgaagcgatcctcccacctcaacctcccacgtggctgagactacaggtgcttgccactatgcccaactaatatttggaattttcgtatacgtggattccagaggggtgacagcgaaacgtgggaccatncagttgcaggaaaacaagcttaacacgcccactnattctacattatgctcctacctcccggcagcctctccaggcccagaactttctccagtcagcctctacagaccaagctcatgactcacaatggcctatttaggcccataccctacgtcacggcagtctccgcagatgagcctactgcctcacaacagcctccacaggcactcgcgagtagagggatcctctataacaccgcacac

SEQ ID NO: 583373 - DNA, 859 bp, Homo sapiens
  misc_feature (47)..(47): n is a, c, g, or t
  misc_feature (107)..(108): n is a, c, g, or t
  misc_feature (125)..(125): n is a, c, g, or t
  misc_feature (133)..(133): n is a, c, g, or t
  misc_feature (137)..(137): n is a, c, g, or t
  misc_feature (154)..(154): n is a, c, g, or t
  misc_feature (284)..(285): n is a, c, g, or t
  misc_feature (290)..(290): n is a, c, g, or t
  misc_feature (293)..(293): n is a, c, g, or t
  misc_feature (299)..(299): n is a, c, g, or t
  misc_feature (311)..(311): n is a, c, g, or t
  misc_feature (331)..(331): n is a, c, g, or t
  misc_feature (339)..(339): n is a, c, g, or t
  misc_feature (342)..(342): n is a, c, g, or t
  misc_feature (352)..(352): n is a, c, g, or t
  misc_feature (354)..(354): n is a, c, g, or t
  misc_feature (358)..(358): n is a, c, g, or t
  misc_feature (364)..(364): n is a, c, g, or t
  misc_feature (477)..(477): n is a, c, g, or t
  misc_feature (525)..(525): n is a, c, g, or t
  misc_feature (555)..(555): n is a, c, g, or t
  misc_feature (643)..(643): n is a, c, g, or t
  misc_feature (651)..(651): n is a, c, g, or t
  misc_feature (683)..(683): n is a, c, g, or t
  misc_feature (688)..(688): n is a, c, g, or t
  misc_feature (690)..(690): n is a, c, g, or t
  misc_feature (704)..(704): n is a, c, g, or t
  misc_feature (706)..(706): n is a, c, g, or t
  misc_feature (713)..(714): n is a, c, g, or t
  misc_feature (718)..(718): n is a, c, g, or t
  misc_feature (720)..(720): n is a, c, g, or t
  misc_feature (723)..(723): n is a, c, g, or t
  misc_feature (745)..(745): n is a, c, g, or t
  misc_feature (749)..(749): n is a, c, g, or t
  misc_feature (758)..(758): n is a, c, g, or t
  misc_feature (773)..(774): n is a, c, g, or t
  misc_feature (777)..(777): n is a, c, g, or t
  misc_feature (782)..(783): n is a, c, g, or t
  misc_feature (788)..(788): n is a, c, g, or t
  misc_feature (791)..(791): n is a, c, g, or t
  misc_feature (818)..(818): n is a, c, g, or t
aaagtgcatgatttttaaatctttttaaacaaataactatgaaaaangtattcaagaaaataaaatacaaatgggaaatttaactagattgcttcttctaattaatnntaagcttttattaagtntagaaaanaaanaaaaaaaaacctttgangtgttactaaaatgctaactgagaatcattttagcataaatctagccacatgcatttcaaggttccactgctacgaattttgttaagatcagctgaatcatgaataacactatataatagagtataaggnncacangcnttagangtgatccttgcnccatacccttagattatgtnagactaangcnggcaattctncnaggntctgancccctagtgcccccaacccaaatcttggaagcaaagaatatgccctgtcatacaactttgtacaagttgtagtaaaacaaagcttaagttttctcatctttctacagcaaatngtcagttatttaataaacactaaaatgctcctaagaatccattttgantttgtttaccaaacacattgtgccaagcanctgcactacacaaaaagcttcctttgcaaatttgcgctccacaaattcacttaaggctggcaaatttaaaacttgcaagcacaaagcnccagcgcnctatccctaaatcctaaaatgctgcgcattantagcncncatatataagcgcnantaaaaanntttncntanagcaggcacaaaatataaaagngctnttatttttncaattaaaaaaaaannctncatanncttgnttngctcgcacaataaataaggcgcagctnaaaatgcaattaaatgctataataatgcgcaaaaaaaaaag

SEQ ID NO: 583374 - DNA, 638 bp, Homo sapiens
  misc_feature (15)..(16): n is a, c, g, or t
  misc_feature (22)..(22): n is a, c, g, or t
  misc_feature (34)..(34): n is a, c, g, or t
  misc_feature (71)..(71): n is a, c, g, or t
taccccggagctctnnaggccnagaacttttcantcagcctctacagaccaagctcatgactcacaatggnctatttaggcccataccctacgtcacggcagcctccgcagatgagcctactgcctcacaacagcctccacaggcacagctccatcgttacaatggcctctttagacccagctcctgcctcccagccttctctccaggccctgaactttctcaggtctccctctgttgtccaaggctggagtgtagtagtgctatcgcagctgactgcagcctcaaccttccaggctgaagcgatcctcccacctcaacctcccacgtggctgagactacaggtgcttgccactatgcccaactaatatttggaattttcgtatacgtggattccagaggggtgacagcgaaacctgcaggacaagttcgagcatcttaaaatgattcaacaggaggagataaggaagctcgaggaagagaaaaaacaactggaaggagaaatcatagatttttataaaatgaaagctgcctctgaagccctgcagactcagctgagccccgatacaaagaaagacaaacatcctgatccatatgaattcctcttattaagaaaaataaagcatccaggattcaatga

SEQ ID NO: 583375 - DNA, 221 bp, Homo sapiens
ttcaacttttttttggattttcggtcttgcaagcctcccccggcctttttcccctgccagttccctgggggcaggtaccagctttcctgaatggatttccggccccacccccccccccccccccccctttcaatccgtttgaaaccctttgggtccttttttggcagaacagtccctggccctgtaaagttttttagatcaataaaggcaggggctttcca

SEQ ID NO: 583376 - DNA, 93 bp, Homo sapiens
tggggcaatttttttaacctgctttttttcccccctttaacagggtaggggatccatgtttccctttcaataaatatttttttcccccctcca

SEQ ID NO: 583377 - DNA, 441 bp, Homo sapiens
ccttagtgtttgggtatattcatttcaaagggagagagagaggtttttttctgttctgtctcatatgattgtgcacatacttgagactgttttgaatttgggggagggctaaaaccatcatagtacaggtaaggtgaggcaatagtaagtggtgagaactcctcaggaaatgagggtttcagaataataagaggtgttcgtgcttatctcaccctttgaatatgagcggtgagcattggggctggcaccaggaaccaacaaaggaaaatgtctttcctttggctcttaagttgtggagagtgcaacagtagcataggaccctaccctttgggccaagtcaaagacattctgacatcttagtatttgcatattgttatgtatgtgaaagttacaaattgcctgaaagaaaatatgcatataataagtatcaacttctaaaat

SEQ ID NO: 583378 - DNA, 515 bp, Homo sapiens
  misc_feature (435)..(435): n is a, c, g, or t
  misc_feature (446)..(446): n is a, c, g, or t
  misc_feature (448)..(448): n is a, c, g, or t
  misc_feature (456)..(456): n is a, c, g, or t
cagggctgtgctctggctggtgggaaggagggagtgaaccgattccagttagagggccagcctccctgccaagtgggccacggtgactcatcaatatctggaggaacatctatcaaagaagagacatcatcaacggtgaagcaagcgttagatgtggttctggtttcagggctctcacctgagactttgtgaaaccagccagctgggtgattgctcacagagagtgaaggaggcgttaccaggtccctgcagacgtgtgaggcctgggacttccactctggctcagttgtctggggctgggagaagttcccctgcagcccagtgtggatccatctgtgagtggacagcctctgccacactagctctcttggggcaacccattcttggcacccccttcctcagtgccctagtggccactttcagggacactacaanttgtattgagncngttatggngtgtggagttttcggaaatcaactaaataaatatttggggagtctcctatgttaaaaaa

SEQ ID NO: 583379 - DNA, 388 bp, Homo sapiens
ggaacggaggtaagggacactcgccttcccatcggctgggggagagggctccacacacagcccggggatggggaatgggggatcccacacttctaacgcatccacaaagccggcagccctatcaggtgttgcggtgagactcccactcggaaggtgagacctcaggccggctcccctctccttacacctcccacagccccttcggccggggctcttagccgggggccttacctcattcttcagagaaaaaggaaggccttcaggatctttctcctctcccagtacccaaacagacaaatttcccggtcggggtactcaggtcctccttcaggcctaggaccccgatcccggttggccctccccttcgaggcttttctggtggccatca

SEQ ID NO: 583380 - DNA, 130 bp, Homo sapiens
atcatagcaggatcctatattgagacatcctggctatcacggtgataccccgtattaactaaaaatacaaaaaagttagccagtgcatggtggccaggcccctgttagtcccagctgactcgaggcaggt

SEQ ID NO: 583381 - DNA, 161 bp, Homo sapiens
tcccccccttttttaaaaaaaaaaaacccccgggggttgggttttcgggtttccccggccttttcccaaaaaaaccccccgctttttgggggcccaaactggggggaaccccctttggggtttttaaaaagggctttttaatttttttgggccccccccca

SEQ ID NO: 583382 - DNA, 998 bp, Homo sapiens
  misc_feature (29)..(29): n is a, c, g, or t
  misc_feature (70)..(71): n is a, c, g, or t
  misc_feature (90)..(90): n is a, c, g, or t
  misc_feature (117)..(117): n is a, c, g, or t
  misc_feature (181)..(181): n is a, c, g, or t
  misc_feature (183)..(183): n is a, c, g, or t
  misc_feature (232)..(232): n is a, c, g, or t
  misc_feature (509)..(509): n is a, c, g, or t
  misc_feature (513)..(513): n is a, c, g, or t
  misc_feature (541)..(541): n is a, c, g, or t
  misc_feature (554)..(554): n is a, c, g, or t
  misc_feature (571)..(577): n is a, c, g, or t
  misc_feature (599)..(599): n is a, c, g, or t
  misc_feature (621)..(621): n is a, c, g, or t
  misc_feature (636)..(636): n is a, c, g, or t
  misc_feature (641)..(641): n is a, c, g, or t
  misc_feature (643)..(644): n is a, c, g, or t
  misc_feature (659)..(660): n is a, c, g, or t
  misc_feature (662)..(663): n is a, c, g, or t
  misc_feature (677)..(677): n is a, c, g, or t
  misc_feature (769)..(769): n is a, c, g, or t
  misc_feature (781)..(781): n is a, c, g, or t
  misc_feature (790)..(790): n is a, c, g, or t
  misc_feature (795)..(795): n is a, c, g, or t
  misc_feature (986)..(986): n is a, c, g, or t
gtggatagacttaaagtttggatactcgncgtcaatctatgatgtttgcactcctgaaagtttactgtgnnacgtatataccccatgctntgttgcaactgcagagagggcctgatntctatcagctagagatcaaccttcgaattcaggagatagatctccactaaacatcagcatcgtntntgctattttaaagacaaacagaacaagcctactggtttgccctggaagnatcgaggggagagttgctattcactatatcaaccccccgaaccccgccaaagataacttcacctttaaatgtcatcgatctaatggaaccaacacttcagctcctcaggacatttatgcggtaaatggaatcgcgttccatcctgttcatggcacccttgcaactgtgggatctgatggtagattcagcttctgggacaaagatgccagaacaaaaccaaaaacttcggaacagtcagaccagcccacctcagcttgctgtctcaatcacaatgganacanattcgcatacgctcccagctacgactgntcaaaggaacatnaaactaacaaaccccannnnnnnaatcacactcccctgcccaacncacccgaagagcaaaagcccangaaaaagaagtagtngctgnanncccccccccacccanncnnccccccccccactntgcctcatctctgtacgaatttgggtcccagccctgttgggttgccacccatggacatggatttcaacccctggagaaaacgatgtcattgntcagcagctganaccccaggngtcgncgggggacttgccgtttctccattccactgcctgttgcagagtttttctgtaactaagggggttgaggttattgtagacgttagattgcgggcaccgccagggattttgcagcgcttcagtgtacgtgttagagaatattggaaaagcgtctgtgagccccgtgctgtattttgtaataaagtcttttgcngattgcaaagag

SEQ ID NO: 583383 - DNA, 506 bp, Homo sapiens
  misc_feature (8)..(8): n is a, c, g, or t
cattttcngtggtcccccaaaaaatataattggcttcgcccccggaggttgtttttttacccccgggggtaaacccctttttgttttttttttccgcgggggggccctattagcgccgcccctcttttttttccttgtttctgtgggggtggggaccaaacccggtgggtaaaatttttgggggggcgggggtgtgtccccccttttttttccccctttttttgggtagtttgtgcgggtctcccggggttgggggtatgggtcgaggttggggtgaaacggccaagactggccattttcttttaaataaaaaaacgccatttgggggggggggggtcgctttttcgcttcccggggggggttaggcgggttttttttttttattccccgagatgatgtttctgcaggggcgtttgccgcctgggtccatcccgtggggggtaaaaggggagcccctcccctcggaaagaaaaggattaaaaaagaaaaaaaaagtggagacaaag

SEQ ID NO: 583384 - DNA, 692 bp, Homo sapiens
  misc_feature (111)..(111): n is a, c, g, or t
  misc_feature (621)..(621): n is a, c, g, or t
caaaaaccgagtacgtggggcatttggggttccacaaagtggtttcacccaaaagaaaataggggtgtgattggggaaaatttttttcttttcttttctctcctctttttnttttttttgacaagggccagtgggggttttctgttcttttcggctatgcacatgaaaaatttaatgttttaaggaagcttgtacataaagcgtgcacaccacttttgttcttggtgtgtaaattaacttttataaactttaccttttttatacataaacaagaccacgtgtttaaaggcgacctttgtattctttcctggaccttttgaaccctgaactttgacctttgcagcaattaaacaacggttttaagaaacaatccaaggccattttttttaagaaaaaggaagcccaaagttggtacatttttaagggctgcaattaaaaaaaacaggtactcaagattttttaggttgaattaaattctggcaaggaaccccaccggtaattggtaatccaatgcgggcccctaaagggaattttttactaaaagaccatttattatggcacatcagcacgatttctgtttagataatacaccactacattctgttaatcattagggtgtgnctgaatttcttttgccgttattaaaaatctcaaatttctaaatctccaaaataaaactttttaaaataaaa

SEQ ID NO: 583385 - DNA, 184 bp, Homo sapiens
  misc_feature (113)..(113): n is a, c, g, or t
cgtgggcggacgcgtgggtttctgtttagataatacaccactaaattcagtcacacctaatgattaacagaatgtagtggtgtattatctaaacagaaatcgtgctgatgtgnctgaatttcttttgccgttattaaaaatctcaaatttctaaatctccaaaataaaactttttaaaataaaa

SEQ ID NO: 583386 - DNA, 560 bp, Homo sapiens
  misc_feature (84)..(84): n is a, c, g, or t
  misc_feature (136)..(136): n is a, c, g, or t
  misc_feature (161)..(162): n is a, c, g, or t
agacattttctgtcaggcaaattttcagaaagtctcctttgcacccttactgaggaagtatcttgaggaacattctccaaggcnaaaatgaggatgacaaacccaggcaacagcaagcacagcaaatgggatcccnataaagacagtggggaacctttacnnttaggataggtctcattcctagaagggtgaaacaagcgccaagaaaaaggggggtacatcgtcccaacgcgccataggaaagggtggacccaaggcgttaaattcccaggagccaaggtagccgtaacagtatttgccaaggggaacttgcaagggcaaggcccaaattaaacctctgtgctggcaatataccttgggtggggcggccattcattagttacccactttagggggggtaggcaacaagcggacacaaaactttgggttatggccgcaaaatttatctcccgataaatagggttgagtggccaccacaaaaattccaacgaccaattttcaccgggtctccaaatttccgcaagttagtcggggggaacgaacgggcaacggacctctgg

SEQ ID NO: 583387 - DNA, 201 bp, Homo sapiens
tgtgtatcatcatgatcatttgggtaggaatgccgaacataggatctagccgcttagtaaagtgtaggtatatgatacagcatggtgagccataggtactatgtagtatagtaatctccaaacttattgcataactgaaattttgtacgctctgaccatcccttccccatttccccccactcccgggatcttggcctcgtg

SEQ ID NO: 583388 - DNA, 348 bp, Homo sapiens
aatggctcaaagtgcagataatagtctaccagctgattaaacaaggtaaaacaagaagtaattagagctttatacaagtccaagtagtctactcttatatctacctcaaaattcaaataggcaccaactatttcatgcaagtaggtatcatatacgttaccctgggtttagaacaatataaatgcttgatctcacccctatttaagatgaggtgctgacttacggtgcctctgccaggtgagttttatgtttgcacaactccatcatcttgcatcatgatgcttctcaggccacatggatgaggtcaattgactttgaaaaacttgagtctccactctgggtcaacag

SEQ ID NO: 583389 - DNA, 1095 bp, Homo sapiens
agaaaaggaagaaaacacacaatagaaattccggaagcgagagagagaaggctgctgagcacaaggcgcaagtccttgggggtagtaaatctccagcagcctcatggggccaggaggccttgaggcagccaaagaggaagcagcattgggcttcctagctcagacagggaaccctgtcagtatggcactggcgcactgaggcctgagtctgtcttatgcatctggactgttctgcgagcagcgactgcatgagaagatccgaggaggcccaggggccagggacagtgccaaggagctgtcccctgccgccttggagaaaaggcggcggagaaagcaggaacgggaccggaagaagaggaagcgaacaggagctgtgggcgaacgacaaggccacggaacggctgaggaggccaatggaggcccaggaggctggtggcaggcaatcccagacgggggcctgcacggagccgcgggagccagcccgggctgatcttccataaggcggaggcgagcgtacgacgagtccggtctagcaaggcgcagcgcagaaaagagaagaggcagagggtgaaggggaacctcacgccgctagaccgcgaggaactaccggcagctgctggagcgcctgcacgcacggccagagcggctggacgagctgcgcggccccgatgacgcgcacggcgccagctaacccaaccacaccaccaccgggaaccgaacgacagcacagcgacagaagccgactcgacaccgagacgccaacaccgaccacacaccacacgcccaaagaaataacccaacccacagacgacagaacgacacacgcaaccccgcggtcgacaaccacgccggagagtccaacacgagacaccaacaaacgccacactcacaaacgactccctggccacagcaccacacgcgcgaccacacgacccaacaccatgcgcacaacctactgaccacgcggcgatcagcaacaagagcgaaacgccgacctctagcctcctcagtgacagccagcacgagacaatgacaacccgcgagagccgatacacaccgccctcccacacagcgaccgcaggagacgaccaccac

SEQ ID NO: 583390 - DNA, 826 bp, Homo sapiens
gctccaacacacaaacatagatggattgtctcaaaattaaaagtatctacctgggtataaagtgaaaggtacccttggcatttttgtcccagtgggcgaaagacaacatcttcgttgttatgttgttaaaaattgagctactttgtgttgtgccgggggtgttgggtcggcatcactgcctgtaatccacctgcctttagaactcccagaagtgctgggattaacatgtgccgtgaggccgacctgtgccttggcccaagaagctacgcatagtataatcaaggaaagcctatgggaaaaactaaacaggacattgagtggccaaaaatttgttacaattttctgagtatagatttactcatccaccatatgaagttcaagtcatgttataatttgcacttacagtgttataacaccataaatatcttacctgtaatcaaaataacctgggtggctaatatgattcggagaaagtaaacataggtgcctcttccggactgcacatctaagtaagagggaataccaagttagaaacagggctcttggacatctttgacctggacaggtacccaataaggtttgcatgttgataaataagaatggtgaagtaggtgtagagaatcacaacgaccttggccactatgggcagggttaatattaccctactcgtatgcttacatcttttccataacaagtaactacgtggaaggtaaatatataaggtaccaaagccaggtggactcaaacagggtgtacctaaccacaaagttaccacgataatgtgggatctaactcaaaccattgggtaacctcatgtttacaatac

SEQ ID NO: 583391 - DNA, 774 bp, Homo sapiens
  misc_feature (774)..(774): n is a, c, g, or t
ctccaggcatccagttggctccatcctcctggttgtgctctgcaccccgctgctcccttgggtctggccctggcgtgggggcctgagagacagagccaggaacccacaatcaggaggccaagcctggtctgcaggaggatagacagaggctcccagggccggtgccctgtgtgcccactgcatcaaaggaccgctgaataagcctggccttcagccccctaaagggctccattgcccaagtgccaacgtgctggggatttctgtcatgaagccctgtggcatccatgtgacagggtatttctagatggccaaacttagttagcctagaattagcgccatgttggaaacactgtctcagccagtcctgggctgcacagctgtgtagcccagtcctccaggtccacggagtggtgtggacctcaccacactcacaggcgtgcctctggtcaagccaagacctcttttcgcccggaccccagacccctctggttgataaaccggtgtggagcctcctcaggcagcggtggatgcctttccaccttgaatttccccagggctctcggcaacatcgataaaccagctcgcccaccagctgaggccctcccccaaccagtctggcaggcttgggagcttggagcttgcttgagtcttgaattgccttctagatggcttctctagaggctctcctggcaagagagggtccaaggggagccctgccaagcaaaggctcccttgtctggggcgggatagagaatctcgctctgtctggtgtgn

SEQ ID NO: 583392 - DNA, 397 bp, Homo sapiens
tctttccttcaagtagcggcgctcctgtggaggatcacagtcctgaggttcaggtggtaaaaaattggctccaggtcctcgtccatgcttccccccaaaaccccacacaacaccacccagtcaaaacgaagagacacgcgaaaagacaggcgagcacaaagcaaaggatacaatacaaacaacagctggggcgccggacagagcacaacgccgctccaccgagagcgcacaaagacaggaagccgggagctagaacacaggcgccgccatgtagtcaggcccatcggaaccacgaccgaccccccagcagaaacggcgtcgagcggctcgcctcagccgacgccgaccacgcacatccgccaggcaaaacacacgcgtgaacctgcaccgacgcgag

SEQ ID NO: 583393 - DNA, 147 bp, Homo sapiens
cttcgcacggtagatgcccagtgcccagcacttcagtgtgtctcgtggtcatagctgtgctggtgggtcgtatgtgtcttgggggcgtcgtgcgctgcggcgtctccttcccgttctccaggtatctgcggaggcgtaccaccagat

SEQ ID NO: 583394 - DNA, 397 bp, Homo sapiens
cacactatgatctcccagcacttagtgaaggcaaagcgtgtggagatcacgaggtcactgaagttcgagaccaggcaggccaccatggtgaaaccccatctccactaaaaatacaaaaatttagccgggcaaggtggcgcacacctgtagtcccagctactccggaggctgaggcaggagaattgcttgaagccgggaggcagaggttgcagtgagctgagatcacgctgctgcactccagcctggggacagagcgagactctgtctcaaaaaaaaaagtgttcagtgtactagtcctttttttcattcattgtatttacaacattttggtaggtttgaaaactttcaaaatcaaccattggaaaaatacatatttaaaatagaaaatgtgcgtgac

SEQ ID NO: 583395 - DNA, 465 bp, Homo sapiens
tggacagcagaagagagggtgagggtggaactgccaacctttgtaaagcagatctctatgaatacactccctcactatcatgagaacagcactgggggacaccgcccccatgtactactcacatcccattaggtccctccctcaacatgttggggattataattccaatgagatgtcggtggggacacacagccaaagcagtatcgaaagggtctcaaaaacttgtagaaaggcatcagggagagggagatcacctgaggggaagacagtagttataatagtgcaggatgtcgctggtggcttgtagcgaggggtatgcatctaaatcatgttcggtagagtctgaagaaacatttggttggctcgtcccatccaagtcctttgatatggacttatgaactgaggaatcatgacgcaatgaagatggctgggggtctacatctagcccaacatctaggggctagg

SEQ ID NO: 583396 - DNA, 235 bp, Homo sapiens
gtaagagctcactgtcagcctctgcctcccaggttcaaatgattttcctgcctcagcctctcgagtagctgggactacattgcatgtgccgagttatgcccagctaatttttctattttgagtagaaatggggtctcaccactggttctgacctcagagtgatccaccacctcgcgcctcccaacagtgctgaggattatagcacgttagcctcttattgcccaaggctggaagt

SEQ ID NO: 583397 - DNA, 851 bp, Homo sapiens
  misc_feature (236)..(236): n is a, c, g, or t
  misc_feature (251)..(251): n is a, c, g, or t
  misc_feature (768)..(768): n is a, c, g, or t
  misc_feature (823)..(823): n is a, c, g, or t
ctccgcgaatcggcggtgggtccggcagccgaatgcagccccgcagcgagcgcccggccggcaggacgcagagcccggagcacggcagcccggggcccgggcccgaggcgccgccgcctccaccgccgcagccgccggcccccgaggcagagcgcacgcggccccggcaggctcggcccgcagcccccatggagggagccgtgcagctgctgagccgcgagggccacagcgtggcnacaactccaagcggnactaccacgatgccttcgtggccatgagccgcatgcgccagcgcggcctcctgtgcgacatcgtcctgcacgtggctgccaaggagatccgtgcgcacaaagtggtgctggcctcctgcagcccctacttccacgccatgttcacaaatgagatgagcgagagccgccagacccacgtgacgctgcacgacatcgaccctcaggccttggaccagctggtgcagtttgcctacacggctgagattgtggtgggcgagggcaatgtgcagactctgctcccagccgccagtctcctgcagctgaatggcgtccgagacgcttgctgcaagtttctactgagtcagctcgacccctccaactgcctgggtatccggggctttgccgatgcccactcctgcagcgacctgctcaaggccgcccacaggtacgtgctgcagcacttcgtggacgtggccaagaccgaggagtttatgctgctgcccctgaaacaggttctggaactggtctctagcgacancttgaacgtgccttcagaggaggaggtctaccgagccgtcctgagctgggtgaanacgacgtggacgcccgcagcagcatgtc

SEQ ID NO: 583398 - DNA, 1005 bp, Homo sapiens
  misc_feature (236)..(236): n is a, c, g, or t
  misc_feature (251)..(251): n is a, c, g, or t
  misc_feature (922)..(922): n is a, c, g, or t
  misc_feature (977)..(977): n is a, c, g, or t
ctccgcgaatcggcggtgggtccggcagccgaatgcagccccgcagcgagcgcccggccggcaggacgcagagcccggagcacggcagcccggggcccgggcccgaggcgccgccgcctccaccgccgcagccgccggcccccgaggcagagcgcacgcggccccggcaggctcggcccgcagcccccatggagggagccgtgcagctgctgagccgcgagggccacagcgtggcnacaactccaagcggnactaccacgatgccttcgtggccatgagccgcatgcgccagcgcggcctcctgtgcgacatcgtcctgcacgtggctgccaaggagatccgtgcgcacaaagtggtgctggcctcctgcagcccctacttccacgccatgttcacaagcaagtacccgcctgggcggcgctgggggctccgtgggtccctcgggtcagctcgtgtaacccagctgtcccccgcagcatgagatgagcgagagccgccagacccacgtgacgctgcacgacatcgaccctcaggccttggaccagctggtgcagtttgcctacacggctgagattgtggtgggcgagggcaatgtgcaggtgagggctccctcacccggatcccggtgtcccccgaccctgtgcctccctcacctgcctctcggtgccccgtagactctgctcccagccgccagtctcctgcagctgaatggcgtccgagacgcttgctgcaagtttctactgagtcagctcgacccctccaactgcctgggtatccggggctttgccgatgcccactcctgcagcgacctgctcaaggccgcccacaggtacgtgctgcagcacttcgtggacgtggccaagaccgaggagtttatgctgctgcccctgaaacaggttctggaactggtctctagcgacancttgaacgtgccttcagaggaggaggtctaccgagccgtcctgagctgggtgaanacgacgtggacgcccgcagcagcatgtc

SEQ ID NO: 583399 - DNA, 390 bp, Homo sapiens
gggagaggttgatttgagctgagatgacactgcgactccagcctgggtgatagagtgagactcgtgtctcaaaaaacaaaagtaaaagagaaaaatagacaattaaaaatagaattaggcgggcatggtggggggcccctgtaatcccagctattcgggagggtgaggtgggaggatcgtttgagcccaggatttctgggcggttagtgcgctatggcgatcgggtgtcctgtagtaagttcgggatcagtatggtgacctcccggagagcgggggaccgccaggtagcctactattcgtaggcagtggtaatttcgcagacaggcctaagtgagggtctggcgaaatgtggagaacgacagaatctcacctaagttcagagccaggggg

SEQ ID NO: 583400 - DNA, 571 bp, Homo sapiens
  misc_feature (15)..(16): n is a, c, g, or t
  misc_feature (22)..(22): n is a, c, g, or t
  misc_feature (34)..(34): n is a, c, g, or t
  misc_feature (71)..(71): n is a, c, g, or t
  misc_feature (505)..(505): n is a, c, g, or t
  misc_feature (507)..(507): n is a, c, g, or t
  misc_feature (509)..(510): n is a, c, g, or t
  misc_feature (521)..(522): n is a, c, g, or t
  misc_feature (526)..(526): n is a, c, g, or t
taccccggagctctnnaggccnagaacttttcantcagcctctacagaccaagctcatgactcacaatggnctatttaggcccataccctacgtcacggcagcctccgcagatgagcctactgcctcacaacagcctccacaggcacagctccatcgttacaatggcctctttagacccagctcctgcctcccagccttctctccaggccctgaactttctcaggtctccctctgttgtccaaggctggagtgtagtagtgctatcgcagctgactgcagcctcaaccttccaggctgaagcgatcctcccacctcaacctcccacgtggctgagactacaggtgcttgccactatgcccaactaatatttggaattttcgtatacgtggattccagaggggtgacagcgaaacgtgggaccatccagttgcaggaaaacaagcttaagacgcccactgattctacattatggctcctacctcccggcagcctctccaggcccanancnntctccagtcannctcnacagaccatgctcatgaggcggatatgctcatacgcgatgcatat

SEQ ID NO: 583401 - DNA, 168 bp, Homo sapiens
agtaagggatacgaggcaggtggaagggcttcaaccaggaacgcccgaaggtagaagaactggctgagcctccaaggatgagtctttttccagcaatggccagagcgggtgctggggggtgacctcgctcctctgtggcactgaccagagttcctcccaggcaggggg

SEQ ID NO: 583402 - DNA, 174 bp, Homo sapiens
gacgctgggacgacaagggattacaggtgtagcacgcgcctgggccatagcttgtcatctttatccctcaagtccctcaccaaacaagctaaagcagaaagataaaataatttgacaaaaaatgggttcgagaatatcacgttgctattcaacgattggtgcatgtcacaacgc

SEQ ID NO: 583403 - DNA, 135 bp, Homo sapiens
taccccattaacatttgcttgcctactagatacctttaaacaactgaatccaaagctctggaatactactggtagcacaaacaacttcgtatgtctgatacttacctttgctttctgttctgttcacactgttta

SEQ ID NO: 583404 - DNA, 384 bp, Homo sapiens
ttcctctttgaccttacagttacatgaactagtcagtttatagggctctgtgtctaaatttaaagttgaactaagcttctatcttggacactcagctggtacatagtcgggtgtgctcttatagctgtgcttaggtagctcgtctggtaactagggtcgtagcattggctctccgtgcacagttaggtctagagcatacagtatacacaaggtatacgggttagaccttgctatcctatgatgtgtaagaattattcatctttccccccggagcgtacatctatggcatcaggttgcaactacaatcgcttatacgtcatgtccgtacatggtgtctctaaggacgtctggtactaaggtggagtgggtcccgttccgaattcc

SEQ ID NO: 583405 - DNA, 175 bp, Homo sapiens
ggcaggttatcgcagagctgcggatgtagagagaaggcgtgctcgtttggccacaccgcggctccagtgtccagcagctccgtcaaggtccactgcatgaaactagatgaacggggagggcaccagagcgatggtgaacttcgcagttccttcacactacagttatcgtacaatt

SEQ ID NO: 583406 - DNA, 435 bp, Homo sapiens
  misc_feature (168)..(168): n is a, c, g, or t
  misc_feature (288)..(288): n is a, c, g, or t
tgagacggagcttagctctgtcaccaggctggagtgcagtggcgggatctcggctcactgcaacctctgcctcccaggttcaaatgattctcctgccacagcctcccgagtagctgggactataggcacgtgccactgcgcctagctaatttttgtatttttagtagncatggggtttcattatgttggccaggatggtctcgatctactgacctcgtgatccacctgcctccacctccgaaagtgttgggatcacaggcatgagcaccgcgcttggccagaagtggnattcttaaattcaagaaattgggatggggagtattcacacattttataacccagaaattcaagcaattctgggtgactacaaatgcattgttttggagaatagttgtaaggtggaaaaagaattaggaactcgacagatagtgagtt

SEQ ID NO: 583407 - DNA, 439 bp, Homo sapiens
  misc_feature (178)..(178): n is a, c, g, or t
aattcaccagccatttggtcttagtaaggtcattaccgcgctctaggtttgagtctcatttgtaaaatgaagggagtggaggggcttatagagctcgaaccctctgagtctaagaggctagaacacgtgcgatctatactccgcctaggaaaggaacatctaggtatgctcaaaaacnagtgagaagtattgcttagataacctctgggctacccaggcatcggcagcttgaccaccaatggagacaccaattcaggcatccctttcccttggttcaggccggaattgggggcaatctccgcattgattttaaccaagtccttcttccaagcaagacacttggcacattttacaagcccggggttggaactcaagccttgagccagccaacttggttaaccttactggaatccccccggtacagaccaattttcaaggt

SEQ ID NO: 583408 - DNA, 123 bp, Homo sapiens
tgagatcccctatcaggctgtgctatcctgtatcgcctcttgccgtaccactggcatcgtgatggactccggtaacggggtcacccacattgtgcccatctagcgaggggtatagccctcccc

SEQ ID NO: 583409 - DNA, 144 bp, Homo sapiens
ccttatgcgcctttgatgctcttgggctccccaactgcagcccccttctgcagccggtgctgcggctgtccccatcagtggagccctccagtactgtggtctccttggcagtggtgtggatgttcagccatgctattggtgacc

SEQ ID NO: 583410 - DNA, 434 bp, Homo sapiens
gggccaacagaactggcatacttaagaggtgagcaagaagcctgtaatcccagcacgttgggaggccgatacaggaggatctcccaaggccaggagttggagaccagcctgggcaacagagagacctggtctccacaaaaaatacaaaaattacccaggagtgtttgcatgcgcctgtggtcccagctactcgggaggccaaggtgggaggatcacttgaggcctggaatttgagactagcctgggcaacatggtgaaaccccatctctaaaaaaaagtttttaattagatgggcatggtagcatgcctgtagtcccagatactcaggaggctgaggtgggaggattacttgagcccaggatttgtaggctgcagtgagctggttgtgatgctgcactccagcctgggtgacatagcaagaatctgttcctcta

SEQ ID NO: 583411 - DNA, 200 bp, Homo sapiens
  misc_feature (145)..(145): n is a, c, g, or t
cagagactatcaggggccaggaggaatggacatggaaaggcgggaaacagcgctcatctgactgcctgcaggaccttcctttttcacatcctctctttacagatctcaagagaacagccagtctttcctgaaaccagaacctctntgctatgccagactccataacgcctgtagggaacaggattggaaactaggaaaac

SEQ ID NO: 583412 - DNA, 1065 bp, Homo sapiens
ggtccaggcccccaactgggttcccagggattagagaccatgctagccacatactcctgacggctgtaagcgaggtgcctggctcagcctggacgacctgctgcagctgattgcaccacaatcctcggcgcatctttcacctgcctccgcaggaggacacctatgtggaggtggatctggagcatgcgtggacaattacccagaccacatgcccttctccaatggcccactggacaccttttgaagggcagaaagtgaagggcaccgatccgcacgtgtggtcctgcgaggggaggttgcctatatcagatgggcaggttctggtaccccctgggctatggacaggatgtacgcgaagtggacacagagggtgctgtacctacaggctcccacacctcagcaccctgccactcgtgagatgaccacgacacctgaaagaccacagacgatggcatcacagggcttcctgatggccgcttccatctgccgacccgaatccatcgagccatccgacccaggtttgccagctgaggagccacaggagaagtcctactcggaagcgtaaccgagccagagctgatgggacaccatgcatggcacatgctaacctccaccaacagtaccgagcaaggcatctcccagaacctgcggacccatggcttgctgaaccgcaggaactcaaccctggtagaaagctatagatgggcaaattttcttgtcgtcagcagattaccaagggctcaaagcgacagcatgtcactgtggcacaacacactggtctatggtgcacgacgaacggagcacgaccatcctacagggcagggcagggcccagagaaagaagagaaacggcacagacgtcgctgcgagcccagaccgggggacgagccgcgccacgaccggacacaagacggcgagggcagcccgcgaaccgagacggaagaccgcaccccgccagccacagcccaacacaacgacaacgcagccgaagaggggagacacggcagcaaagaggaacccacgaagcacagcgaggacaagcagcccgaaggcacgaaccacccac

SEQ ID NO: 583413 - DNA, 259 bp, Homo sapiens
tctgcagaatcgctgtcaaccaccttaatgaccagtcttcagcttctcatagtttgacatcgattgggagtccttgctgctatcatcagaccctcccctgagcagactgtaggccacctcgatgttccagcaggttgtcaagcatttaccgccttggcctgcacactgtctgcattgttcaggagcggagcttcttcatcccaaagtcgtgggggatcaggtgtaaagcgatttgagagatcaggatctgagagtcgct

SEQ ID NO: 583414 - DNA, 921 bp, Homo sapiens
cataacaaggggctatccggctgaaaatcaggaatcttagtggatggtgatcagtgcaggataagttcgtgaaaatctacattaccttaacgtggagttcatcaagttcccacgtgagaatgtgctagaggtgcatatctacaggagaggtcattggatcttcggtaaagaatctcaatgggaagagttactccatgatggtgaacaatctcttgaaacccatctctgctggaaggcaacgctcaaactcagtcagagactgatacagtggcttatactgtgtcgaagaagacgagtggaaatacacaacggtgggattgaccgggaaccaggttgaataacgcgagtgccaagaaaatgagaagccctcctatgacactgaaacggattcctagtgagggatatgactgaatgttctaccgacagacttcctgaaagatggacgacgatgatcatgaagccgacagcattacataaagcctgggtggatagtcaaccagagacgcgtcgccaaaggcgacaccgaactctgagactacagcagtccgctagggaactgtgatgtgatgtcgccatacggatgtgaccagcaagggaatatcggagcccggcctctgtaagttcgacagactagctcttgaacatacgctacgaaggtaagggaacgactgcacccatgcctacggcgcaatccccccgaataaggccagctattaaacatcccgggcagagggactcagacccgggcaccggtcacggcgggcacggctccgccgggacacacaaaggagtgcccacaagccaccgggagccgcaccccagcccagggcggcgccggcaccccacagcaaccacacaccacccccacgccacacagcgcaaccaccgcccccgcacgcacaacacacactcagggccacc

SEQ ID NO: 583415 - DNA, 103 bp, Homo sapiens
tgacatcactgaggatgtggtcagcacagaggagggtgacgttagcattacccccaacctcattttagtcgcctaagcatttgcctggcctccttctgtgact

SEQ ID NO: 583416 - DNA, 1335 bp, Homo sapiens
ctagacgtggtggccccgcccttgtgggtggcgcatcgtggcggtggggtctccgtgggttcgcgggtttgagtcgccccgtcggtggcaaaacggtgggagaccctcgttggtttgtagctgttgaggtccccggtttttcccgcgcgtttggggggccccctcttctgtgtgtgtgttccgtccgcgtgtttttcaaccaggggcgttgtgctgtccccgcggggaggtttcgctggtggagcccccccgggggggcaagaagggggtccccagggggcgcctggtgaagacagagtgccgcccgggcagaaaccccgcgcgcccttagggggaacaagaaaagggggaaacggcccccaacgtcctcccccggggggaaaaaaaaaagaagaccgccccgagagttgtgggaagagacccccaagggtgagacccgcaacctaaaattttgaggggctaattgttggcccccttaggctccgttaaaggtaaagtgtgttttaagaggaaacccggcgcgttggacccaccccacactgtttttgtaaaaaaacgcacactggcgcgctcggggggcgttatagggaaaaaagtaaataagtttgcgcgcgtctttgtgttatagggagtttttaaaaggtgtgtcactgtgataactcttgtcacaaggtgaaatggcactgggcgcgcccctcagtgtgtagctcgagaagttctcacgagatttttgagaaaccccaccttgatagagagagttcccccacacactctttttctttgtgtctcgggtagatatgagggaaaagttaaaaaaaatattgtaggagccatgtcacatgtgagccacattgggaggaagaagctcgtgtgtgtgtgaaaccactagtgataggtttgtaaaatagtgccccacacataaatagtgtgtcctctgtctcaagagaaaaatatatatttgatatgttttggtgtttgttttgttttgggataatagcttttagaagtacccatttcacgaagaagggtgtataattcttgtggtatagaatgcctcacttacacatcttttgagaaaggtgttatatgaagttcccacaaatataaagagatttaataatgagcctcggtgagatatctcgggctttacacgaaaatttcacgagagaactaatttttaaaatctttagcacattttaaactttttttgttttgttttctgagacactaattctgaccaaagagcacgccaaacccctgcctgtgtggcactttcttggagtgtgctgtgaatgtgctttttaagaaatttaaaagagatcctttttaaattga

SEQ ID NO: 583417 - DNA, 125 bp, Homo sapiens
  misc_feature (102)..(102): n is a, c, g, or t
gagcggtctcccgcccgcggcgccatcgcgccattcctagttaaggcggcacagggccgaggcgtaaagtgggagactatgctgatacttgggttccggcgnctgtgatactgcagtgcagcctt

SEQ ID NO: 583418 - DNA, 496 bp, Homo sapiens
  misc_feature (169)..(169): n is a, c, g, or t
  misc_feature (344)..(344): n is a, c, g, or t
  misc_feature (347)..(347): n is a, c, g, or t
  misc_feature (359)..(360): n is a, c, g, or t
  misc_feature (363)..(363): n is a, c, g, or t
  misc_feature (367)..(367): n is a, c, g, or t
  misc_feature (373)..(373): n is a, c, g, or t
  misc_feature (377)..(377): n is a, c, g, or t
  misc_feature (381)..(381): n is a, c, g, or t
  misc_feature (389)..(389): n is a, c, g, or t
tggcctatggacccccatcctagaaccagagaggacaatgatcttgattcccaggtttcccaggagggtcttggcccggttctacagccccagcccaaatcctatttcaagagcatctctgtgaccaagatcactaaaccagatgggatagtggaggagcgccggactntggtggacagtgagggccggacagagactacagtaacccgacacgaagcagatagcagtcctaggggtgatccagaatcaccaagacctccagccctggatgatgccttttccatcctggacttattcctgggacgttggttccggtcccggtagccttgttaaccctcagagcnttnaagtcctttccnnctntcanccattncccnccantaataagnttagctttcttttccccccccggggcttggatttgtggaattatgaactggggccatgtcagtttgtcactcacccaaactgacccaataaaacctttatttatgct

SEQ ID NO: 583419 - DNA, 135 bp, Homo sapiens
atcagctcggtccgattacgctctagacggagaaggacggttcttgtcgttattggggtcacttttgctcctcctggtgtcggcgggtctccacgtacaccagcacctctccctggccagcacttctggtctcca

SEQ ID NO: 583420 - DNA, 494 bp, Homo sapiens
  misc_feature (169)..(169): n is a, c, g, or t
  misc_feature (344)..(344): n is a, c, g, or t
  misc_feature (347)..(347): n is a, c, g, or t
  misc_feature (359)..(360): n is a, c, g, or t
  misc_feature (363)..(363): n is a, c, g, or t
  misc_feature (367)..(367): n is a, c, g, or t
  misc_feature (373)..(373): n is a, c, g, or t
  misc_feature (377)..(377): n is a, c, g, or t
  misc_feature (381)..(381): n is a, c, g, or t
  misc_feature (389)..(389): n is a, c, g, or t
tggcctatggacccccatcctagaaccagagaggacaatgatcttgattcccaggtttcccaggagggtcttggcccggttctacagccccagcccaaatcctatttcaagagcatctctgtgaccaagatcactaaaccagatgggatagtggaggagcgccggactntggtggacagtgagggccggacagagactacagtaacccgacacgaagcagatagcagtcctaggggtgatccagaatcaccaagacctccagccctggatgatgccttttccatcctggacttattcctgggacgttggttccggtcccggtagccttgttaaccctcagagcnttnaagtcctttccnnctntcanccattncccnccantaataagnttaactactcttgccacctcaaaagataagatatgtggaataaagaaatgaggccatgacagttaaacaatcacccaaaaagaccaaaaaaacaattctttaagc

SEQ ID NO: 583421 - DNA, 168 bp, Homo sapiens
ggatcatagaaaagtctctggacctagcatgacctatcctggaacctggaagtaaagcagaaccaggttgtggggacagaggaagagatcacttcaagatggcacagccgtgagcggccaggccaatatttcatatgaactgtggccctgggttggtgacactatgag

SEQ ID NO: 583422 - DNA, 175 bp, Homo sapiens
cgttcattgagcggaaggctgtggaatggattatctataagttgggggagggctgtggaacggattatctataagctgagcggaaggcctgtggaacggattctgtacgagatgagcggacggcctgtggaccggattctctattagttgagggaaggctcagtcgaacggactg

SEQ ID NO: 583423 - DNA, 437 bp, Homo sapiens
agcccaagtgaaaacacttcttcatgtcccatgtccatctaattacattgtgttattttttgtcatttgcatagtctacggttgcaggaacagtttgatgaaagtgaattacatctaaatcttggtatagtatataatttcatctgttttcaaaatataactttttttgaacctcagcaactttgattgattttagaactttagaatgattttctccacatttcagtggaattgtggctagccccagtataaaaacaaaacaaaaaaacgaaacaaaaaataaaaacaaaaaaacctgcttatatttatacagtgagtctgaagcgaagaaatttgaaccatacaatgtttaattcctatggtgcttttcatgtacttcatttatcgtgttaaagttcagaattgcacaaagataaacaccattgacttcagctgcc

SEQ ID NO: 583424 - DNA, 432 bp, Homo sapiens
cttgcaacagacgggccttttgtttgttactttcaaaaggcccccatgattcaattagagaattccccccgcccaaaaaaagttcctaagtatgttaaaaatggcaagctttttaggcttgtcccaaaagattgctttgttttcctaagtccccaaaatggatataaattatctagattggaaaacagttttgcatgtttatcaggttacaatttaaaattccatcggggccaacccttcctttcccatcctcaaaaaagggcccttttatgatgcattgccccccctttggggaaattgatctttaaattttgagccagaataaggaaaatttggttggggttttacaagtgagctgaccccattttttattcgggggatttaaaaaaaagtcttgaaaaaaactttataaaaacatcttttatccttccc

SEQ ID NO: 583425 - DNA, 684 bp, Homo sapiens
gggtccaatatggcgacctccacgtggtcggtggcttctcctccggcttgcactattcggcttcctctgggaaacgtccggcggcctcgagtcgagggcctcccgcgacgacgacattgctactgccctatccacagcgcgcgcgcgcgccttcctcccgggactgcacacgggtgcgcgctcggaacccagctgagctcgacgagttggcctcgcgcctcctcgcgattcccggcgccggcgtgtctggcgctgtgcgcaccttcgtgtccgtagctttccagtgtaccgcgcggtggcctggccaacttgacgcggggccgttgatgccccttgctgcaatccttgctcggatggctgagacgcccgtgtgaggcaccgagcgagctgcgacaggcggaagaccgacgcgcctaccgtggtaggagacggcgcagggcggccgaactgccgtgtcgcccagaacggcggttcttccgcgatgaactcgggcgagtgcctgggtgaacgtggtgagcgacgagcggcgggtgagcagctccggggggctgcatgaacgcgcagttcgggatccgccgctgacgggaccctggtcacctgggtacctgtctgaggaggaggtgctggacactgagaacccatttgtgcagctgctgagtggggtcgtgtggttgattcgtaatg

SEQ ID NO: 583426 - DNA, 126 bp, Homo sapiens
cctgcgccgttacgcgccatagcttactcctcgctctgcctcatcctccttcccttccttcctgcctgtcatctccatatttgaacccctcagcccctcagcatccctgcgcgtaagggccagcag

SEQ ID NO: 583427 - DNA, 326 bp, Homo sapiens
atctcattggcgccactcgcagtcaccgaaacctctcgtgtctgccggtacagatttctggttacgccaccgtgtccgaacctcgaagattgcgtctaaggtggtatattgactcgatccgacgatggattccgtgtacaatgtgtcattagctgttcccggttcatcctggccagtccaccgacgccttcgtcgtccatcacccggagacaaactactttcaatgccacgtgagacgcacacagcgagcgccgaccgtattttcgccgctgtcttgtgggatttcgacggtactctcgtcgacactgagtcccggtgggtcgaga

SEQ ID NO: 583428 - DNA, 846 bp, Homo sapiens
atccgaacatgggaaagaacaaactccatcacaagccgcttttagatgaagctgtaaacactcaccggcggggctccgtggcttcattcttgaagtcagtgagaccaagaacccaagaattccagacacaaaatagatgtgaaacactgtttccaagaattataaagctgtcggctgtgcacggtggcgtcatgttttgtaattcctgcactttgggagacctgaggcgatgtggatcacttgatggtcacggaattggagaccagccgtggccaagcatggtgaaaaccgccgtctctagttacaacacatacaacacaaaacttacccacggtgcggtggatgcacgcctgtggtcccagtctacccgggagcttaagggcaggagaatcaccgtttgaaccgtgcggaaggtggaggttgcagtgagcccgacgatcgtgcatccactgtcactccaacctgggcgtcagagtgaggcttggtctcaaaaaaaaaaagcactttttgaaagtgtaatgtagtaaaaccccagaaagcaaatgaaacagctagacattggcgccgggaccacgaaacgctgaaaaaggtccttaaagacatctcatgccccggggggcctggcaacaggagggaaccaaccagtgtgcatgtagactggccttgcaagaagacacctgccggaagatgaaggaagttgaggattcatccccaaagatagaatgaccgccgggagcaaaccagccgaggtggcagaaataggcccaaagggttgcgcggggacaacatatggagttacgaaaaagggagcagtctcaaagaggagaccctaaaagcaaattgagc

SEQ ID NO: 583429 - DNA, 172 bp, Homo sapiens
tgctgtccggggcacttattgctggaggaaaaggtggagctaaagagaagatctctgcccttcagagtgcatgggagtgtgtgtcaacttatgaaggcatgtagtatgtcagtgtgtgcagtgcgtgcatgtgtgggaatgagtgcttgtaggtgtgacaggcatttaggta

SEQ ID NO: 583430 - DNA, 100 bp, Homo sapiens
agggaatttttagggtttttttccccgctttgtttcccacccccaaagtaaaaattaaaaaaaaaaatttgccattttttccaaaattgaaaccccgtta

SEQ ID NO: 583431 - DNA, 1746 bp, Homo sapiens
  misc_feature (246)..(246): n is a, c, g, or t
  misc_feature (273)..(273): n is a, c, g, or t
  misc_feature (403)..(403): n is a, c, g, or t
  misc_feature (476)..(476): n is a, c, g, or t
  misc_feature (478)..(478): n is a, c, g, or t
  misc_feature (784)..(784): n is a, c, g, or t
  misc_feature (1047)..(1047): n is a, c, g, or t
ccagcacttcgggcgggctgtagctcaggtgtgatagttttgaatcctcaggtagattttgaaaccagtcctgtgacaatatgttgtagaccccgagtctcatacgacatataaaatactagacacattatgcttggcgcgcaatgatcgcgatagttgcgaacctcgatagatcactaagcgtagctccagagacgcgctagcgagtgtcgaagaaggactattgcctatgcatccctctaaganacgcgttggaagactcttggaagttgntaagccagagtgacacacccagtgacacacgccagtgcccacactccccaggtctgtgtgactcgcactgggacatgagacagacaggtgtaataccagtgatagagatagagacacaatacaaagacanatgtaggtggcgaagccctggcttccctaaagtgatatctttgctctatcttgaaaacggcgagccctgacanangtgtatgatcacgcgtcgtgttcaccccccgcagtcatatgtcctctgtgtgtgtcccccacagcgcgtgggagtgtcccacgtgtaaagtcaccgtgtatagtgtccggtataagctacaacatatgccaacatagtcgaagtatcagttgtgggtcgcagagggccgcatttgtgtttaaaccaaaggaccaggcctcccgaagaagaaaactgtggcgcggaagacaagaacttttctgagcatatccgcttgtatgagcgggcccatcttctcctccgatgttagacaccaagcgagataancccctgtgataacaaactctgtgcgcgaagtggggtgagacccggaaactcactgtgtgagccctcaattaaaactctaacgccatttgtcgttccgaagtgtgttattgaggaccccgtcttctcttttaccaggggcgggatggcggatcatttctcggacagaggcactagtgccccccacccgagtgtgatagtgtcactagggttggtgtgccgtttaaacatacctttagagggggggggctccattgtgttgaccnttcccgtcgccgttgccactattgtgtcccacaccggttggggggcgtctaacggcctgggtaaggacatatccattcctaaaggaatttggactcggtaaggagacaaaatttttttctccaatgattaccccccgcggagcctgtacatagtaagattagacgacactacacaagacgaaggctattgggaatattgggttcttttaggacctatccccttttttttccaatttggacactggaatttttttcaatttctgggggccaaaaacaggggacaaggtttttccaaactctgggggtaaaggaacccaaaaaaaccagaaattttccgaccccttttttaaacttataaggggtagcctttccccttatgtgggagacaccagtgaaaacaacaaagggcgtttcgaccgtttttttccaacattgggggcaatactctcttggattgtggcggacactatacgtttggcttggatcacgctttaaccccaggaacaggtatggtgatggtccgtgacaaaaggacatgtacatatttattcacacgcagccaggcccacatattaacaccccccggccccgtgtccaacaatcatatcactcggttgtgcggcacacaagcagaagctactactaattaagcgaggaagaattataataatctcactgatgagaaggagcgttccctaa

SEQ ID NO: 583432 - DNA, 973 bp, Homo sapiens
cctcctgtcacatagggcccctctgggtctcacccccgtggcctgttgttgtcgcgaccacagtccccttggcgcccaccattgtatgcggggttcttaccacagcgctctcctgtgccgggtcgctcggcaaacgctgtgtgattcacaccgcgcctttttgccaacgcggggtacacaactgtcggtctctggggatgcccccacccaccttctgtgtgggttcgtacgcctctcacagtttgctggcacccggtcgttcttctcgcggaggtgctccactagccccgccatgcccccggttcctttttgagtccctcccgccctcctgtatgcttcccatcgcgcggttatttgggccccctctctcccaatcaagccctgggtgggccccccaatgccctccttttggccctcccaacggtatttcctcgcctggtggccccccccacaacccaccacatggaccatgttgtatggttacggcttgctcattatgtagacaaccaacttgggccctgctcccgcgttcttgtgcagctgactagcatcaggcagtaggacttcgccctcccgttcctcctcccttgggggagggggtttttcctcaaattcttgcgtcggcttgatgccatcatcgcacacacgaacaaaatgtgtgctgaacaccccccactgtcgggaaaacacgaatagacgattatagacccccactctaggagcaactcgactcccggtaagcagagagagtggggacaactcagcgtgagtaggggcagaaactgctcacctacgggttagggcaccacctcttggtgtgatcctggacacacagaaccatttcaggagggcgcactctcactcgctccctctccctcactccacgacacactgtcttgtacctcgacgcctatttttcccgctcaccttgcgccccaaaaagcctttcttttgggccccccccacatataca

SEQ ID NO: 583433 - DNA, 369 bp, Homo sapiens
  misc_feature (3)..(3): n is a, c, g, or t
  misc_feature (17)..(17): n is a, c, g, or t
  misc_feature (66)..(66): n is a, c, g, or t
  misc_feature (288)..(288): n is a, c, g, or t
  misc_feature (340)..(340): n is a, c, g, or t
cgngttcccgctcgcgnctctccctccacacatccctgcaagctgagggagccggctgtggcttgnagcacagaaaggggctccacagtgcagcggtgggctgaagggctcctcaagtgccgccaaagtgggagcccaggcagaggaggcactgagagcgagcgagggctgtgaggactgccagcacgctgtcacctctcaactcagtctcccacatggcgtggccacccttgtgtctgttaaactctttctcttacaaaaatgccatggtctttctttgttgcagtngtcagggaaaaaccccttggggcagattacaaaagttctttttcagggcatntgttttccagaataggcgaggttttcctc

SEQ ID NO: 583434 - DNA, 409 bp, Homo sapiens
  misc_feature (222)..(222): n is a, c, g, or t
ggcctaatgtaggtgacgggttgatgggtgcagctaaccaccagggtacatgtatacctatgtaacaaaactgcatgttccgcacatgtaacccagaagctaaagtattaaaaaaaaaaaaaaaaaaaaagaatgtgctctcagctggagacatgcttcagtctgatcccatggggacctctgcagcataaattgaaccacagagttgatcctgccttcagnaagagggctggccttttgagcactctcttcccattgccatcagttagttatttggatgcagggagtccttgaacaggggacagacattagcagcaatcattgaggcacaagtacacctgtggtaaaggcagaggaggggagaagtatagcatctggtgcagaagttatacccccaaatgaatgaaat

SEQ ID NO: 583435 - DNA, 428 bp, Homo sapiens
caattggaaaacctcctataacttggaactgtccccagcccgctttgggttgtcctgcctttccagatcaaaccaatgtacatcgtacatgtattgattgatatcctctgtctccctaaaatgtataaaaccaagctgtagcctgaccacctcgggcacatgtcatcaggacttcctgaggctgtcacaggcatatccttaaccttggcaaaataaacttctaaactgattgagacctgtctcaggtactttcttggtttacaggaatttaagcaaattacaggactgcactacccatgagtttgtgaaaggaaaaataaatctcaggaccccaaaatcactaagccaaaaagaaaagtcaagttgggaattgcatcgagcaaacctgcctctcattttattcttgaataagatagctacaaagatta

SEQ ID NO: 583436 - DNA, 246 bp, Homo sapiens
gggtgggggtgtggatgtatataaagcaagactaagtctgacttcctaagggctttctcaaaccatttctgtccaagagaaaatgacgttgggcttggatataaaaaatccaatgagtaaaacacaagctagtcaaatgtgttcacagcatgcagaacaaaaactttcaacctttctctctcactatacagtctcttgtcatgtgaacgtgtggcatggcagcatggccgtctatgcaagcaggga

SEQ ID NO: 583437 - DNA, 153 bp, Homo sapiens
  misc_feature (55)..(55): n is a, c, g, or t
gaccaccgctctttcagttctggcgagcagatttgatgatttaactgttgaggtngtggtctaagcatagcgcggtatctaatcccagtttggttcttagctattgtgtgttcagacatgttaaagccactttcgtagtctattttgtcaact

SEQ ID NO: 583438 - DNA, 669 bp, Homo sapiens
  misc_feature (13)..(13): n is a, c, g, or t
  misc_feature (215)..(215): n is a, c, g, or t
  misc_feature (347)..(347): n is a, c, g, or t
  misc_feature (350)..(350): n is a, c, g, or t
  misc_feature (423)..(423): n is a, c, g, or t
  misc_feature (425)..(425): n is a, c, g, or t
  misc_feature (437)..(437): n is a, c, g, or t
  misc_feature (442)..(442): n is a, c, g, or t
  misc_feature (451)..(451): n is a, c, g, or t
  misc_feature (459)..(459): n is a, c, g, or t
  misc_feature (476)..(476): n is a, c, g, or t
  misc_feature (481)..(481): n is a, c, g, or t
  misc_feature (494)..(494): n is a, c, g, or t
  misc_feature (499)..(499): n is a, c, g, or t
  misc_feature (505)..(505): n is a, c, g, or t
  misc_feature (507)..(507): n is a, c, g, or t
  misc_feature (551)..(551): n is a, c, g, or t
  misc_feature (553)..(553): n is a, c, g, or t
  misc_feature (570)..(570): n is a, c, g, or t
  misc_feature (577)..(577): n is a, c, g, or t
  misc_feature (588)..(588): n is a, c, g, or t
  misc_feature (590)..(590): n is a, c, g, or t
  misc_feature (632)..(632): n is a, c, g, or t
aatgtcgacaatncagggaatgaacagcctccatctgggcctctctggtcaaaaccacttttttgagttaggggcccagccccaggcctcccaggtcatcgtcctctgccccgaagcccgagaagctgatgggctggcaggccaggctgcgcaggttcacaaggcaggcggtctgcgtggcactgaagttagggacagttaccaacagcactgtntggtcctcaggacctcggatgattttggagccaaagctgggggtgttgccacaaaagtagacatgcgggcactctgggaagatgaacgggttagttttttagaaggggtaacaacctagagttttaggggcngtngggctgatgttacggacccgcagcaacttccaggatctccaagttatcctccatgctgctgtttcggaaaatntnactcacgttctntcctnatgttcccnaaaatctnacttcatcaatggtggnctggnaggggttggtgancagcnggagcntngagtaggcagttgccagcgggaacatgcaggggtggaggggctncngggggagcgttttattngtggganaaactcgcctngnatcacgtccacgggcactgaggcgctcagctgcaggaggatntcatccagcatcttaacagcttccacgctggctgctt

SEQ ID NO: 583439 - DNA, 107 bp, Homo sapiens
cactaggtgctctagaggatctttttcttgcccagactcgtacgtggttatgtaacttacacagcattacatgcgggttgaagcagcacccgcatcgtgtttcagac

SEQ ID NO: 583440 - DNA, 346 bp, Homo sapiens
  misc_feature (318)..(318): n is a, c, g, or t
ccgggcagtagagctgggattacaggcgccgccaccacacctggctaatttttgtatttttagtagagacggggtttcaccgcattggccaggctggtctcgaactcctgacctcaggtgatccatctgccttggcctcccaaagtgctgggattacaggcgtgagccaccatgcccagcctttggacataaggattttgagtagctcttattgcccaggctggagtagctcttattgcccaggctggagtagctcttattgcccaggctggagtagctcttattgcccaggctggagtagctcttatgcccaggctngagtagctcttcttgcccgtcagatggt

SEQ ID NO: 583441 - DNA, 377 bp, Homo sapiens
  misc_feature (349)..(349): n is a, c, g, or t
agtaagagctgagctatagcccataggtgctggagagaatagtggtcagtcttcttgggctgagaggttaaccatctagcttttctgcatcttattggtcgatacgctctctcctgttgtgcttgatgatcacgccctcgattgagaggtcctctgtcttactttttcctttgattaaaattgcaaaatatattaagatctggtagaggtaccagcttcctttccagctggagtagctcttattgcccaggctggagtagctcttattgcccaggctggagtagctcttattgcccaggctggagtagctcttattgcccaggctggagtagctcttatgcccaggctngagtagctcttcttgcccgtcagatggt

SEQ ID NO: 583442 - DNA, 310 bp, Homo sapiens
  misc_feature (282)..(282): n is a, c, g, or t
actccagcctgggcaataagagcttaaccaaagacccagttagcctgaggtacagaaccaggaggtgctcaaatctggggctgagagccagagagacgtcagaaggtgagaagtgcccagccaggactccactctgcgttctttgttttgtttttgagacggagagtagctcttattgcccaggctggagtagctcttattgcccaggctggagtagctcttattgcccaggctggagtagctcttattgcccaggctggagtagctcttatgcccaggctngagtagctcttcttgcccgtcagatggt

SEQ ID NO: 583443 - DNA, 234 bp, Homo sapiens
  misc_feature (206)..(206): n is a, c, g, or t
ttcccctctgcaacagacgcccactccacgcgtccagcccacgtacagtctgagcattacgccgcagagctcttattgcccaggctggagtagctcttattgcccaggctggagtagctcttattgcccaggctggagtagctcttattgcccaggctggagtagctcttattgcccaggctggagtagctcttatgcccaggctngagtagctcttcttgcccgtcagatggt

SEQ ID NO: 583444 - DNA, 735 bp, Homo sapiens
gttcactttctggttgggtggatggagccgggcgggagcgcgcgcggtggaggggctgcggttcagtctccgcccggcgctccctgtatcagctgtctgtctgtctgtagcctatctctgtcccttttctcgctgcatcgcctcctcttctctgcttcacatgcctgtcctgctgcctttacaatgtctctgggctggtatctaggctccttcctttctatcctttcaagtttaaacttacactaatcgctttctggatgattatcttacccttttctctatttactctcatattcctatcttcattctcccttatttctcatttctttctattcttttctcatttcttctcttcattgtgtattcttatattaaatcctttttttcttttttcttatatcttttttctttcttttattttttttcttttttttttgtcccttattccttattttttcccttttttttatttctttttttcttaattttattgtaccttttttatttatctatacttctcttctaatttttttcatcctttactctctctactttttctctcttcttctctaatcattaatcttctctctactttctcttatttttcctatactctttactatctctctcatttctctcacttttatatttctctttttccttccatttccatatatcttttttccattcatcttacttatttttctaattctcttctcacaaattcttttctcc

SEQ ID NO: 583445 - DNA, 333 bp, Homo sapiens
  misc_feature (7)..(7): n is a, c, g, or t
  misc_feature (305)..(305): n is a, c, g, or t
tgtgcantagagctagactccgtctcaaaaaaaaacacaggcaggtgtggtggctcacgcctataatcccagcactttgggaagccaaggcgggcagatcatgaggtcaggagatcgaaaccatcctggctaacacggtgaaaccacgtctctactaaaaatacaaaaaaataattagccaggctggagtagctcttattgcccaggctggagtagctcttattgcccaggctggagtagctcttattgcccaggctggagtagctcttattgcccaggctggagtagctcttatgcccaggctngagtagctcttcttgcccgtcagatggt

SEQ ID NO: 583446 - DNA, 280 bp, Homo sapiens
  misc_feature (252)..(252): n is a, c, g, or t
gcataatgagctgggattacaggcgtagccaccgctcccgacctatgtatcagttgtttttttcaatgtaaaatgaaaaaaagaattttctttcttttttttgtcttttttttagaacagggtctctctgttagagtagctcttattgcccaggctggagtagctcttattgcccaggctggagtagctcttattgcccaggctggagtagctcttattgcccaggctggagtagctcttatgcccaggctngagtagctcttcttgcccgtcagatggt

SEQ ID NO: 583447 - DNA, 217 bp, Homo sapiens
tagaacatgtagggactttttaagttgccaaatttatacaatgaagaatgttacttgttacatcaagtatctaagcgtgcatttcatgctcatcaaactctagtttaataacttagatacacgagccctattatcttagacatctacacctcagtgacttctaatatgaaagtgttaacatcccaaatgttgcctcacatctacggtgaactattaa

SEQ ID NO: 583448 - DNA, 241 bp, Homo sapiens
  misc_feature (213)..(213): n is a, c, g, or t
agaccacgccgttgggtgagagattgtgagcgccttcatgtcaggattggggtctatatgcatcaatggctggagcctcagcgcccactccacagagtagctcttattgcccaggctggagtagctcttattgcccaggctggagtagctcttattgcccaggctggagtagctcttattgcccaggctggagtagctcttatgcccaggctngagtagctcttcttgcccgtcagatggt

SEQ ID NO: 583449 - DNA, 258 bp, Homo sapiens
  misc_feature (230)..(230): n is a, c, g, or t
gtgggactcaaagtgatcaattttcgccactctcagcctcgccaaagtgttggaattataggtttgagccactatacccagcctcttaaaatattttttgtagagatgggggagtagctcttattgcccaggctggagtagctcttattgcccaggctggagtagctcttattgcccaggctggagtagctcttattgcccaggctggagtagctcttatgcccaggctngagtagctcttcttgcccgtcagatggt

SEQ ID NO: 583450 - DNA, 164 bp, Homo sapiens
gagctcggtaccccactgctacgtgcccctcctgagagcggaagagacttcttctccagtcatcggggagctgtggctcttctccagaaggcaccaccacagctgcccacttctggaaggttctgtctcctactggacctgatctcggctggacctgatctcgg

SEQ ID NO: 583451 - DNA, 316 bp, Homo sapiens
taccgttattgtgtactctctcttttctgaaccatcatgtacttaatgtctgtatcatatgagtagacacttgattgtctgttcacatgactccctaatggtttcctatgtgatattcttgggtctagagttaaatttaaagtaaacaatctctattgaaaaccacttttccagacactttcctagatttgttttctcaacaaaacatcctttcttctagagcttcccacaattcttgtatccatttatcatatgtcaaccaatcaagtatacttgagcgtgtattttagtgagaaagacatcctaggtgtgagtc

SEQ ID NO: 583452 - DNA, 630 bp, Homo sapiens
ccgccatcacccaggggatggtggatttcgttccatgaagaacaaggtcaccttgtggttggagctccccaggacatcatcccccagctgaagaagaagtatgatgtggacacactggacatggtcttcctcaaccactggaggaccggtacctgccggacacgcttctcttggaggaatgtggcctgctgcggaaggggacagtgctactggctgacaacgtgatctgcccaggtgcgccagacttcctagcacacgtgcgcgggagcagctgctttgagtgcacacactaccaatcgttcctggaatacagggaggtggtggacggcctggagaaggccatctacaagggcccaggcagcgaagcaggccctgactgccccccggcccttgctcggctctctcacccgcctggtatgaggtgccaactgctctgcgacttctgcggcccgggcggtctaatcaagcacacctgccggctgcgcctgacatgctaacctctctgaactgcaacactggattgttcttttttaagactcaatcatgacttctttactaacactggctagctatattatcttatatactaatatcatgttttaaaaatataaaatagaaattaagaatcta

SEQ ID NO: 583453 - DNA, 1326 bp, Homo sapiens
  misc_feature (389)..(389): n is a, c, g, or t
ggtggacagagcctgggtatactgagggtcgccgattcctagtgtcctggcgggtctctgcgtctcgctggcgccgaggtggcaagcttcgtgacactcgatgatgcaaccacgatctccgagtcctccccatgatactggctagtcgtagtttagcgggaacgatgaggttccacccagtcgaccctagacccgtgcgacatatggtctatgcatgtcaattgcgtatcacgattactgctccaagctgcgctaagtacgaaaaacagtagacactacagtgagcaaacacgaccacacatacaacaccatacccctaatactcccactagagttggacactctcagctcccaacttgcagtccggagggtttcacctcatccagagnagttacgaagatgtggcagagctgcaaatcggtgcagacacaagagagttctcacacagtgctcagacgggtatactatcacagagtcttcctgatactcatgacacccgcactaattgatgaacctctcatatctccatggttccagtaaaggggacagtacaagtaattacccctccctgtagggaacagttttctcggctctgtaaaaggagtcaatcgggtttggacaaatagaaaaatccgacgcttggttggagctttgcgcaccctcctcattcgtcttatctcatctttgtgcctcggacgggaatccatccgcattatgcaggacacatgggacccgcacttatttcttgggggacactttagcgcattcgttgtgcggtggtttcgcacctttagccgttgtaacaactataacgttatgccaatgaggtccctcaaggtaaaccaagagtctctatagaggggttaaccaaaggggggggtataaacggttggtgaatttacatttggcacagcgggttcctaaggatccaagggttgattgacattcttctctcagaagacgtacggaagctttggttttcccttaaagcgagctcacggggcacacatggcggtaggtgggccacccattgtctagcctcgtataatctacggccatcttttccggaggtcgaattaccatcgctccgtgttaagagggaccttggaagcccacatacaaagacaaagtaccttaacgcggaaggaaaataaaccaaccaatagaggattccataactgggcgccgttgtccggaaaaaggttgcaccgccccatttccaagggccctttgtaaggccttctgccccctggttcaacaaacacggtatgccttatcaacaccaggggggggaacaacgctggttcacgacacggggagagacac

SEQ ID NO: 583454 - DNA, 103 bp, Homo sapiens
ccatgccaggtgtggtgcagaatcgtaggcagggggatgtagcagagataggcctgcactgcctgtggcctttgtcgagtccctgcccttctgtcgtcttctc

SEQ ID NO: 583455 - DNA, 204 bp, Homo sapiens
taacctggtatcccacccctgaggtcaggtgtatgagacagcctgaccaacattgtgaaaccccatttctactaaaaatacaaaaattagctgagcatggtggcatgcacctgcactcccagctactcgggggcggctgaggtgggaggatcgcttgagtctagggaggcggagcgatgaggtgagccaagatcatgccactac

SEQ ID NO: 583456 - DNA, 560 bp, Homo sapiens
ggaaggttttgcctgttctagaaacaactgttgtacttgcacaatcgtgatttgcgataaagactgcaatccatttaggagaggtgggatacattactatgccggggaaattttccacattttgcaaacatacagatactaacaatgtcattctggatcaatgactggaacagttaagttattgcgaaataacttcatactcattgcagatgtttgtagacgcactgagaagactcactgaatcctgtgatgagtgtccaaagagacgcgctgaattaactgggtcaacattgataggctattcatacgtgagctacatgagccgccaagtgatgatttgtaagagtagactttagtacacatattctgcacatacatgatagtgtacattgaacctcataatagtccaactatatttagaacaaaggtgaactttacgtactgaacttgtccaatgacgaaccaagagtttcacctctcgagacttagttataataggccgaccaatcatgctattccgtgacccacccctcaggttgctgctgtttgaacatatagtg

SEQ ID NO: 583457 - DNA, 460 bp, Homo sapiens
ccctaaaattttttttttttgaacaagccccctcattttgtggaccccccccctaaccaaattggatggggttgggggctaaattaattgggttggggcggggggggaccccgaaaactttgatccgggggccccctttttgggttgggggggcccgaaaaccaattttggggcccccgttctgggtggaatttttttggctttggccttttgggtttgtccttcttttcccccttggttttttaagggctttttccttttaactttttttggtggttttcccggccaggaggccaaaaggggggaaaatttccctcttttactgggataatttttttggttccaagtggggtaaggtttttttttccatttgaaggcccccttggctggtaaaacctcttttgtggattctcccattttttcttccctccctttccattataaattttttttttgccca

SEQ ID NO: 583458 - DNA, 202 bp, Homo sapiens
gcaaagtaacaactggacacaagtgaaaaattgaggtataaattgaagcagcaactggtgcagtgtgtccagccagtggatccactatggaagaggatgtctggagtataggctacagagcatacaggtattgtgagttttacttcagtacagcagcctttcttgtcatctgatggacatctgtttaaatggagctcgtcag

SEQ ID NO: 583459 - DNA, 871 bp, Homo sapiens
ggcgcgtcccccaggaggtccccccacgggcgaggcgccaatcttgtagagggttccaaaaacccttggaaaaatggcgcaagccaaaaggggtgaacaaacccggggcgcgaaggaatgccctcggccaggaaaacctattctatccgggggtcccgcacacaacggaaagtggggtgtcccaaagaagaaaacgccggctaggggcaagagaggcccccacaagacgccaccacgaaaaccgtcgggggacagcggacccacacgtttccagatggctgggagatagccgtgagggaccaaaccttccccccaagaggtttttaattgctgaaacacattccctccttccccgtccgatatattacccccacccttctgaaagaaaggaggaggccccattccagagcccccagcctgcaacctttttgttgagaccgctttgtgtgaagcaaacccaagcgccccacaggccccccccaacgagcccccttgttaaaagctgcattatatggagatgtagtttttcccacaaccttttgttatagaaggagaattctcccacacaggcctcggcgatataaggagagctcgctcttcgcaaaggaagggtgtaaaaaaaactctgttgctgccaaagtcccacactggccctaaggcggtataaacatccaacacctttacagcatttctccccctctccacctgaagataaaagaaaagaaaattgaagatcccaatgcataatcatctgtttttctttttccgttggtgtgataaacccacacccccctctaaaaaaacataaatttttttaacctttccccttttttctgtgcttccaattaaaaaaaaagggaaaaatcccaaa

SEQ ID NO: 583460 - DNA, 361 bp, Homo sapiens
ccctcacagaccctggcagaagcaggaagcatggaagttccttttatgcattggaggaaaaacatgttggcttttctcttgacgtgggagaaattgaaaagaaggggaaggggaagaaaagaaggggaagaagatcaaagaaggaaagaagaaggggaagaaaagaaggggaagaagatcaaaacccaccatgccccaggcagaagcaggaagccagagttgctggaaccacaggcttgtgccaccacgcctagctaattattttaactttttgtagggacaggttttcatcatgttgaccagactggtcttgaactcctgacctcaagtaatccacctggctcagcctcccaaagtgctg

SEQ ID NO: 583461 - DNA, 425 bp, Homo sapiens
cacgaggagggcagcgacgacagcagcttttccatcggtgacaacaacgggctcagcaggcggggaaacggagacgtcgccggctagaactgggagattggacaccacacagtattaaacagttggcctgattgcatcaagtcatctttccagtcagctacattgacaagttctacagggatgtgctggaggttggtgagctagcatcacttgcctatttcaatgatattgctgtaggtgcagtatgctgtatggtggatcattcacagaatcataagagactttacatcatgccactaggatgtctggcaccttaccgaaggctaggaataggaactaaaatgttaaatcatgtcttaaacatctgtgaataagatggtacttttgacaacatttatctgcatgtccagatcagcattgagtcg

SEQ ID NO: 583462 - DNA, 168 bp, Homo sapiens
tgttaattctacaatcaaccaacaagtcattattaccctcactgtcaacccaacatagtgcatgctcataatgtgaaagtgttaaaaaaaatgtaaaatgtgaactcgtgcaaatcttaccccgcctgtttaccaacaaacatcacctctatgcatcaccatgtatta

SEQ ID NO: 583463 - DNA, 466 bp, Homo sapiens
cgaggacccatccctgaggagagtggcgatgaggacgcagacgacccttacaagcgcatctcgatctgctcctctgacagaacgattgcctgtgaggacgagttctccgagcctgaagaggagggcgaggggggccgaagaactcttccaacttccaacaaagcaagagagtcacaacaggggatgaacaagcgaaaggaccagaggagaagaaagaatccccgaagaggcgaaaaccaaggaggagaagccagaaggcaaaggggtcaaggaggagggcaagttgggctgaatggacctctccagctctggattcctgctgagtccctcacgtatcttccccaaacccgtcagattttatattttctatttctctgtgtatttatattaaaatttattaaatataaatatcccccgggacagaaaccaaggccccgagatcagggcagctgtgcggggtgagctc

SEQ ID NO: 583464 - DNA, 426 bp, Homo sapiens
aaaaaaaaagatacagtagtccatggtgagatgttgcaaaattattcaaaatattgccatgggatacccttaattgggaacctatagaagcacagattctgacataacaagtatttgctacttccaagcactgcagtcaactaatggatataatgggatgggctggttgctcctaactgtgctggagaaggtgggaaagaaaaagatgagctcagctccacacgaaggacctgcaagcttctatcttggcccagaagaagcccttattccctgtagctgcagaagtaaaattgctgaacaccatgcctagagtttaatcctgtgagcagctgaattacaacagaaattaaattcacaactgatgttattaaactttgtccacttggccagtcctatccatgtaaaattacatttcattgtctttga

SEQ ID NO: 583465 - DNA, 117 bp, Homo sapiens
agggtccattgacagttgccagaagaaagcccagaacatcatggagtcctttgaaaatccatttaggatgtttctgccctcactgggacaccgtgtctcccgtctctcagggcagcg

SEQ ID NO: 583466 - DNA, 408 bp, Homo sapiens
cgtatctggaaggatgaccaaggagtgttcctttcgaacgcccttcccccccttgtggtgatcttacaagagcctctggcatctctttctgcaaacggcaccctgaattgtgtatgccgtgccctgattacgcagtagatgctgagggacggtgtgagagagcagcaccagcccattcgctgtctcatctgtgacccccatgttcccatgctgacctctgtttcctccccagatcatctttcgttgttccagatgaggtggggctgccatgtctccatctctgtctcaaccgtttacgtgcactgagcgtgcaaccttcttacttccctacgtgaaaataagaatcgtgaatataaatttgttttctcaaatatttgctatgagatactgctggactaacttcatcag

SEQ ID NO: 583467 - DNA, 601 bp, Homo sapiens
  misc_feature (464)..(464): n is a, c, g, or t
  misc_feature (510)..(510): n is a, c, g, or t
atagcttgcatctcatcccagtaaaaccacttatttataacatatcaacgtattgacaaggttgaagagcaagattgttctgaggtgagatgcaaatttcaaaggggtgagcactaattgttccagtgattgtttatttattggctaggacataattactctctttgaggttacacatctgcctccaggttcctgtgtgcttgtgcccttgggatcaggccagggcagactgtgatcactgagattcaaactcccagagtaatcagcaagagctttctagagaccaaggccaggcctgatccctgagggatgcatgagaaggcttggaatctcattctgctatggtggctctctcttgatcttcttggagtagcaaaaacagcaatgtgggcccaatggtgtggcctaaatgatcacaaaggtaaatgagtaaagggctcagcagatgagtaaggagccttgtnctgagaaattagcactgggctctgcattcagaaacatgtgataagnattgcccattgcacattggctttattggggtaaggacttgaaaatttcagttttgcattaactggggaagaaataccctgagggaaatggc

SEQ ID NO: 583468 - DNA, 142 bp, Homo sapiens
acatgatgctcaccgctcagaaaacagcctgctcctccttctggccttttcatatttccaagttactgtttggaaggaaaaaaaaaaggtgtggtgtgggctggtttattctctaaaggtgacaaaaacatgaccatcggac

SEQ ID NO: 583469 - DNA, 920 bp, Homo sapiens
gtttcccaaggggcataggccaatgtttcttgatcccacagactcccaggcatatctttgatggaagcatctctgcaagtacgggagggccaaactgagtggtaagactgtacctgggggagattgcatgaccaggagtgacgcataggcgtgatcggtatgtccgcaagtttgaaggcttcctctgctcttagagtatgggttgtgtgactccctcttgatactatactgcttttgattgtatggcgaggtcacgatgaaagacaaacgttggcgacatagttaccgatctgtgatatatactcttctatgtgcctttgacgaggaaaatgccgaggaatgatgcggcctgaatcggagttctaattgctatcctagtgacgactctggagagtcatgagaacgcctgctcgtggcagtctacggtgtttgcggcatttctctcagtgtcccaccacaaacggtctggtcaattcctgactcagcaaacctctatcggtctaacttcggactatacgcctgaacggagaatgagtctcagaaggattctcggtattgacatgtctcttcaatctccagtaaagctcctgaaggactgactgagccaacgtgtcaaagcaggtaatggacgcgatttgggacttgtcagcaacgttcatgctggaactggaagccagcagaggattcatgaggcaaacgaagaggtaatgagcagagcgcttcgggattgcctgatgaagagttcctgatactttctcgttctccagtgctattctctcatttctctccttcattcgttggtcacatatatgcctaaatgcaccagtaatgtgcctacgtcctgcctcgcaatgagggagcatgtacccacaggtacatccatgtagctgcaggcagcagtctgacttattggtaccccc

SEQ ID NO: 583470 - DNA, 501 bp, Homo sapiens
catcagaatgagatctgcacgaggactgcgtagccaccttcctctagtgcagtgcaggtctttgtagtgttgcttcatctgcattcccttcatttctcctaaaacatggtagaagattttcaagtcccggctgatggagttagcttcagttgtcctatcgcaacaccttctttgtggttctcattgtcttccttgtcctgttcgtcattgatgcctcgctcgaaatacggaagtatgatgatgtgacggaaaaggtgaacctccagaacaatcccggggccatggagcacttccacatgaagcttttccgtgcccagaggaatctctacattgctggcttttccttgctgctgtccttcctgcttagacacctggtgactctcatttcgcagcaggccacgctgccggcctccaatgaagcctttaaaaagcaggcggagagtgctagtgaggcggccaagaagtacatggaggagaatgaccagctcaagaagggagctg

SEQ ID NO: 583471 - DNA, 324 bp, Homo sapiens
ggtgatgagagaggtaaggtctctattctccagagaaattcattcagcaaacgtccatttttttttgagacagattctcgctctgttgcccaggctggagtgcagtggtgcaatctcggctcactccaacctccacctcctggattcaagcaactctcctgcctcagcctcctgagtagctgggactacagacgcacaccaccatacccagctaatttttgtatttgttagtagagatggggtttcaccgtgtcagccagttggccttgaactcctgacctcaggtgatccacccgcctcggcctcccagagtgctgggattac

SEQ ID NO: 583472 - DNA, 348 bp, Homo sapiens
gcgagtgatgcggggtatatcgattacaggaacaggcccctcaagagggatatgaagcaccggcaggtcctttgagtttgaagcttgtggctcgtagtgtgcgggcgagcagttcgtggattcaactgtggaggtttagggctaagcatagtggggtatctaatcccaggtagggtctcagctatggtgtgttcagatatgtgagagccaatttgcgtagtctattttgtgtcaactggagtgtgttacaagtcaggtgagttttagcttgataggggagggggtgatctaaagagagtctttacgccggcttctatggactggggtctaatcgcccggttaaactcg

SEQ ID NO: 583473 - DNA, 250 bp, Homo sapiens
tccccacacatcaagggaattcacaaggcacagggacagctccccacacaacaaggaattatccagcaaggcacaggacagctccccacacaacaaggaattatccaacaaggcacaggacagctccccacacaacaaggaactatccaacaaggcacaggacacctccccacacaacaaggaattatccaacaaggcacaggacagctccccacacaacagggaattatccaacggggcatggggaccg

SEQ ID NO: 583474 - DNA, 343 bp, Homo sapiens
gagtgtactcctatttataaaaaaatgttaactgtaaaacagtctctggcaggtctttaaggagatattctagagggaaggtattgttatcataagagatgacagcttcatgggtgttactgttcctgaagaatttccagtgggacagcatgtggaggtgaaaggcagtgatattgatgatcctgaccctgtgtaggtctaggctaatgtgtatgcctgtgccttagtttttaaggcacagtttaaaaaagaaaaaactttaagttttcataacttaacttaaaaaagtttacacaaataaaaaaagtctaagaaatttattcacaaaaaagcttagtaatag

SEQ ID NO: 583475 - DNA, 139 bp, Homo sapiens
ggaaggaagcaagcacttggtggtgcctcaagccattggacttggacccgtttcttcttcctcgggcttcctctcttcaactgcacaaaggctcttgttgacctccctatgttcgtgacttgagcccacccctcggtgt

SEQ ID NO: 583476 - DNA, 104 bp, Homo sapiens
ttgatagcgagtcgtcgtctgctgaatgtacaccagcctttcgcttatcggagtcacgggggtccccttcagggacatctttcccgcccgaaactccaccaagt

SEQ ID NO: 583477 - DNA, 906 bp, Homo sapiens
  misc_feature (5)..(5): n is a, c, g, or t
  misc_feature (118)..(118): n is a, c, g, or t
  misc_feature (196)..(196): n is a, c, g, or t
  misc_feature (727)..(728): n is a, c, g, or t
  misc_feature (733)..(733): n is a, c, g, or t
  misc_feature (738)..(738): n is a, c, g, or t
  misc_feature (743)..(743): n is a, c, g, or t
  misc_feature (749)..(749): n is a, c, g, or t
  misc_feature (752)..(752): n is a, c, g, or t
  misc_feature (763)..(763): n is a, c, g, or t
  misc_feature (772)..(772): n is a, c, g, or t
  misc_feature (779)..(779): n is a, c, g, or t
  misc_feature (785)..(785): n is a, c, g, or t
  misc_feature (788)..(788): n is a, c, g, or t
  misc_feature (792)..(792): n is a, c, g, or t
  misc_feature (797)..(797): n is a, c, g, or t
  misc_feature (806)..(807): n is a, c, g, or t
  misc_feature (810)..(810): n is a, c, g, or t
  misc_feature (814)..(814): n is a, c, g, or t
  misc_feature (816)..(816): n is a, c, g, or t
  misc_feature (821)..(822): n is a, c, g, or t
  misc_feature (826)..(826): n is a, c, g, or t
  misc_feature (834)..(834): n is a, c, g, or t
ataanaataaaaaattataacaaaccctgagaaccaaaatgaacgaaaatctgtgtcgcttcattcattgcccccacaatcctaggcctacccgccgcagttactgatcattctattnccccctctattgatccccacctccaaatatctcatcaagcaaccgactaattcaccacccaacaatgactaatcaaanctaacctcaaaacaaatgatagccatacacaacagctaaaggacgaacctgatctcttatactagttatccttaatcatttttattgccacaactaacctcctcgggactcctgcctcactcatttatcgagccaaccacccaagctatctataaagcctagccatggccatccccttatgagcgggcgcagtgattataggctttcgctctaagattaaaaatgccctagcccacttcttaccacaaggcacacctacaccccttatccccatactagttattatcgaaaccatcagcctactcattcaaccaatagccctggccgtacgcctaaccgctaacattactgcaggccacctactcatgcacctaattggaagcgccaccctagcaatatcaaccattaaccttccctctacacttatcatcttcacaattctaattctactgactatcctagaaatcgctgtcgccttaatccaagcctacgttttcacacttccgcaagggttttccaagcaagaaagcnnataangaacnaccantgacangcntataagatagnagaacgcancccatgnatcctnacngggngcctntcaacctcnnaangacntncggcnnagcnatgtgatntcattgccatgtgcgagcacgatcggtcatggataggcaattcataacgaacacgaccgagcgatatacgga

SEQ ID NO: 583478 - DNA, 742 bp, Homo sapiens
  misc_feature (5)..(5): n is a, c, g, or t
  misc_feature (118)..(118): n is a, c, g, or t
  misc_feature (196)..(196): n is a, c, g, or t
ataanaataaaaaattataacaaaccctgagaaccaaaatgaacgaaaatctgtgtcgcttcattcattgcccccacaatcctaggcctacccgccgcagttactgatcattctattnccccctctattgatccccacctccaaatatctcatcaagcaaccgactaattcaccacccaacaatgactaatcaaanctaacctcaaaacaaatgatagccatacacaacagctaaaggacgaacctgatctcttatactagttatccttaatcatttttattgccacaactaacctcctcgggactcctgcctcactcatttatcgagccaaccacccaagctatctataaagcctagccatggccatccccttatgagcgggcgcagtgattataggctttcgctctaagattaaaaatgccctagcccacttcttaccacaaggcacacctacaccccttatccccatactagttattatcgaaaccatcagcctactcattcaaccaatagccctggccgtacgcctaaccgctaacattactgcaggccacctactcatgcacctaattggaagcgccaccctagcaatatcaaccattaaccttccctctacacttatcatcttcacaattctaattctactgactatcctagaaatcgctgtcgccttaatccaagcctacgttttcacacttctagttaggtctacctggacgacaacacacaataacccggacg

SEQ ID NO: 583479 - DNA, 624 bp, Homo sapiens
ctcaagtagatgaacactctaaactatctcatcaacaatacgactaatcaccaaccaaaagatgagtaagctatctactctcagaccacatgatactcagactcagatactaaaggacgaacgaggatgctctttgtactaatatctcatacatcattcatcttgacaaaaagaaactcatcaagagggcagcctcaatcatttacatgaaggaatcaactatctatagagctcgccatggcacatccccttatgagggggcgcagcggagtcgtaggctataacgcactaagattaaaaatgccctagcccacttcttaccacaaggcacacctacaccccttatccccatactagttattatcgaaaccatcagcctactcattcaaccaatagccctggccgtacgcctaaccgctaacattactgcaggccacctactcatgcacctaattggaagcgccaccctagcaatatcaaccattaaccttccctctacacttatcatcttcacaattctaattctactgactatcctagaaatcgctgtcgccttaatccaagcctacgttttcacacttctagttaggtctacctggacgacaacacacaataacccggacg

SEQ ID NO: 583480 - DNA, 458 bp, Homo sapiens
tcccgacatttgtcagctagacggagtcttgcatgcctaagtgacgctagccagcaaagtgtaaatttagctagcgattgacgtacagtgaggagcaagctcagccattattgacgttaagtctaagattaaaaatgccctagcccacttcttaccacaaggcacacctacaccccttatccccatactagttattatcgaaaccatcagcctactcattcaaccaatagccctggccgtacgcctaaccgctaacattactgcaggccacctactcatgcacctaattggaagcgccaccctagcaatatcaaccattaaccttccctctacacttatcatcttcacaattctaattctactgactatcctagaaatcgctgtcgccttaatccaagcctacgttttcacacttctagttaggtctacctggacgacaacacacaataacccggacg

SEQ ID NO: 583481 - DNA, 880 bp, Homo sapiens
gccgagggaggtactggaacaagtgcatctgggactccctacactcttgagtgcaccagattccccaacacagaacactggccatcctgatcagatagactccagctgtgcctacgtcacaccaccctgggtatcatgggcacacagatgctggtcacccaggagctgctgcgttaactagccaaaagctttgatctgctctgacctggccgtgactcacttgaacggacatatcaacgcaggtgcgcacttctgaggcggcctcacaaggtgtcagacctgcaaatgcgttcgttttagcctacgccgaggaccagtctgtcgtctcctcaccatggcactgtcagtgaacgactaaggtgaccctggccagtgtgtgtcgaggaaagtaacttggcagggactagcagtactatgtgcatgacctacactgagagaacgcacacgcgacggaggcctcaggacgatactttcttgcatgctaatctgtataccgatgcaaggcacagcatagatgcctcacgagtcaggagtccgcatcttgaggagcatactgactcctcgtatggcttgaccgtcttcaggcactgtcgcagcgtagcctggaacggacgcccaggacgaaagtcatgaggtgcccaactagggcttctattactcccttgacggaaaccatcgagacaggttcctcgcgataaacacatcacaagattggcatgctcttgactggggcggagaaacgaagggtatcgctcgatgcccactgtaagtggtgcggaagcgttgcttcccgggtacttagagtacctaatcttgaagcagaatcaccattccaggaagggttgccatcgttccggggctcttcggggggacccccctg

SEQ ID NO: 583482 - DNA, 367 bp, Homo sapiens
cagagtagtaacacgggaggcagcctagatacctggctagacagcaatttctcaaaagcagactgcagctcttcacagggactgtcaaatgctgtcagctggagagaagaaagacaagcaaaaaacaaggtgatgaagcattgccctagaaaagctttgacactcaggaaaagattggcagagaaacaagggtctactgcaggggtagagggagggagccctgataacggtgacttcagatgggtatggtctttcagttttgctgtaatagtgtatattgacaacaacgactataagggtcctactatctagctatattaataaaattgctccatcattttattagaagaataaaccgaagggcaaa

SEQ ID NO: 583483 - DNA, 430 bp, Homo sapiens
gtctaacggcacaggtgatacactatggatccttggttgcggcgcttaaaattatgccagcaaagccaacagctccccatcgtgaggccttgcctataaaacttgcctggatatgtacataatatagccaggacgcatcaagaagcaatctgtgacaaagtctgagggtcttcctttgtgcttgccctccacactaagagaagttggcgtctccctcctgggaatagtattgccttactgttcatctgtgaactgtatttagtattaaattactctgtaccccatccgaatcagggcttctaccactgctgatgcgaaaccacaaagggacctacctgagccaccgtcctagccaagcgagcaaacctgcagggggtttggcagtggacttggtcaccgcagaagcgtgtgcgccgttaggccgatctga

SEQ ID NO: 583484 - DNA, 377 bp, Homo sapiens
cggtaccacccaggtagacttaaccacaggtagacctaatcacagggtagacctaaccacagtgtagacctaaccacaaggcacacctacaccccttatccccatactagttattatcgaaaccatcagcctactcattcaaccaatagccctggccgtacgcctaaccgctaacattactgcaggccacctactcatgcacctaattggaagcgccaccctagcaatatcaaccattaaccttccctctacacttatcatcttcacaattctaattctactgactatcctagaaatcgctgtcgccttaatccaagcctacgttttcacacttctagttaggtctacctggacgacaacacacaataacccggacg

SEQ ID NO: 583485 - DNA, 321 bp, Homo sapiens
tgagacaaagtctcactgtcacccaggctggagtgcaatggcacacttcggctcactgcaacctcctgctcccaggttcaagcgattctcctgccccggcctcccgagtagctgggattacaggtgcacaccaccaacacccggccaattattttgtatttttagtaaagatggggtttcaccatgttggtcggttggtctcgaactcctgacctcatgatccgcccgcctcggcctcccaaagtgctgggaccccaggcttgagtcaccatgcctggctgtttatgcctagttttaaattagctggacagtccagatgca

SEQ ID NO: 583486 - DNA, 821 bp, Homo sapiens
  misc_feature (43)..(43): n is a, c, g, or t
  misc_feature (81)..(81): n is a, c, g, or t
  misc_feature (85)..(85): n is a, c, g, or t
  misc_feature (104)..(104): n is a, c, g, or t
  misc_feature (106)..(106): n is a, c, g, or t
  misc_feature (108)..(108): n is a, c, g, or t
  misc_feature (116)..(116): n is a, c, g, or t
  misc_feature (123)..(123): n is a, c, g, or t
  misc_feature (177)..(177): n is a, c, g, or t
  misc_feature (182)..(182): n is a, c, g, or t
  misc_feature (193)..(193): n is a, c, g, or t
  misc_feature (203)..(203): n is a, c, g, or t
  misc_feature (220)..(221): n is a, c, g, or t
  misc_feature (278)..(278): n is a, c, g, or t
  misc_feature (301)..(301): n is a, c, g, or t
  misc_feature (311)..(311): n is a, c, g, or t
  misc_feature (315)..(315): n is a, c, g, or t
  misc_feature (331)..(331): n is a, c, g, or t
  misc_feature (335)..(335): n is a, c, g, or t
  misc_feature (355)..(355): n is a, c, g, or t
  misc_feature (454)..(454): n is a, c, g, or t
  misc_feature (458)..(459): n is a, c, g, or t
  misc_feature (568)..(568): n is a, c, g, or t
  misc_feature (571)..(571): n is a, c, g, or t
  misc_feature (580)..(580): n is a, c, g, or t
  misc_feature (606)..(606): n is a, c, g, or t
  misc_feature (611)..(611): n is a, c, g, or t
acggtgctggtggagctgactcccgacatccatatctgcggcntctgcaagcagcagtttaacaacctggatgcctttgtngctnacaagcaaagtggctgccngntnaaaggaanatccgcngcagcccccagcacggtccagtttgtatcggaggaaacagtgcctgccacccanactcngcccgcctccngatctcatcncctcggagacccagacnntcccagtttcagctccagaatttgtttttgcacatggctatcaaacttccctgcccncggaaagtaatgaaacccagacngccactgtcntctntctccctgcccagtcncgcnccaaaacgcccacaacaccncctgctcagaaaaggcttaactgttgctatccaggttgccaattcaagactgcttatggcatgaaggacatggggcggcatttaaaaattcacacgggngacnnaccccataagtgtgaagtctgtggcaagtgctttagccggaaagacaagctgaagactcacatgcggtgccacacgggcgtgaagccctgcccagtgtaagccgtgtgnctncgccgccgnccgcacagcagcagcctccacaagcncctgnggatccactcggacgagcggcccttcaaatgccagatctgcccctacgccaccctagcaatatcaaccattaaccttccctctacacttatcatcttcacaattctaattctactgactatcctagaaatcgctgtcgccttaatccaagcctacgttttcacacttctagttaggtctacctggacgacaacacacaataacccggacg

SEQ ID NO: 583487 - DNA, 757 bp, Homo sapiens
  misc_feature (5)..(5): n is a, c, g, or t
  misc_feature (118)..(118): n is a, c, g, or t
  misc_feature (196)..(196): n is a, c, g, or t
ataanaataaaaaattataacaaaccctgagaaccaaaatgaacgaaaatctgtgtcgcttcattcattgcccccacaatcctaggcctacccgccgcagttactgatcattctattnccccctctattgatccccacctccaaatatctcatcaagcaaccgactaattcaccacccaacaatgactaatcaaanctaacctcaaaacaaatgatagccatacacaacagctaaaggacgaacctgatctcttatactagttatccttaatcatttttattgccacaactaacctcctcgggactcctgcctcactcatttatcgagccaaccacccaagctatctataaagcctagccatggccatccccttatgagcgggcgcagtgattataggctttcgctctaagattaaaaatgccctagcccacttcttaccacaaggcacacctacaccccttatccccatactagttattatcgaaaccatcagcctactcattcaaccaatagccctggccgtacgcctaaccgctaacattactgcaggctgatggtttcgataataactagtatggggatacaaggggtgttatgctgcatgctccctcggtatgatctcattatctatgatatcctaggaaattcgctgtcgttacttaattccaagacctacgttttgtcacactgtctaggtaagcctctaccttgtcacgacaaccacataagaacaacaaaacaaaaagacaaaaaccc

SEQ ID NO: 583488 - DNA, 722 bp, Homo sapiens
  misc_feature (306)..(307): n is a, c, g, or t
  misc_feature (351)..(351): n is a, c, g, or t
  misc_feature (356)..(356): n is a, c, g, or t
  misc_feature (362)..(362): n is a, c, g, or t
  misc_feature (377)..(377): n is a, c, g, or t
  misc_feature (417)..(417): n is a, c, g, or t
  misc_feature (419)..(419): n is a, c, g, or t
  misc_feature (427)..(427): n is a, c, g, or t
  misc_feature (431)..(431): n is a, c, g, or t
  misc_feature (433)..(433): n is a, c, g, or t
  misc_feature (450)..(450): n is a, c, g, or t
  misc_feature (453)..(454): n is a, c, g, or t
  misc_feature (459)..(460): n is a, c, g, or t
  misc_feature (468)..(468): n is a, c, g, or t
tagagattgtggcggggctggcatgagaagtgacatctgcgttacaaagtctatcttcctcataagtctgtaaagagcaattgaatcttctagctttagcaaacctaagccaaaggaaggaaagccacgaagtatgcagaagtcaaaccctcatgtcttattatggcacaagtctactataagtctaaatcagaatttacatatacaagtgtcccaggtagcagtgactcccgtcattggagtgtaatggatcaatgtttgaattaaggcctatggtaaggtaacattgctttgttgtacttttgnncaagagctcctcctgatcactattacatatttttctagaaaatntaaanttcagnagagaatgtatcacntgctgacttttattccatatttggatggagtaagttttangntagaattntgtncngtttggatttaatcttntgnnaagtnnattccttntttactggttctgactaataattctcctgtttatcttttacgggggtaacaaactgccaagctgcactggcctagttctcgtgaatatctgcccattcgctgaaagaattgtttatcaacacacattgtatcactttctcacctgtatatatgagatcgctcccaaataaacaatattattgtgaaaatagacatacccccaataaaacaacaaaaaaaacacatcatacacttgcggccccgcaaggcttcat

SEQ ID NO: 583489 - DNA, 1009 bp, Homo sapiens
ttgcctgctgcttaccaaagaggagagcaaaacctgtaagtcggtccaagtttcatgtccgaatggtctccagtcagagcagaacttcttgggttccttgatcttacccagcaatagtggacacgcggctaagtgagtaaactctcagtcagaggtgacctcacatgacaaagaacagtatcaaaccaagtaaaaaaacccggtaaacagcattcgcctgaaattacgccccgccctgaaaagaaaaggagaccagcacacaccgcgagaccccagacaaggcggaaacacaacacaggaaggcagcacaagaagcacgagcgacaccacgaacaaacagcaagggaacaatacaggcaaagaaggacggagaccgagcagagcgagacagaagagagcaaaaggagcaaggaagagacgacgggacaaggcagcagcgaccaacaagaaaggaacaatagaacacacacaccgacacggaacaggccgacgggcacgcaacacacacacgaccaaagcaaagacaccgccgacaagagagagcaaacgaccgccaagagcacaccacagacacagacgaacagaaaaggaggaacacaacccaagaacaagcaagaggcacgagcagaacgacaagcgcacagtaagggagacgcggagaacgggagaagagagaatgacccacgcaagacagaccgacccgagtagcgacgagaaagcaagacacgacgagcgacagcgaggacaagacagaaggaatgacgagaagaagagcgaagaccaccagacagaagaaacagaggaggacaggcaggagcgaaaaaacagaaacaagataagggacaaggacgcccgagaacagggagcgcgagccgactagaccagcaagacgacgagagacggggagagggacgacgaactggaggacgctgacacggacgacgacacgtgaagcgaccgcagaggacgagaccgagagcaggcacgagagaccgggcagacacgcgcc

SEQ ID NO: 583490 - DNA, 631 bp, Homo sapiens
tgtcctaaccaacctctaaagatcaaaaaaaaaggcccatttgatgtgggggtttacccgagggtattttgggggcccaaaatttatctggttctgttctttgaaggagataactaaaggaccagaaaaaccgaaggggcttaatagccgccttctgtgcaggtcctactgctttgttggctcataaaataggttttggaagtaaagttcaacacccctttttgttaaagacaaaatgatgaatggaggtccttcccccctctttgagatttgtgtgaaaaaaccggcctgatttttccaacccgggggcctgggcccagctttgagtttgggcttccaatttttaaacccctaaatggcaaggaggtggcggctcaagtaagggctccccttgtttttaaaaactagagcagcgaactgcgccgttcccttaaaaaaacaggccgttaggaacccattttccctgggttcgctttaaacaaaacaggggtaggttaatgggttcaaaagtcgctgtccttactacttttggggaagtatggaagtccccactacccaaaaatttttcaccccccaaattgggtttaaacatttttaacccttgtttgcaaaataaacagggcatttagca

SEQ ID NO: 583491 - DNA, 333 bp, Homo sapiens
ctccgggcccctgcccagggttttttcaggttttttccccccgggtttccgttgcttacaaaaccccccactgcctccttttaggttgggggtccgggtttgggccctttttgggctccatttttttttttttttttttttagaaaaacccccccccccaaaaaaggccattaaaaaaaaaacgtcctgtgagtgtaaaaaatgtccctgtttgtggttttggaaaactagttttgtagcttagggggggggtccctctgtttggggccctggccccccccgcagggctccccccgttttatgcccgggcttaattaagtgttttttccccca

SEQ ID NO: 583492 - DNA, 886 bp, Homo sapiens
cggggcggtgcagccccgccttgatgggaccaaagcgacgaacacagaggcgaccactcacggggcacaaagacacccgcgcggggagctgtggtagctcccccggcacaaacgggagtagtggctccgcagaaagcatggcgtggtacgccaggaacccgatggagccctggggccaattaccgggaaagacgaggcccgcccccgattataagagaagcggcggagccgcaaacccacaaccgaaggcaccacagggggtctgaggaccaccaaagaactacccgattgggtgaataggctaccccagcagacaagcggcgtggcacagaaaaactagatatcggcccgccagccaagtcgaagacaacccccttgaataagtgtacaaaaaaggatgctgtaacacagcgagaaagaggggcgcctcggctgtaggaagaggcctccccaaaagggtcaccgcagcgaggcgtgctaaccccccataacgccaacgcgcaccaaggaggcgcgcgcaccagggtggcagctcctctcaggagcagcgggacgagggcccgacaccgcaccgccccgtcgactacaagaggaggcaccaccgccacttgctgggtcatgaaggcgcagcaccccccgggttgggggccaactcgacggataacgcgtccccacgcattcggggggggcagtgagggcaggagcagactcagggtggcccacgacggggagggggcagcgaactcgctcacgtgaagtgtgcgcgccccggtgaaacacaggaacgcgcccactacgagcaagagatccgaatcccgcgcaacaagaaacgcgcccccaccccccggccccccgacaacaaaacaaaaaaaaaacacaccacatc

SEQ ID NO: 583493 - DNA, 755 bp, Homo sapiens
  misc_feature (176)..(176): n is a, c, g, or t
acgcgtccgctgcatacttcatggatcccatggtgggggtcttgcatctgtaagaatggaattgattttgcttttgcaagaatctcagcaggaaacatcagaaccactattttctagccctctgtcagagcaaacctcagtgcctctcctctttgcttgtacagccaatgccaaancagtagttgccaatccattattgcacctgtaatctgacacatgatattctccatgccataataaactttgattcaccaccccaccctgatatccaaagcaataaagtgtatgtaatgcatactttagcagcttcactttctgcttgtatttatcagtgcctttgtggtagtcataactacagttcatttcagacgaatcagtttactggaatggtatatcagacagtactgcttcctcatcgaccttctttgaaaacaggaagcttagatgaagcattaactcccaatacgtcaccagctcaatggcaggaataacttgctaattcgacttttgaattcttctgcgaggaagcccagtcagggcttacagtcttgctctgtgagattctcacagcagtgtatcttagtctcttcatccatggcctggccacacattcaagtaatgagctatttcggattgtggcccatcctctaaatgagaaaatgtggtctgctgtgtttggtggaggtgcacatgttcctagcaaagaacagacacattcaaaaactttacctgtttcttcactagttgaagaagga

SEQ ID NO: 583494 - DNA, 444 bp, Homo sapiens
  misc_feature (266)..(266): n is a, c, g, or t
  misc_feature (272)..(272): n is a, c, g, or t
  misc_feature (279)..(279): n is a, c, g, or t
  misc_feature (296)..(296): n is a, c, g, or t
  misc_feature (342)..(342): n is a, c, g, or t
  misc_feature (382)..(382): n is a, c, g, or t
  misc_feature (387)..(387): n is a, c, g, or t
  misc_feature (399)..(399): n is a, c, g, or t
agtacatctttattttatctctttacttctcccacccagaggaaagtataagttctttatatatccttttagaaataaactgggtataaataagcatgtgtatacacacacacacagaaacacacacacaaacacacacagatatgtatttatattccagtgtatataaatacatttatatacatgccatttatatacacatttgcatttctgttattagcgactctaaacaccatttgaaatgagccgtacccatttgtaattcngttttntgaactntccttcacttccttttncattggattgctgaatttttgcttattgatttattacagttaaganaattaacttgtagtctgtgacaggaattgtaatgctttancattntgcatttctttnttaacttgcagattaaaataaaaagttttatatagttaaaaaaaa

SEQ ID NO: 583495 - DNA, 206 bp, Homo sapiens
agccggatgtgacacagatgaactggtggctctcaaaaaactaaaaatagaattatcagtgatccagcaattctgagtatacactcaaaagaagtgaaagcagggtctcaaaaagatatttgtatatccatgttcctagcagcattcttcatgataactgacaggtggaagcaacccaagtaccctgtgatggctcaccaatagta

SEQ ID NO: 583496 - DNA, 1264 bp, Homo sapiens
ctcacgcgcaaagccaagcatcctcactaacagatacaagcaggagatcggcttcggcaattggggccactgaggcgtggcgcccgtggctgcccagcaccttcttcgacccatctcaccctctctcattcctcaaagctttttttttttttccgggctggggggcgggaagggcagattgcaaactggggggctgcgttacgtgcaggaggcgcggtggggctgcgttggaggagggggccacgtgttgagagagaagaaaagtggtggccggacatgggagggcccaaggaacctccgtgggagggggccagtgcatcaagtgtgggctgggaagtgggacggggcagtagacgcccgtgcattcagccgggtgccataaccgggggaaaacatacacggatactataccggaggaaagggcccgaagaaggggccataccaggaacagcgagagcagggtaggccacaactgggagaacagcaggcccggaacctgggatagcaggggcaaggcggggcgccgaagcacacccagacgaccctgcggatgggcaccgagagggagaggcaccacggcagctagacaaggagactgcgcactccagatacaccgaggatggacccaaactacgctcagggacacacataggggcccctgatgtagaagatatcgcgaaaatcacacaccatggcctccgagaaccacacacaaggaaatagccccactgggataaataaaggcggcaccaaaacaagacacacagacaacgagcacggcaaaactcgggacacaaccccacactgacgcggcatcccgggaacacccgacaaatcaggaagccactaggggcgaccaacacacacacaagagagagcgaacacaaagcgacagcgccgcagagaaacggcaacaccaggcgagccgaccgcggacgaggccagaagacaagaccgagcccacacccgaccccagcagagcacccacaccagagagacacagaaaaaatcacagacagcgagcaccaccaggaaaggacaacacagaaagagagaacagggaggaagcagagggccaagcacagaggcgcggacagcggcaccccccagcggagaggcgggacgcaaccaagaagcaacggagcaaaggcaggggagcgacggcgccgacaggcggagggaaggcgcagacgcgcgcaggaacgccacgacgagcaacggcaacacagaacagcaaagagaacggcacgaactgagaaggaag

SEQ ID NO: 583497 - DNA, 257 bp, Homo sapiens
  misc_feature (47)..(47): n is a, c, g, or t
  misc_feature (62)..(62): n is a, c, g, or t
  misc_feature (105)..(105): n is a, c, g, or t
  misc_feature (114)..(114): n is a, c, g, or t
ctggtcttattggtcttggttggagctccaaacccaacgtttcccantttttttccaaactnagccaggtggttcgaaagacttcaagcaattgaacatgaactncatgaattnggtttgctcaaggatcactctttggaggggcggcatttccagaattacacgttatggagcgtgtgattcaggatgaccatattccacttttaagaagaggcgctccagttctggatctgataccgtctcctttccctgaagcc

SEQ ID NO: 583498 - DNA, 257 bp, Homo sapiens
ctcggtcagctgctccgccgccggaaggaaccttatccccgtgctccggacaccccgggcctcgccctgctgaccagctgactgaggagcagattgcggagttcaaggaggccttctccctctttgacaaggatagagatggcactatcaccaccaaggagtaggggacagtgatgagatccactggacagaaccccactgaagcagacatgagatatgatcaagtgaggtggaatgcaaatagataaaccaatgta

SEQ ID NO: 583499 - DNA, 973 bp, Homo sapiens
tggtctaggaaatttacggggtccatattcaatgtaagccataatgctctaaatgttgccgagatcttcgtatgttccacattaagacttcggattctttacagggactatgcttgttgttgataacagttctgtgtagtctcaatcgacttacccataatggcggttacgcatacatcgttgtggaaagtctcccacgagagctaacgatgaaacacggacctctcaccttctgatctccctgtgccgtcctctaagaataacgcgttttgcatggatctacacactttgttcacccacgagttttccacttctgccctttgaagacttggtgaacctccctatgggtctccctgtgggctctgccactggacagaacggcctcctagctctctccgctctgtcctggtagcccttcgtcgataggctttgtgttgcctacgtaagtgctgtcctggcgtgtctgtggctgggccccgagggtggaaacgtattcgcgtctccccgtctcctccttaacctgggactctccgggtcttctgagtatttgcatgctgcgggtgtctaggacagagttgcttccactagaagcctggagacatagcatctttgatagcataagccagattatctgtgtgtgcaggtggtgtcgcgtgtagcgtgcatgtgtgaatcgtgagctagtcatacgttgagatgtgactccacaaacacctcgtatatagcgagcatatacaaccaatgtgggtagacctaggtgttctctacagaggggtgtgtgtgtgctgatgcgagcgcgtgtgcctagaatatatattactctcagaggagattctgttgcgatttgaataggaatttctttatgtgattagttcgccccttccccacccctgaccagatgttaagcagctatgaaacattctctgtactagttctggtctccttttaacgcacgggggctctgaaccctttt

SEQ ID NO: 583500 - DNA, 86 bp, Homo sapiens
tggggaagagacgggggtctagcattggttccccaggtggggtatagaactcctagccctcaatcactcccaccctcacgcctccc

SEQ ID NO: 583501 - DNA, 251 bp, Homo sapiens
  misc_feature (16)..(16): n is a, c, g, or t
  misc_feature (76)..(76): n is a, c, g, or t
agatatgcgacatatnactgtctcatcatagattcttaaggtatcagggtgttctggagctgtgatcctcttggtnttaagatattgcactattccctttgaaaaaaatcaccatattatataaatggggttaaggttctgcatcaggtttttgtactgctgctggttttaagactcaggctgctgagtgcccagcctttgcaagaatccacttcaggaataatgacatcatgccttaagcggagggtacc

SEQ ID NO: 583502 - DNA, 114 bp, Homo sapiens
tcactccaatccctgcctccatctccccatgggcgcctgggtccctgtggttttacattatcttcctctgtgcatgtctatctcagtattcaaagttcccctttttatcaggac

SEQ ID NO: 583503 - DNA, 318 bp, Homo sapiens
atcccaactctaaccctatggttaggggctatcccccctctgtttgcagcagtttgggcccttacacaaaatgacatcaaaaaaattggagccttttccccttcaagtcaactagggctcataatagtttcaatcggcatcaacccaccccccctagcattcctggacatttggacccccgcctttttcaaaaccatactatttatggggtccggggccatcatccccaaccttaacaatgaacaagatatttgaaaaataggagggctactcaatgaaaaaccatgataattttttgtatataaaataaacctttga

SEQ ID NO: 583504 - DNA, 391 bp, Homo sapiens
cgccaaccggcgccaggtggtaagtaccaggaagtctgcagagttcgccggtggtatctgtcagcacttctggggtgaagccaactcggatcccacgcttcttgatttcatccaaagccaagtggtcaatgcccccacacatggtgctgatgcctttgagattggcccttacagcatccaggatcttcgtgtccacgtggtcgaagagaagccagaccagcccgtgggcccccgccacacctcgctcaagctccttgacaggaatgggctcatccaagtcccagtgctccacctcacagtctgccgcgcgggagagcgcgaccctaccctcggcgggtatcctgcgggtcacgcacaccctcatgagtcgccgcggtctcatccacagtgc

SEQ ID NO: 583505 - DNA, 245 bp, Homo sapiens
tttttttttctcctatttatctatcatgtcactggcaactgatcaagggaacatacaaaacaattccaagtgccccagatgtctctcgctggtgatcctttctggctaggcagtagtcattttaagaacaggtctaggtcatgtagtccattctaaacagttggacacaaccattctcaattcccttaaaatctcttattgcatcttctatgatttaaggggcaaataaaaataacaaaatagat

SEQ ID NO: 583506 - DNA, 1708 bp, Homo sapiens
tgggtctgggaattggccccaaagggcaaacaggttttattgggccagcagtccgggaaaatatcagcggttgggacttgtggccacacgcctccagctctcgctccttctctttcttataagtggcattaggacgtttcagaggagagccctttgggcagcatttgatgtgagcctcattctgtgccgaggcactctcagacaatgtggctctataatgtgttctccgagaaggcgcagcgcctctcaacagaagcgcgcctgtgtgtgcaacaagacacgcacaagagtgtgcgcctgtggttctcacccacggcgcgcgcagaggggcggagacaccactctcacacacagcgcctgtgtgtcggctctctcacacaggtctccccgggcggcgcgccacaatgtgcgtgtgtgtggaggtctcctctccggcgggagacccccccctgtgtgtgtgatgtgatgtgcgggttctcaccccatgagacccgctgtggcaagagggggatctctctcgccactgtgtgtgaccgccagggtgtgtctttgtgatctctctccgaaaggcgccatgtcgtctgtgtgaaacagaattcgcgcgacacacaggctccattgtgaggctctctcttgtgtgccccggtatgtgtttagtcgcggggcgccgagggtgcacttctccatctccagtgcggaggagcgtctctaagggagaggggcgcgcgcctcctcccaacacaacgtgtgggcgggaccccctcctggaagagcttcttttttgacgcggggaagaaaacctcctgtttgtgggcggcgggggctattacacccgcggcgcctcctgtgcccactcttgtggtgcgacgggcgcccaggggggtacacctctggggggcctattaaaatctatctctccctcttttccccattgtcgggccgactatgtgtgcatactcccctcttgggcgaggggggggaccactctgtggttccctattctgtggtattctctcggcgcacctttttctccactcgcggggggtgcggccccccccatttttttcccccccctaaaagagagaaggctcttttggaagtcggttcccgggggggggggctctcttctcttctggcccaccacacagccggcttcttagtgtgtgcgggctctgccgcttgttgtgtcctcccccccccaactttcgcggggcaccatatccctcctgtggggaagagaacaacccacccaaagggtccttaggagaacgaggcgtcaccttccttggggtgccccaccctccccgggcgggtgtggttgaagagacaccccaacgcgggctgttaaaaaaaaaccctgctggtggggttggcggcatcgcctgcggtggcgggagaacgtcgtggtggtgtgcttccgtcgggcgcgccgcggagagaaaccctttttagtccggcaacaacacctctatctccgctcggggggcgttgtttggacagggggccccccccagagagaagaagggtggtggcggcccgcccttatttgaggggcgcgtcctcacacaaaaaatctccctccgggcggtcgatcgtttgttcttcccccgccccccgcgacagaagaggagaacgcaccatcttgtcgatgcttctgctgcagtagagtgtagttgctgccccccgcctcgcacgctggtacgcttta

SEQ ID NO: 583507 - DNA, 269 bp, Homo sapiens
ttcggtacgctcttgactcagagaaggagcgacctgctcagtttctgcctacttctttcccttcggcttcatgtgtactaccatagttctcatcgctttcctctgtgtgagacacgcaattagggaaaagaagctctggaagcccactttgccatctctacactggtccaggtccttcattattttgtgggacagccagagggtctttttgattttccaaaaatccagggaactccttttccatgagtactcctcaaaggatttagcga

SEQ ID NO: 583508 - DNA, 868 bp, Homo sapiens
ggacgcccttccgattcactctccgctcccgttctccggctgtcctcccgttcctgctgcccgtgctgccaccatgacggaacaggccatcttcctttccgcctgagacttcgtatgaggacgggggtggaatcggcctgtctgaacgatcttcgcgatagcacagtgcacagtggacatccgtagtcagagaccgaggtctaagctgtgcatgtcttagcagtgtccaatgctactgccaagactaaggcgagaagtaccgcctgcctggagcagagacaggttagcaaagggacatcgcttggcatctggacatttgtcctggccactcacccaaggaagcaagtggttgttgactgtaaccttcttggagggagtcaatacactttgtgcaagcagattcaacttaccgcatatgcttacctccagacttcaaatcgcccactgtcaaaacgttcaggccttttccatagagtgagttacatggtagcgacatcgcagagagatctttttcccgttgtgagtgcggtgccggcttagttagccatcagccatcatcgagcttcggtctgtcgttgtgagggggtaacctttcttgcttgtggagccagatgccttgtgcccgttccctgtcctgggtctgcaggtgtcccgcagtcgggcaggaacccagttccctccttcatgccctttctgggttgtttacctcccgggctctggggatttttcggtgacatggaaaatctcgctgcggcgttgggcgaataccgtccaaccgttgggtgagagttagcgatgaggaggacacacgtacgctggcgaaggctccgcaagatagctcgtgggggttaggaccctgactttgggg

SEQ ID NO: 583509 - DNA, 434 bp, Homo sapiens
tttctctctttctctctttctttctttcttagatgaagtcttgctctgtcgctctgtcacccaggctggagtgcagtggtgcgatcttagctcactgcaacctccgcctccccggcccaagtgattctcctgcctcagcctcctgagtagctgggaccacaggcgcccaccaccacgcccagctaaatttctgtatttttagtagagacggggtttcaccatgttagccaggatggtctcgatctcctgaccttgtgatccgcccgcctcggcctcccaaagtgctgggattacaggcgtgagccactgcccccagccgagaatttctctttgcgtccttcctactttggggacttcgaatggtgggaaagagttatcaaggccaaaataaggaattcaaatgaaaacaaaacagaatcaaagaagaaaaaaca

SEQ ID NO: 583510 - DNA, 1102 bp, Homo sapiens
gagcttgtcgacgctgtcgcaggggtggatcctgatgctgcctgaagcctgccgtccatgctctccacgcgtgggcttctctaattccattgtatgtaagatactctcgtggcctagcctgtccttggaacccgcatataacggtgctgtggctggttcacggccgtgactggtgcctatgtggcgcgttaacatgtagcaacatgaatgctggctgtggtgtgctgtgcagcatgcatgcaatgccatgacaagtctcattccctgaacagctgacgcaacacatagtgcgaccctgaaatgtgcctggaaacacggctgtacttcagcagcacagaattggcgcagcacgcatcatgtgcatcatcgcagagcgaaatgctttggcaggcctccttcacgaaagcaaagcgcattgaggcacagcaaggttcgagcgaagatgaccaaaagggaccattgcaaggcaacgtcagcaacacaagcagggcaacgcacaaagcgaaggcagccacgaaaagttgcgaaagggaccattggagccggaagaagcacgaaagccaccaacgtacaacgggacactggacacggcgccaagttagacaaccacggccgaccgagggagaccacacggacggcaaagagcaccgaaggacaacagaccacgggcgacgcgtacgaaaagccagacagagcactggcaaccgcgggacagcccggcatccgaaggcacagatcaggcagacatcagacaacggcagaaaagcgaggaaacggcataccaggcaaagtcacgtctaacaatccaggaaaacgcacagaaacgattacaaaagcacaagatgccacaataccaggaaggcaaacgacgcaacaggaggacttggcccgtgacgattaagacaatcaccaaaatttgacaagcagcagaccacggacccgagtaagccacggaaacaggcgcacagaagtgattccgcagttgtcagaaagaaaaggaaacaaaaggcagagccccagtgagacacggcatgcaagccccgttaatgggacgacaatagtatcaccgcgtccccttgtaaggtggaacaaaggaagacat

SEQ ID NO: 583511 - DNA, 456 bp, Homo sapiens
ccctttaaacccccgccagctcttgcctaagatcttacaaaaaagactatttggactttcaaaaatgtcaacgaccgcccttgaggcaatcttcaaagcttgtgtatttaaggactggtagaaattagggaacaaaattaggttaaaggtttttgttctgggagccggaaggcaaaaattggggtgttcaccaaccccataaaactttttctttttttgcaccctcaaaaggcctctctctaccgaatgtaaaaggcccaaaaatatttttccaaaaatggtttttaccttatagcccccctgaaacttaatgcttatgttggaagccgggtcatcataaaaaaaatcaatggatttagcccccccaggggcccaaaagggaaaccattttctaataattctggaccatttgaccccttaggatttttggagttttaaaaaaatgacccaataaat

SEQ ID NO: 583512 - DNA, 785 bp, Homo sapiens
  misc_feature (496)..(496): n is a, c, g, or t
  misc_feature (718)..(718): n is a, c, g, or t
ggtgcgtgctcgcggtgggcggtggcggcggtgcctcgcgaaggttcgagatccgtcgcgtgcgggaggcgggccggatcttgcgcagggtcggtgtgggcgcaggctgcagcgccgcgactcgtgcgggtaggcgtctgcgctcggttggagggctcggcgcggggtttcctgttccttcttctgcgcggctgcagctcgggacttcggcctgacccagcccccatggcttcagaagagctacagaaagatctagaagaggtaaaggtgttgctggaaaaggctactaggaaaaagagtacgtgatgcccttacagctgaaaaatccaagatttgagaccaggaaatcaagaacaagatgcaacagaaatcacagaagaaagcagaacttctttgataattgaaaaaaccagctgctgtggtttgctcccaatttacaaacgggctatacggtgaaaatcagtaattatggatgggatcagtccagataagttgngtgaaaaatctacattacctttaactggagtccatcaagttcccactgagaatgttgcaggtgcattttcacaagagaggtcatttggatctttgtggtaaaggaatctaaatgggaagagttactcccatgatgtgtgaccaatctcttggaaacccaatctctggtgggaagggagttcaaaaaaagtcagactggtacagtcttatatggtgtgcaagnaagtgggacacaccaggtggattactggaccaggttgaaggctgcaagaaagagagcctttttgatg

SEQ ID NO: 583513 - DNA, 1362 bp, Homo sapiens
  misc_feature (509)..(509): n is a, c, g, or t
  misc_feature (1362)..(1362): n is a, c, g, or t
agcggatcgagatgggcggctgggaccgctctcagccccttcgaggccgtctatcctgaatagacctcgccccgtctgctacacccaagctgatggattgctctcaaagtcgacgagagaggagaggccatcatggatggcatagacgtccaggattactcacattagtggccgttctcggacagggctcgatatgttagctgtggtcgtctactccagggaatgctgatgggattgctcagcaaacgcgtatactggaggctttatgtcacagtgggggacgtactacgatcgttgtgcagatagctcgagggaagacgtcagtcgctaggggcatcgcacgaggcctgtgcagggtcggactgcaagtctcccagcggcgcatcaacttgtgggttatccctaagccttgtccctcatacaccgatgatagaagattggggttcgttggacggcaatgcttggaactccatgaatggggaattggctctgcatagtagtgactagcntggaagcggtgaacaattaggggtgtccctcgactggttagcccggaagcataagatctcggaggatcgggtggaacgtcaatgctaggagtcccacgcgtgtcgtcaatgcccatctcgcatagaggtggccattagcagtgcgttgatgcaaagcagtaatccctgtgctgaacttggtaaatccttgtgaataggctatctgcaaacttctttgggtttacccaaatttttttagctttttgacaaggtcacaggaaagttcccagagccaatgactaacacacaagtccctttgggagaaggggtgtccagttcacttacgccttcaagttcggtagcctcaagggtattcaccaaaacccaagcagttgtgccaagaacctttctcccccattggccgttctcaacagctaaacattcttccttgggcgttcagcccaagatgattgggggcggaacagggagaatataacatgggtcctatactaaactcactgtgattttgggaataacgttggattcgttccccccttttatgggtcatttactctccccttttgggtgggccagttcccgtttcacacagtttacccctttacggtcctggaaggggaaggaccccctttgggcatgtggggacctgggctgaacggcggaatactccccacaaggtttcccaccagatatacttactaggacaagcacccacccagtgggaatgaatgtgatgtggacatcggagtacagggcgagctgaggcccctaaatggaaaacgcagcaaacaacttaaggggggaggtgaaaacacacggcaccgagcattctatgagaaaatatagggcgggccan

SEQ ID NO: 583514 - DNA, 439 bp, Homo sapiens
  misc_feature (439)..(439): n is a, c, g, or t
ggtgcgtgctcgcggtgggcggtggcggcggtgcctcgcgaaggttcgagatccgtcgcgtgcgggaggcgggccggatcttgcgcagggtcggtgtgggcgcaggctgcagcgccgcgactcgtgcgggtaggcgtctgcgctcggttggagggctcggcgcggggtttcctgttccttcttctgcgcggctgcagctcgggacttcggcctgacccagcccccatggcttcagaagagctacagaaagatctagaagaggtaaaggtgttgctggaaaaggctactaggaaaaagagtacgtgatgcccttacagctgaaaaatccaagatttgagaccaggaaatcaagaacaagatgcaacagaaatcacagacgattgcacagcctcttgataatgttatggatcggatcagtcagataagtctgcgtgtctcn

SEQ ID NO: 583515 - DNA, 403 bp, Homo sapiens
ctcattcatgaactctaccagcccagagacggcttccagctgagccttggctctgaccttttcaccgacctggcggtctacctgcgggacacctctgtcagtgccttgacgacgctgtacttggcctactctgtacctacctactctagggcctctgacggggccatgaagcacatcaatgatcatgcggcagaccacacacagggcctgatcgtggacttgcttaagacccttgatgctatgcggacgtgagcatggtgaatctcatcttgtttgctaaccttgagacacgctctactcgcagatgcacccaagatcgtgacttattcgtgacctaagagactgaggtgcggtgacccatgatgagccgcgctgatcagcatgtctccttctgggccggcct

SEQ ID NO: 583516 - DNA, 575 bp, Homo sapiens
gagactccctctcaaaaaaaaaaaaatacaaaaaattagccgggcattgtggtgcatgcctgtaatctcagctatttgggaggccgaggcaggagaatcacttgaacccaggaggcagaggttgcagtgagtcgagatcgtgccactgcactccagcctgggtgacagagcaagacttggtctcaaaaataataatagtaaaatgttacattgtgcttgaagttttaaattactcatttttattaatgaagcaaaataccggtagtttagactttccaagagttaactatagtttacaaaatcttttttaagcaaaaatatgcttgatatattaagcagaaatgtggtatattaagcaaaaactgtcacaattcagccaattataaactgttccttacagacaggtgtacttgaagctctttagggatagttctgcagaactgtggctcattgaagttggcatctaagaggaaaagtgcgtaactcggtatgccttataaatttattaacaggattggcaaacttacacacttagcattttagggccagtcccttacaaaaaacacacacacaca

SEQ ID NO: 583517 - DNA, 597 bp, Homo sapiens
cctttatttatacagccaacaaatacttattactaataagctaccccagcctggcaatatgacgaaacctcgtcgctactaaaaatacaaataaaaattagccgggcttggtaggagggcgcctgtagtcccagccactcaggatgctgaggtaggagagtcgcttgagcccaggagacagaggttgcagtgagctgagaatgcgccagtgtatcccagcctgagccacagagcaatactctgtctcaaaaagaaaaaaacgtaataataataaagaaggaaagaatagatgatagatttgaggacctgctctaccaaatatcagtactacggcaagtaaaatttagtgtggcattggtgtggaatagactaaccagtgaaacagactaaagggcttagaatcgtagtcacacatgtagggaaatgcagatataaaacagaagacattgcagataaatggcgaaaggagaatggagagacaagtgaatatccacatgagacaaatgaaatggtaccttgtatccctgccttacgcgaaagataaaaatttccagtggattaaagacctaaatgtaaaagacactttgaaacctaaga

SEQ ID NO: 583518 - DNA, 140 bp, Homo sapiens
acccgcgtactagctgcgggggactcgacgaatccctccaggtcgccgagaggtattacaggaaatacaaggagctgctaaagtcctaccagtggaagatgctcaacacctacctccttgctggagcagactgaacgagc

SEQ ID NO: 583519 - DNA, 838 bp, Homo sapiens
aacggggtagggatgctccaagaggaaaatcattctacacaggggactgggtggaaaccccccccccaatcgtggctaacccaaggagggacagctggcccgcagtcagcaacaatgggcaagggacagcacaagggaatagaaaattgtcgtggtcccgccgtggacggtctgtttaatctcgagaggttttaaacatgcaggcaagctgactgtgaaggccaccgtgtgtccgagatgttacacaacaagtccaagatgacagctggtcccacccacccaggtcctctaagcacatactctgcttttctgtcaacaatccccattttggggaaaggaaaagtcatatttattcctgcacccccgttttttaacgctgttctccccggtgtgccccctcttctctgggtgtaaaaaaggggaaattgggaaaaaaattaaaaataattctccctttaatggtggggggctactggagaggagagacagcaagtccaccctaacttgttacacagcacagaaccacaggtgtctggaaaatctcatcttcgaacctagagaaataggtgctataaacaggggattaagccaaattagctggatgctatagatcttttaattgtcttaatatttttttctattattaaactacaggctgtagatatttttagttttcacaggacttctatcattttaaactgacttgtatatttaaaaaaaaaatcttcagtaggatgttttgtactattgctagaccctcttctgtaatgggtaaagcgtttgattgtttgagattttctgtttttaaaaaagtagcacttgactttttgccacagga

SEQ ID NO: 583520 - DNA, 676 bp, Homo sapiens
gcaagcagccgtaaaattccaaacgtggtttgccccctacggcttccggtaaaaatgggctggccagctaaacagaagggttcgatattgagggtgaggccatctgctgctcgaaaggatcaccaaaatagggggtgtcgtaaggttgtgctctggagcaaaaggccaatcttaagttgcaggccatttgaagttatcatggtgcttgtggcagccggaccgcaaggcaaaaggcttatgatggcatctcagtccggaaacttgagtctcggaagagccctgtagggttcaggcgcacagtaaatgagcccacgtctgtgtctggcatctattagtcctaggcttcacagggttatggcgatccgggcagtgcattatccgttctcgccatgaggaaggacaccgtgtatgcgactcggttattacgctttgataacagctgtgctgtggctgaggtatggtgtgtacgtacaggtggcttccctccaggcttgggttcagaagacgatagttgagacctaatgcaaggctgaccggaagcccttgcctcaaagcgtcatttcggcctggaacagggcatagtggacggcagtggccagcagtgtatgccataagacggagttcgaagcgggggggtgccaggcctgcatagcttagtcaatcaattaagagcttt

SEQ ID NO: 583521 - DNA, 1019 bp, Homo sapiens
  misc_feature (113)..(113): n is a, c, g, or t
agacactgaccttcagcgcctcggtcagcgccatggcgccctccaggaagttcttcgtggggggaaactggaaggatgaaccgggcggaagcagagtctgggggagctcatcnggcactctgaacgcggccaaggtgccgggcgacacctgagtgttgttgggtgctccccttagtgcctatatcgattcgccctggaaggaagctagatcccaaagatttgctggtggttgcgcagaaacgtgttaccaacggttgacttactggggcgcttaccactggggagagcatcacgccgtgcatagttgaatcaaatgagttgcggaacgccacagtgttgtgttggtctctgtgggggacacatccaggaaagaggaaggcgaattgtctttgggggaggtcagattgaccgtttgttgggggcatgaaacggtggcccagtgctctgggaagaaagaggacctcggaagagaaattcggcttggcatgtagggggacaaaggctaagatagaaaggggaagcgtctggcaatacatttgaaaaggggtgtgttatcgagaggcaggaacaagggtcatcggcagatcacgtgcgacgacgatggcgcgcaagggtcgtcctgggacccaatgacgccgtgtggtggcgcatgggtacctgtgcacagatttgaacaacgccaaagagggccaagggacgtgtacccgaagaacgtccgaggattggctagaaggccaaagggtcactagtgggagggataagacgcaccggtatcatatatgagcgctctgtgattgacacaccttggaagatgtgcacaccagcatggtggtgatgacccttggggggggggaccaacagacgaaatgtgagtcacagggacaacggcgccataatttcatagctttggagcagggaaaggaaaaccaaaggaccaaatagcgaggagacgctggccacaggcctagtgacacggggagcgccccaatattggacaggttcgcgagggagttcctagg

SEQ ID NO: 583522 - DNA, 109 bp, Homo sapiens
gagaaacactgggcacagggggaggtaactgcagtaagcccagcttggccctggagtccacgcggattttcaaagctggtcctctaagagggggctggacccacgctcc

SEQ ID NO: 583523 - DNA, 312 bp, Homo sapiens
tgtacccacatgctgacttaccaataacaaacagttgataaactcatttgtatgttatatgctatatattttttttcttttttgagacagagcctcgctccatcacccaggctggagtgcagtggcacaatcttggctcactgaaacctccacctcccaggttcaagcgattctcctgtctcagcctcccaagtagctgggactacagccatgtaccaccacgcctggctaagttttggtgttttaagtagagacagggtttcactgtgttagccaggatggtctcaatctcctgaccttgtgatccgcccg

SEQ ID NO: 583524 - DNA, 162 bp, Homo sapiens
attgtgtgaaggagtctggctgttcgctaaaggtgacctagcgctcagatagagtctattgcagtctatcatacgctggcagctgctggatcatcatcagagggacatgggtcattcagtaagctggcattatttcaatggagtattatttgtgtggtagct

SEQ ID NO: 583525 - DNA, 1011 bp, Homo sapiens
gctggcgctgaggaggcggcgggtggctcccggggcgtttgatcggtgctcacccgagcccgtcgggccatcgcggatccaggccctgattgtcgtgacctgccccggattccccgcgggccttcctagccgccatggacggacggtgtctatgaacccccagatctgactccgtgagtgagcggatggcagctggctgaacatcctgtgcggctggtcgcatgagctgttggttggatgattcagtgcctgcgaggatcgagctcagtgaagccatgatgctgaagtgtacggggacctggagtgccaactgaccgtccagaaaagaaccattgatgatggtacacctcgacatggaattggccattggaacacgcgaacgaaactctacacacgagctgagaccaccaaggacaagagagggatccactctcgcagcgacgattttacaaacgtgcaccctgcgttgatgtgtaaacaacaacatcccacgtgagcgtaagcagtgggtacctagcagaaacccttggttagcacatatgctcaggaccgcggaccctcaataaacgagagaaagaacgacaatgcgaagaaccaccgaaacaatgggtaagaacaccgagaaagaacacataaacacattggaactgaatgcaacgaataagacgtttatgactggaaatactgtacatcgaagcttcaatacgatcccattaacacgtaatgaacgcgagaagggaccactcacaactggcagtcaatgatcaaaactgcaacccatcgcagtcggcaagcgacagagaacaagaggacccacacaaaagggagatagaacacatgaggagatagacaggcgcaaggaacaagatacagaagcaaacaaggacaaagacgagcacagaaagcagtaacaccaagagaaagtataagaaaagaaagtgcaaagagcacagaaaagcgagtcaagaagacaagcaacaaaacaaacaagaaaaagaaaagacaacgaaa

SEQ ID NO: 583526 - DNA, 295 bp, Homo sapiens
aaaaaaatttgaatttttccaaaacgggaaacttggggggtttggtttatatttcaagcccatttttttttaaggcccttgataaaaattttttttttccccacccaaaaaggaaatttttttgtttttgccattttcagggggtttcattggttttttaacttttcccccttgggggttcccttccagttttttcagcccttttaacccctccgggttttacattttccccacccaaagtttttttgggtcttttttttttttgtaataaaccacccgtaaattaagggggtta

SEQ ID NO: 583527 - DNA, 326 bp, Homo sapiens
  misc_feature (10)..(10): n is a, c, g, or t
atgtgcatgncccagttgttcagcacccatttattgaaaagatgattccttgtccattgaaatgcctttgccccagtatgttcagtgcaaagtcttttttgccagcccatctatagatacataatagtatctctgtggttaattcctttattttaaaatttaaaatctgataaactttaaccttggttattgctttttgtcgtgggacagttgtaaaccttttttggcttttcttttaccaataattctcatactgcatgtgctaaatgtcacaatccccccctttctgtttactttgaaagtgtgaaaatttttattctagtttt

SEQ ID NO: 583528 - DNA, 1215 bp, Homo sapiens
gtctagtcatgaggagctccttagcgaggcgtacggatagtcactttacgccccggcccgtggtcaatcccaaagccttttcgactgcaggatcatcaggttcggatgagtctcatgtggctgctgcacctccagatatatgctctcgaacagtgtggcctgatgaaactatgggaccctttggacctcaagatcagaggttccagcttcctgggaacataggttttgattgtcacctcaatgggactgcttcacagaagaaaagcctggttcataaaactttgcctgatgttctagcagaacctttatcaagtgaaagacatgagtttgtgatggcacaatatgtgaatgaatttcagggtaatgatgcacctgttgaacaagaaattaacagtgcagaaacttactttgaaagtgccagagtagagtgtgcaatacaaacatgtccagaattgctgcgaaaagattttgaatcactgtttccagaagtagctaatggcaaactaatgattctgactgtaacacaaaaaactaagaatgatatgactgtttggagtgaagaagtagaaattgaaagagaagtgctcttagaaaagttcatcaatggtgctaaggaaatttgctatgctcttcgagctgagggttattgggctgactttattgacccatcatctggtttggcattttttggaccatatacaaacaacactctttttgaaactgatgaacgctaccgacatttaggattctctgttgatgaccttggatgctgtaaagtgattcgtcatagtctctggggtacccatgtagttgtagggagtatcttcactaatgcaacaccagacagccatattatgaagaaattaagtggaaattagcagaaatatccattcatttgctgtactatttgtatgtaatatttgggttgatctataaacactgtcagactaaagtttttaaaatatacttatttctaagtatttatttcagcatttatgaatttgcaacattggcaagtgatttgggattttaaaattgcaaatgttcatttattcatatcattgaatacacgttgaacacatccacattgtataggatgtggtaattagcttgtaaccagggtatgatctgctattgttatttctcctctttattggaaaaaggcctcagttttaattattttcttcccaaaataaatcacacatttggttacaa

SEQ ID NO: 583529 - DNA, 717 bp, Homo sapiens
cttttctgaaacaagatagtcacttaaaattttatttaaaaataaaacaatctctagtaatgctatcttaagcatattatttgtgacttccattgcagttcatcaatggtgctaaggaaatttgctatgctcttcgagctgagggttattgggctgactttattgacccatcatctggtttggcattttttggaccatatacaaacaacactctttttgaaactgatgaacgctaccgacatttaggattctctgttgatgaccttggatgctgtaaagtgattcgtcatagtctctggggtacccatgtagttgtagggagtatcttcactaatgcaacaccagacagccatattatgaagaaattaagtggaaattagcagaaatatccattcatttgctgtactatttgtatgtaatatttgggttgatctataaacactgtcagactaaagtttttaaaatatacttatttctaagtatttatttcagcatttatgaatttgcaacattggcaagtgatttgggattttaaaattgcaaatgttcatttattcatatcattgaatacacgttgaacacatccacattgtataggatgtggtaattagcttgtaaccagggtatgatctgctattgttatttctcctctttattggaaaaaggcctcagttttaattattttcttcccaaaataaatcacacatttggttacaa

SEQ ID NO: 583530 - DNA, 443 bp, Homo sapiens
cgtggacgtgattcgtaaagctgaatatacacccagaacttctacttgggaaattgcgacagaaagtgcatgtgttcaccactgattaccgtgtgtgcatcctctacagactcctgggagacagcaagatgtccttcgaggacatcaaggccaacgtcacagagatgctggcaggaggggtggacacgatgtccatgaccctgcagtggcacttgtatgcgatggcacgcacacctgcaggtgcaggatatgctgcgggcagaggtcttggattgagcggcaccaggcccatgtgagagatggccacgatgctacagctggtcccccttcatcaaagccagaatcatgtgcagcacctaacgacttcaccccatctccgtgacccctgcagagatatcttgtaacaatgccatggagactacgagactacatgattcctgcca

SEQ ID NO: 583531 - DNA, 154 bp, Homo sapiens
tcacaacattttattgtggtaaaatatcacaccaaatgtgtcatttaactgtctatatagttcagtggtattcagtgccttcataatgttgtgctaccaacaccatcatccagctccagaactttttcatcttctcaaactaaaaatctgtact

SEQ ID NO: 583532 - DNA, 296 bp, Homo sapiens
  misc_feature (276)..(276): n is a, c, g, or t
  misc_feature (281)..(281): n is a, c, g, or t
tttaaaagaaatcttcgaaattatcatctcgtttcacgttaattaactgagcccgcggtcacaaagcttcgcaacggcaaagcaaaagcaagattcatgcctttcaactttctcactacccaagtagcaccgcaagccgaatccgcaggcagtgcaacattgtttgctactcttgcgcagaacaaaaatgctaatcactgcaactgctttacatgaaagtgcacctagaaagacttcaaaacccagaggtacattaactttccaggcaagttcctnccagnctgtgtgccacgagc

SEQ ID NO: 583533 - DNA, 409 bp, Homo sapiens
tatatatcacacatatcatatgtatatatcatacatatgtatatatcatacatatctcatatatatcatatatatctcatatcatacatatacatgatatatatatcataccatatatgtatgatatatattatatatgatatatgtatgatatatgtatcgtatatatgatacatatatcatatatatattatcaaatgttatatatatattttatatatatatatatttttagtttttgtagactaggtctcactttgagaccagcctggccaacgtggtgaaaccccgtctctactaaaagtaaaaacttagccgggcatggtgatgggcacctgtaatcccagttactcaggaggctgaggcaggagaattgcttgaacccaggaggcagaggttgcattgagcc

SEQ ID NO: 583534 - DNA, 213 bp, Homo sapiens
  misc_feature (130)..(130): n is a, c, g, or t
  misc_feature (134)..(134): n is a, c, g, or t
  misc_feature (152)..(152): n is a, c, g, or t
tggattgtctaactcatactggagccacactgaacaaaaaaattaccccctgcaatctactcttaactgatagtcgctaactttggttatgtgtgtctattcagaatattacattaattgatttctcaancaanggtcctttctgaaatggnatctatgattcagctattcaaaacctaatgaaggtggtgactattacaatgtggagaaatc

SEQ ID NO: 583535 - DNA, 569 bp, Homo sapiens
  misc_feature (295)..(295): n is a, c, g, or t
  misc_feature (312)..(313): n is a, c, g, or t
  misc_feature (344)..(344): n is a, c, g, or t
  misc_feature (355)..(355): n is a, c, g, or t
  misc_feature (438)..(438): n is a, c, g, or t
  misc_feature (467)..(467): n is a, c, g, or t
  misc_feature (523)..(523): n is a, c, g, or t
ggtagagacagggtttcgccatgttgcctaggctggtctccaacctggtctcctgggctcaagcgatccgcccgcctcggcctcccacatgctgggattccaggcgtgagctaccgcgcccggcctatttacttttcttactaagctggggatcaccgtcgccctcggcttggcaggaaggcgggggtgcaagaagaaaagaggtacagaacacccagaggtgccctcgattccgtcttgcacttgccttctcccaccgtccagcaataaagcgagagaaacaagtgcaggaaantgggccgggcatcatgnnagaagccaaaaagacaagcctggggagccgnggggattccanaagcgggggctcctcttccgcactttggtagctgcgttgctccgttccatgccctgccttcagccattcctcctggttaccangcaaaaaggaaaacacctttgaagctggncaaggagtaaccagcgttctgtctactgggaatggggtcttggctctgttgtctanggcttggaattgcaacggcatgatcttcggcttgcagccccgtctt

SEQ ID NO: 583536 - DNA, 114 bp, Homo sapiens
acaacaactccatgtatgacctcaaagcctccccaggtggactcccctgtggggcactacaaacggcccagcagttgactcaagaggccacggtggcagtggctggtcctcatc

SEQ ID NO: 583537 - DNA, 712 bp, Homo sapiens
  misc_feature (5)..(5): n is a, c, g, or t
  misc_feature (11)..(11): n is a, c, g, or t
  misc_feature (14)..(14): n is a, c, g, or t
  misc_feature (105)..(105): n is a, c, g, or t
  misc_feature (122)..(122): n is a, c, g, or t
  misc_feature (135)..(136): n is a, c, g, or t
  misc_feature (143)..(143): n is a, c, g, or t
  misc_feature (149)..(150): n is a, c, g, or t
agggnttccgnttnatgacgcctttaccctacgcatgcagcagtactcttcgatccaccaaccatgtgccgcccccaacgcatgtgccgctccctagtaatactngtttctagggagcggcncatgcgttgaacnngggggantttttnnatatttaaagtctctccccataaaatcctatattttaaatcttaataacattatcctttatttcttttctttatactttaatttttctaaaattttatatctatttctcacaaatttcttttttttcttcacattatatttctctacttttcttttttaaaatcatttctactattattttcttaacttcctctttttatatccaatattttacatactttaatataatatttagtattattctatttatcttactattatatttcttatactaccttttttattctttactttttatttctatttaattatttcttttcatatcctcttaaactatatctaattcttattcattttatactttctctaaatttatttccttctattatattttttatttttttaattttctatcaatactttttttttcttatttctttcttcttcctcttttcttacctttcattattttactcttctttattcttttattttttttttctaatttctttattttattattttatatatatttatttatttattttttttttacactacc

SEQ ID NO: 583538 - DNA, 545 bp, Homo sapiens
ctagcactaatttagacaatgaagctatgcagcaagattgtgtatttgagaatgaagaaaatacccaggtaaggaatgtcaaaaatatgtgttagatgtacaactttgattgcttcatgtgtttctttgatgccagaagttatagttcagtattttgctgatacacttaattgtctcaattataaatccccaagaatatacattgtttcagagtttaggaaacatcactgggtagagaagtataaaacaacttattggctgggtgtggtggctcacgcctgtaatcccagcactttgggaggccaaggcgggcagatcatgaggtcaggagatcgagaccatcctggctaacatggtgaacccccatctctactaaaaatacaaaaaaattagccgggcgtggtggtgggcgcctgtaatcccagctaccggggaggctgaggcaggagaaaggcatgaacccaggaggcagagcttgcagtgagccaagattgcgccattgcactccagcctgggcgacagagtgagactccatctcaaaaaaa

SEQ ID NO: 583539 - DNA, 204 bp, Homo sapiens
tctagagtatccccgcgcgccccagcttctcaagttatgataattatttatattactgctgttatagaaatgatctagacctaccgactattggatgattcatgctcgtgtactgtcatcggggttatctcgagttacgtccggtcattccggataggccgataaagtgttttgtgttgatagtttggataagctttggcgccg

SEQ ID NO: 583540 - DNA, 795 bp, Homo sapiens
tggtcctcttaaaagttatttataaaccagtttcataggccacaagggatataaaagggatctatgttacagcctttaggggaaaacaggcagggaagcttgaggagggccaaaagtgagtctagggcctggggggcgcattcccgggggagggggccctcgaatcccagggggaaggaggccgaatccccggaggggggcattgcccattggagagttcccttctttccgggggggatctccccattgggggggacccatataggaggtctcaataccaggatggtgtgggcccattcattgcctgtggaaggggggtgtgccacccatggggaccaaaaatagggtgggggggaagggacccccaagggccacaggggtgggtcaaacgtgggtctgtggagccccccgggaaaaatagcgtggatgtggtgagaaaaaaagtgttgaaagagagagtgtgcaaaaaaaagtataacattcaataaccaatgtaggggagagctaaacataaacctgtgttagtgagaaatttagggcccctgaaaaaccacacaagaggaatagtgagtcccaaagaaaagtttcctgtgaaagaaaccccggtgggggcaaatgtggagaaaaccccccaagctgtgggagaaataacactacgtggaacaaggaaagactccgtggagaaaaactccctgtgggggacccccggggtgaaagttctcccaagaagagtgtggacaaactgcgagagacaatatcacagagaaatccataggagcaaaggagagagcccca

SEQ ID NO: 583541 - DNA, 112 bp, Homo sapiens
  misc_feature (1)..(1): n is a, c, g, or t
nacttcctggttcaagaaggtgacatttttacaggtcatctcttcaggcaaaatttcttataggggaaggagtctctgcccttgctttaaggtattattttagataggggtt

SEQ ID NO: 583542 - DNA, 956 bp, Homo sapiens
gggcctggacttgtgtgagcgtgtggacagatggtggccgcgctgtagctcgtgctcgtgttgcctacatgtttcctggctgtagaggcgctgcttcatgctgcaccgcctccacttgatctcgagtacgcatgactccttttgacactttatcagaataaatatggatggcgagctcctaggcctcgtggcttcctgtgtaggaggcgcggcagtgccgaaacggaggtcgtgcgtgcggtgtggacttgggactgctgggagtgtggcgggttggaccgctgtctgtggcccacttgggcacccgactgcttctgtccacttctggttgccaggagacagtcaagcatagccaggcaggacatgaagttgctattagatggagcgttcgtgatttaggttatgcagctaaagtttgctgtgatttaagcaataaaattctgttcagcccaaggaagagaacaagaccacaacaaaacacacacaaaacacaaggggcaaaccaagatacaatagactcagagagggagcgtgcgcagacactccggggactatctcacgcctggagcggggcaccccgagaccattggccccggatacccccgcgcacgggggttccttaaggtgaccaccagggagggaggcccccaccaaaggttcgagtcgagcgggacgctgaaagcacggacacgagagctgcgcgggaggccctggccggactaagaacgctccgcgaatagcgcgcgcggaagacccacagtgtgcacccgagagcgtgcgtgatccagggcagcggtgacgggcaggccaaacacccccactaaagccccacgtgggagaggcccccgtgcaaccaaaacccggggggcagtggctccgaacacacctccaccccccaagcgagtacatagcttcccgagacctcgcgccagcacgcccggcgaaaactccagagt

SEQ ID NO: 583543 - DNA, 189 bp, Homo sapiens
accccctcaatgctacttgcaaacttagaagtttatagaatgtgcctcaaaataatcttgctaaagaactcgagactggtctgattacataaacactaccgtttagcatggatcgagtgttgtccccatggttattaacccttcgcacttttgagctgaacctcgtatctccttcagggtaccgagctc

SEQ ID NO: 583544 - DNA, 312 bp, Homo sapiens
tagaaatcagcagacatggagcgtgcatatgtcatgccagggcctccatatgtcatgaactatggtcagggaggtccccaactcattatctcagcccatgtggcaaaggatgcctggcttacattgagtttgcacagcacagagcttagacctaagagacaccttagagtttaccctggctaccttacagatgaggacactgaggctcagagtggcactgggctcattctaaacataccctctgtgccaggcactgttgcctccaaatcccttctctcttgtacacctccactacggaggcaggacaagcag

SEQ ID NO: 583545 - DNA, 677 bp, Homo sapiens
ggtgccccgcgcgccggcgagtcgctgagccgctggctgccggacgggacgggacctggctagtgctggtgctgcgccccccgtggccccgccgtgggcattggctgcactggcccggtgccgctgcatgcatgcctctgcatggcccagtgtgcatcctgactgctgccgacccgggagcttggccccccgcagcacttcactgcattgacccatccgtggtggcctgcggacacggaaccagagtagttgcgcccaccaccgggaccctgggaccccatgccgagcgccactggccagacagagcttaggcagcatctgacacatgagcaagccattagaccatgtgaccgttcccccacagactggtgcctgctctgccaaacgtttcattggcccactgggatacgaacaaccattgcatgggagggacatcatgggccaagcggcataccttacccatgagatgactgcttgattcggggaagccccacccgcaggaaggctacagaattcctccggttgaacaccttggaaaggcaggtaaccttttgcccggtgagcaggggaacccccagaaacattcctaccataagaaaagcgtaccatattggacacaagaggcagggtcttagccaccaataaccggttcacaaggggagctttggagcggtcac

SEQ ID NO: 583546 - DNA, 200 bp, Homo sapiens
tgtgagaactagatgggctcaacagctggaggtctagtccacttatttttgctctgataggctcatcgccggtttcattgagaagacacgtgcggatcagggcttctgtcaccgaacaggggtcgcagtttgcagagtgggctacgatcttctagagtaacccttcttctcctggccgacagtccgggtaatgcgtatgc

SEQ ID NO: 583547 - DNA, 125 bp, Homo sapiens
tcgaccatgtgcagaagatacctaggacacacgcatcacctggtgcctcactgaaccctgatggctacgaggtggcagcgcagatgggctcagagtttgggaactgggcgctgggactgtggact

SEQ ID NO: 583548 - DNA, 287 bp, Homo sapiens
  misc_feature (134)..(134): n is a, c, g, or t
  misc_feature (186)..(186): n is a, c, g, or t
  misc_feature (282)..(282): n is a, c, g, or t
agaacgtcttccccaaccagactgaaggcaaaaggctcctacaaacccctggcttcctaaaactgctcctgaatgcccctccaaaaaaccccaattacctgcccctccctaaggaacaaccaggaccccatctnccacccccacagcagtgacccccacccagggccaggcctaaaaggcttctgncagcttccatcctacccataaccccaacttggggcaaaaaaaacccatcctaaaggctgggcccatgcaagggcccacctgaataaacagaattanctgca

SEQ ID NO: 583549 - DNA, 209 bp, Homo sapiens
gggggtttgggcccttaaaaccccccccgggttggggggaccccttaaagccaatcattttttcccttttttgggacccccaggggccctgttgccaaggggggaaaaactcctaatttaaatgtccccgccaatgtcctagtgttggctaccccaatgttgatgccaccccgttggaattattaaaccgatttttttttttttggcca

SEQ ID NO: 583550 - DNA, 294 bp, Homo sapiens
gaactagagtctttgcagatgtcaatgaattaagatgaggttgtggccgggcgcggtggctcacacctgtaatcccagcactttgggaggctgaggcaggtggatcacaaggtcaggagttcgagaccagcctggccagcatggtgaaaccccgtctctactaaaaatacaaaaaattagctgggcatggtggtggcgggtgcctttagtcccagctactcaggaggctgaggcagagaactgcttgaacctgggaggtggaggttgcagtgagccgagatcacaccactgcac

SEQ ID NO: 583551 - DNA, 300 bp, Homo sapiens
cacgagggcgacaacgtgatgaagggctacgagaacaacgagaaggccaatgccgaggccttcaccaagcagggctggttccgcaccggcgaccagggcgtgctctcgccggagggctacctctcgatcaccggtcgcctgaaggagatcatcaaccgcggcggcgagaagatctccccccgcgaggtggacgaggttctgatggaccacccggcggtgtcgcaatgcgtcaccgtcgcggtgccccacgacaagctcggtgaggatgtctccgccgcgatcgtcctgcgggagggggtc

SEQ ID NO: 583552 - DNA, 144 bp, Homo sapiens
ttgttatccgctaattattttgcgccatctaagctcttacgaatggggtgactacttatgatacaaaactacagctagtgaattatcctatttgtaaatacctttgttatattgtattccataaatcttggacacgaatgttca

SEQ ID NO: 583553 - DNA, 505 bp, Homo sapiens
gttaggtgaggagcctaagtgtcgaggtgatgagagatcccaacgggaaatcgacaggtcgttaggcttggtgagttaggaataacacgagatatgccaatgaggctgtggaaggagatgaatgggtaaagacactaagtgtgtaacacatactatattgtggtaggccgtgctacaataagaacgtagaaggggtcatgggcagtagttgaaaagtggaagttgagaagtaggtaagagaatagggagagaattgagatctgatgtcatgggggttgaatctctacattaggaagttggatgacacgtatgggatagatggagagaattaaggaaagaatggtctctcttttggatgtagtataccatgtgctagaaggtatatgctgggaggatggaaagatagcataagggtttgggcttggtctgattctctatctccgtgtaagtaagcagacacagacagtcggtcgactgcagaatgatatggtactgcattaggtag

SEQ ID NO: 583554 - DNA, 777 bp, Homo sapiens
  misc_feature (31)..(31): n is a, c, g, or t
  misc_feature (39)..(39): n is a, c, g, or t
  misc_feature (112)..(113): n is a, c, g, or t
  misc_feature (240)..(240): n is a, c, g, or t
  misc_feature (269)..(269): n is a, c, g, or t
  misc_feature (291)..(291): n is a, c, g, or t
  misc_feature (371)..(371): n is a, c, g, or t
  misc_feature (408)..(408): n is a, c, g, or t
  misc_feature (431)..(431): n is a, c, g, or t
  misc_feature (496)..(496): n is a, c, g, or t
  misc_feature (523)..(523): n is a, c, g, or t
gggagctgatggcataacgtgggggttgagncgctcgancgcaaagcggcggagcgggtcggaggttgcgggaggagcagcagagggagcgcctccgccaggtgtcgcgcannctgaggaaggctggcggctgtgagcgcagcgccgagtgagtggcctggctgctggcctgagagcgcggacctggtaacggagctgcagggccggagcctggtggcgcgagggcctgaagctggctgngcagtgagtgaggttgtgcgactgacccntgaggaggagctgcgggggaangtgtcctgggagcttggccagctgcctgtcctggaactgccaaatacttggtcgtctacacaggcgcgggaatcagcacnggcagcgtctatcccatgactacctgggggccctaantggagttgtggacactgcttcangaaagggagaagcgttagttgctgcctgacctgagctgaggcctgagccaaccctcacccacatngagcatcacccgtcttgcatgagcagnaagctggtgcagcatgtggttgtctcaggaactgtgacgggctccacctgaggagtgggctgccgcgcacggcatctccgagctccacgggaacatgtacattgaagtctgtacctcctgcgttcccaacagggagtacgtgcgggtgtcgatgtgacggagcgcactgcctccacagacacagacaggcggactgcacaagtgtgggacccagctgcggggacaccattgtgcactttggggagggacgtggg

SEQ ID NO: 583555 - DNA, 145 bp, Homo sapiens
cagacagactgggcaagacagacactctgggttgtcaatttctggggagatcgacaagccagattacaagggcattggatccagtccagagaattgacgaagcgcagcgtgtcttgtcttggcccaggagtgtcttgtcttgggt

SEQ ID NO: 583556 - DNA, 283 bp, Homo sapiens
  misc_feature (66)..(66): n is a, c, g, or t
taaattttttttttaatgccattttccaaacggtaaaaaaagttcttccaaaatgcagcccaaaantgctggggccactggccgtcctgcatttttggtttccaaaccccaaagcctcccattcggaaggatctttggggttttaaactgagtgggcctagggtgccccctattttttattttccccggtggggtgctaaaaaaaaaaggggagggccatcggggatatggactaaaacttttttattaaaaaaacttttccccaaggggcctggggagtgga

SEQ ID NO: 583557 - DNA, 1042 bp, Homo sapiens
cggcgattgcggctgcgccggcttgaaacactgatcgccaccacgctgtacgcggtgtggagcaacgttcgttgttgtcgctctactttaccgactgtaacctccgcgtgcagtgtgtggcccctggttcccggcgcatgccgtgctgacctgcagacctgtgcgcctcacgtctttccttcctgtggagaaacctaacgctgcatcacaccctgtggccgtcgggactacatatgtgcccgtccgcggtgcagtggcaggggccggggaggagggggtaaccggaatggactgtgccgcggagcggccagtgatgccctcttggcggacggatccatcgggaaagtgctggccccaccgtgccatgctggcccccaggcggaaacggggcggcctccagcatgtgcccacctggcccgtcccacgcacggcttcactggggccagctgccctgtggctgtgctctccagcttcctgacgccggagagacttccctaccaggaggcagctccagcggagaccttccagcccgcgcaggtcggcgacagccttcgggacccacactggctggaacctgctggttcccgggctggcagctgaccatcccagtaggcatgggatgacccacgaagtcaacctaagcctgacgaaagtcgatggagcaccgtctgcatgtgacgctcatggagaaaccatgtccaacggtctaacccaaagagggctgacacacacgcagccactctccatgacttagacaggactggctaggacaacaaagaacccacgacacgcctcacacttccaactgacgggaagataccacctcacactgagctccacgacgagagccacacaacagccacaaccactcacttagacacctcacataaaccctaacaaaaaaatcatcccacctcaacacctcgaccttaccataacattctatcccacaccacaacacaccacaacacccactaccatacaacaacgaaccacactacctcccaaatacaacaacctccaccataaacaacaacaatcg

SEQ ID NO: 583558 - DNA, 543 bp, Homo sapiens
ggatgggggtggtaagaatccaggacctgaattcccagcctggccaacccttgcagctgtctgctctcaagaggagcaagagccccttgaggccagcagggttgggggagttggagtgacctgaggttcttttctgttagagccctggtcctcctatctccaccacctatccctgctcagtagaacccctgggtgctaaatggcaggagccccggggtgtcccataggggtatggctggctgggtcactaaccactgtgatctgctccctccctctacagatcatgcggatcaaacctcaccaaagccagcacataggagagatgagcttcctacagcacagcagatgtgaatgcagaccaaagaaagacagaacaaagccagaaaatcactgtgagccttgttcagagcggagaaagcatttgtttgtccaagatccgcagacgtgtaaatgttcctgcaaaaacacagactcgcgttgcaaggcgaggcagcttgagttaaacgaacgtacttgcagatgtgacaagccaaggcggtgagc

SEQ ID NO: 583559 - DNA, 183 bp, Homo sapiens
gatcgttcagcgttcatgtacctggtcaataggggcatagacactacctcaaggagtgtgaaaggattaaatgaggccgggcatagtagttcacgcctgtaatcccagctctttgggaggcagaggtgggcagatcacttgagctcaggagtttgagaccagcttggccaacatggtgaaacc

SEQ ID NO: 583560 - DNA, 788 bp, Homo sapiens
gatataaggcagcggtaattcggtgagcggtggtggttgattcttccgtggagttagggggctccgtgaacatctcagagtcttcagggttcttccatctgggaaactatgtaagagtgcagaaaagatgttcgtcgaagatatgactccaggaccacgtatattttctccagaaggtcagcttataccgagttgaatatgccagtggaagctattgcgacatgcaggcccgtgtttgggaacttcttagcaaagtgatggtgttgtggctgtgcagcagcaggagacgcaacatccacaaggcttcctttgatgaatgtcttttgttgtctggaataaacatttgataaatctcgagttgaggaacttggttgtgcagtgtggcaaggcataacttcgtgattgctaatggttctggactaatgaagcgaaggctctatgggctcaaaggtatttatgtgacaggtcatcaggagcgaataccttgtgaagcatgtgtggttacagcgctgtgtgatatcaaaccaagcttatacaacaatgttggaggaaaacgtcccttttgtgtttcatttgtctgtacattgtggtgggataagcactaatgggtaaacagctctatcagagtgacctaggtggaaacttacgggggatggaaggccaaatgggtgtggaaataatagcgtgcacgttgtgtcaatgtgggaaccgggactaataggaagggggaaattgacttgagggtaggattgtgataagtttcaaagttctaattagaccagggtgta

SEQ ID NO: 583561 - DNA, 140 bp, Homo sapiens
gtaccaccggaagcgagttgcgacaaggcaggttaccgcaccggaagaagcgaacaaagcgacttaggaacggacaacaatggtacggtcggggaataagacaactttttactatatattgacgtagtctttaacataat

SEQ ID NO: 583562 - DNA, 388 bp, Homo sapiens
cctctgtctcctaaattaaaatcttctgccactgcatagctactgcggctgctggtaccgccatagccacctggtttcgtggttatcgcaaagtatcggcctccaccgccataggggccagagccttctgcgctccaagaatttcctcccttcatgggtccaaaatttgaagactgaatagtcgtaattcccaaaatcatcgtagcttccaccatttttcaaaattgcttccatcattaccaaatccattatagccatccccactgccaccaatatccaccaccaccacggctgccaccaaagccaccacgaccactgaagtttcctccacgaccgaagtcgtcattcccaccgaaaccacctccacgaccaccaccaaagtttccag

SEQ ID NO: 583563 - DNA, 378 bp, Homo sapiens
  misc_feature (159)..(159): n is a, c, g, or t
ggccttttttggggaaaaggcggggtatttcccctccccaaccctaactgttccatggggaaaccctggagccatccctttggagccaacaaggccgccccaggggtatagcagaaagaactttaaaagccaggagggtggacgcccagctccgcctgntgggaaaagctcccctccccaactgcaggttatgcataggacttccgcagggccggactccccaacttgccccatgttttaggtttcaacaacaaaactgccaggtgggtgggttttgcctttaacctgggccaaaaggaaattagggccaaggagctttccccaactgtggcaaccgtccccggccccccccatggaaacaataaaggtttttcctta

SEQ ID NO: 583564 - DNA, 296 bp, Homo sapiens
  misc_feature (262)..(262): n is a, c, g, or t
aagaaagtgcaaaaggcagcagcacaagacagagtcaggaactttttgaaaggaactctctctggcagctgcttcaatcttctttctctagaggtagtaagagggggctggagatctattcattatcttttaacaatggacaaagagaagcctgtctgctgcgttagtcattgcttggaggtccccgacttctgcttccactactgctctctacccgcaaagtgacttctctttgatggctatttattaaaatgggaatgtngaccctccagctagggcagggctggggggcatgg

SEQ ID NO: 583565 - DNA, 409 bp, Homo sapiens
gaaagaccccattcaaacctgcctctctttaaagcttcagtcatgtttacagttgcattaagcaattcttaccactcttctggctgggtattctaggattccatataggtgacagcttataggaaggggcatgggagctttcaaatgtggcatttgaatcctgactctgcccccaaataggtaactgtggctttcggcaggatactggtccttagccgtgcccagttttccatctgtacaaaggtgttaacatgaagattggatgcatgtagttggcatgaaaccttgggggttccccctgtttcttcccgttctgcggtccaggcagttagagtcacacgatgatctatttggccggaatcccgtgctttggtacttctttctagaggtctgttatgccccttgggcg

SEQ ID NO: 583566 - DNA, 434 bp, Homo sapiens
cagattccattgcgtgtctcttgttgttgcgggcgtcatagaaccggggccaatagatgggatggagctgcctgcctggcccatggaggccagtacgcctcaaagatcttggtcaggtctcgagccaggcagctgcagttgtacatgaccacgcccagctccttgacctgggtcagtgaacgccagtccatgttggcactgcccaggtagaagtgggtctggtccaccacccagagcttggtatgcaggacgccatgggtcagctactgcatgtccaccatgcggacctgggcaccgctctgcagcagagcctgcaggtccgcctgtggctagggcccgctgggcttgctcacagcgatacggacgttcacgccctttggtgccagggtctgcagctgccggaggacctcctcaacctgcagggcagagggctc

SEQ ID NO: 583567 - DNA, 1284 bp, Homo sapiens
gacgggtccagctggtgtgtgatctgctcgacgcgtggggtgtgtttgtcgcgcctcggtaggtcatgacttggcgttgtcccacggtgggtgggccccccctggttgacgggggggccccccggcttgtggctgtgtacccgggcgcagccagtatgtgtgggtgtgtgcccttggggtaggccccctttctcggggcaagtgttgttcggggcacccttgagccctgtggctcgttctgtcctgataggtctcggccctctcccgtggttgccgtgggcccccgggtttctggcccaccgtgtgccccctgtgtttgcgtttcccatacgatgcaagccacttggcccttgcccgtgttgtgtgcgccccccacgggtgggtcccccgccccacaatgtgggccacgtgggccccctccaaggcgccggaatggccccttctaagtctccccccaattgtgtggaggccccagggcgcgtagattcccgtctaatataggtgaatggtgtggtcttggtcccgcccccactttactcgcccggtgtggattttcccacccctggggggaaattgaggggctggcgctgtcggcgggcgttcttgcctggggccccctgaggagccacttcccacggttgttgcccaccacactcaacactcgtggggatgggcgaaggggtggccgctgggcctctataccccccatgaggggctcgttccacgggcttctggcacacaccacagctgtgcgtcaccccacaaatattctcgggtgtggcttgtgtgtatgaaagctataacttgatatagtgggagagcccttccacaggtggaagaggttgaagggaagggggcctgccacgtgttcacaggtataaagatttctcgggcaagaccacgaacgtatcacgcctttggaaagggccacgcggggaacttctaaggcccaaggagatttaccacgcttgggaaaggaaggcacgtggcccagaaggggtgaagggaccacggggcccttaaagtccacgcgaaggaaagcctccgttgtgggccccctttaacgctccgtttcggggtaacctggaacgcctcttttcccacagctccctccacgccactcacgcacgccttcttgtcaaagcgttttgcctcgccccacgtttaatccccacaccccccaagtcaaggccacccttttttcacggtcactatttattttttgttcctttttttgttttgtaagaaaaccattccaccaacccccgggccaaaacccatcca

SEQ ID NO: 583568 - DNA, 215 bp, Homo sapiens
  misc_feature (201)..(201): n is a, c, g, or t
tctggttagatgtgaaattacttctgccgcctctgacgcaccactgccaatgctgtacgttctgcatttgcccctcgagccaggtggatgtttaccgtgatgttatatcacttcctgggctccttcactgcatcatgcctagatccaacattttttcctagatgagtcacatcctgggtatccagctgaaactcccacgtntcgcggggttaccg

SEQ ID NO: 583569 - DNA, 617 bp, Homo sapiens
  misc_feature (273)..(273): n is a, c, g, or t
  misc_feature (316)..(316): n is a, c, g, or t
ttcgtgtcgcgtgcagtgtcagctgtctgatgctggctcagcgatctgctactcagctccaagtgtagatacaggcatgacgcacagcactgacagaattttatgatagctcgacgttttctcatattcagtaggatcgagaccactgcattaagatattactttttgtgccaaacattacatagccagatcacataatgaatgtctcagagaagagttctagtaggaaactggaaactccacaagcagaacgatcaggtccttacttttgtntggtagtcttttcttttctttttttttttgagatggagtctcngcccatcactctggcatgatttcggctcactacaacctccaccacccaagttcactggaacctccactcctaggtaaaagcgattctcctgcctcagtctccccagtagctgggattacagatacccaccaggcctggctactttttgtattttgggggggacagggttcaccatgtggccaggctgtcttgcactcctgacctaagtatctgccatctcagctccagagtgtagtttataggctgagcatggtcccggccaattttgtttttagagagccggttcccatgtgacaggtgc

SEQ ID NO: 583570 - DNA, 132 bp, Homo sapiens
aagagtacaaatatggaatatactacttacggtgtgactactgtgtaacttttacctttgtgtactgagtacgttttttttttctgactactgtaacgacgtccttccttccctctactgcacgttgaactt

SEQ ID NO: 583571 - DNA, 356 bp, Homo sapiens
gtagagatggagtctccctatgttgcccaggctgatctcacactcctgggctcaagtgatcctcccaaagtgttttgattacaggagggagccactgtgcccagcgtattttttttaaacattttcaatctgcagttggttgaatccatggatgcagaacccacagacatagaggaccaactgtgtgtatgtatgtttgtgtgtgtgtgtgtgcgcgtgtgtgtgtgtgtagtttttgctagaatatgtgtccactaaaaatatatgcccttaataaaatgtttaaaatttgaatagtaaaaattaaacctcagaagaatccagttgagtctattttgcacaacagatatagtttt

SEQ ID NO: 583572 - DNA, 302 bp, Homo sapiens
  misc_feature (4)..(4): n is a, c, g, or t
  misc_feature (14)..(14): n is a, c, g, or t
  misc_feature (31)..(31): n is a, c, g, or t
  misc_feature (46)..(46): n is a, c, g, or t
  misc_feature (49)..(49): n is a, c, g, or t
  misc_feature (54)..(55): n is a, c, g, or t
  misc_feature (59)..(60): n is a, c, g, or t
  misc_feature (63)..(63): n is a, c, g, or t
  misc_feature (112)..(114): n is a, c, g, or t
  misc_feature (132)..(133): n is a, c, g, or t
  misc_feature (146)..(146): n is a, c, g, or t
  misc_feature (162)..(162): n is a, c, g, or t
  misc_feature (182)..(182): n is a, c, g, or t
  misc_feature (188)..(188): n is a, c, g, or t
  misc_feature (202)..(202): n is a, c, g, or t
  misc_feature (229)..(229): n is a, c, g, or t
cagncatgtgttgncaaagcctgttaatagnagttaagtgttaagnctnctttnntttnnccntttccatggtaatccatatttagaccactgtatttttgccttgttaacnnnatttaccattcctaaaannaaaaagcaacccnctgtcaaactgttaantctgtcacagcctgtatatnttagtnatttgtaaatctcntcatacaatagtgacttcttttttgantgatacagtatcttaattacaaggttattttgtacttgtcttaatacactaagtgtaataaaaacggcttgag

SEQ ID NO: 583573 - DNA, 145 bp, Homo sapiens
atcacgctggagtgaataggaaaggaactgatgtgtcccaagtggatcaacatcatgaccgagcggagcgtgccccacctgcagaaagtatttgataggtacaagagttacagaccttatgacatgttggaaagcatcaggaaag

SEQ ID NO: 583574 - DNA, 361 bp, Homo sapiens
tggagagtctcacttcatcacccaggttggaatgcagtggtgcaatcttggctcactgcaacctccatctcccaagttcaagcaattctcctgacttagcctcccaagtagctgggactacaggcacgtgccaccacgcctggctaatttttgtattttttgtagagacggggtttcaccgtgttcgccaaggtggtcttgaactccaggcttcaagtgatctgcccacctcggcctctcaaagtgctgggattacaggcatgagccaccacacctgggcctgggatttagtaatttcggatttccaaattcaggtcaagaagtgggaatttatttatgttggtttcttgtgaaaaaaata

SEQ ID NO: 583575 - DNA, 515 bp, Homo sapiens
tgttgaattatatttttgtcaagctgaagagttctgtagatgtctattaggactatttggtcaagtgttgagtttaggttctaatgttttgttaattttcttcttcagttatctgtctattagtgcctgtgggatgttgtagtctcccactattgttgtgtcagaatctaaatctcttcataggtctctaagaacttgctttattcatatgaacccatgaattttataaaccccctttctcttttctgccttttcttccggtaaccattctttcctgtgtgcacaatgtgcaaaatgtagatgtccatgagttcaagaacatgtttagagacctagctgttgtaaaagaaaatataaattagaaataagaggcttaattagtccacataaaaataagagaaaatatcttactaaaatctcttttcttaaaacacttagattatgtgtagatttttatctcctttttttgaaatatatgtaaatcattaacagctaaataaatctttgttatgtaa

SEQ ID NO: 583576 - DNA, 80 bp, Homo sapiens
ggtccccacccagtttcctttgcctctcttccttctaccaggtcatgttttttactctctgccccttctgtcgtcttctc

SEQ ID NO: 583577 - DNA, 471 bp, Homo sapiens
agagtggagtccgacgggcagtccgggagcaagttcctggcactgtggtgaatctggcgtgagtggaagtgcgggtggcattggaggagatgggcacggaggtgacagaggatgtggtgaccgcctgctatgccctcatggagtaggggatccaggaatgcactcgctgtgagcagtcactgcttaaggagccacagaaggtgcagctcgtgagcgtcatgaaggaggccataggggctgttatccactacctgctgcaggtggggtcagagaagcagaaggagccctttgtgttggcctcggtgcggatcctgggtgcctggctggccgaggagacctcatccttgcgtaaggaggtgtgccagctgctgcccttcctcgtccgctatgccaagaccctctacgaggaggccgaggaggccaatgacctttcccagcaggtggccaacctggccatctcccccaccagcc

SEQ ID NO: 583578 - DNA, 138 bp, Homo sapiens
cttccatcccgttgtgtgtgagtcaagaaggaatcgtagctccatgctgtgcgagtggatgcggaaggtgggctagcaacacatttaacaacatcatgtataaccagtatgatagccacatccttgaatgtcaaccac

SEQ ID NO: 583579 - DNA, 140 bp, Homo sapiens
attaccactgtcaaagaggcaaaggttttgatttttgtattatgaagttaagtctcatgtggagtccatttgttagttttagtggaatcaaagggaaatccaaggtgtcccgatgctatatccacactcagacctctttt

SEQ ID NO: 583580 - DNA, 418 bp, Homo sapiens
cgcctttgctgaacacgagctcgccagcagcatcgttgcgagcagggttagcggcgcgtatctccttgggaaggttgtcatacgcatatttgaccttctctcgaaacaggcgcttggcgtcgttcagggtgtgggcgatcagggcgcacttggcagcctcgaacagcgcggcatccagctgaacaatgcagaccaaggtggtgaagcccagctgacgggccttgaggatgatgttccgggtgtgcatcccctggaagtagtcgatctgctcctgcgtcatccggaagcggaccttcttgccctgcttgtccgtgatgaagtacaggttgttcagtcgccagaacccgtcccgggagcagttcatgtgctcgggcttcatggtcaggcatcctttcgataggtcattcaataggctggg

SEQ ID NO: 583581 - DNA, 1056 bp, Homo sapiens
  misc_feature (630)..(630): n is a, c, g, or t
  misc_feature (745)..(745): n is a, c, g, or t
gccggtcacctgaaactggatgctggtgctgggccgccaatggtcaagatggtggattacaacccgtgtgggaacacattgaggtgtctgatgatcaaagacgatactgcactcccaacattcgtactatccggtcacatgtctcttacactgcgtggacggtatcagagtcactcgggcgttgtgaatcgcactggaacgctagtttccgaaggaacgtgacgaacagtgagctgaactgcgaaccagtggcgcctgaccgtggtagctgctagaagcggctctcggtgtgacctggagatgcctacgcatggtatatacttgacctgcacgcatgagttagtgcttgcgccctgaccggggcgggacgaaacggtcagtgaaagcgtggtgaagcagccatagtcacgaggccgaatggtcgcctagtaaacgcgtcgcaccaaaggaggtgacgcccgacgcctgttgacgcacgaagggcctcgcgccgcgcagatgcggcgaaccgacatcggaagaagactcatgcccaatgcgctgtagtcaaaacaaggtcgcgccataggcagccattccgaggcgacttctggcagcagggctatctagagtggatagtcaagacgaatngcgttaaagacgctttatcacatactttcccgctcaggatagaatgacccgcgaccggaaagtgaaccttccaataaaggagtacgaagatttgaatgcgtggaggccacacgtngagagcgaaagtatacagaaccgttgtcggttcgccaatgagatcatatgctccccgaacaagccagcaattgggacgtcctgagatagggtgagcctgttggccgtttcgctcgccttttgcggcccttgattcacgcggcaaacacggtggttttcgtttgcgtggactacccaacgttttccgctgctgaggcgttgcttgcccggagcggtatggcccaccggcgccccatttgcaaccgttggcagttccaattttggggtttgcccatttggatcccttacactggttggtggggtgtgcaatcc

SEQ ID NO: 583582 - DNA, 225 bp, Homo sapiens
aggggcgaatcgcttgccaggaggccgaggttgcagtgaaccgagatggcgccattgcactccaggctgggcaacaaaagcaaaactccttctctaaaaaaaaggagacaggacctggggtgacccagctggtgaccaaaaacctcgagttggtctgcatgacggatcctggcccatccaagtggacagctgtgacgttcgcccaggccccttcccatctttcct

SEQ ID NO: 583583 - DNA, 771 bp, Homo sapiens
  misc_feature (227)..(227): n is a, c, g, or t
  misc_feature (229)..(232): n is a, c, g, or t
  misc_feature (235)..(235): n is a, c, g, or t
  misc_feature (238)..(238): n is a, c, g, or t
  misc_feature (240)..(240): n is a, c, g, or t
  misc_feature (247)..(248): n is a, c, g, or t
  misc_feature (254)..(254): n is a, c, g, or t
gcagaatggggatgcagccatggaagaccttacacggttaaaagagaccatagataataattctgtgagttctccacttcagtctcttcagcagagaacatggctcatacatggtctctgctggtttcttcaatcaccccaaaggtcgcgataatattatggacctcttcctttatcagccacaatatcttaatgcaattcagacaatgtgtccacacatcttcgcnannnngantanancagtcannacaaanaaggatgtcgaaaacgtcggcaggttctaacaagatctagtaaagttatccaccaggagtcttacacatataaagacccaataacagaatgtgtgaatgtatatatgtaccttgtgacttggatggggctcagaaaaagctgagggaatgtgaatcagtgctgtgtgaattgacttcttcttggggggctggtcttggaggattcatggaaaaggccgtctcttcatattgagactttctgtcgcatccaccagtgtatcagcattaccatgtggccagataaatggaacatgatcaagaagaagtggaagggtgcattgtaaatcgttagaaatgcaagattgatgccaagatgggtctaaataagtcatgtggtatgggtacaatgcagtctcacctattagcagtgatgaaagacaaagtttcttaaagcagagttgcatgatattgaagaattataaaatagagacaggtctaatgggaatcaggttggttatgagactagaagtggaatcac

SEQ ID NO: 583584 - DNA, 395 bp, Homo sapiens
  misc_feature (227)..(227): n is a, c, g, or t
  misc_feature (229)..(232): n is a, c, g, or t
  misc_feature (235)..(235): n is a, c, g, or t
  misc_feature (238)..(238): n is a, c, g, or t
  misc_feature (240)..(240): n is a, c, g, or t
  misc_feature (247)..(248): n is a, c, g, or t
  misc_feature (254)..(254): n is a, c, g, or t
gcagaatggggatgcagccatggaagaccttacacggttaaaagagaccatagataataattctgtgagttctccacttcagtctcttcagcagagaacatggctcatacatggtctctgctggtttcttcaatcaccccaaaggtcgcgataatattatggacctcttcctttatcagccacaatatcttaatgcaattcagacaatgtgtccacacatcttcgcnannnngantanancagtcannacaaanaaggatgtcgaaaacgtcggcagggtatgaaagactgtaggtatatagtagtgacaacaggtgtcatacaagaaaaagaccaaagtacagaataagatgaaagatcatatatagctaatctctgaacatttgagtgggata

SEQ ID NO: 583585 - DNA, 975 bp, Homo sapiens
  misc_feature (586)..(586): n is a, c, g, or t
ccccaacgaccatggttgttgtggcgccaaggggatcccccccttgtttccccccgcggtttggctgttcctccgccgtcaccatttgtcgtcggcgggctcccttgtttaaaatccggcgcgtcattgctgccgcgcgtgcatacttttcccgcgctgccataattgggtggtcgcttggtactctcccccccctttctggtaataacgggctggctcatttcctccggcgccccgtttcctccatggggatggtatatacctcaccaccagggggtctttgcaccactcggcggcacatttgtcggtgccacgcccccgtagttcgtgctttcgtatatgtccacccccagaggggggtctccccgccacccttgtgtgcccgctgcccctccgtgcaggtgggttatgctcgccgcacccttttcgcccgcacacgcctggctgttgtggctgcaggcaaagttgtgcgcgcagctgaacactcactcgctcgtgttggggcagcacgctgacacgccccgcacctgtctgggtctcacttactcgctctcgggggtgcacgcaccgcttggggtcctggcgncctcttggtctttcatgcgatggtcgcggtactatacacccccctctccgccactctggtctgtactatatcggcgcgtggcgcgtcctggtcgggattaacccttgccttccctgtgttgtgggagtgctctcccccccgttcgtggttgcgctccccacccccgcattggtccggagtgctctgctgctcgcgccccccccttgatgcggtgccggactcccacggtaggacttgtgcggggccgcccgtgcgcgggtccactggggattgccgtccttttcgtccaaatgccccccaccacccgcccctcgtgtcccccttttttttcccgaacacaagaaaaaaaaagtaatcccccacaaaacaaaaaaaaccaaacataaaaa

SEQ ID NO: 583586 - DNA, 279 bp, Homo sapiens
gcacgtggtgtactatctgagatggcacactcctgccttgtgttcagctgtgagctcggcccagccgggacgtcaagatgctgtctccacctagtggctcatcattcattaatccagcccaagcttcctcacacagggtgggcagctggactccaaaatgacaggcctgttatgcaggcacttatcaggcctgctgatgtcccgttggccaaaacaagtcacgtggccaagccccgagccggcaggggaggagaacacacatgggtgtgaagactgagc

SEQ ID NO: 583587 - DNA, 818 bp, Homo sapiens
agcggggtgtctcgatgagcagtcagtgctataggggaactgtcttcctccgccaagcgcgaggctgagtacaagttctatgtctgtggttgactccgtatttggtctgaggccttcgggagctttcccgaggcagtatagcatgaagcctgagtggtcgtccccgactccgtctcctctgatccctgcgcgcccgtgcgagggaccatagttggtgtcacttcctcctcagagggtcgaccagatctcattctctgttagatgggtctcgcatccgtattccgcgggaatcagacggagtctcgcattagatggccagcttgcccacccgcagggtcaagcgtaatcaaagagatcggtagcagtatatacagctactatagtgtgaatcattttcatgcctccatgcagactcctttttagacgagaggaacatgtggctcgttgaacagatgtggtacgtgttgcttttatgcatcccagatggttcaatgacatttgctggggtcagcgaggatcatcgccacaggtaagaagctctgttccgcggtcccagggcctatcagaactcttgctcgtagtcgttggtcgagccaagcaatgtataccaattcaaaatcacgttttaagatatgccaagacataagtacgtgatggtgggtcactaaatacatgaagtcctcgtgacatggttattcatgagactgtggagatatagtctgggagtcttgcttgggggtcatctagtttccagaggaaccggagtcactgtgtaaagtatagaatggcattcgcttgacaattttggacaacgatca

SEQ ID NO: 583588 - DNA, 331 bp, Homo sapiens
tacacatgccatcccctgaatggcaggcctccttcagttcctgagctgctgaagtgggggtgcagaaacactgtcccaacccacgaagaaggcccactagaccttccacttagctccacttaggaggcagtgtacataactaagcggggtccctgtactaccggcactctgccttcatcactgactgttccaaggacaacaagccaccaggtttgtgcctgtccccatcagcagatggaatatacactataaaactacccatcttccctgaaccatatctgaggctcaccacttaccagaaataggtggctcaagctcccttggcagagca

SEQ ID NO: 583589 - DNA, 635 bp, Homo sapiens
ttttttttttgcaaggttcagttatccttaaatgacccccatctccctgaagggcagtgtgcgacggcacgctaggtgatggcaagagatgttcacttgaagatctggccctgattgaaggtcttggcccacttgcgggaaggccccctcccagaaaaaagtactctcgcaaccagcgttcggggtctccctcgcgtgccaggatccagttgccgccagtgtgtattgactcgtagtccaccgtgccaattcgggactcagcggaaaggcaagctcctgggcctcggaagacccagacctccagaaaagggagcgtgcgtatggtgggtcccaaaagggagtgacatgggagaaggcattcttcctcagctggtccagtcgtgggaacattccagtgatgagatggcagctcatgaaggtctgagtgagtccttcagggaagcgatactctgagtaccaccagggaccagccgtccttatcaaggggctcccagaaatatggcagtgcccagagagtgtgtcctcatgggagtactggcgcttaaattcatccaacacaaggtactctggggcaggtgagcgaaggggtcctgtggcctatgggctcagaagccaggcctgctcaatttatccaa

SEQ ID NO: 583590 - DNA, 269 bp, Homo sapiens
cctggttcatctatgtgtggaaggggtagggaacgaaaggatccatacatgtcacacttgttctttttccaggtgaatgattttcctaattttcaagggtctgatgccctttttataagcttccaggagcacctgtatgtgacttgctccaagtcatttagcatcatgctcttttcattgtctcttattatcacctaggagattgggagctagttgatgtcaagggctgtgctctgtctgatttctgtctcatagattgttactagggt

SEQ ID NO: 583591 - DNA, 167 bp, Homo sapiens
  misc_feature (5)..(5): n is a, c, g, or t
aacanagcagctatcaagccacgaccgattaccacccggaaagcagagcctatcaattgcattagacccagtgttcttggacattggaaagaaaatgtggaatggaactggatattaggccaagagattttcccgggcatcaacaacatggtttcttctgacgttgg

SEQ ID NO: 583592 - DNA, 2183 bp, Homo sapiens
gctgcggctgcagacggtctctccgagaagctgcaaggatgctgtctgtgcgcgtcgccgcggccgtggcccgtgccctccctcgacgggcgggactggtctccaaaaatgctttggggtcatcctttgttggtgcaagaaatctccatgcctctaacactcgacttcagaagactggcacagctgagatgtcctccattctcgaggagaggattctgggagctgacacgtctgttgacctggaggagactgggcgtgtgttaagcattggtgatggtattgcgcgagtgcacgggctgaggaatgttcaagcagaggagatggtggaattctcttcaggcttaaagggtatgtccctgaacttggaacccgacaatgttggagttgtcgtgtttgggaatgacaagctaattaaagaaggagacgttgtgaagaggacaggcgccatcgtggatgtccccgttggcgaggagctgttgggccgtgtggttgacgccctcggtaatgctattgatggaaagggtccaattggttccaagacccgcagacgagtgggcctgaaagcccctggaattatcccccgaatctctgtgcgggagccgatgcagaccggcatcaaggctgtggatagcctggtgcccattggccggggtcagcgtgagctgattattggtgacagacagactgggaaaacatcgattgccattgacacaatcatcaaccagaaacgtttcaacgatgggaccgacgagaagaagaagctgtactgcatctacgtcgcgattggtcagaagcggtccactgtggctcagctggtgaagagactgacggatgcggatgccatgaagtacaccatcgtggtgtcagccactgcctctgacgctgccccgcttcagtacttggctccctactccggctgctccatgggagagtactttagagacaacggcaagcacgctttgatcatctatgacgatctatccaagcaggctgtcgcttaccgccagatgtctctgttgctccgccgaccccctggtcgtgaggcctatcctggtgatgtgttctacctacactcccgcctgctggagagagcagccaagatgaacgattcctttggtggtggctctttgactgccttaccagtcattgaaacacaggctggtgatgtgtccgcttacattccaacaaatgttatttccatcactgacggacagatcttcttggaaacagaattgttctataaaggcatccgccctgccattaatgtgggtttgtctgtgtcccgtgtcggatctgctgcccaaaccagagccatgaagcaggtggcaggtaccatgaagctggagttggctcagtaccgggaggtggctgcgtttgcccagtttggttctgatttggacgctgccactcaacagctcttgagtcgtggtgtgcgtctgaccgagttgctaaagcaaggacagtactctcccatggctattgaagaacaggtggctgttatctatgcgggtgtacggggttatcttgacaaactggagcccagcaagatcacaaagtttgagaatgctttcttgtctcacgttatcagccagcaccagtccctcttgggcaatatcaggtctgatgggaaaatctcagaacagtcagacgcaaagctcaaagagattgtaacaaacttcttggctgggtttgaaccataaagccctgtcactgtcaccagatactgctttggttttgtcatttattctggtaaaatcagcaccatttgtaaagggttactcttgtattcctgatgtacagaaatcacatgaataaaagttccatactgtgtgctagtttgtgtgggggtgggctcaggtgtgtaccaggatttgtgtggtggtcagaggacagccagcctgtatgacagtaccctccttccaccgggaatttaatgcaggtttttatttaaagcacgacttcatgttgagttccataagttagttttgtaagacagagcttactgtgtgacctcagcaatggctagcctaggctattcttgtagcagtctgtctgccatagctggcaaattgctctcttaccctgttcttgctggtgcagtcagcatggatagataattcaaagctgtccactatgaaattcggaagtactttgtgattgattaaaaagagaactctgctccg

SEQ ID NO: 583593 - DNA, 432 bp, Homo sapiens
cacgaggggctattgagatggtagaaggagagcctccatacctcaatgaaaatcccttgagggccttgtacctaatagcaactaatggaaccccagaacttcagaatccagagaaactttccccaatatttcgggatttcttaaatcgatgtttggaaatggatgtggaaaaaaggggttcagccaaagaattattacagcatcctttcctgaaactggccaaaccgttatctagcttgacaccactgatcatggcagctaaagaagcaatgaagagtaaccgttaacatcactgctgtggcctcatactcttttttccattttctacaagaagccttttagtatatgaaaattattactctttttggggtttaaagaaatggtctgcataacctgaatgaaagaagcaaatgactattctctgaagacaac

SEQ ID NO: 583594 - DNA, 321 bp, Homo sapiens
tttacgggctacctaagatgaagtagaacaacccctttttgacagggcggtggtcaaggctgtaatcccagactttgggaggtagaatcgggtagatcacctgaagtcaggagtttgagaacagctggcaacatggtgaacacccatctttactaaaaatacaaaaacttaagcgggagtggtggtaaggggctggtatcccaggtactcgggaggctgagggagaagaattggccgaaactgggaggaggaggttggaggtgagccgaggttggaccattggcaactccagcctgggcaaaaagaagtagactctgtctc

SEQ ID NO: 583595 - DNA, 107 bp, Homo sapiens
tggccggctctcaacctatagttggaccttacagaatcagcccaacctaccctccagaatgaggggcatttaaagtcgctctggggcaaggggggggggggcccttt

SEQ ID NO: 583596 - DNA, 125 bp, Homo sapiens
ccccccccccccccttttttttttaataaaaggcccttagcatttgttgtagctttcccccccccagtaagttggtttacaaattttttcccctgagcctcccaataaaaaaaccccttttttta

SEQ ID NO: 583597 - DNA, 881 bp, Homo sapiens
ccacgtgacccaggctgcgcgcatgcggtcccggtgtgcatctggagagctgagcggcaccgggagcccccggcacagccggcccgcccgcgagtgagcccgcgaagatgccccggcgcagcctgcacgcggcggaatgtgctcctgctgggtgatcttaaaggaacagaattacagaccatgatcccaagttgaactggttccaagtggacttatttatggtcctgatggggagaatatgctggtccaagaagtacccgtcgtgtgggggcctgctgaagtcaccacctatagacctgcacagtggacactcctccagtaatgaacgccagtctcacgcccctcgagattccaaggctaacaatctgtaataggcaacaacgcagtttctcctgacacaacaattgggccagttcatgtgaaagactgatcctgtctcttcggacatgcaacataccaagggaacctccagtctcgctacagtgccacgggcagactgcaacctgcactggggtgaacccgaattgaccagacgggggtctagaagctacaaccgacaggagggacaaggaacttttggaccggcgaagcctgcacaattgtccacttataacatcagaactttaattttgacgcgcgaatggcaggcacacaagtaagaaggccctcgtgatcatgggtgatctcatgagaattggttccttaatcggatctaatgagagatctaggtcacttcacatgtaaacggataagggcgggaagacttcgccggggcccctggaaaggtgctacgacagacgcgtaatcactatcacggacctgtacagaacatagtaaagccatgcggacggtaggaacaagcatacaagagacagggagac

SEQ ID NO: 583598 - DNA, 701 bp, Homo sapiens
  misc_feature (38)..(38): n is a, c, g, or t
  misc_feature (66)..(67): n is a, c, g, or t
  misc_feature (89)..(89): n is a, c, g, or t
  misc_feature (91)..(92): n is a, c, g, or t
  misc_feature (95)..(96): n is a, c, g, or t
  misc_feature (100)..(101): n is a, c, g, or t
  misc_feature (105)..(107): n is a, c, g, or t
  misc_feature (114)..(114): n is a, c, g, or t
  misc_feature (135)..(135): n is a, c, g, or t
  misc_feature (141)..(141): n is a, c, g, or t
  misc_feature (159)..(159): n is a, c, g, or t
  misc_feature (163)..(163): n is a, c, g, or t
  misc_feature (183)..(183): n is a, c, g, or t
  misc_feature (193)..(193): n is a, c, g, or t
  misc_feature (200)..(200): n is a, c, g, or t
  misc_feature (210)..(211): n is a, c, g, or t
  misc_feature (214)..(214): n is a, c, g, or t
  misc_feature (221)..(221): n is a, c, g, or t
  misc_feature (226)..(226): n is a, c, g, or t
  misc_feature (229)..(229): n is a, c, g, or t
  misc_feature (237)..(238): n is a, c, g, or t
  misc_feature (244)..(244): n is a, c, g, or t
  misc_feature (249)..(249): n is a, c, g, or t
  misc_feature (272)..(272): n is a, c, g, or t
  misc_feature (276)..(276): n is a, c, g, or t
  misc_feature (282)..(282): n is a, c, g, or t
  misc_feature (287)..(287): n is a, c, g, or t
  misc_feature (289)..(290): n is a, c, g, or t
  misc_feature (296)..(298): n is a, c, g, or t
  misc_feature (317)..(317): n is a, c, g, or t
  misc_feature (322)..(322): n is a, c, g, or t
  misc_feature (333)..(334): n is a, c, g, or t
  misc_feature (349)..(349): n is a, c, g, or t
  misc_feature (351)..(352): n is a, c, g, or t
  misc_feature (367)..(367): n is a, c, g, or t
  misc_feature (378)..(378): n is a, c, g, or t
  misc_feature (380)..(380): n is a, c, g, or t
  misc_feature (386)..(386): n is a, c, g, or t
  misc_feature (388)..(388): n is a, c, g, or t
  misc_feature (399)..(399): n is a, c, g, or t
  misc_feature (403)..(404): n is a, c, g, or t
  misc_feature (410)..(411): n is a, c, g, or t
  misc_feature (414)..(414): n is a, c, g, or t
  misc_feature (422)..(422): n is a, c, g, or t
  misc_feature (428)..(429): n is a, c, g, or t
  misc_feature (488)..(488): n is a, c, g, or t
  misc_feature (689)..(689): n is a, c, g, or t
gaccaggaaaactaatgagtgaatgtgtatgctagtgnaggaattgggaatatagtgaaatttggnnaaagcctgagaaagaaatgttncnnggnntgcnnaatnnnagaaggngtcaatgttggtgtggcttcnatgggnataagatgctgcaagagntttntgtgcaatttaagtgcggcngatggcgggntgagggnaagagtaaanntgntgggtgnagggntgntgctgagnntgatgnaggcnctgctgcggtttggcccctgaangccnagaaantgtananngataannnagctaaggaaggaaagaanagaantttatggatannaaagtgtatgggagnanntgaataataaagtgnataaaatgtgnanttggtncnaggtaaggacnaaannctgaanntanaaatgaanaagaanntgcatctgcacaaagtggggaaagatgaactaaattatggggtggatgatgtgacattnattgggggaatgaggaagggacgagggttccctggagtcttacggtccaacatcaggaccaagtcccatggacatgctgacagggtccccagggagaccgtgtcagtagggatgtgtgcctggctgtgtacgtgggtgtgcagtgcacgtgagaacacgtggcggcttctgggggccatgtttggggagggaggtgtgcancagcctggagag

SEQ ID NO: 583599 - DNA, 822 bp, Homo sapiens
ggcgggagagagcgggtagtgtgcgccgcgcctgagagtgtggaggcgaaagggggcaggccaggagaggcgcagtgagcctttgcatgccacgcgcgcgccttccctgtcttgtgtgcttcgcgaggtagagcgggcgcgcggagcggcggggattacttttgctgctagtttcggttcgcggcagcggcgtgttgtagtctctgtgcggcagcgggtggagacactagcactatgtctggagagagcagttcggcagtgggacaggaggcgtgcgaggacatgaggcaacatgtggcgggatggtagtgccggctcgggtgtggcggagcacggagggagccattggtgtgctggctgacacagaggggcaagcgtggcaggggggcgggaacgcggagcctgggacctggtgtggcggtgaaccggcgtctggaggcaccgaagggggcagcgccgagtcggagggggcgaagattgaccgccagtaagaaccgagtgaggaatgaaggccattcaaaatcctccccaacgacaactctgaagcagacgaaaggcaacagcgggaaacgaatggacacactgttcatacggaaggccttaagctggggaacactacaacagaaacagaatcttgaacggacctaacatataccaacagtcaagagagaacgtttgtcagaccttgcactacctgaaagtaaggatccctatcacaggggcagatccaaagggagtaaggactatgtgccatttacacagaatcggcgacgtgtagaataacgccctgcaatccaaaagaaactcacattgaatcgagag

SEQ ID NO: 583600 - DNA, 601 bp, Homo sapiens
attatcctacagcatcgaagacgggaatagagcatatgcgcaatttgttcactcgcaaccgcaaaactagtagtggtttcgtcccagaggttttcagcagctggagaatatagatattctttcaattaaggcagttgacaatggtcgcccttcaaagtcatcaatcaacagactacatattgaatggatctccaagcccaaaccgtaccctagagccatttcattttgaagaatcatattttacctttactgtgatggaaagtagaccccgttgctcacatgattggagtaatatactgtggagcctcctggcatacccctttggtttgacatcactggtggcaactacgaccagtcactttcgatgtggacaagggaactggaacccatcattgtttgccaaaacctcttgattgcagaaacagaaagtacaaactacaacctcacagtcgaggctacagatagaaccaccactatacttcatcaggtattcctccaagtaaatagacccaatgaccctcgtcctcagttttctaccatcaagtaagaattgtaatcctgaagatacgcgccgaacagaatttgccatcaggcgggatag

SEQ ID NO: 583601 - DNA, 330 bp, Homo sapiens
gtagtgttctagaggattcctcagtaggcaaaagtctcttcaacttctcactactgtgaacaactacacgagaaagcaacaggctggggagaggggggctaactattctcacgtatttcttgggacaccaatgggcatggagacaggtcagaaagcggagagatgtgttaagtggcatcacaaggacaaagactgagcggagcgggtcagacaagagagatggaaaacatactacattccagagtcagactcacccgacacagtaacgagtaccagtaatttcctgagctatttaacatatgtgctaggaaattgttctaagatctgtaa

SEQ ID NO: 583602 - DNA, 1763 bp, Homo sapiens
  misc_feature (305)..(305): n is a, c, g, or t
  misc_feature (562)..(562): n is a, c, g, or t
  misc_feature (1496)..(1496): n is a, c, g, or t
tggcaacatacgttttatattactcaaggacaaccgggacgtcaccaagttgcccagtttcaggggggcttgtaggtgtgactcagggctgtgaacacaaaattcacggtggtgaacgcctgtgtgtgcttacagccctgtgggcatactttgtgggacaccgcaaaaggacacttcggggttacattagaaacctgtgacttgtgcttcttgaacgacatgtggtgatacatgtgtctttattccctctgagaaatatgtgtttccctctatacctctggtgtgtggcgcatggtctacaccanatctatatttactgcgctcttacacaggagggtctatactacaccatgggtgctggggtgtaaaatataaggtgtacttaggggcgctctaagtctaagagacctctatggagtgtaagtgtgcggcgcactctatctgggcgcacacaaataacatgtgggctctggggggccctgagagcgagctgagaacgtcttgtgtgggggctctacggagaaaacgctctggagactctggggctcacgggagaaagctncgagtactgatgtgggcgcgccacaggggagtatgagggctctggggtatttgcgcaagggccacaccacatatttaaagcgcgccatgtcttcccgaagggtgccccccatgttaaaaacgctctgaggaaagaacactctgggggccccaagaggtgtatgagagcaaggtggcgggtgtgcgctgggctaccagcatcttctctctggggagaagaggattctccaagagatattattcaatcgagcatattcatgtgtggccgataaaggggcagctgtggaacagcgcctatgttgcagcgacactattttatcaacgcgccaaagataacttttatcgacgtgatgttgttccccccatggggggagtattctaatgcccgtttatgtgaggagaaaaacccgaggggggactctttgggccatctggtggttcaactccaccaagagggtctgtgggaagtgatgacaaggtaacaaataagccagatactcgtgatggaacgttcacacgttggcagggtaccccactgcaacgtccttccacaaaaagggacatttaaaaggaggaaatctacctaccgaagtagctattgaagaggccgtcccccccaaagacaagagtggtggggacaccccaccaacagggcggggtgagcgcggattatacacaccagacggcgcccagggggcacaaacatagcggtgtacacaacaacacctatttggggggagagacaacaacgaggggggtaccacaaacaaatgtggttgcccacggggcagcgggtaatttgacacacatacagtggggagaccacacagaggaaaaccatcagggcaagggagggccccctcaacaggggtggggaacataacacgagggcggtacgagacaacaagcacaagtgcgcaccacttttcacccantggttaaccggagacaaggggcagcgcaaacaaacatgccaacccatggataaggggagggcatcgtaaactagaggagacacaaagcagacagaaggaggcagcacacaactagtctagatgaaagacacaccacaacatgaaagagagctccacacgagataatgagagaaacacaactagatgagatgaatcaaacagagtgtaagacaacagaacgttcacgtgctgtagcgtcttcacgtagctgcttgcgaacatgcgaag

SEQ ID NO: 583603 - DNA, 149 bp, Homo sapiens
  misc_feature (2)..(2): n is a, c, g, or t
tntctgactggaaggattgtttgccatttattgagattgggaagacaaggcagggtagatttctggggatgatcagtgaccaggacaggaacacgaggcggatgaggcgtcttgccaacacggccccggcctggtaaccagcccatcag

SEQ ID NO: 583604 - DNA, 631 bp, Homo sapiens
tcctctgatgcccgcgggtgtgacaaccgcagtgtccgacccaagccgccctggaggtttcttccgcgccatccaattttctaactctgcgccccgggcgtgttcacccctgcctttgtattgtttggcgctcgtggccgaactcactactgttctggaagccctccacctggcgcgtccttataaccgtccttttccaggagtctccaaatgtctggtcgcccaccagaaaagagggttttgaggaacttttgccaacgatccgtgttacctctggcgcttgcccccccccctttttaccctctggggaagaaacatattcttttgcttaataacaactcgtttctcgtggtccaaattatcaacgttttctctactttccaggacatctcaccataacattgtctcccagccgcctatacttctgcctcttacaatattttccgccaccccaccaccactaggggcgtctacatctcacccccccccacacacattacaccaaccatttaacagccctctcttctcaccaccgaaggaaaccacacccttctttgttcaacccccttccccccttttccccctttccccccacccccaaaacaattcccgggttttcccccaaaaaaaa

SEQ ID NO: 583605 - DNA, 235 bp, Homo sapiens
agctcagctgcatctacaagtcactctagaggattcccagcatgcttgggccccagatagatgtcctgacctttaacaacctgcggacaatggactacccgttgtgactcagaaagtcattgatgcaacacagtgtccagaaggataggggtttgatccctggtcttgatcagcaggttaaggatcaggcattgccttaagctgttgacatcttaatctggggcccaagcctgct

SEQ ID NO: 583606 - DNA, 151 bp, Homo sapiens
ggcgcggcgccctggacttggaacagatgacaggagcgtgaaggacttcgcagactgcgctgctttttcaaaacggacccgggcaatgcttcgttttctaaaggatgctgctgttgaagctttgaatttgactataatctggtttgcaaca

SEQ ID NO: 583607 - DNA, 349 bp, Homo sapiens
tatatctgttccttggccaattatttctaaagacacactacatagaaagaggccctataaactcaaaaagtcattgggaaacttaccgccaattcgactaaggagaggagacacgcccatatgaacgactagagcacatcagaactcctgtggggaggaaaccttataaattaaacacatggcccccttagagaccacaggcgaggcctgcctccatgcttccctctccttttctgccacctttccccctagctggctcctttggacctacccctgtccttgctgacttgtgttgcattgtattccaaacgtgtttacaggttctcttaagcaatgttgtatttgcagg

SEQ ID NO: 583608 - DNA, 166 bp, Homo sapiens
acgtgtatgtcacggtggggttgttctgttttgttgtttttttcttttttcttttcttctttttccccagaaactcgctttttaattattttgttgcgtttcattttcattttcattttttggagacggagtctcgctctgtcgcccaggctgggttgcagtggcg

SEQ ID NO: 583609 - DNA, 188 bp, Homo sapiens
gaccgttcaggtccttccaagtcaatcaccactggtgcgtgtaccgggggcgatcatgacagcaggacttcacaagctgttttcccacaggagggagccagacagttaagccttatcggggaaaggccttccaggggaaataacacggggccggggatcttagagggcgattccagctttaacttggg

SEQ ID NO: 583610 - DNA, 108 bp, Homo sapiens
  misc_feature (9)..(10): n is a, c, g, or t
  misc_feature (94)..(94): n is a, c, g, or t
tcactatanncactgctactagggaaccactgctgctccatagtgcttcctgctgctatagtgcttcctgctgctatagtgcttcctgctgctntagtgcttcctgct

SEQ ID NO: 583611 - DNA, 656 bp, Homo sapiens
  misc_feature (128)..(128): n is a, c, g, or t
  misc_feature (181)..(181): n is a, c, g, or t
  misc_feature (183)..(183): n is a, c, g, or t
  misc_feature (192)..(193): n is a, c, g, or t
  misc_feature (195)..(195): n is a, c, g, or t
  misc_feature (205)..(205): n is a, c, g, or t
  misc_feature (215)..(215): n is a, c, g, or t
  misc_feature (227)..(227): n is a, c, g, or t
  misc_feature (231)..(231): n is a, c, g, or t
  misc_feature (237)..(237): n is a, c, g, or t
  misc_feature (239)..(239): n is a, c, g, or t
  misc_feature (244)..(245): n is a, c, g, or t
  misc_feature (250)..(250): n is a, c, g, or t
  misc_feature (253)..(253): n is a, c, g, or t
  misc_feature (257)..(258): n is a, c, g, or t
  misc_feature (262)..(262): n is a, c, g, or t
  misc_feature (265)..(266): n is a, c, g, or t
  misc_feature (268)..(268): n is a, c, g, or t
  misc_feature (275)..(275): n is a, c, g, or t
  misc_feature (301)..(301): n is a, c, g, or t
  misc_feature (340)..(340): n is a, c, g, or t
  misc_feature (656)..(656): n is a, c, g, or t
agcgggagggagggagaggcacagtcagagggaacgcccgcgcggggagccagggcgcccgaccccgccgcgccgcagcggcgcgcagcccccgacgcgccctgtggggacccggaccaggagggacnctgcccgggaaaaggctgtggagacctgggctccgaccccagttcatcccccncngaaccccgnngncccgtgccanccgtggtccncgctgggagccntatnctgccncntcgtnntcagnccngggnntggncannantcgcggngcatggcggtgaccatgctgcaggantggtgccggggatgggggtcaacgctcgcaggggcctgntcatcctgggcatccctggaggactgtgattgagtgccggaattccaagatgtccctcgagggcgtggccctgagggccctattggagagcactttgagcacgtcgcctaaggccaaaatgcggctttccaaagaggggaccgcactatagtgcgtcacgcaagatggcgccgagtggggaccgaagcattcgagaagcggggcgaacggtccaaacttagtggcctaccggcgccagcgcagagggacaaattccgccagcgggacatggggcggccacgctaggaaacagttggcgacaaagagagacgcccgn

SEQ ID NO: 583612 - DNA, 249 bp, Homo sapiens
tgtctatattggggaaatgtgaaggactgggtacgtgatagtaatcaggatcaatgagtattagcaagttaatgttatgataggactttgacgttcagatatatttttaaatccgtggaggactagcattaagttgacatgctgatccagagtgctacacacgaagtggattcagtgaatctagagaagacagcagcagacacggattccacggaaccacgtgttctgatgaccgctacggactgacgg

SEQ ID NO: 583613 - DNA, 396 bp, Homo sapiens
cagtttatgcaggcaccccatgagcctttttcccaacgcttaatgactagtaatgttaaacatcttttcaggtgcttatgggccatttgtataactactctggagaaatgcctactcaaatatttttccttttcatttttttaatttgaggcagggtcttactctgttacctgggctggagtgcagtggtgtgatcatagctcactgcagcctcaagctcccaggcccaggtgatcctcccactttagcctcccaagtagctaggaccacaggctcacaccaccacacctggctaattttttaaatttttggtagaggacaaggtctcattatgttgcccaggctggtctcaaactcctgaggcaggaggatcatgtgggcccaggaatttgagac

SEQ ID NO: 583614 - DNA, 276 bp, Homo sapiens
caaaaaccaaacaaaaaagagtaataagcacttagaaactgctataacaatctaatattctcacacattccagaaatgtatcacttttctacttattagtatttgttgagactgggtcttgctgtgttgcccgggctggagcgcagtagctattcacaagcatgatcacggctcactgcagcctggaacttccctgctcaagtaatcctcccacctcagcctctcaagtagctgggactacaggcaagcaccacgcacctggctgcaatccatttt

SEQ ID NO: 583615 - DNA, 638 bp, Homo sapiens
  misc_feature (348)..(348): n is a, c, g, or t
ctcgctgcgcatcttgtggggctgacaacctgcaagccaagaagtacgagaaggggcaggcgcggtggctcacgcctgtaatcccagcacttgggaggccgagacgggtggatcacctggggtcaggagttcgagaccggcctgaccaacgtggtgaaaccctgtctctactaaatgcaaaatattagccggacgtgggggcgcgtgcctgtggtcccagctgcttgggaggctgaggcgggagaatcgcttgggcccgggaggcggaggttgcagtgagccgagattccgccagttgcactcctaggcctggacaagcaagtagggctaagaagctctggtctcagnaaagaaagaaaagaagaaagaagggtaccggggaaaagaggtcggcagaaagagcgcgagagccttgtctcgcccgaggtggccgaggagacattccgagagattaaaagcggagagagagagaacctagagggggaggggaaaggcggcgaaaggccactgagcgcggccgcgaagaagacagatagcgcgaagaagcgcgccgccgcgcgcctcgaaagtgaagcgtttccagcgcctgcggggcgtacctgcggggcccatttctttaagcccgtggtgagaatgag

SEQ ID NO: 583616 - DNA, 171 bp, Homo sapiens
atggggccattttttcccctttttgccccctgggggtaaaaaaaaaaaaaaaaacttttttttgggcccttttccaaaaaaaaaagccttggggtttttccccggggggggtttttttttttaggggggggccggtttttccccccccatttaaggttgggggattcttta

SEQ ID NO: 583617 - DNA, 175 bp, Homo sapiens
gccgggtattgggtatatataatatataatatataataatatataaatacgtaatatttggaattatttatatatttatattatgtatattatacatatgtactattatatatattatacatatacactattactcctgcaatagtggccataatttaagaattaaaaaaaaaaa

SEQ ID NO: 583618 - DNA, 823 bp, Homo sapiens
  misc_feature (364)..(364): n is a, c, g, or t
gtccccccggggggcgacggttcgattaaaagcctcttggcactgtccggtatttcgcctggtttcccccctcttggggaggccgtgtgttatttccctcgcccaagcccggcggtgtaatgttcttcctccccggggtgctccttggtcacgtggcccactcttaggttgcggcgccggccgttccttgtttttcaaggtgcccacccccgtccaccttccagtgtctgtgtgcccccctcgctactgtgtttgcacgcggggcgactgtattcgttctggccaaaaccccgatccctcggttcattacggggcacccctctgtgcgttgcccgacgcacccccctggtttggacataaatantgcgggtatcggccaccggcagaaatcggtgggtcccccaagttgggggagcacaaagaatttcaggcacgagctcaaactcacgagacaatggaaaccgaagcgcccttgttggagcacggtttttataagcgcgccccctaatattcgccagctattttcttctctccacaattcggtctgcctgcaagacaacaacttatatgatgatgtgtgccgacaggaccacggtgtgtgtcgtacattgcgcccgatggtggtctacgagagacaactacccagcacatgacgtgtatggtgtgtgagatccacgacggggtgtttgtttttcatttactcaaaagacgtcgttgcggtttgtatacaattacccacaagaggcggtctgagatcaaaagacacgacttaagagcatctgtgtctgcgaccttaaaaaaataacaactgtcccacatgaca

SEQ ID NO: 583619 - DNA, 146 bp, Homo sapiens
tggggaactgtacggggtgggccccccaaaagaggctttccatgccaaccccggctttatttggtaaaagtaggccctgtgccctccggccacctggatccctgcccctcccccctggggcggaataaatgtttttcagacctgga

SEQ ID NO: 583620 - DNA, 370 bp, Homo sapiens
tgataaggtggcagactgggaatcccgactgaaaatatttaattcgattcagagacaaagcatcatatctcggaaattttagacacttatagtgtacctaccactctagactataaaatcatatacacaaaggccatattccaatagagaatgttcccccacctacttaaaaagtttctcaacggataattagcatccatattaagaaactgcctcatgaaatattaaaaggtgcgaaagaaataagctcgattaaaaggcttatgcacgtgtacccaagactccccttgacttacagagggcttaccctaaggttcgagataggtcacggcactatttacaacatttatgccagtaacagattatcttt

SEQ ID NO: 583621 - DNA, 695 bp, Homo sapiens
  misc_feature (29)..(29): n is a, c, g, or t
  misc_feature (72)..(72): n is a, c, g, or t
  misc_feature (75)..(75): n is a, c, g, or t
  misc_feature (83)..(83): n is a, c, g, or t
  misc_feature (96)..(96): n is a, c, g, or t
  misc_feature (146)..(146): n is a, c, g, or t
  misc_feature (177)..(177): n is a, c, g, or t
  misc_feature (179)..(179): n is a, c, g, or t
  misc_feature (211)..(211): n is a, c, g, or t
  misc_feature (275)..(275): n is a, c, g, or t
  misc_feature (306)..(306): n is a, c, g, or t
  misc_feature (335)..(335): n is a, c, g, or t
  misc_feature (473)..(473): n is a, c, g, or t
  misc_feature (509)..(509): n is a, c, g, or t
  misc_feature (521)..(521): n is a, c, g, or t
  misc_feature (693)..(693): n is a, c, g, or t
agcagaaggcacgcagcgccctgggcgcnccgagctccccagggcaggaggccgagcgccctggcgctcggnagnaaggcagncacggggtccagnctgctgcagcggcgtgcagcggctcgggttgccacggcgcggccggcagncttctggtctccattaagcagcggttgcggngncctgctggttgaaatggcacaagggagggtgncagcgggtgtgaggcaggggtgccattctgagggccaggggttccgggcgcaccagggcacagnaactccaaggtcggcccagccaggggcctgnccgcctgggcgaatgggctccttggtggngagggagacggggtccaagaagtgggggccgccagccgcagccttcagcgctgcaggcctcctcctggggtggtgcggaaggcagccaccgaggggtggggccccaggaggcagccccaggcctggccgggggctcantggggcatggttcacagcaatattgccaatgaagancgggagggtcanagtagcttccggcgccttcagagagacctgtgagtagtagtcggtgtggatgaggctgcagcccggcaggccggactggggcaaggcaggcaccaggatctgctcgtgcatttcgcccgccgccaggcttggacgcccgcaccctccacctccgcaatggtccgtacgtcgngg

SEQ ID NO: 583622 - DNA, 228 bp, Homo sapiens
ttgggggggtttcccccttggccggttaaaaaactttcggggcccctttttttcaccggggggggttttttcccttgaaaggggggtttggaaaagggggggccccctttttttttttgggggggcccccccccccccagggggggttttttgccccctttttcccccccctggggggtttttggttttggccatttcccccccaaaaaattaattatttttttccca

SEQ ID NO: 583623 - DNA, 645 bp, Homo sapiens
  misc_feature (31)..(31): n is a, c, g, or t
  misc_feature (184)..(184): n is a, c, g, or t
  misc_feature (463)..(463): n is a, c, g, or t
  misc_feature (503)..(503): n is a, c, g, or t
  misc_feature (612)..(612): n is a, c, g, or t
gctgggcgtgatggtgggcgcctgtaatccnagcacttgggaggctgaggcaggagaatcacttgaacccgggaggcggaggtgcagtgagccgagatcgcaccattgcactccagtctgggcaacagagtgagattccgtctcaaaaaaaaaaagaaagggaaaaaaaaatagcattataccncttcctggtctcaaccgccatgaaaattctgaacactccaaattcagtggaataatccaaaacaaaatttataaggtataaaataatttacttcttatagtaatagtatactttaaaaaggcctcagggtatattatcttctaaacagctacaattcagtggcagctacattaaccaactatgttctctagtggagaacaactaggcctatttcactggctgtgtagcctcagtggcctaacatgggtgccaaataaatattcgtagaattaccctgantgtgtaaaaaccattcgtttggtttacaatgtgccaaaantctcaaaggccctgtatttatgtaattctttgacatcattatctattggattctcagttatggactgcctgggtgtgacttagctactttaggtactcaatattataanacctcaatattgcttgatttacacaaatcttcc

SEQ ID NO: 583624 - DNA, 351 bp, Homo sapiens
taagtaaatatcagtttaatttacaaacatcagcagtgtaaccgatattaatctggagaaagacaaagcacactgaattattcatgtacatctaattttctttgtaaaaaaagaagttttcaggaagagacatctgcatttttacagggcaccctgggattttaattgggggaagagcccagttcactataaacccttatcaattctacattggaatttaacagcaaacatggttaactggggagccttaagataataaagggattttattggtttgagggaaaaaaaagtcccagttcttgatatgacaattttttattccccacctacccccacaaaaggcaaaaaagg

SEQ ID NO: 583625 - DNA, 810 bp, Homo sapiens
gttcccccccccctcttccttgacggtcccccagtgtgttactggtgtctgccatttgggcaccccggggcccactgttgccacggttctcactcgaggtagactacttcgaggcctccccgaggggagacttggtacagccagggccggtattttggcatcctccgacttcgtgtgcttggaccgctggaagttattcctcggggttggacagcgggagaggccctggcttactcgggggcttcttaccctctagtcaccttgccccctggggatggaatgagctggagcccccccctgggtgactgctcacatcagcctctgtgatggccgtgtgagctggactgtgtcagcgacgactcgagcactcattcttgctccctatgttatttcaagggcctcccagggcagcttttttcaggatccctgatcccaaagagcccctgggcctcccctagggtacactcccggcccattccaggacccgcccttttacccctgcagaagaagacaccatgtggagcaatcttttggactgacatccccttatctcaggccaaccgaagttcccacccccgactaggggtcaaggcagctagctacctaccttgccccgtgctgacccggacctcctcccggatacagcactggaggtggcccccccctcttttacttctgtttgaaaacccccgactaggcagctgagattttgggttttccacacgggccaagatacccggcctctgctgaggtcactccccttttcaccagctgcttaagggagccccaataaaggtattcgatttttta

SEQ ID NO: 583626 - DNA, 165 bp, Homo sapiens
gcacttggaggcgcgcgggtggatattagctaggagttgaacagcctggcacatggtgaacctgtctctcgtataatacaaaaattagcctggcatggtggtgcatgcctgtatcacagctactcgggagggcggggcaggagaatcgcttaaacttgggaagcg

SEQ ID NO: 583627 - DNA, 236 bp, Homo sapiens
ccaggtcccgggatctcgctccgggatttggcgctttgcccttctattctcgaaggggtgtaagcttcccccactgccccgtgcggtcactccttttggggtccccccggtggcccatatctccctgggggcccccccgctgtgacctatacaccttggaccacattctctgggggtccgcctcctcccccttaggccgcaccctttttgataaatttgaaaacaccccacatagc

SEQ ID NO: 583628 - DNA, 384 bp, Homo sapiens
  misc_feature (205)..(205): n is a, c, g, or t
  misc_feature (340)..(340): n is a, c, g, or t
attgatttaaaaaaatcttgatcaggaatactgatgtgtggtgtttttttcttatagtgtctgtctggttttggtatcagaataatgctggcctcatagaatgcatttggaagtgtcctttcctcttcagttttttggaagagtttgaggagaattgatttaattcttcagatgtttgccagaattcccatatggccctgggctntttctttcttgggaggcttttctttactacttcatgctcttgactagcataggtctgttcagattttccatttcttcatgattcaatcttgataggctgtgtgtttctaaggaatttgtccagttcatctagggntatccaattctttgatatgtaattactcatagtactcttaatcc

SEQ ID NO: 583629 - DNA, 146 bp, Homo sapiens
tcactagataaaatgctactgaattgactaggaaatccataagagagtgctggggaacgttattcccatgagaggtgcctcagatggaaggcgctgtgtctccatacgcaacttctgagggctggagggtgccaagggcagctgct

SEQ ID NO: 583630 - DNA, 778 bp, Homo sapiens
gtgcggctgctgtcccagtagcccggcccggcctcgtgcaccgcgtgtcgtggtgggtccctgttggcccgcggctgcatgggccgtggcggcggcgaggccgaggggcgggaatgccactgcccggcctgtgcagtgtgaacgtgcaatgtcgatcccctaacccatgaaagccccaggcgcggtctctatgggcggccccgctcctgcttctgtataatttttataacggacagggatgtcggctcataccgcccgggttgtaatgcaatggtgtgatcacggctcaccgacaggcctcgacctcccggggctgaagcgatctttcccggcctcagccatcctgagataactgggaccacagggcgcgccctgactggattataacaatattaatatatataatactaaaatgaggacacaaaaagagggatccgacaaatagattgaaagaacgaagcatgagaattcacacagaaatccacctggccacaagagaaaagacgcccgagatatgttaaaagaggtcacccacaaaaaattgccgccgaaaatatcaacaccagagagaatataaacacaccaccaggatgacgagtgagaacacaaatattttcgaactaagtatgcaccccaccgatgaagaaattgacagtaataaatggagcccaacgagacaaacaacaataggagggaaacccccaaatggcatcaatacactgatatgaaataaacaaaacataatttaatagcgaagacattctttttgaaacccata

SEQ ID NO: 583631 - DNA, 175 bp, Homo sapiens
ctcatcactacagctaaagggaggaccctatcttccaaacctagatgcttctcaaaccatctaggtctggaaaacattccttttggtgcttttgttaagtgttcatgcaaagtaggttaacgatttattgactttaacaaggaatcatcggagatgcatgaccctttaacgaatt

SEQ ID NO: 583632 - DNA, 117 bp, Homo sapiens
  misc_feature (18)..(18): n is a, c, g, or t
cttaagcggcgtcctttntttctccttttgggccttactcagccccaactccctatcctcctcttaccccctatccacatacttgtactcccacaaaagagcacacttactcccaaa

SEQ ID NO: 583633 - DNA, 309 bp, Homo sapiens
agagtaagatacaatatcagacatccaactattcaacacgctttctaatttttggaagttttctattgggtcttgtattttaatattcatcaattgataagtagactcattatcaaattggtaaaaaacaattttaaccggtttcaattcaagacctaataattttaattgtatttgagttaaaaggaaaggcccattattcttgaaaacaggctccttaaaatctttaaaggtgccactgtctacaaactgaacttcaccaaaatgaataatattggtgtcataatcgtaataaagaatcaaactgcc

SEQ ID NO: 583634 - DNA, 696 bp, Homo sapiens
acccgcccaggcaactttaaaacggttccatgaagaagaagtcgaaacccacccgattctgtttatctggtactagtgcaagtgaaaaattgaacccctgccctctagatgttcaaaatccgcttcaaagcttcggtcagaataaattcaccaccaccgatttcttagcaatgccaagaaggaaaatgccaaaattagttataagggaatagcttttctgtgttaaagtgtcagaaggagccttaagaaaagccattccatttcttcaaagcgttactcgattaccaggtgaaagaagtccccaaagaaagtgattccagccatcgccgggttaatccaacttaagaaatttattgaagtattctcgcccggcaaaagtgcttctttgaccaactaagaactggtggccaagattttaataattaaggtcaatcaaccaaccaggttggccaaccacctcaataaggtggtggaagaaaatactttatttaataaccagagttcaattaccccagaaaaccttcccgaggttcacaaatccaacacaaatggtgttaataaccattccactctacacacccttggcacacttgtaacaccacggttatccaaaaatggttaatgtaaatatcccggaatggggggtttggtaaataataggtggtaataaaaataaattgcccaaagcccccttta

SEQ ID NO: 583635 - DNA, 985 bp, Homo sapiens
  misc_feature (21)..(21): n is a, c, g, or t
  misc_feature (24)..(24): n is a, c, g, or t
  misc_feature (30)..(30): n is a, c, g, or t
  misc_feature (40)..(40): n is a, c, g, or t
  misc_feature (55)..(55): n is a, c, g, or t
  misc_feature (58)..(58): n is a, c, g, or t
  misc_feature (79)..(79): n is a, c, g, or t
  misc_feature (81)..(81): n is a, c, g, or t
  misc_feature (83)..(85): n is a, c, g, or t
  misc_feature (90)..(90): n is a, c, g, or t
  misc_feature (96)..(96): n is a, c, g, or t
  misc_feature (102)..(102): n is a, c, g, or t
  misc_feature (109)..(109): n is a, c, g, or t
  misc_feature (118)..(118): n is a, c, g, or t
  misc_feature (130)..(130): n is a, c, g, or t
  misc_feature (138)..(138): n is a, c, g, or t
  misc_feature (142)..(142): n is a, c, g, or t
  misc_feature (150)..(150): n is a, c, g, or t
  misc_feature (162)..(162): n is a, c, g, or t
  misc_feature (179)..(179): n is a, c, g, or t
  misc_feature (185)..(185): n is a, c, g, or t
  misc_feature (191)..(191): n is a, c, g, or t
  misc_feature (234)..(234): n is a, c, g, or t
  misc_feature (236)..(236): n is a, c, g, or t
  misc_feature (238)..(238): n is a, c, g, or t
  misc_feature (241)..(241): n is a, c, g, or t
  misc_feature (246)..(246): n is a, c, g, or t
  misc_feature (263)..(263): n is a, c, g, or t
  misc_feature (290)..(290): n is a, c, g, or t
  misc_feature (308)..(308): n is a, c, g, or t
  misc_feature (328)..(328): n is a, c, g, or t
  misc_feature (335)..(335): n is a, c, g, or t
  misc_feature (351)..(351): n is a, c, g, or t
  misc_feature (354)..(354): n is a, c, g, or t
  misc_feature (420)..(420): n is a, c, g, or t
  misc_feature (429)..(429): n is a, c, g, or t
  misc_feature (436)..(436): n is a, c, g, or t
  misc_feature (449)..(449): n is a, c, g, or t
  misc_feature (453)..(453): n is a, c, g, or t
  misc_feature (465)..(465): n is a, c, g, or t
  misc_feature (478)..(478): n is a, c, g, or t
  misc_feature (497)..(497): n is a, c, g, or t
  misc_feature (500)..(500): n is a, c, g, or t
  misc_feature (502)..(502): n is a, c, g, or t
  misc_feature (507)..(507): n is a, c, g, or t
  misc_feature (533)..(533): n is a, c, g, or t
  misc_feature (536)..(536): n is a, c, g, or t
  misc_feature (543)..(543): n is a, c, g, or t
  misc_feature (553)..(553): n is a, c, g, or t
  misc_feature (648)..(648): n is a, c, g, or t
  misc_feature (677)..(677): n is a, c, g, or t
  misc_feature (704)..(704): n is a, c, g, or t
  misc_feature (741)..(741): n is a, c, g, or t
  misc_feature (759)..(759): n is a, c, g, or t
  misc_feature (785)..(785): n is a, c, g, or t
  misc_feature (792)..(792): n is a, c, g, or t
  misc_feature (795)..(795): n is a, c, g, or t
  misc_feature (806)..(806): n is a, c, g, or t
  misc_feature (830)..(830): n is a, c, g, or t
  misc_feature (848)..(848): n is a, c, g, or t
  misc_feature (856)..(856): n is a, c, g, or t
  misc_feature (887)..(887): n is a, c, g, or t
  misc_feature (889)..(889): n is a, c, g, or t
  misc_feature (892)..(892): n is a, c, g, or t
  misc_feature (895)..(895): n is a, c, g, or t
  misc_feature (921)..(921): n is a, c, g, or t
  misc_feature (940)..(940): n is a, c, g, or t
accggttctacagcacccggngcngcggcngtggccaagnccgcaccgggacgancancccggggacctggctacaccngnannnaaccnattganggcaantttcgcncgactgtcngaaatgacacancgcaaacnccangccagctntcaacattcagnaagaagtcaacggtaantactantcttcncgacgcagaatggccgacaatgcctgtgttctttttgccgtcncngngcnaatgnttataatcacgttcaangctcgcgcttatatgagagacagattnctatatcaagtgaggtangccgactccaatctcctgtnaccgacnttttcgacttcgaccncantggcctggatgcaataagttctctcaccaatctgccaagaatcaaagaatatctcgcgatcatacnaccatgatnatcccanacaaagatgaccnccgnggccttgcgacnccagcggcctccngatggcattgtcctcgtgngcnangcctnattcatcaatattaaggctctatacnaantaactgngtatggaacngactataaatacatacaacagaccgaaacgagccggagattagctgtgtaccctgcctttagaagcacctcctcagtacgttttgccaacctatnaaatggccgtgaaaatgcctgaaaaaganccaccacctccttacttacctgcctgnagaaattctgcctttgacaataaatcctataccagcntttttgtttttttatgtnacagaatgctgcaattcagggctctncaaactngtntgatataaaanatgtagtcttttgtttaagcattnattttcaaacactaaggnagcttttngacatctgttaaacgtctttttgtttttttntnaantcntttacattttaatagtttttgaaganaatctagggttaagcaagngcaaagtgccattgtttgcctttaattggggggtgggaaggaaaa

SEQ ID NO: 583636 - DNA, 361 bp, Homo sapiens
  misc_feature (1)..(1): n is a, c, g, or t
ntaaagaacaaagcagaagtcattcatttattcaaaatctgagcacagagagaccccaacagtctggacactcagtagattgtataatgtgggtcttattcacacagggatgtttggaatccaataacaaagtcctctgagagctgccaccaaaaggttaaattgaaagttgtaagttgaatgactgatcagcctctgattccactgggtgtgggcgctcctacctgtaatcccagctctttagaagcctgcggcgggcagatcgcttgagtacaggagtttgaaaccagcctaggccacatggcaaaaccacatttatgtttcatcagtcctcacaggacagtctctccctcgatttctc

SEQ ID NO: 583637 - DNA, 343 bp, Homo sapiens
taggcaggcccgggttagggtcctggtctcctgacatctagttcctgctcaagagtgagaactgttattattattactattattgagacagagtttcactcttgttgcccaggctggagtacagtgccacaatctctgctcactgaaacctccgcctcctgggttcaggcgattctcctgcctcagcctcccaaagtgctgggattacaggcctgagccactgtgcctggcgtttttttgttgttgttgttgttgttttagacagaatcttgctctgtcaccaaggctgagattgcaccactgcactccagcctgggcaacaaggcaagactctgtctcagaa

SEQ ID NO: 583638 - DNA, 175 bp, Homo sapiens
gatgcccctgagaagagtaactacccccttcgtcctatttccggtccctgtgacctctattctgctttctgtctatatggattcgcctatttggatattcatattaatagaatccacagtaggtcactcttggtgttcagcttttttcagcttggcataatgttttccaggttca

SEQ ID NO: 583639 - DNA, 306 bp, Homo sapiens
ggggggtttttaaaacccccccccttttaaaaaggcaagggttgggcccccccaaggatttttttttcatgggaaaattttcccccccccacccggaatgttggaccaaattgggggattttttttataattttttggcccggccaaaggaagctttttttaaaagggcggggtttttttttttttttgggacccccgcccccggatattggggggcggttttggttttaaaaaaaaaggattttttccccttcctaaagggtttttttttccccccccctgaaaaaaaacccccccttgggggga

SEQ ID NO: 583640 - DNA, 159 bp, Homo sapiens
gcagcgctctactcctgagactaatctgcttctacagcacatcttgcgctggagaccagatctcatccagactgaggaagtgacatgtctgaagaaggaaagacggccatgctgatccccaatgccattcagatctgcacggagagcagaaggtcgacg

SEQ ID NO: 583641 - DNA, 321 bp, Homo sapiens
  misc_feature (1)..(1): n is a, c, g, or t
ntgacatgtaagagggaacagggtaacaggaatttctgagatcttttctgctccctttctcttttatctggaacttttcttgtctttgcttctgtggccctgttcttctcagtctggagtctactcctaggagtttttctaaaagaagtatcagtttcaagagtttacatggcccagactgctctaacacctatttgcatggcattgttcttgttctcagcctgagaacaagatccttcagagcctttcccagatgaggctgctattctgagactagtatgccattgaggcttcagggaaggatcgtgagagagggaagga

SEQ ID NO: 583642 - DNA, 401 bp, Homo sapiens
  misc_feature (2)..(2): n is a, c, g, or t
  misc_feature (66)..(66): n is a, c, g, or t
  misc_feature (165)..(165): n is a, c, g, or t
  misc_feature (218)..(218): n is a, c, g, or t
  misc_feature (226)..(226): n is a, c, g, or t
  misc_feature (329)..(329): n is a, c, g, or t
  misc_feature (337)..(337): n is a, c, g, or t
  misc_feature (346)..(346): n is a, c, g, or t
  misc_feature (353)..(354): n is a, c, g, or t
antccttataatttggcacaaacagcagagactgaagctcctacacatgttgaactgctgacaggnaaagaacccagtagataaatctaggctttccactccatatattagctgaggcaggagaattgcttgaatctgggagacggaggttgccgtgagccaagntcacgtcactgcactccagccctgggcaacagagcaagactccgtctcaaatnaataaatnaataaactaataactaaatgttgtaacacaaaagaggatgaatgcttaaggtgatggatatcctgtttaccctgatgtgattattacaaattgcatgtctgtnccaaaatntctcatgtncccgatnnatatatatacctactatataccgacaaagtttaaaatagaaactgga

SEQ ID NO: 583643 - DNA, 115 bp, Homo sapiens
agggcgcttgtcaatacgtgttgcaaccctgcccatggaggcacccgagtgctggaccttcaccggctccaatctcagcttctggctgcggtaggggaggctatcatcgcgatgc

SEQ ID NO: 583644 - DNA, 145 bp, Homo sapiens
cataagtcattattacctcactgtcaaccaacacaggcatgtcataaggcaaggttaaaaaagtaaaggaactcggaaatcttacccggctgttacaaaaaatactctagcatcacagtattagaggcactgctgcgtacaagtg

SEQ ID NO: 583645 - DNA, 584 bp, Homo sapiens
  misc_feature (151)..(151): n is a, c, g, or t
  misc_feature (158)..(158): n is a, c, g, or t
  misc_feature (210)..(210): n is a, c, g, or t
  misc_feature (265)..(266): n is a, c, g, or t
  misc_feature (270)..(272): n is a, c, g, or t
  misc_feature (294)..(294): n is a, c, g, or t
  misc_feature (334)..(334): n is a, c, g, or t
  misc_feature (450)..(450): n is a, c, g, or t
  misc_feature (483)..(483): n is a, c, g, or t
  misc_feature (508)..(508): n is a, c, g, or t
  misc_feature (556)..(556): n is a, c, g, or t
  misc_feature (568)..(568): n is a, c, g, or t
tgttaccaatctgaaaaccccctcagccgcctacctgtgggtgggtacaggagccagcgaggagagaagacgggggcccaggagctgctcagggtgctgcgggcccaacctgtgcaggtggcagaaggcagcgagcagatggttctgggangcctggngggaaggctgcctaccgcacatccccacggctgaaggacaagaagatggatncccatcctcctcgcctctttgcctgctccaacaagataagcttgctaaaggttcnnggtnnntcctggttgagctcatgcaggnaagacctgggaacggatgacgtcatgcttctgggacaccntgggaaccaggtctttgtcttggggttggaaaggattctcaagaaagaagaaaaagacagaagcctttgacttctgctaagcggtacatcgagacggacccaagcaatcgggattnggcggacccaatcaaccgtggtgaagcaaggcntttgagcttccctcctttgttggcngggttccttggggtgggatgatgattactggtctgtgaccctttgganagggcatggctnaagtggctgcctgagg

SEQ ID NO: 583646 - DNA, 463 bp, Homo sapiens
aatataattgtaagtcatccacgctgttggtctgcaaacttttgaggtaactacacacacacacacacacacacacacacacacacacacaaggattttagatttgaaaatgatgttttttactcatttcaaaatgtactgtaacctttctttggttcttactgttttcatttaactttctctgttttcaagaaaagttgtctttattgacatttgtaaaaaagaatgtgttttgcccagttattaagtattttatttttatgcaatttcagaatcacaatgaggtatgtcattgcttcatatacatgcacattcacctcaacttgcacacacatcacacaccaaaccttatgcaaaggggaaagctaacacttagagtggattttgtcccttaaggaaatggattgttcctgcatatattgctggtggcagtattcagtcttgtgttctttttctaaaaaaa

SEQ ID NO: 583647 - DNA, 529 bp, Homo sapiens
cgcacaggcatccaggccccaagttgggcagagtgctcagacctcagagtagtgtccagggcacggtctccgggtcggtggtccagagctccggcgagaggactcgaatacgtccatcgagtccagtcccaggctgtgtcctgggacaacaatcccaggttcagagctacagcctcacaggcgattccagtgcagccacatacagtctgttcagatacctgcccaaggccaggcgacagtcacaaggccagggtacaggcgttcaactcaaagtctttcatcaggacaagctttaagtcgagtgactgtttcatccccatcgcgtcctcagctacaaatacagcagccacagccccaagtcagggctgtgcctcagctggaacaacaagtccaggttctctctcagatccagtcacaggttgtggctcagatacaggctcagcaaagtggtgtgccccagcaaatcaaactccagttacctatccaaattcagcaaagcagtgctgtgcagactcaccagattcagaat

SEQ ID NO: 583648 - DNA, 972 bp, Homo sapiens
ggtgtttatgaaaatcattgagttgacaaggtgcctatgccattgttaaattgtctttaggtaatttagacaatagatttgctaattccacatataaaaacatgtagaaaacacagaagatcttaccaggatatttgtaaaggtctgggaatcacaggttggcatcctttattcaggtctcttctgcctccaaggctacacttagaattgtgtgccgaggacaatgggagtataaccttgcagttgatgtgaaacaccgaatatccagtctgcccttgcaaaagaggcaaaatgcatgattggtatttctgaagctcaccgggacttgcgccacccatcaaacgtttacgaaatgggcatgagtatctgcaattctcttgaaagatgtacccccatcctttcaataatgcctacaacgatgagagaaaatattcccaatttggtggaaccgattggtcttagcccttgcgtgcgtgcgccctcactctcgtgcgccccggggtttttgttacaacttccacaagcggcatttacaagttaacggctacctgtctttcgaacacctttcggttctcgttcacccaattggtcatacattttttccagatggatgctttgatcgcaagggtgataccagttgagggattctcggccaggaaaagagtgcgtaaaaagtgtcaccacattttcttcaagcctttggatggtaggggggccctagacagtttctggcgcacctctgcctatgatatgacgactgcctgaggaccgtataataccgtgggccaacaaagggctacaaccgtgtccacaaagtggcacgttgtcagctctctgtatcctatcacacctttacgtcaagtttatacacacacgtgtgccccgtgtcttttaaacggcttttgcgcatcattcggcgaaaagatgtctccagcctggctgaggggcacctttacacaccccccggggcac

SEQ ID NO: 583649 - DNA, 127 bp, Homo sapiens
aagcagttaatacagactcattgtctgtgttgatgtgttagcaacacggctgtgtttgacatgactcgtggaacctgtgaaggaagctggtctcatagtactaaataggtggtctacggagcagctg

SEQ ID NO: 583650 - DNA, 178 bp, Homo sapiens
  misc_feature (1)..(1): n is a, c, g, or t
  misc_feature (75)..(75): n is a, c, g, or t
ncaccacttgtgctggactctggtggacgcggaccacctcccctacacttcacacggccactggacctacctttngtacaaacctcctacaacacctgaccaattcaaaaaaactgtgggttttttttttttttttttttttttttttttttttttttttttttttttttttggtttg

SEQ ID NO: 583651 - DNA, 247 bp, Homo sapiens
gcgttgctggtgcttggctatttctcctcctgtgtttcttcggctttgtgttgttgctttttctgctgggtgatgctgcgtcgtcgccccgtctgtggggtcgagttctttgcgtggtcgtcttttgtctgctgctagcttttggttctcccgttgcctcggggccgtgttgctccgtggcctgggtatctcccgcgtgtattgctgttctgctctcatgctcttctttctctctaccgctgctggt

SEQ ID NO: 583652 - DNA, 224 bp, Homo sapiens
tgacgaaaggctggaatcagctttattttatgaggggtggaagcaggggcaggagcatcatccccaccattgagggacttctgctgctcattgctgttgggcgagggggtcctgttgccctggtgatccccagctggctcaggcggctttagtggagagagtcactggtgggcaatgcagatgggggctggaaggcctgaagaaggagctgctgggtgaccggg

SEQ ID NO: 583653 - DNA, 222 bp, Homo sapiens
tagattctttgcccatggtgaacacttccatctctcccgaacgcccgccgatgtccatttgtgcctcctgcgcaaagctgtagttcccaaccaagtgctactgctgcaaaaggcaggattgtagcatttggctcacagatgaggagtcacccatgcgtatcaatcccccccttgtagcattgtccgtcggtgcctttggcatcggggtcacagagtttgccc

SEQ ID NO: 583654 - DNA, 425 bp, Homo sapiens
gaaattttagcctctgacacctacagttacagcaaacaataaacacagactaacttctaggcaaataaacaaacaagagatggagcacattcaagtcacagcagtggccatgatagctagagtttcagaagccattctgtgacctggagcatggaaagaaagtgctaaggttggttgaactgaaggagagaagggggttgtgtccttcataaattcatggagccacacctgatcacctatgtctcagctttatgtaagaaaacaaacccctaatttgtaaagccactacagttagatttctgtttttaagcaaggaaacagtttacggcactcttctttttaaaattattcagtactcagcagccatttgaatgtttaatagaaaggcattatactggcactaaagaactgtgaaaatgaaaaaa

SEQ ID NO: 583655 - DNA, 312 bp, Homo sapiens
atcatacttaaggaagggtcccaggctggggagagccccaagttgaaacagtaagtacaattgtgtactgaccactattacatactgctgatcataaacgacctgtgtgtaatatgtattcacctaaacacgtagcacccttcagcaggaccctataaaactttcctccagcccttgcctctttgcaggtagccccttctctgctgagctgcccactgcaacatattttcacaatttctctaataaatctgcccttctttacctacaactatcttggtaaatggctttaccacctgcgaaactgaccctagg

SEQ ID NO: 583656 - DNA, 399 bp, Homo sapiens
ttctggatctccgactttgacctaaaaagcctcccgctgtgttttatcgcccccactcccaaagcgtgtgtattgtagctacagtcgcacaataatctattttcttaagacagaataccagcagtccatgcaatatatacgaaaccatttttacggatgtgtacttttaatgaaatatcgaactgtttatttttttcccccctcccctctctcctctctttcattgtgtagcggttatgtacgagttctgtgtttgcactcaaaggctcaatggttaaaaatgctgttggatgtttgtgagtgttgcttttcatcgcatcgatattttcactttcagttttctcttgaacggcacagacgaattgtaaaagagccattgaaagtgatggagaatgtgca

SEQ ID NO: 583657 - DNA, 208 bp, Homo sapiens
ttccagcagcggaccacttgctcctttagcaccctcctgatgggaccagtcatcctggcgcgggtggcttcccaagatcaccctttctcatcctccatctttcaacgctcctaatcacatcccggtccactctcaggagcgaatcaatgatgagcataatcttcatgtctctggcaggcggaggagggttcctgaactggtagacatg

SEQ ID NO: 583658 - DNA, 135 bp, Homo sapiens
  misc_feature (70)..(70): n is a, c, g, or t
agtaattgagccagggtcgtaggttgcagtggtgccattgtgttccagcctggtaagagtaaggcctgtntcagtaaaaagaagggagtaacaagacaggtagggattcagtataataaaagtcaaaagtagttg

SEQ ID NO: 583659 - DNA, 913 bp, Homo sapiens
accctcaccccccggggagaaaacagatgcaagatcaggagagaacggagacacaagcaacacgcgtcacagttagtccacagtatcgtcacgaaggatatagctgcggagccaaacagggaggtgcgaccacatggttgaagacgaaccttggtgctgcccccccagcggcggtctattcgcacgcgggttaatacttctcgcccctgggggagaaacccgctcctccgctgtgagcgacccctccccccctcgagtcgaagacccgccgcgcaaaattggcggggaaacccgcacctttgtttttccccgagaggccccttttgccaatccgtgtgcctcccccccccccgcccttttttgagcgtctccccattccgcctctggtgaggtacgtttttagccatcaagaacttctcgggggttttttccccccccccccccgccccttggaggagaagacccggctcccgggatgtcacccgctgcccagacgtttcacccccggggtaatattctttgtcagcccaagggcactgacaggtaccccacaaacatccgctgtgctttccacaaagggtcgtcaagcccccagcaagtggctgtttcgaacccagaaggccacacgaggggccacagcggttactactagagccccaaaagaccgaagaggctgtggcccctcatgagcacaccccccaaccacaaatggcgcgcccaaaagaccgtccctctacattctcctaagtactaatgccgcgcggtctgtccccccaaccctggagaaaaggaagacttctttggtgaccctacccccgcgttagcgcggcccctgttcccgggcccttatgggctttgggacccctttttttttggggacccccccccgcccccttccaaaaaaaaacacaca

SEQ ID NO: 583660 - DNA, 81 bp, Homo sapiens
caggtggccaccagcaccagcaccggtaccggcaggaagaaccagaagttgggcaggctgaaccaacgttcgaagatcgcc

SEQ ID NO: 583661 - DNA, 658 bp, Homo sapiens
agcagtgtctcacacctctaattccagcactttgggaggccgaggtggacagataacctgaggtcaggagttcaagaccagcatggccaacatggtgaaaccccgtctctactaaaaatataaaaattagctacgcatgggccgggtgcggtggctcatgcctgtaatcccagcactttgggaggctgaggcgggcagatcatgaggtcaggagatcgagaccatcctggttaacatggtgaaaccccatctctactaaaaatataaaaaattagccaggcatggtggtgggcgcctgtagtcccagctactcgggaggctgaggtaggagaatggcatgaacccgggaggtagagcttgcagtgagctgagatagcaccactgcactccagcctgggtgacagagcgaaactccgtctcaaaaaaaaattaacttggcgtggtggtgggcgcctgtaatcccagctactcaggaggctgaggcaggagaatcactagaagctgtgaggcagaggttgcagtgagctgagattgtgccagtgccctcctgggcaacatgagtgaaactcttgctcacataacataatattaaataagcgttccttttatgctggtgcaatgattttggtcagtcccccaatatatttttgattttggt

SEQ ID NO: 583662 - DNA, 278 bp, Homo sapiens
  misc_feature (10)..(10): n is a, c, g, or t
gtcgatctanaggatctcatccccggctctgggtagctgggattacaggtgcacgcaccatgcctggctaatttttttttggtatttttagtagaagatgggggtttctccggtgttgaccaagggtggtctccaactcctggtctcaagcgatccaactggtttagcctttttaaggtgctgggattacaggcatgagccaccgcgtctggcatatttcttacatttttaatagagacgagggtctggctatgttgcccaggcccgtctcaaactcc

SEQ ID NO: 583663 - DNA, 244 bp, Homo sapiens
attaattaaattatttgcctaacttaagaaaactactgtggggaactctcagtttgggcttaactccatttgacatgaggtgacaaaaaaaagtttgagtctacctgtggaatatgttggtttattttcagggcttgaaaaaacattcccaaaaacttggtttgggaaaaccccgtttaattttaagttaacttgcatgttgtaaatgcgttttatgtttaaataaagaggaaaattttttgga

SEQ ID NO: 583664 - DNA, 199 bp, Homo sapiens
aaagacatgtacttccagagaaatagtacaaccctatttcctgctattagagcttaaatccggccgggcgcggtgtgtcactgccttgtaactcccagcactttgggctggcctaggcgggctgggtcacgaggtcaggagatcgagaccatcctggcctaacatggtgaaaccccgtctctactaaaaatacaaaatt

SEQ ID NO: 583665 - DNA, 506 bp, Homo sapiens
  misc_feature (19)..(19): n is a, c, g, or t
aaggactgttaaggaatcntctgaatccataagtgccatcgtggttgagacaagtgtaaaaaatgctattaatatcggagagctctttcaaggaatcagccggcagatcccacccttggacccccatgaaaatggaaacaatggaacaatttaagttgagaagccaaccatgcatgccagacaccggtgctgatgacccaagggccgtggttcacggtactagaagaagccagagcccacatcctgtgcactgatgaaggaccctactctcggtggcctgtctcctcactttgagaagagtgagcacactggctttgcatcctgtaatacctgcagggggctgggcaggaaatgtacctgaaaaggattttagaaaattctgtgaaaacccatcacaccatcacagaatggcctttagggcatgaaatgctcatggagggcatgccctcgcatttttgctacgataaataccacaaggcctcggtgacctcagacgatgacacctg

SEQ ID NO: 583666 - DNA, 649 bp, Homo sapiens
gctgcagttttcctcagctttggcgtggtggcctgctgccgggcatcggtgcttccagtccgcggagggcgaggctggcgtggacatgcggcccggcacccagcgccccgccgcccgcaagccgcgcgcccgtccgcctgcgcccccgagcccgccgcttcctatctcagcgccctgccggcgtctgacggtggaccagcgaggcgtgtcctgaatgcaggccatcaagtgtgtggtggtgggagacggagctgtaaggtaaaaacttgacctactgatcagttacacaaccaatgcatttcctgggagaatatatccctaactgtctttgacaattattctgccaatgttatggtacgatggcacaaaccggtgaatctgggctcatgggatacagctggacaagacagatcctgacatgattacgcccacctatcctatccgcaaacagatgtgtccttaatttgcttattcccttgtgagtcctgcatcaatttgaaaaatgtaccgtgcaaagtggtatcctgaggtgcggcaccacatgtccccaacagctccccatcatcctagtgggaactaaacttgatcttaggggatgatacaagacacgattcggagaacactgaagggacgaagaaagctgacatcc

SEQ ID NO: 583667 - DNA, 162 bp, Homo sapiens
gctctcgcggctcccctcacagcttcgggctaccccattccgatcacctgctcaccctaactcattccgaccacccgctccaccctatactcattccgaccacctgctccaccctaactcattccgatcacctgctccaccctaactcattccgatcacctg

SEQ ID NO: 583668 - DNA, 297 bp, Homo sapiens
  misc_feature (6)..(7): n is a, c, g, or t
  misc_feature (51)..(51): n is a, c, g, or t
  misc_feature (82)..(85): n is a, c, g, or t
  misc_feature (90)..(92): n is a, c, g, or t
  misc_feature (152)..(154): n is a, c, g, or t
  misc_feature (173)..(173): n is a, c, g, or t
  misc_feature (277)..(277): n is a, c, g, or t
  misc_feature (296)..(296): n is a, c, g, or t
attttnnattatccttaaagatattgcattttcatattctttatttataanggctcaatgctgctgtaaatacaggtatttnnnnttttnnntttcattccaccaccatcagatgcagttccctattttgtttaatgaagggatatataagnnntctaatggtgtcttcaganatttataaaatgtaaatactgatttgactggtctttaagatgtgtttaactgtgaggctatttaacggaatagtgtggatgtgatttgtcatccagtattaagntcttagtcattgatttttnt

SEQ ID NO: 583669 - DNA, 594 bp, Homo sapiens
taaatagagacggggtctcggcagttgttgcccagggtgggtctcgaactccttgggcatcaaggcgatcctctttgctttagcctcccagagtactggggattaacagggctctttctttttaaacataaaatgtttaaatgggtataacctctgtactctggcccattaagatgtgttaacgctctctggttctggtaactcatggcgtttggcgtcgggccgatattctcccatagatagatcttctactggaaattgcctaagaggaacgtcacagcgcgggctcctggttaatccaggggattttttatacaaagtcaattcagaaacggggatactgggagcttctccatggttctgtacacacgcttattaacttggcgagacagttgatgaatcagttacaagggtaatatggtattaacaatcaggttcaagatagcggcttaatgtggtatacatatggcatgcttttggtaaaaactttgcggggtgcatgaaagatacagttttaagagcagacaatggtcactctggtgcagaggatgcattttctcccataaaatttctggaaaaacaggtcaacagtta

SEQ ID NO: 583670 - DNA, 1300 bp, Homo sapiens
  misc_feature (1300)..(1300): n is a, c, g, or t
gggttcaagatgtgcggcgcccagatggcacatgtgagcgattcggaaagtagtaacagcagtagcgatgcggaggagctggagcggtgccgcagaggcggcactgccaggcattggggctctggagccaactgcccgccacgtggcagggaagccaagagccggtgctgcaaatagccagttgtcaacctcccgaaacgcagcctcaggcatcacaggtgccatgagcatgcaacaagatggccaccgcagcttcagcaccacccctgaattccgagcccacagtagcctaagcaagctgggagccctgctggacagcattcattcaccagtctcagaagcagtcaaaggacgcaagaaaaaagactaacgggtacaggaaagtcagactattggagagactgatgggttaacagcacttgaactaacacactactgatcacatgagagaggacaaatgtaccaacgttgtgcaaaggatgagacacgatcttacgtgggccacacaaaggaatcccctcatctggctgacatcatgatgccccgccaccagaccgagtaccccgatccccatcatccacggtgaatgataccatcacgatcgacacacaacgacactgcgagaaagacatcacctcgactacccacccacagactcgaccactgcgcaacccatgatgcactgacagccctggcagcgagctaaccactacagcacggactcgcgcggggcagcaagccaaaaacacagccgccggcacccctgcaatcataacgaccgatgggcaacagctgccacagcattgaccaatgggaaagcagaaactaggccaatcggccgagcccaacacattatacgcaacatcgccacaggacacacaaacagcatgcagacacaccataaccaccgaagcaaacaagtggactcgacatcaccacatggacagcacacacacgcaaccaaagacatgagggacaaaaacacgcaaagcgagaacgggcgtccgcggacgccagcagaagccaacgtgcacaccacagacaaagcgccgcaatgaacacgcccaagagacaaggggaacgaacaacaacacaacggaagagcgaagaggacaacgaaacacggcgaacaagagggaatcaaaagacgagaagccaaaagccgcgcgacacgacgcaacgcaacaccaaacagaaaacaacaccagacgacgaaacagaaagacgaagaatgagccagaagtaacaacgcaggaggagccagcgagccaaacaaacaacaagtcgcgaccatccagcn

SEQ ID NO: 583671 - DNA, 173 bp, Homo sapiens
cggggctgtcacttgaggcagaggagcaccagtgcacgcaccttgcaggtgccatggacgcaggcgcggtagccgggagcacgccaggtggcaaggtggcgagaggggcctgtctgggccctcggtgccggggcacttggcaagccgcggtggagtggcggggcgaggcggct

SEQ ID NO: 583672 - DNA, 1041 bp, Homo sapiens
  misc_feature (318)..(318): n is a, c, g, or t
gtcatctctgtcgcctccggcccactctgggggtgactggccgcttctgggacctgttagaaacgattcgaggctggagacgactgatgtagcatcgggcagctccgggctccgctgatgtatgcgttgtcttacgaactccagatggactgcttgccctggttacgagcgggttgcaatgatctcaactgtgatttcctaacgtgccgggagaaacacctcggaagccgcgatgtctctctagactagctagagtcccctcgcggtacgagaaccgtcgcgaggaacacacgtggtagtgcacggaccactagagtnccatgctgtgaatgcactcagagttcgactcttggtgttggaccaatttctcacagcaagcaatggtctgctaccgtatggtggtgggaatctggacgccgtgtacgatctagggaacgtgaaccaacagtgcgactcgcgcgtacccccttctaggcaagggattcgaccctgcgctcccatagggccacaaggcacaatcatgacccctaaagcgcgcctagggcgacacccccctcggctctgcgacgccaatacgtcaatgtatgcctgggcccagcgaccacatgctcgtggctaggcgataggggctccacgtaagggagggacagagacgagagctgcagcacgtaggcgaagcagcggcaggagcacagccagcggaggggattggagcagggaccgaagcggcgagagcggggacggcagcaagccaaaaatgcgcccgaaagcacgtacgagcgaagaatcgttaccaataaccaacaaatagagcaatcaccatcggcgaggtccaaccctggaagaagggtgcgatgccgcgttgcgctggaggcaccacaggaagggacgagaagcaatggcagcggagtggccagtgaggcaggggaacggtccagcccctgcagtggactgtgccaagatttccccgggtgcaaatctggagggtcctgcccccgggaccccaagtggggtttgaatttcagcaccgtgggccccaag

SEQ ID NO: 583673 - DNA, 195 bp, Homo sapiens
acggtgaggtacagctacgggtaggtacagcttcttctccttcagttttctcgactcgtgtctttatcatcacctaagcatcaagtttagcttcccactcaggatgatgggcagtgttcgggacagctggtgcccgcaccctcacggataccacactcgcaccggacacttttcaaactgactgcagcgacctca

SEQ ID NO: 583674 - DNA, 680 bp, Homo sapiens
  misc_feature (182)..(182): n is a, c, g, or t
tccaaaggaactattatccccgggttcctccaattccctttggcccctcagtaatgtacaaaaccgattccgccccagggtggggccataataattattgcagccacccgcagcactaatcggcagggggtacagtacctgagacctgccaaataaagtccaaatggtggatagtttgactncagtctcaaggtcatggcaacattagtattatgagctgtagtctccggccgtgctaccaaaacattagtgtacgtcacgaagattcaagctctttcgtatggcgcacccttcttgttcattttgtattaggaacattgtttcatttttgaccatcttattaaactatgaatcacaggcgagtgcatttttagaatttcagctcagtttaaggtacttttaatagtcaagagaagcactctggttttattcgttgccccgcccatggttatcgttccaaagtatagattcggtcagagttggatatcacttccccaatgtaaattcgaatgcctcaccttgcctataagagtaatagcttctataaaccctcttgtagaaaaaccattatggaacgggcgtgctggctcatacaagtactctcatcactctagaagccctaggtgagtgtctcccctaaggtccgtagtaaaacctgtattaactacatcaagctccgt

SEQ ID NO: 583675 - DNA, 373 bp, Homo sapiens
  misc_feature (86)..(86): n is a, c, g, or t
  misc_feature (156)..(156): n is a, c, g, or t
tttttcagattttggaatatttgcatatatataatgagatattttggggataagacccaagcctaaatgcagaagttatttgtgtnttatatatgccttatacatatagcctgaagataattttatacaatactttaaataattttagtaataatnttatataattttataattattgtataattaaataattttgtgcatgaaacaaagttcatgtacattgaaccatcagaaagcaaaagtatcactatctcagccacccatgtggagtctgtggttgtttgacattaccatcattccctactttgaatttatatgctactgataagcaatcattttcttacatttattcacacataagtatttcgctttc

SEQ ID NO: 583676 - DNA, 777 bp, Homo sapiens
gtggaattgtaaaggccagcttggagatgcagtgagtgggacggatgttaggattcgaaatggtctcctgaactgtaatgattgctacatgcgatccagaagtgccgggcagcctacaacattgtgacacggctttcaagcttccggatcactcaccatttctttactgagagtgtcccctggcaactgcttaacaaaatcccaagctcaggggcttctcagcatttacctaatttctgaaaggctcttctgaaaggtggtatctgttctttcgtagcacagtgtttatgtttttcctgtttattgttttgggttttttattttatattgtggctttggccacagttatcacacaaaagaaatagtggggctgtgtaagttgatccgtgaaaatagctcaaaaagaggttttagcagtggctcaaacgggctataggggtttaaaagggtggttatctcgtcttctgtggggaaatgtagcctaagagtgagtggcaataaaccgggtttgggttttagaagtgtctgaggatttaaaccactttagtgtttacgagaatggagcgtgcagaaaaggtgcaagacttgccatttggagacacagggttcttctaagactggagggataaattcaaggcttttcagaaactaaactatcacagcaagctctatctcggagctataatggggttaaaggcaaagacactagttggataatataatcacgggaatcctgaaccattggtgttacttaccttggggggtcgaattataccg

SEQ ID NO: 583677 - DNA, 1366 bp, Homo sapiens
  misc_feature (184)..(184): n is a, c, g, or t
ggaaaaacttcagccgaagttcagctcttactaaacaccagagaattcatactcgaaataaactctaggaaccgtgaaattaaggaatttgcagaatgctttagctaaaatgttctgattcaggatcagaggattcttagagagcttgggaatgtaatgaattacgtgtgtgtttatacgttgntgctgtggagaaaactgccagtagacagaatttttctctttttattttttttacaacataaagacacactctcctcagaatctgacttacagactagtgttgtaaaacacggcctacatgttttgtacctggctgtggggatgatagtgccgtgtatgtgggacttgtgctttggaatatatgctatgcaggactatcatcaagtttcaacatcttgacttgtgacccccaagtgtcaacagctttttaaaaaacaaattcctgcagtaatgaccaaaacccattttaacaaatggcttgacaactgcactcaatctgcagctcttacattaagcttcaccatggaaaccagtccaactccaggaagtcacacattcaaagaattagatcaactagcccaaccacttcattgtacacgatgaagactgaaagccaaacgatgtcgaaggggttccccacacgtatgataacagcctattaagggctaacaagctgggcttcaaaaaactgcagcgtttaccctggacttttgtgggcccccatgtcccttgcacagtgacacaaggttcatactagggcactcaaaaagggccttaacaaaagaacaatttaacgaattgcatctacaagaataaatcaccacaaacagtttctacaggaggcccccatttcatgggggtttaggcaaacacatttggtagacaaattcctcatcaagcagctattcacggcagagcaccaacaaagcttgcatgcaacgaattgtcacacagaacgcattttaaacgcacagactcttagtggaaccggatatcaccagccccacacctatagactagcacgaaaactggtgcaatagagtggttgtagcagcaataatgaggactcctttagtacccccccttatggccagcggctacaacttgtatcctttgtaagcactaactaatatgcagaagttcctcgcaacctactatcgagctaccccctctagatgatactagctaatagagactgcccacgaagagaaacgagcctgcttcgtagccggatgacgcttgagtactgtgtgactgatctacagcaactgctagagttgatgctcgcgttgtattattcacaaacactattctaacgctcatgagcaaatatgtgatagttgtaaactaaagggctattagt

SEQ ID NO: 583678 - DNA, 914 bp, Homo sapiens
  misc_feature (146)..(146): n is a, c, g, or t
  misc_feature (336)..(336): n is a, c, g, or t
cccgaagtgctaaccccgcaagcggagttgtgtgggccgccacagcaaacagattgctgcgccaagccgcgcgggggggcgcgcaccaggtccgctccccaaggagagaggggagcaagagcctacctccccggggggatgtcctncccccgctggacgaacccacttcggcgacggagcccctgggcgtgtacaacacacccaggttcgggtgaactagtcagaaagacgtgctggaaagataaggaaaaatcgtggtcgctggtgacgaaagaacccacgcccactgcgggcacgcaaaatcagcaatctagtgtccggatcgcctccgtacangtaacagttacgctctctgttgtgagcgaacaacaagggaagagggtgactagaccagcccgcaccaaatgcggtccatgcacggaaaatctttccgcgggacaaaacagagaggcgggctctcccacacggatatagacctgcccacgcaaaaacacctggcgggaacaaacgatgcaaaagagtgcccgcgctcgcatggagttcaacataggcggcccgcgcggcatagagaacgcccgccgctcgaaacaaacagcggggcacaccacaaacaatcgacgcacacgattgcaggagcccgcgcataacacgcctatccttaggaagcgagtggatgaggatgagagcaccacacaaagagactgcgcagatattccgaacagcagctaccgtggattgtgcagtgagagtcgccctcacgcaagactgagaatgttcatggaaaagcatggcacgttctttttgacttgtcagggaacggtatttaaataggcgagtatcttcacagtcttatgtaagctgcggctgtctctacttaaacacagcgggttccatcatgccccccccacaaagca

SEQ ID NO: 583679 - DNA, 722 bp, Homo sapiens
cgggccatggaggcggagccgcgctctacccgatggcgggggctgcggggccgcagggcgacgaggacctgctcggggtcccggacgggcccgaggccccgctggacgagctggtgggcgcgtaccccaactacaacgacggagtgaggaggagcgcctgctactacctgcctgcaagcgcctgggcgtgctcaagaacgtgctggctgccagcgccgtggggcatgctcacctacggtcgtctacctgggtaggtgccgctcgtgggaccctggggtcctgcccgccctgtctctccagctccgggcctcgggaaacagagaaccgcgggcctgccgtctctcgcccgctctcacttcccctccgttgccctcgcagctgcaggcacggacccctcgcggcggtgggctggggttggggggtcgactgtcgccgcaagtgatgcccgggtcccagacgcatgagccgtcggcgtgggtgagtcggaccgggcggtccgaggcgtccccgcgacagacctgtccatccgtctgtgattgggagtgccaggctgtgaccatgggcaggcctggggcggtctggggctttagcgtggcccaccggtgtgtcgctggtgcgtgtgcacagcgggcgatggcgccagtgccgggaacacgccggcctgtcctggagcgcggcgcctgtaaggcgggcaagtgccctgccggtgagtgagggctccc

SEQ ID NO: 583680 - DNA, 1005 bp, Homo sapiens
  misc_feature (223)..(223): n is a, c, g, or t
gagtagggggaggtggacgatgtcggagtgtcgtctgggactgtgagtgccggacacagtcataagctgtccagattggtcactgcggagcgaggaaggacggtgcaggtaagcactagcatgagctaggacattgaatgatgcttatctgagcgacttacgcgtgctagaggcatagtcgctcaatgagtcggatcaacgccacgagctcgataactcgttngtattcccctagatcgtgactccccgcatgttgaactgtatagagcagttggaggaatgcctcgctaggggcgagtctagcgagttctggtcagttgcagcacatgctatagaaacgcccacgcaatcgtgtcctaatgagaaagacggaggtcttggctggtgagatggcgatcggaagtccgcagtggccaacctaggctaccaggtctcccgatggggagcttgcaatgagatgaacacatgttgccggcgagccacttcgcacttcgccctaaggatctcaaagacgtgaccgtgctggactgggatgactagtggtatgggcgcgtgtatgcgagtgcctgcgagggctgcactgggagtaatagttgcttgatcgcgatatctggaatgaagttccagtaaccgggaagtcgcgctccaccattgttgtggccaacggtaaaggtttcgtaccccatcggcgttgaacaagggcccgaatccgggttttgtaacacacttttctcgaaagcctaatttttcaccccagacgcggttttagtatccaatccacgcgtgggaatgagcgaccctggtaccgaggtgaaaatcaaggtccgccaaggaaagtggagagaaggggagcggttggcaaccgacgggggtgagacggcctaatagggggccgaagccgatgagcctcgtagccctaagggaggcctccctcctgggttggccaacgccccttcccacggggcccccctcctggtcgtcgttgtggtcacaccaagcaaaggg

SEQ ID NO: 583681 - DNA, 308 bp, Homo sapiens
  misc_feature (308)..(308): n is a, c, g, or t
tctttgaagaacctcgaaaaaggagaaaccagacctcccggttttagacatgcacctgtaaccccggaaaaaggaaaaggcaatgaaaccacttattacggaattttttttttcccccaacccaaacccccaatttttaaaacaagttgtttaattctcccaaaataaacctggtctggtacccgttcaaaaaaggttctttttccttaaattcactgtcttatttaattactattactctaaggtacatatgcttttttgggctgctccaataaaatttctttcaatattccccttaaaaaaaaaan

SEQ ID NO: 583682 - DNA, 224 bp, Homo sapiens
  misc_feature (146)..(146): n is a, c, g, or t
actcagctccgtgcgacccacatggccccaggcggggggacaccagaggctcctccatgagcagcaggagtgagcggaggaatgtgccccacagcaactttcccagccaatgccacgatggagatgacaaccccagatctgggganacagaaaccactcagaacggcacagggtaactggccccaaacgctgaaagttagacttcacccgaattacatttacca

SEQ ID NO: 583683 - DNA, 255 bp, Homo sapiens
tcttcgccagtgaaggactacctgagtctggaaatttttgagttgtttgacagcttggggggtagaaatagtgtgtctgtggtcctttttcttctttgccctgtcctctttcacatcctatgtgtaaactttaccctgcaatgttattcattaaacatttttacagaaacttaattttcctcagttatactgagctttctagctagggcaagcaaacgaactcgtgccgagggatcctactagacgtcgaccctg

SEQ ID NO: 583684 - DNA, 324 bp, Homo sapiens
  misc_feature (14)..(14): n is a, c, g, or t
  misc_feature (60)..(60): n is a, c, g, or t
  misc_feature (93)..(93): n is a, c, g, or t
  misc_feature (107)..(107): n is a, c, g, or t
  misc_feature (152)..(152): n is a, c, g, or t
  misc_feature (157)..(157): n is a, c, g, or t
  misc_feature (160)..(160): n is a, c, g, or t
  misc_feature (181)..(181): n is a, c, g, or t
ctgcctgcggtgcnattacaaacacgggacaccaacttcgggacgaaactgcatctgccncgtgccccaaaagcaagctggcaagtgggccgncatccatcgagtgncacacactgtggctgtccgtggtctggctctggtctgaaggtggncgcgnctnccaccctggactctggacttngcaggttacctgcctgtcacgccacccccttacctgggagcagcgagcagtgccccaggcccgagttggagcacggtctctatggggtaagcttcgctgtctatcagctgtgatttgtaaaaataaaatctttaaatctctcg

SEQ ID NO: 583685 - DNA, 132 bp, Homo sapiens
agcttatgatcctcctcctcctgcctcaggggtaagctaccatcgggcgtgtgcctgtgaccagcctcctgggctctgtcacggctgcgctgtggctgtactgccgtggggctgcagggctgtgcatggtgt

SEQ ID NO: 583686 - DNA, 276 bp, Homo sapiens
  misc_feature (115)..(115): n is a, c, g, or t
ttgaatgttggaaagggttatctcagggaccctgctctctcctctacacatgcgcacgcaaacacacactcacacacacacacacaatgacaggtggtggtctggtctaatatantgtgtctgaattcagagggcagacattaactgccaagttttgttttttttgagagagagtctcactctgctgcccaggctggagtgccgtggcacaatcttggctcattgcaacctctgcctcctggattcaagcaattcatctgcctcagcctcctgagt

SEQ ID NO: 583687 - DNA, 291 bp, Homo sapiens
aaatctggggtcacccactttaggccccttccaatgtggaagggaagggataaatttgcacgtgaatggtgaggtcagtaagccaatcctggttttatatactaactgaatgggcatatggggctttcgcccaaagccctgagaaactttctaacctgcccagattaatgcttaggacccaaacgccttatactgtttaaggccttttatttcatctgtaggaccagaaatttaccacccctgcagggcgctccaaaggccacctagcccatttccctgcctctagaaaga

SEQ ID NO: 583688 - DNA, 221 bp, Homo sapiens
aaaatgggattttaaatgggaaaatcggtaatggggttggtttcaaccatgttaactcccgggtccctgaagagccctcccgaacccccccggaaatttttagggaggaagtgggagctggaggtgggggttggtggtccccgtacaaaaactttagcttccgggaccctattgaggtttttaaaaggcccccaataaaaaaccgtggtcctttcggggga

SEQ ID NO: 583689 - DNA, 641 bp, Homo sapiens
taacaaccggcagcggactcctttggctatggcctccaactttaagaaggcaaacatggcatcaagttctcagcgaaaaagaatgagccctaagcctgagcttactgaagagcaaaagcaggagatccgggaagcttcgatcttttcgatgcggatggaactggcaccatagatgttaaagaactgaaggtggcaatgagggccctgggctttgaacccaagaaagaagaaattaacgaaacatgataagtgaaatcgatgacggaccgggcacaggaacaacatgaacttgggtgactttgtaactgtgatgacccagaaaacgtctgagcaaagatactgaaagaagaaatcctgaaagctcttccaagctcttcgcatgacttgatgaaactgggcagattccgtgcaacacgactctgagaacgcgtgcccaaggagtcgcggtgagaacctgactgatgacggacgctgccagcgaacatgagtcgatgacgctgatcgacgatggagatggccgacggtcacgtgagcaagagattcctgcgcactcatgaacaaagaccagcctctattaagatcagcgtctactacctctactgacagccaaatgtaactaaattacgtgcctgccattgggt

SEQ ID NO: 583690 - DNA, 115 bp, Homo sapiens
cggtgttattacggttgtgagatgataagtcccatacttgtcgctatctgaactatcaacaattctgatgttggacagagtgaactcaaaccagcaggcacacacaaccctcaat

SEQ ID NO: 583691 - DNA, 328 bp, Homo sapiens
  misc_feature (183)..(183): n is a, c, g, or t
  misc_feature (189)..(189): n is a, c, g, or t
  misc_feature (194)..(194): n is a, c, g, or t
  misc_feature (205)..(205): n is a, c, g, or t
  misc_feature (209)..(209): n is a, c, g, or t
  misc_feature (214)..(214): n is a, c, g, or t
  misc_feature (223)..(223): n is a, c, g, or t
  misc_feature (225)..(225): n is a, c, g, or t
tactagtcgtgcctcataagtctgtagaaaagcaatatgaaatctgtcgtagcctgtagataaacctacagccacaggaaggacagccacgaagaatgcagaagtcaaaccctcatgacaaagtaggcacaagtctacaataagctaaatcagaatttacaaatacaagtgtcccaggtagcnttgatnccgtnattgagtgaantggntcaangtttgattnanggcctatggtaaggtaacattgtctctgttgtactatttgcaaccaagcagctcactcctgcatccactattcacatcatttttctcagcaagcatctcaaag

SEQ ID NO: 583692 - DNA, 315 bp, Homo sapiens
ctggaagaattcacggccttgtcgtcagtgacgatgcagccgcccacgtacgaatcgacctgtcgcaggcaatggcacatctcgtcgctgtcgttcccgaccgcgacgaagtacgccttcgggccggccagaacgtcgccaccgcgccgcgctcgatcgacacgcccttgaacagcccgttgaccacgtgacgcttgccgttcgcatagcgctgcacgaccgcgatgcgttgagcgtgacgcccgctacttccggcacgaccttgccgtcgcggaacggcacccacacttcctggaagaacttctcgtggccgcg

SEQ ID NO: 583693 - DNA, 832 bp, Homo sapiens
  misc_feature (1)..(1): n is a, c, g, or t
  misc_feature (64)..(64): n is a, c, g, or t
  misc_feature (100)..(101): n is a, c, g, or t
  misc_feature (122)..(122): n is a, c, g, or t
  misc_feature (138)..(138): n is a, c, g, or t
  misc_feature (145)..(146): n is a, c, g, or t
  misc_feature (154)..(154): n is a, c, g, or t
  misc_feature (161)..(161): n is a, c, g, or t
  misc_feature (171)..(171): n is a, c, g, or t
  misc_feature (176)..(176): n is a, c, g, or t
  misc_feature (187)..(187): n is a, c, g, or t
  misc_feature (191)..(191): n is a, c, g, or t
  misc_feature (225)..(225): n is a, c, g, or t
  misc_feature (229)..(229): n is a, c, g, or t
  misc_feature (232)..(232): n is a, c, g, or t
  misc_feature (237)..(238): n is a, c, g, or t
  misc_feature (241)..(241): n is a, c, g, or t
  misc_feature (246)..(246): n is a, c, g, or t
  misc_feature (250)..(254): n is a, c, g, or t
  misc_feature (304)..(304): n is a, c, g, or t
  misc_feature (307)..(307): n is a, c, g, or t
  misc_feature (341)..(341): n is a, c, g, or t
  misc_feature (347)..(347): n is a, c, g, or t
  misc_feature (349)..(349): n is a, c, g, or t
  misc_feature (356)..(358): n is a, c, g, or t
  misc_feature (364)..(365): n is a, c, g, or t
  misc_feature (375)..(375): n is a, c, g, or t
  misc_feature (384)..(385): n is a, c, g, or t
  misc_feature (388)..(388): n is a, c, g, or t
  misc_feature (390)..(390): n is a, c, g, or t
  misc_feature (415)..(415): n is a, c, g, or t
  misc_feature (419)..(419): n is a, c, g, or t
  misc_feature (457)..(457): n is a, c, g, or t
  misc_feature (461)..(461): n is a, c, g, or t
  misc_feature (479)..(479): n is a, c, g, or t
  misc_feature (494)..(494): n is a, c, g, or t
  misc_feature (496)..(496): n is a, c, g, or t
  misc_feature (508)..(508): n is a, c, g, or t
  misc_feature (513)..(513): n is a, c, g, or t
  misc_feature (523)..(523): n is a, c, g, or t
  misc_feature (527)..(527): n is a, c, g, or t
  misc_feature (553)..(553): n is a, c, g, or t
  misc_feature (561)..(561): n is a, c, g, or t
  misc_feature (591)..(591): n is a, c, g, or t
  misc_feature (596)..(596): n is a, c, g, or t
  misc_feature (598)..(598): n is a, c, g, or t
  misc_feature (652)..(652): n is a, c, g, or t
  misc_feature (832)..(832): n is a, c, g, or t
ngaagagcagtatgaaaatattctaatgcagtgctgtccaacagaactttctgtggtgatgganatgttccatatctttgtgctaatacagaatctaccnnccacatgaatactcaaaatgnggctaatgccattcangacatgnntttctccnccaattnactttccatntcccncgtcatatgtnactngtggctcctgactgcccaatgcagttctaatgcntcanggntcccnnccngtggnttcnnnnngggggtttttttatcattcggtgctaagggtttgggggttgggtgttgtngtngagggaagcactcagagttttttgggcacttacncaagtntncggtttnnncattgnntggggggggnggggtgggnngtngntggtctggggggctcagtacgggcntggntattgtgggtgggaatgggagagttaggattttggtgnttgnaattgtgagtggaataangtaaaaaagaaaaantngaggtaaaaaanagggnaatatgtgantggnaaaaaaaaatatggagatggttgggngttggttngtggggtgaaaaataagggtggggtttaanagaanangaggattagaagtggaggagtggagggaaggaggtaatgagggaaatttatggnaaatgaaggatgaaaaggaaatttattttttgggattaagatattgttattgatattaaaaaatttgatgggatatagattattaaaaaaggagtaggtatattatgtgagaaggtttgtgttgtaggtgataggtttataaatgatgaaaaattgattggaatgtgggataaatgaaan

SEQ ID NO: 583694 - DNA, 310 bp, Homo sapiens
  misc_feature (191)..(191): n is a, c, g, or t
  misc_feature (194)..(195): n is a, c, g, or t
gcaaactcctgacctcagatgatctgcccgcctcgcttcccaaagtgctgggattacaggcatgagcaccacacctggcctacattaatacctttaaacatagatggtctaaaatgttgactgtaaataaaaagaatatgacctgacaaattttagaaggagaatttaatgtgtcagttttattggtaganaanntgtacttcatgaggtttgtggactttgggactcacggaggtgtgtagacctctcagtggtgagtgtgcaggctcctaataggtacctgttcttacggatctatggtctaggttgg

SEQ ID NO: 583695 - DNA, 164 bp, Homo sapiens
gcttcgcatggctcttctctttctctgccctgttactgctagtggacttgggatcagttgctttctggagcttcctggcacctccaggctgtggcaggtgcccctcccctggcaatcacacgcctgagtcccccggcccggccccccagtcaggacggtgggaa

SEQ ID NO: 583696 - DNA, 1049 bp, Homo sapiens
ggttttacaatttcaattctagatcacattttatatatgctgcatgccaaaaaaaaaaaaaagagaaaactggccttttctgggtgtggaggggaaaaaaaactaatattctaccttactagtagagtccaaaacaagttttcactgagaagccttttcagtaaaagttaaacaagttggtttttggagcattggtcagttatcctatttcagaaagagtcaaaattcaagcacgatacatttggaaggcttggcaaactcctaaacccctgatgagtcctctcattctgggaagtggggaattggagtagatactggattggtccccgtaagtatggcagatgacagggaggtctttcccaatcaggcactcagaaacacaggtcaccgtatgttctcagccagtaacaatcatactggaggacgaaggactctcccgttggatgcagacaccaatggtaatgggacgatgtaaaaccttcttagcaatcagatggctaaactccttggcttttaactttacactagggaaatggttttctaaaactaaaataccttgaatggtcagacagtataatctcagctggtataagttttggaatggctcccatcgaggcacgtgtaacaatccatgaactgtgactacattgacaatgtaaacaaaaaaagaaaaacaaaaacaaaacaaaaaaaaaacaaaaacaccacccgggcaactaatagcggggggacaacaacagggccacaaggggacaagtcacaacaggggtacacgcgaaccacagtatgtgtgcacaggggcgacaacatgggaggacccacaataaggggcagcgaataaaaattccgaaaaaacccacagagcacccgctaaagagcgacgacgacgcgaccaacaggacagagcaggcgggaacgaccaaaagaccacagcgagagcgcgcgaggacagacaccagcagcgcacagacagaaaagagacgaaacgaagcccagcactcaagatagtggagagagcatccagccagcccgcgaccagaacacagcgc

SEQ ID NO: 583697 - DNA, 314 bp, Homo sapiens
tgtttcttcttagaactgtctgcaaagcctggacctctttaactgatgaagttaccaacctgaatgactaccgagagagtgtcttcaagacacctgcccagcttaccatacttggatagctatgaccgagaggaccaggaagcatctgagatcagatgccgaggtggatggtgaggatgcagcaggaggaagaaggtgggcacaggtgcaaaagcaggcaagagagcaacagcatcatgaaggagaagatgattaagatccctgatgacctgcagaaaacagaactgttcagtattggttaggacttactcccg

SEQ ID NO: 583698 - DNA, 156 bp, Homo sapiens
acatctcgtggggtgcatacgtaacctgagaggaggctggggactctgcggatatgggggtctcagtcactgtccatccaagaagcctggtcgccaaggttgcattggtccacttcattcttggtgttagccttgggttagtgcgcctctgctcaa

SEQ ID NO: 583699 - DNA, 389 bp, Homo sapiens
gggtttttttttgggtatttccccggttttttttttgcgccccgtttttttttttggggtacactttttttttggggtgggtttttttttaaaaaaatggtttttttttttgggaaatttttcccccttggggttaaattttcaattttttttttgtttttttttgttaaaatttttaaaaatttttttttcttttttttcccttttttgccaatttgggggaaagggggtcccctttttttttttttttttgggttttttggggattttttttttccctttccaaaaaaaaaaggttggaaaaagttcctttggggttttttttttgttttttggccttttttttttttttttaaatttctttcccatttttttaaccccccttggga

SEQ ID NO: 583700 - DNA, 232 bp, Homo sapiens
ggtcgatctctagcaggatccccgtatcagatgtgggcatatgtcaatgttttcctccctcttcgtctcatcccccgggccgcaacactgcgttggcagtcagccaggacggagaccacgggcagctccgggtgctggtgatccccgccttggcgatagagattgtctgctgctccctggcttcgtggattgccacacggtcatcttctcgcatctcgtctcttctcttgta

SEQ ID NO: 583701 - DNA, 124 bp, Homo sapiens
ccacctcaactccccactagcggggaccacaggcacggcaccactacatccgggctaattaaaaaaattttttggtagagataggatcttccctatgttacccaggcgggtctcaaactccggt

SEQ ID NO: 583702 - DNA, 1433 bp, Homo sapiens
gcaaaacaccaaatggctggatgactgccgtgtgcagctggtggtggtgccctggagtgccctgtgtgtgccctgtggactggtggaaccgctgtgtgtgcattcctgctgtgacggtttctgtgccatgttgtgcattctgtgtggcctgtgtggtctgctggcctgtggaccgtggtgcctggggcctgaggcctgctggatgcttcgctgtgcagtgtacagtgcctgcagtgcatcacaggcagttggcattgcccaggtcctacccaaagatatagggagcctgctatggatcgaaagtgcaccactgcacagcatcaaatgatcaccctagagcagggcaagcatctcatcatcgtctcatcccacattggaacacagacatttcaacagtgccagatcgcaagcagaattcagaatctggcaatatttccgtttcccaataggatgggtgcccatcattcagtcggaaagcgccattcgcaggggctaactattggcacagcgcaattctcaagggcccaaatgaatcgcccaagccaaaaggcctaggaactcgccgtggtttgacgcgcaggggtcgcagaatcggcgtcgtccgaacaccagaagaggggatctccaccagagcgtgggacaaacgatatatcatggatacataggcacgttaaagtacccaggtgaggcagaaaccgattaaacagaaacgctcggctagcatatccagccgactggaatacaagcgggaacaccacttggtggtaggcttggagtagacaaccagcgtgggagcagcttaccccacgaatggtgcaaccgatggctttggggtagcccaaaacgacacacggggcacccgaagtatccccctgtagttggcagaagcgtggtacactccaaggatacacaccattatcccgacatttgggggtgcggccatacagagtggacgacgtttcctattcaccaccaatacttacaggagatacacaccaccacgatggatctgtcacgtcccccacgcgcaatgtggtcacattaagatcattggtgtgtgtggagtaacaaacgacaaagcgaggaaatatacagggggtcacataaggccgctcgccctaacgccaagaaccagttgttttctcgacgcatatttagtggccatacagacgggcgatagctgacagcacacgaggcgtacaagacgcggccacatagaccagaggactcgtaccatatggcattgcccggttgtgcgggcataaacgctgcacgccctgattcataaattatcagcacccagttgtacgacacgcacccaaaaggagcgagatgaccaataccatattgtggtgatacaacatcaggtgcgatcacgttaccagggacgacaacaccgagtggtgttgcaccgaattagaagcgtacaaaat

SEQ ID NO: 583703 - DNA, 118 bp, Homo sapiens
ggttaggttcgcttcgtcattgttgcgtggtgattagtcggttgttgatgagactatttggacggtggggactcacatacgacgggggaaactacgaactgatcacgtactgcggcgg

SEQ ID NO: 583704 - DNA, 366 bp, Homo sapiens
ggtcgactttttttccatataactatcatccaataaactgatggctctcttactaaggtaagagaatcatattctcacattattaagatcatcaattatcatgatggccttgtacaattcagaaacagcaaacaatgggcaagtatttgatacagtcatttagtcatttattcttcaaatctctgagtgcctattatacgccatgctttgtctatggaatgggagtacaaaggttgaggttgcagaagacctctttcccatgaatttaaaggatttagatagctccaaggataaagaacaatgcagtgggagtaaagctgagatggaaccagaaaaagagggcgatcagaagagagagagtgtgtt

SEQ ID NO: 583705 - DNA, 100 bp, Homo sapiens
ggatttgctggtgcagtacaactaggcttaatagggctcgaattcgagagatcaagagattgagaccatcctggctaacacggtgaaacccgtctctact

SEQ ID NO: 583706 - DNA, 697 bp, Homo sapiens
  misc_feature (1)..(1): n is a, c, g, or t
nttgttggccgatttctccgccgtgttattcgttcccccgctctgtttggggctccttcctaaggccgcttgccttgggggcgtgccgggggggtcgcggttgtacgggtccgcggcgtcccccactggccatagtgtcaggcggaggtgcgcatctcggtcgtctccagcagcccgttgtcttcgagggcgcagtcaggttttgggtgcgtgatccgctcgcggaagcattgtttgctcaggagcgagtgggtagaacgctggtgggtaggggaagcccgccgctctgcatggcaccgcacggttttattgcgcccgaccacgctgcttgccgctgccgcccccgagtcacggcgggttgtcccgtgatgctctcgtatgtgccccactcgctcaggggggggcttgcgctagaaactcgcgccgccgcggtagggaacacccgcgcaggggggccatatttcttctctagcgccgcgcacccccccgtctggtggaggtttgcctctgcgcccgcacgagtgcacggtccggcgaagggacggacgtcaaccctggcatgtgaggtgtgagtgggagctcatgagtcagagtgcgccacaagggggcccgcaggtacccatggttctgtagtcaaataaggcggtttggtgcaagaaacaattatttttcctccgccccagcaatgtcaaacaag

SEQ ID NO: 583707 - DNA, 124 bp, Homo sapiens
ttgctgtgatctagaggatcccgtactgtggtgtaccgttggcttcagtcgggaggctacaccttttgaaattccgtagacacaccatctctgtgattgtcttcatctaggggaaaaccacaga

SEQ ID NO: 583708 - DNA, 573 bp, Homo sapiens
tgatctaaggatccccaacgatggtcctcagctacttgggaggctgaggcagggagatctgaacctgggaggctgaggttgcaatgagctgagatcgcgccattacactccagcctgggcaacaagagtgaaactccgtctcaaaaaataaaaaataaaaaataaaaaataaacaggcaaaagacatgagacattgcacctgagaagatacatatagatggcaaataagcacatgaaaagacgtccaaggccaggtgcagtggctcacgcttgtaatcccagcacttcgggaggccgaggcaggcagatcacgaggtcagaagtttgagaccagcctggccaacatagtgaaaccctttctgtactaaaaatacaaaaaattagctgggcgtggtggtgggcatctgtaatcccagctactcaggaggctgaggcaggagaatcacttgaacctgggaaggggagattgcagtgagccaagatcacgccattgcactccagcctgggtgacacacacacacacacacatatagtgacacacaaagaaaagatgtccaatatcataagccatta

SEQ ID NO: 583709 - DNA, 896 bp, Homo sapiens
  misc_feature (896)..(896): n is a, c, g, or t
agcgggtgattttcgttaaaggttttctaagcaatatttgtcatagccagaagtcctctaaagtcttgccgagtaccatggtagtctttgctgacgaaaacgtcagaagtacgtgtctcagggtgtcatcttcaaggggttccctgggtcttggacactacttgtaataaataacgtaacacataaccacgtatcctgattgtgccttcaggagatgtgcttagggtgaaagtacattactcgagaactccaggtacctggacaacgttgagacagtgagttgcggaatgtgttggtttccatctctcctggtacattcgttccagagatcgagattagtaatcctctgtagtaaagagtctcatcatattagctcgaaattcctatcgttgtaagggtaccacaggcggtaggtgcttaaatttttccttgtatactaagtaacaggaagactctatgccatgtctaccttctcttcttagccctgcacttatactgctgtctgagcaaagtcaacatttccattgtaaacatttcgaagtgtccgaagacgagttactggaacaggattggccggtatagagcgtctgaagtgttcggtattggcttcgcgttaaggaattccaggaaccatggacaagtagacctgagagaggtaagccaggcggttttttgagtttgcacacacttgttgctgaacgagcgttattcactcgttcccgtcctaatataaagtcaaacggggagaaacggtttggcaccgttacttattattatcctaagttccttacgcgcaataggtttctgagggaacttaaaaggccggcgctttttccacttcttggttaaattcacacgtctaaggacgtaccggcagccagggaatggcttgcacn

SEQ ID NO: 583710 - DNA, 207 bp, Homo sapiens
agaggatcgcgtagaagacgacagaagggaagaggtgcacacacttttaaatagaccagatttcacaagaactcactattgcaagaatggccactaaggggaaatcccacccccatgattcagtcacctccccatattgggctccatctcccaacaattggggattaccacatttcaacatgagacttgggcacgggggacagggga

SEQ ID NO: 583711 - DNA, 250 bp, Homo sapiens
agagcgtataagatcacatgagcttaggagttcccatcgtgactcagtggttaatgaatccgacctggatccatgaagatgtgggttcgattcctggccttgctcagggggttaaggatccggtgttgccctgagctgtgacgtaggttgcagacgcgacttggatcccaagttgctgtggttgtggctctgatcgacccctagcttgggaacctccatatgctacaggtgaggctctagaatagaagat

SEQ ID NO: 583712 - DNA, 228 bp, Homo sapiens
ccaaaaagggggggggttttttttttgggttgcccccccaaagctttttgggggggggggggggcccttaatttttcccccgggggagaaaagggccccctttcccccccggggggccctttttggggaaccccccccccctggttttttgggtggtttttccccggttttttgggccctttttttaagggggttttgggggggaaaaaaagggggccccccttttta

SEQ ID NO: 583713 - DNA, 165 bp, Homo sapiens
cagcttcttgacactagacgatcccctcctcatcatgtaagaaggcgtcttcttcctctatataattctttgtattttcctgataagcaattgtattatccagaggatttagactaacctcatcgtcctcgctatcaaggaataaatgaatttcaccacccagat

SEQ ID NO: 583714 - DNA, 537 bp, Homo sapiens
ccaagtcacacggttgaaaaaggggggcaagaaaaatgaaatgggagtgactaaagggggaatgagggacggggccccccctaaagggggcggggatcaataaggctgatatttaaaaaagaaaaaggagaaatctagtgagaagtttttttttttttttttttccaaagacagtagagctttatggtgtaaaagctaggggggtaaaagtatgaaacggcaacaatgttaagccaggccaatctattacaaatataaaggggtgggggtttccaatacacatatgaacaaccggccctaagccacaagatttatcccaaaaagcaacatcaggtttttggatccgtaagtgaaaaaaaaagaggggaatggacagggtgatatcgcatgacataaacgtacatacacatgagttacttgaatataaaaaaaatggtcaggtttgatagatttatatgggaaaggtgtcagagtgtctctaagactctatctctgtctctctctctctctctctctctacactctacactctctctc

SEQ ID NO: 583715 - DNA, 417 bp, Homo sapiens
aatcattggacttgccagctgtagctagatcaggtaaggacacagtagcttctatgttattaaaacatgaaggtgtaaccacatatgctttagccgacccgcttaaaattggatgccaaattttatttgggttaactgatgcagagacttggcatgataatataaaagaagaagtaatccttcattggggatggtcacctagaaagttttttcaaacagttggaactgattggctgagagagttaaattcagatcattggttattaagagcaaatttggctttcaaccaatataaaactaatgaacctgataaatcacaacttgacttcactgatcctaaagctccatttaagttagcacgcgcaagctatttttggaattactcaagaagagtcctggaacccttcattattaaat

SEQ ID NO: 583716 - DNA, 524 bp, Homo sapiens
agaggactctgtctttgaggtctatgagattattagatggaatcattcatcacatcccatttgggctttagatactttgaagtgagtatctcaaattttcaaatcaaagaaccctgattaaaacaaaaggtcttctcacctcaaatcctttatgaaatgaggtcaacttaaaatactttttagttagctatgatataaaattaaactatatttttgttatagttaatgaattaatattgtatcttctgttccttagtcgaaaagtgagcagttaaatggtctatttctctaacaaaacaattaactgattcctcaggatttaccgcccactgtgaccctcttgccctgtgcccacacatacctactaaagaccagttttcagatccccaggaataacataaaatggggcatatctgtctcgtaaatatgattgaataagcatatgtagagcacagttgtttcacttttaagaatcaattataatcatttgtacaataaaatgaattatgtctttcacacaaaaa

SEQ ID NO: 583717 - DNA, 683 bp, Homo sapiens
  misc_feature (497)..(497): n is a, c, g, or t
gcagtaaatattatactagcatgtacgcatctcacttctagagaatactaatatatcgctcacacctcatatcctccctactgatgcctagaaggaataattactagtcgctgttcattatagctagtctcataaccctcaagagtccattccctgttagccaatatggtgcctattgtccatactcagtgcttggtccgtctggcgaagccagcggttgggcctagtccgctagctagtgctgcgaatctccaagcacatgatgggcctagagctacgtacataacctaaaggctactccaatggctgaaagagctgaatcgtcccgagacaatgtatagtttactaccatctgatcatgactttccgaaaaaggggacatcaatttggagatcgaacacgaacccactccacgagtcctgaatctattagcgatcgagtcccgtctgactgatgttttgtaacccagaatcaacgaacaaaatgcgtattgagcntggttccccctaagcagttttcactccgtagccctcataattaatccctcactcctaatactagactacactgactcctaggcccttcagcaatcatggggagccgaacgccgacgttatccagttgaaccactatcacgaaaagaaactctacctctctatactaatctccctacaaatctcctt

SEQ ID NO: 583718 - DNA, 164 bp, Homo sapiens
aatcgagcgcctcctaacacgccgcctccgtaacgagcgcctccgtaacgagcgcctccgtaacgagcgcctccgtaacaccctccgtaacgagcgcctcctaacgacgcctccgtaacgagcgcctccgtaacacgcttccgtaacgagcgccgggttaaggc

SEQ ID NO: 583719 - DNA, 369 bp, Homo sapiens
aaaacaggcatcttgtttgggatttgggtcattttttaaaaaagcggattgacttcccagaaagcagcttttttgaattttaaaacaaagggggaaatttggtattagttattttgagtttttttcaacttataaccctgtaaccagttatttttaaagcccagatgaaataagttctgcatatttttaaaaaatcccagttccctgttaaccagataatgttttccccacccataaaaggtaggaacattgtttttccttacccgtagtatgcaaacccctatccatgttcattttgacatcctttgttgtttttataattcatgggggagttccctataaataaaaacaaaaatgggttaactttta

SEQ ID NO: 583720 - DNA, 417 bp, Homo sapiens
  misc_feature (121)..(121): n is a, c, g, or t
gatgggactggccctgctgggggtgctgggcgacctgcaggcagcaccggaggcccaggctcgtgcagccaacttccagcaggacaagttcctggggcgctggttcagcgcgggcctcgcntccaatcgagctggctccgggagaagaaggcggcgttgtccatgtgcaagtctgtggtggcccctgccacggatggtggcctcaacctgacctcctctttcctcaggaaaaaccagtgtgagacccgaaccatgctgctgcagtttcggggtcctcggctactacagctatcggagtctccacttgggcagccccttctccgtgtcagtggtggaggtagacttctatcagtacgcgccactgttcagtcagggcagcaagtgccctggcgaggactttcgcatggccgcactctc

SEQ ID NO: 583721 - DNA, 452 bp, Homo sapiens
atcaaagagattacactaattaattttaaacctaacagattttacctaataatgacatatggatcatgagaactgcagaactcttgtcacgtaatgaccttgtccaaacctcagcaaaaggagaccaccaaactatagcgagccttgtagcagcataaggtcgtgttcgtaggatgaccgcagatctctccccgggcctctcggttaaatgtctcccagagaaaactcaacactgcccacctggccatagcctctggaccccctttcttggagcatttacaaaaaaagagcttacaattgtgagtccttcctctgtccccttgacacgtatgtgttctctcctacaattcaggagtatctttcttaaggacctgaaagccattcctttgaaatttaatcatctggaaggttgctatctcccattcttgggtgggagggtagaatcctgactt

SEQ ID NO: 583722 - DNA, 456 bp, Homo sapiens
gtgcaccttgcatgctgatagtcgacgtctagagaatcccatgacttcttagcccagatgatagtgttggcgtacagttatatcgtgaggcaacactatatctgggctatgagggtatagtgtgggcatatcttccagaatctaactatcagttttgcagtatagctcagacttctctaaatctaaattcttaattggaaaaccctgaggattcatgtaaaaggtgtggcgcatttcttggtatatagtatgtgtgatataaaaaccaaccgcttgtcaatgggggtaatattactgtttggtaattcgttctcttgctctactctctacccgaagaacaaagcaccacccaagagtttaaaaattaaagagcttacactgaaggcctccagccagtttacctaaggagatggaatgtggctgggtggagagccatatgctggagaacagaactcc

SEQ ID NO: 583723 - DNA, 627 bp, Homo sapiens
  misc_feature (507)..(507): n is a, c, g, or t
cccaaagtacttgtgtccgggtggtggactgggcttcgctgcggagcccgggaagctgcctttccttctccctgtgcttaaccagaggtgcccatgggtgggataatgaggctggtcacagcagcactgttactggggtctcatgatggtggtcacgggagacgaggatgaggacagcccgtgtgcccatgaggccctctgggacgaggacaccctctttggccagggccttgaagttttctacccagagtgggggaacatgggctgcaaggtggttcctgatggtaacaactacagacagaagatcacctccgggatggagccgatagtcaagttcccgggggccggggacggcgcaacctatatccgggtgatggtggatccagatgcccctagcagagcaggacccagacagagattcgggagacatggggtggtaacagatatcaagggcgccgacctgaagaaggggaagattcagggccaggagttatcagcctaccaggntccctccccagcgggacacagtggcttccatcgctaccagttctttgtctatcttcagggaaggacaagtcatctctctccttcccaggaaaacaaatcgaggttctggaaatggcagat

SEQ ID NO: 583724 - DNA, 171 bp, Homo sapiens
actcatcctcaggtgctatttcagtccaatttttggctttatattttgctatcttctatacttctccaatacttgtcttagtcttgtactcatttatctatctgagcactcttgactaatattttcattttcatatacttgtctctattcttccaacttttctctctaagt

SEQ ID NO: 583725 - DNA, 135 bp, Homo sapiens
aggacaccatgactgccgccacacccaccgatagaaggtcccaggaaaagtccgagcggaggaacgacgggatcgacgagacagcggcggaaatcatcactgccttgggcggtgccgagaacatcgaggacgtcg

SEQ ID NO: 583726 - DNA, 243 bp, Homo sapiens
taagagacgtgttgcatcgttgtacttgcagtggtaggtgatgtctgagagtatagttggcagcagcgcttgaggggcaagttgggtagccatttccttggaagtcactccttctacattatattcaaactggctgccagattgatagttctcctagccagacgtgtatcttgtcccttggagctcctataccagttcttggctgggatgttttcaggttgggcccggatacaggtgccgccc

SEQ ID NO: 583727 - DNA, 387 bp, Homo sapiens
  misc_feature (313)..(313): n is a, c, g, or t
gatttagatataaatttaacaaaatatatataagatctatatgaggaaaaccataaacctcttatgcaaaaaatcaaagatctaaataaatggagaaatattctattctgtttatgaacaggaaggctcaatattgttaagatgtcatttcttcccaactgatctatagattcaatgcaatcccagtcaaaatcccagcaagttactttgtgggatattaaactgattctaaagtttatatggacagacaaaggacccagaatacgccaacatgatattggaaagaggaaggaacaggaatcgtaggtactgntactacctgactttcaaaacttatttttaaaggcttcagtgatccaggaagtatgggtgttgggtggaaaggac

SEQ ID NO: 583728 - DNA, 647 bp, Homo sapiens
  misc_feature (647)..(647): n is a, c, g, or t
acgcgtttgtgggccatacgcgcacctcacactgtacacggagcttgcggaatcgccagggcgcacgcatttctgcggggggtctctagtgaaagagcacaggatactgactgtgccggcagtgcttcttcttctgcgcatatgcctttcacgggctatgaaggatgggtgggcaccctggtccagaacccacagaatggagagcgcaagcctacagcgggtcccagaagccaagaaggtgtgtgggccctcaagcttccagattgtgctggtcaagctggagagaactgtgaccctgaaccacacgtgtgggcctgagctggctggcccctgaaagggatgtggtgccttcagagaccaagtgtgagaatgcaagctggggtgagacccaaggtgccggtaatgacacacaccttgtggccctgctgaatggcatcttcaaccacgagtgtgacattaagcaccgaggacactgtgccggagagtgagatatgcactcggggactgttggcccctgtgggggcctctgagggtgactacacgggcccacttggctgcgttaaccacaatgttgggtcctggaaggagatttataacccccgagtatgcgcacagtgcccgctgggcacctgtgtttaccgcgtgtn

SEQ ID NO: 583729 - DNA, 134 bp, Homo sapiens
tctggccgctgtaattccgagctactcagaatgctaaggcaggagatctcgcttgaaccccaggggcagagtttgcaattgagccgagattgcgcttctgctttccagcctggttgacagagcaaggctctgtc

SEQ ID NO: 583730 - DNA, 244 bp, Homo sapiens
gctccgagacctcgggcatccggtcgaggtatggggctgggacgaggcgaacgtcggtgccgccgtggacgatccgttcgagctggccgagaagattcgggccgtgatcgccgccgagaccgggctgtcgtgcagcgtcggcatcagtgacaacaagcagcgggccaaggtcgcgaccggattcggtaaaccagctggggttttcgcgctcaccgccgagaactggatgacagtcatgggcgac

SEQ ID NO: 583731 - DNA, 110 bp, Homo sapiens
catcaccctcacctctaccatcaccaccatcaccatcactaccaccaccatcaccatcatcaccctcacgcacataccatcaacacctatcaccacgcacaaacaccacc

SEQ ID NO: 583732 - DNA, 113 bp, Homo sapiens
tgttggcagagaccggccaggtctgacacccacgccctccttctcactagctgaactcccactccgctaaggaccctgcaaatgcagaaccgtggaccttggataatgaaagg

SEQ ID NO: 583733 - DNA, 390 bp, Homo sapiens
tatcatacctggactactggcatacctaaaccttctggcatacctgaccttctggcataccttgaccttctggcatacctggacctatctgggatacctggaccttctggcatacctggaccttctggcatacctggaccttctatagggtgatagattaggtccaaatggatgagaggagttcagatatctatttgcgatacaaacgatagtgcgtgtagatttttgaacgctttctataattggtggctgcttataaggcctactatgggtagtaaaatagtctactctactctacaaggtataaaacctaatgtccaaagagcagtaccactatggactaacagttaaataaacaaggagatacaaagggtactgagaacaattatc

SEQ ID NO: 583734 - DNA, 100 bp, Homo sapiens
ttgaatctgacggtttctcattgttctagagactggggagtcacatataaagtccccagcagattcagtgcttggtcagtgctcactcttgcttcatctc

SEQ ID NO: 583735 - DNA, 365 bp, Homo sapiens
ttaaatgggtgtatggcatgatgctcaggttggggagatgaatgaactgtcagccagataatactatctgggtgcatagtaccgaaaagttagtttttcaacccttccttcccctccctttcccccttctattcgtccccagtgtctattcttgccatctttatgtcacttataagtgagaacaggcgatatttggttttctgttcctgtattaatttgcttagaataatggcctccagctgcatccatgttgctgcaaatgacatgatttcctcctttttatggctgcttagtattccatggtgtatctgtactacattttctttatcctatgcatccttgatcggcacctaggttgattcctt

SEQ ID NO: 583736 - DNA, 173 bp, Homo sapiens
gaacttgataagttgtgcaggtagtgaggatgcaatgtgcagaaggcgggtctgcttccaagacgtgcacaaagacaatgacaggcttcttgtggcgagtgctgggtgatagcatggtacacagtgcttgcgactcacagtgattgcatcgtcccagactgctaactatgggg

SEQ ID NO: 583737 - DNA, 150 bp, Homo sapiens
taacaaacaaatttgattattaaaccaaaccctacacagaaaattattccaaccctcaatttttgaattttcatttaaataagcaaactctaaagacacatcttaaaagatgtttgtgcagctatgtatttccaaaatactcatatttca

SEQ ID NO: 583738 - DNA, 1033 bp, Homo sapiens
tgggtgcgggcttccgctggcgtgctcgttcttcgtttggtggcccgccgggcggtgctgtcgtcctctcttgtctgtgcgcgcgtgtcggggggtgggcgttgggggctgtgctgtgtgcggtgttcgggtcttgcttttgtgtcgtttggggtggggtgtgtccgtgtgtggtgtccttgctgcggtttgcctcgctgttggcccgtcgagcgtctttttctcgcgtcgttgtgcttgtctctctcctcttcgtcgggctgtctgctggctggggctgggtgttcggcctctctggggttttgtggctcgcgtgcgtgtgcgtgtcttcgctcgtctttcccccctcctccttcccttcctccccccccttcgcgcgccctctttttctctcgcttcgcttcctcctctctcctctgtcccttctctccctctctctcttgctcctcttttttcgcttatgcttctcttcctgctcgtgtcgcgcggcctctgggctggggtcttctctttttttgtctctctccctgcctcgctctctcgtctcgctctgcgctctcgctccttcttctccttcgtttttgttgtttgccctcgcgctcgcccctctctctcccctccgctctggtgtcgcttgtgctttgttcttgtcttcccggcctccctcccgcccctccctctctctcttttgtcgttttctcgttattcgggtttgtgttctggccgttgttggccctcttcccgcccccccctcccctcccccctcccgccccgcgcccccccgccccgcctcccccccctgcccctcgccgccgcccgccgccctccccctctcctccccgcctgcgggggcgccccccccccccccccccttcttcttcttgtgtgcgcctgcctctctctctctctcttgttgtttgctccgtcgcgcggtcctctctctctctctctctctctctttttctttttttctttcttctcgtcgttggattgattttttttttttttttttttttataggtaaaataatata

SEQ ID NO: 583739 - DNA, 854 bp, Homo sapiens
  misc_feature (2)..(2): n is a, c, g, or t
  misc_feature (239)..(239): n is a, c, g, or t
  misc_feature (252)..(252): n is a, c, g, or t
  misc_feature (259)..(259): n is a, c, g, or t
  misc_feature (270)..(270): n is a, c, g, or t
  misc_feature (282)..(282): n is a, c, g, or t
  misc_feature (306)..(306): n is a, c, g, or t
  misc_feature (327)..(327): n is a, c, g, or t
  misc_feature (336)..(336): n is a, c, g, or t
  misc_feature (339)..(339): n is a, c, g, or t
  misc_feature (350)..(351): n is a, c, g, or t
  misc_feature (357)..(357): n is a, c, g, or t
  misc_feature (372)..(372): n is a, c, g, or t
  misc_feature (389)..(389): n is a, c, g, or t
  misc_feature (393)..(393): n is a, c, g, or t
  misc_feature (396)..(396): n is a, c, g, or t
  misc_feature (408)..(408): n is a, c, g, or t
  misc_feature (419)..(419): n is a, c, g, or t
  misc_feature (438)..(438): n is a, c, g, or t
  misc_feature (442)..(442): n is a, c, g, or t
  misc_feature (501)..(501): n is a, c, g, or t
  misc_feature (602)..(602): n is a, c, g, or t
  misc_feature (604)..(605): n is a, c, g, or t
  misc_feature (608)..(608): n is a, c, g, or t
  misc_feature (610)..(610): n is a, c, g, or t
  misc_feature (614)..(616): n is a, c, g, or t
  misc_feature (618)..(620): n is a, c, g, or t
  misc_feature (635)..(635): n is a, c, g, or t
  misc_feature (637)..(637): n is a, c, g, or t
  misc_feature (681)..(681): n is a, c, g, or t
  misc_feature (793)..(793): n is a, c, g, or t
  misc_feature (823)..(823): n is a, c, g, or t
anagcaggcggggaccgggccggaaggcccgggaggcgcgcgcggccggccgccggccggccggccacggagggggcccagcaccaggagggccgggagcggcgggcgccggggccgggccgggagggccggggcagccccgcagcaagaagcccggccggaggagacagaggggggggaagaaacgggggcagaggggacggagggagcgtggggagcgaagccgggccagggggaangaggagaaggggnggagggnttagtggatancgttgagtaggnttgggcgtaaaagcccggccatanccaccacggcaaacacggcangtggggctngcngtaggtgtacnncacccnctgtgtcggggtctnggtccccaccagcggcncatnccncaggggcgaggnggagaagtggntcatctaggtcttcaagancggngacgcggccggccacggcggggccacaaaggtcacccgggagggcaccatgaagggccncaagcgccaccggtacgacagcgtgccgggcaaagacagccccctcgggccgggacgcggagcggatcgaaggcccccggttttggtgtggacgtgcgcantnnttntngttnnntnnnttttttttttttttntnacaacaaccggcggacggagaagcagaagcggcgggggaagaanagccaggagaaggagaagcgccgggaggcaggagaccaccccggggagcggcgggcccgggacggcgagaagaacgagaacagggacagcggcccgggacacgggcaaggcngccaacgggaccagcaccccagggacgggngaccgcgcccacaccgaacgggcgccacggc

SEQ ID NO: 583740 - DNA, 619 bp, Homo sapiens
aagaaatgaattcgtcccaatccgagtgttggccacatccctccggtgaactggcgaaattcctgaaggattaaacgtgaaatgttcaaggcaagctgtctttcagagcattgcacaagatcagatggggcgctgtatgtgtgttatgaggagcggccggcaaccaacaagtaagcttctgagatattatgcagaattatgcgaaatgtgacgtgcataagattcaagttatcacacataacattatattggtttcgatatttacagagcacttttacaagtcagcatgttaattaaaatgtgtggccacaatcagtaattttggcttttggccttgtacaaaaaaatgagtgtggtgatccattaaataatggataggtctagtcatgttaatagttttctgttcatgatcacgtctatatcttttaaccacatttagggtgactgcaacgtaccagtgatgtttctatgctaaaagatcagtgacatattttatttccgcaaagaaccatagtatctttcagcagcccattcatgagaggggtgttcagtatagccattgcatggattcaaagtagttcttgagcgccattcgtgccaagattcagtataaattgag

SEQ ID NO: 583741 - DNA, 335 bp, Homo sapiens
catgggaagattacaataaacaggagaaatgaggaaaggaaaatagctccgcgcagtctgaagtctgcaaggtgtgcagagccagagagacatgagtatgtatctgatgccacactatgcctagggaaagtttagatccttgtgcccctgactagctgcctcgcccattatcttcatgtacctagaatatgtaacacaaagaacaatgtacaacctataaatagcttatgtaattataatgtaaatatttggtacacaactcaggaactgcctcttctttccctttacttccctaattgttacaagcaacacttattacgttgctgattagagtg

SEQ ID NO: 583742 - DNA, 152 bp, Homo sapiens
caagacggctgagcccgtgccgtgtatacctgtgcaaacacgcacgaacaggatggaacgaggacgaacatcgcgagctccgaggtaaagacaaaccctgcgaactagtgggacgccgcagtcatcgttgttctcgacactccacccatccg

SEQ ID NO: 583743 - DNA, 179 bp, Homo sapiens
gatgatgcgcttctcagaaatgtccaggcatttctgagaagcgcatcatctctacccaagtccaggtcctacgacaagagcatgcagcggggcagccacttctccagctcatgaacagcattggggctgtcaagaactgggtggacgatcaggctccgggctgtaggccttaatcaccg

SEQ ID NO: 583744 - DNA, 846 bp, Homo sapiens
cacctggcaggaggcagtcctggcatccaaagaatgcttggcgaggaggaggaagcagttggagagagaaggattctgggaaaggaaggggccactttggagcccaagcagcagaggattctgggggaagaatcaggagcccctagtcccagtccacaaaaacatgggagcctggttgatgaggaagtctggggtctgcctgaggcagatagaggagcttagggtgccctcccttgtaccccaggagatggagcattgtgtgccaggaggaggctggagactatagttcagtcttgtgggggaaggaggatgagagtcttctggatgaggagttgagcttggctgggtccagggcccagacatctgactctccgtccctgagcgaggacggtacacgacagaggaagaggaggggctccgattgggaccccgtagggatcctggcagatggttgtcacttccgctcgaattccctcttgaaccccctaccaacagagctgaggccctgaccctgtcagacatgtccctggattcctgtctcggatggtctcctgtcacgggctctcctttgctgtggggtcctccgtcatggcctcgtgcccctccttgctgctgcttgcttgcttccattgctagtcaggtcccacgtgtggtcgcgttgtcttgtgacagcaagcgctgggtggtgcttgacgtggaggctcgttgggatctggcggggctttcttaacctggctccgttgcttcgggccccgcacctgcccgtccgtcttatcctatgtcttgggcaatggttaacacaatcggggggcgctctgggggcctgaacattggggccgagggctt

SEQ ID NO: 583745 - DNA, 219 bp, Homo sapiens
  misc_feature (46)..(46): n is a, c, g, or t
cactctacacgagctttggctcagtgatcctcactgctaatagtancacttgggaggtagaggcaagtggaacacctgaaatcaggagttcaagaccagcccagccaacatggcaaaaccccatctctactaaaaatacaaaaattagccaggtatggtagctcaagcatgtaatcccagcactttgggaggccaaggtgggcggatcacctgaggcca

SEQ ID NO: 583746 - DNA, 996 bp, Homo sapiens
ggagcccaaggaggcccgactgacgactgaccagttgccatgggcgatcctacgtacgagatcctagacgtgccgcgaagatgcgtccgctgatgacatcaagaaggcgtatcggcgcaaggctctccgaggtggcacccagacgagaaagcccatgactaataaagagtttgcatgacgaagacatttacaggaggtggccgaggcagtatgatgggctgctgctcgtgacaagcacaagctgggagcatttacggaccgcgtatggccggcgaagggctgcaccagggaccaggcaactggccctatctcgtggccagaagcctggcagctggatgggccttggccttcatgctgtgtcgagccttgtccggcaatgcgcccaggagggcgagggctcgttccggaggtcacagtctcagtctctgagcgcaggctgcgcagtaacgccctgtcttgggccaaggaaggcctccttctttgtgagaagcttgtcaacccctgggccgttcctgctcaccgttgttaccctccgaggacaagggccccggtgattcccacggcataaggaaccccaggcggaggggcggcaattgacctccaccagggtgaaccagcaagcccattccccaaaggcggggggcccgcgccgccgcccccctgattttgttcacccgcgcttggtttcggttaagacgccccccccggtttttgttggccgttttgcccttttgttcccccccggtctacccccagtttttacacaccgttgggcggcggaccgacgccgttccaccagcacaccttgtttttccgtccgccgtttcccctgttcaatggctccttgttgttccctccccggttatccaaggtctccccctgggggggggcccccttggggcgtgcccatattgtctccgcgcgattccgtgactattgtccataaccggatattccgtaagcccccagcgccattttgggggttcgccaaagggg

SEQ ID NO: 583747 - DNA, 789 bp, Homo sapiens
ttgtggctaacaccatattaggggggtgttttgatcacccgtctacgggaataaagtgtccgtcgattccgcgcatacatggaacacgcggggggaactcattgagttgtcagggcccctgaaatttcgaatgtgtccaagcgccacttataaccgtggggttgaaacacggttctctttgctacagggagtacaaaccagtccattactgatgtctatagcacagtgcttcagtgaccagtaatcgccagccacttttggaagcacgcgacatattgcttgagcccaggaggttcatggcacagcctgagcctacacaacgtgagaccccgatctcgtacgggtgcatagggaaaaattaccctaatgtggcggcatacacctgtagcctcagctactcaaggtggctgactggagggatcacttgagcccacaagggctgagtctgcagtgagccataatcatgtcacgtgcaatccaagcctgggcacaaagcagtgagactctaaccttcccagaaagtaattataagagagcctatgtgcctgtctttgtgcatttggtggagggggacagagagagttacatttataggtaactcacaggtggcagattccgatttgggtgcctgtagagccacactgtactaccattaagaaaagaagtcaaaataaacaagagaattgcgcttctgtgatatatctgatagagcataaatttgaaaggggagtactcacaatggaagtaccataataaaatattgaaataaaaaaaacaaacaaacatgca

SEQ ID NO: 583748 - DNA, 201 bp, Homo sapiens
  misc_feature (191)..(191): n is a, c, g, or t
ttatattgtggtgttaccgtagaacagagactcttgaaggatggttaatataaataaacacctcgcaggaagagggaaaagaaaatataccaatgcctgggacccaactcctctattaaattagaatctccaggtggaatccaggttttgtttttttaagttgcccaggatgggctaggatgggcagccangaattaagaa

SEQ ID NO: 583749 - DNA, 185 bp, Homo sapiens
  misc_feature (165)..(165): n is a, c, g, or t
gggctccggcaaccgctccggcaacgcaaccagctccgctgcgcgcaggctcgggctgcaggctctcggctgcagcgctgggctggtgtgcagtggtgcgaccacggctcacggcagcctcagccacccagatgtaagcgatctggttcccacctcagcctcccngagtagtggatctaggatct

SEQ ID NO: 583750 - DNA, 704 bp, Homo sapiens
  misc_feature (441)..(441): n is a, c, g, or t
  misc_feature (446)..(446): n is a, c, g, or t
  misc_feature (453)..(453): n is a, c, g, or t
  misc_feature (463)..(463): n is a, c, g, or t
  misc_feature (475)..(475): n is a, c, g, or t
  misc_feature (676)..(676): n is a, c, g, or t
  misc_feature (688)..(688): n is a, c, g, or t
tttaattcagccctctttgacaattaagtttttttactttgactatttttttgcatttttattaacctaaaatatttctcctgcctatttagtggagaaaaagccaaagcataggaaggctttcgcctctgcttctgaaactggaagatgtatgttaacccctgaaagaatcatttaagagtcatagtttttctgctaccttgacagtgcagatgtcattctcctctttggacagacaaagaagatacatctaaagaagggaaataactagtccaagtcttcatagatggctagaggccgagtctggacaagggcctgggtctactgcctccctgtatgtccatgatggcatgaacatttgtatccagacctgggaggcctttcccaggactcagttgccctgtggggagcacagcataacggattgggacaggccaactnagggnggcaggnttcttccccnttcccctcccangtttcctgtcttttccagttgggggattggggaactcaacccccgaggggatgcccaagattcctttgcaaaaccgcttattaacagaaaaccctaaaccattggattgtttgaaaaccaaaacaagcttgggctcaaaggtcaaggacacctttaatggcaacctgcccttcctcttcaagtgctctagttgaaacaccnctgtccatccangcacaccctaacaagg

SEQ ID NO: 583751 - DNA, 1115 bp, Homo sapiens
ggtacttcgccgtccctcgccgtccttcgccatcgcaacgaccaccgtgaccccgatctctcgaaatctgcagacatcttgatattttacccacgcatagtctgtcagagtcatcctgcacgcccactcgacgccagggcgccgggtgacgtccacatcacgggcgcatggtcggctcctactcgtcaccatcgggggaaactgacgacccggggcaaggcggcagagcaggtccggccctgtccttgcgtgcacgtgtctcggtcctctttgccgcgacgctgagccccccaggacttcgcgctgtccgcgggaacagacactggctaggccttgtgggcctgtgctgcatcctcggacggtttcgcaccgagccagttgcccatctcgtctccgtgcagacacctctagatctgcacccccgtgaggggcttccacatgtccgcggggctgagaatggccctgggagcatgtgacactaatgacgcagcagcacaccaaggggcgtcgtagacaacacgcgctaccctcttcgtggacgcacgaaccaggcgacactcgagcagcgccccccgacgatattcgacacagagacactagtagaccacccgcggtcgccacacctcgagccccaccatcgcatccccgacctcactccaaccgaccgcacggatacaccctcgacacacccagcccaagaaaacccagactccagtgcatgcactagcatcccatatgaggagccactacgcgattccacaactgcacaaccgagccaaacgcagacaccggacatacaacggtccgacaaaccaacaccaccaaatcaactacacaactatcaaactaccgagaccaatacatgacaccgacgccacaaacgaccgaccgacagaaccactctcaacctcatggatagtgcccaagccccaagcacaccacaagaagacaacgaaacgacagaacacccggcaaacaaccgccccaagcacggatgggctcgaaccatgcgcactagacgcctcctcctaacgctattacaactcctgacacccgaaaacaccaacaacaaacgcagcagccacctcaacccgcgacacgtacggcaacgccgt

SEQ ID NO: 583752 - DNA, 155 bp, Homo sapiens
gtacgatgaggcaggcccataccattgtccaccgcaaatgctttctaagatgccttctctctccatctaccttccagtaaggatgacggtattatggttcttggaggtctccaaccaccttccctaattttaataaataattgtcaagtttgttt

SEQ ID NO: 583753 - DNA, 374 bp, Homo sapiens
tttgccttgcagaagctctgcaattatatgaggtcccatttgtcgattctcgatcttacagcagaagccattgctgttctattcaggaatttttccccccatatccatatctttgaggcttttccctactttctcctctataagtttcagtgtctctggttttatgtggagttccttaatccacttagatttaaccttagtacaaggacatagaaatggatcaattcgcaatcttctacatgatagcagccagttgtgccagcaccatttcttgaaaatgctgtcttttttccactggatggcttagctcccttgtcaaagatcaagtgatgattagtgtgtgggttcatctctggggcttcaattgtcgacgc

SEQ ID NO: 583754 - DNA, 793 bp, Homo sapiens
agcggactggggcaggagaatcgcttgaacccaggaggtggaggttgtggtgagctgagattgcccatcggcactccagcctgggcaacagagtgagactccatctctcacacacacaagacacacacacacacgacacgcaaaagaaaggtgaatgtgacttaagtgacagcaaaattgtatgcttaaacaatggttaggatagtacatatgatgtgtgttataccacagtgaaaaagattattgctaaaaatacctagccggaccatggtaacgtgggcaggtcatttgtcaaatgtgagagacggagatggcggggaaaaggacacatttaacacttgatgcaagaattatgatcaaaattgtcttagcctgttcacgctactcttataaaatgccatagtactgtgcaggcataaaacagactgatattctggccgggcacagtggctcatgcctgtaatcccagacactttgggaggctgaggtagggtggatcaggagttcgagaacatcctggccaaatatggtgaaaccccgatctctacaaaaaatacaaaaattagcaaggtaactacaggccatgttgcgcacacaacggtcacggctagtaccagtgtatatattatgaagagatggggatcccccccaagggtgagactctaactcctggtcgacaagagaatctgggctgcctcggtctccccagagtgctagggatgacaagtgtgagctacacaagcacggactaaacatgatgattaagagctcagccagaagacagagaaagcac

SEQ ID NO: 583755 - DNA, 488 bp, Homo sapiens
gtgcagggggggtagggggggttggagtctcagctctgccatcaccatagctaggtatcctcagtgctcccacctataaaatagaaggggccgtgcccatcttttaggactatgatgatggaatgcactgataactttaagttacttggtgtagggccgggtgtaaaggatgtatacggtaatgggggatggtaaatgaaatctaggttaaaaagataatcagggcagtaccccatcctcctaccaccctatcaaggttggccattctagagtttcaagcaacttttagaaaccacacggggctttagtgcatctggtcactagagggattggctagttggcaggattctagagggctccaaactcagatcagggtggggtccgtgacaaggagaaaagctgggttatatgcaagagcgtaacaaaatttccccatttcttttctttttttcctttttttgtgggggcgccggcaattggggtaattt

SEQ ID NO: 583756 - DNA, 219 bp, Homo sapiens
gctcggccgttattcacgtggtatgatttttcatttcctgaataattgtgatattgggcatcttttcacatgcttgttggccatgtgtattgtcttctttggggaaatgtctattaaagtcctgtgcccatttaaaaaatcaggtcgtttgctttttgtttttgagttataggagttttgttttttttttttttgaaatgggattttggctttttcccc

SEQ ID NO: 583757 - DNA, 303 bp, Homo sapiens
aaatggctctatcccatcgtgtaacaggacacacaggattgaaagatttccatgccttccgcattgtatagagacaccaaggcatgagctctaggcgaagctcattagacctgtctctgcaatgagaagttgtggaataggagactggcagcaatgtgacgacaactaccattgacatgttctgcccttggaacacattaaagaagtgcggcatgtcgtcgtcattacattgtcatcgcctcgatgatccagggaagtctgtcgtggattgtagcaacatactcattggaaggtcagaacaca

SEQ ID NO: 583758 - DNA, 580 bp, Homo sapiens
  misc_feature (115)..(115): n is a, c, g, or t
caggaattcggcccgagggaaggccaaaaaatgaaatggaaaatccttttttgctcagcatctgtaaaaaacaatttgaccctcgcagcctaaaagccctcaggagggattcccnggccaaaaaaggcagattgtttttttaatgataagggtaatgtggggaacccccagcttccccctgatttggggccaggggtcacatccttgcgggccccgagaactcccccccccaaattgctgttgcagggacacaagcacttttggggttatcaacccttttttttttttttcagcaaaaaggcttttgcccccaaaaaaataaaaccaatggggggaaaaggaagctatgcctctttccccaaagccaagcttgttttattataacatgatccccagcttttgatttccacttaagggatgagatttggaattatttcaaaagtatgattgattttgatcaggggaaaatattttaaaaaaagggaattatttcttaggggacttaatttaaccccccttaaagatttttgcccaaacatgtaatcatagggttagactaaaaaaaaataataaaaatgta

SEQ ID NO: 583759 - DNA, 606 bp, Homo sapiens
  misc_feature (603)..(603): n is a, c, g, or t
cggcgggcagggctgggcaccggcctgagtctcaccggactgtccaccgggagttgagtcggagtggcgagctggcagtacgggctctggagcagtttgccactgtgggggaggccaagctgataaaaccaaaaaggggattgtcaatgaacagtttttgctgcaacgggtggcagacggggccatcgacctctatgccatggtggtggttctttcaagggcctcaagatccctgagtgagggccccccccgggcccagcatgagaaaatgctttgtgacacctggtgtattgaggctgcagctcggatcccaaaggggatggccgccctgcagtttgacccctggcagcaagaggtttaccgcaacttcaaaagcatctccaaggccttggtggagcggggtggtgtggtcaccaacaacccacttgggttttgaatactcccggccagggcctgtcccagttatgggccttccctcaagccaaaaccgaagcccctttccttaaggccctggtttgtcccgaaggggcctagtgttcccagccctgggcctgctttcaagagccctttctgcctcgcaaataataaaaatttttagcccgncca

SEQ ID NO: 583760 - DNA, 122 bp, Homo sapiens
tgtgagcatcgtccgcatttgctggccatttggagttgtggcccacctgtttcttctgaactgtagtcacagaccactggttagttcacccccacaatggccaaaagctacaaacagcttaa

SEQ ID NO: 583761 - DNA, 503 bp, Homo sapiens
  misc_feature (94)..(94): n is a, c, g, or t
  misc_feature (113)..(113): n is a, c, g, or t
  misc_feature (137)..(137): n is a, c, g, or t
  misc_feature (402)..(402): n is a, c, g, or t
gggaaaaaaaaacaaacaaccccaggtgtctttttttaatctggtttccgaaaaaactttcaggccctgttggaggagcacaattttagtgggncaagggccctaaatacctnagggccttggggggaccccctttngggccccagggccccttttgtgttgtttgtgggttcccatccccccacacctgtgtaaaatggggggcccggtattgcattgtgggctgtttggggaccccccaggaaaccaggggttttaagtggattgtgtgggcctgggcattcccaaaaaggaagggcccctgtgccctgcccggcctttaaaaaaacaaaatttttttccccaaagcaggggggggtttttttggaccaagggaggagccgttcattccccccacaaaantgtgttttttttgccaggaaagaccaccctcctttttgggaattttttggcaggtggggtgggcccccccgtgttgtttaaataaaaagccttgggccgga

SEQ ID NO: 583762 - DNA, 369 bp, Homo sapiens
  misc_feature (10)..(10): n is a, c, g, or t
  misc_feature (27)..(27): n is a, c, g, or t
  misc_feature (78)..(78): n is a, c, g, or t
  misc_feature (315)..(315): n is a, c, g, or t
  misc_feature (333)..(333): n is a, c, g, or t
  misc_feature (364)..(364): n is a, c, g, or t
aaaattaaanccccctatatgtgttanccctgggaaaatatgatgaatgggtatgtgtcccacggcaaaaactgcatnccctaatacctatcctagccagctccccaaagcaaaagtataggtaaggttttcagagaaaattattgctataaaatctgaagcttaaagaaggcaatgactttgttttcctatatgaaagaagcacagtacgtatcattgatgagtcattatcaaaaccaattttgggcttggtatggtggttcacaccggtaatcccagcactttgggaggctgaggcagaaggactgcttgagnccaggagttttaggccancctgggcaacaatgcaagacctccatctganccaaa

SEQ ID NO: 583763 - DNA, 265 bp, Homo sapiens
gacaccgcatggagaaacgaataacatgcatacagaacagccagaaacagcgaaagcaaaaagaggaacaataacaacagcaacacaacaaacaaccacacaaacgccacgacacaaaacaacgcgaacgaacagaaacaacacagaaacagaagcatacacacaccacggcaaacagcacgccaacagcgaacagccaacccagacaccaagagaaggaaagaaccgaaaaccacaacccaaaacgaaacaaaagacaaaacaa

SEQ ID NO: 583764 - DNA, 157 bp, Homo sapiens
acagcgtcagggacaggaggataggaacaaataactgtagtccgggcgaccaatacagttattcacccaggggcagtgatgatcaacatacctccacacagttgtcacagacactgcagtgggaacatcgagggggacggtaaaagcggcagtgtgg

SEQ ID NO: 583765 - DNA, 783 bp, Homo sapiens
  misc_feature (783)..(783): n is a, c, g, or t
cccaggagcaagatgcgtctgagtcccgccaatgcgcggctgcactggccctcggtagtgtatgtgccctgaagtgacgtacgcgcgtatagacaggaaaaggttaagaagttcttgacataggatgttctaccaggaatgattgatagctcgtggatattgaatgcacgttcaacgtatgggtaacctagctattggattcaggtttgtgcctccaatcgtgcgacagcagtgcttggcgtcttgatcattgtagtgcatcctgttgactggagcggtagacacgggagggaattgaaccacactgtatgatttgggcttggggagcttccaagtatgggggttgaagatgactagtcgcgaaggtcaggtcgtaacctggccgcaaaggggccttgcgtattattggacttggtactgtgaccgtggattagccagaaggaagggccttggggctgggtctccgtgccggaaggttgaaaccaaatgtgggtaagggaaggggggggaaccaaggttcggggattaaggacattttaacacaacggaacgttagggtcctccgagttcgggggaccctcgggatttagtctctacacgcaagtttgctgttggaagacatgcccgacgttcatggggggcccttttaacacagctttggaaggatatggatgcaattccaactatgcactagggggaaagatgattcatgaggggcaaaacacaccctagttgagcgactcgcaacctttggtggtatccccgtaggactaacaggcgcgn

SEQ ID NO: 583766 - DNA, 568 bp, Homo sapiens
  misc_feature (264)..(264): n is a, c, g, or t
cgaatgccaatccaaggttcccaaatcagcccgcacatccactatagcgctactttatatcgtcttcttgccgtagtcgggaacgggaaggaaagtctcttttaaagcgttatagttattttgacgagagagagggagagtagggtgcgcttcaattttctcttggggagtacgtatgtcgtgcatactttggacggatcgtataaccggacctgacgtcgtaagaccgagggatgtgaccttactatctatctgcgtcgtagntatgtgggttagtgtgtctgcgtaggttgtgagggcttgaggatagtctttgttcgatcttgtggtttttgcgtaggaggtcttgaacctgaagaagaggggtagttttctttctgttgcctggctgagttaaaacgtgtttctagtgggagcccgcctctgatagagttcgtcttttttatttatatagctgtgttccgtgagaggagggagtaaagtgactcggcttcgttgtgtgccgggacggggcgcgtaccgggtagtagctgcgttttgccgggcgtgtttgagcagatgttcttag

SEQ ID NO: 583767 - DNA, 302 bp, Homo sapiens
  misc_feature (5)..(5): n is a, c, g, or t
  misc_feature (8)..(8): n is a, c, g, or t
  misc_feature (210)..(210): n is a, c, g, or t
aaccntcntgcctcccaggttcaagcgattgtcctgcctcagcctcccaagtagctggggttacaggcgcccaccaccatgcctggctaattttttatatttttagtagagatgggatttcactgtgttggccaggctggtctcgaacgcctgacctcatgatctacctgcctcggcctcccaaagtgctgggattacaggcgtgacacncaatacccacccacctaatttctactttttatttttatttattcatttatttatttttgagacaaagtctcactgtgtcacccaggctggag

SEQ ID NO: 583768 - DNA, 292 bp, Homo sapiens
aaaaaaattaatccccttttttccctggttttcttatttcaaaaatcccagcccttgggtaaactttggatggcaatgttagggggtcctttttaacaagctttgggttgggctttgcttttcccctccccttagccctagtgggtggccattaggccaacccttttttttttaggggaaacatggggatatggacaatgtccaaaaccccctgaatattaggaaatcctttacgatattttgtgtagccccttttgtttgcgggtgagggaataaagtttttccccagtga

SEQ ID NO: 583769 - DNA, 195 bp, Homo sapiens
tgctagaggatcccggtgggaaaagcctgggaactggacagagaaaatggggcgggggctacctttctcaagtgttttcgttcagatggcaattcctctggttgtcggcaccaataaccttatcattctcatccacaacaagcagcgcttggaggaaacgctgatggtggtggatgagaatgataaggttatggg

SEQ ID NO: 583770 - DNA, 1331 bp, Homo sapiens
agttcatggagggggacaagggagtgcgtggtaaactgtcttgagccccaccctacacctgcctgtgctggcaaccaggtggacctagaccatgatgtgaagatctggtgcacccgacagctgaagctatccactgatgctgacagggttacaaagatgtgattaacgaagaacaacgcggcgagcgggatgaagatagcttgcaccaacactgacctgtcttgaatagctcacatgctgtggtatccttactgcactcacctgagtacagagacgccatcaccggcgctggcgagaacctggggtctggggccacagacgcggactcgtgagtgcagtctcccagaatcctcagacaacactcaggacgaggaggagggacctgaccggagatgcagcagcatgcccatcttgaggccatcataccaggccctacatacagcaacaaaaacgcacctaggacctagcaaagccatgaaagaataaaacgacagaacatccccagcgacgaagagaccaagccagaacggagtgaaaccaaacgcaagagtcccctacgacgaagtgggccgcccgcagccacaggcaaccggccgcctccacggcaagcaggcagcaataggacccacgcgccacgcaatgcgccaacaaccaccaaccgacccccgcaccccccaccacgcagcaacgcacagaccaccacacgccaaccccgcgcacagggcacaccggcgccccgcggagcaacccacccacacaccacaccacaccaccccccagcacgacagcgaacgaagaggaaatgaaggcacaccacgcgacccacccccgcaacacacaggagagcaacaaaagaacgcgcccagacagtgcgaacaaacgcaagagagcaaacgcacagacccacagaaccacaagaccagcaaagcgacaaagcacagcacccccacaaccacgcaccaacaccacacccacacgggacgagcggccgaggggcacgccgggacgacgcgccgagcgccgagggccaaaacggaagcacgacaacagcgacgagggcacacaacatcacagcccccagggcggcagggccgccgacgcgcagcgcgccgcgccgagacaccaccgggacgcgcacgacgacgagaaagagaaagagacgggacggactaggcagcgagagaagaagtcaggaagagcacggcaagagaaacgcaaaaagcgaccgggaggcgcacagcgcggcgacacacccgccgcccgagccacgccacgccgcacgcccgcccgcccgccgaccccgacgacaggcaggggaggcagacgacaag

SEQ ID NO: 583771 - DNA, 425 bp, Homo sapiens
ctgccacaaagactgggctcagaggcgacactgaggaatgtatcacaggcaggaggcctggtgttctcagatgtattctttgtattgttagtgccctcttttgggcttcctacgtccagctgtgtctgagtaaaccgtccgtcttttccgctgttacctctggtgttgcttaactacgtgatctaaacagaattcgagtcattgagggccacatagatatacacctagaccgtgactattaagtcaataaaactaaaataataacgagcatacatcgccaaaacaaaaaaaacaaaacaaaacaacaacaaaaacacacaaccatcaacacatacaaaacacatcaaaaactaacaacactcaaaagacataaacacaccatcacacacctaccaaacccacaacaatcacaccaccgaccaaac

SEQ ID NO: 583772 - DNA, 289 bp, Homo sapiens
tagtcttcatgcaactaaaaatccctttttagatcatgggggggtacttcagatgctattctaatagaaataagaagtggctgctttaggaagcatactaaatgaagcacctccttaagggcactgtttacatgtgtactatctactaaatcatgccaaaagtaggaaaaaaagacactctggcatagttctcctagacattcaaaaggaaaaatatgttaccattcacaatcctaagtcaaaccgcttatatacgtttctgtaaaattgataaataggggggaacagg

SEQ ID NO: 583773 - DNA, 191 bp, Homo sapiens
ctgggatccagcctccatctggctaggaggcgtgccccgctacccggtatttatgccaaatgggccagtatcgaagaattcacaaaaaagaatagcctcatcatccccaccatcatagccaccatcaccttcattaacctctacttctaactacgcctatttacaccaaccccggcgttaggccgatctga

SEQ ID NO: 583774 - DNA, 128 bp, Homo sapiens
ggacacaccggtggacggaacggtaggactttgggtggatgacgagagggtgaggcagattctgaattttcttttgaactgagatttggccacctttgggcattccttatgccagtggtccgagcgga

SEQ ID NO: 583775 - DNA, 466 bp, Homo sapiens
  misc_feature (466)..(466): n is a, c, g, or t
tatggcagctctgaggtaaactttaatttctgggctgacaggacttccaaacccatgctccatcctgggcacctttttactcgtgcccaagcatggggcagcccagtccaaaagggtgccttgccagggcccaaggggggtggggagctcacttcacatttccaggcgtggaggagttgagaggactgggggagtacgtcctgtccacacgcccatttgccagcaagaggggccatgtgacttcaccttcaaccccaagttcctgtggattcccggggtgggaagggtgaccaatgtggcccttcctatcacacaagggttcctctcccaaagatacctgtaagagggcggggcgctcacagtggaacccagagaaacagaggggggctaagggcaccgcgagggcccccccagaggccctctccgagagtgggggaaaacgggtggggcccctccaaaggggggn

SEQ ID NO: 583776 - DNA, 562 bp, Homo sapiens
  misc_feature (207)..(207): n is a, c, g, or t
tacggtgttgttcagcattttggccagttccacccttattgcctatcaccagatcgcgggggtcggccaattccagtagcccccagagctttgcggggggcaagccccccttgtcttatgccagcgctttgggggcccctccaaagcccaggccccctcctgagcaggccaaaaaaagtaacgcccccctgtcttttttccaggaantgagcctagggggctcttttggcccccagggcttttcttcattttttaaaaaatccctttttttttccccccagggggaatgttttaatttctgtttggacccggaaaattaagggggttgggcttcctctttaaatgccccgttccctttgttttaatattaaatatgttcccccttaattgctttgctgctagccctccccctaatttttttaaaggatattccccttttttgccttttttatgggtccaacctttgcccgcttttttgtaaaataaaaaaattttttaatttgggttttgttccctttttttgcccccagctacccccccaagggttttttgtgccccttta

SEQ ID NO: 583777 - DNA, 129 bp, Homo sapiens
tcggtaccaatctgtcgattccaggtgaacgaggactgcgctcctggaccgcgcggacacggcggctcagatcacccagcgcaagtgggaggcggcccgtgaggcggagcagcggagagcctacctgga

SEQ ID NO: 583778 - DNA, 400 bp, Homo sapiens
gtgcactgatctgtggtcgcctcaggatccccgcttatcgagctactgctcatgggcgcagaaatactgatctgctgacgaaggctcacccgagatctccgcagtcttcagcgcattggaccgaaaaggcccagctatcgtgggctgggggagctccacgggcccttcagccaggtggaggacctggaacgcgtggagggcataacggggaaacagatggagtccttcctgaaggctaacatcctgggtctcgccgccggccagcgctgtggcgcctcctgaccgtcgtctcctcactccgccttttcaaatttttgtataagcccgtgttgtgtacatacagtttttgctccggatcgctccggatgagcgtgctccggatcaggagtaccgagctcga

SEQ ID NO: 583779 - DNA, 367 bp, Homo sapiens
caatttttgactcaatgccccggcccctgtagtgagttgaaccccctccagcagtcccctggcaaaagcccctggaaaacatgcaatgggaaccttcaccctgaggccaggccctttccatgctacccaacagtaaacaggacaccctgtgttgttggctgcacccgggttctgggattttggattccctggggcctggaaacccctttcagcacaaacaacccctgtgttccgaggtccagtcaactggccgggaaggaattcaacccaaccaaggacaaaggtccatattatgacgggtggatgctcgtgtgactttgctgaccttttatgttttttatgggcaataaaggccaaaaaagctcca

SEQ ID NO: 583780 - DNA, 718 bp, Homo sapiens
aagactgttaaaaccccttgtggttttttaaaacccatttgttgtctccccttggtccccatgtccctttacctttctccccaattttggggtggcctttctgaacttaatagagatggcccttatcaccgaacactttggctttaaaaggggtggtcaaaaaaaactcaatcctaattgtaacgctatggcttatccattctccccccttaaaaggaatcgttgcttggactttccagcagaatattaatcacgggaagaatttttccctcaatcaaagtcaatatgcttccatctctcaatagtgagtagcccccattctacttgaaacttagtattgaatttgagatcttgaacttatctgttaaacatcagatccttgggtcatagcacgaggccttttgcacaaaaacgctgcctgtctgttagtcatctgcgcaaaaagaacacccagcttgtaaagatgatttctacagaaagagtgcatgaattcaaacccttgtgctgttttgtgccactaaacatgcatatagttcataggtaaacaccatccccatgccccatatcccaggtataagctggatccgcatacgtattgagctcctctcagtctccatgtggggttcaattcattaaacgtacctgcgcatgccagttcagtgaacaccaacagtgttattaattaaacagcacgtctcattagccataaaaaaaaaaa

SEQ ID NO: 583781 - DNA, 321 bp, Homo sapiens
ggtctgcaggaactgaccggagatgttgatgccgttttcggcgaagaccttgttgatctcgctcatcacgcccggaatgttctcgtggatgtgcagcagacggtgcttgcccgggtgggctggcagcgccacttcagggaagttgaccgaggacaccgaggtgccgttgtcgctgtacttgaccagtttttctgccacttccaggccgatgttggcctgggcttcagcggtggaaccgccgatgtgcggggtcaggatcacgttgtccaggccgcgcagctcgctttcgaactgttcgtcgttggagcgcggctccaccgg

SEQ ID NO: 583782 - DNA, 421 bp, Homo sapiens
  misc_feature (98)..(98): n is a, c, g, or t
ggtgctctagaggatcctccgtatcccaccaaagccttttggagacagggtctgagaggagtcagggtcgtataaacttaacacattgtgttatccanaaaaccactaaaccctgttactctcggtctgtctgctatgtgaaaccaagggcgggtgttaaacgtttatcacccatggatatacaggatttgcgtggggacattctgggaatggggctcaagggggtctaaccttggaggtcaaggaagagggcaaggaatctttggttaagagggaagattggattgaacttgttggggggtcaggaacaagggggcaaggggttttggcttaagggggggaagattgggattgaacttggttgggacaattgttgggttggtaaaaatccattcccttcccccggttctttaacaattag

SEQ ID NO: 583783 - DNA, 271 bp, Homo sapiens
acctactagctgtattacagactggtagctacagttaggcaacatacatgcttgtttctcagaatcatactataagatacataaatctgccaaacgtctagaatatcagtattaaaatagtctgatagatgccttacaggatcatgaatgactaaggtgggatatgctttaaaaccaaatttaaaaattccaaaaagggcatctttatcttgttcaaccatgcattctggaaagggtcaatttcagaaattatttaaaggttaataagagt

SEQ ID NO: 583784 - DNA, 143 bp, Homo sapiens
taatcgagccgtacttcagctcatcatgtcctgcaagtgacataaagtccttttatggctgcatagtattccatggtgtatatgtgccacattttctttatccagtcatatcagtgatgggcgttaggcgttggctggaagtc

SEQ ID NO: 583785 - DNA, 126 bp, Homo sapiens
aggcctgagtggcaggagcactaaagctctgggcacagagtccatgagctcggggtccagccaacgacgtccgtgccacagactccacatagctccggggctctggctggatccgtcttctggtaa

SEQ ID NO: 583786 - DNA, 224 bp, Homo sapiens
ggtatgcagcctgctgagtgttaccagcctgctgaggtgtgatgccctaggcactactctctgcctcttctgttaattgtaaggggagtaggcagactccattagatcttgcctatcctttaggatggacgctcactcagatgtacgaaggcatctgccactggctcttaactctgtccttccagtgagaagcgtcaggagtccgacttcctcagcaggctgca

SEQ ID NO: 583787 - DNA, 1191 bp, Homo sapiens
tacaaggttcagtttccttataatgaccccaatttcccgtgaaagggcagggtgcaggcagctagggtgagtggcaagagagtgttcactttgaagattctgcccggatatgagggcttggcccacatgtgcgtggaaggcccccttcccaggaaaagtacctctcgaaccagcgtcgtgggtctcctcgtgtgccaggatccagttttccgccgagtggtgttttgactcgtagttccaccgtgccaatcgtggacttcaggggaaagaggcaagcctcgcgtggcctcgagaaagaacccgagaattccgagaaaagtggagccgtgctatgtggtgggtctccaaaagagagggattgcaccactgtggccggaaaagcgcgtattcttctcctctcagaggttgtgttcccgaggatccgctgtgggaaacatttctccgagtgtgtattgagagaaatgggcggaggtctctatgaagaggcttctgaaggtgaagtccctttcgaggggaaaagcccgaaaataatctgtgagaggtttacccagcagggggacaaccgagacgcggctccctttttaatcaagagtgttgctcctcgccgagaaaacatttagtgggcgaaggtgcccaaccaagaaagagagtgtgggtgtctccctttcagatgtgggaagccatacctgggtgccgcctctatatacatgatattatctaatttccccaagaacagagcaaaagaagggggtacaacctatctcttagaggaggagaccgaggatgattagaaaaagcacagaaaagacggggggggggacacctcatgtgtgggggaccttcttgttgggggggtctataaacaaggaacgaagtccaccgacggggtgcaccctcgtaggtacttacaaccatatttttccgatatgctacaaatttatttgaccatcttccctatacgaagggagagaccgagtggggtgcacgaagggcgccgtcacctcgtttttaattagcattccacttacatactttatacgacgatcattcaaagcacacatggggggggggagcgcttaatcagttggagattatccattactattgatacccacccgggtgtgaaaccaaccgccctttattaccttctatatatgtcccaggcgggtgggagagtgggttgtattgcca

SEQ ID NO: 583788 - DNA, 852 bp, Homo sapiens
ggtcatctggaggagatttgctttctttgttctccaaaaggggaggaaattgaaactgagtggcccacgatggcaagaggggaaagcccagggtacaggaggcctctgggtgaaggcagaggctaacatggggttcggagcgaccttggccgtgtgtcctgaccatctttgtgctgtctgtcgtcagtatcatcatctgcttcacctgctcctgctggtgcctttacaagacgtgccgccgaccacgtccggttgtcaacaccactcaatccaccactgtggtgcatgccccttatcctcgagctccaagtgtgccgccagctaccctggatcaagctaccatgggctaccatagcatgccgtctcatgccagggatgccagcagaaccctacccaatgcagtaccaccacttacccagtccagccgcatgggcccaaacgggcgtacatgagacctggttgaggaagcatgcgggccctaccccggcagcagctccttaaacccgggctaaatggatgcccgtaggggcctctgagcattccctggccttctctggtgccactcggggtcatgtctgtggtgtgtccgtggacttggtgtgcacggcccgggttccttaagccccattgtgtgctgtgtgtgtccaggccggttccttacgcccatgtgtggctgtggtgggtctcgcctgaatgtggggcactctgttgcggaccgtggggcgccacctgccgaggggccgggccaaactgtgtctcccccggggattgtcccaatcacgcgaccccacaaggggggggggcctctcggggcccaagagggccccgcagggggtccatcctgggagacga

SEQ ID NO: 583789 - DNA, 1655 bp, Homo sapiens
  misc_feature (155)..(155): n is a, c, g, or t
  misc_feature (364)..(364): n is a, c, g, or t
  misc_feature (1171)..(1171): n is a, c, g, or t
ggaggtgtgcggatgcatgaagtaccgtctgcgtgattaagtgtaaagatgctgtccgatgcgcgattgatgcggtcgtggatcctgtgcccattccatcgggcggagcgctgaactggttcctccaggaaagtgcattagcgcttcatcacatnttgcatgtgcatgacgatggaagcatgtccaatgaccgtcgtaatgcaactcaatcatgtacaggaacgtacgtgaggaactgacgtggagatgattcgctctatgtcgtatggaaaggagtcggtaatgttctgtgggagacattgtaataacgcatacgtagttatcgagtactgtagaacagtacaacttgtgagagagtttcttnatagctattaggttagagtggtaattggccccggcgatatcgatggggacttgaaggagattgtgtgcacaggccatggagaagaaagattggggtgaagagtttatttgcgtattcagggtcttatatatagcgggattagtagttcacttgtgatacaccttgttggggaaatcacttggatcagatagttttgggttgatatagttaccgctagttaaccggggacaaattgagtacaatactatagtttaagagggatacgggagcgatagtatgcttgagactatgagacacagagaagtcgacattggataggaatccgtgacgcaagatttaggggagagtcgaaggctaggtgagggggtacagtggtaagggtcatgattgggcgcgctttggcgtcacattggccttagctttggactcgcggcaacactggtggttccacaacatgtgggagttcacgagaagaacctgaccgctatgagcccgacaaggatcggcggtcatcggaaaagtgtcctacctcgcgggtatatccaatatcgctgtcgcacacatttttacaagagtgccgggcgaacaccctagcactgcaaggaaccctggggacaatatcacaaggggcactcggtgcgacactaacggctcattgggcaggcgcccaagatacagggggtcccgttgggggccaccagcgcggaggaaacaccacggagctctcaactacgggctagaaccccgaaccacgcgaacctggtcgggcaaacacaaaaacgctccagacaacaagggcgacgatcnagcacgcgaccaaaccagcacgacatcacaccgccagacacagaacagcgatcaccacacacgtcgagaccgggaacacccttcagcacgtgcccacccccgcacactaacaggcctggtaaccgcgtccaattctacatggtcgcgccccaccgaggggtcaaacaaagacaacgatgaacccaaccaacgtggtggacccaacacgaccggggtcaccaacagcaccaccatcacagacagagccaagatgcgcccatagcgcaacgaacacccccacaaacagtggagagactgaggcactagcaccgctgacgtgacgagcccgccaccagcgaaaaacagagagagccacaaccacaacgcacgagcacgagaggaagcaagcaataagtcataagacacaacgaagaacgagacaaggtcaaaagacagttccgcgaacgcctcacgcagcgcgcgtacaccagccccgactaggttt

SEQ ID NO: 583790 - DNA, 245 bp, Homo sapiens
gcatcaccaatcacctcaacaccaacagcgagcaccaccaccgtcatcatccctcatctaccatcagctatcacctctagggccaacaccagcaccaccatcatcatcataaccatcaccaccaccatcaccatcactaccatcaccatcaccaccatcacctcaacaccaacagcagcaactagcagcatcatcatcaccaggatcaccatgccacactctagcctgttcggtatgagcggcga

SEQ ID NO: 583791 - DNA, 120 bp, Homo sapiens
actgcagccagctcatactgaaaagtgacactaggggtagcatgtagtagcaaaattcaaatgatttagtcacactggaaaactactattcttccccttgcttgtttttatttttttttt

SEQ ID NO: 583792 - DNA, 177 bp, Homo sapiens
  misc_feature (32)..(32): n is a, c, g, or t
  misc_feature (53)..(53): n is a, c, g, or t
  misc_feature (59)..(59): n is a, c, g, or t
  misc_feature (69)..(69): n is a, c, g, or t
  misc_feature (71)..(71): n is a, c, g, or t
  misc_feature (73)..(73): n is a, c, g, or t
  misc_feature (80)..(80): n is a, c, g, or t
  misc_feature (82)..(82): n is a, c, g, or t
  misc_feature (122)..(122): n is a, c, g, or t
  misc_feature (154)..(154): n is a, c, g, or t
  misc_feature (156)..(156): n is a, c, g, or t
  misc_feature (174)..(174): n is a, c, g, or t
gaagcctaaattccaggagggtgagcgagttntgttctttcatgggcctcttntttatnaagcaaagtntntnaaggttncnataaaggacaaaaaatttaaatattttatacattatattngttttaataaaaatttggattaatttgttttngngagctgttttttcaaatnttt

SEQ ID NO: 583793 - DNA, 1855 bp, Homo sapiens
accccgccagccccggctccgccgtgccccccataccaccccggtcggccacaagcgcagaggctcctcgaggcatcagtggttgttgacctcctgtactggagagacataaaagaagactaggacgtggtagtactaggtagccacagcctaataacctagctagctattacatacaagacaagtatacacaagcatacgtagacgccgtacacacgcctaacataagcctataggaccatagatactactagtagaccatacagagctataacggatataaccacagcgcgtgctgaatacccaactctaactccgacatacacaatcacgcatgcaacggacacacccacactaaccaggcgaccactaatactagggacaactcccctgcaccagctaggccttcatacactcctctgaccgcaacccacggcgctctccacgaaacagctaaaccaagaccaccaactaactcaggcaacacctaagcagactcccaacaagactagaaaacccccaacagtccaaccaatcactacaatacgcgagacaacctactccacgaagagccgtaccacaacaaatatcacatctgaacgctacgcgacaatcgacagctattcaaacacatcatagcacacaaatcacataccaggcacaaatgaatcaagtggaccaagccagcgacacgagactacgcatagcgccactaagatgtaacaaccgcaaacaatgagtaagacaacgagacaccacttgctacattcacaacaactagcgccaaaacatgcaacaccatccataacacgtggaccaacactcaatgaacaccaacgcacatacaaatatacgctcaacacattcccaacttaccaagtgcaggtataaccccctaggcactatacacattagtctaccttgcaacacacgagcacacactacaagcgcgaccaccacaaccgaacaatcgacaaaatcacaacagcaccatccaaaaatgcaacacccatctgcacacaaccacatctcaacagcaaacacgagcaatacacacgacacgcatacatacccaaaaaagacgcccatacaaacgacatacctcccacactacccgaacacacacaatcaccaataacacaaatatcaacacagcaccccacaccacaacaacatctataacacagtacaaaaacagaaacctaaacaacaacaaacaacctatctaaatatccatacaaaactcaactactatcaaaaactaccctgacgaaccaagatccaccatcatagcagactacaatctactacccaatatcgaacacaacacataaacacgcaactacacaaccagcaaccaactatacacctatatacaacaaaaaagactattactatcaaaaacactaaatcacatacacaaaacaaataatctatataactacccaacaacaaccaactaaattacacaaacaaaaaaactatactacagaaacaacacaacatatacatacaacagtaactaatataaaccacaagaccatatcaccataccacacccgagcacataacatgactaccatactaacacaaccactccctcacactaggaaccactaaccacagcaataactcacacacgaactaagcaacatctacacgaacgaccaccagacgaacacagcacaagacacaagcaacaacacgagccacacgcacataacaacccagatacgctaaacatacaactataagacacaccgacaacacaatgcaggccgaatcaaacgagcaccacatcactactcagacaccactaacgtctcaaatatacaaccgcactatcatataccgg

SEQ ID NO: 583794 - DNA, 293 bp, Homo sapiens
aaaggttatggtttctactatgttctcccagctcactgcaagaatccaagtggggaaagccagttgccgtgatacaaggacacacaagcaaccctactgagaggcccatgtggtgaggcactgaggcatcctgccaacagccctatgagtgagccctttaaaagcagatcccctgctgggcgtggtggcccatgcctgtaatcccaacactttgggaggccaaggcgggtggatcacctgaggtcaagagtttgagtccagcctggcctcgatggtaaaaacatgtctctccc

SEQ ID NO: 583795 - DNA, 696 bp, Homo sapiens
tcgacaccagcttcggcaacatagtgagactctgtctctttaaaaaaaatcaaaattagccaggcgtggtggccgatgtctgtaatcttagctacttgggaggctgaggtgggcagattgcttgatcccagaaagttgaggctgcagtgagccattgatcatgccactgcactccagcctgagaccctgtctctaactaacttattttagtactgtgtgttttaagtaatacagatatttgaattgagtgttgtgaagaacagaaaggtggagctaattctatgagaggtttagaaaagatgatgtttgggtggatcttaaaagaataatattgtgaatttttttcttggttggcaggttgattgggaggtcgaagggttagagtaggtgaaaaacataattcatgctaacacaagggattatgaaagagcattgttttcaggaagtaataagtatggcatagagtgcagttaggaatataaatctatagtgattaaaatagtgtgatatttagaccgaaaagtacgtggaaaagagtagaaagcctagaaatgtgcccatacacgcaaaatgtcctatatctaaaggcgcatatttccaaccatgagggaaaggtggctatgggtattccgaattgtgtccttttccactggggtgtttttccctctcgaccggcttttccttaattccattttc

SEQ ID NO: 583796 - DNA, 100 bp, Homo sapiens
ccatggtgggcaaggcacgaggggtcttgacttgcattggttttctcctagattgtttgaccttctcccttgcatcagcctgttccagggggatccccta

SEQ ID NO: 583797 - DNA, 187 bp, Homo sapiens
  misc_feature (1)..(1): n is a, c, g, or t
ntgggtcagtgtcttcgagctgaaggacaataacggggagtagctgtcaggccctgggagtgtctgagtgtaagtggagatgggtttgaggtcactgagggaagtatgggagccatccctctatagatacaagtcattgggaaatagtctcgtgaggcctgtgagtgtccagggtaaccctgggctg

SEQ ID NO: 583798 - DNA, 436 bp, Homo sapiens
aggcaaacaaaaggaatttggaaaaaagtgaagtgtggaatggaaagacaaagtatcagagacttgagagagtgaggcaggaggaatgattaagcacagaaaagtgaggataaagtgagccatgattgcaacaatatgctagagagtataggggacagagtaagacagtatgtctgtaaaacaaacaagaatgaagatagggatctgtataagtgttagaggcatttgtatgtccttgattgtagagtgtcaggtgtaaacgttaaaatcacaggtgtggatgtgattgatacatatcagctggatggaacaatgaagtattaagccatgtcaaaaaaaaaggaaatctcagtctgagactagctctctctctcactctctctctctctctctctctactctactactctctctactactactctctctactcgtg

SEQ ID NO: 583799 - DNA, 114 bp, Homo sapiens
  misc_feature (7)..(7): n is a, c, g, or t
cccacantctgggcccaattacacagacttcactttagaactacagcattttttttttttaagccccccgcaatgattcagattagggtaccagagctcgaatatctccgcata

SEQ ID NO: 583800 - DNA, 544 bp, Homo sapiens
gattcttgggcacgtaaagaagttggtccatagtttctaaccagtcttgttggcacacgtctatgtgatcactgttttggttgtttcctttgagatagagtcgtcgttctgtcaccttaggctcagtgcaatggcacgtctcggctacgcgcaacctcagcctcctggttcaagcgattctcctgtgtcagcctcctacagtagctgggattacaggtgcatgtcaccatgcatagctaatttgtgtatttttagcttagagatatcggttttcaccatgttgccagttggtgtcgagctcctgacctcaagtgatccaccacccatcccaagtcttgggattacaggcgggagccaccacgtctggccttatcacagttgtttaacaaaattgagagataaagaatatgccataaaatcgttcctttttgaagttcagtggtttatagtatattcacgaggttgtacaatccatcagcatcatctgattccagaacttcaccaatctcctacccaagggagggccttttcccccaacaaaaca

SEQ ID NO: 583801 - DNA, 405 bp, Homo sapiens
ttcccttttcccatggagtgccacggaaaggtcatactctgccgttttgtctcttaatgcatttgcctgggaagttgcatctccctggcatctgcattcaattaacactttagtgccataggtgtggaccatcaggaaatggcgtctccctgaccctaggtgccaatgtatgacttttagagaggcaatgtgataactgctgagccatcacccaacattcctggtgggtgggagaagagccctttcctgccctgctcatgctgtctaatggcctgtgacagcatgactttagtaggctttgggaaatcaagagttttgaagattattggtaaaataaagacatttggttgaaattaggtcagacattaggtttgctaaatgctttaaggtaataaactgcttcta

SEQ ID NO: 583802 - DNA, 128 bp, Homo sapiens
  misc_feature (12)..(12): n is a, c, g, or t
tctactgccacnttctatctaccaacatatgggaagtctcagcagagtggtaaggaggtaaaaacagaccagatgctgacatctgataggaagagaacaaaacagaaaaggatagaatgactgtcagg

SEQ ID NO: 583803 - DNA, 138 bp, Homo sapiens
agaatctatttacagatagtagttcatacttcaatgacagtgtctagcttgcattatgaagcctggttatgtatccacgtactaacataggtgagttagattggtatttctagtacagtgtcttaccctaaagattgt

SEQ ID NO: 583804 - DNA, 1004 bp, Homo sapiens
  misc_feature (73)..(73): n is a, c, g, or t
  misc_feature (91)..(91): n is a, c, g, or t
gtcgccaaggcccaggagaaccccggtgagtccgtccagttagaggcagcaggctaactaatccttcacctanttcgacttcgagtcgccntgccagcgcatgaccccaagatctctgagtcagggagagcatccagtgtatcagggaacattgtcggcgctcctgtgctatttctcgtgtattgtaactgtctcgcgtgtcttatccgagatccctaatgtaatacgacttgtgtgacaatctgtctgtgccttacgaagagtgtctgtgcagctttgttatcctttttaaaagcaacttttaaaagtggatggggaggggggctagcatacgtggtagggttctagaaatctgtggtcatcgctgaaatcctttttgcatcatgtttgttgatgttggagtgactggaagcgttcagtgccccagattccctaggatcaggcaacttgagccgtgctgtactaggatgcgtatccaacgatcgacttgtccttctccttgcgtgacttcgagttcgtgtgatctcctccggatgcgattcgctaattcccttgtggggaatcccttgtacatttccttggttgtgctctcggcacttgggatccgttgccgttccggagacatcgggttcagctcgtggtctcccttgtgcgtccgttggcctcttcttcctggggattgcgtcgtctggctacacgcacccggtgccgcacctggcgctcacctgcctggcccctgcctcgactccgcgccgcttggctcctactcgcctggttttcctccaaccactcaccggtcctctggctggggctctcgctcctatgacggctcccagtcgtcccaacccgttgcgccccacgccccgcacccctcagacgttttcgtccccgccatctggggcccccctggacgcgccgtttccggcggcttcccccgcgtcgtttccctcgtggttgcccacccgtggggccccctctacatcggtgacgccaccctctctctg

SEQ ID NO: 583805 - DNA, 331 bp, Homo sapiens
gtggtcgtctagaggatcccgagcgagatcacatcaccaagactaagctttttggttggttggttggtttggttttttgagatgaagtttcactctggtttgcccagaatggagtacagtggtgtaacctcagctcacgtgcagcctctgcctcccaggttcaagcgattttcctgactcagcctcccaagtagctgggactacagatgtgtgccaccacacctggctaattttgtatttttagtagagacggggttttaccacttgggccaggctggtcttgaactcctgacctcaggtgatccactcgccttggcctcccaaagggctg

SEQ ID NO: 583806 - DNA, 447 bp, Homo sapiens
gtgtcgttctacaggatcccccatcatctatacttgtactgtcactaatgttccacctgatggttgtgatgtgaagtttacagaattgggaagaacttcacagacttatgagggtgtttttataggaacaaagtgtatggaataggtgagaaaatagatatatcctaacctctgtctttttatcaccctctaaatcctatgattccagttctgttcattctgcagtgaaaaataattagttattcacactctgacactaggtggcttaggaatgctgcggctgttttatatagattaaacaatctagaaggtcaggattccatgagcgtattccttactaaaaaagagaagagactgggagttacacattagcttgccatggctgtcctgaattccaggagcccctctggataacagagaatgtgcaccttctgctgaccaaggcag

SEQ ID NO: 583807 - DNA, 254 bp, Homo sapiens
acggcaagaataaggcaacttaaggaaaaacgcaggaagaccctgggtaggcaggtcatgcaaaagctgccaatggtgtcctgatgggagcaagatgcgccatcttgctcccatcagaaagcaggaaagatctaaaatgaacaccctgatatcacaattaaaagaactagagaaaaagagcaaacaaattcaaaagccagcagaagacaagaaataactaagttcagagcagaactgatgggacgaagactggc

SEQ ID NO: 583808 - DNA, 133 bp, Homo sapiens
  misc_feature (17)..(17): n is a, c, g, or t
  misc_feature (36)..(36): n is a, c, g, or t
tgagtatctcccttggnccctcctccatcctctcanaccctgtgctccattcctcagccgtttggacagggagtccgctgtcaccaaggagcccatgtgagacacactgctatgactgcctcttgttaatgtc

SEQ ID NO: 583809 - DNA, 141 bp, Homo sapiens
atctctgcacatcactgggtctgtaactgaccccacactttcctaaatgtggaacttcctttatagtctgcacaggtccaccatagaccctcaccacagagtcccaccatgaccctacgtaagactcacttttcctggcag

SEQ ID NO: 583810 - DNA, 1125 bp, Homo sapiens
gctacaatctgtggcctcagcccttgccaactctgcctcttcccccgctgactggggtatcagtttatggtgccctgcaggaagaccctcttgttcctgtgggtgggaaggttctggaatctcagcttgccctctctggagcttggggagacactaggcttttggaggacaagctttgcagagctggttcatgcgagctgaggtggctgggagatttctgaggtgcggtgcggcgcaactggagcaaactcagaaccaccccttggacgttgactctcaacgcccggctccagaactggctatcgaagcctctgcagcagcatgtgggcacgctggtcagcgatggccatcccgggctcagcacagcaacgcagccccagactcagactgggcgaacgcaaacaggggctgccacaggccaggacaagcctgccggacacgtgatccctgagcacgtgcggcagctcgctcgcagagcggcgaaggcacacggcagcccgtcgcgcgccctggcagcctcacttgccctcagaggaacctactgcacgccgagcctcgcccggagcgccctgggcgtcctgccgtgaaccacaaaaggctacctcggagcggctcactacatggccaacgagactacctaccgcgcggagaccaagaggtgccggcaccacccacaccgaccccgcagcgccacacgcacacgaccgcgacagccacagaccacgcgactcatcgacacaagacggcgcaagtcaacagtcacagcccctactacaggcactaccccaacccaaacctagcacccgaaacaaagaagacccatcctgaacaccagatgagaagcacgaacacactacggcacggaccgggcactctcgcacaccaagatcaggaggagagcaaaatcaatccagaaacgcaccatcgggtcaacaccctacgaacctagagaaggcacacagagcgagataatcacaccagacagaccgaacaacgaataaaaaccagaagcaaatacagacctaaccaccaacagcgaaccgaccacacaaccatggggccaccaaccaagggtaacaaaccacaaaagcaggcgaccacgcgcatagggaaagatgaacaccg

SEQ ID NO: 583811 - DNA, 577 bp, Homo sapiens
  misc_feature (335)..(335): n is a, c, g, or t
cgtaatctagaggatcccgggggcgacggggtctcaagggtgtctgatggactattttaaggtacataaaaggctttcctcggtggtctacagcatctcataatctatccgggggaattcagctgcctcccaggttgaatacaggtaataatccaaatgggtgtatgtcatcttggtaaatgtccaagaaaacaggtggccggcggaacaaggtgttttgggcgccttccatctggttcctctggaaatggatgggggggggagggagatcgcaaccgggtactacagttctggtaggggtgtgccgtaaccctcatccatatatcgatcaggtnactggtcagatgattggaatggataagctgatgtgctggtgaggtacaaaagtcaatagcaggtaagagtccggagggcagtggtggttaatgaataagcttcattcaatcctaataccttaaaataagtaattggcttccctttccaggtatcccggaggacggtctggctctatctaacggtaagtggtaacccgaatgcaatgggcctataatctaatagataacttagccattgtgat

SEQ ID NO: 583812 - DNA, 445 bp, Homo sapiens
  misc_feature (400)..(400): n is a, c, g, or t
aggcgcctgtataatcccagctgctcaggaggctgaggcagggagaatcgcttgaacccttggaggtggaggttgcagtgagccaagattgtgccattgcactccagcctgggtaacagagcaagactgtgccattgcactccagcctgggtaacagagcaagactctctcaaaaaaaaaaaaaaaaaaaaaaaaaaccatgatttgtagatgtgtgcaagacacagtactgctatggctaataatggtaagatgaccctaataatgtcctctccttgaatttttatataataatattttctgagtcataactaattttttaaataatgatttccaatctaattattaattagaattttgttgttgttgtttgagacagagtcactctgtcacccaagantcgtgccactgcactccagcctaggtgacagagtgaatccgtctc

SEQ ID NO: 583813 - DNA, 343 bp, Homo sapiens
aaaccattcacgtgtatggaatgtggcaaagccttaagtttcccacgtgtgttaaccttcacatgcggatccacactggagaaaaaccctacaaatgtaaacagtgtgggaaatccttcagttactccaattcgtttcagttacatgaacgtactcacactggagagaaccctattgatgttagggggttccggaaagcctgcagtcgtccagttccttcggaatcagtaagaggtcagtcggattatatgctgtcagcataggtaatgtggtaaacctaaggtgtcctcgtctctcctaggacatgtaacccactgggtggtacccattgtatagtatacag

SEQ ID NO: 583814 - DNA, 118 bp, Homo sapiens
  misc_feature (67)..(67): n is a, c, g, or t
aagcaatactaagctgaaagaacacgatgggacttcaaactacgagtgtacggctagagtcaccaancctagcatgctattcatacagaaaacagacacactagaccatattagaact

SEQ ID NO: 583815 - DNA, 418 bp, Homo sapiens
tttgtagaacgcatgcgtctccagcctgtgtgactctaggactgggtttgtgggtcgaacgcaatgcccagaaaattagatctgaaccggaactttccagacctggatacggatagtgtccgtgaatcataaagaaggtggtccaaattatcatctgttgaataatattaaggaaaattgtggatcaaaacatcataagcttgctcctgagacccaggctgtcattcattggacttatggatattccttttgtgctttctgccactcttcatggaggagaccttgtggccgattatccatatgatgagacgcgtagtggtagtgctcacgattactgctcctccccagatgacgcctttttccaaagcttggcccgggcatactcttctttcaacccggccctgtctgacccccatcg

SEQ ID NO: 583816 - DNA, 205 bp, Homo sapiens
  misc_feature (58)..(58): n is a, c, g, or t
gggggggggggtttccgccccccaagttcccccggcgggttttttaacgtttcccccncccccagattaaggtttccccttcccccccggggttttgggcggtgggcccaaaccccgttttcccccccgggggcccccccccttttttttgggggggggccccttcccgggggggcccccctttttttcgggggcccccccggga

SEQ ID NO: 583817 - DNA, 952 bp, Homo sapiens
ccaaaggcaacattcggcctgctttaggtacctggtgtcctttaccataaccttcgcattatgatacagtaccttgctagcgtggcttagtaattggaactctacagtatgcacgagtactatctacatatattgtgtatctgctctgaatccctttacgcatggttgatgtctacattgagtcgtgccgagtggcgtctgcaaactggcacgtaggaacacgggactaaatggcaagagcagcctagcaataggccgctagtagtaaaaagacacccaccgaacataatgatagacaagttcgccgcagtatgaagtccgatgagatcaacgatgagccaagtcatacttcagaagcatgtgtgctggaatgtctaaaatccatggtagcatttctgacatggacgggcacagtagggtaaaccgaaagattcgacgcgttgataaggtgaactagatgtgctgggtatgaaagcgacacggggtttccgtcttcgcgaattccataaccaggaatggttggaattggaacccgcccaggcacggacgcacaaggtgtggaccacccataatccttttaaaccaagggctctacaaaacacgggggtaaaaagtttggttcctttggaacgcctttcgaaactaaaccaattaattttaagggcccaccatttcgacttttctccctctaccaagggctttccctccacctttggaaacacccatgggtttaaacttcggtttgggggacaaaggactttactggctttaaaaagggcgaactccaatattttttatccccataagccaaaaagggggttcccacatatacaaagtgtggacctctcaattttgtggtggccgcaaccaccttattttcctcattaaagccccgtgataaccattgaaggctttaatggtagcacaattctctaaagatgggctatgccca

SEQ ID NO: 583818 - DNA, 1505 bp, Homo sapiens
gagcctgtgcgccgctcagatgtgaggtggtttcgtgcgggtgagtgctggctgcccgtaccatgagctgaagtgcggatcggagcatgcagacatgcgccggtccctggcgtgactgcaggatctgtcacacgacgactgatggccaaggaccccaggaaggctaaaggacgagcagactccgtttacgctggcaagagatttatcctgcagctgcaccttcgttgactgcgtggactgttgtcgtctcacctgattcgcccgtgtcttgagcagccagtgagtgcgtgcgtggcaactcgtcgctactacgagtccaccagccatcctcacgcattcgaaaggaacgcgcccgcactcttttgcattgggctcgttcctgcactccagaattacagacagcgtgctgacacgtgcacgaccacggcctgtcctgacacaactcaaccttgctcgcgacccgtgacgtcccatagacacactacttgcgggcatgtgactcgttcacatgtggaccaggccatcagtggcctgaggatcgataccacagcttgcacaaactgcgtcgcgaagtaccacggcacccaattgacaccggaactcatggaattccgaggacccttctgccaacacacccggacgcatgacatgcagcctcgctgctgagctgcgaggagcaccccccctgctagtataacttcccagttcaaccaacaggaccccaacagcagagaaaccttcatcactcaatgctgcagacccgcaactgccactaaccaacggggacacctacaattcgcgacacgctcccatataccactttgggaaacttcgctagcacgctcgcaacaccatgacttgcacatgataaccatcccacgcactaaacaccccccaaatatgcaaggcgcgcaccgtaacaccacatgtgcttcccttttagcgttagacacattgacctccatctaacagtgcaccccacttcaaggcgacatttgatataagggaaccaactcctaacccctccgactccggcacttccttaactcaggacaacatcgagccaaacccacccacgactgctctccatgtcgcactccatgacactaaccatctacacacacccacaacaactatatacatcacatcaatacagtaaactacactacaccctactcccacgcaccaacaccacaaccaacactacaattaggacaaccacaatacatatcaacccaacacttacaggaaacatactacgcatacgttgcaccaaaccccactcccctccaaaatataactaccatcaactactcgcccagacacataccaatctacacttatcgtacactattcaaaactaagcagaaacttaattaaataaaaacatacatacaccatcacaacacaaccagcactacacactaacaacatacaatgaacttaccacaccccaccactaatatgagcagtaagaacacatcaacaccatgcaccaaccacgg

SEQ ID NO: 583819 - DNA, 101 bp, Homo sapiens
tatctagaaatattgctcagccttgtgctgtgcacaacctggttctctttccagtgttatttatgtagctagagtgaccatcgttgggggatctcttagtc

SEQ ID NO: 583820 - DNA, 504 bp, Homo sapiens
  misc_feature (492)..(492): n is a, c, g, or t
gaatgcctctttctattccggttttcttgtcaaacacattggcttggcttgtttgtaaaaatgtacagttccgcccggccctatacccgggaatatttgtctggtcctctagttgcttcgtgcacctcccttcgaccccctcaactcgtccatcttggcgactcgcttcttgaactcgacgtactggcatttctcgtagctatgtcgctcatcctattcaatccctctagcgtaagcatggtgttttattgatattggcatcgatatctcggtaatgatcggctttttgttgggctgaagcttggctgggctgagctcggtgtagccgcggacttgggcttccttgggctcaagctctggaaaaaggtaattgacttaccgagcacttccaaggggcgtaccaagtatccttcggcacttgttgagaggaatcaagaggtgagcgcagctgtctcggtaggccagagggagtttggcatcgcgcatgctccntcgcgggtcgct

SEQ ID NO: 583821 - DNA, 226 bp, Homo sapiens
tgaatgggcggactgccccacctccttgttcgagtgagcactcatttgcctgacaggtgatcttgtgggagagactgttgccaggcaaccctggagtctggctcagtgcacaaatctgtccaggacagattggcgggccccctgtgggcttgtgcgttcgcctcctttatgatgcttgctgctgaagtgctctgccgtgacgtgctcccttggcccgtggggattg

SEQ ID NO: 583822 - DNA, 789 bp, Homo sapiens
  misc_feature (682)..(682): n is a, c, g, or t
  misc_feature (757)..(757): n is a, c, g, or t
  misc_feature (787)..(787): n is a, c, g, or t
gagttggtggaaccggtggctggattcatgttcccttaactgacaatcataagaagccaactcgtacactcatgatacagattgctgttctagccaatcaccagaatggaagagacacccatatgagacaaattaaaatatacacaccatgtagaaagagagctccatctggtaaatgttcctgagatgtacaacgtatacgatcttcatggatgtagtcgttcaactaacggtgacttttacaaatgagacggaaaatcatgtaaactgtatcctttagttttatcgctgtatcttaaataactatatcagtgtaccctttacttgaacataggcatcctgttatagtctaatatttagtatatgtcttaaaaatacttttattgcaactcttgacatataaattctggggtcatgttatctttattatctttaacctgcaacaaagctcacatattttacattactacaaatggaaaaaaaaaagacgaagtggcctcattgggctcagaggcggagctctgtcgacagtttttcttttgtgagggttatgtattgatcgtttcatcctgaatggattcattccgatgttggaatggttgggtcgtgatggtatcggtgcgtggggcgatacgcttaagatagatctaagataaacgcagaagtgaacagaacgaagatntgacgacccaccgactatatccacccggaatcagcatgtaccttttactaagacaacggccccaccatcagcttnttcaagcggcaagtgggacgacacaacgantg

SEQ ID NO: 583823 - DNA, 1922 bp, Homo sapiens
  misc_feature (330)..(330): n is a, c, g, or t
  misc_feature (579)..(579): n is a, c, g, or t
ccctgccacagatagttacccagactgccttgtgtcttgaccatgtatcggtaagcacgctcgcatgtgtggagtgcttatcgtgtcccttgtatcggctctgatacgagtctagagtaatccgcgtccctctcaacaccaaggtagtccgtctttctgagttacaatgtagagggcgattctacaatcgatgcgctggagagcacccttgcgagcgagacattactagatgggagacctcgtaacttggactagaaatcgtgtccgaatggcacgaagctcgttcgtgccagatgtagacagggggtgttcctggcgacctgacatganctgtcaagtactgactttgagtgactctacgcttgtcttacactctctacagaggacatgacttgctgaacaatcgtatctacctcatgcgataggagcggacctaatctcacggtgtgtagtctcgttagtacagtaaggtctggtggcttgcttctttgttgcataggaagacagaaaaattccatacgcacattccacaaagaggcattatcacgcatcaagccatcccttgaatccagtgcaatnctgacaaagtgggttatctttgccgcgaggcattagtgattgccaagttgtctctctcgaggctgaaccgataagaaggggaattgagccagtggtgactccacttcccactttgtgcaatggcgctttgttagctaccattgactattcccttccttagcacaactccgggtatatgaccccctggcttgaaattctccgggaaaagcgaacacaacgggggctcaggccactggtgattgtaacctgaaggacccaattttggcattacaagcccattaagccacgcgattagaacgagattcctggtctagagaggcctgctcggagacatttgtttggccgtggggaacctgaaatggggttgggggtttggacccttgtggtgtggccattcccacagggctggagccgaccatcggcggcgataggacgaacccaagcacggagaaaaagctctattggcgcaccaagtagccggctctggaacagaagcgacatgcaagagatgtgccaacactccccgagcccttggtgggttctgaacacccattatacacttgaggaggccgggtttaacccccccaaggtggccccccccaaaaggatatgtaagaaagcgcaccactaataacacatttgcgaggtaaggacccattatggggataggacaacagccgcaacgatcgacactgggtgagaggcaagccacacataataacacatatacacaccacgccatgtaggaccaaggagatgcacacagcacagacgcgagacatggtgagcaccccccacagccacagcgaagacgcgcacgaagtgacgaacaacaacagccgccgctcaactgccacaacgaaggagggtgacacccaacaacacgtgtcctgcgaaaacgaggccaacagctaggtcgaccacctatgtacatcgcctgctgaccacaatacgccgaaagccagaagatcgtcgctctactcgaacggtcacacacagatgcatcaactacagaaaagacgagatcaacccacacccaacacaatcataataatccatcaaatagtactacttaaaaaacaatcttcacaccgaaaccaaaccaaagcacaccctaaacagaccaacagcaaacacaatacatacatactacgaggagaacacgaccaaaacaataaaaacagacacaataataatacacactccatccacacaacacactaccaccaaccactaaaaaccaaatcaaataaatataacaatcatcacttcaaatacaactaccaaccataatgcacataaaccatagataagagacaatactataataaactacacatact

SEQ ID NO: 583824 - DNA, 812 bp, Homo sapiens
cagtgagccgagatgcaccatgcactccagcctgggcaacaagagcgaaacctcatctcaaaaaaaaaaaaaaaaatttctaaaaggcccctatgctttggttggtttagccacggtttttttaaggtcgggaattccaaaatggcacagtaagaggggttttaatcttagattatacaagaagaaaagatgacccaattttcatagctatagggcctcaatacacgggttttggccaaaagaggtgaagcagtcacatttaggctttttctaccacccaacccttaaagatcttagtggcagatttaagctggttttaaacgtgtaatcataattttacaacattttatatggtctacattttccggggttataacccttccagaatggactacgggccattagtaatacagggtatctttttttaataagtttctccaaatttatggggatttaatcgggcagaattcacctggtggaaattgggatgggctaccttggtttataaacactggggctaccttggtttgtaaacctcgtgccggtttaaaattgggatccccggggaattgcgctctaatccgtgggcgggccaggttaaaataaaggtatccagggctttactaaaccggtcagaaaacaaacacaacaaagaccgacaccacacaatgaacgacatatgaagcacaacacaaaaaaaaaattggtgggcgggccggcccagagagatataaaacaccgtgggggcccgcccaaaaatagaaacggccagggacaaaagcccgtgaaggggggtcccaaaaacgggggcg

SEQ ID NO: 583825 - DNA, 628 bp, Homo sapiens
ggcaggcaaacctgaggtcctcagacatggcgggcacaggcataggtaggctgtgagaggtagtggtggatgcagcatgccgttattttggatcaagggttatgaagccccatggtgtgcagggaagcaggattgcagtcgcatggatggaggagtgaaacatcgcagataccgacctactaagaactacctgagctacctgacagcacccaggattatactagcctttgaaactgacgtaactgagcaacatgaattcgaaagacactgtgctgtctcgacaaagcaacttgacatctgctcagtatgaaacgactactgagcttccagaccccctcctactggtcaacaatcacctgacattactcgcactggccccagcaatgtgtaaacaattctatggcccagttagagcactcacgacagaccagaattgcagaatctggaactaatgtacacagcatggatgtaaatgcctggacaagtatagcacatgcaccacatctagtagcatatgattgcaacacggcacagaaaggaacttacagacgttaagaaacacctattgcagcatataaactggacaagaaaagacacgtgcaactcacagaatggatctacattgaga

SEQ ID NO: 583826 - DNA, 128 bp, Homo sapiens
tctataggcgttgcagaggtccctgtggcaaggtacctctccacgtagacactcctcatggtgaaacggcgaaacgtctccttcggtgtggtcttaatcgagccatgttcagtctagctatcttgcct

SEQ ID NO: 583827 - DNA, 621 bp, Homo sapiens
ctaatagaggggggccagaaatccccactctagaatgcttgtagaatgttgggagacacccaggatgtgatgccaagtggacttttcttgtgaaggttgttttgtatcattggccccagccctgaatcccaggtgcaggtccccaagacttgttcttgcaaccatggtcctggaacatggagcgggacaggcgaggaggccttttgcccacccacatcgcaccggattcagcgctgcaacaggcgcccgaacgcaaaaggtgcaaccgcaacggcaacggccctgaggaggcagatccacaaattcccccgcccccgattaaccacggccgggctccacctgccgcgcaacttccggcaggcgcgcgcacacacaaccccccttcccgaccccacacggcaaaaccccgcctataaggccaaacagtttcgagggggtttccccaaagcacgcgccaccccgcgagcgggccagcccagtttacacgagaggccaccaggttccgacttcccgccgtgagcagcccccaccccacccagggggcgacacctcggggcccccccttcccagcacagggaaacacgcgagggaggcgcttccacacaccccggcttttccccg

SEQ ID NO: 583828 - DNA, 956 bp, Homo sapiens
agcggctgcggttgtgcagcgtgctgtggatgtgatgaagctggtgggtggagcctggaggaggaaggctggctggcgacgacgacgaggaagacgccgaggcctggtgccatggaacttggctgtgactgtgtggtgtgcgtgcagccagctcgcagggtgctgcctggagccatgaggagccatgtggacatccattgggtgtcacatgagaagtgtgtgggtgcagtgcggacgctcgggggcgtgctggccactggggcgcagacgtccccgaacccaatcgggtcctctaagaagagtggctgcctccacttctgcctttgtgttacggctggcgtggtaccctcgtagcaggacattggccttcaacccaaggcaggagaggtacggtgttggagagccgcggtccaacaacgtaagagaattaacgtgtctgaaggggtttactctttgcagacccgttccctttttatacactacttgattgaagagtgcggacgaaaggattgagagtgaccgaggagaaaaatttcgcagtaccagcgccgcaagaccaccggtacgcgaacagaaacctggtcgagaaggggacttacataggagtcgcatataaaaacatttatgggaacgacaccggtgcagaaagggaacgcctgttggatcagcgctacacatgtttgggggcgcaggagaaggggaggggcagacaccgcaggggcaatccgtcgaaggtcagcatgggagagaggggcaaagggggggaagagagacatcaaggacgacgaaggacagggaggggaaaggaacacaagggatacccggacatgaggggacggaccggttcatcgcgggatggaccacacacagacacccagagatcgagggggacataaaacggcggaggagaaggcgcggcagacacgtccagagggaacatgggaagtaggtagaaa

SEQ ID NO: 583829 - DNA, 180 bp, Homo sapiens
aataagagatagatatccagaatgtgtaaggaacttctacaggttcaagcactaagcaatgagcaatccccattaaaaaaggggcaaactgtaaactctgtacccactcataataacaaggtcacacattctatggattgtcgcgggatcctcttagcaggtcgaccagtcaggcgatgc

SEQ ID NO: 583830 - DNA, 384 bp, Homo sapiens
  misc_feature (9)..(9): n is a, c, g, or t
tcatatcantggtcgtggttgtagtccgtgcgagaataccgaaaaaaaaaaaaaaaaaaaaaaaaaaaaaattgggggcgcgccggcccggaaaaagctttcaagacaaccacatgcgcgggggggcgcgcgggggccccgagggggacaagggcaaacgggggcacaaggggggtcccaaaggagaaaccgggggccgaggaaaagaggggcggggaatttctccccaatatataaaaaagcgcccggggggaaacggcggagggtcttgggagaaaaatcccagaaggggaggtattagggggcgcattaaggggggctattttcacaaggggggcccaaggcggaccccgaatttcaaattacagccccggccggggggac

SEQ ID NO: 583831 - DNA, 136 bp, Homo sapiens
ttcgggtcttgggctccccagtgttgggattacaggtgtagccactgcgcctgggctagttttttttttcccccccttgtaggtgagtcttgatgtcgagccttggctgcagtgctgtggcgcaagctcggttcac

SEQ ID NO: 583832 - DNA, 149 bp, Homo sapiens
cgaacggagattaaatagcttcctatttaatcttagtggcgcacgggtgagtaatatatagttaatctgccccatagtggaggacaacagttagaaatgactgctaatactccatactccttcttatcataagttaagtcgggaaagtt

SEQ ID NO: 583833 - DNA, 277 bp, Homo sapiens
gtcgacctttccaattggaattatggaagagtgggggtgagaaaacgggggtcagtgtgatgattgttctctctttgtgtgtgtgtatgtgtgatgtgtgtattgtgtggtatgtgtggtgtgtgtgtatgtgtgtgtatgtattttgggggagaaagtaaggggatcttaatttggaattttgaaagtatcaggtgttgaacaaagactattctcactgtatttcagaagcaaagtggaaatgaataggtaaagcatacagttctggagtcgacgc

SEQ ID NO: 583834 - DNA, 178 bp, Homo sapiens
gatgcgaagtctagagcttacgatgtcacttgggagaattgagagttaaattgagaaatggagagaagaaactcaagaattagtgagcacattttggaggtgggagaggatttatttattgaatatgcttctaagtcgggagagatatttggtagcatattagaacaggtagttggca

SEQ ID NO: 583835 - DNA, 232 bp, Homo sapiens
  misc_feature (213)..(213): n is a, c, g, or t
  misc_feature (228)..(228): n is a, c, g, or t
tctagttgtccattcctgctctacgccatgttgttatttaaaaattatggtaaactctactttacatagaatttatcattttaatcctttttgagtgtacaattcagtggcattaagtacactgacgttgttgtgcaaccatcactactattcatctccagaaagttttcatgatcccaaaatgaaatgctgcacatattaaacagtaacgtnccattactccctggnaatt

SEQ ID NO: 583836 - DNA, 570 bp, Homo sapiens
gaaaggaagatccgaaaactggaaaaggctactcaagagctaattcctattgaagattttattacccctctaaagttctgggataaagcaagagagcggtctcaggtggacgctgcatccttctgaggagactgacgaggagagctctgctgtctgacaggaagtggtcctgtgtacaaggcatgcaacgacgcgtaacgatggagagggacatccatctaggggctatgctagaaggccagcaggaagctctggaggaactggaactggaatccccgaagctccatgctgaggccagtcaagcgggatcctaactctgttcccctttgagaaggaaggggcacattacacaccaccgatccctaaggtaccaacctcgcctgtaaggcaggtacaatgtacatcaccaaggtgtacacacaagtggagtttaagagatagagttgcaggctgctatccttaacatgctggccctgagacgtaggaatgaccagggttcaagtctgctttccacagaatcaggcatgctgttaataaatactggtttaatcgaatagactgagggaaaac

SEQ ID NO: 583837 - DNA, 138 bp, Homo sapiens
aaacatctgcatgccaaactcggcggaatgtgattaactactactagggacaagagcaagggatgagatgaggattagaggtgaggttgtagaaaactgcttcttgaaagtcattttaagagcctggtctgaaacaaa

SEQ ID NO: 583838 - DNA, 601 bp, Homo sapiens
  misc_feature (16)..(16): n is a, c, g, or t
  misc_feature (84)..(84): n is a, c, g, or t
  misc_feature (145)..(145): n is a, c, g, or t
  misc_feature (157)..(157): n is a, c, g, or t
  misc_feature (168)..(168): n is a, c, g, or t
  misc_feature (186)..(186): n is a, c, g, or t
  misc_feature (207)..(207): n is a, c, g, or t
  misc_feature (210)..(210): n is a, c, g, or t
  misc_feature (212)..(212): n is a, c, g, or t
  misc_feature (217)..(217): n is a, c, g, or t
  misc_feature (225)..(225): n is a, c, g, or t
  misc_feature (234)..(234): n is a, c, g, or t
  misc_feature (254)..(254): n is a, c, g, or t
  misc_feature (268)..(268): n is a, c, g, or t
  misc_feature (282)..(282): n is a, c, g, or t
  misc_feature (331)..(331): n is a, c, g, or t
  misc_feature (342)..(342): n is a, c, g, or t
  misc_feature (386)..(386): n is a, c, g, or t
  misc_feature (390)..(390): n is a, c, g, or t
  misc_feature (441)..(441): n is a, c, g, or t
  misc_feature (472)..(472): n is a, c, g, or t
  misc_feature (527)..(527): n is a, c, g, or t
  misc_feature (535)..(535): n is a, c, g, or t
  misc_feature (538)..(538): n is a, c, g, or t
  misc_feature (574)..(574): n is a, c, g, or t
ctggtggttgccaccnccaaaaggatgccccacaggattaaaggccacaccccgtactcgtggccagcggtccctctttgcctnaaatttgtggaacgcccggccagccttcaagaagggtttgtcaatccggccaccaccagcnaccacaccaacnacagccctgtnggctgaggagaaaacctnctaggagcaggagggcagcancanangggtntactaggnctaagggtngtgggaaaaaacggtggcanaataccctgaagcncgggccaacatgcnaaggtctccaggcttctccaccaggaagcacaagaatatacccacaggnatggagcccanagggagcacaaagccaatatagaacagggcctactagccgcaanaaanaaacaggcccgtataaatacacaggcggcaataaacaacaccgtacgcttntaaaaccgaaaaggataccggaagaacaccnaggcgaggagcgccagcggcccgggtcgtggattatgttcttcacgatgcccttnatgtagcngtnccgctcagcgaaatccacggcgcgcagcccccgctntttacggtgctttacgtgcgctcggta

SEQ ID NO: 583839 - DNA, 382 bp, Homo sapiens
tctgaggatcctcatacgggttcgagtcgcaacacgacaactttcccttttgtctggtgggactctttcagactgatgtcacctattagccgtggaaccaaggtttttccacaaactgtaggagcacatattattgtggtttcctttcatagccaggcaaggcagctctaattggtaatttcttggtttaaatgggctgtaccagtttgtatcagacacttctggaataccaaagggagcaaattaccaaaaagttcctggtctgaggaatcacggcaatagctacagtctaatgtccacaaattctgactccaggcaagcacgatcctcattggcagaaagtttagaatcctttctcatggtaaccaattctagccttttc

SEQ ID NO: 583840 - DNA, 639 bp, Homo sapiens
  misc_feature (318)..(318): n is a, c, g, or t
tggaggtgtgttatctcgactgcagatgagatttaaaaattctatgttagtcatatactgctctctcgtgactggtgctcaggaaactagattcctctctctcctgccaaagcagaatacgcgagggcacatgaggctgtcccttcccagaaattatatctagaggctgccacatctgtcaggagctcccagacgcagcatcgacaaatgtaactcctccgctcaatggtcaccgcgagtagaaggtgacacatgccagagctgtctttgctaactgcagggatgtaaaaataccctcctagcattgtggtctgatanccatttgtggtcatagcccagtacagaagtagatcgacctggagacaccacccacaccggtttcttcgtacaatgtgatcaaaaatagcctgtaagcgcatctccatggcttgcccccaatgcatgttaaggttctcaaagggaccagcccggatctggtgctcaagatatgtcagttaatgtttccaagtccatgtgtgctcctagagttcacatacccaattcttgcaaaatatgtttcaatgtccatgatccctttggccagcacccaggatctaggctgaatgcaatcctctcgctgccaaggtgtgtaataaagtg

SEQ ID NO: 583841 - DNA, 145 bp, Homo sapiens
caaaactaacggagcatcatggctgcatgcctgtaatcccagctactcgagaggctcgaggcaggagaactgctttgacccgagaggtcatagttgcagtgaggtgagatgcgccctaacccaggccggcataagcaactcccgt

SEQ ID NO: 583842 - DNA, 673 bp, Homo sapiens
  misc_feature (193)..(193): n is a, c, g, or t
  misc_feature (197)..(197): n is a, c, g, or t
  misc_feature (271)..(271): n is a, c, g, or t
  misc_feature (273)..(273): n is a, c, g, or t
  misc_feature (311)..(311): n is a, c, g, or t
  misc_feature (433)..(433): n is a, c, g, or t
  misc_feature (456)..(456): n is a, c, g, or t
  misc_feature (462)..(462): n is a, c, g, or t
aatttatacccgggaggagagtacgccgagagtctagatagtctctcgttacggtgcttaggatccatttccatcgtatcctttcatccggtcgttgaactccagtcctcaggcatggtgatgcagcatccataagtccaagaactgcatttgcgagcgcaagccatggcgaacgcttgcctaaggtgaatgnaacntatgatcgttaagatctgactatctctagaccgacgctgagtgtgtgtgtgtgccttgtcaatcattgaattcnantgaccttatatcatctctccattactcacatcctctangacataggtattacccatagagctgaagtattctcccctttagaatagataccgagtgtcgcgcacttggaacttagttgcgagggtaattgctctcgcgcttactagaagctgattgaatnagatcatatacttgcacttgctnctaaancattctcccctacgttcttcctttacatcacatgggggtaacgacaaatacgtggtcgtgagttaggataagtgtatgcgctcggggaaggccccagagtaaaacgggagatataggcatctggataacgtccacccctactctcatattgcgacctttgagcacattaattcaatcgtctctctctgtgaagaaccatcactgatcacca

SEQ ID NO: 583843 - DNA, 117 bp, Homo sapiens
tctgcggacttactggatagaacgtactgggattatgaacgtcctgatgaggaacgtcactgggatgaggaacgtcactgggacgttcctcatcccagtaacgtacctcatcccagg

SEQ ID NO: 583844 - DNA, 1006 bp, Homo sapiens
tggggattcacaaaattagagcctcttttgggtttaaaaaaaaaaaaaaaaaaaaaaaagggaaaaaccccaagggaaaaaattttcaaaacggggacccgcggggtcccccagagacccccccggcgggggagagggggcaaggccctttgggcgagaggaggtgcggggggcggcccaaaaagagatggacgccctctctcaggcggcgccggggaattgggggggaggagggcgccgagggcaaggaccacatattcggggcggctctcggcggcgccaacgagctcctctctggcgcgtgccggcagaaggggcatgcgctgaaagaaggggggcaggagcaaatatgaggagacaaactcagaaagcgcgcgaacgagcatcagcagcccacggcgtgtgcggtggtggtcgcccccgggagacaacgccgcgcatctaacgagagagggcggggccgccaccagcgcgaggggggcggcgccgacgggctctgaggagaccgccctgggaggagagggcagcgagcccctgtggggggaggagaaggcgccagtggatccacacgccctgcggggacttgggaggacttctccgggaagcagggccggcggacagctggtcccccaaggacaacactcctcggggaagaaaacagcacgcctggagccagtgggcaacgggcggctgggggacgaaaaagattccccccctcttgagggggaccaggcgaaaagtagtaaaagcgccacagtcacggagccaccgggggaacgacaattcggggtctcccgagggggggcggtccaccacgagagagaccttcggggaaggggcgtccgcggcacctcgccaagggagtagacgccatggtgggcacgggcaccggaaggggcgccagagggggggcggacggaaaaagatggtaagccacgaaataagcgagagatgaactgcagcccaccaggggtgcgggccccaacaggagggaacaccagggggc

SEQ ID NO: 583845 - DNA, 278 bp, Homo sapiens
tcaatttctacactcatgggagggagggataatttcttaaagaactcccagattgatgtacatgtgtactttgttctttctatagagctatatttggcaaactttttctgtaaagggccagatagtaagtgtcttatgcttggtgaggcatatagtgtttgtggcaactgctgaagtctgcaaaaaagaagccttagataactggaaaatgaatggatgtggcggtgtttcaacaaaactttatttacaaaaataggaggtggggtgtagaaattgaa

SEQ ID NO: 583846 - DNA, 603 bp, Homo sapiens
  misc_feature (38)..(38): n is a, c, g, or t
ggagaaaaaaaaaaagttcccctttgcccttggaaggntgctgaaaagtcaagtcacaaaaggcatagaaataggagaaaaggcatacaaataaatgtatttgaccatagtttcatgtgacacaggagccttcagaatgaacctaatccctcagtggggtgcaaaagcctatataccatcttgaggttacagaaagaatttaggctcagagtgcagcccaaaacaggttatggtagtaaatcaggttatggtggcaagacaggtcctgggagagaaagaagaggagacctggccagcaaaggtggtcttgttatgtagatgaaacttcacaggtagcaatcttcagagagaatagacggtcaatgcttcttttcaggcctttacaggtatcagactcttagtctttcctagattcaggcaagggaagttccggctgcatcaatgcagattctctgcagatgcaaatctccccacaaaagacagctttgcagggccacttctgtttgctggccctctgacacccagctcaaaatatgtcaaagaaatatatttggagataaaatatttttatttcctccagttcctactttgaaaaaaaaaaaa

SEQ ID NO: 583847 - DNA, 120 bp, Homo sapiens
tccctctcatacaaaaaagaactgtaaacaataaaactctaaaggaatatggagagaaactacagcatattagcagaggataggtcgctctaccgaggagtaccgcagtggagtccgttg

SEQ ID NO: 583848 - DNA, 150 bp, Homo sapiens
caataaatcagcacacggtttaccaaacttttgttacacactcacatactcaaggataaactccctcgttccatttcgagaacaaagacttcttcctcttcctttcttaggacaactgatataggtcccgaataacctagacttctctcc

SEQ ID NO: 583849 - DNA, 125 bp, Homo sapiens
  misc_feature (1)..(1): n is a, c, g, or t
ngacggacgcatcaggagatacagggcaggtttctgtggttctggagaaggaacaggcgcaagtttctgagactcacaaacagggactgatttgggaggttcaggagaagaaacagaggcaggtt

SEQ ID NO: 583850 - DNA, 287 bp, Homo sapiens
ccttggagaggcgggttaggaagagtggagacttcttcacggactctgaaccatgaacatatttgatcgaaagatcaactttgatgcgcttttaaaattttctcatataaccccgtcaacgcagcagcacctcaaggaggtgttattcaagttttgccccttgtatattttttggcggctgcaggggctatatccacatagtcactcatatcatacagagctggctcctgtcttccctctggctcccccatatatatgatatcgctcatggcacacatcatagcgac

SEQ ID NO: 583851 - DNA, 225 bp, Homo sapiens
ctagaggaccccggtcatttgtctacacagatatttgtcacgaagacctagtttagatcgtcccatctacttatgaatagcgaacagtatacccgcgattccgctacgagcaagtcatacacctcctatgaaaaaacttcgctaactagtcaccctagcattacttatatgatatgtctccatacccattacaatctccggatcccagcctgtgtagagatggaa

SEQ ID NO: 583852 - DNA, 833 bp, Homo sapiens
  misc_feature (833)..(833): n is a, c, g, or t
cagacttaatgttggccaaccatgcatcctccctagaaatgcatttgaatttgatttactaatcttttatttaggaaatttacatttttacattagtgagattggtcttttgggctatgtacttttttttttttttttggagatgggatgtcttggctctctcacccaggctgggatgttgcagtatgtggcaatcttgggcccactggcaacctctgcctccggggctcgagtgattctcttgcctcagccttccaatgtacgctggggactacgggctttgttggccaccgcacctgggctaattttgggtgttttaagtaaagatggggtttggctatgtgggccaggcgggctcttgaatttcctgacctcaggtgactccaccttacctcggccttcccaaaggtgctagaatttccggggtgtgagccaccatgcccagccgggttatggtatttggaatatggggatttggctagctctctaaagtaaaataggataccggtatatctttcctggtgctttaagcagttataactggggaatgattggtccatgaacgggtttgaaagtctggtccttacagaactttctgagtccacagggctttccgtggaaatacttccttatataacctgtcagttccctttggtcgactattattgtccctaattctaaactttcaagcaacctttacattttacacacactctggtttttcaaaaatattttcctcccttattgtcattagaacattcagggtcatggaatctctcaagcaactcattttctttgtggtccaactttaccctttgttgtagcgaagttcn

SEQ ID NO: 583853 - DNA, 115 bp, Homo sapiens
ttctagcctatataactgcaggctgagccactctcttccctttcaccagcatcactccccatggaagagatattgttttccacccataatcctttctgccacccgcttacactcg

SEQ ID NO: 583854 - DNA, 301 bp, Homo sapiens
acgtgagagagagatagagcgagagagagagatagagcgcgagagagagagtgagtgagtagacagatagagagagagagatatggagacagagttatcctgcttgcgatatagtgatactactgacctactacaatgaatcagtacgtcttccttatacagtggtcggatatatgctcgaagagctcgtgcagttttggcgttactactctctggttctgtgcgtaactttggatggatgtccattacttcatacgattgtctacttggtatcggtgactccagattctctggccttcgt

SEQ ID NO: 583855 - DNA, 773 bp, Homo sapiens
ctttagttaggatgtcgtgatgggaccgagctcagcgtaaccctctggccgacgtgggccgaggtgggcctggcccgggtctgctgtgtgcccagacgagcggagagtgctgtgagcggcttctggtgccagctgctaacgagccctggcagtgctgcacctctggtgccatgtgtctgcccctgcctcctggggtagaatcctgccccagccctcctgtggccgtgggacctggtgtgctggcctgctttctgccatgtcctgtcctggcctgttcctgcattagtgtccgtggataactagtgtggagtatgtgtgtgctgtgccctgcctgcctggacatgccctgctctgctgtttctttaatgccccctgactgcgtcttcactgtgccctctccctgttcttgctggaaagctgactgttgggtgcaatcctgttcatgaccctccatggagaagttttgggatgaatttctggtgggcgtgcctgatgcaagaaggacttgctggagactatagagacccagaagaagcagcttctccagtaccaggcacaggctcaaggatgtggtccgtgcctataaaagcctgctgaaggagaaagaggcattagaggccagcattcaaggtgctgtcggtatcccacgaggccagatgtgggctcgcaggttgtccagcttccaggactcaccttactgactctgtggatgacggttgcccactcaagcgaggattaactgggacgcataactggatatgggcagtcacaga

SEQ ID NO: 583856 - DNA, 266 bp, Homo sapiens
cctcggtggaaggtaccatcggtctttaaaccctgcgtggcaatccctgacgcaccgccgtgatgcccagggaggacaggccgacctggaggtccacctacttcttaggatcatccacctattggatgattatcgaaatgtttcattgttggagcagacattgtgggctccagcagatgcagcagatccgcatgtccttcgcggaaggctgtggtgctgatgggcagacacatgatgcgaaggccatccgaggcactggaaacacc

SEQ ID NO: 583857 - DNA, 557 bp, Homo sapiens
  misc_feature (345)..(345): n is a, c, g, or t
gcacaaagcatgccatagtgagtacctgcgaccggtagtttcgtctcgcatcaaccgtgaattcctggtagcaaaggtacatgaagtgatcatcagccagcactcaagtaatcacgactcgaatcgcgatcatcggctggtcctgaggaagcgctgacgagctcagcagtgcgcagctttgtttcatgcattgccccccagtcatcgggtggcacaaacaacctgatcaaggcacgcacacaaatcgtcacgaagttgctcggctgcctgtccgatatcggtaccaagcggggccgtcgcatcagtgtggatccacggactccgaggcacaatctccccgagcgngcattccgaccgcctcaatcgtgccgcggatccgcgttacacaaccgatgatcggatgccggacgttctcgaccctccacccgtgcctcagcaagcaggacgccacagtgtcgacaaggaaaggacggtcccccgtcacgatctgaacagaattatctgcccgtttgaccacgggggatcgacgatgacgtcacgcggagcggcccagtcgc

SEQ ID NO: 583858 - DNA, 362 bp, Homo sapiens
atgctcggcatgaacacaaagcatggacacacagcacagcccagcaccaagtagtagccaatcttcccaaagagcaggcccatgaggaccccaccaatcatcctgcggggaagagggggaggctggtctgagtgaagaggcctgagggctggggactggcaggcgggagcagagggggtactcacccaacatatttatagcccaagaaggccaccaggtcgatagtggtgaggtctgtgttgacagtgacaaggtagaggctgagcaggatggccagcacctccagtgtcagccaggccaacgccgagctcgcctgtagccccaggagatctggggagaacctgccggcaccccgagcaagc

SEQ ID NO: 583859 - DNA, 620 bp, Homo sapiens
gacacccctatcccaccagaagagccggtattctctattcccgttaagccaacgcctagtgacatttcagtgcgtcagggtaaatacaataggctgcaaacacacacccctggccagttttctttgatgaaatctccccacgccctctgtgaagttcctcagatttaagtcacatttgacattaccgccaatgggatagtacatgtttttgctaaatataaaggcacaggacgtgaccaccaaattgtaatccagtcttctggtggattaagcaaagatgattttgaaaatatggttaaaaatgcagagaaatatgctgaaaaagcccggcgaaaaaaggaacaagttgaagcagttaatatggctgaaggaatcattcccgcccagaacccaagatggaagaattcaagggccattcccctgtttatgagtgcccccagcttaaaaaaaaatttttccaaaatgagggggctcctggctagaaaagccagcgaaacaggaaaaaatattagccaggcggcatccttttttcaccaggcatcattgaagctgttcaaaatggcatacaaaaaaatggcatttgagcgagaaggctttggaagttttggccctggggacca

SEQ ID NO: 583860 - DNA, 1025 bp, Homo sapiens
gtacacatcgaagatgtgcgttatccggctgcctgtggctcttggattgtgtgatctcctgtccatgtatcctgccgcttcttcgagtgctgcttgcacgtattcttggacccgcacggcgccgtatgtctgccttgtgttgatcttgagtcatcgtggatcgtgcgatgacacgctcgttgcaatacctcttcatacgtcatggcgtagcttatgtagacataatatggtgtgacgaagactatacctgggaattgtacgctacttgagtcttgtcactaggacttcgtgagcatagatccctctgaattgtgcacgagacagctgtgatgagacatgacgtatcttatcgtttagcaattgatcatatttacccctaacgttcaaacaaagccatgatgtggttcaagtgccgactctgacatcaaagggaattcctttaacattatcgccacgtcgaaacgggtgtaacttattgcataatagggcattacttcactcatgggaaatgggcccaaattttttcctggacagggggccaggttggtgactttcagtagacattgtctccttttccatctcttccacctaattgtagtgcaaattactggcaatcattcgaagattagggcggaggacctaatcaatacgccatggtttgctcccatatagggcacttccccttcgaattagccccccacgtgaagaacgaaggcctcttccaacaatttcttgatggaacctcttcaattctcggacataacaatcaacttggaaatggcctgggcgagcggttacttcgcaagaggataagtctccaagtgaaaccgcgccttcgttggccaaaggcccggaaattacctgggcaattgaaccccccacttaaaacgggacggacttgtcgttattcaggcaaaatccactcagggaatttctttcctttggggcgagaattatgttaaaattccaggtgaagccggggggttattcacacatttggaggttccctacacaaagaacacacc

SEQ ID NO: 583861 - DNA, 780 bp, Homo sapiens
atctcgctctcttgtccagctggaggcaatggcgcgatctggggctcacagcaacctcccgcctcctggttcaggcaattctcctgcctgcctcctgagtacatgggattaacaggcgtgtgtcaccacgctcggctaaattttgtaattttagtgggagacacgggtgttcaccacagtcaggctggtcttggactcctcgacgtcgtgatccaacccgccttggcctccccaaagattactggggattacaggcggtgagcccacatgtgcctggctgagattttctttaaagatgagcttaattttctgaacatctttagtggatatcataataataggtacaataaaatctgtgatccccatattcttgattgccacccattccagggaccacattttataataaaatagggatggcgtttttatattcataattatatagtgagtatcactgggtcccattacaggcgcttattaacaatcataacaattgtcatatagtctttgagagaaaaaataatagtgaaaaataataatagtggtgaacacaggggaatttttctttctaaagcaagggctttaaaatatttttgggaaagtttgaccaaagcataaccaccatgaatatccagatttacctcaatgctaagaattatgtttagttagggaaaagggaagtcattttgacctcaggtaggaaaatagattgctttgagttttaagtagctttagacttttaaaagttaggatttattctgtaacttaaaattatttgga

SEQ ID NO: 583862 - DNA, 536 bp, Homo sapiens
ttaagtccattacaatggaaatgggctgaccgcaaaggaaccatgatatgaattggtttaagtcatttggtgcatccaaaataagagtataagaacattccagaccaatcagagaaaaacatgattccatgataaaaataatacaaatgtcgggtgacatttaacatgtatccgcaatcccttcctccccctttggcaagtctaacacttcaggccatacacataatggcaaaacaggaaaattaaaactagccacttggactatgtcagatttaataacacttttaaaaacggtacaaagagcacatgtgcttgagtcaaaaaccacgggaatggtagagggtcaaaaaagaattacaaaataaatctgagacatgaaccaaaaaattcccatccggtgattggaaataaaagggtatctggcttactaaaaaggtgttcctccaatatatcacgtctttggataaggaatacagcacaagactttctccacctattggtaaacacatcaggctcagtctcactgaagagaggat

SEQ ID NO: 583863 - DNA, 408 bp, Homo sapiens
cggtgccgccgggctttaacattggagattctcggaggcatggaacacggggttcaaatgttcagcctgttaaccctggaacaaggttgctcccttggtgcagaccagaggaactgtatcacgtagggtgagccgccgggcctggggaataccttcggcagcttgaaccaactgttgcaacgtaactgccgctcccttttcgtccgcaccccgccgtggggctccaggaggggcaccccaggtcttctgagccataccgaccatcgtgcagccctcgtacgcagatgctgtcaactggcagagtcacagccctcggggatcatcagcgtttccagggaccgttgccacaccaatcagagagcctagaacatgcactgggcaaagtggatggcccagcaaggcaggcaa

SEQ ID NO: 583864 - DNA, 204 bp, Homo sapiens
gtatctcgactcctgcggatatcgtggcttctgagtgataagagagctcctctggacatattgtgtatgccatcgaccaggagacagtagtttgcaactctcatcaatcaacatgcttgcagattgttacaatcttgccgttttaccatccatgataatcgcatgggtgtatctgatgtgccaattcactgagttgtattgctc

SEQ ID NO: 583865 - DNA, 523 bp, Homo sapiens
  misc_feature (5)..(5): n is a, c, g, or t
  misc_feature (50)..(50): n is a, c, g, or t
  misc_feature (128)..(128): n is a, c, g, or t
  misc_feature (182)..(182): n is a, c, g, or t
  misc_feature (254)..(254): n is a, c, g, or t
  misc_feature (263)..(263): n is a, c, g, or t
  misc_feature (292)..(292): n is a, c, g, or t
  misc_feature (376)..(376): n is a, c, g, or t
  misc_feature (413)..(413): n is a, c, g, or t
  misc_feature (432)..(432): n is a, c, g, or t
  misc_feature (488)..(489): n is a, c, g, or t
  misc_feature (505)..(505): n is a, c, g, or t
tgganatgggatcttactctcttgcccaggcgggagtgcaggggcacaanatcacggctcacggcaacctcggcctccggggttcaagcaattcttctgcctcagccacccaagcagcggggattacnggtgtgtgccactacacccagctaattttggtgttttaagtagagatggggttncaccatgtgggccaggcctgtctcaaacggctgacttcaggtgatcctctcgcctcaacctcccaaagtgcngggattacnggcgtgagccaacgcgcccggcatggatnccagtccttagggggtgtgtgattaccgaaaagatgttttaggaacacctttttttggtagctccagtttaagggaacactatnctggggggaaaaaatttagcaaatatgcgtagattanctttttagagagttcccantcggttaaaagcttagggatcaaatccagttttcttacatagaatacattgggctnntaatatgggaatattnccttaaatcatttctgag

SEQ ID NO: 583866 - DNA, 621 bp, Homo sapiens
  misc_feature (1)..(1): n is a, c, g, or t
  misc_feature (6)..(6): n is a, c, g, or t
  misc_feature (40)..(40): n is a, c, g, or t
  misc_feature (42)..(42): n is a, c, g, or t
  misc_feature (65)..(65): n is a, c, g, or t
  misc_feature (86)..(86): n is a, c, g, or t
  misc_feature (213)..(213): n is a, c, g, or t
  misc_feature (447)..(447): n is a, c, g, or t
  misc_feature (474)..(474): n is a, c, g, or t
  misc_feature (484)..(484): n is a, c, g, or t
  misc_feature (491)..(491): n is a, c, g, or t
  misc_feature (494)..(494): n is a, c, g, or t
  misc_feature (508)..(508): n is a, c, g, or t
  misc_feature (517)..(517): n is a, c, g, or t
  misc_feature (536)..(536): n is a, c, g, or t
  misc_feature (548)..(548): n is a, c, g, or t
  misc_feature (551)..(551): n is a, c, g, or t
  misc_feature (560)..(560): n is a, c, g, or t
  misc_feature (564)..(564): n is a, c, g, or t
  misc_feature (566)..(566): n is a, c, g, or t
  misc_feature (575)..(575): n is a, c, g, or t
  misc_feature (585)..(585): n is a, c, g, or t
  misc_feature (589)..(589): n is a, c, g, or t
  misc_feature (591)..(591): n is a, c, g, or t
  misc_feature (598)..(598): n is a, c, g, or t
nacaantacgaactcggtaccaattacatcaaacgtcagngncatgattccgagcgaacctgaanaccgtttgagggcttatccangccaagaagacgcgtagcagccaagcgcgaagtgcttgacgatccaaaatacggaagccaaatcctggccaagttcatgaaccacgtaatggaaagcggcaagaaagccgttgccgagcgtatcgtntatggcgcgctggaaaaggttaaagaacgcaagaacagcgacccctggaaatcttcgagaaagctctcgacgccatcgctccgctggtcgaagtgaagtcgcgccgtgtaggcggtgctacttaccaggttccggttgaagttcgcccgtcccgtcgtaacgctttggcaatgcgctggttggtagacttcgcccgtaagcgcggcgagaagtctatggccctgcgtttggctngcgaactgttggacgctgctgaaggtnaaggtgctgntgttaanaancgtgaagacgtgcnccgtatggntgaagccaacaaagctttntcgcactaccgnttntaattctancttnantaattttgngagggctttntggntngtactantccgattagccgctaccgtaaca

SEQ ID NO: 583867 - DNA, 550 bp, Homo sapiens
tagccttgaccataatttgacaggaaatacatctaatgcaggaattcctaatttaaatggagcaatattttgtggatacccagttatattatactgttgcttattctcctgcttttgatcttttttttctgatacggcagcatctgcaacatgatatttattagtctggtggtcttgtatatttttcaccgactgagcaataaaggttcccttagcacctttagccaccagcaatccttcactaatcagcaactgatatgcgagttctatcgttcctcgagccacatttaattcactcgcaagagctcgtattgaaggaatacgctggaaagcctgtagctgcccattatttattccttcatgaaaacgttgataaacttgcaaataaagtggtgtattagctgctgtatcaatttgtagaaacatttttaacacatcttgtcctagtgatattttttattcttgcccctttattataggccaagatgctttaatatgcgctacagttatttaaatgtgctaaaacagagtcgacgcggccgcgaattta

SEQ ID NO: 583868 - DNA, 325 bp, Homo sapiens
  misc_feature (178)..(178): n is a, c, g, or t
  misc_feature (193)..(193): n is a, c, g, or t
ctagaggatcctgaagttaagggctaccaacacggaatctgacaattcctcaatcactttcatataaaaagttttttctgatagccgatagtctttcgagccaaaggaataagtcaagactctaggacatagtctttagataaactgggaccatcttcttggtgaaggccctgctatnaaaggaaagaccctnagagtaaagaaacttccctcgtttaaactttaccaatacagtctacaccttctattgcatattcctctattcaattccttttatttcatggccattcccttttttacctcaaaaattgggggaaaaaaacgg

SEQ ID NO: 583869 - DNA, 368 bp, Homo sapiens
  misc_feature (201)..(201): n is a, c, g, or t
  misc_feature (261)..(261): n is a, c, g, or t
  misc_feature (264)..(264): n is a, c, g, or t
  misc_feature (296)..(296): n is a, c, g, or t
tggtcaggaattaccaccttgattatacatatgaaatctgtggttcagtcaagcatctgatgtgattagtcagttgcagaggtgattgattcttgctagttattctaaccgtatgctctatcccagaaaatgtttgaaggtttagtaaaacagttttaagttgctaaccttaaagccaatacatattttagaaattatgangtccactgtacagatcaagaaactggtacttaggaggactaaacagcttagcttaactgntgntgggacataacccatgaccagaaccagactgntcataaaatggctttttcaggtatttcaaaaatgtcaatataggtataaattaactaattataatattttta

SEQ ID NO: 583870 - DNA, 442 bp, Homo sapiens
tgcagcgagggcggagattagccagatgccaaaatcaggcgacgggtggtgatgactgtcagacacacacaaggtcgccagtgaacttcacacacacctcatgtgagcaaccctagcctattttatagtgtgtcctatttcatacctgtacacacttcctcgtataagtaatgagatttacttacacccaaacagatcctgaaagaaagcttcaagttttctcagatgatggatatcttatccactgtattcaataactgacggatgtaaggtgcacgtttcctgatgctgtgacgcactgtattccagctggtactcaagtctgggaacagccgtaacaggtcaaccttgtggagccatcgcgagttagagggtgaaagatggcagaaaaaaaagtcttgtgtgtgagtgtgtttttgagtttgcatcaatcttaatgtct

SEQ ID NO: 583871 - DNA, 1359 bp, Homo sapiens
  misc_feature (215)..(215): n is a, c, g, or t
  misc_feature (327)..(327): n is a, c, g, or t
  misc_feature (1359)..(1359): n is a, c, g, or t
agcgggacagggactgagttgctgggactctgggctggggctggggagaaatgagagcaaactcatcctttgtgcccctctcatggcgtcctggtccagagtccccgcctagatacgggtactggcgacaacgtccatggcgtccgctcgggaggaccatgctcactggtgcacgtgcgaaatagatggtgagtggtggctcggaggagacaagnggagctagaggcagcagtaggaccaggtgtatgtgcatatataccctgccatgcattcttagcgcttcgccatcctgctcgatctagcatcctcagcgactagggtgaaaanctgaacgaacgccccaaaagttcggagcctatatcatcgcagaatgggtctgagaagacagcctattcattaaactgctactcatgagcaacaatgtagcgagaggttgagagactcttgaggggcatagactagtgcctgcagcgatagagctcggggaggaatcgatcgcctagtgtgactagcgtggctagacagcttgcctttgtgttcagtagtgttgcctcgtcagccacttgcccgcgtgggtctgtgcgtgcgcgatagtctgctaccttaaccacctggggctgcagcccgttagtttgccgtatccgttcgtgagaccttttgctgtggtgcgggggaccccggcgattaccattgcatttgccggagtttttgcggcgcgtttgcttgtgtggccgaaccctcttgtcgcgagctcccttggtggcgtagttgtgccccagcctttagctgcgctttggggaggccccctggccgcctcaaatggcgcgacaggcactgccttgcagccttctccactttacgtccccgactctgtcttctttgtcgtagactcggtgcccctggcctagggtcgcctgcggagattggggccctgtcccaacctagtgtcgctggagggaaacttcttaacccaggtgcttctagtcaggttgcgaggcgccctgtgttgcctggggccccagatgtcattcggacggggtctcagacccgttccgtggaggtcctcgcagtagacttctcccccgagcccgttgattgggggcctcgcaaggccgtgggaactgtgctttgtgtgggggcagtattcatccccgtggggttccgtgccccagcccgtgcccagtaacctggggccccgcttgtctcctgtggatcggctagcttccgcgtcgcttgagcttgggtggcgcttccggtggccctttccgggggctggcttcgttggcgccccctgtggttgacgcttttcggcggccatggcccgacccctcccttgcgttggtccgggtgcgcctaacn

SEQ ID NO: 583872 - DNA, 172 bp, Homo sapiens
cccgactagcctgacgggctcacgtaggctttcgatggctcgggctcccgcgctgcggtgcgggggggatggcagaagccactgtgatgctgcggcccgtgcgccccgcgagctcagcacgtagttggggtccgggtcgtcgccgccctgcagactgtcgggctagtcgggg

SEQ ID NO: 583873 - DNA, 146 bp, Homo sapiens
cacgagggaggccacacaaacatttgcccaaatcacagattctacacagtaaggacacccccacctcaatttcatttctgaagcaatgaagctatgactgacatgagacgtttaactgatagttacactttataccctcactaaca

SEQ ID NO: 583874 - DNA, 889 bp, Homo sapiens
  misc_feature (453)..(453): n is a, c, g, or t
tggtatttaacctattttttaaacagacaaggcctaacagatcttatattttctttctgggacacacccacggtgcggccacggcggccaggggtctgggtggtgctgggcctcggacacaaaggccccagaaagtgacgcagccctctatggcgcccagaatcttcttcagccgcatccagggtcttcacgggacgcttggtggtccaagaccattgggctagagacctggagctggtatttcccatctcttaaacatccttctggtctggtccaagagaaccagttctgggggatccttggtacctgggctgtggagatatcctgcgcataaactgggtgagatccaccactgtatcccacctctaacatactctacaggatggactgtttctcccgcgctcctatctatggggagaagtgtacaaatggtactgagcatatacctctccnaaaacatccacactatgagatcgctatatatttctatacggggcccaaacaaccctctgtaagatcggggcctgtgagatggcgccaaaaagagctaaatatattccccgcgcccgtgccccatcagatgtgtacgcggtgcgtttcgcgactagtcatctcccggcacaaaatttatgcgcctgggagacaaccctctcttctccagggggagcatctccatcttaagagacacgaacctcttggggttttagccagagacacaacaaacggcgaggcgggggaaaacgaatacaactaaatgatcgccccccggggcgagaaatcagcgccaggctatcgcacgccacggagacctttataagacaacccacgtctggggccgcccacccaacacgctttgaaacccctggtgtgtggggacaacacaggtccg

SEQ ID NO: 583875 - DNA, 127 bp, Homo sapiens
agctctgaacagagactctgctctgacgcgacttgactgagagcacaggtcaggacacagctctgatctggcctgaccaacacaacagcgcaggaaagggcactgctctggcccggctcccaataca

SEQ ID NO: 583876 - DNA, 523 bp, Homo sapiens
ctcaaggctttatactccttaatccttgattattattcatgatctcctgtgttgatcaactgcccgtagctttctgtgcttgtgtaattgcttttaggaaagcacagatgcaagcacacatccttcagctagctacaggtggacacatcagaggactttgcaagagtgagaaccactcttactttcactcttacagagtgagacctcacctgctctctctagttggactctggtgagccttctgcctggagtaggtatgcttggtaagtggcactgagtgcccatgctcctcgggggcccatgatgcctgggactgactgaaaaactgggtggttgggatccttctgctgcagccagtgaggagggagccctgacacggcccctactccctggatgcccctcagactgcactatatagagcagggtggctgctgctcgggcctcccagggaaaatacgtaggaagcccactgcttcccatggcccagtgctttcacagtgaggagaaggggacacagaagagg

SEQ ID NO: 583877 - DNA, 447 bp, Homo sapiens
gtggcatgatcagggctcactgcagccttgacttcctggtttcaaggggattcttctgccttagtcccccaagtagctgggactacaggcatgtaccaccatgcccagctaatttttttgaattttacgtagagacaatgtctcgctatgttgccaaggctggtcttgaaatcttggctcaagcgaacctcctgcctcagcctcttgagcagctgggattacagatgcacaccaccatgcctggctaattttttatttttttaaattatttttattttgttcccaccacttgctgcctgttgataattttttattaacattttatttttgtttttggtagacagcacgggaattgcgctcatgttgcccaggaccagatctcgaacatccgtggcctcaaggtgatccttccgtgcctcgagcttcccaaaggtgcgggcaattacg

SEQ ID NO: 583878 - DNA, 385 bp, Homo sapiens
tcgatcacgtgcattgtgccaaagtcactttgttttttggtatttttgtttgtttttggggggttttttgaagacagtgtctcactctgtcacccaggctggaatgtagtggtacagtcttgggtcaatggaaactctggctcctgggttcaggcggttctcctggctcaacctcccaagtagcttgaaattacaggcgcgcgccaccatggccgaactcaatttttggatttctcggtagaggcagagtttcaccattggtcaggctggtctggaactcctgaacttcagtgatctgcccttgcccttggcctcccaaagtgctgggattacaggcgtgagccaccgtgcccggcccccaaagtcactttcccacaatggcacg

SEQ ID NO: 583879 - DNA, 659 bp, Homo sapiens
aacttggacttacctgtttgagatctagcatgtctgaatcatgctcatttctggcaggagcgtggctcatttcttttaggcaacaaaataacatgcctgcctgtctgctgaaactactgtgtttcgacagcatttatatatttatttatttgagacacgagccttgctgtcaccctggctggagtgcaatggtgctgacttggctcacagaaacttccgcctcccaggttcaagcaattctcctgtcttagcctcccgagtagctgggaatacaggcatgtgccaccacgcgtggctaattttttagtagatagggggtttcgccctgttggccgggctgttctctaactcctgacctcaggtgatccacctgctgcagccttcgaaagtgctgggattacaggcctgaggcactgtgcccagccgaaaagttagtagttctaaaaggagggaaggaactaaccatatggagatactacttatgtgtcagacgctactaggtaatttattagctaggtgaatcttcacacagatgtggttattgtttattagagaagactccttaccgctgaagaaattatagctcagcaaggacagtgaattcccagggcctgtggtcctagagtagaatcaacctgaactgagagagtaataagcta

SEQ ID NO: 583880 - DNA, 522 bp, Homo sapiens
aaagatttatctgtagcttgcgatgctgtttggtatgatagcgttcacccacacaagaacttctttcaaaattgggaatgcatcctctcaaaccctgctttggttttatcaactgattttactgatattcgaagtcctttgttgtcatttcaacgatgttcacagcatctttgccagcagtagatttcatctcaagaaaccactttctgtatccacccatatgaagcaaatcctcatctgttcaagtttaatcatgagactgcagcaattcagtcagatcttcaggctccaccacttctagttatctagctatttctaccacatttgtagttacttcctccactgaagtcttgaagtcaaatcaagactcagttatctgtgaaggttggaatcaatttcttccaaactcctgttaatgctgacattttaacgtcctcccatgaagcatgatgttcttaaatggcatctagaatggtgaaccctttcagctacagacttaagaatatatttcttctttttttt

SEQ ID NO: 583881 - DNA, 434 bp, Homo sapiens
  misc_feature (417)..(417): n is a, c, g, or t
ctagaggatccctacagtaatatgtaacattctaaatcctttttacatcatcttcactagaattaggtccatctcaaggaaccactttcttgctcatccataagatgcaactcctcattgttaaacttttaccatgaaatagttatttcttccactgaagtcttgaacccttcaaaatcatccatgagggttggaatcaacttcttccaaacttctgttaatgctgatatttttatctcctcccatgaatcatgaatattctgaatcgcatttagaatggtgaatactgtccagaaagttttccattgattttgcccagatccatcagaggaatcactatgtatggcagctacagtcttatgaaatgtgatgaaatgtgtttcttaaataagaagacttaaaagtcatccatgggtngcggaatggatactatg

SEQ ID NO: 583882 - DNA, 1702 bp, Homo sapiens
ccacgcgtcgcccacgcgtccgggccgcccttttatttttttttttacaatggagaaaagatatttaataaatcatggtcaattttataatgttagcaagcccagttcgttgggtggatagcctccacatttatattggttaagtcatgggtggcgtggtgtctcttacctactgacattatgttgttatatcccttcattggtggatctaaagaatgtcgcaaaaggttcattccgtgtaccccaactacagattcactctcctttagcgtgcctttttctagcaccaattagtgcttttacaaaaaaagagtgcgcatacacaaccaagcaggtgacagcggccaattccttcgaatgtgtccacgattaataacgggtacgcagtgctaaagaagagggtcgtggtgctaaatagcgtggcagagtggtatatggtccagagtccagcataaaattatttcctttcggagcattccctccattcccctaacccgaatacatgcatgagaatgtagcaaaacccttcggaaacctctcttagccaacggcaaacttatctgtggccacaagtgcaagggggtcggatgtgaaccagtatatcacacagctctttagccacttcagtggtgaacaggaacccatcgggaaaaattcctagtatacccatcagtcggctcacttataataacggataacggacgtgcacttataaccagtgataagtccttgagcacagattactggccgcacaacttctctggaccggtcaccggggttggaacaatgtggcaaatgtcatggatagcgcacttcgtcaaaagagcctagacgggccgccaccgagtgcgtcgctcgcttgttcagtcgtatattatgtcacatccaacgacctaacaagtgcaagccccacgacagcaccaccgtcacgacggacaagcctatcccccacatcatcaccagacccacgacgcgacagacacacgacgcgagtgcgaatgcagcactcaaagcactacataccgaccagccgcacgaaaaggagcagaatgcaaggagggagcggaggagtgcgcgacggaacggatgcgcgaggagagaggcgaccaggagcgaacagggacgctaaaggatggtcagatggagcagtaggtcgagacaggatggtcagggaaaaggaaacgggcagggaaccgcggaggttagaggaaggtcgggtggggatacggcaggaccgatattacaatgcaagaaatagcagatagggacaaaacaaaaacgcaaccaaaacaaacaaaacagaaaacacaccagagcaaaacgaacggcaaaacaagccaagtcacaacgaacagggccgacaggcaagagcacgaccgacacagcggaaggagaagaaacgacaagaaaagcgcaaacagagggaagcaatagcaaaccacaacacccgccgacaaagggacacaaaacgacaaccccaaagacaaaaggcacgaagcgacgacatacgaacgcaccacaaggagcgagcagaggcgcgccacaacagcacgagcgacaaacaaaacacaaagaggaggaagcagagcaaaaccggagaaaggcaacagaaagaaacagaaacacgaagcaaagaaaaaagaccacggaacagcgagagccaaaaacaaaacacagaatcaaggacgacagccccagagaa

SEQ ID NO: 583883 - DNA, 742 bp, Homo sapiens
ggggtgctgaagatccaagacgttggcgtggagacaatcacaaccatcgcctgcgcagtttgtaatagttggtgctcgtgggcctcccctgtcgccctgtaatgtccagtatgccccgccgtagcacgtgagtggtccggataaatcaatgcccccatttcctcgaggattcaatctgcgaaatctcggtcacgcgctccaatgtgacttctacaaggccagccatccccatagagtaaggtccatcctctctactgggcgagataccaatgtgcgacgcgcttcgtaggtgtgcattataagagacacgcgcgagcgtagagaattctctcgaactccaatcctctcgccagatacgcatgacttggtgaaggttacaggctgactggggtgaatcatactctcaatagcgacatgacaggcggtgccaaagggcctggatcaccatgaagtgctgtagttgcacccacgtgaagtgcgtcgggcgtgctagtccgatgcacgcccacgggcgcgggatccataggtagaattggaggggagagagcagtgcaaaaacccctgaatcctgtcgaagaagcggacaggcgccaatccactttcctcggttgtttcctagctacgagccgtgtggtcctgacgtagcggacattaaatgccatagattccattcgcacctaagacaagagacagaagaaccatgagactgggaaggcagtgtgaaagggtcctaaactactca

SEQ ID NO: 583884 - DNA, 140 bp, Homo sapiens
gaggatcccgaagcgcacgatggcgcgcccacgagcccttctctgtgactgaggattacccgctccatccatccaagatagaaactcagctcgtggtgggggcttgcttggcaagggtggcgaccatgcacattgaccca

SEQ ID NO: 583885 - DNA, 402 bp, Homo sapiens
tctgtaaaggcagtgtttcactatattttccaggctggtttccaactcctgggcatacctgattctcatgacttaggcttccctacatatccgtcgatctccctggcccctctcttacccggcttccctgctctagaaccactgcaccgcgatctatccgatgcctcacctgcctcctccacagtcccctccttccaagccgcccctttctcgccctcttctgctccacgccctcctcctgcgcggctgctcatctttccacgccctgcccagctctgtctcttcctccagccggcctgccctgatcacctccccttctccaccagcccgcccttgcccacgtacccttccccctccgtcctctctcctctcagccgaccccactctcctttcctctccttt

SEQ ID NO: 583886 - DNA, 231 bp, Homo sapiens
catttggttggacgaagggaaaagggacaccttggtaccagtactcaaagacacaaggattgagctggtgagggactagtttggggattccagaaaagatgctgggcccaagaatcttgtacaagtgggagcaggcagcaagtcttccccttgtgcgcttacccagccacttataattgtgcaacagttgatcatttggcaacacagagcagtccacagcatttgtcaaca

SEQ ID NO: 583887 - DNA, 207 bp, Homo sapiens
tggacaacaagagcgaaactcaatctcaaacaaacaaacataaatgaaaaggctgggtgcagtggctcacacccgtaatcccaatgctttgggaggccaaggaaggaggatcacttgagctcaggagtttgaggctatggtgaactatgattgtgccattgcactccaacctgggcaacaagagtgagatcaagagtgagacctctt

SEQ ID NO: 583888 - DNA, 375 bp, Homo sapiens
agtagcgagtgcacagactacagcatctgcagcgttgatgaggtcaggcatggatcgatgacacaccgctagcgtgaactgatccagccacgtccacccgtaccatagtgctggtgttgcaggcatgagccaccagtcccgtcctgctttttgtatcagaagacaggactaatgtctcctcctcccgacctctaaacctgcgtgtgttgctgtgcaccgctcgtttgtagcgtcacctctggtctggtgaagtctgtgctggcatctcctcattgtcgccttcatcatagctgtttcctttgatgacagaaagactctcgttctttctagatggtgggatcaggggcctttgctgtgtttcccgtggtatggatg

SEQ ID NO: 583889 - DNA, 120 bp, Homo sapiens
atacagcacagcttagtgctgcagcgtgacagcccaggctctgatgtgtctctcacagcttgtaaagtgtgagacatgctgccttgttgtgggactgagggacgaacaccactctcttca

SEQ ID NO: 583890 - DNA, 150 bp, Homo sapiens
  misc_feature (63)..(63): n is a, c, g, or t
caggatcacgtgtggtatatgataataagtgatttatcaacaagagtgatattttgctagggnttccaaagtttacgcggttttctagcctcatggaatactgttgaacctatagcgtagtcttgattcttttgttgtctctgccttgta

SEQ ID NO: 583891 - DNA, 1240 bp, Homo sapiens
tccagttgcgtagcccgcgcgttgggccgctggcgccagggggttctcctgcgggttgtatgcctcgcggggattgcccctgttatcctcgcgatgcgtctggggatacgtgctttccgcggttgtgctctctcccctgggcgcgtgccggtgcgagcgctcttgctgtggccagccggcagtgctcaccgcatgaggtgtccttgtccgggtcgcaccccagggcgttccgtgtttggcatggtcgcgccacgttgagccctgggtgtaacccttgtccgggcccgtgcccctcgtgtgtgactggcgccgcgccgagatgtgttcctacggccaagcctgtccgatgcgaagggcttgcccagggggcacaatggcaaagcggcgatccaggttcaaagccttcgatgccatggctagggcgccttggccgcctaggcaaccagtcgagccaagttggagcgttgcaatgcccccgatcgaccgcggctggcgaccaggtgggcgcgcgtgccgtgcactcagcgaaggcacttacgtgaccagctctacacgtgtaagcaaggaacagccgaccaacgcacactgttaggagaaccctgcggattcagaagaggacgcacccagtggctgcacgaccacttctgagaccctctcggagacatcccctcagctctcgtccctcctcagccgctgcaccatgtaggccatgccagcccccagagtccatatgagcgcgtgctgggcttcaggcttgcacgggccaatcgcgccacgccatgggaccagagacgtctggtccgtgtgtagcggtacgcgggaccaagagcacgcaagggcccaagggaccccgaatgtatggtgaatgccagaacggatgcggagaagagatgcgccgcagagaaatgcgggagagcagcaatagcggcctacaggaatcattgcgatccaaggtgctctcctgtccttatccccgtccctcgcatgttttcttcctgccaccccatggcgcctaaccccctagtggacgctgcgctgcccactcaccctggcccacagttgcgtgtgattatttcatctgttagatgtggctgttttgcgtagcatgcgtgtgccacacctgccctctaccccgatacctgtgccgcgcgccccctctgcaatgtatgcccctgccccttccccagcactaatgaatttatatatataaatatatctacgagtgcgtaacaaacatccc

SEQ ID NO: 583892 - DNA, 380 bp, Homo sapiens
ttgaatctgggcattgggcgctcgtaatacccggatgtgactggcgcccagccgggcgtagaaacccgcattgcgtcgggcacgctgaccgccaaggaatcggtgctgccgcagctgggcctgggcttcaagctcaacgccaacaatgagctgttcgcttcctatgccgagaacatcgccgccttcgtcggcggtggcagcggcggcccgttgcaggtatcgccggaatcgttcgcggccagcgccggcctggagccggagaagtccaagagcctggaagcccggcttccgtaccttcggcgagcagtaccaggcgtcgatcgcggcctacaacgtcaagttcgacaaccgcctgctgtcgctgaacccgtgctcgagca

SEQ ID NO: 583893 - DNA, 449 bp, Homo sapiens
  misc_feature (137)..(137): n is a, c, g, or t
  misc_feature (145)..(145): n is a, c, g, or t
  misc_feature (204)..(204): n is a, c, g, or t
  misc_feature (226)..(226): n is a, c, g, or t
  misc_feature (236)..(236): n is a, c, g, or t
  misc_feature (247)..(247): n is a, c, g, or t
  misc_feature (259)..(259): n is a, c, g, or t
  misc_feature (262)..(262): n is a, c, g, or t
  misc_feature (279)..(280): n is a, c, g, or t
  misc_feature (287)..(287): n is a, c, g, or t
tccccaatggggggggggggggggcggggggggggttttttaaacccagcttttttttttaaccccccgattccctggggggcccccccccccttttttttcccccctttaaaaccccgggggcggttccccccccnggtttttnccttgggcccggggggggttaccttttttccccggggacccctttttccctttggcccnttttgggggccccttttaaccngttttttccnaaaaaccgggnggggccgggccnggntttcccgggtttttttnnccccccnggcccccccccgggcccccccccgggtccctttttttccccggcttttgggggggtggggggggggggtcccttttggccccgggttttttgccccccctggcccccttttttggcccccttttttcccaaaatttacccctttaaaaaaatttttttggga

SEQ ID NO: 583894 - DNA, 284 bp, Homo sapiens
ccccgactagcccgacagacagactcgcattctccttctccacaggccgtaggtctccagccgggcctccggccctgtcgtcaagggcctgactgttcccatccggacttatggaagtggaggagggaattttgagtccaagctggggttttgagatcctcaactttaccaacatctcccctaatctcaccagacttaggaaacacttggccttcagcaaacttaagagtaactgatccaaatacagatgccccccactgtcgggctagtcgggggggtaccga

SEQ ID NO: 583895 - DNA, 1681 bp, Homo sapiens
  misc_feature (1)..(1): n is a, c, g, or t
  misc_feature (941)..(941): n is a, c, g, or t
nttgttgttgtacgtcgctctctctgtgcatctaccgccctgttgagtgatgtggtcgagtgtgctcgacgctgggttggttgtctcgtagccgcctggtggtgttattgtgcagctcactggtagttattcccccgccccgtggtgggagacggcagcggactatgttgtcgccggccactagttaacgctcaggaggtgtcgtgtggttcctccttctaccgcaaatgttgtgcacattcctcgttgcagggcccccaccaatgggccgggtggatataatacgccccctaaaatttttccgggggggcccccctctgctggggtggtggatcgccctgttcggctggacccctcgggttggaccccgcaggatattctcgcggggagcgcgtgtcttccaagaaagagagagaattgtcccccgccagacaggaggtgttacacacccgcgtcgcccagaacttctcccggagattgtggtggacaccgggggccctcttctccgtaaaagacgcaccagagtgtgttgctcgtgaaaccagccccttcggtgggggcaacccgggggagatctcctctccgcagccattataaatccgcggtcctcgggggatgccaacacaccccgtcgcaactggggaaccttgtaagggcccccccagaagggccgccccccctcgtggggggccgcccaacatttccgccgcgccacagtggtgcaaggaggttgtggtgtgtcgccgcctgtgtgtcctttaatagcgttgttggtgttgtaggcgtgcaacatcttaagagctgttatggctaggcttcgctgtgttttgtttgtttcgcgttgttcgagagcggcgaaaatgcggggagggccctaatatggagagatggctcgctcggtgtattctgtctgcggttatatgtgagactctacactttcncaccagggtgttctacccgcctggggcgccacacacagaggtgggcaccccccgtttgtgccacacacacgcccctgtgtagacacatgtgcccccacggagggcctcacaaggggagagttttatacaggtgtcttggccacagtgttatacacaggcgcacaagtgttctgaccacaggcgtctgtcacacatctcttatagagagaagaggacacacagggtctacacccgcttgcaacagggcccctgcgcttgtcacagggagaatatgagagatctcacagccacgtgccacaacttctgagatatctcccccctataggggcttcacaggcgaccttgagagggcctcgtgggacacacagtggaggacacataatgggtgtggagagaacacgattggagagggtatccctcatatgttatcacacctgagagtcacagccacaagccacctgagatgggagaataataacacgaatttataggctgcttataaccacctttaattttccaccggagatgaggtcaccacaatctgagaaggaatcaaaacttccacatcctgaaaaatctaataatgtttccaaaaccaccttgccaatcgctgttagagttgccaggttcctgggagaccacggcctcaagactgtgaagatatatatcctccagcattcagtccacgggggaaccccgggaaccatgtttttgcttatagcccttaaaatcagagatga

SEQ ID NO: 583896 - DNA, 913 bp, Homo sapiens
tgcgtggacccggttgtcccatcgctggctgttctggcgcgcccctggtcgcgtgcgctttttgccttgttcctgtgcatgtccccaggttgcaggacgcggtggctgagtgtcgtggacctccgggtgatggttggccatgagtgcttggctaggcccgaggcgttcttcgtggaagggagactgtggtcatctgtgctggccggtctgggcggccctggctcgggcctttcttccgaacacgccatgcgtcttgttcctgtgtccgtgatggaccccggagcccctcgtctcagcccgtgtccccaccccggttcaccccagcccatccattaggccagcaacgcttgtagaactcactgctgggctgtaatcgtggcactggtaggttgggaacaccagggaagaagatcaacgcctcactgaaacttggctgtgtttgcagcctgctctagtgggagcatgcccagagcctggctgcccatcatgctggccccatccaatcaagggaagaaggaggtatgttggactggaggccctggagccatgttggcaatgagggtgacagttttcctttcctctgtgtcgtatctctgtccagttcctttagaacaatatggatgcttccagatggactcccaaccctggcttggggtcaagatacagccagcaagagttaggggccttagggacacttcgggctagttgcttccattgaagccgactctggacctggcccttacttgcttctctagctctctaggcacttctcacagcttcgcacctgtccccaccctccactcagctgtcactgcacgcatacactccaccctccaccttccattttcccccactactgcagcacctccaggcctgtcgctatagagcgtacctgtatgtcatatcacgtgtc

SEQ ID NO: 583897 - DNA, 313 bp, Homo sapiens
ttctgatgtttgctggctctgcaattctgttttgaaagataaatgtccacttgtgtatctccttaaagctgtactaacctaaaatcggtagttccccgtgggcatttgccaggcatggtggcttctagaactttgagttgagtggagagaattaatttgcttaggtgataggttaagtttgattggattttattccaccttcaaaccgtgatggggacttcagaggaacctcttggggaagctaatgattcagggtattgaagactttagcttagaacattagtggttcttttggtttcagaagttcatggtg

SEQ ID NO: 583898 - DNA, 461 bp, Homo sapiens
tgagagaaaaggagcaggtagaggaatagtcaatgatatatttgtctcacgcccagtaaaccagctctttatataagataaggtgagcatagagtagctacctgtagagatatttaaccttttatctgtagctttctgcttaggaacaaaaggaagggtatcttcttgcatgaaagcgtccagcttattttttttcctttggcatagtaaattgaggcaccaagtttttattttccgttcacatttcttcccctcccgttttaaaaaaagtcttcagaaaatgcattttagaagaaaatgcgtctctagtcttggggttttgtctggtctcttgtgactaagacagtttatttctagacaggtcccacgtggttaggaaagctcatttttagcaggttgtaaagtctcatgacccatgaaggaaaaaataggtggaggaagagagagagaaacaaacaaac

SEQ ID NO: 583899 - DNA, 379 bp, Homo sapiens
gtcttcttggtaatcatggctctcatgagctctccctcttctagaattcttttctttttaagacaggatctagctctgtcacccagactggagtgcaatattgcgatcatggctcactgcagttttagacctcccgggctcaagcaatcctcccgccccagccttccgcatacctgggactacacttgtgtgccaccatgcctggctattgaaaaaaaatttattttttttaagtagagacaaggtcttgctatgttgtccaggctggtctccggctcctgggctcaagcaatcctcctacctcggcctcccgaagtactggcattatgggcatgagccacagcgccgagccccgattttttttttaatgctaaaagac

SEQ ID NO: 583900 - DNA, 766 bp, Homo sapiens
  misc_feature (217)..(217): n is a, c, g, or t
  misc_feature (219)..(219): n is a, c, g, or t
atgggttagaatgtctgttcaggttttatacttatcgagggagggggagttcaagcgaaaaatttttcaagatttccaagaagaaaccaaagaagactaccgaatctgggtcagcgtgtagtggactaggaaaagttttggggcttatttgaaatattctcaatctaagacacagtctattgacccaaaacttcacgaggggggggggacttttaananggtacaaaactaaacaagggatccccctattacggatgaattgtggaagagaaagacattcctctacttctgggggaggaggaggagccggctagacttcccctaattcctctacaaaggcgccagatgctggtaaagctacatcgtaccggggaggcttagggtgccagtaagactctcccagaatgagtattttccccggagggccgggggcccttgcacattagacagtggccggcctgcgcgcctgggggatccaggaaaggggcggaggcctcgcgaagtagacgcttctcaaaggcgcctgggcgccggggggaaccgtggggctgcggagttgttttccccgagatgctccggggcggctgttcgggggcgtcggaagagtggcgcggtgtggcggtgggtgcggtgtgtgtagccggatggttgtgttcaaggcgcccctgcgggcgcgggccggcggggggcgccgcggcggattgggaggggcgcgatcgggggcgtccgggcgcgtggtggtcggacgcctgcgtagggcccgtcg

SEQ ID NO: 583901 - DNA, 475 bp, Homo sapiens
ttttttttttttgtagaaggaagggctttattcagctgggagcatcggcaagctacagccttaaaatctgagctcctcaagtgcacaatttctgtcccttttaagggctcacaacactaaagatttcacatgaaagggtcgtgattgattgagcaatctaggggatatgtgacaggggtttcatgcactggtacagaacacaacagggagtttcacaatttttttatacaatgcttggaatctacggataacatcaggttctaagtcgtaagttgatttttaactactaggtttaggccaggcaggcccagggctggtttcaggcctggtgccgggctgcctgtctttgatttcacttccttgtttttttcttaaaacaggtactgagtataaaacattataaaacaatatgagaaggtctctctcttccctcaagagtgtatgactttgctgccccaggatgatcttgaactcc

SEQ ID NO: 583902 - DNA, 521 bp, Homo sapiens
caggtattttattatcttaattatctgtagcaaattttaaaggaacgttgctgggtgcagtggctcacacctgtaatctcagcactttgggaggccaaggcaggaggatcacttgaggccgggagttggagaccagcctgggcaacatagtgagaccccatctctttaaaaaaaaaatgtgtgtgtgtgtgtgtgtgtgtgtattttatttttttaattggccaggtatgatggtgtacacctatactcccagctacttgggagactgaggtgagatgatcacttaaggccagaagatcaaggctgcagtgagctatgattgttccactgctttctagacagggtgacagagcaagactctgactctaaaaaaataaataaggtaaaataaaaataagaagcccagcacagtggtttatgccagtaatcattcccaacatttcaggaggccaagcaggaggatcacttgagctgaggagttcaagactggcctgggcaagacagtaagaccatctctacaa

SEQ ID NO: 583903 - DNA, 265 bp, Homo sapiens
ccgtctatcatctgggaggtggaggtgcatgagccagatggcaccattgcactccaggctgggcaacaagagcaaaactccatctcaacaacaacaacaacaacaacaacaaaaaagatgagtgttagacaaattcagtcgaatgctggcttataacataattgggagaaaaattataattcctatcttaaaaagcaaaaactacttgaacaaaagttaaactgagttaaacaatgtttattagaaatcaagtatttatctgtaa

SEQ ID NO: 583904 - DNA, 956 bp, Homo sapiens
  misc_feature (320)..(320): n is a, c, g, or t
  misc_feature (328)..(328): n is a, c, g, or t
  misc_feature (333)..(333): n is a, c, g, or t
  misc_feature (356)..(356): n is a, c, g, or t
  misc_feature (397)..(397): n is a, c, g, or t
  misc_feature (406)..(406): n is a, c, g, or t
  misc_feature (413)..(413): n is a, c, g, or t
  misc_feature (434)..(434): n is a, c, g, or t
  misc_feature (436)..(436): n is a, c, g, or t
  misc_feature (441)..(441): n is a, c, g, or t
  misc_feature (445)..(445): n is a, c, g, or t
  misc_feature (468)..(468): n is a, c, g, or t
  misc_feature (471)..(471): n is a, c, g, or t
  misc_feature (483)..(483): n is a, c, g, or t
  misc_feature (485)..(485): n is a, c, g, or t
gaagcgccggccagagaagagtcaagggcacgagcatcggccatgcctttcttggacatccagaaaaggttcggccttaacatagatcgatggttgacaatccagagtggtgaacagccctacaagatggctggtcgatgccatgcttttgaaaaagaatggatagaatgtgcacatggaatcggttatactcgggcagagaaagagtgcaagatagaatatgatgatttcgtagagtgtttgcttcggcagaaaacgatgagacgtgcaggtacccatcaggaagcagcgggataagctgataaaggaaggaaagtacncccctccncctcnccacattggcaagggggagcctnggcctgaacagagcagctgctgatgtctggaggctgaacanagcagctgntgatgtntggaggctgattttcctgttntntgttntccnctggaaaggttgtttacgacaanccnccttgtcaaagngngtaaaaataaaggattgctccatcctaaaaaaaaaaaacaaaacaaaaaaaaaaaaaaaaaaaaaaaaaacaaagagagaaaaaaaaaaaaaaaaacggagagaaataatgggggggaggaaaatcggcaaacaacggagaagtagaaaaaaggagagcgcaaggacggaggctcaggaaaaagaagaaaagaaagcgggcccacgaagagggaggagaaagaagaagagagagggagagggtaaagaacggaggacgcagagagggaccgaccccggggcgaggaggaagcagcggagagtcacaagggaaaggagagaagagccagtgaaggacagcaagaacgagcaggcagcgcgcgcaaggaagcagaggaagagacaaagaaagaacaggggcagagagggagaacagacgagagagaggcagaaaccatcggagcagccggcagacggacagtagagcgagcaa

SEQ ID NO: 583905 - DNA, 744 bp, Homo sapiens
gcccagcctgcccgagccatgccgagcggagccggagccccaatgccctgagtccgcgcggagaccgagcagagccctccagcctgctcaccccgcgtgcctaccccaggcgacctcagccgctctctgcccttctctcggccccgcgccctgcctcgctggccctctgcccaatgaaactggccgcgatgatcaagaagatgtgcccgagcgactcggagcttgagtatcccggtcaagaactgctatcgcatggtcatcctcggctcgtccaaggtgggcaagacggccatcgtgtcgcgcttccgtcaccggccgcgttcgtaggacgccgtacacgccgtacctagtcgaggacgttcctagcgcgtcgaacgttctacgtccatccgcggcgaggtctaccagctcggacatcctcgtacgacgtccgtgctaaccatcccgttccccgccatgcggggcctctccatcctcacaggagacgttttcatcctggtgttcagtctggacaaccgtcgactccttcgaggagagtgcacgcggtctcaggcagcagatcctcgacaccaatgtcttgcctcctagaacaaaaccaaggagaacgtggacgtgcccctggtcatctgcggtcaacaagggtgaccgcgacttctaccgggaggtggaccagcgcgagatcgagcagctggtgggcgatgacccccagcgctgcgccctacttcgagatctcggccaagaaga

SEQ ID NO: 583906 - DNA, 441 bp, Homo sapiens
tttcagaggtcatgcactctggagagagaacaccagacatgttagagggcgaaaccactccgtggtgacacactgtggagtcctggccaccagccggacacattcattcaaaattaaaaccttaaggcccaggtccagtccccctctttaaggaaaaggtgggaacggttcttagaatggaggggaatggatcccctttccaggccacccggtaggttttaatgggcaccactacttgccagaggttattgtaaacgggagttaactggtctttggtgccctttaccttaaaggaaaaagaaccctaaggttcgatctacaaaataaagagttggtacggtcttctttccggggccttcatttccttggcggtttggattctgtggtatttttctactaagttaaaaaccacgggttggattcaacagggttttgggtggt

SEQ ID NO: 583907 - DNA, 927 bp, Homo sapiens
  misc_feature (320)..(320): n is a, c, g, or t
  misc_feature (328)..(328): n is a, c, g, or t
  misc_feature (333)..(333): n is a, c, g, or t
  misc_feature (356)..(356): n is a, c, g, or t
  misc_feature (368)..(368): n is a, c, g, or t
  misc_feature (377)..(377): n is a, c, g, or t
  misc_feature (384)..(384): n is a, c, g, or t
  misc_feature (405)..(405): n is a, c, g, or t
  misc_feature (407)..(407): n is a, c, g, or t
  misc_feature (412)..(412): n is a, c, g, or t
  misc_feature (416)..(416): n is a, c, g, or t
  misc_feature (439)..(439): n is a, c, g, or t
  misc_feature (442)..(442): n is a, c, g, or t
  misc_feature (454)..(454): n is a, c, g, or t
  misc_feature (456)..(456): n is a, c, g, or t
gaagcgccggccagagaagagtcaagggcacgagcatcggccatgcctttcttggacatccagaaaaggttcggccttaacatagatcgatggttgacaatccagagtggtgaacagccctacaagatggctggtcgatgccatgcttttgaaaaagaatggatagaatgtgcacatggaatcggttatactcgggcagagaaagagtgcaagatagaatatgatgatttcgtagagtgtttgcttcggcagaaaacgatgagacgtgcaggtacccatcaggaagcagcgggataagctgataaaggaaggaaagtacncccctccncctcnccacattggcaagggggagcctnggccctgaacanagcagctgntgatgtntggaggctgattttcctgttntntgttntccnctggaaaggttgtttacgacaanccnccttgtcaaagngngtaaaaataaaggattgctccatcctaaaaaaaaaaaacaaaacaaaaaaaaaaaaaaaaaaaaaaaaaacaaagagagaaaaaaaaaaaaaaaaacggagagaaataatgggggggaggaaaatcggcaaacaacggagaagtagaaaaaaggagagcgcaaggacggaggctcaggaaaaagaagaaaagaaagcgggcccacgaagagggaggagaaagaagaagagagagggagagggtaaagaacggaggacgcagagagggaccgaccccggggcgaggaggaagcagcggagagtcacaagggaaaggagagaagagccagtgaaggacagcaagaacgagcaggcagcgcgcgcaaggaagcagaggaagagacaaagaaagaacaggggcagagagggagaacagacgagagagaggcagaaaccatcggagcagccggcagacggacagtagagcgagcaa

SEQ ID NO: 583908 - DNA, 1186 bp, Homo sapiens
gcccattctaggatatacctgatgcttagcgtcagtcgagcacttgggaatccctgtattgtgccatggtgtctcaagtctcaggatgattacctcggagatttcagaccacatggagtcgttgtccctggctcgctgcccttgttgacgagggacacgcgggaccgaagttgctaggaccgaacgcagtatcacccagatcgagagaattgccgagttgcttatcgcacgcagaggctagacgtcggtgtccgctattgtacacaggctggtagcacagaatcagttgcacttgccgatcctagtctaactttaactgactagcgcatcccctgattcaggacatcatagatcactctggtggttccaccatcttcgttcacggaggttaggtctatctcgaccgaattggtctgcagattcgctagtgcaatagcccgttgctccgctggtacgcaacatatgtccgacggccgtaagacgtggaccttcgggacgcttaatcaattgtcccaatgcagaaccggtggggtcgtaaaaggtcgtgtcaccgaggaccgtaatagctgaatcgacacacggtccggttgatttgctgattaccaatagcggtagtttccaaaggtcatcttccaaatacgaattgcccccggttgccagcacgatgtgccatacttggggacaggaaacatagagcgattctggtcaaagcttcctacactttgtaaccctatggcacagaggatcgaaaagaggaggccgcttcacttagacgttctatggtagatgttggacaccactcctcgtccactacgcctttacatacacaggcgccgtcaccgacgagctaattcgaatcattcgggagaacccttttttggccttaagacaaaaatttcgactccaatagtattcggccgtagggacttggaagtttaaattcgcttaacacacttcaggccccctgtggtggtttacatcgtttgtgccatccactgttggaactactttttcgctcaaaggtgcccacacctatagcgatggcccagtagtaatacggaagctaaacaggcaatcactgtcatcacccgtgaaccttcatgtaaggcgcaatactcgtacattgaactccaagtgttttcgctacaacatggagtttcagatgaatccaccgttcttgaaaaac

SEQ ID NO: 583909 - DNA, 211 bp, Homo sapiens
tatatgtctggattgatccattattaaaggtttctcatttatatgcatagaggtgtttatagtattctctgatggtagtctgtacttctgcgggattggtggtgatatcccctatatctttttattttttttttattttttttttttttttttttttttaaaaaaaatttttggtttggccccccggggggggcgcaggggggggggaccc

SEQ ID NO: 583910 - DNA, 885 bp, Homo sapiens
gtaagctacagaaacctgtagcaacatggcacgacatatccaggctgctggctcccaatatacgcctgcactgcccatagtcttggaaacttgttggctttgatgtttccgggatccagcacgactggtcctaccccatcctcaggactattttccattcgtgaggaccggcctgaaagtacagcgtggtaggcccgttccgctgagtaaacttctaatcacgtgccaggaagctcagtatcagattcttcgtagaggtctgtgtacatgttgacacggtactatcttcgtcaagacgtacatcttttctgtatacatatggttcccctcatgctgatgactcgagtggctatactctactcactgactggcacttcttattctcctgtgggagtttgccaggccggatactaacattacatgtgcttcatctagcgcatctcaggcttactgcacctcaggtctccactttggagggcatactgactgaatccattcgcagtgactgagtgtctggactggtcagattgattcgtatgtaagtcttagaggagagtataaggctaatacatagaacgatcctcactgcagagaggtaacacactcgtttgtaaagaattctgtaaccaattaccaggatgttcacggctgtgagtctgggctccctgagtttcttgaagctagagacaatgttgtgtcttcccaaagcacactttgccattcccctagatccctctcatactcatgggatgcatatctgccggttcaaggagcctggttgtccactggatgggttcgacctttgccctggtgttcctttggtgcctggaggctttttggacaaaaaaggtttacttgacgttcaacacatcacaccacacgagg

SEQ ID NO: 583911 - DNA, 1527 bp, Homo sapiens
tatattgtttgtatatattattaatatatatattactcacaccactcggcagagagaagagagagaggagaggagaggaggaggagggagagagagagagagagagagagagagggagggcggacctctcatctggtaacaccccacaaaacaaaaacacaaccaacgccagcacgaaaacgaagaatagaagagaaagagagagagagagcgagcagccccacacgcccaagagagagagcacgacaaaaagagagagatgcggatgtgcgagcgtcactaagagagagagagagagagagagaaggagggcgagcgaagagcgcagagacgcgagcgcgagagagtggacgcgggagacgagacgaggaaagagagagtgaaaaaaacgcagaagaggagacaagagaagagagacgacgagagtcgaaagcacaacaacaacaccagacacgagagaggaagcgggaaaggaagaagggaagcacagcacccacgcgagaacagaagacagaagaacaagaagagaagaaaagcgagagcacgcacaccaacatgagagagagcagaaagaagcagaagagagtagagacagagggaagagcagcaggagccgcaacaaggaagtcagaaaagaacagagaacgaaagaccagcgaagaaaaggacacgagacacgagcagagaagagaagctaccaaacgctagcaggagacacagacgcagggaagagagaggagaagagacgaagagagagacgaaagcgaagagagagtggacaggagaaagagagaagaaaaaagacgagagaaaagaaagagaaagaagagacggaaagaaaccacaaacgaaagagagaaagaagagaacgacgaagaaaaaaaagaagagagaaaaagacaagcacaagaagaacaggagagagaacacgaaaaacaagaaccaaagcaacaaagaaagaaaacagaggcacgacaacaagtgacacaaagaggagaaacaaaagaagatgcacgagacagggacggaggaggagagagcgacacgaaagagagaaaggagcgagaaaacacaaggagaagaaagaacacaacacgaaacaacaacaagaaacaaaagacagaaaaaaaaagaacaaaacaacggataaaaaataaagagagaagagcaaaggacaacacaacaaggcagggcaacacaacagaagggaaagaggaacgaaaaagagagtagaggagacgaagtacaacacacaagaacaggaggacacaaaccagacggaagcaaacacaagacgcagaacgagaagagcacgcgaagaagaccaaacaaaaacgagccacacgaaaacaagagaaagaacacacgcgagagcaagactgagtaaagctcaccgacgaacgaaaagacaaagcaagaaaggaaaaaaagaaaaacgatacacgcagcgagaggcgcgaagggcgcgacgacacaaaaacaaaaagcacacggaagagagaacccaacaggatggggagcaaaaac

SEQ ID NO: 583912 - DNA, 102 bp, Homo sapiens
attgctcttacatgacattctggaaaacaggagaatgttatcagactatgctatggcagcccaacccgccgagtccttacctggctgtatgccagcctgatc

SEQ ID NO: 583913 - DNA, 135 bp, Homo sapiens
ttttggacattatcttggcaagaatggtaagtcttgaacttgataggaatggggggggttcaagcttttaaaatgttctttttatctaaggtgtgcagggtgtgtggatagcaagtttgagtgtgattctggccg

SEQ ID NO: 583914 - DNA, 513 bp, Homo sapiens
tctactgcatgtaacaatatcagccctactctgaagtgcgtgctgcctttatggttctacccagggtcagtgtaccatagtgaagtgtgtcatacctttctgtctctttgcactatgaaaaaatgctcaaagtattagatgtagccactgtatgttgtgtaagcatttgtggacataatgcaaaataaaagtaatacagtgcttctgttttagaaagaaagaaaaggccggcacggtggctcatgcctgtaatcccaatactttgggaggccaaaggtgggccaatcacttatggtcaggagttcaacaaccagcatggccaaccatggtgaaaccccttgtctctactagaaatataaaaattagctgggtgtggtggaacaacctgtaattcccagctacttggggaggctgcggccacgagaatcacttgaacctgggaggcagaggttgcagtgagccgagatcatgccattgcaaaccagcctgggcaacacagtgagactctgtctc

SEQ ID NO: 583915 - DNA, 454 bp, Homo sapiens
  misc_feature (30)..(30): n is a, c, g, or t
  misc_feature (34)..(34): n is a, c, g, or t
  misc_feature (90)..(90): n is a, c, g, or t
  misc_feature (334)..(334): n is a, c, g, or t
  misc_feature (336)..(336): n is a, c, g, or t
  misc_feature (453)..(453): n is a, c, g, or t
aatctccctgggaaaaaaattcccggaagnaagnaagggcccacccatctttgcctgtttgggcgaccttagctgttcccggcctccccngctttggaaaagccccacacccaacccaggggtggaaagcagtgcccccagcacagcacagctgatctgtgaaagcatggacagactgcttctttaagcagttccctgatcccgttcctcctgactgggtgagacctcccaacccagggtctccagccttgtcctgcaggcgcatttgggctggcaacaggtctgtacctcgctgggccggagctcccagaggaagaggcaggatgacatcttntntgtttcacagccttcactggtgatagctccaggtactggaaaatccaaggagactaggaactggagaagaagcccagcaaagtacagcagccctacagaaacatggccagactgttng

SEQ ID NO: 583916 - DNA, 104 bp, Homo sapiens
gcggagaggggagctagaaacggctaccacattcaaggaagcggcggggcggctgagaatgaacgtggagaagaagattgacaattacacagagttttgtcttg

SEQ ID NO: 583917 - DNA, 933 bp, Homo sapiens
tctgctcgcctaatgccgagcaacatggtgttcaggcgctacgtggaggtgtccgggtggcctatgtctcctttggacctcatgccgtaaaataggtcgcgctttgtagatgtatctcgatcagaacatgggcttcgggtcgatgggaccttgctcttcaacgtgagcgatgactaggcctattgcctttcaaggttgcattgcagctcagcttgtttgtcatcctcaagtttctgcacagtgtccaccaagaagttatgtccggataagcctggagggacgtgctgaacaatctaatgactaagaatggtgctgccaagtacgataggcccacctagagaattgaaggccaggacgaaaagggggtacccgatggatcgtaaagattcagtttcgaattaaaggttgtattgacatgggcccagggccaacatggaggaacagaactaaatccacgaatagagagtctaaggaagctgcaaacagggagttctccttgatagacttctgctcaaaagaaatgtactttggcaactcagaggtgtgtactggttgctggctagattgctaagtgctgctgagaagcattgattggttccgggttccctgagagggaaaagatcctcggcgatataagcatgttccagcccgattgttcctgcccgagagtcggaggtccagaaggtaagtggtgttcgaaaagcttagaggtggtcaatgggtcatgaccagaaatgagcagtgtccaaatggctttcgtaccacacgcatgggtggcctcattacccgtttacaggttctgctggcgtgcaaagagaatgggacaacacaaggggtctgtgggcgagcggcggaaatcaaacactgtgtggggggcccgggaaaaaagtgtatagttctgggaagcggggtgggggtttccacaagcgcggg

SEQ ID NO: 583918 - DNA, 576 bp, Homo sapiens
  misc_feature (48)..(48): n is a, c, g, or t
  misc_feature (72)..(72): n is a, c, g, or t
  misc_feature (125)..(125): n is a, c, g, or t
  misc_feature (134)..(134): n is a, c, g, or t
  misc_feature (142)..(142): n is a, c, g, or t
  misc_feature (194)..(194): n is a, c, g, or t
  misc_feature (212)..(212): n is a, c, g, or t
  misc_feature (229)..(229): n is a, c, g, or t
  misc_feature (290)..(290): n is a, c, g, or t
  misc_feature (293)..(293): n is a, c, g, or t
  misc_feature (298)..(298): n is a, c, g, or t
  misc_feature (328)..(328): n is a, c, g, or t
  misc_feature (330)..(330): n is a, c, g, or t
  misc_feature (334)..(334): n is a, c, g, or t
  misc_feature (340)..(340): n is a, c, g, or t
  misc_feature (361)..(361): n is a, c, g, or t
  misc_feature (380)..(380): n is a, c, g, or t
  misc_feature (392)..(392): n is a, c, g, or t
  misc_feature (430)..(430): n is a, c, g, or t
  misc_feature (445)..(445): n is a, c, g, or t
  misc_feature (459)..(459): n is a, c, g, or t
  misc_feature (534)..(534): n is a, c, g, or t
gctcctaactccttctagcagcccccgctgccaactccctccttcctnagggacccggggtttgcctcttgncaggaaggtagactctggcagtgtccactggctttagggagtcccctcccaancccatcttntgggttanggccctgccctatggcccgcacaggacagtcacaggacactggaaaacacancagggaacaccctaccangttaaggaaactgagtnatgagtaacaacaggggtggaacaccaaagcacaaagctcctcgggagcctcaggcagggnaancccgntccgtcctgggtccaatttcttcctcccanantcanggtcancatcgtggtcaaagggtgagngtcagccttgccctggtgnttccttcctgtnatctcctgggaatgtgctgggggattccggggaggagntgctcagagaagaanacacacagctccanaagaacaagcagccactggcctagatctacacagggaaagcagaggtggtgctcatgacgcgggacaccagtgancagagcctgggctcacaggaagctcacagcatgtgccttggg

SEQ ID NO: 583919 - DNA, 572 bp, Homo sapiens
ggtcagaaataggaaggtagtgattactcacagtttcaggaatctgatgatgcagatgaagatgatggaagagattcgggcgctcccactaagagaattcgatcatctccccgagaagctaaagaataagaggcgatctggaaagaatgcacaggacgatagtgaggactcagaagacaagatgtgaagaccaagaaggatgatctcactcagcagaggatagtgaagatgaaacagacagatcatgaaaatgtgcgccaacaacggcaggcggcatctggaagcaacgtgttctaaacggagagagatgctcatggaagatgtgggcagtgaggaagaacaagaagaggaggatgaggcagcaattccaggagaaagattccggcgagcgatgcacgattcctaagtggaagatgatgacgatggtgactatggcagttcgaagaaagataaacacaataatgactggttaagcaccgtccaccccctgagtactaatagatataaacatctcagccatcccttgtggggcgttgtgtgaaagatgggttgtgaggcgtgcgagttggcag

SEQ ID NO: 583920 - DNA, 489 bp, Homo sapiens
  misc_feature (94)..(94): n is a, c, g, or t
  misc_feature (196)..(196): n is a, c, g, or t
  misc_feature (204)..(204): n is a, c, g, or t
  misc_feature (290)..(290): n is a, c, g, or t
  misc_feature (328)..(329): n is a, c, g, or t
  misc_feature (371)..(371): n is a, c, g, or t
  misc_feature (375)..(375): n is a, c, g, or t
  misc_feature (399)..(399): n is a, c, g, or t
  misc_feature (404)..(404): n is a, c, g, or t
  misc_feature (429)..(429): n is a, c, g, or t
  misc_feature (485)..(485): n is a, c, g, or t
gtgcttgctttgccctccgcccccctcgtcgcccccgctctgcccgggggtccgcttctcggggccgtggctccccgctctgtggcccctcccnccgtcggccgcctccgtttcctcgactttctgggagactcatggggccttctcttctcccaccctcgggactttaccccagtgtgcaccacatagcttggcngagctgcnttgctggctcctgaatttgccaagaggaatgtctcgttgattgccctttcattagacagtgttgaggaccatcttgcctggagctnggatatcaatgcttacaattgtgaagagcccacagaanngttcccttttcccctcctcgctgataggaatcgggagcttgncctnctgttgggcctgctggatcctgcngaganggatgaaaagggcatgcctgtgacngctcgtgtggtgtttgtttctggccctggtctcaagctgctgctgtcttgtctctncccg

SEQ ID NO: 583921 - DNA, 392 bp, Homo sapiens
ttcggcaaagggaacccgggaggtggaaattacagtgagctgagattgcaccactactccagccgggagacagagtgagactcttgtcttaaaaaaaaaaaaaaaaaaagtttattttgtcaaggtttaggacacgtgcccctgacacagccttaggaagtcttgatgacgtgtgcccaaggtggtttgggcacagcttggttttatacattttaaggagacatgagaaataaatcaatatgtgtaagatgtacattggttccatcttgaaaggcaggacagcttaagcagggatagtgtttctaggtcacaggtacatgagagacaaactgctgcattcttttgagtttctgatttgtctgtccaaaggaggcaatcagataatcagatgt

SEQ ID NO: 583922 - DNA, 879 bp, Homo sapiens
ctggggagtttattgctttccacaggggattgcctgtcccccagcactctagttgttaagcctttagttaatgaatgtagcctgacttgtggcataccatgcaatgcacccagctactcacaaccgcctaatttcatggcaccacatctgtgctatacctccctccctctgatactctctgaaagtcatgcacattacctactggctgactttttacacatctcaccagctgtaaaatgctatgtctctatccatcagagatagtcatgtattctatttctgaaggcagcgaacaagacaaagcagatacacttgttgccgtgacgggatttgctgaaccatgtatctaatcctcccatttggacagtataggtgttttgctttgtttgttttctttttttaacgcaaaaaccttgtaacctttgacactgacagatgtgtttgcaaggatatcggctgcagtattacatgaatttccatgtgtatctggaagtatttttcaaatggcataccaaaatccagaagtttaaagatgcctataaaagtaaacaacatttatttaaaaagaactctgtatatgccttcttttgttgaactatgatatatcttcgagacatgggtgtttgttaataactaataagctggagtaagctacaggatctccaagaacagccctttttttacagtcatacgttctaggagtagacgcgaaactaattgccaaaatatccacttagaggcaaagaacaattttgttacttatctaaaaaggcttcagcacattgttgtggcaatattgtatctgtttacgcaaatgggcttttccgaaagcagacaaagataggttcctcagtgaccaattaacgaaatctatatttc

SEQ ID NO: 583923 - DNA, 792 bp, Homo sapiens
gccatttgccgttcttaaattgtcatcattggctaggggacctggctctccatataaatgagaggagaccattagtgcacatgagttggatggtgcagatctactactcaaatgaaggatattttggctcgcttgtgaccgatctctttgactttccagatcaggataatcaaataaaatgataagatacgaagagtgaatgtataacatggtcagcatatagttgatttactgcctaaggttgttatagtgtgttgaagaatgattcttgctactgagtataaattctgtggtacccgttcttagaggtcaactgtttatctatatgtgaatgctcaaggaatagttagaatagtctggaattggggaattgatagtagcaagctggaatttgggtcatggaaaatgctgtgtaaaccagtagcaagacgggccaatgcttggagtcaagccaggcccagatcattcaagctctatcttcttggtcttttctttctttctttcgtgcacttcctggactttcaactcacatggcgccttgggaagacaccttcactgtttgaacactgccttggagaaggcggaccgagcaccttcctggagctagagcatcataagcacttactttcgcgggcgacatcggcactggtggacacgggcttcccatcattttaagcccagagacaagctgggcttcccacaaatttctggcgaccaactcgctgatgtactcatcctcacgcgggtcccaatggtgggaaaatctcccattccacccgggcatcaatagca

SEQ ID NO: 583924 - DNA, 164 bp, Homo sapiens
tcctcagtggcccccttcagtcccactccagctggcaaggtcagcatcaggaaaggcacggagggctgggcctggcccaggacactcagaccaggaccctcttccctctggaccctgccccatcacttaccagccatgtctcttcattcgtttatccaagaagg

SEQ ID NO: 583925 - DNA, 934 bp, Homo sapiens
cgcggtggctcatgcatgtaatcccagcactttgagaggccgaggagggcggatcacaaggtcaggagatggagaccatcctggctaacatggtgaaaccctgtctactaaaaaatacaaaaaaaatttagccgggcgtggtggggggcgcctgtagtcccagctactcaggaagccgaggcaggagaatggcgtcaatccgggaggtggagcttgcagtgacccgagattgcgccacggcacgccagcctgggcaacagagcgagactccgtctcaaaaaaaaaaaaagaaatttacttcatgaccacgtggaatttaatcttggaatgcaaccgatggttcaaaattagaaacacaaacattcaccagaatacagcacatttaccagaataaggaccccaaaaaacttacttgacctacacactttgggtcacacacccttctgacaatcgtcaactaccttttcattgactgaaaagaaagacctcaacacactaggattacacacgagctccctgccacggtatgtgggctcacaccctgtatccagcacttggggcggccacggggcgacgactgctgagccccagggagtctggaaacacccccttggcaactgtcgacaatcttgctccaccagagacttacacaatttgccacgggttagggcgcacccggagaccagcactggcagctgagcggggaggactacctgacccaaggtctagacagccatgggaatggagccggccgtcaaaggtaaacacgagctggggcaacgcggacagcataggcagcagggggattgcgccgggagcgcgacaatcacgggcagcagagagagccgccatggggcggggaacacacgaggagacagcgctaaaaaggcggccacaagaaagagggcgcacaaaagcagacaagacacacctc

SEQ ID NO: 583926 - DNA, 358 bp, Homo sapiens
taggcggtcgcgccaagtcgtgaatgcgagacccaggaggagctgggactacaggcacccgccaccacacccggctatagagtagtagtatagtagtagtagtagtagtagtgtagtagtagtgtagtagtagtaatacaaacgcaaaagaacagggctgtccccagtagtatagatagagacagtacaaaaaaaaaaagacaagaataaacaacaaacataaaaaaacagcgaaacaaccgcataccacagtgaatgtgatatgatgtgatgagatgtgatgatgtggtagcaatgataaccacaaccaaaagacaaccacaacaacacagcgcatataaaccaaaccaaaaacagc

SEQ ID NO: 583927 - DNA, 197 bp, Homo sapiens
tgtattgagtggcatgtgatggcggtgaacagcagtgaaggatggtgagcgaaagctcagctcaagccaaaacaaacgtggaccagaagagtgtgcagttgcaagatttaatagagtgaaaacagagcttccatacatgtgggacggggaaccaagggtggtggcccatctccctgcctcaagatgcctggaggttt

SEQ ID NO: 583928 - DNA, 130 bp, Homo sapiens
ctcctgaatgcatgtgtctgggatttcatccatccgtacattgaagttgacttactgaagaatggagagagacttgaaaaagtggagcattcaggacatttgactttccattctcttgctggtggaaggg

SEQ ID NO: 583929 - DNA, 367 bp, Homo sapiens
atttttagtcccaaattttaataatttgtaaattgatctcttattccaagaatcctttgaacttgtagaacatttgggagtccccttccctgtcctcttcctgatccctgctttttggactgtttaaatcctctttgggatggatcaaaaagtttaaaaaggcccctcataggtccagctggtggcctcctgactttccaaagccttcactggaattggggcatttgctccagccctagctgtgaacatgaccaaagacattatttataattcagccctttaaaaaaaacctggactcaaaaagtcctggatatttttaaaaagttttatttttcaggtgaacaaaaaaacatcctaagaactttga

SEQ ID NO: 583930 - DNA, 326 bp, Homo sapiens
cccccatttttttttgggcccccggggggggggtttccccccctttttcgggggttttggggggccgggggggggcccccccccttggttttttttttggttccccttggggaaaaggggcggggggccccccttttaaaaaaccccccccctggggggggaatttttttttttttgctttttttgcaaatcccggccccggggggggggggcccccccggttttttcccccaaaatttttttggttttttttttttttggaaaaggggggggggggggggggaagtttgttttttttttttttttggccccccccctttttttta

SEQ ID NO: 583931 - DNA, 326 bp, Homo sapiens
aaggccccaaaaaccggagggaaacccccccccctttcgaggggaattacaaaaaccggaggagccccttttggcaaaaaaaaacctttaaacaggggagggcgggttttccgtcacaacttttttttgccccccttttgttcccctgttttcacattttagggtcagggtccaaccttggcagcctttcttttaaatggaggaacccattaatttttttctggccttttaaaacccttttgttcagtccccctttccccccatccgggataggccctgggggtacaactggttttgcctttttttataaaataaggttgggggga

SEQ ID NO: 583932 - DNA, 120 bp, Homo sapiens
attgatgctggtacccctagcacttcttacaagccacctgctccagaaggcacagcctgaccctcccaatgttgaatataaatgcccaatgtgccacatgaatgccatgtgtgactcctc

SEQ ID NO: 583933 - DNA, 354 bp, Homo sapiens
ctgcctgccgtattcgttacttggtgctacgaccgcttactgcctacattctcatgggaatgtctgaccatcctgacagacatcctacacctatgttctcccagagagcttcggaaccccactcccagacaccattgaccagatgctaagagtcacaggaatgaaacacagaaaaattccaagtcacacaaggactgtaaaagatggtcaacgaaaggaccacactccttaaaagcacagacatcttttatcgcttccagtaaaggcgcacactgcagcggcacagacagtcttgccagaaatggccagcttgtgcacgactccgaatcctatcgtgacaaaggcctacgctgc

SEQ ID NO: 583934 - DNA, 165 bp, Homo sapiens
ggtgaccgggatgttctcgacagaaccaagaagcatctccaggagcggctgatagagctgctcagggacaaggatgctctctggcagaagtcagatgccctggaataccagcagcagctcagtgctgagcgagagcatggcacggagccacagaggcaaaccact

SEQ ID NO: 583935 - DNA, 181 bp, Homo sapiens
gcgactcttacggttccttcataatattttaataatatccgacactttgatagaggaaaattcaaagctgtgccttcgacgcctatactatactgtgtatgtgtggaaataaaaatgtactgcactttaggagaaatttttgctggcatttatctgttagatttgtagaaacttgcgaggt

SEQ ID NO: 583936 - DNA, 565 bp, Homo sapiens
tctgagatggtcttctgggccatggagaatcctgtccctcatgctctgtgtctggaatcgcccaggccttctggattttgcaccatgttcttcgaggccatccttgcagcccttcacacgctccttgataatctgacgctccttgtcccggagcttgactcccggctggaacacaggtagattcttctctgctgctgtactcagtcccctttccccagctgcgctggtaggtctggatcttgctgctcaatgttgctcccggaaggagcgctcagaagtcttctgttgtcattgccaaccagctggatcagttcagacttatccagggccttgcggatgtcacttgtagtggtggtgcaggacgcatggcgctcagagctgggtcctcgtacaccttggacttgctcagcacagtcaacttgcaggtttgcccagcactttacagatatcggtgcttagcagccgattgctgcactcagagctgtagctggtggccgaagagctggtctcttgggaggccagcctggcgcctgcggtctcctggaggtccacacgctggtgcagg

SEQ ID NO: 583937 - DNA, 196 bp, Homo sapiens
aatagacaagtgaccgtgtggtgtgcgcggtggcactgcgctgcgaacatggccttggcgtcagacataaggagctcatcggcgaaatacgccatgcgagacctagtccacaggcttccaggagggaacaacagcgacaagactgcaagctaggccaattgtcggggtgacacacgtcgacagctggtctgcgtgc

SEQ ID NO: 583938 - DNA, 373 bp, Homo sapiens
  misc_feature (215)..(215): n is a, c, g, or t
  misc_feature (219)..(219): n is a, c, g, or t
  misc_feature (261)..(261): n is a, c, g, or t
  misc_feature (263)..(263): n is a, c, g, or t
  misc_feature (309)..(309): n is a, c, g, or t
  misc_feature (336)..(336): n is a, c, g, or t
tatcgccaactgctggaaccacgtttaaaagcaaccggccgttaatgtctgggtacaggatggcaaccgccgtggataaactgaccgctgaacagcgtgaacgttatttacaggccagcgccgattgccaaagtcccgcccctgccagcggcgttgtttatgaactttttgtcgccggcaaaggcaaaacctttacagcgaaaccgaaaccggangcanaaattgcctcgctgttagcgaaacgttcctcttgcggtaaananactctctatttctctctgcgctatttgcccgtcgcgcacggcattntcgagtattaaatctcctccaggtaantcgggtacgacctggcttacctctttcgctctcatta

SEQ ID NO: 583939 - DNA, 148 bp, Homo sapiens
gcggccgcctactactactactactgctcgaattcaagcttctaacgatgtacggggacatgctcttttgtcacctgctaattgccttactagtaatgaattctgatgcatgaaaccccaataaatatcctcattgacaaccaaaaaa

SEQ ID NO: 583940 - DNA, 817 bp, Homo sapiens
  misc_feature (19)..(19): n is a, c, g, or t
  misc_feature (81)..(81): n is a, c, g, or t
  misc_feature (85)..(85): n is a, c, g, or t
  misc_feature (87)..(87): n is a, c, g, or t
  misc_feature (123)..(123): n is a, c, g, or t
  misc_feature (129)..(129): n is a, c, g, or t
  misc_feature (204)..(204): n is a, c, g, or t
  misc_feature (250)..(250): n is a, c, g, or t
  misc_feature (274)..(274): n is a, c, g, or t
  misc_feature (311)..(311): n is a, c, g, or t
  misc_feature (320)..(320): n is a, c, g, or t
  misc_feature (329)..(329): n is a, c, g, or t
  misc_feature (347)..(347): n is a, c, g, or t
  misc_feature (392)..(392): n is a, c, g, or t
  misc_feature (405)..(405): n is a, c, g, or t
  misc_feature (444)..(444): n is a, c, g, or t
  misc_feature (497)..(497): n is a, c, g, or t
  misc_feature (502)..(502): n is a, c, g, or t
  misc_feature (529)..(529): n is a, c, g, or t
  misc_feature (591)..(591): n is a, c, g, or t
  misc_feature (600)..(600): n is a, c, g, or t
  misc_feature (602)..(603): n is a, c, g, or t
  misc_feature (609)..(610): n is a, c, g, or t
  misc_feature (615)..(615): n is a, c, g, or t
  misc_feature (626)..(626): n is a, c, g, or t
  misc_feature (629)..(630): n is a, c, g, or t
  misc_feature (635)..(635): n is a, c, g, or t
  misc_feature (653)..(653): n is a, c, g, or t
  misc_feature (656)..(656): n is a, c, g, or t
  misc_feature (741)..(742): n is a, c, g, or t
  misc_feature (784)..(784): n is a, c, g, or t
aaactgctccgcgcgcgcnggggaggaggaaccgcccggtcctttagggtccgggcccggccgggccatggattcaatgcntgancncgcgtcccgctgtcttctgcttcttcccttgctgangcagcngctgctgctgctgccggccccggagctgggcccgagccaggccggagctgaggagaacgactgggttcgcctgcncagcaaatgcgaagtgtgtaaataatgttgctgtggagctgaagtnagcctttgaggaaaccggcaagancaaggaggtgattggcacgggctatggcatcctggancagaaggcntctggagtnaaatacaccaagtcggantgcggttaaaagaaataaactgaaaacattgcaaaagctcctggnatataacctgcanaaggagaggacggcagcaatcgatttgccaagggatgtnagaagacctttgagacattacacaacataggtacacaaagggtcaagtggtgnatggnacatcccctatgagctgtggaccgagnctcctgcagaggtggctgacctcaagaagcagtgtgatgtgctggtgggaaaatttgaagcngtgatcgcngnntggtcnnagcanccaccagcagnaannctgtnctgaatcctctgcgccanccncgtgctgaagggaaaagacaccagttgcctggcagagcagtggtccggcaagaagggagacacagctgccctgggagggaagaanncaagaagaagagcagcagggccaaggcagcaggcggcaggantagcagcagcaaacaaaggaaggagtcgggtgg

SEQ ID NO: 583941 - DNA, 305 bp, Homo sapiens
atcgtaggagtaccatccctgtctacatgtatcaagacgaagataatgactgcgaacacttaatccgaatcatatttatttagagtcagaatggagcgatttgtagtaccagcaccatctgctctaaaccgttctaagactgctttgtatgtcactcccctggatcgagtcactgattttggcggtcagctgcattaagatagatgaaaactcttctgcacttcttgcactgtggttctgaatcatgtacgcgagtctgccattagtgaccacctctagtctaagattcttaccaagaggaaggc

SEQ ID NO: 583942 - DNA, 133 bp, Homo sapiens
acaaaatgtatgtgaggcgtatgtgccaaaatgtgacagactttaactggtggacatgtctacacactgacctgctttttaatatacttcatctgtttaaaagtatataataaacatgtttaatgtttgttta

SEQ ID NO: 583943 - DNA, 442 bp, Homo sapiens
tatctggtaagcccgggacagtaagcccagtggctggtggagtccgtattgttggtaatggtggaggaagaaaagcctttccccttaagcttgggtggggccgatccgtgttgcttgccttccaaaaaggtggggagtgaatgtgcacccttgggtgggcctgccaccattccacttaaagttacaaaaatgcttcatggaccgggggttggtactataatgttcctcatggccaacaaatggaacccggagacatggaatcccttgccagggtgaatcctaacattgcaggaggggaaaccctgcaagagagagcccgcctcaattgatgcctgcagattgaatttccagaggcttaggaggaggaagttctccaatgttctgtttccaggccttgctcaggaagccctgtattcaggaggctaccatttaaagtttgcac

SEQ ID NO: 583944 - DNA, 402 bp, Homo sapiens
  misc_feature (36)..(36): n is a, c, g, or t
ccctgttgcggtgccctttcccactcctcttggggntttatgttatgtgggaaatggactaaaagcattctttgtggtttttctatgctcttgttcagcccattcttacctgttaaagcagtctgtttagagaggaaaaagcagcaatattaggtctcattaacgtttctgactgtggcaaaagtcttaacatagaccacacttcagtatgtagttgcattcgttgaaagataacttgctttctcttaagccttgacaatatagtttaacaaactcctgtgttttataaagtgttctttaagtttggcagtttcttataaacatacacttaccctacatcccagcaatcccactcctagctatttctccaagaaaaatgaaaaacatttctctacaaaaaga

SEQ ID NO: 583945 - DNA, 664 bp, Homo sapiens
  misc_feature (90)..(90): n is a, c, g, or t
cagcccatcgatatcacagtagactacaactgctggttagcatcagagttctatcaaagtagagcccgctctgtttagctgccttattgnctatgtcttgactatctttgtcagtgatatcatggatatgcaccgtgtctatgcacggttgctgccactgtgctctaagctgggctgccttctcggtcaggttagcaatctttagagactatgaattagatatctcctgcgtagatcgcacacttgagtcatgtgtcaacatcgatgcttcatgtgccagaatctattccaacattatcctggacttcacagtagcagcgtctatcatatctggctctgatgattcctcagcattatgagtgagttggtcagccttgatcagctgtttgacttctaatgctctgttgtggacttgatgtatcatgtcctgcgttagaccgtagatccctgtggaccgtggtgtaataagtaacgagcagtcagtcaacgccacatggtagctgaacgatagctcatgaatctctcatttaagatgcatcagttgtctctggtaacgtcatgtgctccccatgttgaatagatggatccatgagcatcgccgtagcgagtttcattccgctcatgcaaggcccatctcatcatgtctaagtgtgcctagccccgt

SEQ ID NO: 583946 - DNA, 602 bp, Homo sapiens
gaagccgcgagagcgcggacggtgggctgctgctgggcggcgcggggcagggagggcgccggactccggtccccgccgtccccgtccccgttctccttagcccctgccggtccccgtgctggagcgggccattggggccaccgggggcgcgttggccggggaccggtgtgggcccgtgagggattggaggacgggttggggagaacgcgagaggggggaaccaggaaaggcgccgggaaaggcccccttgtctgggagcacacgacagcgggacgccgccggcggagactcaaccgagagaacgccctggcacaggggacgcaggagaggctggctaggttggggaggtcgcctccccagaaggggttgacagggcacaaccgccttggggaaagaaacccgcgcccaaaatgctcgccttggaacgccttagaaccgggttgacaggtagtgcacccaagggggtttggatccaatgacaggggaccacgggacgcagcaggagcacacgcagcaaagcaagtcctgcacagagagtggggaaaacatccaccggtggcatcggccgtcgacggtcgaacaagcggttgcgggaccccgtg

SEQ ID NO: 583947 - DNA, 166 bp, Homo sapiens
  misc_feature (88)..(88): n is a, c, g, or t
ttcacctgagacaacttgtacatagaggagcaacgaattcgactacccatcggtgggcagctgcgcacaacgtgtgtgaaaacaacantcagcccatcttcgcggtgaccagtagcatggtgaagacctacgagaaactcaccgatatcatccccaagtcagccgt

SEQ ID NO: 583948 - DNA, 879 bp, Homo sapiens
  misc_feature (242)..(242): n is a, c, g, or t
gtctgcatcagcaaatggacatgtccaggatttcttcctatggaagccttgacagtttctttgtatctttcctaacacggtaacaacttcttccccagggttgagaggagaggtggaagaatctacttaacccagcaaaatgttttcctagccagattttcttcagtgtgaaaatgtttattgagtcagtgattccactgggtagggttggtgacatcagagccacttcccccatttaacgntataaataataaatggtgacactgaaagtctgttggatagctgcatggtttctgtggatgatggtgtctggggagttgagatgcttgttttaaaaatggaagtacagtagcataaatatggaggcagcttaatgtttgctgtcctttgcataattcacagaactggacttctctagcattcttgaaaactaggagggaaaaaaagaaactgatagtttttgatttttgcatgcgtgtgtgtgtgtgtgtgtgtgtgtgtgtgcacgtggggttgtttcaaagggatgtcacatagtgagtgatttttccttttcagcataatttatcatacttgtagtcaagtgtgggtattctgtaactttgtagtgggttatcgggttaactatcttaaatcgactaagtatattacatattcttaagagtgtacacaccgcggcgtgtacttaccacagaagttacttcatatcgaaaaatgtcactggcggcccttggaaatgggggtcccgtcctcaattctattccttaaaaatagcaaatgttttttccagatttagcacctcttgtcccccgctcggttggtccactcaaaaaaaacctggcatcctgctccaaaaaaaacaaaaaacacaaaaggggc

SEQ ID NO: 583949 - DNA, 746 bp, Homo sapiens
  misc_feature (245)..(245): n is a, c, g, or t
cgcctgtgatcgtgtcttctcgagagcaatgacgtggtgaaagcggaaacgacgcaataaggagtgagtgagtcaacgagtctcactgataaagtctggtggtgcgagtctcactcattgcatcaggaaattgctatgtgtgaaacgagcacaccgagtatcgctggcgatctagagattatcatcgtacattagggacccgctcattggccagcactgaataacagaccagtgcttcatgtagnccacctgaagtggttagccgcagataggaaagtagctttggttgacaaggattttgaagtaccttgtatgaattgaccggcttattagtcatgtaacaggcggtagtcttgactcgaaggcacagtcaaagaggtgaacggaatggccttgcacattaacatttcctgtgagagacgttgtcattagtccgagcaacatttgtgtgattccgctaggggagtgtggcccatggggtggtgcgacattgactatggttgccatgaagatcagaattctcatgaagaaaagtgtgtgagggtcgggccatatagcattgagaggaagattgagtatctggaaaagaggtgcttgcccctgggagtgtggtagcaaggtttcatggaagaagtaaaggttggtgatgtcgggatgatgtcgcgtggatgattgaacccgatggagtgtgaaccatctgactcttcacgcactggccgatgactgacccaaaaagcatgcacaca

SEQ ID NO: 583950 - DNA, 701 bp, Homo sapiens
taggggccgtgtccatagcggtggtgggaatgtgtcgcgccgggaaacttcctggttcccgggtgtcggttcgccgggatcctcttggaagggaaacaatggggcggagggcactgcggtagccgccgccgccgcgcgccggccgagccggatctgctcggcgcccgggatcgccagctctgtccgttgcccacaggctagcagtcgggaccgtactgaggacatgtattcctctgagaaaccttggacagcagatttgggttaatatctgattgggacaacattcagacccatttccagtcatgaacggagtcttgcccctgtgacccaggctggagtgcagtggcgcaatctcggcatcacttgcaagctccgactcctaggttgacaccattcctcctgcctcagtctcccaagtagctgggacctacaggaacccgcacagccacagataatctggggtcattttgagtagcagacatggtttccacccatgtttagccaggcatggtctcgatctccgtgaactcgtgatcacccgcctcggctctcaaagtgcttgagatattaggtgtgagcaaataagccgggctggatgctccgttcttaacaggattgtgattaatctggaacttgcttaagaagtaatccggcaatgttcttgattggtacaagtagatcatactgtggcttataggaaa

SEQ ID NO: 583951 - DNA, 351 bp, Homo sapiens
aaagattcttcccttcgggctggtggtgacttgcagaacttgctgttgcatgggtcaaagtactgtcaccccacagcttcttcatcatgtcctctactttcttgagcctgtcgcaaggccccaagtggccctcccccttggcggcgaacttggacacatacatctcggcaaaattgattcagggtgaaggcccaccctgtgaaggccagacccaaagcccacggtaccgagaaccaggatcgctcatgatgttgcccatggggcggctctcgcactcgctgtaggtggagatgctgccgtacacgttctccatgatgcgctggaaaagctggtagacgctcctcgggctcc

SEQ ID NO: 583952 - DNA, 294 bp, Homo sapiens
aggatcctgatcaggagttgagacagcatggccaatatggtgaaacccatctctactacaaatacaaaaattaggtgggcatggtggtgtgcacctgtaatcccagctactcgggagactgagacaggagaatcacttgaacctgggaggcggaggttacagtgagctgagatcacgccactgcactccagactggatgacaaggcgagactctgtactggattctgctggggccgcagcgggggcaaactttctaggcccttctcccaagcagtaacagccattgcacttcgg

SEQ ID NO: 583953 - DNA, 328 bp, Homo sapiens
  misc_feature (95)..(95): n is a, c, g, or t
  misc_feature (189)..(189): n is a, c, g, or t
  misc_feature (200)..(200): n is a, c, g, or t
  misc_feature (272)..(272): n is a, c, g, or t
  misc_feature (290)..(290): n is a, c, g, or t
  misc_feature (292)..(292): n is a, c, g, or t
  misc_feature (295)..(295): n is a, c, g, or t
  misc_feature (301)..(301): n is a, c, g, or t
attaaaaaaccaaaatcccccatatcccagacatgaagatatcagttccaccaatactgtagttaaaaggctaactctccccttggatgggaacnacctttccctcttgggtttccggaaaaaaagcgcacttccccgaaatattttttcagccaaacccctgggaacatttttactaaatctttttgnaacccttaaanaattccctcattcattaccctacagggtaaacaggagtttaatttggatcaaaactatgttttgggtgtaanattcagttccctcccccnanggncaaccnatgaaataaaaaaagccttttaaagga

SEQ ID NO: 583954 - DNA, 304 bp, Homo sapiens
  misc_feature (1)..(1): n is a, c, g, or t
  misc_feature (52)..(52): n is a, c, g, or t
  misc_feature (123)..(123): n is a, c, g, or t
  misc_feature (203)..(203): n is a, c, g, or t
  misc_feature (229)..(229): n is a, c, g, or t
  misc_feature (252)..(252): n is a, c, g, or t
  misc_feature (266)..(266): n is a, c, g, or t
  misc_feature (272)..(272): n is a, c, g, or t
ngtcgtagtgtcgctgtttgcgggtctcccgctgggaccggggcgcacgggngtcgctgaggcacgggtgtcatgtcagacaacgaggacaattttgatggcgacgactttgatgatgtggangaggatgaagggctagatgacttggagaatgccgaagaggaaggccaggagaatgtcgagatcctcccctcttcgagcanaccgcagccaaccagaagcgaataanctcaccatacatgaccaagtacnatcgagcccgcgtngctggnaccccgagcgctccagattgcgatgtgtgccc

SEQ ID NO: 583955 - DNA, 114 bp, Homo sapiens
gagttgcagagagaatggtggctactggagaatgaatgaaatgcctgaatataagtgaatctcagaccatttctcatatgcgatgtgcaaaagttgtctaatgtctctaagtat

SEQ ID NO: 583956 - DNA, 424 bp, Homo sapiens
  misc_feature (132)..(132): n is a, c, g, or t
  misc_feature (140)..(140): n is a, c, g, or t
  misc_feature (160)..(160): n is a, c, g, or t
tcagaaaaccacatgttatctgcggctcagttttgtaatcccccatttacaaggatgttgactggaaaacaatattcaaaagagccccaccagggaggataatgacgtcaaactatgtcacttaaaaaaaanaaggtccntgggggtggtggctcacgtntgtaatcccagcactttgggaggccggggcaggtggatggcttgagctcaggaattcaataccagcctgggcaatatagcaaaaccccatctctacaaaaaattttaaaattagcaaggtgtagtggtgcaaacctgtgatcccagctacttgggaggctgaggtgggaggatcgcttgagcctaggaggcaaaggctgcagtgaagaaccatgatcatgccactgcacttcagcctgggtgacagagcgagaccctgtgttta

SEQ ID NO: 583957 - DNA, 133 bp, Homo sapiens
agaaggtgtattagagatcaaggaaggaatcatccttccttgtatgtatatacagcctttgggtacaaagtgtgtggtttcttgaggatcggactcttgatggtatttctatttttatataactatatagtaa

SEQ ID NO: 583958 - DNA, 252 bp, Homo sapiens
gtatggacttcagtttgacagtctccagatcaccctacagtgggtgcaggctgtgtttcacatacactagaaaatgtggccaactagaagtggactacagtcctatctgacatgcaggactccagtttatcacataagataccacctatggaggagccgtcctacacccaagataatgatctttctgagctcatctcagtatctcaggtagaggcctccccgtccacctcttctgctcataccccttctcag

SEQ ID NO: 583959 - DNA, 182 bp, Homo sapiens
ccccgagacctatccccaacacccaaggggagttcccacggacgcttctgctcatgttccaaggctgtgacgtgcgctcattctcgccctcttttttcctctctcctcctgccccctccaagaagtactgactggtctcctctatcgtgtttgctgatccacagtgttgggcgataacatca

SEQ ID NO: 583960 - DNA, 148 bp, Homo sapiens
gcccgggaaaccccgtcgttccctttcccctggcttgcagcgcggaggccgcacgatgccttgagttactgtaaaagacgtgaaccagcaggagttcgtcagaactcttgcagccttcctcaaaaaagtcccggaaggtgaaagtccc

SEQ ID NO: 583961 - DNA, 97 bp, Homo sapiens
gatcctttggcactttgtccagacccaaatcagaacactggaccactcgaagatggcattgacagcggaaggggcacactgggcctagggagggctc

SEQ ID NO: 583962 - DNA, 211 bp, Homo sapiens
cagagacctcgcaggccccgagaactgtcgcccttccacgatgtggctccgtgcctttaatcctggcactctctctgcttccgcggcttgggggaatccgtcctcgcaacctgtgggacaaccgtgaatggaaagtcttgggaagtcgtagcttagaggatttgacagctgtgcattttctggatcctttgcaagccgctttgaccctagg

SEQ ID NO: 583963 - DNA, 1150 bp, Homo sapiens
gctataagccaaaatgggagaggaaaagactcatactcaacattgtcgtcatatggacacgtagattcgggcaagtccactcactactggccaatcttgatctataaatgcggtggcctcgagccggacgacaccatttgatagaaagtttgatgacatggaggcctgctgagactgggaaagggctcctacaagtatgcctgggtctaggataaactgacaagctagatggcgtggaaacgctggtaatcaaccattgatatgctccttgtggaagataccgaggaaccagtcaagctactagtgatgaactagtcattgcactgaccccaaggaccagcagcacgtacctgtgtatcaagagaaccactgatttacatgggagcactctcacggggtgagctggtgctgatccgtgagtcgtcggctgctggatgtgtgggtgaacattgtgaaaggctggtatctccaagaatgggcagacccgagagcatgcccttctggcttacacactgggtgtgaaacaactaaattgtcggtgttaacaaaatggcattccacatgagccaccctacagccagaagagatatgaggacctcgttacaggaaagtcagacacttacattcaagaacaattggctacaaacccgaaaacagtaacacataagtgccaaatatactgcgtagcgaatggtgacaacaatgctgggaacaaagtgctacaacattgccttgggtccaagggactcgtcaacagaacaccccgtacagggactggcacacggccaagtgggcaaaccaaggcacgccatggaggagctctagagaactgcaataccgaaccaaccaagaccaggacgcaacagggacaaacgcactagacgcctggccctacctgaccaggggaagtggcaacaacgaaaaaaactgggcgccgaaaccacggtaacctggcacaggagacggggcccgaaactggacaaacaggagcggtaccaaccacaaaacccgaggcaatacggagcgcacacacacacggctccccagacgaaaaaaggttcacaaacagagcgaagcacaaacaaatccgggcggcaaacggcaccacggaacagctaggggatgcaacagcatcatgacacggggaaac

SEQ ID NO: 583964 - DNA, 604 bp, Homo sapiens
acttgaccagaaggcagaggtggcagtgagccgagatggcaccactgcactacagccggggtgacagagaaagaccctgtccaaaggaaaaataaaaaaggacataatattacattttaggtagaatataacacaaggtagaggagcagcttagtggacaagtagaattggtgggttggaagtcagttcagaagagagtttcatagaggggagtagcagcagaatcaatgaacgtgaatgagcatgcggcgaaagaggaagacaaagagaacaaggacgcaaaaaaggcaggttggagaaggggtatgcaggtcgtggtggctcacacctgtaattccagcacttggaaagactgaagcaggtggatcacttgaggtcaggggttcgagaccagcctggccaacatggtgaaacctggtctctgctaaaaatacaaaaattagccaagcatgggggagggcgcctgcaatcccagctacttgggaggctgaggcacacgaatctcttgaacccaggagatggcggttgctgtgtgctaaggtcacaccaatgcactccagcctgggcacagagcaagaatcatcttaaaaaaaaacaaaaacca

SEQ ID NO: 583965 - DNA, 260 bp, Homo sapiens
gatttgataactagcccccctccttaaatcactttatcgaggtataattgatatataaaaagctgtacatatttacatgtttaatgtatacatcttgatgagtttgaggataagtatacactcatgaaaccatcaccatcattaaggcataaacattcattaccttctaaagtttcctcctactctattgtgtgtgtgtgtgtgtgtgtgtgtgtgtgtgtgtgtgtgtgtgtgtgtgttctcgtgtgtgcgtggtgtgg

SEQ ID NO: 583966 - DNA, 152 bp, Homo sapiens
taaacttttcaggagcaataatgaactctgcacttaacggaaataatagcaaatgaataacacaaaatcctaacaagtgaattaacgctctgtcatcagacaccactggctatgcaataatcacaacgattccacagtcacgtccttcaatc

SEQ ID NO: 583967 - DNA, 938 bp, Homo sapiens
  misc_feature (275)..(275): n is a, c, g, or t
tttctgtcgttcgcgtgcccgtcgttggccctggctgctgtcccagcggtttcccctggtgcggttgcgcgcgcgcttgttaacggttgccccccgtgtttcaattgcgcctgtgtgccccacaatgttgggggtgcgcgttccccaccaggtgaatattttgtcgggcgggtacgctatccatgtcggctttatcttgcccgggtgtctggattatctgttgggtcccctcgtgtttgagagtccccaccgttaattgtaccgccgtggctttntgctggcaccagctgactatatgtccacgtctctcgcgggagtcaacgcaccacccggaaatttcctcccctgttgggcttgtacacgacatgtaagagtgtatacgatctcacgatcttgtggggaagcacgtcgctattatccgttatgccggttgttctcggctacaaccagtggtttcacccactcaacgctcgggttacgacggtggatgtgtaacatataccttttctgcgttaaagtaacctggggagcacaacccacaagtagggggaaacacacgtcaaggtgaaaacctcttctgccgcgtgcgtccacgggtcgggcactattaaggggcttctctagcagtaacattgtggggcccgacagcagcaacgacgccgccggacgacggatcgagcactctccaattgtgccaccacacctggggctgtgcggccctcccaacccacaggaggggcgagaagaaacgagtttgtgtagtacggcggtctatccacgtaagcggagtatgtccctccgcgtaaagggccaaaggaggcccgaggcccaaaggaggagaaaggccccagcgtgggcagccagcgactgcgcggtgaatgcccaaggccccctgaaggggagagaagaacaaaaacaaatttcttgcaaacataaca

SEQ ID NO: 583968 - DNA, 826 bp, Homo sapiens
ttgtcgcgtccccccgatgccgggtgccggtgagggcgtgcgcccgattggggtgtcccgcccgtcgtggtgaaggtccgggccgcagcgtgtgcatggaaactggtgttttcggctgggcgccttctcctcgggagtctttcaacggggttgagattcccgccgggtgtgtctctgcccagattgtctccacacagaggaagtgctgttcatcggctgctcgcatcctactggacggggttctctccttgccccgttgtgggaacagtcttccccacagtgcctatgagtttgtcttaacagtcccgtaaaccccatgtcagatttgagagcggacccctgttaaaagtcatcctctgttgaggggcgccctggctcttccgcacgagtttgtgggaacccccctctgtcaaacactattgaatcaatacgggcctctctttcttacagggataaactagataaatctcgttcgggcctttctgggaacacctctacatcaccacgggctaggaagatattgtcccgcttcacaagcaccccgtgcagcatcaatctggtagccccccccttgtcaaacttacccccgtgtctccgcctcagttcgtgcttttcttaacctcccgctccattctacacgcttgggggcccccattttggcattgtacttatcattgggtggctaggccatagccccagggggcagaacccggttgatgagtagtaccccaccggtgtccgcacgcctggtacgtgtgtcgcgtgttcttgcagaatccgggccccggggcaacaaaaacatccaaaatccccttgcccacaaaca

SEQ ID NO: 583969 - DNA, 207 bp, Homo sapiens
  misc_feature (106)..(106): n is a, c, g, or t
  misc_feature (109)..(109): n is a, c, g, or t
  misc_feature (141)..(141): n is a, c, g, or t
  misc_feature (149)..(149): n is a, c, g, or t
  misc_feature (191)..(191): n is a, c, g, or t
cctccacactccagggtgagcccagggccccacgccaccctcgggtactgaggtcacctggcagaggtgccctgctggatgaggtggctcggagcactgctgccanagngaaggctgtgcacccttctcaactttgatganctgctgancgcagcaccttctgtgaccagagaagtggaaggggagcctgntgcccccagacccaac

SEQ ID NO: 583970 - DNA, 299 bp, Homo sapiens
taccccacatctgcgcatatgacataactcaaatgccataacaggtccaacgaccggaaaatgcctctagtttcctttccgatgactagaacaatatatatccctctattttattagcttatcagcatgtatgcaatgcctgacataaatacatttaagtaaaagacacaataagaccttatgtttatctaaaaaacaaaattaaagaggaaaaacgaacaggaagtaacataaagaaaaaaacgtagcaattccacaaatatttctgaatcccagccatgtacaaggtacttgtctta

SEQ ID NO: 583971 - DNA, 1194 bp, Homo sapiens
tgcacactcccgcgtcgagaacatatcaggcatagatgcagcgcctggtatagagcttttgatgatcctcctatgtcatacgtccagaagctagacaaggcccggacaagcagtgggtggtgctagggacccaccaatcctgctatcaatggcagtgcaccccgggacctgtatgacatgaagcccttcgaagatgctcattcgcagtgcctccaactccccagatcggatgtccatggctgagcagctccgaggggagaccctggattccatggagaagctgagccggcgggaggctgaggcactgctgcagctcaatggggacttcctggtacgggagagcacgaacacacctggccagatatgatgctcactggcttgccgagtgggcagcctaagcattatgctactggtggaacctgagggtgtgagtacggactaaggatcaacgatattgaaagtgtaaagtcaccttatcagttaccacatggaacaatacactatgcccatacatctctgcgggcagcgaactgtagtctacagcaaaccatgtggagcggaaactgagatctgacctagacgctctcttccagaagatgccctccaaacctttaccacctattactctaaactatagggagctcgtattggagagtgtactagtgaagataggactatgtgtacaaaaatgagagataacatggaatacatgagaaaataatacagttgatagaaaggagtagcgtataaagaactgggtgagaattcatgacataaaacggaaagattaaaaaacaatagaataaagtgtaaagaagtggacacaaaactgggacatatacgtggcatattgtatgcacatacaaaagacgtgaatgtagaaaaggaaatgactggaaaaaagaaagttgaaagaaaatatgagaagaggacaataatataggaagagaataaataaaaaaagaaaacaaagataaaaaataataaaatagaaagaaaagaaatattactgaatatataaaatctaaatataaaaaggaaaaaagaagagaaggcaatgtgttaagaagaatagaggtgtggaaagattagggaaattgataagaaagaaagaaaaataaaaataagaatgaagaaatcaaaaaaaagaagaagtgaagtggagagataaagtatgaagaaaatataataaaa

SEQ ID NO: 583972 - DNA, 258 bp, Homo sapiens
tgggtgatctagaggatccctgtatatgctgtctcaaaaatatttatcagtaggaaatgcaggagggcacagtggctcatgcctgtaatgccaacgctctgggaggccaaggcaggaggatcactggagtgccaggagttcaagaccagcctgggcaacatagtgagaccccatctctacaaaaaaaaatttatccagggcagggtggtacatgcctataggtcccagctactcagtgtggccaagggcaagggggat

SEQ ID NO: 583973 - DNA, 766 bp, Homo sapiens
agcggtggggttgggccagataagagaatataagcaggctgcccgagccagcagtggcaacgcgctcgggtccccttccacactgtggaggctttgtcctttcgctctttgcaataactcttgctactgctcactctttgggttcacactgcctttatgagctgtaacactcaccgcgaaggtctgcagcttcactcctgaagccagcgagaccacgaacccaccagaaggaagaaactccaaacacatctgaacatcagaaggaacaaactccggacacgccgcctttaagaactgtaacactcaccgcgagggtccgcggcttcattcttgaagtcgacagagtcttgctctgtcgcccaggctggagtgatgaggcgcgatcatcactccacctgggctcactgcacctccgcctcccgggttcaagcgattctcctgcttcagcctcctgagcagctgggattacagagtccctgtcatccagactggagtgcagtggtacaatcccggctcactgcaacctccacctcctgggttcaagcgattctcctgtctcagcctctcaagtacctggaattacagggaatacaaccaacctcttcatcacctgaagacatttttttcatgctttcccatgttcctgaaatgccctccccctaggagccttcctccaatttatctactctttccacattcaagacagagttgaactcacgatgtctaaggtctctggagagttcaggtatcttgtaacgaggacgaa

SEQ ID NO: 583974 - DNA, 375 bp, Homo sapiens
catctcttgtttttcctttcttttcttgtattactttctcttgatcaatagagctgccatagccttcccagacataaataatcagcttccttggaagtactcagaatgtgaacagctgtagccacttagacctggttttagattctcaccccttgttgtgtattgtaattatctagggaacttaaaaggtactgaggcatgggccccaatggaatcattatccctggggggtggggtgggccctagacctggtattttcaaaaactttcaaaaattattctaacacatacgcagattaaactggttgcagacattcaggaagcaaaaatatggcccaattacccttagagtggagttaaataagcttaaggctca

SEQ ID NO: 583975 - DNA, 203 bp, Homo sapiens
ttgttggcgcgcgcgacacagccccgacgtgaatggatgtgtctctgatgcctcagtgtgacatatgccttcctctccacccagctcagacacccccaaaacactccgcacgccagccacgccgctgcctggggcagcctccagctcctgtcatttagctgcgggatgctgggaggagctgctgttctgagtcgcgcccacaa

SEQ ID NO: 583976 - DNA, 345 bp, Homo sapiens
tgcaagtgttctcacagagccacagcctcctcaatgctctgtgaatggtgcttgtgcatctgggtctgtgtctccctgaagtgaatctctggcttcagccatagatgccataattcttgaagtttgctgacagcctcacggggtccacttgcttcatcatagtgtgaaattccgaaagtgccacgcaagagctctataggatcgacacagtccatttgaggagattttttcctctgaccgagagctctctctcgcgaggcccctgtgtgtctcccacaaagccctgatctgagggtccaagtacacagccactctcatatctaccatcctcattgtgctatagca

SEQ ID NO: 583977 - DNA, 432 bp, Homo sapiens
tccattttctttctgacaactttcacatttcccccttttaattgagatctttctccaaaagcatagctgaccagtcatcctgcagtcaggctttgattgccccttggtgctgggatggcgctgtcccagtttggtgtggtctggttccacatcatcaggaagtgactggtgaccaggagtcagtgtcagagctcatttagccacatttgagcaaccagggaggtgtggagggagtggccctcaggcgcagtctacctgagtccactgttaagtacggttttgtctgttccatgggtgttggcatcatctcaacgcgctgggccagcacgatctgttaggagttgtacttctgcagagacttaagcaacagataaaaaatttattaagggaaaatgcagagtgaaattaataataatatgacaatcctagttg

SEQ ID NO: 583978 - DNA, 359 bp, Homo sapiens
tggtgtactcgtaagtacagtaaccattggtggacattgatttgatggtaagggaggtaatcgttgacctcgtttgttatgtaaatggatgcgtagggatgggagggcgatgaggactagagatgatgacgggcaggatagttcagacggtttctatttcctgagcgtctgagatgttagaatatagttagttttgtagtgagtgttaggaaaagggcatacaggactaggaagcagataaggaaaatgattatgagggcgtgatcatgaaaggtgataagctcttctatgatagggggaagtagcgtcttgtagacctacttgcgctgattgtcccatgcgggtagccttttaagggt

SEQ ID NO: 583979 - DNA, 529 bp, Homo sapiens
gacgcggtggtcgagggcgtgttcacggtgccgggcgacgggtgcgtcgactacaaggcgctcctcgcggtcctgcgcgacgggggctactcgggctggctggtcgtggaggcggagcaagacccgaagaaggcccacccgctcacctacgggcgcatgggcttcgcccacatgagccgcttgctcgccgacctccggatgtagccggcgcggcgaggcgcctcgcggggacaccggcccgccctcgcccgcccctcgttgacagcggggcgggccggcgaagcttctgggtagggcgctagttggacagccccttcttcacgactgcgaccttgtgggcctggtccgactcgtcgacatcggcggtcttggcctccttgagctcgatcgtgaccttgccgatcttaccggtgaacctgaacggtaccttgtaggcctcgctgaccgcggtgccctcatccgcgcccacatccgcgccttcgtccgccgagtagaagcagcactgggtctgctcgatccgtgcggccgc

SEQ ID NO: 583980 - DNA, 767 bp, Homo sapiens
ggggggcttcgaagttggggttgaacaccccagatctcagtggaacccccgccccctgcctttccctctcccctagaaaagtgggtggtgcctgtctcaccccctgatgaccttgggacacccctccaaaagcatgatacatcgcgatgaccatatccgccccaaagacgcgtagcacgaagaagctgaggagttcgagagagccaagtgagtcatgagagtgtcctgatggtgaggacatgagagataggatttatcgtatgagaaaaatagatgctgtgacttcagtgaggaacttccatgtgcgtccacgtaacgcacctaagaaattgatagacgccttcacatgattggaaagcaagcccactcacagataagcgtaccctgagtaaagtggagagacgacagcagtgtagatagcaatggagcctgtgtggaactcccagtatggggagtcccacacgattcgaattaaatgacaaacgtaatattaggagggtatatatgaaccaccatgcgccaattaagcagaaaaaaaaccgatacatagaatttagattagccaccatagcaccacacatggaaaacacaaacattaggcgccaacatgagagcacaccacctagaagtggattacattaatggcaccaagtggtgagccgcgagtattattggcaaagcgagaagtttgcaaacggacaaacagtattagaagagtggtgcacaatttccataccactggggcaacctatatgacgcattagtgg

SEQ ID NO: 583981 - DNA, 355 bp, Homo sapiens
tctgagtgcatataaaagttatgtttatattacactgtagccaattaagtgtgtaataccattttgtcttaaaaaaacccaatgtacatataccttaattaaatatacattattcacttgcagaccaaagaatattaagttacaaaaaaagaaaaaaaatatatttttactaaaaactgctaataatcatttgagcctttagtgagttgtaatctttttgctggtggagggtcttaccttgatatggaaggctgctgaccgattagggtggtggttgctgaaggttgggggccaggggtctctggcaatttcttaaaataagacaaaataaagttttccacattaattgactcta

SEQ ID NO: 583982 - DNA, 980 bp, Homo sapiens
agcgggtcactgaggcagtagccggacgggtgaggagggcggttgccggcgcggcgcggcgcggcgcggcgcgggtggggcgggggttccgcccggcttccagtcccctttcccggccggccggctgccgccaccggcctctccgcggagctcgccccggagcggagtcctccggcggctagtgctgacggccagcggaactgagccgtagtagctggcagcttcgagtcacagcagcaggtaatggctggccatggaaacacaagtgtctaatgggccaagcttgcaataacacagccaagtggtccaaccaccataaacaacaactgttcgtcaccagtgtgactctgggaacacagaagacagcaagaccaagttaatagtcaactaccttcctcagaacatgacacaggaggaactaaagagtctctttgggagcattggtgaactagagtcctgtaaggcttgtacagagacaaaattaagcagggcagagcttgggatatggctttgtgaacctacattgaccccaaggatgcagagaaagctatcaagaccgtgaatggctggaggacttcaaagcaaaacaataaaagtttcctatgctcgccccaagtcgagttctatcagagatgcaaatttatatgtcagggacttccaaaaggaattgacccagaaggagtgggaacaggtttggcacgaatatggacgcattattattctcggatcctggtcgaccagggtcggtgcgcatatccagggggtgtcagcggataactcgcacattgcgcaacgcgcaaattggagggcaccaacaaacgctcattcacaagcccctacaaggcgcccgcaaccctccccgggtgtccaccgcagaccaagcctcgggtaaagactgggaaatagagcccaacgacagcaaagcaccacacgcgcccacccgttgcacggagtgccacgtgtgcacaagcaacaggtta

SEQ ID NO: 583983 - DNA, 249 bp, Homo sapiens
  misc_feature (9)..(9): n is a, c, g, or t
tcttccttnacttcccctctccgcccttttttgagatgggggtctgtgctctcttgcccaggctggagtgcgatggcacgatcatggcacactgcagcctttacttcccaggcccaagcaatcctcccaccccagctactcgggaggctgaggcaggagaatggtgtgaacccagaaggtggagcctgcagtgagccaagatcacgccattgcactccagcctgggcaacagagcgagactctgtctca

SEQ ID NO: 583984 - DNA, 318 bp, Homo sapiens
atcaggttataaagaagtcacttgctcaggtccgcctgtcttgaattaggatcacatttacacaatatcagacagctaaagccctaacttaaaggcaatgtgctaccttagactgggaatcagggagggtcctaaatatatacaaaatctggccaggcccagtgactcacgcctagtaatcccagcactttgagaggccaaagtaggaggactgcttgaggccgggagtttgagaccagcctggccaacatagtgacaccctgactctacacacgggcacacacatacctgcacatacacacaaataaattgtctggg

SEQ ID NO: 583985 - DNA, 287 bp, Homo sapiens
caattgcaatttagctttctttccaaatggattcattgtggcgtgagacttgatagaatgtgaagcaaattctcctcctggaatttggctgtaagcctagaggatgggctgcataaattattctaaatgccatagaatcttgcatgttgtttctttctagactgttttaaatctgcgtcaggatgcctggaagtgagacactgaacaagcaagagctcattgcacaaaagagaaatagtgacttgcaaaaaaaaaataaatgaaacatcctttttgtaaaaaaaaaa

SEQ ID NO: 583986 - DNA, 147 bp, Homo sapiens
  misc_feature (2)..(2): n is a, c, g, or t
cncggccgcacctttattacatgggtgaagacaaaacaaggatttatttgcctttgcgggaccttgattttccatagacatgagctaacgctcacaactctttgccctcatgacacatgcactcgtctcggaccactcgttccggcc

SEQ ID NO: 583987 - DNA, 680 bp, Homo sapiens
agacatgttctcactctgtctcccaggctgaaaagcagtggtgtgatcacagctcactgtagcctcagtctcctgggctcaagccatcctctcacctcagccttctgagtagcttggaccacaggtgtataccaccatctctagctaatttttatatacttttttggagagatggggtctcattatgtagcccagtctggtattgaactcctggcctcaagcattctgcccacctcggcctcccagagtgctggggttatagatgagagccactgtgtctggcccagaagatccttacaaatataaactggacgatgacctgcatctgcttcaagtcctcagggacttcctgctacatctgtaataggcttaggaccccttcacatgtccctgctgtcctctctggccacatatcctattttagccctgatgtctttccgtaaattcccacagcacaaggcttttccagccttggaagctttgaatgtgctttctcctttgcctagaagagcttattcaacatgcacctgggtgaagccccattctccttctcatcttggcataaatgtcaccactcagggagggcctccccagccacacatttagatcaggcctccctctctcatgggctatctcataaccttattagcccctaactcatgggctatctcgtaactcta

SEQ ID NO: 583988 - DNA, 163 bp, Homo sapiens
ttatagctttcagcacgaggaagagctctggggacacaataaacaaatatagactacacagcatcttaactgataaactcccatgtgtattagtacattaaacatcaagaggaccatacattaagcaagactaccagagtacctacaatatcgtcaattgata

SEQ ID NO: 583989 - DNA, 412 bp, Homo sapiens
ctctctctctctctctctctctctctctctctctctctctctgtctatctgtctgtctgtctctgtcgctctctctctcctcgcgatcccacatgagtacgcctaagaccacggggtccacccgagacccgttgagcaccaaccctaggcccccgcgcggacccttatgggctccgaccagatgagagaagcaatcatgaaccatgaaagagctcgtcaaatgcgggcacaagcgcgcatagcagccaaagggacagctagcgacacgaacagagacgatcatcaaacagacacagaagatgacgcacaggatcaggcctgcttaaggaagctagggagacagactacctctggaaccggagagcggaagacgttcacaaatcaggggaccatgaccgcatctcacgctgtc

SEQ ID NO: 583990 - DNA, 446 bp, Homo sapiens
  misc_feature (15)..(15): n is a, c, g, or t
  misc_feature (74)..(74): n is a, c, g, or t
  misc_feature (425)..(425): n is a, c, g, or t
  misc_feature (433)..(433): n is a, c, g, or t
gtcacttgcactccngaatttaatcccctgacctaacatggcctaaaaatcctgtttaagagtccaaccttaanccctaccttcctcctgttttgagttaattcctaaaactcctaaaaagcaagccttgtattcctttccctttataaaaattatttgtggcccggcacagtggcctcatacctgtaatccccagcattttgggaggccaaggcaggtagatcacctgagatcaagagttcgagaaccagcctggctgacatggtaaaacgccatctctaccaaaaaatacaaaaattagcagggtgaggtggtaggcgcctgtagtcccagctacttgggaggctgagacagaagaattgcttgaacccaggaggcagaggttgcagtgagccgagatcaagccaatgcactccagcctggantgaggagncaaagctccgtct

SEQ ID NO: 583991 - DNA, 207 bp, Homo sapiens
ggggcttctacggatgtgcgggccatctacggctgtgcggtgccagtacggatgtgcgggccactacggtatgtgctgggtggaaggcaggggcgggtgatggaccgccgccccagggtcacctggttgatgttgtagtcactggtggtctctcctaggtccgccagggtagaagttgggcccgtgatgctgatagcaacaggcagt

SEQ ID NO: 583992 - DNA, 257 bp, Homo sapiens
caggggaagagggtgtgcagaaagaaaacacagtcatgttatacagcgaggccttgtgtagatagagtttatgtagtcataataattgccagccctgaatgttgagctaaaccaattattatactgtaaggaggatgtgaggattggagtatttctggtttgggaaagccgcagggtggtcaacttgatccagttaaatttgtcatatttctccagaagcaagtactacccagggttaccgagcctccgaattcgta

SEQ ID NO: 583993 - DNA, 131 bp, Homo sapiens
agtgtctgagcaggtgaaggatatttacatggcagcaggcagacagaatagagccaagcaaaaggggaaacaccttataaaaccatcagatctcttgagacttacttactaccacaagaacagtatgtggg

SEQ ID NO: 583994 - DNA, 337 bp, Homo sapiens
ggcattatagcaaaaccaggaactctgaaatctgtagcatgctatggagagtctatatctttttctgagctcagtggggaagtcttggagactgaagagaattggccctttgcagtcatccaggcagccttcaccttccttatgggtagcaccaccatcaggaacatcaaaagccacccatccactcacccacagcacagtgccttaccagcgtcacccatggagctgaagatgctctcggtgacacacatgatggtgtcagtagcctggtcgtagcggccgatgggtcgcctcggttggaaaactgccgcacatgctgttggagaccacggaggct

SEQ ID NO: 583995 - DNA, 676 bp, Homo sapiens
ggtgaggcccgatgtgaggactgaccctggattcctcgaaactgccattgtgatcattactactgatactattggaaatggctgtatcatattttaagtactaagtgtgaattgttacctcagaaacgcttctgattccatcctagtgagaagctggccctcaggtggtggcagacaaaggatgtgtaagatatcctcccgatagattatatatcgtccatcatggatttgaatgaaatgccaaataacacgtccactttcaacgatgatagataatacgcggagcacttatactgatggccttgtgcctgggtcttgggccatacattctacacactagggcctacatcttcttgaactcagcataggtatcttatcaacattctggagagtgataactatatgaatacttatataatacaatttattggcttatatacatttatacacacagataatctgattatttatttctcaatatatatatggctaaacctattatcacaaaatcacacacctgaatgaagtgtgtgtaaaactgaatgacggacctgagcctccatgggcgacaaggagtgaccaaagcatgagcgctgagacccgaaagcaagataaaaagcacaggaagtgacaacataaagggaagcccgaagggcgctgcaggccccggagacca

SEQ ID NO: 583996 - DNA, 227 bp, Homo sapiens
cccctcgaactcgacggttctcaagctgacacgaatttacggattcatgaccccactttcattaaatagtcccaggagatagctaaataacattttcagatagacactcacactgcataagttccataatacacaaagctaagatatgctgaccgaactcacattgacgtatggagcactcacctagaaaagccaagacctccggcacacaattagaacatctgaac

SEQ ID NO: 583997 - DNA, 375 bp, Homo sapiens
  misc_feature (40)..(40): n is a, c, g, or t
  misc_feature (77)..(77): n is a, c, g, or t
  misc_feature (85)..(85): n is a, c, g, or t
  misc_feature (136)..(136): n is a, c, g, or t
tgcgctgggatattcaagagtctgaaaagctctacacagnaaatctgacctcaaccacagctaggtcctgactgtangaaaacanaaatactaagtaaaatctcaaaacatagtaagtaaagccatactcaacctngtcataatccaagaaatatcaattaaacaatgtgcaccattgagccaaacttttgtaaaaattatactatctagtgcaggccaagatgctgaaattggtaccttcacgcactgctggtggcatcatatactggtacaacccttttggaaagcaatttagcaataatcattgagagccacaaatataattgtgccctttaactcagacagtcctgctcctgggaattcacctctgatgga

SEQ ID NO: 583998 - DNA, 113 bp, Homo sapiens
tgttcccttggggttgcgaatgtcaatttcttcatgtgccacattgagtgtctccacacagcacaagggactcttcggcaagccaggcccttcagtgaacttgcgaaataggc

SEQ ID NO: 583999 - DNA, 103 bp, Homo sapiens
  misc_feature (44)..(44): n is a, c, g, or t
  misc_feature (59)..(59): n is a, c, g, or t
  misc_feature (83)..(83): n is a, c, g, or t
attatcgaaaccatcaggctactcattcaaccaatagccctggncggacgggtaaccgntaacattactgcaggcacctacgnatgcacctaattggagcgcg

SEQ ID NO: 584000 - DNA, 682 bp, Homo sapiens
  misc_feature (483)..(483): n is a, c, g, or t
  misc_feature (635)..(635): n is a, c, g, or t
  misc_feature (680)..(680): n is a, c, g, or t
tgtcattaccgtagctgtatccggcactgaaggtgcataaggtgaacggtaactggcgttcaggctactgttatggttgttatcgtcatccagactttgttccaggctatagctcaggcgaccatcatccagcagtgagccatcaagacgcatttcatgttgggttgggcgatctttctggctggtcatctgataggaaacttcattgctaaaaaaggtttcattttcagtttgatgtgacatggaaggccgtggctgacccgcggccaatttatagcgaacctgtccctggcgagtcaggaagggcgtcgatgctgccgaaacctggaaattgttcacccgaccatcttcttccgtcactttgacatccagcgtgccctgaacagactgattgaggtcatcaataataaacgggcctggcgggacttttttctggtaaatgacgcggcctgattgactgatcgtcacccgtggcattggtcntgtgcaataccgctaatttgtggggcgtacacgcaagctcccacggtaacattcgatcgtcactcgccagtgccgcgcccggtataagaaaaaccatcgaaaatattgggaacttgaaatcggtttcgcccgaggggttaactttagagccntaatttgccggtaaatgggaccgaaaaaaagaataaggttgcgcnaa

SEQ ID NO: 584001 - DNA, 126 bp, Homo sapiens
gcatgtatgggaatggtgatagaactatatcccagactgatggaaggatgaaatgacatcagctttggcctggagtcagtagcccggtaaagattcagagggagtgctgcacattcccaaagggtg

SEQ ID NO: 584002 - DNA, 272 bp, Homo sapiens
gctcgcaccatcttcactgtgtgctcgtagtgtctggcagcagtttgttgatttaactgtctgaggtttagggctaagcatagtggggtatctaatcccagtgatgggtcttagctattgtgtgttcagatatgttaacagccactttcagtagtctatttggtcgtcaactgggagttttctacaactcacgagtgagttttagctattagtagcggagggggtgatctatgacaccgctttacgccgggttctatggagcacacaggtgg

SEQ ID NO: 584003 - DNA, 1142 bp, Homo sapiens
aaaacaccaaatggcggatgactgccggtgcagcgggggggcccgggggccctggtggacctgggatggggaacctgcggtggcttccgctggaggtttcggcagtggcatccggggccggggtctgcggcctgtggactggggccggggcctgaggccgcaggagctctgctggaggcaaggccgaggataaggagtggatgcccgtccagccaagttgggccgcttggtcaaggcacatgaagcatccaagtccctggaggcagcatctcatctcttctccctgcccattcaggaatcagcagatcattgatttcttcctgggggcctctctcaaggatgaggttatgaagcattatgccagtgccagaagccagcacccgtgccggcccagcgcaccaggttcacggccatcatgtatgcataatcgggggcactacaatgtgcaacgtcaggatctgggtgttcacagtgctccaccggaggtggccaccgacaatccagtggggcccatccatccatggacaagctcatccatcgtcacccgtgcgcagaggctactgggaggaacaagatcggcaaagaccccaaaacttgtccctttgcaaagggtgaacaggccgattgcgggttcttgtgctggtacgcctcatcgctggaaccacagggggcactggagcatcgtactccggaacactgttgccttcaaaaggctgctccatgatgggctggatataagatgactgggtaagcgtacagacggggaatgacatgacgaacgtggtgcaagttggcaaggccaaactttgagtgcaatttaagagctacagattactgaccaccgcactatgaaggagacagggatcaccagatgcatataggagttaattgacacgactagcaagaaccaacacaagccaccagccaccgacacacggaccaaccgggaaacagcaagagaattcacacagcagaaaaaaaaggacaagcgaaagaaagacaagaccaacacagcgccacacagagcagacaagaaagcaacaacagcacgagcaagaaacacgcccgccacaacggagacacagcaggaaccgagcagacacaacaaacagacgatcacaatcacgcacacaaacaacacg

SEQ ID NO: 584004 - DNA, 221 bp, Homo sapiens
ccccccccccccggaaaatttttgggcccttttttgtgggcccaaaatttttccccttggggttggggcctttcccaggggaattttccccaacccgctttaccccggggtgggcccccctttgtttttttttttcccaatgggggggggggggggtttttgggccccctttggttttttttttgggccctggtttctttaaccccctggcccgttttgga

SEQ ID NO: 584005 - DNA, 371 bp, Homo sapiens
gtcgacccaggtattaggcccaggatccattagttacttttcctgatcctctccctcatcccatcctctgccctccagtaggcctcacaacatgtggtatttggtttcctgttcccgcgttagtttggtaaggataatgacctccagctccatccatgtcactgcaaaggacataatcttgttccttttttttttttgttcttttgagacagagtctcgctctgtcacccaggctggagtgcagtggcgtgatctcggcttactgcaacctggaggtgaaggattcttacactgaatactttaacagttggtaaaaggaaataaagaagacacaaataaatggaaatatatcccatgtgtatgaatgggaa

SEQ ID NO: 584006 - DNA, 999 bp, Homo sapiens
  misc_feature (320)..(320): n is a, c, g, or t
  misc_feature (999)..(999): n is a, c, g, or t
gacatctacgaggcggtatgtcctcccccatgccatcctgcgtctggagcctggcatggtcgggacctgagctgatcgtacctacatgaataggatcctcgagccggatactgcggcgtacggacttacaacaccagcggaccgtacgcgggcaacattacgtgctgatgagcgattatagggacgaacgcctagtgctactgtcagcgccatggaacctctcagatgctaaggtaggatgcggcgaacgggcatgctgtccatggcatccgtcaccgtgagaagaatgagcgtacgatgctgtcctgaacggctcaggntcaatcaactagttgagcatatgtgacgtcggcttccgtatggccgtgatggctacgtcgttctcagcacgttcctttcctggagcagtgggacgttcctgatggtgattgccagcggacatatctcatcctatctaatgtgcctagtcagtgtagagtgtggaacggtgtgacagtccgtcagaaggaaccgtgatacggcacaaaacacgtgcatgtctagggggttatcatctcattgtatcccgtggctacttgcctgaccaggagtgtcacgtaaggaagattcacgtgcaccatggtgaccgcagcaccaagtagaaagactcatggagtcattgtgtcctccttgatcgcatagtagtccgttgtggatcggcgggtccatcctggtctccgctgtctgaccttacagcaaaatgtggatcatgataggcacggacgtgtgacgagtccggcccatccaatcgtccactgcaaatgcttctaggcggactactgatttagttgcgttacacccttttcttgagaagaaactacttgcgcagataccaagatgggaactggcatggctgcaatgcggaccacggatgggcagggcatcccttgtaaggggccgcacccaacgttgctcgcgaaccgaacgggccctatgcggacgcatcccaatttagtgggn

SEQ ID NO: 584007 - DNA, 991 bp, Homo sapiens
gtttctgtcagatgtggtatgctattttcctagctgttgttgcgtcctggtttgctgaggggtgggagccacccagcgtctcagggacctgtcctccgtcgacgtcgtcaagtgtgccttgtgtcttgtgtcaggcctgcccttcccaccagcatgtgcctcgtggctcagggtgccccaggcctgcccagctagtgctgtccgtcccatctcctgtgggcagtcccttcccgtgcaggcgcatgggcttcctgagtagggctgagtgcaggccatggcccctgtgggtggcactggaggggctgtgacctgtgtccccagttgttgccctccccagtggactggctatgtgagcctgcttgctcactagagagatggattctcacctgtcgacctgactcgagcccctctgcttcctggcctaagcgagggttccaggtttcagacactggcagccaagtgaacgagctgtgctcgctgggtggtgcagtgcctggcaccaggaggcttgcataccgcctttccttcctgacgtcctctgtccttggttgctggcccatagcagtgcctgccgtgcctctgtgtaccctcctgtagccaattcccgatatcagtggggaaatttcgtgtctattgtcaggcgtcgcatatgacgcccaggatggggggccactgtggcggaagggggtcctgtggaacaactcttggcacaggacctgccctgtaagttgtagggggcatggtggctgggagcggcagggatccgaacgcgtggcggtggttgtgaaggaggctgttgatttcttcgggcccatgggtccagggtgcccgaaggagttcctgcggccgatttgtccccagtttttaacacgtgcctcgagacggggccggttaacgtgtcccgcactggcgtgggggtccccttaaaaatctctccatgtgagaggtttcatcaaacccggtgcccccccatattctaaactgacacaag

SEQ ID NO: 584008 - DNA, 120 bp, Homo sapiens
tggtgctagtcgacggtagaataatttcatggtgacttccctttggcaagccctgctatcacctgcgttgggtcttttaagatgtaaatggtaccttgagttacctggcccagtgaaata

SEQ ID NO: 584009 - DNA, 292 bp, Homo sapiens
ttaaaacgcctttattccctgcaacagttaaagcaacaaaatctaatgacatgaaataaacactgcaaaactgcattctgaccccttgctgcaaggtttttcattaaaacaattagagcccatggccccaagaatgctgagacactttcaaacttgacaacatttagataactggaggaacaccagcatcatgcctctgtgtgaacatttcggagaaggtgaaataaattaggacctgcaatacaattggaactgaatcctcaatacacccactttcctcagaagtgtgaaa

SEQ ID NO: 584010 - DNA, 401 bp, Homo sapiens
tacggcatcatctggagagaagcagcagaagaatgaaaacgctacgagaactcttggaactatccgtgtcaagatttgtccgggtaaaacagagtactcctttctgggactatgttatgggaggctgtccgagtcaattttccctgttgtggcatggacttcactggctccaatggagacccctcctcacctgactccctacactacctgagtccaacaggggtcaatgagtacctgatggcactgtggagtgtgggcagcgtggttcaggactatgactcgtgagtacctgcttctctgggctatacccgctccctgcagatgcttcagcctctgagcttacagtcccctcactgccttttgcccaatacactgtcctcccacagagacaagctgttccc

SEQ ID NO: 584011 - DNA, 330 bp, Homo sapiens
ggctttgtcccctgcctgccgcagagctggacagcacgcttccctgtcctgaacccggacagaagatttcactttgactccagagggctccagttgagctggaggtgtttagagagctgccaaagctccccctcaaatttctctcaggggttcgaggagctgcaggggacagcgatctgtgtcagcatcggggagccgtggagccgccatctccctcgcgacccagctccggccgtggcccgggattgatgacacgctcagtgagagggaaaattacattttcaggatgtctgccagggctcgctttgataaatgtttaaaaatgtgcta

SEQ ID NO: 584012 - DNA, 275 bp, Homo sapiens
  misc_feature (36)..(36): n is a, c, g, or t
  misc_feature (84)..(84): n is a, c, g, or t
  misc_feature (189)..(189): n is a, c, g, or t
  misc_feature (221)..(221): n is a, c, g, or t
acaaatggatatgtaaatatcactttgagatccttntttgacgttttttggatacatacccagaagtggggtttgctgggtcangtggtaattctattttcaatttttggagaaacctctatactgttttccgtaatggctgcagcattttacattcccaccagcagtgcacaagggttccaatttttncacacccttgccaacacttgtaattttctgtncttttgatgatggcgcttcttgtgggtatgcagtgatatctcattgtggatttt

SEQ ID NO: 584013 - DNA, 143 bp, Homo sapiens
atgactgtcctggtcttactgggacagtctgtatgaggcatgtcaccacacgtgtcgcctcatagctgcaagagagaggcaccagcgtgaagttcccctgtactgacagagatgcctgtggatcattcaaccgcctccggggc

SEQ ID NO: 584014 - DNA, 223 bp, Homo sapiens
ctcgggcccctgcaccaacaagagagccaaagtctgcagttgcatttccgagtcttgggccaagacttttctttgcagcggggagcacccagcccattttagccctgccagtgttgagggctgtgtacaaaagcccctgaaggatgcccctacccgaattcctgccctcgggcaggctgcccccaaaaaaggaggcgtcagggtgggccacagctgttcaatg

SEQ ID NO: 584015 - DNA, 406 bp, Homo sapiens
ccccctccccgggtactataaaaaaagtagaagataaaaatttttggagaggatgtggagaaaacagaatcctgggcattgccgttataatcgtgaaaaagtaaaactgtgatggcaaacagtatggagcttcctcaaaaaaattaaaactggaactaccatataatctagccatcccatttctggatatatattcaaaagaattgaaaacaagattttgaaaagatacggttacacttgtgttcatttcggggtgattcacaacaaccaagaggtagaggcagtgtaatatccacggacagatgaatggataaagaaaatggggtatatatataaaatggaatattattcagccttaaagaagaaaattgtgccaaatgctacaacatagataaaccttgaaaac

SEQ ID NO: 584016 - DNA, 646 bp, Homo sapiens
ttagatctcactttttatactattttatgcataattttagacttcctcattaaatacaaagatctatttctcaaatctaatactatattggtaacaaactaaagattaatgtgtaggataaaattattcacataatatattaattggtgctctaatatcctcatagtattattgtcttttattcttcatattacacttgtaatactttttactaacgtaactcctaattactggtgtcattctctatcgtctttccctctgtttaaaatactttcaacatatttcttctttagccatctttctcaatagtatttctataccccaagtagagaaccatccctttcaatctttggtgctttgattaaagatatcacaggaaattgtttcatattgcaggtttgactgtggtgcaatgaatgatatatgttagaaattgtttgttattttctgaatttttcacataatctgtattattgctgccaaatgtatgttcttctaaaaaaagtctcaaatttaattttcactctgtttagaactttgttatgtaaccttgttgagatccaattgggatgctatgagttagaaccacataaaagccagtctgctgaagattatcttaagtcttttatggattcaaaagatgaga

SEQ ID NO: 584017 - DNA, 340 bp, Homo sapiens
  misc_feature (75)..(75): n is a, c, g, or t
  misc_feature (81)..(81): n is a, c, g, or t
  misc_feature (90)..(90): n is a, c, g, or t
  misc_feature (98)..(98): n is a, c, g, or t
  misc_feature (103)..(103): n is a, c, g, or t
  misc_feature (105)..(105): n is a, c, g, or t
caatatagcataacctattatatattggtcctagcctttctattagaactattcagagattcctcagtattttanagcagncatcaaaantggacttngtatngnttattcataaaagacacttggtaatagacttcagtgaactctgtatgaatgcaatagttatgctgtaatagtttatgctgtaatagtttatgctgtaatacgtttatgctgtaatacgtttactgctgtaatagtttatgctgtaatagtttatgctgtaatagtttatgctgtaatacgtttatggtgtaatagtttatgctgtaatagtttatgctgtaatagtttatgctgt

SEQ ID NO: 584018 - DNA, 461 bp, Homo sapiens
  misc_feature (196)..(196): n is a, c, g, or t
  misc_feature (202)..(202): n is a, c, g, or t
  misc_feature (211)..(211): n is a, c, g, or t
  misc_feature (219)..(219): n is a, c, g, or t
  misc_feature (224)..(224): n is a, c, g, or t
  misc_feature (226)..(226): n is a, c, g, or t
tcaaacagctcgataagcctttttgactgtgtacatctgtaccgggaataacattcctaggctgaaatttccacgaaagaagtagagaccgtgtacgtcgagttgcttcatggcgtgagttgcccgtgacctgctttgggcgattttgtatgttgctatgtgaaagtagttgcagatgtttcctgaagtattttanagcagncatcaaaantggacttngtatngnttattcataaaagacacttggtaatagacttcagtgaactctgtatgaatgcaatagttatgctgtaatagtttatgctgtaatagtttatgctgtaatacgtttatgctgtaatacgtttactgctgtaatagtttatgctgtaatagtttatgctgtaatagtttatgctgtaatacgtttatggtgtaatagtttatgctgtaatagtttatgctgtaatagtttatgctgt

SEQ ID NO: 584019 - DNA, 142 bp, Homo sapiens
tgcatgctcgggtactggaggatcctctaaagtctgaccaggctccagcttaccgatatttaggagagtcagcaacggtgctcacgtgtcgacggaacttgtccaagggaggcatgcaacgcagtggtgaatacacgtcgac

SEQ ID NO: 584020 - DNA, 870 bp, Homo sapiens
tactgtgattttcccatggccttagtaaccagcagaccaggagattctctcccattcctggctcagcaggtcccatgcccatggagctttgctcactgctagcacagcagtctgagatctaacaacgagggtgcagcctggctgggggaggggcgtcccccattgctgaggcttaagtaggaaaacaaagcagccgggaagctcgaactgggcagagcccagtgcagctcagcaagttctattgcctctatagactccacctctgtggggagggcatagctgaagaaaaggcagcagaaacttctgtagacttaaacgtccctgtctaacagctctgaagagagcagtggttctcccagcacagcatttaagctctgagaatggacagactgcctactcaagttggtccctgacccccatgtagcctaactggggagacatctcccagtatgggccgacagacacctcatacaggcgggtgcccctctgggatgaagcttccagaggaaggatcaggcagcaataattgctgttctgcagctccactgtgatacccaggcaacagagtctgagtggactccagcaaatccaacagacctgcagttgagggacctgtagaaggaaacttaaaaaaaacacaccacaaaaaaaaaacattgttgggcgggctggcccaaagaggttttaaaacaaccgttggggggggccaatagtaatagaacggcccacgggtccaggacccggcactgaaggtgtgttccccaaaaaacggcggcggggtcgaacaccagaggttgcgctcgggtcacggccggcaccccccggcgcccgaaaacacaacagagacacccaaaacggcacacgaccagc

SEQ ID NO: 584021 - DNA, 179 bp, Homo sapiens
gggtgttgttgcagttgcactgggctgctgtggacgttgtcgattcctcactacggcccaaggttgtggagctggcagaaaagtgggttgttggagttgagctcgggctgccgtgggaggttgtagatagctcaacaaaggctgatgtggtagtaggagctgcagctcgcccctgagtt

SEQ ID NO: 584022 - DNA, 150 bp, Homo sapiens
tccacagcaactaggcgaggcctgttaattggaatgagtcacatttaaattactttaaagaggatccatatgcagggcaagtctggtgtcgagcagccgcgttaattcagctccaatagcgtatattctagttgctgccgttcaaaagct

SEQ ID NO: 584023 - DNA, 357 bp, Homo sapiens
gggagaaccagacactatcaggcactgcgaggatctctttttaaatgtcactactgtcgtcacaaaactgatgatgatactggacatgaatggggatgagaggagggagatgatatgacgtgaccactccagccgtttccaagtagacttactatacttacaccccttaacatctttgtgcacacattacaggtggtgtgggctgtgatgatggcatcctagaagccattggactgtgcggtttcctctatggtgcatttttagatctctgtgactccctgtgatgccccccatatgacgcctgtttctctcactatgcagtggacccgacacgatgagtagtgttaccagcagtgg

SEQ ID NO: 584024 - DNA, 733 bp, Homo sapiens
  misc_feature (50)..(50): n is a, c, g, or t
  misc_feature (93)..(93): n is a, c, g, or t
  misc_feature (119)..(119): n is a, c, g, or t
  misc_feature (163)..(163): n is a, c, g, or t
  misc_feature (299)..(299): n is a, c, g, or t
  misc_feature (441)..(441): n is a, c, g, or t
  misc_feature (602)..(602): n is a, c, g, or t
  misc_feature (633)..(633): n is a, c, g, or t
  misc_feature (645)..(645): n is a, c, g, or t
  misc_feature (660)..(660): n is a, c, g, or t
  misc_feature (677)..(677): n is a, c, g, or t
acagaaccaaggctgggtatcaagcaacctcatgacttccactgcaactntttaacatccccaattcctggtttttcagttcagttggctganaaggatggaaactggagttttaagtngagaagcagaaagagaaacatagattgatcctcaaaagaaaatnaaagaatccatttatcacagttttatcctcatactccacagttagattgcttctcctgaagctgctttgttagtttctgatatgaagacagagaagccacttctatgtggaaaaggatttgccagaggttcctcanttcgtgcaggtacatgttgcccaggcaaattaagagcagcataagccccaccttcatagttctggctggtctgttgaacaggtacaaattacattggaaaatgcaggctacgaaaggtacaagaaaagccagattgtttccnatttcctcatgggcaacctgttaagaatgttctgcaaggtgaactcctcgaatgagatttagggcagcgcacatgatgttgagaatgagggagaggatacccagggctgttactggttccatttggaaattaggagcaggctccaagtgcattggtgtgtnaacattcatcaccccatttgccacaactgtnttctccagagtnagaaccgctggaggntgcaacttgagctcctnctgaattttttccaagctgcacttcatctgagaggaacttacatagttaaaatgcc

SEQ ID NO: 584025 - DNA, 137 bp, Homo sapiens
  misc_feature (29)..(29): n is a, c, g, or t
  misc_feature (68)..(68): n is a, c, g, or t
  misc_feature (114)..(114): n is a, c, g, or t
  misc_feature (121)..(121): n is a, c, g, or t
gtttcgagtggccgtggcagtatcgcttnccacccttctttacgttacaaccgcatgtggacactcgnacagaagcagctggccgcctggtgctcgcttgtcctgtccttctgncgtctgnacaaacaatccagcat

SEQ ID NO: 584026 - DNA, 320 bp, Homo sapiens
ctgccctaattcccaccacaccttttctaaatgtcaaacctactttactattaacaatcagcatcaagttaattgaaagttttttaatcgactggtgcagattataaaaatattcctttttaaactatctgtggtgaaggactagtattattcttccaattcatcatcaaccaagacgtggtcctacagtgcctgctttgggccacttgtgacctaccctgtgagtgaccaagctcatctatgtcctgttcagtgaggcaggattaattgagaacacacttggatgttgcagcacaaccaccatagatggttacgggggt

SEQ ID NO: 584027 - DNA, 386 bp, Homo sapiens
tgcgatccttaaactgactagaggcaggttctgctacgttggccaggctgtctcaaactcctggcttcaagcaatccacctctctcggctcccaaagtgctgggattacaggtgtgagtcaccacgcctggcccttttttttttttttttaaaaaaaatggagtctggctctgtggcccaggcaaaagtgcaggggggtggtcccagttggtggcaacctccacctccgggtttcaagcaattctccggcctcagcctcccgagtagctggaactatagggcgcatgtggccacgcatgggtaattttttggtattttataagtaaagatggggtccacggtgtagcccagggctgggtacttaaatccctgagctcaggcaatcc

SEQ ID NO: 584028 - DNA, 830 bp, Homo sapiens
cactctttgcgggtcttattctcccgcgccccgtatgattttcggccttctgtgcaatgcggtgagcccccattctttccgcgcacattgtcctcccggcgtcattcgcctcctggggtttctctaaggctcttcttccgtagggcattgctgaaccatcacgtgatggggcgcccggcggtctttggtctcccgcgcggtctcctcttgctccccccgccgtcgtacacatgtaatgagggggctgaatacgcccccccaggcccctctctttcgattccgccgccccccgtggccctggtgggaataaatactgcagccccctgccccttcttgagggatttctttactgcgcctcggggtgtttatttcccccccccgaggacgccccctccacccttcttaggaaccgttccctcgcgagggagtactcctcctctctctgtcaccagggagtggaaaattcgacgtgtctcttatccacacaaacagatgtgggggaggcaacctcctcggcgccactcctcgccacgcacagcagtggggtttgccctccgacagagattggagcgtggcggaccatatttcctgtttgaatgggcgtcgtctcctcctcacacgcccgggcttgtatagagaccccttcgtggagtagccccccggatgtttgcaaggcgcccccttgccatacttaatatagcggtcttgacggcgcatagcattgctacgctcccccgcctcatatgccgtccctttctttcgtgattggcatgccaacgagcctggcggcccaagatggagaaaaaactgttgtttcggcccacaagaca

SEQ ID NO: 584029 - DNA, 159 bp, Homo sapiens
tgatgcccctgttggcgatgattgaggcaggagagtcatttgaacctgggaggctgcagattgccgtgagctgaggtcatgtgattgcactccacctgggcaaggaaagcacccggcgacaggacaccaggtcccccacctcatcattcctcgcaacag

SEQ ID NO: 584030 - DNA, 741 bp, Homo sapiens
actctactagcttgtaccgctgacacctagtaggacagcttggcattaggcctccatcgacggaactgaaacatagatctccatgggaaaggcggcagctcgagaacgcgtggattcgcgcggctggaggaattcggtgcgaggactggagaccgacattagagctggacaaactgggcaagggtgcctatgcgaaagtctacaaaggctaaagcgagctcacagacaaccttgtggggctcagggagatcagactggaacatgaagagggggcaccctgcatcgacatccgggaagtgtgcctacataaggacctggaactcgccaacagggaggcgctcatgacattatgcacactgagaaggtcctgacccttgtctgtgagtacctggacaaggacctgaagcagtacctggatgactgcgggaacatcatcaacatgcacaacgtgaaactgtttctgttccagctgctccgtggcctggactactggtacctgcagaaagtgctacacccagacctaaggctcaagaaactgctcatgaaccataggggatagcttaacctggctgacttaggcctggtccgagccaaggtcaatcctcaccatgacatactccaatgaagtggtgaaactgtggtaaccggcctccgaaatcctgattgggtccactggcttcttcacttagattgtcatgatttggttatggctatgatattttttaaaaattgctctaagca

SEQ ID NO: 584031 - DNA, 253 bp, Homo sapiens
cagcttgtgcatgggccaatcttctttctgacactccacattgcagtaaaatgcctgcttgcatcttccacatttggacaatccttctttcctggtgaagcagtactcgcagtggttgccccgctcgttgaccgtgagcacgtaggcataggccgggcaggagaacagcaagtcccccacctggaagggctgcagagcccgcagcccccggcctttgcccgggctgcagaagcgctccaggccgccgaggccc

SEQ ID NO: 584032 - DNA, 362 bp, Homo sapiens
cggcacgagggagactccatcaaagcaatataaattctgatgaaattgaaacaagaagaaacattaaatttatgatgagaccagatgcagtggctcaggcctgtaatcccagcattttcagaggctgagacaggtgggccacatgagcccaggtattcaagaccagcctgggaaacgtggggaaatccccttttctacaaaaaatacaaaaattagctgggcatggtggcacatacctgccgtctcagttattgtgaagtctgtgcagggaggatggcatgaacctgggaggtcaagattgcagtgagctatgatcatgccactgcactccagcatgggtgatggagagagatactgtctta

SEQ ID NO: 584033 - DNA, 305 bp, Homo sapiens
  misc_feature (23)..(23): n is a, c, g, or t
  misc_feature (66)..(66): n is a, c, g, or t
  misc_feature (133)..(133): n is a, c, g, or t
aaggtgacaaagaatttggcccngggtggactcagactaactactctaacagcatttctggtgtcncccagtgatcaaaaaagagagtggttgtggaacctgttggcccagttggtttcaagccagagacatnccagaaagtttttaccctctatatttgcatggtgctgcgtgagcggaggaatcctctgaatcctgaaaccagctcttgcctctcttccacggaagagggcctgggccacgtggagcctcagtgcccgtttggcctaaatctctcgctgacaataaagagcaccttgcgttgc

SEQ ID NO: 584034 - DNA, 407 bp, Homo sapiens
  misc_feature (161)..(162): n is a, c, g, or t
  misc_feature (168)..(168): n is a, c, g, or t
  misc_feature (232)..(232): n is a, c, g, or t
  misc_feature (281)..(281): n is a, c, g, or t
  misc_feature (352)..(352): n is a, c, g, or t
  misc_feature (377)..(377): n is a, c, g, or t
  misc_feature (393)..(393): n is a, c, g, or t
agaagaatgaagatttgcaaagagaagcagaagtaagagaaaatttatggcccctaaaatatggcctgggcaggagcagaactactacaaatgcattttcacctgggtgaaaagacttgcagctagagccaggctcaacgccacgtggaagcggccaaggnntggggnctgcaccctctgaagcaatgcctcaagctgtaccttggcccattttcaccatggctggagctcngagcagcagggacacaggtcaccaagtcgccaggctgcacacagcagtngagccctgggcctgacccacaatctattttttcctcctaggcttcaggaccgttgaagggaggggctgccnttaaagatctcttgacattgccttnggagacttttctttcnttgtcttggtgatt

SEQ ID NO: 584035 - DNA, 327 bp, Homo sapiens
ccccccccccccaagagtccccccgccgggggcccccccaaaatggggggttacagggggggcccccgggcccccccggggtttttttttaaaatttttttcccgggtgtgggggggaaattttaccagggggtgcccccctttaacaccccccttatgaatcccctggggtttcccttgggcccggggggttgtttgcctttttggggggtttttttgggggggttttccccccttttgggggggggcctttttttcttgtttttcccttttttgggcccctttggggggcccgggggaaaaaaaaaagggtttttttttttttta

SEQ ID NO: 584036 - DNA, 262 bp, Homo sapiens
caggttgggatactgaaaatttccagatgagctcttctttcctacaagtattcataattagggaatgccagggtttagggtaggggttaatctgttgggggttgatgtgtttagcaacgaagctactcctcagctttgtgctaaaaatatggttcggcactgccctcttggtggcacagggccataatttgttccaatagaccccctcttctatgccctgttgacttgtaaatttagttaacaatatatacgggtggggtac

SEQ ID NO: 584037 - DNA, 745 bp, Homo sapiens
tatatataagattattagtataaaaggggagataggtaggagtagcgtggtaagggcgatgagtgtggggaggaatggggtgggtttggtatgttcaaatctgtcatttatatttttacgtggtaagatatggtggagtagtgtgatttgagtgtgtgagtagattagtgcgtaggtagaatgtagagtgttaagtgaggtgtgatggtggctatagatggtggggatgatgaggctatggtttattgtgtgaattcttcgataatggcccatttgtggcaaaaagccggtaagcgtcgggcaggcctccctagtggacgatggaggtgtcggatggaattaacgtggtgtctacgtcatgtatagcttgtttcagtgtgcgaaatagtagtagggtcgtggtgctggacgttcaagttgagtaagtacgagatatgcggtagtagtccaggataatatcacatacgttaatcttaacaatggtactggtaagggttgtcacggtaaaactggctattatccactcctactggatgggtaaatagagcgagctactgcctaagacatatgagcaggtaaaaccggagaagtgggactaacatacccacctcaaagtgaccgaacatagaagggaacaaactgtgccacagtgcgaagcaaacatcaaacgataaacgacaggaaacaaaagccaatcaccgaacaggcgccgacaagcaccgtacaaaaaccaccgcaatcaaaa

SEQ ID NO: 584038 - DNA, 397 bp, Homo sapiens
ttgcctatattcaggacctgccacctcatgtgcacaccgtatctttctcaccttttttttgagatggagtctcgctctcttgcccaggctggagtgcaagggcacgttctcagctcactgcaacctccgcctctggggttcaagcaattctgctgcatcagcctcccgagtacctgggattacaggcatgtgccaccacgcccggctaatttggtatttttagtagagacggggtttggccatgttggccaggctggtctcgaactcttgacttcagatgatccatctgccttggcctcccacagtgctgggattacaggcgtgagccaccatgcccggcctctttctcacctttacacctgtcttcttatcctcacatctgttttcacattgggcg

SEQ ID NO: 584039 - DNA, 607 bp, Homo sapiens
ttgggacggcggactgtacgggaaagcatgggcaagggcggcccgggtcggcaagggcagtgtgtctggtagaggcgccctgagccatcgtgatcgtggagagacaggttgggcatgttgccgcagaggtcaccgaagatttagtagcactggtcggagaaggtgatcttgttgacggtatggcggattaagccagctttcagcaggttgctggcatacttgcgggcctccctccggtccgtgaagcctttcacattgtggtacagccagtccaccacatctgagccgataaaagcattagggatggtaatcttgagccacatgcggtcacggacctccaaccctgattcaggggaggccatggcttttacgatggcagccatgtcactgtggatggacaagtggaagtcgtctaggcgctctgtgtcagggatggaactggtgatggaggagctggtggaggtgatggtgctcagggaggggttcatgccgtatgcagggaaggtgccggtcatggctgccgtgtgggagacccaggccgcagggtccatgggccggatgtgccgctcctgggcaatgtgaagcaacacgtgtctttggtccagca

SEQ ID NO: 584040 - DNA, 670 bp, Homo sapiens
gaatgatgacttattcagcgtcttcataatcagcttcgtgattctctgcctccagctgttcctgacattagtagacaggcagaaagtctctcattaactagggaggtttcccagagcaggataaccattcagcttcagaacgtttacctgatgagtatacgtcgaactttttagccataatgcagagtgctacaggacaaagaaaccacaaacatggaccaaatttgcttggagaatcttcataccacttcgagatcagcatcttaaccaattccatcatcctctccaccaaaggacgtgtcgatcagcagaagtaacttcagctccctctgcttctgtaggtcttggcaccggttgtcaatggagaatcctatagcctctactatctatctgttccttatcctactgcttctctagtattctcagaatgagacgtgtaaatcgaaggcctacctcaatccatctgaaaaacttcctagtatataacatttataattatgtgtttacatgaattttttatttatttaggttttttttttttttttttttttatgttgaaaattctgccaaacgagatttatctaatattgttgtaaacattcttaagggataggtagaagaggcgtgtgtgtgttgtgtcgggcataatctgagttatctaagagatgta

SEQ ID NO: 584041 - DNA, 812 bp, Homo sapiens
cgcggtggctcacgcctgtaatcccagcactttgggaggccaaggcgggcggatcacgaggtcaggagatcgaaaccatcctggctaacacggtgaaaccccgtctctactaaaaatacaaaaaattagccgggcgcggtggcaggcgcctgtagtcccagctacttgggaggctgaggcaggagaatggcgtaaacctgggaggcggagcttgcagtgagccgagatcgcaccactgcactccagcctgggcgacagagcgagactccgtctcaaaaaaaaaaaaagaaagcaagtttcacattgaataaggctgtgtgggaaggcttttggattaaaatctttgggatttataacatcctgtaagtttaggagaacccggttttcccagagcagattcaagcttctaaaaataaagtgcttcagtagcaggaatggcatgtttaaaaagctgatggcaggtaagcatggggtagggtcttcttcaccattatctgtcacgtcctgtgtccctgcgtggaaatggtgtccttgactaaacccatcgggcttgtggaacccaatgtttgtggttctgaatacccaggtttgggtgggtatttattctatgtttttacatttttatgcgccttggttaaggtaaggataacattgggtttaggtggatcacgggggtatgggtttgaacctcaactttggatgggggttaaccgtggcttaaaacggggtggggaaaatatcttcaaacaagggagggaaaatggagacaacaggtggtcgcccaaaaagaaaaaaaaaagtgtggggcgcga

SEQ ID NO: 584042 - DNA, 697 bp, Homo sapiens
gagcgggggtgtgcgcgagagccgaaggtcgcgttcctgcagctgcttccgttgccggggcgggcgcctgggtgtccctggcgagcgtgatccccgaagggtcagcgcgcgcggagccccagggctgaatgcgcggtcggggtcgcgcggtccggagctttgcccgtctcgctggcgggcccgctgctctcccgtcgctcgtggcgctgttgcgggcgctagtagtggtctagtagcgcgtaggctcgcctcgggctgctatgagtcgtccgattgcgtcgtgtgcacgtcgcgttccctgacggcctgttctgcgcggcgagggtactgtgcggactgatcgcttgtgcatgtctcgcggagagcggacggcgcttgagctcgtcgcatcccccggtggggaaacgtagaaactgggttactcgccagctttaggcggaggggtttgaatgagagcgggtgcgcatcgggttggattccttcgaccgactacgtgaaaccattaggaacaaatccttgtggttaactagctcagcaggcttcatcagtgtaagctgtactcgggcctagaaattatgtaacatggcgactgatacgtctcaaggtgaactcgtccatccttaaggcagatcccagcttatacgtaggagctcagcctgatccacgcgggacaagtgacggtgagacggtagcacca

SEQ ID NO: 584043 - DNA, 223 bp, Homo sapiens
  misc_feature (4)..(4): n is a, c, g, or t
gttnttgatagtaggagcagaagacacatttatctcctgaggaaacaaatagattcagatagcccttattcacccataaacttttactcctcaaatacctactacatctagcagttacaacgttatttaaatggagatggataattacagtatgtacatttcttaaggttttggtactattttatctattttttgtttttgagacagagtcttgctctgtttc

SEQ ID NO: 584044 - DNA, 408 bp, Homo sapiens
gttcgaagatgatgaatatgcctaattaccctgaatctgaatcactacacatttatacatatcaaagccattactatgtactcccatgaaaacgtataattattatttgtcaattcaaaaataaaattttaatttagtttgttgaggcagggtcttgctctttcacccaggctggagtgtactagcaccatcacagcacactgcagcctcaacctcccaggctcaaacaatcctcccatctcagccttctgagtagctgggaccacagacacacaccaccacatccagctagtttttttaattttggagagacagagttttgccatgttgcccagggtggtctcaaatttcctgagtgcaattgatccacctgcctcagacttctaaagtgctgggattacagatgtg

SEQ ID NO: 584045 - DNA, 672 bp, Homo sapiens
gagtgtgggagtttcgcccggcgcccttgtgttgagccgtttccccgggcccccccttgggttttaatgaagaggtgcgcgccatattgggcccccggccccccttgttggggtgtgtgtaccccaagcgtggcccccaggcggtggtccccgtccatggggggaacccggtggaccttcgtggaagtgtgtcccccccgcgtgtgggccccctctcttttgggccttgggtggtgcgaaattgtcccgccgtccgacccgggcgcgtgggtccccgaatccgtggcctccgcggcccccccgtgggcccgccccggggggcccccaataggtccaaccggtgggccccccgcccggggtttttcgggggcgcccgcgccccccccccccgcggcgttttggagccccccccggggaaccacgcgggttcttttgcgaagagtttgtgagccacacgacggtgttggaccgctcttcttataaatgggtggccccacgctaatatagtgtccttgtctttttaatggtcccccccccttcctcttccgcctctttctctctgggaccacaaacctcttctttgggtgaaggaagatttccctctttctctcccacgctttctatccccccctcaaacaaatttgtttcagagagaggaacatatacacaaaa

SEQ ID NO: 584046 - DNA, 493 bp, Homo sapiens
tagcactaataagctgtgtgcgcgacacacaccacagaggtaggaaggaccacctttaataaattatcttcttaatcgcagagaatttctgaagataaaactgacaaaatgctaaaccaaggctttgatgagtcccaaaggaccacagatccatcggctcctatttgaagaattcatcccctgtagggttctagcctatgtagggcactggattacaagaaccaccagggctttgaacaactgccctaagaagccttctaacccactctcatttgccgattctttggaccacccactcctgctgggagaaaggccacaaattggctctgttttcaccccccagggacattgcaccccctcgccccgaatcctttggccagaggggccaaatctcctaatttggcggcccgataaaatacgcaaattccgccataccctctgtccctccgtcgaaaaagaatacctccccccccaattcccccacacaaattcg

SEQ ID NO: 584047 - DNA, 149 bp, Homo sapiens
  misc_feature (16)..(16): n is a, c, g, or t
  misc_feature (44)..(44): n is a, c, g, or t
  misc_feature (73)..(73): n is a, c, g, or t
  misc_feature (119)..(119): n is a, c, g, or t
tcagaggccacagagngaggtgacagtccctcatctccctcagnctccacagtcttctggctctcctcctcgnctttccgcgtaaactcctcgatgactatgtcctcagagctagcggnctcatgagatggtttcggatggatcaggac

SEQ ID NO: 584048 - DNA, 384 bp, Homo sapiens
aatagacaagcaggggatactggtcaggctgaatcatcctccccgtggatacagagctgccagtatcccctgccttgttctatcctgtgtagtgcataggagaaaagggcctggcaatctcgtacacacaaagaggagaccaagatgtgctcttcctctcaagggaaaggggaaagctaggatattcttaagagaaggtaaatagctaaagccaaggaaatgaagggctatgatggaatagcctggacatgatatagagtgaaatattttcaagcacaggagttatacaagtggcttaaatgtatcacatgtgtacagttcatctcagtacctgccagcctcactttgaggtataaaacatggacagaaatgggtctcataggg

SEQ ID NO: 584049 - DNA, 208 bp, Homo sapiens
aaccagagaccgagagcatgagtggggtgtgctcgtgtgcgtggatccgggtgtgtgtgtgtgtctggtatatgtgtgcgcagagtgcatcattttcagactctactatttccgtcaagtttctgtatgatttggatcatctcaggatcggattctgttttagagtgtctctgggcccagatccgggcccctgccctcctctgcacct

SEQ ID NO: 584050 - DNA, 1348 bp, Homo sapiens
ggagtcacagtgtaagtagagcgtgttttgaacacgttttttcgtagatgccttagcagggattatatgccgtccgccattgtgttaatgagccaaggtgggcaccatgaataggtcggtatgtcttggttacgtagtccacctagtggcttctcatttattaagtgaagctttctctagagcaaggcacatggattaatgctaccttgttttgatatagcatatatgttttgagctatgacatctttcagttggttaatctctgtttaaggataagtcaaatttctatcggaattggccccctagggcgtttggggtgggaacgatacgtggatatttggtccttatctgggatcccatttgtgttcttcttagggtatagctgcccatgagtgtgtttgatcgtaaggttttctatcggtaagcactggggattgcttgctgcttgggagaattggttacgttcgtttcaccttgtgttccacggcgctgggtaacggggggtacaagattgcgttccgtgggtattccccgttagtatttccctcgggcgttaagggagctccgtggaataaggttgctaacggcccatctggggttctttcccggaaggtagcgtgcccaaggatatccttgaaccatggtggtggaatcagtgttcttaaccctctgcgcttgcggcagcgccttgggttggtttggggttcatgaattggcaactctcgttttggtctatctgagggggacggtgattgtgttctgcgtgccaagggttgtcaggaagtgctcataggggaccttgtggtttttaacgcggtagtgggcttgtggtttttttgatatgtgtgttatttaaaccgcccaagaggtttcgctaccaaggacatgccctggttcttgccctagatgtaagtgttggactatctcctttagggtctcagttggtataagttgccgtgcttgcaatcaatagaagcttctttgggctatagttaggtacttatacagtgtgtcggtagatgattgtcagttggtattgtaaataaagagaagtggtaatgaatgggtattggtatctgaatgagagttcagttgcttgttccggaaatcccgatgtggaatggagtagagcctgtgtgccactgttgagtccatcccctgggtacgcgagtcatggcaatccacaggccctctgccacaggacgccagcctcggcctcagagtatgccggctgtctgcagagaggtgtttgcatgtataaactatttattgtttcttattccttcgatttgtgatgtaattaatcttagagagcttatatccgtggaggtaaataagtcactatggg

SEQ ID NO: 584051 - DNA, 470 bp, Homo sapiens
gctcgacaacccaaacaccaaacgcctggcacttggcaaacattaccagagtaggctgaaacgaaggctggtaaagataaaagactctaccggcactttcataggttattagagcacacgcgggccgttccagatgttccgcattacccgcgtttttattgtcttaagaggaactcctgaaaaatgctcggcattctctctgggtttgccgcagccgtttttagttgacggcgtcgttcatttcctcttcgtcttgagacgagacgtaaaggccatcttctgctccaacaacaaggcagcacttactacagtgggctgaagcgtaatatacgtattcagggtaaatggaacggccaagtgcaccgttaagtgcatcatgagttttgtttaccagcctagccgcttgggggagggtcggaaaatccgtgacccaccggtccctctgtcgacccctgtgacctggcgcgaat

SEQ ID NO: 584052 - DNA, 986 bp, Homo sapiens
tatcctctcgcgcacacaaccaacctaccctttaggtgaacccgtaacggaccattacatgtgttcctatctgtgtatctgcccttctacttgggatactatttaataaagaaagtcatcattgtctacgttgaaagcatctgccgtgtagaaacgttatccatgtccggaaagattctcgttcatctctcaaattacttcattgtctaatggacggttctgaaagaaaagcatcccaaatcggcgtaccttgcgcgaaccgtttgacaaccggcaccctgcttctttccacctctccagataacacttactctgaaccccaactcggcgcaaaatcaaaccactcttgtttctctgcacggcgatctgccagtccctgctcttcattgttacgtacgctgattcacatgtctaccacacaagtgtcagtccgaacctagccctttccttcttatccctccaccacgctctaataccccgcccaccccatccacaactttaggatgaccacaccctccaaaactcatctccacgcccaatcttcccccccccctccctccattcctccaccatccagcccgctaacacgtcgcccgctctacatccctctccacggcgttatccccctctcacccaactcagacaaaactgccatgcacgctcctgggtacgtccccatcatccctcaccatcccctcacccatacccaacacctacatctccatcaaacaacccactttcttcacatcactcaccacgccccactcttcactcgtcacgtctcacaccttatcctcctcatacatcaatcaccgccatctccaccacgcaacgatgatctcaatgcccccgctaatatactcttcgcccctccaccagactcctacccgatatattatctccacatataacccagctatctttccgcctaccacatgttccaggtcatctacacctaacacaccacccgtaaaagacttccattg

SEQ ID NO: 584053 - DNA, 102 bp, Homo sapiens
aagtacttcttcggcggcaggacgttttcttcgaagaagccctcattgacaagcattccccgctgggaagtatctggccaccacaaagggggtcccggtgtt

SEQ ID NO: 584054 - DNA, 910 bp, Homo sapiens
  misc_feature (7)..(7): n is a, c, g, or t
  misc_feature (40)..(41): n is a, c, g, or t
  misc_feature (49)..(49): n is a, c, g, or t
  misc_feature (98)..(98): n is a, c, g, or t
  misc_feature (101)..(101): n is a, c, g, or t
  misc_feature (115)..(116): n is a, c, g, or t
  misc_feature (136)..(136): n is a, c, g, or t
  misc_feature (169)..(169): n is a, c, g, or t
  misc_feature (189)..(189): n is a, c, g, or t
  misc_feature (202)..(202): n is a, c, g, or t
  misc_feature (205)..(205): n is a, c, g, or t
  misc_feature (221)..(221): n is a, c, g, or t
  misc_feature (224)..(224): n is a, c, g, or t
  misc_feature (240)..(240): n is a, c, g, or t
  misc_feature (244)..(244): n is a, c, g, or t
  misc_feature (248)..(248): n is a, c, g, or t
  misc_feature (276)..(276): n is a, c, g, or t
  misc_feature (304)..(307): n is a, c, g, or t
  misc_feature (311)..(311): n is a, c, g, or t
  misc_feature (313)..(313): n is a, c, g, or t
  misc_feature (315)..(315): n is a, c, g, or t
  misc_feature (347)..(347): n is a, c, g, or t
  misc_feature (350)..(350): n is a, c, g, or t
  misc_feature (372)..(374): n is a, c, g, or t
  misc_feature (381)..(381): n is a, c, g, or t
  misc_feature (467)..(467): n is a, c, g, or t
  misc_feature (512)..(512): n is a, c, g, or t
  misc_feature (520)..(520): n is a, c, g, or t
  misc_feature (549)..(549): n is a, c, g, or t
  misc_feature (685)..(685): n is a, c, g, or t
  misc_feature (707)..(707): n is a, c, g, or t
  misc_feature (713)..(713): n is a, c, g, or t
  misc_feature (790)..(790): n is a, c, g, or t
  misc_feature (824)..(824): n is a, c, g, or t
  misc_feature (846)..(846): n is a, c, g, or t
  misc_feature (897)..(897): n is a, c, g, or t
tattatngtttttattatttaaaaaaaggaagagaattgnngggggggnggggagggggtatatataaatattataaaatcatattagaataaataangtngtcataaataaagnncccattgatttatgggtggngtttgggaacggctttggctatttgcttttggngggtaatttgggcaccaggnttccccctcaggngangttccagttaccaggnganactggaacctcaggtntatnaaanctggaggggcagtgaaggcctattattnacagcacataagattctaggagacagannnnggcncngnagaggtggggcgcggcgcgcgcgcttcattgngtnccttaaatatgctagaattttnnngggggcnagaacctcggaagacactccatcccccaccatcatgaatactgagcttgcacacttggggacctgccccagcgtgaggtcaggggngtgggttaatgcattctggaaaaggggattacttgattactgtcncccaagtncccacagccctggggtccatgcagagacnacagtgcaagagacgtggctccccgctgagatccagctgatctgaccgggcagtcactttgtcactcagaaacagagatgcgattgaagatggggagtcggcggggggctgccacgggctggggtggtgcaaaaantcccgcctcgaagacgggagantcaganccccccaggctgctgccgctgctggcatattcatcagggtcggatcccagggactgtacagagggggtccgaaccangccacccaagggcccccagacgctgataggagtngcccttcggcaggaggggcaanagactggggtggggtctcttcgagccagggggggtgccaggggcagcaganaaggcagagggtg

SEQ ID NO: 584055 - DNA, 810 bp, Homo sapiens
  misc_feature (639)..(639): n is a, c, g, or t
gggcaggcctatttgactccaaggtagcagctgtggtaggatagagactaaaagctggaggagggtaggcgacatgaatgctgtagaccaggagcggtggggtacaaagggggcccatgcgggagatgccacttggccagtaggacctccgaagaggttgttatcccaggcgtggaggtgggggccatgagcagactacagaggtgcaggcacgcgaggattcgtccgacgttcgttcgcaggcccatgctgggtccacgagttctagactgtcgccttccgtccctaggcccgtggattctgtgctatttccgtggtcgccctgacgttatatctagcttgttcgccctttccccaaagctcatcttccagaacttttccctcatcgtcacgtaagccgcctaggttgcactctactaactgcagctcccgttctagcatgtctgccgttctttcgtagcaaagagagagaacagcggagctatgacttagttcagtgcagagagataggtgaggccagctcggagatcttataccagtctgtacttggacaaaggctagcacagggctaggcaccgaataacagatttcgtagtgagtgcacaatgacaagagcacctgactacaatgcgagcaacntgtaacaacaagagacaatggagtacacagtccttcactgggcatccgagggcccagtcgtcgcgccgagcagagatatgccctccatctagcagaacactgcatggaaaggcacccaagcccccttgcatcagtgtccttcctcaattagcagaagagggcttactcatc

SEQ ID NO: 584056 - DNA, 193 bp, Homo sapiens
aatcctctttccaaagcaggccctcaccagtctcttttctctttcgtggttcacccctgtcaatggagcaaaaaaccaacattacttccccttagaactgcagaagggctttgtgtttcccaccaaaccccttcctggacagggaactactttggcttggtgcttttgatcccaaagttcccacagccgcagt

SEQ ID NO: 584057 - DNA, 164 bp, Homo sapiens
catgtacaagtgtgtgtgtgcatgcatgtggcagtgtgtcatgtatatacatgtgctgctgtgcgtgtatgtgtgcatgcatgtgaccgtgtaccatgtgtatacatgtgcaggtatgtgtgtatatgtgtgcatagatgtatagtggcagtgtaccatgtata

SEQ ID NO: 584058 - DNA, 319 bp, Homo sapiens
  misc_feature (63)..(63): n is a, c, g, or t
  misc_feature (115)..(115): n is a, c, g, or t
  misc_feature (130)..(130): n is a, c, g, or t
  misc_feature (276)..(276): n is a, c, g, or t
  misc_feature (290)..(290): n is a, c, g, or t
caggtgtgagccaccacgccagcctgacgatgtttcttacttctatcacttccttttgatttnttcttatagcttctatctctgcttacgtcacccatcattcttgcgtgttgtntgctttgcgcattanagccctttgcatgttaatcagttattttaaatttatgatctggtaattctaaaatgtctgccataactgagtctggttctgatgcttgttttcttttcagactgtttttttgtcttttagcatgccttgtaattttttgttgatanctagacatgatgtnttgcataaataaacaagtaaactaaggta

SEQ ID NO: 584059 - DNA, 544 bp, Homo sapiens
tcaaacaagggtttgaaacacctacgggaatttggctcccaaataagctggaattggtggtatatgcctcaaatataactgactgtatcctataggggtaacttttcaaacagcccttagcatttttatactatttaacccattggtgcatggagttttctttaaaaaatgcttgtggtgaaagacccaagatacccagtatgcttaaggtgaacagaaaatgtgtcctgtcttgtaaagggacactttcaagtatggtggtaaatcctgggacagaggttgctgacactttaaaaaacattaacttacttattataagtgacctaatttaaataacatctgaagattacccatttttgtggtcttagaatttcaaaaagaaaacgcaaacgggctgtccatagcgtgttggcactcaagggacacaaaccaagattcttctatcagggggcacatatttacactctttgccaacaataaaactcgtgtacgggatcactttacaaaaattcgatttgaccctccagcctgatacagtactaac

SEQ ID NO: 584060 - DNA, 903 bp, Homo sapiens
ggggcgaacacgccgcggtcctcgtcgtggtgcagtggctcacgcctgtaatcccagcactttgggaggccaaggcaggtggatcacctgaggtcgggagttcaagaccagcctgaccaacatggagaaaccccatctctactagaaatacaaaattagccaggcatggtggtgcatgcctgtaatcccagctactcgggaggctgaagcaggagaatcgcttgaatccgggaggcagaggttgctgtgagccgagatcgcgccatttccagcctgggcaacaagagggaaactccgtctcacaaaaaaaaaacaaaaccagaccgagaaaagaacaccttaagtttccacccaggcctgtgaagtaagaacctctgctagagaggccaagtggctgctccacatcatcatcctcctcagtctggtgggggctcaggggaagtctctcgtcactggcgactcggcggctccagggtctcagaccttgccccacacggaaagcccttttcacctatcccaaagggacgctgcgacgagatgtccgcaacgatggctctgaagagattcctcttgcgaatctgtcttagctcatcacagtgcatccaacgcttaaccccgggtcacaccttgatcaagcacagtggctgcggatggaaaaacctaggtggtgtggtcagaaagagctggagcgttgagaggtggggggttaagccatcgagcagctgctgggattcacccctcttcaggtgactactgctgatgggtactcttgtgcgacgcaagtgcgaagccagggtggggacttttcagagctaattaggcctccagagtatcacggtagttcatgaatcgtaatgacattgactggttctcgggattttcccggcacatacttttggggga

SEQ ID NO: 584061 - DNA, 225 bp, Homo sapiens
tcgagctcggtacctcttttagttgagaacacacatcgcaaatagtttctggaatgcttctgtctagtttttatttgaagatatttcctttttcaccacaggcctgaaagcgcttgaaacgtccgcttgcagatactacagaaagagtgtttcaaacctgctctatgaaagggaatgttcagttctgtgacttgaatgcaaacatcacaaagaagttcctgagaa

SEQ ID NO: 584062 - DNA, 745 bp, Homo sapiens
  misc_feature (175)..(175): n is a, c, g, or t
  misc_feature (213)..(213): n is a, c, g, or t
  misc_feature (230)..(230): n is a, c, g, or t
  misc_feature (248)..(248): n is a, c, g, or t
  misc_feature (266)..(266): n is a, c, g, or t
  misc_feature (276)..(276): n is a, c, g, or t
  misc_feature (288)..(288): n is a, c, g, or t
  misc_feature (303)..(303): n is a, c, g, or t
  misc_feature (306)..(306): n is a, c, g, or t
  misc_feature (314)..(314): n is a, c, g, or t
  misc_feature (334)..(334): n is a, c, g, or t
  misc_feature (339)..(339): n is a, c, g, or t
  misc_feature (346)..(346): n is a, c, g, or t
  misc_feature (359)..(359): n is a, c, g, or t
  misc_feature (362)..(362): n is a, c, g, or t
  misc_feature (378)..(378): n is a, c, g, or t
  misc_feature (383)..(383): n is a, c, g, or t
  misc_feature (466)..(466): n is a, c, g, or t
  misc_feature (473)..(474): n is a, c, g, or t
  misc_feature (522)..(522): n is a, c, g, or t
cgcggacttctgccaagcaccggctcatgtgaggctcgcggcacagcgttctctgggctccccagaagccagcctttcgctcccggacccggcagcccgagcaggagccgtgggaccgggcgccacaccctctgcggcgtgtcatgggcccgcgccgccgggagccgaaagcccngaggccccgaggaggcgcaccctgagcccgacccccgnccccccggcccctcccnggcggggccccttccttnaggcgcttcctcccatcnaacacagtcnggcggagacaanggtttggctaaaggngantccgaaangcttcagaagagcacaacancctcnttgatanaggaagctgcccnttncagccgcctggcaagnagaanatatgtgttaaattcactcgtggtgtggacttcaattggcaagcccaggccctattggccctacaagaggcagcagaagcatntctagtnnatctctttgaggacgcctatctcctcaccttacatgcaggccgagttnctctcttcccaaaggatgtgcaactggcccggaaggctccgggggccttgaaggaggggactcgagtgagctccttgcacccggtgttcctgtcagtcttacctgctcagccaggggggttgatccggggactctccgagcctgctagtccatggatctgcgagtgctgacttgcgctctacgttgtttgtcgtacttttctttggaaggacctgtatcctga

SEQ ID NO: 584063 - DNA, 196 bp, Homo sapiens
gtaagttatacccaagtataatcatatcagcataagcactataagtttagtcaccaccataagcactatagaatttccatatccttagatcataataagttattaaatccttaggtccaagtttcagccctagacctcaggccacagacccctcagaaccacctcagctccaccaagctagtagcacctcttccac

SEQ ID NO: 584064 - DNA, 371 bp, Homo sapiens
ccgcgtcgacattttgtcggcttgccctgggcaaagagggagtttatggtggaaagtgggtccaagactacccctgggttagacccctgccttgccccatccgctcctcccaagccctggttgcggcgctaaaatgtggttcaagctgacaaggccgagccgtggaggaatgctggggttcgcccgcagaagggatgggacaagagaggaggggtaaaggagaccccagtaaagggcaggccatttcaggtgaagaaaggtaagaggaatctgtgaagtcaagggccaggctgtggaggagattaaaggaggtcaaagagaggtaagggggtaaggttgctgaggtcgacgcggccgcgaatttagtagta

SEQ ID NO: 584065 - DNA, 487 bp, Homo sapiens
ctcgttatagaggatccccatccggtgctgagcatttgcctgtttcgcagctacttgggaggctgagacaggagaatgcttgaacctgggaggtggaggttgcaatgagctgagatcgcgccactgcactccagcctgggcaacaagagcaaaacaacttctcaaaaaaaaaagaagtttctaatctgtatatgtttacaaaaacagccatcccttttggtaaaggagtcagttgtagattggttggtccccaccacatggattatgcctttgttttctcagcagcagtgcctggtcatagcccggatccagaaacgctgcttaactgatcaaacagttgggcaggggtatgcccgtctccagatgcttagtctaacttcacgtggaataggctcgcatcctacccacgggattgcaggtgtttctttggcgtgatattccaccactgagaacattttgaaggtaccaggatatctctggtctcatc

SEQ ID NO: 584066 - DNA, 232 bp, Homo sapiens
atcactatatgcctgaagctaatctaccaaatcttgaaacctgagaatattctattctatcttcttccgtctaggtaagtagagttcctatacactacgcctactcatgtttagcgcagacctattgacagcctacagcatatacgctaaaagctacactctacaacctactacctatccagctacccgataccctaggaccatccagtatatctagagatctagctatact

SEQ ID NO: 584067 - DNA, 278 bp, Homo sapiens
tctcctcgtaggacggggtccctccccgagactgggtatctgtagcatgggaagacgtgatccacgtgggctcccactcggggcgcattcttatccccataaatagtataagccacgaccggaacacgggagtggacctgctgagcgtcctaacgtgtactgctagcaggaccgatgcgaactacataggtgggaccatccggaacaaggccaggccaaggcctctcccactaagggacgctacagcccatggtctccctagaggtatccaccacggt

SEQ ID NO: 584068 - DNA, 908 bp, Homo sapiens
taaaaaaaaaccccttttttccttttttgggcaaaaaaagcgggggagggggggggtttggggggtgttttcaaaaaacacaaacccctcatttcccctctcctcagttctcctccctcgcactcttcttccttgtgtttccaccctctctctgcgtggggtgtcgtgcaccacatcgctggtgactccgttgttggggtcgctgcccccacttgtggtgtctcatcccccaaagagtcatcgtttgtcttcccccatagagtgctcttgatctctttatgacgagagtggtggagggtgagtaccgcccgcgctcccacacaagacaacaagtgccgcaggagatccctgtgtcgtgcgccccccgtggagacagaacacaacacggggggagtcaccgctgtcccacccagtggtggggtgccgcccatctctgcgggcaaacacatcacctccggggcgccactttcggtcggtggagagccccccccacagagaggaggagcacatcatgagcaagatagtgtccccgccgctgtgtgtgttatttaccacaccctctccagagggcgtctgtcataagtgctcgcgccctttgtgtgtgaaacgctcgctcgctcgtgtgtgttgtctccctcgccccctaattggatgatcgcggggggcataccgtggtgcgcaccctgtgtttccccccgcggtgtgttctttccgtggtgccccccccccttgtttgtttccctccgctttgttagcaccagggagacctatcacaccgagaaatcatcgagatgggccccccggaaaaaatctgggggggtcgccccccaacggctcgaaaggggtcttctttctcgcgccccacctctttttgtcggtcgcccagtccctctgtgtggagtgctccc

SEQ ID NO: 584069 - DNA, 352 bp, Homo sapiens
acagtatctgataaatatttgtatccaagaacttctctacctatttcagccaaaagtctcatattggtcttagaggctagctagtatagtatacgcaagaggctatagcaatatgcccacaaagcaccagacaggagcaaattaggtaatcctctggagctcagggatgctctcgatgcactcatcttaaggtgctttaagcagttaactcacaggacatataaagagtcatatcaagataggcatatacaaagactgctcacccgtaagtttaagtccaatcaccagtatggtaccatctgaagccacagagtgtgcattcagtttaaaatgaagaagcttagccctgtgg

SEQ ID NO: 584070 - DNA, 941 bp, Homo sapiens
tctaagcccctcccgcgagcccctcccccacgttactccacgcctctgccctctctccctccctgacgcttgcctactgacctatcagtggggctcctctcaccgccaatctcaggtaatgtccccgtagtttacggtcgacttctcgtacttccaatctgctagcgccccctgattgtcacctgctcacacgtgctccaccacagcccctcctctgctaaccgatgtacagcggccgataatcctccggcgttttctttggtatgtacggattccacgactcttctcgcctcttttatctccgtgcgctgtctctctggctttcgcttgtttttccttccccgcctcatccactggtttcccgattctataacccccgtacttatcgtgcctcgtagtactcgtatgaaatttctgatacaggtcgagttacctgaattgttttatctagatgaactgtctcagagtcataaagtcccactggcacgttccccatatgtttatctgattggacatggtcgatatgccatgcaggccgaatctgttactgaaggcgtgcgttcgccaaatatgcacctgtacattccacaagcattgccttcttattttacgtcttttagctgtttaaaccttgtaagatggcaaagaggttggatcaacgtttaaatgactgtgctgcccctttcacatcataacgatctactgaccacgaaaggccgccgcctgccttttcccatctgtctatctatctggcctggcagggaacgtatagtacttgcatgttggtgaaggaagaagtggggtggaagtagtggggtgggacgacagtgaaaatcctagagtaataaccaagcctggcaccaagggtgtcctgtcaggcatgtaaatgcagtttaatcagagtgccattttattactgccgcggatgatcttaaaaatta

SEQ ID NO: 584071 - DNA, 346 bp, Homo sapiens
tccccatctgtggcagctaaaacaaaaatcactcaaaatattcgggttaacttgtaagctctctctcatagggagctgccatacctcacagtccaaggtgtttcctatagacttcagtaactttatactgacttgtaatggcaatttactatgcagcaaaaagtgattcagaaaaaaaaataccctacagttgtctgtatcccttggtatacacaatggcttaagtaacctcttgctttaaacatttgtcctgggataaaatgctaatgtctgtataggaatgtcacagtgcaagagtgctgctagcccaggcacaaaggttattaaaacttatttggttgaaggg

SEQ ID NO: 584072 - DNA, 496 bp, Homo sapiens
gagagaactagtctcgagttttataatattggggatggctgtgggtataatactaagttgaaatgatatcttttcggggaaaggctttgtaaattaggccttattctctttgtcccttctcggtacaggggaggagaattccgaactgtacgataagaacaccagacctgggattactccgggtctagaactccaagatcacctgtcaggacttaaactctgtctagacacaacacagacaccttataaataggcgcggtagccacccactcgggactgctccctgcggattcgccagagcatcttcaaggacggcttcctgtaaaaacccctatatctttggatgggcaattcgtgcagcgcctctctgataagacacttcgcgcactttcgccacccgtgttttaaacaccccccttaggggtctaaccttgtgttccccgagtgttgggctcacgagttaaagtggggacttcaaagtgtgactttactagcc

SEQ ID NO: 584073 - DNA, 941 bp, Homo sapiens
ttactggaatgttaggttacctccccttagtatattattatggttctatgtgctagacttgtttttctctcattgattgctaattggggctatttgattttgtttagaccttgttggttatccatttgcctagtcatcttttatatttaggttactttttttgcattccacgtatccctgtaatagctgctgtctgtgtatacacgtgtttggcattattcaggtgtgatacctgttaaagttctataatgctttctttccgatattggtcgtcttatgatgaataagtttctaaatttatctgacaccatgtcagaaacttgttttggggaatttgatagctattgatgtgcatctgttataactgatgacagtacttcactcatcattcccccgataccttttttgatgtcagtatctacattgttgcctcctcctttttggttttgctggttataataggtttggattggagagggctcactggcctcccaatcctgtggagctggatcattggtattcaaatcatatatgtggataggatagggaggatgatattaccaggattcatggatgcgggatctagattaccaggaacaataggagtggattcctgccccaacccaaccgcattcgatgtggatttttatattcaaccgtaatgtggctattccaaagatttttttttcctatttttgacgaattggagcccttaagatgcacgatggaattgtgttttgcgttttttggtaaaaggagcaaagcgaggacctggagataaacgctggaagcaatctccattggaaggaaattcagcacgagtagatggtaaacatctaaaggggaaagggaggggattacgatattaaaaatagtaaatcagtaagtcaacttctaaatttcaagaaaacaaaattgggtgttaggcatcaggggtttca

SEQ ID NO: 584074 - DNA, 1421 bp, Homo sapiens
tattctgtgatgtttgctgttttctgtcttgtttctttctttctagtttgcccttttgatcttgtgttgtcttttgctcgttgtttctttatctttgttttctttctttcttttatccttctgttttttactgcggcgtttgcctctggcttctttttcgccttcgtttcttgcttttttttttgtgctcccgggttgatctcatggttcggcttcttttctcggtgttttatttcacttcttggtatttcactttgtatccgatgttctttctttatgctgtccctttgtttgatgttccctccctgttttgtttcttgtgtgttgttctattccactgttgttatttgggcgctgttcattgtccctgtctcgcgtatgttggtgtcttcttctccttgctccattgtcgtctagtgtgttcggtgaacttctcgtgcgttgcctgtgttaccatcttacactgttcctgcgtttgtccaggtatcttgtgctatgatttcacccggtggtatgcctgtgccttgagggtcaccctctgtgctgttacgtttgggcttaatatcccattgattaacttggttttttgattcatttcttttcttcttattatacatggaatctatatttggacatttctttttagtcattgcatttttctggttctgtgtttagcccttataattatatcactgttgttgtgtgtaaatgcgtcttgaccttgaaggaaagataccaagttgtgatgcacactttttatcacatgattatattgattatttactacgtctgtctatgccaatcgatatgatcgctgtttgttctgtgatcctgcctttgacgttttatattccatgtaagttattgtggccttagtaactgccttgcagtaacatccgttatattgctttaataaacctgcttcaccatacacctttgccccctatatagatgtgtgcttgcaacactatataagcatttgtgattggtgatgttgattaagtatatatttcggtctgttctgcaatgatagagctttatgttaatatatttatgtgcattctgtataatacagctagctatatcaattcttcacatacttctatatggcagaatgagaggacggccatattgataataactatctgatgatcacggcaggacactgcacttcgtacatataggatttctctaggctcggtgaggcagtagagtatttatgttttctttgacaggttaactgaatctcttttatccatcggtaattttgagaggatgattcctatgatgtgttcacccaggggaatcgctggcttttaatagaaatcttctatgtggttgtaactgttcatatcgtctgactggtctgtgttgacattcattattcccatggtattggactcttctaaactatgtgcctt

SEQ ID NO: 584075 - DNA, 148 bp, Homo sapiens
gtgtgtcgagtaaggtagtgcaacttcttggctgaataggtttaaaaagatcctttccattgtgagacagtgaacatatcaagtagtatttttcataattcgatacccaattacttgaaattccatgatgcagcaaacaatagtaaac

SEQ ID NO: 584076 - DNA, 217 bp, Homo sapiens
  misc_feature (60)..(60): n is a, c, g, or t
  misc_feature (64)..(64): n is a, c, g, or t
aagttgtgagatattggatgtgaggcaatttttcctttctctggagtctttatgaaacanaacntttgaaaaacctatgtattattcaaacagctttggtcccccccccacagaaaagcctaactacacacaacaaaatgtatgtcaaccaagtgtttagaatgaaattataagtgtttaagtccaaataaagcatgtgatgtggaataatctatgc

SEQ ID NO: 584077 - DNA, 367 bp, Homo sapiens
  misc_feature (329)..(329): n is a, c, g, or t
tctgacctgggtgaggtgtagcattgtcctgggattgtttgcccagcttccgatggaccccttctgggactactcttaggcctaaaaaggggttaggcacctctcccctgatcaagaatggaccaagattccctccagagcagagaggcccccagccctatgtttacagccactgacatgtctaagaaacttgtatgactttcatgtccctccttagcctaaggacccctgggacagtgtccataggtcatccccagaacctgtgggaagagtagagaatatgtattcttggggtattgggaaagcagctttgtagccttctccctccntctgcccctctgagacaataaaattgccctctttaaaa

SEQ ID NO: 584078 - DNA, 114 bp, Homo sapiens
ataaactcaaaaatgattagagtttataggacaatttagtcaagtacctagttataaaactaaagggaaaaaatcaagttattggtcaaaataaaactgaggatgcttataaaa

SEQ ID NO: 584079 - DNA, 150 bp, Homo sapiens
tcgacagcaagaaatagaagaaaaactcatcgaggaagaaacagcacgagagtagaagaattgtagcaaaaagggtggaggaagaactgagaaaaggaggatgaatttaacgggagtctccaggttgagagccaaaccatcatgaaagca

SEQ ID NO: 584080 - DNA, 270 bp, Homo sapiens
taaaaatgcaaaaattagccgggggtggcggcccatgcctgtaatcccagctacatgggaggttgaggtgggagaattgcttgaacccaggaggcggaggcaaaggctccagtgacccaagattgtgcccctgccctcccccctgggcaacagagcaaggccccctttcaaaaataaataaatatatataaaaaataaaaagctttttttggtttttttccctataaagttttgctttattaaaaagctaataaccagctttttttccca

SEQ ID NO: 584081 - DNA, 650 bp, Homo sapiens
agtaaactgggtgtgactgtagtgaatacgatggcagtcctgcgcccttctgctcttgcttcttcatagttactcgtgcctaattctgctcaacggtcagtgggctgctctgatccaaatctggggggcttcaagagaggcgcatgcgagatggatcatcaggtgcccctgtgctcccttccgtgccgcattggatgcgaatacgatgggctggtgtgtggcattgctgatgggccggattgggttaatggacctgaagggagaccgagcgcggctgacggggggggggggggggagggccggactgggaggctccccgagagtcgggcgtgaagagactgtctctgatgctcggacctctctggcgacatgcggacgcgtgcagacacttgactcttagtgggataggtggctcactctgcatgggggacccgtgcgctgggagtcaagctgtgggtgcgtcggtgcattggagaaggggagtgacggggcatagaccttgtcggggcctttggcgctgagcgggttaggggctctgcgaggacaggcgccctggccgcgtgctggagtggcgtacgtcatggggatggggtagggccgcgtgcgtgaggcgtgcggcggatgtggtggagctgggggggggtgggggg

SEQ ID NO: 584082 - DNA, 241 bp, Homo sapiens
ttcaagagactaaatgaagaactttgacctagtggatctggtggatgtcaatatccctgatttaatggtgagatccattttagagattctattctcctgggtcatgaggatgattaatcagacgtcttgggcattagattgaagcatctcagaacatcttttgatccccttctatataggcacctgtgtctgctatacaagaaaagatatgtttcctgcatgttcattcctgatgggcggg

SEQ ID NO: 584083 - DNA, 220 bp, Homo sapiens
  misc_feature (95)..(95): n is a, c, g, or t
ggcagcaactacaacgcagtaaacagagtagtcgtcacagtaaggagaagatcgccagtcacctctttcattggcaaccatttttaacaattcangtcacacctcagggctacttggatcaagggtcaggttcctattgccaccttttcaaaattatattcaggtgtccaaaaatcattctttttttcgcggtgtgccctcgcaattgtaggaggggata

SEQ ID NO: 584084 - DNA, 390 bp, Homo sapiens
atttatttattaaccttgactagttttttatgagtctttactattttctatagttatatcttttcatctgcaaacggcacaatacacattattctagtattgtaattatcttttcttttcttgcctcattgctctcactaggatttccagtactatgttgaatagaaatggtgaaagtagtgcatactttttgttattattatactttaagttttatggtacatgtgcatctacgtaggctttctttgccttgtttttaaactttgaggattagctttcagtttctcaccattgagtatgctgttaagtggcttgcccttttggttgccttgtgagatataatatttatggtcatgctgagctctgagagtataatgtatgtagcagtac

SEQ ID NO: 584085 - DNA, 429 bp, Homo sapiens
  misc_feature (10)..(10): n is a, c, g, or t
  misc_feature (35)..(35): n is a, c, g, or t
  misc_feature (81)..(81): n is a, c, g, or t
  misc_feature (93)..(93): n is a, c, g, or t
  misc_feature (116)..(116): n is a, c, g, or t
aggaaaaggnccattgaacccatgtccagtttagnggaccctttccacacttggccaacatgaatgttaaggtccaaaggnaccattggggcntatggaggtttttttaatccaanttttaatttggggtcaaataagcccattttgtttgtttgttattaagtgtaaagagagctttcggttagcttatttagttataactttatctcacccacttctaaaaaagcgttgaggctacttgaagtaaagtcctgtagacgagagagcgtaacactaaaagatagaaagaaaacttagaagatggaagagaaataattgcactagaaacctggccaatatcatgaacaggctccatatagggactcctgtatatagatcgctgtgtgtgtggatagtacgttcaataaatgtattatctgaactgctttt

SEQ ID NO: 584086 - DNA, 182 bp, Homo sapiens
gggttggctgttccttgttattcccaaagccctggtttggggcccatgttcaccctggctttcagtctagtcaggggcaatgttttttaaaggggggggcctaattatttccagagtagcagcaaaagaggaaacgttgtgaattaaggattccatttaaagggaacatggtttttccctga

SEQ ID NO: 584087 - DNA, 105 bp, Homo sapiens
catggatttgctggtgcagtacaactaggcttaatagggacatgtatcccataaattgtgcaactactatatatccataaaaattagaagcaaattcaaaaaaaa

SEQ ID NO: 584088 - DNA, 721 bp, Homo sapiens
gaggggaaggtttccgatgagcccaggatcagacattgccacttcagccttggccaccaagagtgaaactctttctcataaaaaaaaaagattgtttggccgggcgtgttgcttcatgcctataatcccaacacattgagaggtcaaggcagcggaatacttgaggccaggctggtctcaaactcctgacttcaggtcatctgcccacctcagcctcccaaagtgctgggagccaccatgcctggctgtttctgtgtcacttctattcctgtgtctgcatttatactcccaagccttccacccaccctccaccttctcagttgtcatttcccaggcctgagagtctgtgcctgggggttgtgctatccatggatgttcatctacactgggtcagaactcaccaccacagcacgctctgtttactgataagaccattcctctgcatggcatatgaggtatctatgtcactctgaggcctcaaaaatgctaaacattcttttcttcccctataatatgacttcctcttcgcacttacaccttcaagtaagtagtttaaggaggagataaaaattttactgttaaaaaaaggagattgctgggtgcagtggctcacgcctgtaatcccggcactttgggaggccgaggcgggtagatcacctcacgttgggagttcaagaccagcctgaccagcatggagaaaccccatctctactaaaaatac

SEQ ID NO: 584089 - DNA, 322 bp, Homo sapiens
gttcactttctacacagatacaacagttcttctgatggtgactccagttacttgggacgccgcttgtagccttcagccctaagtcaatagcagtgagagcttatcccaaagtccccgtttctgcgtcgtccgcatgctcttggtgacacatactagcggtcgtgatattatccaaatggatcctgttgggaaagaataatattagcttgagcaacctggctaagatagaggggctctgggagactttgaagaccagtcctgtttgcagggaagccccacttgaaggaagaagtctaagagtgaagtaggtgtagaaatagaa

SEQ ID NO: 584090 - DNA, 578 bp, Homo sapiens
  misc_feature (176)..(176): n is a, c, g, or t
  misc_feature (234)..(234): n is a, c, g, or t
  misc_feature (320)..(320): n is a, c, g, or t
  misc_feature (330)..(330): n is a, c, g, or t
  misc_feature (359)..(359): n is a, c, g, or t
tagtgtaatgagattcatgattatatctgaacggtgaatatagtcttactcaaattaatactagctgggtaaacatgtctatctacagattatcctgtctgggcgcggtaactctacgcctatcatcccagcactttggaaggccgaggcaggcagatcacctgaggtcaggctgngcttgaactcctgacctcaaatgatccacccaccatgccctcccaaagtgttgggatnacaggtgtgagccaccgtgcctggcctgaaaattgtgatcatggaaagtacctcacagaattgtgggatgaatggagctaatgttngcaaagctcntatttcagtgtccaggatatgttaggccntatgcctacagagtcaggcacattttcttgaaacacaaagccctttatctagcttaacctcttcccactttagagtcgtgggtgcaggaaatattttgttttcctctttaccgtaaggaaagtaacagtgctagtgtgttgttgaaatgccatgctctgggcatgtgtttggggagagagatgcagtgcgaggtgggaggtggatcctctagagcgggc

SEQ ID NO: 584091 - DNA, 200 bp, Homo sapiens
tccaagcagacacaactgaacaactatccacacagagatactttcagaagaactaaaactcaggtgagcaatcacagtacctggttttaacatattaaggaaagaggcactgaagaggttaggaaagattgtcttgaattgcctataccacacctcctccgtcatccagcagtgcagtacgatgtggagagaatataatc

SEQ ID NO: 584092 - DNA, 101 bp, Homo sapiens
tgccgaccccaaatgggagctgtctcgggcccggctgaccctgggcaagccccttggggagggctgcttcggccaggtggtcatggcggaggccatcggtt

SEQ ID NO: 584093 - DNA, 231 bp, Homo sapiens
tagggaaaccgtgggaccctgtattgaggagaactgggttacacgcacgacacggttcaaggcctcgcagcatgcacaacaacagtgcaaggtcatcatcacagataagcagtgggatacacacatcacgccactatgcacacacaatgcaggtacacacacacacccacatgcacacacacagaatagcacgggtacacacacgcacacccacagtgcacacactaatgc

SEQ ID NO: 584094 - DNA, 627 bp, Homo sapiens
  misc_feature (132)..(132): n is a, c, g, or t
  misc_feature (346)..(346): n is a, c, g, or t
  misc_feature (407)..(407): n is a, c, g, or t
ctgttccgggaggcagcaggggcttgaggccgagaagggccgttgattgccagcaacagtggagactttgtagcgtgtcccggttcttagtgcgtcgaaatggtccccgagacctgaagctgaagaagccgncactggtttgcacattgccgtcgggcatgacctgtgtatgctctggtggtggtgtcttacattccgtcattcatacgggaggaaattaattctgatggaatggttaacttggttttgagaacctttccgaaaagatggttcgggtttactacttgaacttttgtatgaagagtattgtggcaattaaggagggccgagtgagcttttcttgggncttacaagagttaaattgtgacaatcatattcatggtgacaggactttggcgagttccagnttgccttatgttaccaatggggaaggtttgaaggtcttcataaattccctgtgtaaccggaattctggatattgtcaagtcaataaattagtttcgcactaaaaataatctttccaaaagcttaaggaaaatttttcttccccccattttttttccccgtttatattacctcttgtgggtgtttttatttcccaaaattttcttgtggtgggggcacact

SEQ ID NO: 584095 - DNA, 397 bp, Homo sapiens
  misc_feature (61)..(61): n is a, c, g, or t
  misc_feature (70)..(70): n is a, c, g, or t
  misc_feature (348)..(348): n is a, c, g, or t
ccggccaacttgaaaagctgcaaactgcaatgggtcgcccttttcgcaatgccctggggcncgcgccggngctgaagccctgatagtctctcgttccgtatgaaggtggaggcgaacactcccaaatgcaaatcgaaaccgcgaaaggcgcggcccgacgaatggctgcagataacggacgtcttcatcgccgcccgcgccgccatgccctatctgccccatcaccatacgcgcgccgaaacccgcgcctttttcaaaagcgtgatggaaacgcaggaagtctggacggcggaggccacgctcgacggcgagcagcgcattgcgggtttcgccgcgatccgtgacacncaaggcgaaacctggctcgaccatctctatattcatcccgcatcgcaga

SEQ ID NO: 584096 - DNA, 395 bp, Homo sapiens
gtggtaacgtatgaaaatgtctaggaggcacaccctctctggcatctatgatgggccaaatgcccacattcgcttggccacagtatgtgaaattgaacccagcttatacacagggtgcggcagctgtcgtgtttctctatgtgtgccaagtgtcatgtctgtaccatgcagggatagctgagtcttcatcctcctcagctcctatctgttcagtgcactgaacaccagctgctctcttcctctctggctcccatggcagccatggtctgttgcagagagaagaggattgcctgttccctctttaagggaacctccgttttgctttctggaaccactctcttaatgccgtctgtcaaaaccagctaggactccctggggtccaatccctctgtgtt

SEQ ID NO: 584097 - DNA, 418 bp, Homo sapiens
aaactagtatgacctgaaagctgagaaagataaattgcttctgcttattcagtgagtacatatatgtgtatactgatttcactggaggcaccatttttccacagtgatcctttccccctcttgtggtttgtctagccaggggttctggggcctcgggaggccctcatgttcatttcttccacggcccatactgcctcctgcctttctccacacacacagcccttaacaggtatttatttcaaattaccaaagtgagttgctctcacataagaaaatgcacttcctccgttcactttccaaactctaggtgctgtacaaagaagtgcttagagtgttggagacttatctgacatactatcaatcatgccgttagagctctacggcctaccaaacactccatgtgagggtttggggagcc

SEQ ID NO: 584098 - DNA, 189 bp, Homo sapiens
gtatagacatagagctcgtgtccggcgcgaacatcgtcacgcacctgaaggtgggatatccatactattgacatcgcccgggacctgagtcgtggtaggtggcaggatatgacacgtatgtggcggaatgatcattgtgtttagtgcctgttgaatgctcgtcatccacaagctcgaccacagcaagct

SEQ ID NO: 584099 - DNA, 135 bp, Homo sapiens
agcctggcttcttttaaacatgatcaacaactgtgacagccccctgtttcctttcagatttgcggcttaaaaaaagcaaacaggggcacatgtttttaggatctcctggggctgcatcggggcaaaatcaaaaca

SEQ ID NO: 584100 - DNA, 171 bp, Homo sapiens
gctgctacagtaaaattataaattgtgtttatcactagcaatttagaattgaaaatttcattatcatatcatagtgtttctccttgacagaagcacattatctagccctgttatttgaaaatcagtaagtgagcacccttagaatgcagattctagtctaaatgcacttca

SEQ ID NO: 584101 - DNA, 297 bp, Homo sapiens
aacatgtagacttagaccaaattccatgtcatgatgtatgttagctcatgcttaggattcatatgatgtgttttgctatgtgcatggtgaattacggtaattcacctctcccaattcggcgtgttcttcgcatatgaactacatctgacctgatccccttggtacgtaggtagtctctaatcgagattcgatcaaaaccattttcaaaaccctttcggtttgactatggtaatcacatgatttacgtcgcatcacatgatctgtttgacatcacatgatttgcataacaccacacaa

SEQ ID NO: 584102 - DNA, 294 bp, Homo sapiens
ctctagagatcccccaagcccgaccatacaccctgaataattgccaattgcttcttttatacccttcttgagcatctgtaaaaataccaagcttgaagtttattaaataaatgtgattaaatattttgtgttgtgatctcaatatttttcttcagattatcacactaattctcttctttaagcctgagatttgagctaaaaatcttaagctctgcgataaggtatcaatttaataataaatttccagtcttttgtagtattttatattaatttttctgaaagacaatggtgatg

SEQ ID NO: 584103 - DNA, 786 bp, Homo sapiens
  misc_feature (108)..(108): n is a, c, g, or t
  misc_feature (254)..(254): n is a, c, g, or t
cttcaagatgaagctgaacatctccttcccagccactggcgtgccagtaaactcattgcacgtggacgatgaacggcacaacttcgtactttctatgagaagcgtatnggccacagacagttgctagctgacgctctgggtgaagaatggaagcggttatgtgtgtccgacatcagctggtgggaactgacaaacaaggtttcccacatgacagcagggctgtctgtgaccgcatgggcgtgtcacgcctgctnactgcagtaacggggcatttcctgtgtacagcaccacaggagacactgagagaacagacaagacgaaacatcacgtctcgtggtgtgcattgtgagatggcaaattctgagacgttctcaaccttggattatggtaagcacaaaggacgcgaacggatacttcctcggcactgacatgataactacacgtgcactcgcacgccttgggaccccaagaagcagctacgcagcaatcacgacaaacttgttcaagtctcttctaaagaacgatgactgtccgccagatatgtcgtacagaaagcccgttaaataacagaaggttaagaagactaaggagcaagagcacccacagatgtcagcgtctgtgttgactcccacgtgtccctgcagcacacaacggcggcgtattgctctgcaagaagccagcgtagcaaagaacaaataacagaagagcgctgcacgcaatcatgctaaaactttgggaccaggagcaatgcagggacggctaaggagcaagcgccacgaaccacat

SEQ ID NO: 584104 - DNA, 80 bp, Homo sapiens
tttatagttgaaatacaattttttattcaccattgtctgcacaaatccttgaaaataaacctttttttccctacaaaaaa

SEQ ID NO: 584105 - DNA, 273 bp, Homo sapiens
tattgagtggcatgtgatggtcggtgcatatatataggtgtcgttgtcatggtgtgtgtagtcacggtgtctgtgtgtgacatcatcaccgtcggtgtgatgccctcgtggcgtttgtgtgacattaatatgtgtgacgtcgacatggcccgtgacgtcgatgctgcatctcggtgtgacgtcatgccaagttccccatgtctgtgtgcgacgtgctgcatctgaacgaggccatcgctatatctcttcgtgacgtcacatggccactcaata

SEQ ID NO: 584106 - DNA, 203 bp, Homo sapiens
tgcttggattacaggcatgagccaccacgcccagcctcatgacaagtttttgtttgagagccctgttttcaattctttgtatgtacccaggagtggaactgcatggcacatggtaattctgtttgacattttgacggactgccaaacttttttccatagcggcggcattttatattccttgcagcaatgtgtgagagcgttgg

SEQ ID NO: 584107 - DNA, 418 bp, Homo sapiens
tacttccacagggccagtatttccctggtaccaaaaccagacaaagacgcaacaaaaaaagaaaactacaggccagtatctttgaacagagatgcaaaatccttaaaccaaattcaactacatatttaaaagatcattcattgtaatcaagtgggattcatcccagggatgcaaggatggttcaacatactctgatatggtttgtgtttgtgtccctgcccaaatcttacatttaattgtaatccccagtgttggaggaggggcctggtggaacgtgattggatcataggagtggagttctcatgaatggtttagccccatctccccttgctactatatagtcggtgagttctcatgagatctgattgtttaaacctccctgctctctgtctctctcctactctggccatgtgtgttc

SEQ ID NO: 584108 - DNA, 324 bp, Homo sapiens
  misc_feature (6)..(6): n is a, c, g, or t
  misc_feature (21)..(21): n is a, c, g, or t
  misc_feature (154)..(154): n is a, c, g, or t
  misc_feature (180)..(180): n is a, c, g, or t
agaagngacagactcttgctntgttgcccaggctggagtgcagtgacatgatctcagctcactgcaacctccacctctcgggttcaagcgattctcctgtctcagccttccgagtagctgggattacaggtgtctgccaccatgcccagccaangtatttttagtagagatggcgtttcnccatgttggtcaggctgatcttgaactcctgacctcaagcagtccgcctgccttggcctcccaaagtgctgggattacaggtgtgagccaccatggctggccaaagattttatttttaataaaagcaaaacttttttaaaaact

SEQ ID NO: 584109 - DNA, 91 bp, Homo sapiens
tttacattcatgaggaatgttaatttgtactatttaactattcttgatgtaaaatcttgtcatgtgtataaaaataaaaaagatcccaaat

SEQ ID NO: 584110 - DNA, 325 bp, Homo sapiens
  misc_feature (173)..(173): n is a, c, g, or t
gctagctagatgaagggtggatggtcactgtgggtggccagctgctcttggcagaagagacactgtggcatagcggaagagctgagggctagaaggcagtgtgtggacagtcacaggactggagccctggctgagggtggctactgggatattgctcaccgaaaatgactganccaatggggtgatggtgacgggtgagatgactgtgaactgaggctgctggactaggaggagaatggctcaagacagtggtggatgctggccgctggagccggggcctttttggaggcttaggtgtgctcacaggcatcagtaccatattttg

SEQ ID NO: 584111 - DNA, 241 bp, Homo sapiens
tttggggggtaggtggcgcaccccacccacaaccccccgctccacgggtgaaaccctgtctctattaaatatacaaaggttggccaggcatggtggcgggcgcctgtgatgctggctgcttggaaggctgaggcaggagaatcgcttgaaaccagaaagtggaggttgcagtgagccgagattgcgccactgcacttcagcctgggtaacaagagggaaactccatctcaaaaaaaaaaaa

SEQ ID NO: 584112 - DNA, 1177 bp, Homo sapiens
  misc_feature (271)..(271): n is a, c, g, or t
  misc_feature (277)..(277): n is a, c, g, or t
  misc_feature (296)..(296): n is a, c, g, or t
  misc_feature (426)..(426): n is a, c, g, or t
  misc_feature (430)..(430): n is a, c, g, or t
  misc_feature (444)..(445): n is a, c, g, or t
ctctcgcactctgtacttccgccgctccgccgtcgcgtttctactgccggtcgcaatggaagaagagagtcgccgtcgctggtcaattgacaaatggctccggcagtgtgcaaagctggttttgctggggagcgaacgctccccgatgccgtgatttccttaccagtcgatcgggacgccccagatagccagggacgatcaatggtgtggctatggagaccaagaatggaacatcactaacagatgcgtggctgatcgcaagcgcctcatngatgancatagaccgttgtggccantacgcattggaccactagaaaaggtagcaccaccattttgacgtcgattgggctagtctgattccatcactaagcatgggtggaactggaacagttgtgacgcacaagcactactagtgggtcaacaccnaacnaacacatgttcttnntagcagaacttggagggcgtaggactgtctgcttaggactccacaccgcgggaagagtaggtccaacactccacgtttgacattgccatagaatctctgtaagaactctcgctcgcttggaaacactctcgaagggacgcaaaccagaagagggaagatgactcacgattatgtgtgacgaccttcaataccccggccatgtacgtggccatccaggtctgttgctgtccctctacgcctctgggtcgcaccactggcattgtcatggactctggatgacggggtcacccacacggtgcccatctacgagggctatgccctcccccgagcctatcctgcgtctggacctggctggcgggacctgaccgaatactcgatgaagatcctcactgagctgaggctactgcttgagcatcacggcgagcggtaaaatcgtgcgcgacatcaaggaagaagctgtgcgacgtctgcctggagttcgagcaggagatgggcaccgcgtatctcctctctctggagaaagtacgagctgccgatggcaggtctcaccatggatgcacggtccgggtcggagggcgtccactcttcggttgaactggggacgcggcacttgatcctttatgtgtggaccgaaacgtccacggggttgggcccattcggatggagaaaagatcctggcaaaaaaatagccacacatggggggcgcccatacagtataaagacccacagagg

SEQ ID NO: 584113 - DNA, 333 bp, Homo sapiens
caggactaatgtagatgcggacagggagtacatgcagtcctggacccccagagatggtctagggcataagggcctgcgaaggggctggcagcaacagaggctggagcgaggagaatgagaggccagagggaccatagtgccgggcacgcctgaccatgtcgcatggggcaggcgagacggggccatgaagaaggcgggacgggacagggggtgatggcagcctacctggagtccgcctaccccagctgttctcggagaaccaagtagctacacaggaagttctccaaggtccagtgtcctttctcccaccagttggtggaggcttcagtgggg

SEQ ID NO: 584114 - DNA, 980 bp, Homo sapiens
gcggccgccctattttttttttttattgggggtatcactcaaaacctaggtctacagccaggtcaagtgcctgctttattcaacaggaagcgctcaaggtgggactcaccccccacctttcacagttgtaaagtgaatagggagcaaggcaggaagctaaaaaaataatgcatggatctagacaattcaaaaaaacccttcataagatcagcttacggccaaaacgtggctcagggtgacagacacaaaagcagtgtgacagaaaagccttagggcagcctgagccagtgatgggcctagcggaagtagttgggagaacattcgtgagacaaccaaatgccagtgtttagatataaagggcatccacaaacagccggtatccaggggcccttacctctgtatgctgcacaagtatctggctccaggtggcaccaggctggaaatgcccaggatgaccgggtaccccgggggcaccctgacagtgtagagtgggggtaacatccacgcggagggacagccgaggtcacacggggggcgctggagccatatgacggccatgaagggcctactaccaccaacgccagggccctcaaagtggtgccccttccagaagcgacccggaaggatctcagcccagaattcccaaagacagcggaccacaggcgtgtacccgaacttgacctacaaacttgtacatgtgacagtcagaggcccccagaccaatgcgtcgtcggataaaacctaagaacaaagtgccagaagcaggcgaagaacccgaaaccacctgccagaagagggagtacgcaaattcccgtgccaccacaggggccagagtcacacctgtgcattgcgaaagtccaaaactcgggacaatcccaacatagcctagtccaaagagcaacccacaaatgaccactgtgagcagacaggcggaaaacggacctacagcgagacgacaagacgagtaccaagaactggaa

SEQ ID NO: 584115 - DNA, 159 bp, Homo sapiens
atccggtgtaattcgcgcggcgtaccatatcgtacaggttcaagtgaacagctctcatgtagaacatgtagtaagggaagtggcagcggatcgtaattcgggataagtattggtctaagggtggtcgaagtagtagggcggcgcgtacggagctcgaat

SEQ ID NO: 584116 - DNA, 212 bp, Homo sapiens
cacatgtacagatggttggacctactcatgcatattcaccagcagctggagcatctccacccttggtatctctggtgtacattactatgagctctgtagctattgaacaccacgtttgatacgctccttccactacaggacgctcctgcttgggctcgccctgtgccagggcagcctcgatatcttcagatctactcagaagaccgacagct

SEQ ID NO: 584117 - DNA, 481 bp, Homo sapiens
tgaggtggcactggctgggccagccctggagttgcacaactgcatggcgaaactgttggcccaccccctgcagcggccttgccagagccatgcttcctacagcctgctggaggaggaggatgaagccattgaggttgaggccactgtctgaaccatccctgtacatctgcacctttcttggttggcacgggacggtccttgggccttaaaggcctgggtcctccaaaccgggcgtctcctgtgcggacctccgggggtgcggggggttccagcgaggcagctgctacgggtaccttgccagggctccctaggagggaaacccacggacttccaggcagggcatcccaggaactgtgcggcacccattcttctgtgctctcccagcccatttccactcctacgttcgtcatggatacatctccgttcttccctgctgtgatctttcgccatcaacaactacaccaacttccgagactcgtac

SEQ ID NO: 584118 - DNA, 229 bp, Homo sapiens
tatcatcatatcatccccatccccatcattatcaccatcacaccatcattgctgtcatcaccattcaccatcactgtcatcatcaccatcatcgtcattatcatcatcatccccattaccactacattattatcactatctccatcaccatcatcaccatcaccttcatcatcaccgtcatccccattaccactacattattatcactatcaccatcaccatcatcacc

SEQ ID NO: 584119 - DNA, 154 bp, Homo sapiens
agagtgaaactccatctcaaaaaaaaaaaaaaaaaattctatcagccggtcttcatcagtggggaatatatttcttcagttatttaaaagaatcggcttgtcccaggggttatcctttttttttttttttttttttttattatatttttttttt

SEQ ID NO: 584120 - DNA, 895 bp, Homo sapiens
gtgacagactttacagaagtctagctgacattgtagtaccaaattcccttggtacgaattgtggaggatgacttttgcacaataaataatattactagtttccgccagcttcaagcttggatcattgtaatacattcatgcaacactactgggaaggggagcaagggagcactaggcacgctgacacgtgcaatgggtgataggacattcgactttgcagtgagcgccttggagaatgcctagttctcatcgcctagagactatcactcgtctctcatgggtacgcgatcgcgtttggcttattcatctatagtacagtttgtcttgtctttgacgaccggggaaaggctctttatgagcaggcaccggtgtcttccttgcgtgtattgcacgtggcctagcacgttatagaaggttagtgagtattcgtcgaatgaattagtcgagtatcacttatacagtcactttgcaaatttggtgcatccattcacttatgttctagagagacctgtttcccatgcattagtaattagtcctactgggaatgaagtttcataaaatctgtgcagacagggcatgcttgactagtgtgtgtccaggccttccaatatgtgctccagaatatcttctaaagggacagggacggatctgagtacaacataaatctgtgaagatgttcattgcagaactgtttatagtaatacaatgttaagaactgactaaattattcccatagtgggtgatgagcttaaagtagagatgtttgccttcattatggcataatggtagtgactaaacatcaggtcattaggagactatttagtgaataggaaggggaggttgcagtgattttgcaaaaactgaaactgtgatacgaaaataacctgtatggaac

SEQ ID NO: 584121 - DNA, 111 bp, Homo sapiens
ggtccaaaagtagaggacttattgttcattgtagttcatacattcaaagcattgaactgtagtttctatagcaagccaattacatccataagtgaagaaaagagtgcttgg

SEQ ID NO: 584122 - DNA, 517 bp, Homo sapiens
gacctgtggtaacacgtttgtgtgggaggctactttcactttcatcgcccagtacggcgctcagcgtgctgatgccctttcttacactatagttgactcccatgcctactaacatcatacttctaatcattattgaggcaccaaattccacacctcccaatactcttctcttgttctccacagtaatcaccagcctactagtcccaaggcctattatagtaaatacacctctcatgctgtgtccttccgttcccccaacgtccaagccgttggggtgaccgttcatgacactgtcaacttctacgttatcgccgcgggccccaacgcccataacaactatgccgttatctctttctaataatattatttctcccactcctcatcttacaaccatggttcttctatagtcgctcacaccccagttcacatctcttctataaaagactccttgtcccatcaccattccacccagaacaatagttaacgttctgctatcccccgtaaccgcatcgtcctc

SEQ ID NO: 584123 - DNA, 151 bp, Homo sapiens
  misc_feature (43)..(43): n is a, c, g, or t
  misc_feature (61)..(61): n is a, c, g, or t
  misc_feature (96)..(96): n is a, c, g, or t
  misc_feature (138)..(138): n is a, c, g, or t
  misc_feature (140)..(140): n is a, c, g, or t
ttccgcccctccccaggactcccactattgcctctgtgattgncccaggaggaaaacacgnccaagctcaagacccttcccctgccctgggctgtnggggtctgagtctagagcccccaaccctaggccccgtgccanangggaagaggcc

SEQ ID NO: 584124 - DNA, 133 bp, Homo sapiens
gtagaacaccaatattcgtagtcatctcttcaacagcacatcgcagcacatagcgatacacaacaaaaacctatacatcaaattcaagcaatgcaatcacatttaccaggcgataacatgacaacaccagcat

SEQ ID NO: 584125 - DNA, 1603 bp, Homo sapiens
  misc_feature (422)..(422): n is a, c, g, or t
  misc_feature (1597)..(1597): n is a, c, g, or t
  misc_feature (1599)..(1599): n is a, c, g, or t
tacattggccgtcctctctagggtggtcttgggcgaggagggccctgtggggaatcggggtctatatccccgatacatatttcggcctcaggggttcatacctgtggtttctcctgtggcacccgtggttgtgtcagaacccttccatcatttctcccgtgcacaggagggttgggaaatacgggtggctcgacgcccatagggtctccgaagtgtagataggggggagaacctttcgccgcgtgggagagagggcggcggggtattgatgggagcctgtggctcttctggggaagacactctcttcgcgaattcccttgcggttcttttctcccacactctcttcagatatattctgcggggataatttgtggggcgtggatacagtgtggcgtgtggagggaacccccatatacagaagngtgtggaatatagcggctctataatagaggggtacacgggcgctgtggagtgcaaattattataacgtgtgcgctgtgaacactgtggggaaacacaccaacccagaggcacctgtgttacacattttgtgctgttgcctctccgcaacccctttttctctctccttttacaaaacacaacagttcaagagtctcacaagaagtgtcctcattcacattttctctcataaaagcgttggcacagagggtttaacctttcgccgggtgggataaaaatctctctactttatagggggcaagcccggtggtgtgtttaaccaaatatacatttcttttcccgttgtgggggggctcaattcccctgtgtgtggggatagtagaaaaacccaatatatacttccgggtctcccttatttacctgttgtggaaaaccccaatttttctactgtgggttccccaaaaaaaacccttctcggttgttggggaaatatagacccttttttgttgtgtgcccccctgccgcggggaaagggcgagccccggcgtaattgttagaagtggcccgccccgggagcccaccggggctcccctgtggggcccggttagtccccgatatggtgcccgggagacatggagggagtcaagagaggaggaccataaaaggagccatggagacaaacaagagactagggacacaagaagaggaaaagacatggggtgaggatctcagggaccccagagagacccaagaggggaaacggaggagaaatggaagtacatgtcgcgaccccgtatggtcgaagaaaccggtgcggcgacaccccgcggggggtgggcaggggaccaacaagcacgaggagagaagagaggtagggactactacaagggccccctgggggaccgcgctcctacgcccgggcgcaatatcacagaaaatgcgcggaaaggagaacaccacggggcaaaaggagggggcccatataaatcacaggagataaaaaaacaggatgagccgaggcacaaacatgcatcaaacaaaggtggtcgaacacaggcagatagagtaaaaagagccaccgaatctagaaaggaacgacgacgaggatggaacaaaacaaacacaaagatgagaactacacaaacacatgacacagaacacacaaccacttatcacncnagac

SEQ ID NO: 584126 - DNA, 104 bp, Homo sapiens
tgtgggtgccttacacctacttcgctctctcttctacatgaaggctgtcttggttacccgactaggcaacgggcattggtatcacattaccgaaagtctacacc

SEQ ID NO: 584127 - DNA, 1103 bp, Homo sapiens
  misc_feature (310)..(310): n is a, c, g, or t
  misc_feature (524)..(524): n is a, c, g, or t
  misc_feature (535)..(535): n is a, c, g, or t
tgcatcacaaatagcactttttattggccactatttgaagtctgaactttaaacaaattctgggacggggggttcatatccatcagctcgtccaacttttagccaccgtgttcttcgttccccgaggtggcttttctccagaaacttacgtgccttctcaccagtgaaagcctccagtgagcttccccaattctcaaactttggggcttctctcgagactttttatactttctctaacgaaagactctcagtggaggaggattaaatatagatgtgtggacaacgccctttgtcttatatgtgtctcttntttctccaaatgtgcgtgctctgtggaatctcaattttatttgggacccacttctcttttcaagtctcattttgtgctctgttgcacctctctctgggagtctcatgtgattttcgccatctcaatcctctcttctccgcgggaatttgtggggcgggcacccgtgtgttggtgtggcttgcaggcccattagagagaggggtctttctcgcgnatatctcgtgnagtgtggtgagcgccgtatatttttatagtattaaaaccacaaagaccaacgagataacccagacagcgatagagccaagaggttaacaccccatctgcgggatatagtctcttgttgaaacatctcaacacgcgtgtgaacgcttttcaaatctcattgtgtgtctctgtgcgcatattttctgtgtgacgccccactgtggagacacacaccatttttgtgggctcccccgggggtaattagaagaatctcccaatgtgcacatgtgaggaaaggtttatggcctcaaggggccagggtttttatattcaacccgcctgttgtaacacacaatcctcctttctcgaggagtaaaacctccaggggtgttggggaacatttttctttcctattacaacaatgtgccgaccagctgtactcaagcttcaatgttctctcgtggccaaaacatctccaagggccagaggaaattctcgagctgtggtcaaagaaccgaacagaagagagaacccccctttggaaagacacccccatcttccgagaatgtggccaaacattattgtgggg

SEQ ID NO: 584128 - DNA, 365 bp, Homo sapiens
actggccgggcagtgcagcatttgcaagggacagagaatcatttcctgggggtctgaaaccaggatatggttgtggagagtgagggctgaggagggcgcatggcactggggtgaggaccaggaacctgcccaaagccacaggaccagccgtgcgtgccgggaagccaaagtcacatttctatgtgtccaggaaggaactggaaatcgcagactcctcattcacgtagaggaagtgcccacaccttagcctgctgggttggtgcttccctcccccaggctgccagcctcctgccccttcctctggcccacaaagtccgtgctctgtctccgccacctggctttgccatggtttgttagggtttctt

SEQ ID NO: 584129 - DNA, 111 bp, Homo sapiens
acctagaggatcccctaggtgccttagagacatcagacacagaattcatgccagctaggtaatcctttttgtggaaagcgctacgataagagattacgaatgctgaatggt

SEQ ID NO: 584130 - DNA, 757 bp, Homo sapiens
gtgacgcgctgggtattgtctggtttctaaatatacaaggaattcttcaaatagagaaagaggtaaatccgtcactgaaacaccgaggatgcccactggatatactaatctgaacatctgtaggtagttgtcatgaatcaagtggagagaagatgatagttttgaatgaatgaaaacgggtatctttgatacgccagaattccccccaaagtacgcggtatattcaaccatgctacagatttctctttcactcaaagtgttcaagcagctttgtgagatgatcaaaatcatgtctatgtgatctgtaagcatatgctagctaatccaaattgagctattttgtcagtattcttacatgttatttgtactagaagatttcccataggtcttgtgccagtcatagcagagaacttggctgtcattaccagttgttggtcctagtcatctaacccttgaaaccgattctaggtgacattgttagaattattacttaatatgttaaagagggtggacattgatagctataattcatgtgtaccaggtttgaagattcttctgtagtgaaatatatttctatttaatataacatgatcacatgtcctctatcatgaatgattgtagggagtctactcgcccagtggcatgttacaaaagtgtggtagggctataaagtgaagtgtttacagtttgtaacattttgctcgtgattacattggtttggaatgcttatgggggtataatgaatttaattgaatgg

SEQ ID NO: 584131 - DNA, 141 bp, Homo sapiens
gtgcatgacagattgggaggaaatctgagatctgtgtgtaaaattgatcgttcttcatgggggtaagaaatagctggtctggagttgttgaatgttgcgattaattgtgctgtttgcttgtagttgaataataatagaaac

SEQ ID NO: 584132 - DNA, 117 bp, Homo sapiens
  misc_feature (7)..(7): n is a, c, g, or t
  misc_feature (36)..(36): n is a, c, g, or t
  misc_feature (79)..(79): n is a, c, g, or t
  misc_feature (96)..(96): n is a, c, g, or t
  misc_feature (110)..(110): n is a, c, g, or t
ggtagtnacttcttacccccaattctagaaatcctnttcaaatccagatcagtggggcccatctatcaggagaatcaanccttcaggagcctgagnaagaaagatcgaantccaatt

SEQ ID NO: 584133 - DNA, 575 bp, Homo sapiens
aaagctgatcaaagctacatagtcccccccgtagaatagttcaaaagggttggcacaattcttctttgaatgtctgtagaatactgctgtgaatccatctggtcctggactttatgttgtaggtaatttttaaattaccatttcaatcttgctccttgttattggtctgttcagggcatctaattcttcctgatataagctaggaggtttgtatttttccaggaatttatccatctcttctaggttttctagtttatgtgcataaaggtgtacataagtagcctaagaatgatcttttgtatttcagtggtgtcagttgtagtatctcctgttttgtttcttagttatgttatttggattttctcccttcttttcttggttaatcttgctaatggtctattaattgtatttatcttttgaaaggaccagctttttgtttcatttatctattgtattgtttttcttgtatcagtttcatttaattctgctctgatcttggttatttcctttcttctgctaggtaagagtaagagaagaaaagtatctctagatcttgaggtgtgaccttagaatgt

SEQ ID NO: 584134 - DNA, 416 bp, Homo sapiens
gcagtgggtatcaacgcagagtgcccattacggccgggtagtgatcctcctgtcttagcctctggatgtgctgggattacaggcatgaaccactgcacccagccaaaggtgtataacattaattctggccgggtgcagtggctcacacctgtggtcccaccactttgggaggccggggtgggcggatcacggggtcgggagattgagaccagcctggccggcatggtgaagccccgtctctactaagaatgcaggaattggccgggtgtggtggtgcacgcctgtggtcccggctgctcggggggctgaggcgggagagttgcttgggcctgggaggccggaggttgcagtgagctgaggttgcgccactgcactccagcctgggtgacggagtgagactccgtctcacaaacaaa

SEQ ID NO: 584135 - DNA, 953 bp, Homo sapiens
ggcgcgcggaggaggccaagatggggcagtgcggttcgctttcgcggggtagtgttgggcccgcgggggcgcggggctccgggcgcccgtgccccggggtctggttgttgcagggggcctgtgaagtccccggtagcgggacaccctcagaggcgaggggggcctttgggtcgccgagaggtttgggccttttccggggggccggaaatggttggttcggttggcacaggacgttgggaacattggtgcgcagacaaggggtggttgcgaggagcttggcccggggtggctcataggatttcggcttgtagatgtcgcagttgactttgaatggtttgaccccccccaaggttatcgtgtggctctcaacgggtggcctccatcttttcgtgtggacccaacacccgaggacaatcggggaggggggtcccccgggaggaaatataacgcagggtgtgcgctcgttgcccaagcaggatgtgacttggtgaccataccgggcaaacgatgggggggcgtgtgcaacccggggagacacggaagccatcaggaacgctgggactgggagagaggtggcagggtccaagagaaggggcccacagggacagcatgcgggcgaatctccatgccggcggggacagcctggtccgaatatttcccaaagatctataccccaaagagtgaattgttggttcggagttgccacaaaatggtggatttgccccttgggacttacggtataattcgccgagctacgcattgtgagagagacacacctcttctcccttgcccgcgtttactgggagccccccagctgggttcaatgcgggaaggtcaattaacccttatttctgggcaggatttgctggctcccattacaggtttttagtttgcatgcccctgtccattccagagcagagtttggctttgcgggcttgcaagcacataacttg

SEQ ID NO: 584136 - DNA, 481 bp, Homo sapiens
taccagtgagtgaaaactatgagaataatatatacatctttgacatgtcgtcactgactcattgcaaattgttatttacagacacatgcatgcatgcacacacgagcatacttgtacctttgtctctgggcaaacaggtgggactgttagtgacccatttgggaaaatagagcatctcagagaaggaggtgagttcttcctgcctgtgatttctcttggcgctcccctcctctcccgctctggcttctgtggcggcagtggtgggtaagcactccagtgttctcttaatgaggcactttgcctgtcactcgagcaagcctgggtattccttcctcctcatgctcctggaatagggaatagggatctcatgcttgcaaactacacaatgctgcaggtgcttcccaggggccacaggctgtcaggaaacgtgttttatgttaagtcacaaacccacttgacttctgggtactggaattaatac

SEQ ID NO: 584137 - DNA, 705 bp, Homo sapiens
ccgccagaagagaggtgtagtgaaaagtacccctagatagccataaatgggaataggaaaaagactcatatcaacttggtcgtcattggacacgtagatgcgggacaagctccaccactactggccatctgatctataaatgcggaggtcatcgatccaaaagaagccaatcgtaagaaatagagaaggacggctgctgatatgggactagggctccttcagagtatgcctgtggtctgtgtggatatagaacctggatacagctagacgacgtgaaccgtggtatcgaccatagatgatctccttgatgcgtagaattatgagaccagtgatagttactactgtgactaactcgattgtattgccccgaaggactacgaggaggactttatcaaaaacatgattacagggacatctcaggctgactgtgctgtcctgatggtgctgctggatgtggtgaattatgaagctggtatctccaaggaatgggcagacccgagagacatgccctgtctggcttacacactgggtgtgaaacaactaaatgtgtcggtgtttgacaacaatggattccactgagccacctacgagccagaagagatatgaggaaaatgtacggaagtcagggttacttacgaaacatcggtacaacccgaaccgagcgggtgtgccaattctggttggaatggggactaatgctggacc

SEQ ID NO: 584138 - DNA, 402 bp, Homo sapiens
cgagtactatctaggggtaactgccagcccctgtttgcgcctacctggactaagtgagagacttgtcattgctaaagcatataaggtagctccagggatttctgaaaaaagacacaggcttcttcctagagccagccctatataacatgcccacaagggcaacagtcatcacagttcataacacaccttccatgtcctgtctcgctcactcctcacagccatcctaggagatacatattgtcttcatcctgcatttacagaaaaagaaatgaccccagagagcttcaataatttgccacagaaaatgtcgaaactaggcctttgaaccaaggcagtctagggtaaaaaatagtttcacagtatgaataagaatcgagatctgagtaaactttgagtaagaaa

SEQ ID NO: 584139 - DNA, 154 bp, Homo sapiens
ttgcccttagcccactctttaccacaaggcaacaccttacaaccccttaatccccatactaagtaatttatcgaaacccatcagcctacttattcaaccaatagcctgccgtacgctgaccgcgtacattactcatgcacctactattactatt

SEQ ID NO: 584140 - DNA, 393 bp, Homo sapiens
ggcagcattgtgcggggtaggcctctcccaggagtaacagtccccattcacctcaccctcctgtgtgctcccctcccctcaccccgttcctctccctcaactggcaagtgatctctgtccctcgcaggaacccggctctcaagcaggagctctgctcctatgccattcttggtttggccctctctgagggcgtggggcttcgctgtttgatggtcgccttcctcatcctcttcgccagtgtgaggctccttggggggtcaccgggctgtaggtactgcaagtccagaccattcttggtgctggggggtgtcaagctttaccattaaacacaaggtttccctaagaaaaactgaatctcaatgccctggaacatctcggagcaggagctggaag

SEQ ID NO: 584141 - DNA, 170 bp, Homo sapiens
gggtttcctctcagtcatctgatccagagaggtcacgtgtcatcatcatctttagtatctgtagctccgacttccgtgtagatgtcttccacatcggcagggaccatatgagcccaaagcttgcttcactcctggcaggctggccttttccttttcgcaagacttgatgt

SEQ ID NO: 584142 - DNA, 651 bp, Homo sapiens
cagagtcgtcccgcccccagaaacgagtcccgtagcagactcatggcaccgccccgaatcgggacgcacaatggcaccttccactgcgacgagggactggcatgcgcagtgcttcggctcctgccggagtaccggggatgcagaggattgtgcggacccgggatcccgagaatagattcgcttcctgtgaacatcgtggtgggacgtgggcgtggcggagctacgtacgcctcggcaggacgaccggatgatgacgcatcatcgcagaggtcatttcgcagagtaccatgagctccctggtgccctgtggaagccgtggcagtaccaagcttgacgcagtgcgggactcatctagtctgtacattgcgggtcacaagactgcctgggcccagattgctggggcactagatgaagcaggacagtcatggttgggcaccactctatgacaagatgtatgagaactttggggatggaggtggcatgctgttggactagatgggatctcccagtggcagagggggagcctcgatatgcactggagcaatatgctgagtgcgcgagttgctcgcagttaatcctacctggaaccagcccgagcgaagacagtgaggccaggcttcaagctgtgcaatgggagtctggttcaagagg

SEQ ID NO: 584143 - DNA, 335 bp, Homo sapiens
aaaattttcggtagtgtttcaaattgtcttctgaacaggaatttaacattggttttgatgaaggtgagggtcagttctcaagatttgtgctaatcataaaatgaatgaatgcaaaacaccttgtaatttcatatggaattataaaaattaggtttgctgggttttggcctaataagagtgctagtatgtattggttagaatacatcttactatttcacattttaaaaatcagtacactcttcaggattttcttttatttcaacttggagcttaaattacttccccccatgtattattttcataatgcaaaaaaatataaattagaatattaaaaa

SEQ ID NO: 584144 - DNA, 936 bp, Homo sapiens
gggatcacacactccaacccacctcggtctcccaacagtgtcgcattcacaggcgtgatcccctgtgctcagaccgggttgtgacactgttcgtggaaaagcaactgtcagtacttcagcacacatatatagaacgaagttcaccaggagccgtcactcaccccccaggttgatgctgttcgtacacaaacttactgtctaaggatcaaaagaatcgcacacagacatgttcgatcatatcgctgtgcataggtgtgatcgagatgcgtgaagctggaattagcccctgcccgtaaagggaggcatgcagccgcgtgtccatcaaaggcatgctgtgtgtcggctccaatgctcgtgacttagctcgcggatggtggtcgcgggcggccccacgtctagtaggtagcacacgagcactccgtgcttgccgagggcgtaggctccggagtggcaagcggcgcattcttgaggaagacagatatggtcggggtcctaaggttcccctagcgacgtgagtgggacgtcaacaagggcatggcggtgatgttaatggtgaagcagaaatgatccattttattctagtagtgtaagagacatagtcaattgtctgaaatcctggctagagaaaataggactgtaaatgggcgtcctcctagtcactagcagttgtacagcaaatgagcagcaggggtcactaactcttgcccatcatttcaacacggggctgttgacagtatttttaggctgcaatgatttgccttatcttttatcccaggacgctatacagtgggactttaaaaatcatctttgggataagaatcccgagtcaccgtgagggatgtgaattgaagtcgctccaaggcagtcaagcgcagccatttttctgcagagtcagtgactagttgcacaggagatcaaaattgccactcagtggaa

SEQ ID NO: 584145 - DNA, 411 bp, Homo sapiens
tggaccctccccgggtttaagggcagggacttgcgcccccggcacctttgggagttgggattataaaaattaggcttgcggctgtggcccgctggtgggtttagccacaaggcccccaatggcccaggagcaaatgggaggaccccgaggccaaaagcacactgtccgagcccttttgttcaaccgcttgggacccaccagggtgcagttgggctccagggtccagcccccaagctgcatcagggtttttgggaaaggaggggcctggagggccaggagtcccaaactcacgccccctgggccccagggagccgggaattggggcctgctgctcctgctggcctggaaaactttgtggggtcagccctgtactccgttgctgtttttttataaaccccctcttggaagtga

SEQ ID NO: 584146 - DNA, 116 bp, Homo sapiens
agttcataaaagttcttgagccctaaattttttcccaaaaaaaaaaaagttcttaagtcatccattttaattgggtaaaggttgttcacctaaaggaataaatgtcttttaaccta

SEQ ID NO: 584147 - DNA, 1145 bp, Homo sapiens
gccgcgctgtgctagctgtcggagatggtcggggcttcagcacctcgtgtcgtcctgggaccgcgtgacaccccacgctggggccgatgcccaacagtgatatcgacttgagcaatctggagcggtgtggagaatgtacccggagcttcgagcgcctaccgtgtgccgagcatagcacgcgaggcgctagggccccagatagcatgggtgtgcggaccgtaccgatgagtatttcaggggagtaaggactacgatcccataaggagacagattgatattggggctgcctccaaccaaaagtcatcccggtacctcaaccatgttactggtaacggaaagacgatggccatccgaggagctacgggccaactgttggaaggaggtaggcgtggactgcctcagctcttctcgccaagcagaccgagtggtccccggctggagtgcccgatggcgagggccgagggtggggagatggaccattgtgggccgcctaccgagaaagtcagcagtcttggctgagtacttagcgggcatctaccgagaactgttccacggtgcacagctttgttgccccgggagtccccttgcacgtgggcctacgactgtggggttgacggactgatgcctgaatgccctgttgtactggtgggcaagtgacggttgacttcccaacccgtaggtctttgcccaagctgcccaggaagggtgtacagtacttaagtgcccagacatgagcgggcttcccttggctagggaccagtttggcttaacatccaacgtaaagcttttgtgctttggcgcctaaccattggcttgggaggctcaagatttgccttggaagtaacccttccgcgaggttggggcttggctagaggccaaaaggggttcccccgggggtaaaacacctggggagtttgggctttagacattgtggaacgcaaagggggttggccgcgggttggttccccgtgtagagccgttacgccgcgcagcgactgggtacccagtttgggccgcaggaagggggcttccttgcgagaatatcccagacacgcgcatttggcgcgtataccatgggggtccattcccaaagcgcgaggggaaccccaagacgcgggaatttggagcttctccgtcttagaggg

SEQ ID NO: 584148 - DNA, 107 bp, Homo sapiens
cctgggtcccatttatctgctatttcacttggtacagtgttcagtaagccacgctcaaccacagtcagaaaatattaaatggaaatttccagaaataaacaagtttt

SEQ ID NO: 584149 - DNA, 160 bp, Homo sapiens
gaaaactttttttttaaacccccctttcattgttttagtcaaagcaggattattaagggattatttaaaattcgtttttttaaattagcaacttcaaggaaaaccactttgaaactggaaaaagggtttattttctattaataaaaatgaattgtgccca

SEQ ID NO: 584150 - DNA, 1047 bp, Homo sapiens
tggttgcatgtcccgtgggctccgacgagtatgagcagaagtttggttagcgatggtccagccgtgctgaggtggcctcaagatgttgcgaggccctgataggtcagagaatgaggggcgtaccatgattccgacaggtgctggcggtctccccatgaacttgtctgcgtagtcttgttgatgtgtgaagtatgctagtacgctgttaggtcttggaggtgcgaagggaggtaatcttaattgatggtacagttgtgggagaaatcatggacagatggctgctggttggtgtggaaatgagagtggaaactggtggatactatgggataggggacatagtgtgcttaactgtaggagttttgcagaggtgtaaaatggcggagctgtcgtatttaagtggcgtgtgaagttcggccgagaaatgagtttccagtgtgtgtattgactgtggtacggatttaagtttgtagtcttagagtggagtgagggcgtgctcttaatgcgaacttcgataatacgtggatattctattggttattgccatatatggtcgctggtccggggaggggattttgggatctgaggatggcgtagtgggaaggcattgggctgtgttgttgacgtgaggtttttactagttttgggaaatgattgaatgttcggtgggtaatctatgcaagtgcgcttgagtgagattggattataaggtgaagggatggagcgtcattgaataaggtgcgatatatgggacgcatggttcggaatggccaagatatttgaattgtgtggggtttgaaacgaagaggtgggtcttggatttttcgactgttgtgttgttatataaaaaggtatccagagggtggtaagcggaattgtctgattttcagtaagtttgccactaggaagctgggctagggtggtaattgcaggattgggtagttatgaatagtttcacctgttttgtattcttacagggtagatcattttggatagctgtaaattataaatgaccttttttgtcggcctacgagtattacccaagggatg

SEQ ID NO: 584151 - DNA, 870 bp, Homo sapiens
  misc_feature (202)..(202): n is a, c, g, or t
  misc_feature (648)..(648): n is a, c, g, or t
gatggcggatcgtctggagagccagtagacgaatcgaggaacgactgtctggtcattaagtaggagctgctggatgctacgtgacgctttgtgacatattagacgtgtacattcacaggtctaggagtcttgtgagacagaagatcacgagaggggcggcgatggtcgaccaagcgaagctacatgctgaacgtgaggtagntctcgacggagcaaacaaagcaccagatgtgaaacatggtcacacagtggcaacgcatggatcagagtacgtgcatacggtaggtagatccactgccgtggtctctgtatggtagctactgtatcgcactcggaatgactccctcatactagacttgtcctgtggttcgtgcatatccacgtgggacgaaatctccaggcgctgttcctgaggatcgatcgagaactggtggggagctaatagaaatcatggtatagagtaacgaggtatagaagatatgttgttcttcatggcagttggtgtaacgttggttgcagccaaattcgcttcgaggaactcggtgaagatcgaatggtgagaatcagtctaggttgattcaaaagtagacaataagactctagtggtgttcatgcatcagtacgcatgcgcaggacacggatgaaatngcgactcatatctacccaagagcagaggtgtaccggaatacagtgtacattatgatcaaactcatcgtatggagagcacgcgtagcgatgcggggcccgaaatgactatgtccctggccctccggcctattggcttaattttcggcaaagagtttctgctattccccttgggacccctcaataaggggttatgggcccccaacgggcggtcctatggaatcc

SEQ ID NO: 584152 - DNA, 178 bp, Homo sapiens
ccgccgtacagttgcgacaacattggcttgagtgcagccgccgctttaaccagtgcaaactgacacgcggcaacggaggtcatctccgtgatgaatcgggccaagaaagcagggaagtcagtgggagtggtaaccaccaaacgagtgcagcacgcttcgccaggcgtgaaccttacgc

SEQ ID NO: 584153 - DNA, 363 bp, Homo sapiens
gtttgatttaaaaaatggaataactagcaaaactcaaagtcccaaaagcatgagaagggtacctaaactttgaaaggtctttataagattcttcctactttgccatatccagaacacattatcaggaaccaagactaggatatatggttttcacagtgctttgaatactcccccaagtagcccattttcctttgaaaattccttgagtcaccagttgtttctgcttaaggtggctctgctttgctcctcattgcatttgagctggacattttgtcagtttctgcttttcatgggaattaaagtcaggctaccacacacacacaaaccatagactgggtgacaaagcaagactatctccaaaaa

SEQ ID NO: 584154 - DNA, 292 bp, Homo sapiens
catatcatctagccgttccaggatacagctataccactggaaggaccaatttcgatccatccagcagtgggaacttgaatgactcagtgatacgtcatgcacgggttgctctgaggttaacaagacctgtgtgctgaattattctcacaagactcataccaccaagatggaaaatgaggaatgtaatgagcaaagagaaagaaagaaagaggagctggcttcaaccgcagagaaaacggagcagaaagaacccaagcccctagagaagtcagtctccccgcaaaattcagat

SEQ ID NO: 584155 - DNA, 308 bp, Homo sapiens
atcacaactagggtcagtttgcaggtgtaagccatttaccaagatagtgtaggtaaagaagggcagatttattagagaaatgtgaaaatatgttgcagtgggcagctcagcagagaaggggctacctgcaaagaggcgagggctggaggaaagttttatagggtcctgctgaagggtgctacgtgtggaatgaggtcattgtgcccgcaggttgtttgtgattagctgtctctgacaattgctcatacaataattgttcattattgttctcaacttggggctctccccaacctggggacccttcctta

SEQ ID NO: 584156 - DNA, 164 bp, Homo sapiens
aataatgatagctactttctggtctttgttcttttcttgtatcaccatattggatcaaggtagataacgattgctagtgctccatagaccagtgtagaggctgtgcacttggaagagtggcctgttatggggttctacattatagctcaagaggaaggaagagg

SEQ ID NO: 584157 - DNA, 440 bp, Homo sapiens
  misc_feature (338)..(338): n is a, c, g, or t
agtactaaagaggttagcttttggttgtttcattagatgcgagaagatgcaggcccaagagtcgggtgggacagccaggctcaggcaattgggtaaatgtgtcggaaagaaaattagacatgggaggatcaagaccataagacactagctcattagagatcaagaatccaaatgtgacattcatatccgtccagggccagcacagattcataacacgaattccatttaacatctttatgagcatttaagacatgcatttaattaaagtttccttaccagttaactctacgggggcaagcgttctaaagggatccacatcttcaaattacaagggctgnagagttacatgaatgtgtggtgtaggggggtggtctcaggggagcaggggaaaagacatggcagaggaagttggtaaaagagggtactttctcctgaggaga

SEQ ID NO: 584158 - DNA, 539 bp, Homo sapiens
cgtggtgtgtcaggcacacgaggtggggagattgaactactggatcaggctgcgatgtctggtgtcggtggttcgtggtggcagagaatacaggttctggccggaggaggagtagtagatttctcctctagttcttctaagttcttctcctccagttgtggtttcagctcttcagtctttgtttcagattctggctcaggttcaggttcatgagaggattcttccaaaggctcctctatgccattagtcacagggtgagcttcatagtaaccactgttagcattttcttgcacaggttcaggagatggttgtctttcttcttgttcctcttctacttcatcttctgattcttcatcaagttcaggctcagaatcaccaaacacttcatcttcataacgaaacatatcattgtgaacataaaatttatttggaacagatccttcaggagccagaacaaaggtttgcataaactttctttctggttgtccactgttagacagcaaacccatgacctggacaactactccatcactcaaggt

SEQ ID NO: 584159 - DNA, 159 bp, Homo sapiens
cttcagggtactattctgatagcttccggaacaaaccaaggcaaagctgcctatgtattggatacccccttgatgagacgggtgaggcagacccaacggcacatctcaacggtgaaatatcatgaacactttgataaacacaagggttgcttcacacca

SEQ ID NO: 584160 - DNA, 518 bp, Homo sapiens
  misc_feature (106)..(106): n is a, c, g, or t
  misc_feature (242)..(242): n is a, c, g, or t
  misc_feature (247)..(247): n is a, c, g, or t
cttcaaagagccttagaaagccacgtgtttatttgcagccaaaccactcaaacctcaagtttctggtttgaatgaactacatcaacccagcggtggcgaaactatnacttaggtgcatcttcctgcgcaaagcctcccaaaacatgggggcccctggccgcaaaacgccgcacccacggatgggcctttgctgcggaaaaggctgaggccaagggaggagcagggaatcgtccaaggtcatntgggnccgaccccggcgctttccacggcccaggagggaaggggcgtgcgcaccgggaggcctcctccccgcgcccccgatgggacccccaagcccggcctggccgctgcagggaggccggccccgccgccctcctcgcccggatcgacccctcagtgcccggctgccccctaacccgcctgccggcccggaccgccccaggatcccgcgtacctggcaaggcggaacgcagcggcccgaagcccaaggcaaggcccccacagggggcgagcggccg

SEQ ID NO: 584161 - DNA, 450 bp, Homo sapiens
  misc_feature (265)..(265): n is a, c, g, or t
tggtagccaggccttctgcatcagcaaatggctggatgtaatcgaaaaagggttcccatgctccaggttccattaacttggggttatccaggattttcccatatccgagggtggagatgttaaagaagcccttagaaagcctccttagaacccttataaagacaggatgttttgcctttaaaggggcccgggccttgaccttaagcctccgatttttccttaaaaaccgtgggcccaatattgaaagggaaattttttcccttgnccgggttttaaaaagggtttttcgggaaaaaaaaaaaaaaaaaaatgggccaaaaaggtatcctgttggttaagtctgggggagcccccgtttttaaaaagggttaaccttgaaccaaccatttttaaaaatttttgggttggaaaaggttttcctttaaaaaaagttttttgttaagggtggga

SEQ ID NO: 584162 - DNA, 160 bp, Homo sapiens
  misc_feature (149)..(149): n is a, c, g, or t
cggctcctttgccttccaggacctcagccaccctgggccccagggtctccacagacgcaggtggccctgcagtaagaagagtccaccacctttcttatcgccacagttaagaacaggagggtctcctctgacccaatcttcattggcanagatattcatg

SEQ ID NO: 584163 - DNA, 160 bp, Homo sapiens
aacctgcgtggaatccctgacgctaccgccgtgatgcccaggaagacatggcgagctggaagtcaactacttccttaagatcatccaactagttggatgattatccgagatgtttcattgtgggagcagacaagtgtgggctccaagctagatgcatgca

SEQ ID NO: 584164 - DNA, 87 bp, Homo sapiens
acatctgtgtacttctgtgccagcagtgatagacaggggaaaagctacgagcagtacttcgggccgggcaccaggctcacggtcaca

SEQ ID NO: 584165 - DNA, 134 bp, Homo sapiens
aagccaattgctcttccattgtctaagccgggtcgacaggttggacggcacgcggtgcaggcgctcggcggcacgggtactggagccctcttccgccacagcctggaaaatgcgcaattgactgaactccatta

SEQ ID NO: 584166 - DNA, 170 bp, Homo sapiens
ctgtatcccgtaaggaccctggggtatgctggttggctccctgagcagacatgcaggaaagaagaagcccttcgatgtacacccagtgaccaggctgtcctaaaccgggccttcttcccttgcttcgacactgcctgctgttaaatacaatgtattcagctcttattgag

SEQ ID NO: 584167 - DNA, 427 bp, Homo sapiens
tgcgtctgggcgttgcatgatgttgttgctaattatatctgccatatgtgtgttaaagtaaattaaaatggagacaggcctgaagaatccctgagcagacaaaaccagttgggcctcatcagtgacctaaaccttacttgatttgcagcataagcaaaagttaacttgggctatttcttgtaaatgcctgtattaaagaaaaacagaacttaagcccaaccaatcagaagtagccagccaactcataattatataactaggagctttccagcaagatagactaaatgagatcggttataactgtaacccatcaaatattttcttttttttttatttttttttttttttttttttttttttttggggaaggggatttttttttggcaccggggggggaatggggaaggggggaaatcggggtttgggg

SEQ ID NO: 584168 - DNA, 168 bp, Homo sapiens
gagatcgtgccatggcactccagccggggcaatagagcgagaccccgtctcaaaaaaaacaacaataacaacaacaaaaaaaaacaagtgcggggtgtatccctggggacggaggcatagctacaggatccgggggacaggagacgcatggcctatcaggaagtagcc

SEQ ID NO: 584169 - DNA, 930 bp, Homo sapiens
  misc_feature (696)..(696): n is a, c, g, or t
ctcagaagcccaagtacctgtatctgtccaagtgtttctttttgcgtatggattgtttttttgtgtgcttatggatcttgacctctgtgtaacttttttctctagtcattttcattttctctacctctttttgatcttcctaaacttgacattatatggaactgaaacacctcaaaaactgttttgtttaattaagtgctgggattttaatttaaaaaatgcttgaaatgaatatctcatttatgtgattacagaatactaaacagccttatcataagcagcctcatcaaaaccccctagggtagtgaaagtgatttgtagtttcttacaatattctcaataagtaaaaaggctttttaaacccttgtttgaagtttttgtctcctactcagcacactgcaagttgcacaggcccatgttttctattactgtcttttttttcttttttaaaaaatctgatgttggataactagataatcttaatcccccttctttattcctattgtccagcaatacatctctaacgttttcattaatgacgtgtatgtaatttttgctctgtttccctgatgccttgaaccattgtcatgtttagctcttatttctgctttgccacacatattcagactgtattaatcctcgcgttcttcttctgggtaccacattagaaagaaaagctaagtgcaattataggtnccctggttattttgaattgcgttttaactatacctctgatgtattcgggttgtaggggcgacgcggagctaatctgaatccgcttttcgggccaaatggggtcctggcccggtttaacgctggacgcgaatccttcccaaacaaaatcgggcggggggctccggcggcggcgggaccggcggaatctcccgccgcctggggggctcacaacacagtttttttttatccctttct

SEQ ID NO: 584170 - DNA, 1460 bp, Homo sapiens
gagataagtacgagatggtggatagttgcatctgactcatgcacgttgggcttcggctgtcgtgcgtcacagcgctgtccccgttttggcgagctgcattcagtcgcacgtgtcagtgctgatactgccatgaggagggttagatagaacgacctgtgaaaccgcgtacatctccagcatgctgttacctggtattacagagcagtgaggagtgctacgccctgagcatgtgcagcatagatgtcactgtacatttggcgttggaatacggctgatggatatgcgaccgcaaggagggactcgccattccaactcgaggcacttagacacctacggccgtccaactacaatctgctgccggcataacagatcacgaacatacagcggggcagcgtgggcataggacagcgcggttcgtgctacttagtaccttccggcaagacaacataaggattgcgccacctccaggtccggccggagcctattgtcattttagactgataagtgaccacagggcgtggattcgcgtagggagtgaaggcctagagaaccaggacagcgaaataccactttcgccgacgcctccgggattcccctagacaatggaacgcaacctagggacaccaacagagctagtttccccattggtctggttaaaatacataacgcgcatcccaaatgccctacgctgtatgcagaccctgaaaccgtactagccgtaggacgaagtcgaccgcagaccaactgcgcgaggcgcaatccggcgggccatgcgaataggcgtaacttcttggacgagccctacattccttcctggccaggaggacagagcgcacaagcctagcaccaggagttcccatcgaacataggtaggattcatcgctgtagaaatgatcaattgcgcacattcgtagggcacccattggaacacaataacccatgctacaaaaggcataactatgcccgcttggcagccacctcgggactgcacacacatgaattcccctagggatcttcgtaacgctgacactggcccccgccactgcgtgcgctatgtcgttggccatcattttgcgacatgcggccaaagtgaggatctgagaatataacgcttggggagcaaacgaagaccgacgggcgagcgcaggttgggcttagacagggattaacatagcggaaacaccctagcgaatcggaagcggcatcccatgttgagcactacgacagatagactgcagaccaattccactccggcgaaccctaggacctatatcaactacacctagacgacccacctaaggaaacgtcacttgacggaccctcatcacaggcgcacaccaaagcggcactgacaaccactgcgcgcacaccacgaggcaacagacaacacatcacagcgagatgtacacacacaagagcagcacatcaccaatcaccatagacacttggctcacacacga

SEQ ID NO: 584171 - DNA, 111 bp, Homo sapiens
taatgatcaagatccttacgttactctgaacagatacagaacaatatgaacgtgaagatttcttgattaaggccagttataatcttataggttgtggcccagctgaacagg

SEQ ID NO: 584172 - DNA, 388 bp, Homo sapiens
  misc_feature (9)..(9): n is a, c, g, or t
  misc_feature (12)..(12): n is a, c, g, or t
  misc_feature (14)..(15): n is a, c, g, or t
attcgcggncgngnngacagacagagtcttgctctgtcgcccaggctggagtacgctggcaagatctcggctcactgcaagctccacctcctgggttcacgccatcctcctgcctcagcctcccgagtagctgggactacaggtgcccgccaccacggccggctaatttttttttttttgtatttttagtagagacaggatttcactgtgttagccaggatgggctcgatctcctgacctcgggatctgcccgcctcggcctcccaaagtgctgggattacaggcgtgagccaccgcacccggcctaggggtgcaattcattcttatttttggctggagatggagccaggggctcaggagctgggcagagcccatgttgacgcggccg

SEQ ID NO: 584173 - DNA, 950 bp, Homo sapiens
tgttctcccctccgcagcgtgcggcgtgtggcgtgagaaggaactcgacacgcaccgaccgccctaccgccccagtcgaagcgagaagctagtacgacccgctctgggacggggccatgggcgccccgcgccagctcgggtcatgacgacggaggcggtaggcagtcggtgccgccgctcgagcccggggcactttgtgcaactgcctgtgcccgtcatcccatcagctctaccactgggactgtggcctggcctgctccaggatggtgctgctggtacctgtgccagctggacgacagtgagtttgagagagtccctgcacgatagctgcagctgaccaggagcatctggaccatcgacctggcctacgctgattgcaccgatgtttaggcgtgcatggcaccgccttcgtgtatcccgagtacccttggtgttgtcgacatagggctacaagaaccagtccttctacatggaagcactttgtacacatgatagagacccgggtgacatcacgctgtttgcacacagcaaaggcctgcaaggtgctggtggatgaatagtgctcagttgagttgtgccaggacatccaggcgcacctggctcagtggccatgtggccatcgtgctggtgaactcgggggtgctgcgctgtgacctgtgctccatgccctgtcaatgtactgctgcttcaaccccagtggccaccactgcttctgcccgtactcctgactaccagggccacgttcatcgtgctgcgtggctacaaccgggccactggcttgcatcttctacaatgataccaggctattgccggacccaggaagttgtcagcaccaggcatcagtaacttttgaggaggcaaaaccagttattgcacagattaaggacatctctttgctactgggacgttgacgggtggacctggtgccctaagcccggaacccatccacc

SEQ ID NO: 584174 - DNA, 528 bp, Homo sapiens
cttggctcctgtggaggtgagtgaagggtctgctgctgaaatttgggggcaaataaccggagtaggtttgttcctgtgccttggcgagtcgccggtgcgtatcggagtctctgccagccattgatttctacgggtttcaagaagagggagaacaggatggaggagatgttgggctgatggtgtttggtcccctgtacacccggagaacggctgcccgggttatcccagttaaattcctgggcctgaacggagtgaaacgatgtttttgttcgtgtgcagttgtccatgaggcagtgcttccttcatccgtttcctcccagtccataccttccttggcttgtctgaccagtctctttcctcagcttttctcccccagccattgcataaaagtcttacgtgtgtgtttctctttaaggcttcatttcttttcctgagtgttgcctactgataacggcatgcattttctcaggcttttctgagagtcatttttgtgactcctgtcccttagtttgtcttcattctgaagtc

SEQ ID NO: 584175 - DNA, 367 bp, Homo sapiens
  misc_feature (342)..(342): n is a, c, g, or t
atatgtactacatttggtggaatacgcatgtacaattcttcaaaaatagtaaagagcaaaacaaacaaaaaatagtagaagcactggagaaatacactatggcataaactagttacgggtgggatgtcacatggaccatatctacactctgtggcaaccttcttacctgactccaaaggatcagataatcaaacaggaaattatggtaggaaatcagaaaattgaagtatgcattcatatcctaagcattttattttagctcaaaatataaaatattcatcagttagccaagctttgggatgagagatcatagcctcctctttgataggggtttcttgtttncttgatttcatgtttcagagttttt

SEQ ID NO: 584176 - DNA, 230 bp, Homo sapiens
ctaacctagacgaatgaaattacttaagtccctttcatatctgatactgttaaactatctataccaactggctactccccaggtgtctgtgaaccctttaaaactgtatgtaacattgtgtgacttaccgtgcattttttgagaagagttaaccaatagctttattccttctctattttttaagaaatggccccacttttttctccaagttctggggtgtgcagggtgtg

SEQ ID NO: 584177 - DNA, 222 bp, Homo sapiens
taaagaggtagtaaagtgtgggcagtagaggctcccaagtttggcactaccatccccaggcttagccctgctgacgaggactctatgactttgagccagaaaaccaaggttaattaggatttaaagacggggacatcattacattaaccaatcaagtagatgaaaactggtatgaaggaatgatacacggagaatcgggattcttccccattaattacgtgg

SEQ ID NO: 584178 - DNA, 227 bp, Homo sapiens
tccccgacgagacacgatgggaaagtttgctcgagacaatgaaagcctatgggaaactttatcgctatatactataatccacacagggaaaggcacggcactctgggtgagactgggaaggtcctcagccattcagcaccactgcggactagctccgtccccatgggcccgtcaccccgacaggatatgcctcaccaacgcttcattgtttatacaaccatttgctg

SEQ ID NO: 584179 - DNA, 569 bp, Homo sapiens
tgggacccctggctgcagaggagctgccccctgtgggagactgagctgttctattgctcgataaacccctcttcatcttgctcatcctccacttgtctccatacctcattcttcctggtcgcagaacaagaactcaggacctgtcgaatggtggggctagaagagctgtagcacaaacagggctgagacatgccccctgctcgccacactgtgggtgaagagaaggagaggacagctgtagcccttcagggagcccagacctgggagctcccggagctaggcctgtgactccatctttgggaccctgtggttcctggtatctccaaacttccaggagctaccatgttcctcagtgtcaaccatggaagctgcttgcagtgtgtctggtctggccgcagcctcacagagagcccgcacccatgctggcacctggagctgcccaccctgctgcagcacccagcgtgcctgactggtgtggccagaccccgtgctcctcacacacccctcgccactccatgcctgactcgcccttggcaggcatgggacccaggctggtagtgtgagccaaa

SEQ ID NO: 584180 - DNA, 229 bp, Homo sapiens
ctcgcgaacgtgttatccctggaatggcttcatgtgggctgctagtgagtttcattaattatctgcaagatcagatggatattctcaagagagatagataagcttcatgatacattgtgtcaccgtctgctttcttacctctatcctagccctgactgtcccaagtcctagactttatcgtatatatccatctctaaacgggtttttaaagccctcaacacttgatcct

SEQ ID NO: 584181 - DNA, 218 bp, Homo sapiens
  misc_feature (20)..(20): n is a, c, g, or t
cggcacgctaggatgtggcntatcaaaatatacaagacaatggatgtttatataaaaccactttataagctcattgttcccaaaaacctttttttctttttggcctgttaaaaaaaatgtgggttagtaggcctagtatgaggagcgttatggagtggaagtgaaatcacataccaaggccaccacacaccacctgtccaaataggccgcatccaaag

SEQ ID NO: 584182 - DNA, 956 bp, Homo sapiens
  misc_feature (30)..(30): n is a, c, g, or t
  misc_feature (851)..(851): n is a, c, g, or t
  misc_feature (859)..(859): n is a, c, g, or t
  misc_feature (864)..(864): n is a, c, g, or t
  misc_feature (875)..(875): n is a, c, g, or t
  misc_feature (880)..(881): n is a, c, g, or t
atccttaattaaattaatctcccccccccnggggatctcggactccctggaccctccctccagcccagcctcgctagctccgcctgcggtacgtgctcccgcctccgactcaaaatgcctgtctggggaggtggaaacaagtgtggggcctgtgggaggaccgtgtaccacgcagaagaggtgcagtgtgatggcaggagcttccaccgctgctgctttctctgcatggtttgcaggaaaaatttagatagcacaacagtggcaattcacgatgaagagatctactgcaaatcctgctacggaaagaagtatgggccaaaaggctacggttatggccagggcgctggcacgcttaacatggaccgtggcgagaggctgggcatcaaaccagagagtgttcagcctcacaggcctacaacaaatccaaacacttctaaatttgctcagaaatatggaggtgctgagaagtgttccagatgtggggattctgtatatgctgccgagaagataattggagctggaaagccctggcacaaaaactgtttccgatgtgcaaagtgtgggaagagtcttgaatcaacaactctgactgaaaaagaaggtgaaatctattgtaaaggatgctatgcaaagaactttgggcccaagggatttggctatggccaaggagcaggggctcttgttcatgcccagtaagatgtaaagcctgaactaaacatccaacactgagaatctcttcataatctaggcacagataatctttaacactaaactactgtgaaattctaccagcattaagtactgtatatcgccctgtacttggataggctggtaactcgtaggagagagcnctgttggnatccnttgcttattcnccgcnntttgggggaacattttttttacattttaaaaaaaacttcagcttgacaaacaaaaagaaaaaaaaccgggggctt

SEQ ID NO: 584183 - DNA, 477 bp, Homo sapiens
ccccaaagtatccctatctatattttagtctctaacagaatcaagtaagatacatagcttgttcatatacgtggacaatcttattagagctatgtacgaacatcagaattatctgtgatcgaacttacttgtcattggcacttacagtctttcctattctagccgttgtttttgtttgtattttttattattaatgacatatttagtcttcagatatattatgtaaaggcaccacacatgtaaaacagttattacaaatattttatacataaatctcttggtagattttcagaataatagagatttatatcaagaaaaggaatctagattttgttgcattgtaggagcaaacaaggcttcatattctttttaaaatgacttgaaattttattataaatttccatagtttctatcaaggtcaactggcagttttattacctttgctatggacttgaacttactgtataaaattagttg

SEQ ID NO: 584184 - DNA, 926 bp, Homo sapiens
  misc_feature (30)..(30): n is a, c, g, or t
  misc_feature (821)..(821): n is a, c, g, or t
  misc_feature (829)..(829): n is a, c, g, or t
  misc_feature (834)..(834): n is a, c, g, or t
  misc_feature (845)..(845): n is a, c, g, or t
  misc_feature (850)..(851): n is a, c, g, or t
atccttaattaaattaatctcccccccccnggggatctcggactccctggaccctccctccagcccagcctcgctagctccgcctgcgctgtctggggaggtggaaacaagtgtggggcctgtgggaggaccgtgtaccacgcagaagaggtgcagtgtgatggcaggagcttccaccgctgctgctttctctgcatggtttgcaggaaaaatttagatagcacaacagtggcaattcacgatgaagagatctactgcaaatcctgctacggaaagaagtatgggccaaaaggctacggttatggccagggcgctggcacgcttaacatggaccgtggcgagaggctgggcatcaaaccagagagtgttcagcctcacaggcctacaacaaatccaaacacttctaaatttgctcagaaatatggaggtgctgagaagtgttccagatgtggggattctgtatatgctgccgagaagataattggagctggaaagccctggcacaaaaactgtttccgatgtgcaaagtgtgggaagagtcttgaatcaacaactctgactgaaaaagaaggtgaaatctattgtaaaggatgctatgcaaagaactttgggcccaagggatttggctatggccaaggagcaggggctcttgttcatgcccagtaagatgtaaagcctgaactaaacatccaacactgagaatctcttcataatctaggcacagataatctttaacactaaactactgtgaaattctaccagcattaagtactgtatatcgccctgtacttggataggctggtaactcgtaggagagagcnctgttggnatccnttgcttattcnccgcnntttgggggaacattttttttacattttaaaaaaaacttcagcttgacaaacaaaaagaaaaaaaaccgggggctt

SEQ ID NO: 584185 - DNA, 120 bp, Homo sapiens
cgagcgtacttgaaaatagagtgtcaagcagcgagcgctgatacgactaggatatggatagacgcgtctatttgttgtttcgcactgagcatgataagagggacgccgtggcatcgtatg

SEQ ID NO: 584186 - DNA, 825 bp, Homo sapiens
  misc_feature (30)..(30): n is a, c, g, or t
  misc_feature (720)..(720): n is a, c, g, or t
  misc_feature (728)..(728): n is a, c, g, or t
  misc_feature (733)..(733): n is a, c, g, or t
  misc_feature (744)..(744): n is a, c, g, or t
  misc_feature (749)..(750): n is a, c, g, or t
atccttaattaaattaatctcccccccccnggggatctcggactccctggaccctccctccagcccagcctcgctagctccgcctgcggtacgtgctcccgcctccgactcaaaatgcctgtctggggaggtggaaacaagtgtggggcctgtgggaggaccgtgtaccacgcagaagaggtgcagtgtgatggcaggagcttccaccgctgctgctttctctgcatggtttgcaggaaaaatttagatagcacaacagtggcaattcacgatgaagagatctacaacaaatccaaacacttctaaatttgctcagaaatatggaggtgctgagaagtgttccagatgtggggattctgtatatgctgccgagaagataattggagctggaaagccctggcacaaaaactgtttccgatgtgcaaagtgtgggaagagtcttgaatcaacaactctgactgaaaaagaaggtgaaatctattgtaaaggatgctatgcaaagaactttgggcccaagggatttggctatggccaaggagcaggggctcttgttcatgcccagtaagatgtaaagcctgaactaaacatccaacactgagaatctcttcataatctaggcacagataatctttaacactaaactactgtgaaattctaccagcattaagtactgtatatcgccctgtacttggataggctggtaactcgtaggagagagcnctgttggnatccnttgcttattcnccgcnntttgggggaacattttttttacattttaaaaaaaacttcagcttgacaaacaaaaagaaaaaaaaccgggggctt

SEQ ID NO: 584187 - DNA, 264 bp, Homo sapiens
  misc_feature (32)..(32): n is a, c, g, or t
  misc_feature (35)..(35): n is a, c, g, or t
ggtcgactactactactaaattcgcggccggntcnacgtggcaattcacgatgaagagatctactgcaaatcctgctacggaaagaagtatgggccaaaaggctacggttatggccagggcgctggcacgcttaacatggaccgtggcgagaggctgggcatcaaaccagagagtgttcagcctcacaggcctacaacaaatccaaacacttctaaatttgctcagaaatatggaggtgcttgtcgacgcggccgcgaatttta

SEQ ID NO: 584188 - DNA, 833 bp, Homo sapiens
  misc_feature (409)..(409): n is a, c, g, or t
attaggatgactatatagtaatgtaaggaaaatcagtaaatctctggtagttggatgaaatgtgtacggtcacacgctcgataatcggtgagattttagatggtaacagtttcgtgggaagagtagttgggtgaacgagtggggatgttcaaggtttggtaatgctagtaaatagtacatcgtacatgctactgtagtagttataggttgtataagagtatgtatgcattcttctttatgatgctaatgaaattcaactgtgattatggtgctaacaaagggcgagagttgtacttggtattagaaaagtatgtaagtgaatgttctcacgatgatgattcgttggtaaaatctctttagaatagacgttgttatgatgtgaggaacctattttctgaagagatacttncatccttagtaattgatgtttaaagggtaagcattacagatgtatttgaatgtattagatgctagcgtaagggttattagataagtgaggctgagaacttaagtcaaaagcgtctattgaggtataccattgtatgctagtttcaatttggaaagttggtctttagtggaaaaactaggagccataaagaatatttgtgaattatttgggaccttactaggttcgaaagggtatatgaatgtttgtttttagaaaggtatggaagacgaatgttgtcttcttacttatatagagttcattaatgttgaagtgtctaaaaccgtgcgactatttgagagaatgaaagatcatgttattaccgtaagttattgttacaagggtcttgaaattttgaaagaatttaagatgggggattcataaatgt

SEQ ID NO: 584189 - DNA, 646 bp, Homo sapiens
  misc_feature (30)..(30): n is a, c, g, or t
atccttaattaaattaatctcccccccccnggggatctcggactccctggaccctccctccagcccagcctcgctagctccgcctgcggtacgtgctcccgcctccgactcaaaatgcctgtctggggaggtggaaacaagtgtggggcctgtgggaggaccgtgtaccacgcagaagaggtgcagtgtgatggcaggagcttccaccgctgctgctttctctgcatggtttgcaggaaaaatttagatagcacaacagtggcaattcacgatgaagagatctactgcaaatcctgctacggaaagaagtatgggccaaaaggctacggttatggccagggcgctggcacgcttaacatggaccgtggcgagaggctgggcatcaaaccagagaggtgagttgggagaccgttggttaccttcagaaatgagttgcgacagttagtgccgcttgctgaacaggaacctggcagtctccagatttttagttgaaactaagcaaataaaatgggactctgattttctaatgtcaactagttcaaaatattgagttttggacctaacaaagttcttattaataattccagtgagccgagatcgcgcccctgccctccagcctgggcaacagagcaagagactccgtcta

SEQ ID NO: 584190 - DNA, 162 bp, Homo sapiens
ctgtcgctgtcatgcctgtagtctcctgaagatgagatgctttcccaggacttcacatcccacttctatcaggtttcaccaacagggaggaagccctgtcaagatctggtgtgtcctgttttttattttttttttttttttggggcagttagaggcaccatg

SEQ ID NO: 584191 - DNA, 345 bp, Homo sapiens
  misc_feature (291)..(291): n is a, c, g, or t
  misc_feature (328)..(328): n is a, c, g, or t
agttcgagcaccgcatggccaacatggtaaaaccccatctctcctaaaaataaaaaaattagctgagtgtggtgacatgtgcctgtagtcccagctacttgggaggctgaggcatgagagttgcttggacccgggaaccagaggctgcagtgagtcgagatcgcgccactgcactccagcctgggtgacagagcaagactctgtctcataaataaataaataaaataaataaatggttttgcatataataattcaataaccccttacaataaccctgtgaggaagagatangctactactattatcctcagtttaactttatgggaancaaactgaggcccagga

SEQ ID NO: 584192 - DNA, 172 bp, Homo sapiens
taaagattcccggcacgaatgcgccatgttggacgtaggtgacttcaccttgacagcattgaataccatgctgcgtaaggggggccgcgagcttggggtctattgcaaggaacagcaggaggcagccctgactcgcatggcgaaggacactataacgtacatgggactctca

SEQ ID NO: 584193 - DNA, 847 bp, Homo sapiens
ggaaaaagagaactaatcctcgactttatttgtattcttatgtttggtctagtgtctctataagttcttttttcttcgaatcataagcgaagtcatgcgtacggtataggcgcctcccagactggtagatcgggctccatacacgcacatctctgagctggaacactacaagattagccctcgggtgtgcctttcgatggggcgctagtaggcccctagtagtagcatctcacttatccatacatgtggagacccctctgctgagcggaacaccgcgagcggagtcgcgcacggagtgcctatcgaagacccacgatgacgagaagaccagggcccgcgcgtccgcatacgcgcgacagcggtcggtgcgcacaggagatgcggtaaccaccagaggcatggtggccaacagcggatagaacggcctaggagctcgacagtaaagtggcgtgccaacccttgtcactctacacctagagccacaaatacctcacagcgtgccctgtatatatacccagtgcgtcgagcgagacccaacacctcatccccgccgcatccgtaaatacaaatcgcgaatggggcccccgaagggcaggcacacctcgaggatacaataaacgtggagaccccccgataggagcaacaaactagaagcgaacgggaccgaatgggccaccgagaatggccccacaagagcacccgcacgcaaggtggtcgtggaactggagccgcccagagggcgcaagacaacactaccccaggggaaggctcccgaaggtgcatccgaatgaacacaaccacaggtggcctccacaggggcaacccaccaggggaaacacacgaaaac

SEQ ID NO: 584194 - DNA, 187 bp, Homo sapiens
  misc_feature (126)..(126): n is a, c, g, or t
tgctgctgctgagtcgatctaaggatccccgcgctagcggcattaatgacgggtgtaggccagtggcgatacctccagctcgacccaagcctgggaacctacatatgccatgggtgcagcactaanaagacgaaaaaaaaaaaagaagaaggaaagaaagaaaagaaaaagaaaaattattaactac

SEQ ID NO: 584195 - DNA, 1558 bp, Homo sapiens
  misc_feature (182)..(182): n is a, c, g, or t
  misc_feature (305)..(305): n is a, c, g, or t
  misc_feature (1146)..(1146): n is a, c, g, or t
gctcttctagtgcctctgagtcaccatatgagacgtcgccgcctccctggactcgccatctgtcccacaggtcatctcgtggggcctcattatagtttcaagcatgacatgggcgagctcgccaggagtccgtggcagatgcgtagggaccgcagtagcgccgtgtggataggcccctcagngagctggatcacggaccagccaagacgcacccttcattctcacgcacctcacacagcctcctatgacctgagggacctacgcgggaaccctcgcaggcaggcctggagcattgatagcttagncatcactggacctctagagcaacgtaggtcccgtcgctgctacgatcatactatcgctgcttgccataccacgtggcagaacgtgtgcactggctagtattacgaaacgcagagttgattcccctggggctctatgggggcgtgcgactccacctgtgagagaaatgcctaggctaagtgcgtcaaggcggaaagcaggggagccgcatggcgcagagctgatttgctagtcggggcgtactttgcctctgtgctctatccgcgttaccatcttaggtggagcgaaatcgatccgattgggtttccaccgtcccccgtagcgcaagccgttggtggattgcgacgcacgctctcgtgcgagtcccttagggggcccgttcctagccccattgtgcgccgtcgcattgatctcttggttgccacctcggttcgggctatgcacgtggccttgcgattggtgggggatgggcccgaagacgcgccccaaggatttccttcggcgcccatacacgaatccttgagggagggaggggcggccgcgcattggcacggttatgggggccccgacaaggcctgggcccgcgggcgtgaacagcgaggtgccggggtgtcggttgagccggccattgggctttggattgtgaaccccagggttgccctggtggcgcccccctgttcacccccgggtcatattagtgggtttggtgcactcgggaggggggggagacgtcgtcctatcctggcccgtggtgtggggcttttcgcccgatttccatggggcgccattccccaaggggctcaaacaagttggcgttggggatagagtccctcgaatttcgcnccctgtgggggttttccctgggcccttggtcccccacagggcgcgtatggcgtccggggaagtggcgcgtgggcagcgaggccgccggggaggggaggggccccaagggaggcgcggaagcgggggccaatctcagaacatggcgctcccgaagcaggcggggtaccacagggggggagaaagcggacaaaacaacgtgtgtgacccccggacaaccgagggctcctatcaccgcgaattcacacccactggctataagcacatggggaaaacacactgtcaaacacaagaggcacgtaatgacacgggggaaccattcgaacacaccacggggggaagaggaacaggcgcatagggcacaaagtaggggaacaaccctccacacagtagcattgacaaggcgaagttcagc

SEQ ID NO: 584196 - DNA, 214 bp, Homo sapiens
  misc_feature (45)..(45): n is a, c, g, or t
  misc_feature (213)..(213): n is a, c, g, or t
tcttttgagaccttgggaagggcagccccagaggaggctggctcntagtcacagtctagtcggcagtgacatgaacagcagccctcgtggaccagggtctgccccctgaccaggactcactgtgactcttctcttcctcacataattcctaacctggaaattaaaacaaaacaaaacaaaaccccaagctagctggctgtggaggaagtgaang

SEQ ID NO: 584197 - DNA, 787 bp, Homo sapiens
aagcactggttattacaatgggatctggtgtctcgattctaccctgctagaagcctcaaaatacttcgagtctcccttcaccattcgacgacggtctgtacggctcaccatttgtgtatccagaagcttcctaccggacgtccaacgtctgtatttggcgtcaactttttcacgtcacctgatcttgcgttgcgattccggtcatcttaagatttcacattcactagtccatacacatcaatttttgtgagcatctgattgccaggccgactgtatacgtgggcgatgttcgtcagatcgttggtctttagacttataactcctggtatgtctccaatcatattagatgatgcggtcgttgcttctatttacagaacacgcagatagatagttggctctgagaacggcagtgaagcccaacatatactatacccgctgtagagctggggcggaggaagaaccgcgagggctactggaggcagtctcctgaaagatgcagcgagccaggccgttggcggcagcgcttctgctggccaaggaacaactccaacgaaagcgacacgacattgaacgggagtgacgtagagggagtaagcaacgcgcctatgtaccggccactgaaaaagactgccactggggccctgggaaggacaatatcgcgcttgaaagcacaagggaccctgttagggaatctttcagtggccgctgtggttgtcgtggccccgacaccgggaagggccaaccatcatcctggtgaagctttcctgagagaactcacctcccctag

SEQ ID NO: 584198 - DNA, 1501 bp, Homo sapiens
aaaaacactataatgccattactattattacaaattgtttagaaaatagttatgtttgcaaggagggatagggaacgtatataatcctgtctctccagtagtagctatttttacctttgtgaaattcctcatagtctttgcctcaattgtacaaatttttatatgatgtatctagaattttttctgcctttaacctcctaatgtatcctgaacacctttctgttttgctgccagtcatcataattatcattttaaatgatgcatcaccgtcagttgaatggatggactggagtttaattgactgccccttccttatgtgagctgtgcgaggcagccatggcgcctgcaaaggaggcagaatgcacatgaggacagggagaggagagggggcaaagaggctcccatggccagctgcacctcacagtcgttctttccattctacctgctctgtgggggcatccctgcagctggcttccagtctgcaccctcttggtggatgggtatgaaggacaggtgccctcttactacactctcatcctgtgccaggcgctgtgcgtagtgtattctctcaagcaatcctgccagtcagagcttctcctcactttacacacacaggcactggaggaggtgaggacaagaaggaacatcttcacccagagccttgagggccacggggcagtagggcctcagctcattctatctggcccagtctctgtgtccacttgacttaaccatgtggccatgttaattccatcttgaaggcagggagaggtcatgggcagccccactcccccttatggcactctgatgtccccagtcacggctctgggtctctctccacagccttacgacagtctgcctacctcacagacctgcttcttccagctgaggctgcccccgtactccagccagctggtcatggccgagcgcctgcgctatgccatcaacaactgccgctcaatcgacatggacaactacatgctctcgagaaacgtggacaacgccgagggctccgacactgactactgaccgtgcgggtgctctcaccctcccttctctccctcaataatgctcacttctgatttgatgttgatatacttttatggtaactacatagatgttataagaacataaaccaacattataaacaatggccacatttagttactctaaatgtaacaaagaaattagatgtttttatttttctgtgattgtacaaaaacaacaaaaacgaagtgctctcagtcaggtttttccctccatatttttggtcacttttgataagtttgcatgaaaccattttggtgcatttttagttgggaatggtacatttttgtaaatccacccagtgaacatgaaattgtacattgtgtataattgttcattagaaaggacagttttacatgaatattcatatatttattttgttttaatttgaattgcctgttcagggttccttatgcagagaaataaagcagattcaggaattggaaaaaaaaaa

SEQ ID NO: 584199 - DNA, 388 bp, Homo sapiens
ggttgagtcatcacattcctgctgatcaagtagcctgatcagtcctacctgttttgtgttccttgtttttatccttaaaaattgtgagtttgttattgctgtgccgtatttgtatgtaaaatactttttgctgtcatttctaccatgtaataaaaattctgttttcttctgttcctagatgattcctcttgattcttttgttggccagagtgctgatggcaaaatggttcctataatccctggtggaaatagtatcccactcacattttccaacaggaaggaatatgtggagagggccattgaatatcgacttcatgagatggacagacaggtggctgaaacatctcgggagttacacatgaatgcttgggtttcctcaatactgcga

SEQ ID NO: 584200 - DNA, 2160 bp, Homo sapiens
  misc_feature (254)..(254): n is a, c, g, or t
tgaacacacacttgctttggcatcaaatggaggtgtgtatgcctgggggagcaattcagaagggcagctcggcttaggccataccaaccatgttcgagaaccaaccctggtaacaggtcatgcaagggaaaaatgttcggcagatctcggctggccgctgccacagtgctgcatggacagcaccacctgtcccaccaagagcaccaggtgtgtcagtacctctgcagctgggcctgcctgacacagtgcccccncagtatggggcgctgagagaagtcagcattcacacggtgcgggccaggctccggctgctctaccacttctctgacctcatgtactcatcctggagactgctgaaccttagccccaacaaccagaacagcacatcccattataatgctggaacttggggcattgtacagggacaacttcggcctttgttagccccaagagtctacactctgccaatggtgcgctccataggaaaaaccatggttcaaggcaaaaactatggacctcagataactgtaaagaggatatcaaccagaggacggaagtgtaagcctatttttgtccaaatagcgagacaagtagttaagctgaatgcttcagacctccgcctgccttcccgagcgtggaaggttaagctggttggagaaggggctgatgatgctggaggagtgtttgatgacaccatcacagagatgtgccaggaacttgaaactggtattgttgaccttcttataccctctcccaatgccaccgcagaagtgggttacaatagggacaggttcctttttaacccttctgcctgcctcgatgaacacttaatgcagtttaagtttttaggaattttaatgggggttgccattcgcacaaagaagcctctggacctccacttggcccctctggtgtggaagcagctgtgctgtgtcccactcaccctagaggacctggaggaggtggatctgctctacgtgcagactctcaacagcattcttcacattgaagacagtgggattaccgaggagagtttccatgagatgattcctcttgattcttttgttggccagagtgctgatggcaaaatggttcctataatccctggtggaaatagtatcccactcacattttccaacaggaaggaatatgtggagagggccattgaatatcgacttcatgagatggacagacaggtggctgcagtccgagaagggatgtcctggattgttcctgtgccgctgctgtccctcctcacagcaaaacaactggagcagatggtgtgtgggatgcccgagatctctgtggaagtcttgaagaaagtggtgcggtaccgtgaggtggatgagcagcatcagctggtgcagtggttctggcacacgctggaagagttctccaatgaggagcgggtgcttttcatgaggtttgtgtcaggaagatctcgactaccagccaacactgctgacatttctcagagatttcaaatcatgaaggttgataggccttacgacagtctgcctacctcacagacctgcttcttccagctgaggctgcccccgtactccagccagctggtcatggccgagcgcctgcgctatgccatcaacaactgccgctcaatcgacatggacaactacatgctctcgagaaacgtggacaacgccgagggctccgacactgactactgaccgtgcgggtgctctcaccctcccttctctccctcaataatgctcacttctgatttgatgttgatatacttttatggtaactacatagatgttataagaacataaaccaacattataaacaatggccacatttagttactctaaatgtaacaaagaaattagatgtttttatttttctgtgattgtacaaaaacaacaaaaacgaagtgctctcagtcaggtttttccctccatatttttggtcacttttgataagtttgcatgaaaccattttggtgcatttttagttgggaatggtacatttttgtaaatccacccagtgaacatgaaattgtacattgtgtataattgttcattagaaaggacagttttacatgaatattcatatatttattttgttttaatttgaattgcctgttcagggttccttatgcagagaaataaagcagattcaggaattggaaaaaaaaaa

SEQ ID NO: 584201 - DNA, 600 bp, Homo sapiens
cctgaaaggtaccattttgaccctccaggatcgattttctcactccaattttatcatccaaacattgattttgctggaaggatttgtctggatggtctcaaattgccccccaaaggtgcttggagacctccctcaacatcgcaactgtgttgacctctattcagctggtcatgtcagaacccaaccctgatgacccggtcatgggtgacatatcctcagaatttaaatataataagccagccttcctcaagaatgccagacagtgggcaaaaaagcatgcaagacaaaaacaaaagggtgatgaggaaaaaatgcttgataatttaccaaagggtggtgactccaaaggacccaactccacccaaaaaaggaaggccagtcagctagtaggcataaaaaaaaaatttcatccttatgtttaggggacctgtcccgggtcattttaggtaaagtgttttttgccaaggggatttaaggtgccccccctgaatttttttttaaaaaaatttgaagacaaaaattttggggaggttatttattttggacaaaaggattttgaaatttttttaacctgaaaaaaaaaaagtcctttaatgttga

SEQ ID NO: 584202 - DNA, 1672 bp, Homo sapiens
agcaggtagcttacgatccgttacatagttcttctcaaaaatcagttcagaatatcagtccatgtgctgtgtgaaacaataactacggtccacatgtggctttagagaactcaacgtgtgattcagggaagccgccgcaactgaatttttcagttttatttaattactttagccttatgtggctaatggatgccatattgaacagtacaggtatagactaacgctcatagcggtggttgctcaacttcatttctaatagaaataaggaaaatgctgttgaaatattccctttaattttacaggttcctttttaacccttctgcctgcctcgatgaacacttaatgcagtttaagtttttaggaattttaatgggggttgccattcgcacaaagaagcctctggacctccacttggcccctctggtgtggaagcagctgtgctgtgtcccactcaccctagaggacctggaggaggtggatctgctctacgtgcagactctcaacagcattcttcacattgaagacagtgggattaccgaggagagtttccatgagatgattcctcttgattcttttgttggccagagtgctgatggcaaaatggttcctataatccctggtggaaatagtatcccactcacattttccaacaggaaggaatatgtggagagggccattgaatatcgacttcatgagatggacagacaggtggctgcagtccgagaagggatgtcctggattgttcctgtgccgctgctgtccctcctcacagcaaaacaactggagcagatggtgtgtgggatgcccgagatctctgtggaagtcttgaagaaagtggtgcggtaccgtgaggtggatgagcagcatcagctggtgcagtggttctggcacacgctggaagagttctccaatgaggagcgggtgcttttcatgaggtttgtgtcaggaagatctcgactaccagccaacactgctgacatttctcagagatttcaaatcatgaaggttgataggccttacgacagtctgcctacctcacagacctgcttcttccagctgaggctgcccccgtactccagccagctggtcatggccgagcgcctgcgctatgccatcaacaactgccgctcaatcgacatggacaactacatgctctcgagaaacgtggacaacgccgagggctccgacactgactactgaccgtgcgggtgctctcaccctcccttctctccctcaataatgctcacttctgatttgatgttgatatacttttatggtaactacatagatgttataagaacataaaccaacattataaacaatggccacatttagttactctaaatgtaacaaagaaattagatgtttttatttttctgtgattgtacaaaaacaacaaaaacgaagtgctctcagtcaggtttttccctccatatttttggtcacttttgataagtttgcatgaaaccattttggtgcatttttagttgggaatggtacatttttgtaaatccacccagtgaacatgaaattgtacattgtgtataattgttcattagaaaggacagttttacatgaatattcatatatttattttgttttaatttgaattgcctgttcagggttccttatgcagagaaataaagcagattcaggaattggaaaaaaaaaa

SEQ ID NO: 584203 - DNA, 272 bp, Homo sapiens
cctgaggatcccaatgtgtggtgttatgtcaaagatagacaatatcaccccatagtgaaggacttctttgacatcataatgcgtaagaccgcatctttttttacatactgtaatccttgttattacaccatttttgtaaataaaaattcaggttaattaatgaacaaaacgcaagttattctttccacattaggttttgcatatacatgaatttacacactttgcgccagctggttgaatatgtgtcgtactccacataacaccacacaatt

SEQ ID NO: 584204 - DNA, 1027 bp, Homo sapiens
  misc_feature (1)..(1): n is a, c, g, or t
ngtaggttgtctcatcgaacgcattcaaatattttattaccaacgcccacaattgtttaggttggcatcgcagtccgagaagggatgtcctggattgttcctgtgccgctgctgtccctcctcacagcaaaacaactggagcagatggtgtgtgggatgcccgagatctctgtggaagtcttgaagaaagtggtgcggtaccgtgaggtggatgagcagcatcagctggtgcagtggttctggcacacgctggaagagttctccaatgaggagcgggtgcttttcatgaggtttgtgtcaggaagatctcgactaccagccaacactgctgacatttctcagagatttcaaatcatgaaggttgataggccttacgacagtctgcctacctcacagacctgcttcttccagctgaggctgcccccgtactccagccagctggtcatggccgagcgcctgcgctatgccatcaacaactgccgctcaatcgacatggacaactacatgctctcgagaaacgtggacaacgccgagggctccgacactgactactgaccgtgcgggtgctctcaccctcccttctctccctcaataatgctcacttctgatttgatgttgatatacttttatggtaactacatagatgttataagaacataaaccaacattataaacaatggccacatttagttactctaaatgtaacaaagaaattagatgtttttatttttctgtgattgtacaaaaacaacaaaaacgaagtgctctcagtcaggtttttccctccatatttttggtcacttttgataagtttgcatgaaaccattttggtgcatttttagttgggaatggtacatttttgtaaatccacccagtgaacatgaaattgtacattgtgtataattgttcattagaaaggacagttttacatgaatattcatatatttattttgttttaatttgaattgcctgttcagggttccttatgcagagaaataaagcagattcaggaattggaaaaaaaaaa

SEQ ID NO: 584205 - DNA, 757 bp, Homo sapiens
ggctcccgaggtgccgggattgcagatggagtctcgttcactcagtgctcaatggtgcccaggctggagtgcagatggcgtgatctcagctcactacaacctacacctcccagccgcctgccttggcctcccaaagagccgagattgcagcctctgcccggcgccaccccgtctgggaagtgaggagcgtctctgcctggccgcccatcgtctgggatatgaggagcccctctgcctggctgcccagtctggaaagtgaggagcgtctctgcccggccgccatcccatctaggaagcgaggagcacctcttccccgccgccatcccatctaggaagtgaggagcgtctctgcccggccgcccatcgtctgagatgtggggagcacctctgccccaccgccctgtctgggatgtgaggagcgcctctgctgggccgcaaccctgtctgggaggatgtctccggagaggctgactaaactataaacagtatcatagaacagtccacgaaggaaggcagacttcatccactgactcttgtctgccattgactgaagttggtctcacaggacaccaacgtcctcgtccccttgatctgggcggtctctgcaggcagggcaccaggagaacggatcccaagccagtggttggcagctcccttgtcccaactggaggcctgaaattccaggccttgttgaaggtgacgcaggaggggcaaatgtggggtccgagaaggtcatgggagccgcaggagtgtccac

SEQ ID NO: 584206 - DNA, 1013 bp, Homo sapiens
  misc_feature (37)..(37): n is a, c, g, or t
tttcccattccccgttcctcatcctctatcgccccanacacttattctggtggctgcagtccgagaagggatgtcctggattgttcctgtgccgctgctgtccctcctcacagcaaaacaactggagcagatggtgtgtgggatgcccgagatctctgtggaagtcttgaagaaagtggtgcggtaccgtgaggtggatgagcagcatcagctggtgcagtggttctggcacacgctggaagagttctccaatgaggagcgggtgcttttcatgaggtttgtgtcaggaagatctcgactaccagccaacactgctgacatttctcagagatttcaaatcatgaaggttgataggccttacgacagtctgcctacctcacagacctgcttcttccagctgaggctgcccccgtactccagccagctggtcatggccgagcgcctgcgctatgccatcaacaactgccgctcaatcgacatggacaactacatgctctcgagaaacgtggacaacgccgagggctccgacactgactactgaccgtgcgggtgctctcaccctcccttctctccctcaataatgctcacttctgatttgatgttgatatacttttatggtaactacatagatgttataagaacataaaccaacattataaacaatggccacatttagttactctaaatgtaacaaagaaattagatgtttttatttttctgtgattgtacaaaaacaacaaaaacgaagtgctctcagtcaggtttttccctccatatttttggtcacttttgataagtttgcatgaaaccattttggtgcatttttagttgggaatggtacatttttgtaaatccacccagtgaacatgaaattgtacattgtgtataattgttcattagaaaggacagttttacatgaatattcatatatttattttgttttaatttgaattgcctgttcagggttccttatgcagagaaataaagcagattcaggaattggaaaaaaaaaa

SEQ ID NO: 584207 - DNA, 237 bp, Homo sapiens
tagatttgttcgcagggggacagagtttcactgtctcgccaggctggagtgtaatggtgcgatttcaggtcactgcaccctccgcttcctgggttcacccgttgtcagcctccagagtagctgggactacaggcacacagcaccatgcctggctaattttagtatttcgagtagagagagtgtttcaacatgttggccaggctgatcttgaacttctgacctcaggtgattagccca

SEQ ID NO: 584208 - DNA, 297 bp, Homo sapiens
gagagttttctaattacgtttacaaaatatcttccctttggcccatacaagtggtgactgccatgtcgaactcgcggcccaggtcccgccgagacgccgggggtggcgctggggcagccggccgggacgagctggtgtcgcggtccttgcagagcgcagagcactgtctgggcgtccaggacttcggcactgcctatgcccactacctcctcgtgctcagcctggcgccggagctgaaacacgacgtgaaggtgagcgtccttttttctcacttgctggcagatccaacgtcctcgt

SEQ ID NO: 584209 - DNA, 1148 bp, Homo sapiens
ctgctgcccttggagagggagagagagagagggggggcaaagaggctcccatggccagctgcacctcacagtcgttctttccattctacctgctctgtgggggcatccctgcagctggcttccagtctgcaccctcttggtggatgggtatgaaggacaggtgccctcttactacactctcatcctgtgccaggcgctgtgcgtagtgtattctctcaagcaatcctgccagtcagagcttctcctcactttacacacacaggcactggaggaggtgaggacaagaaggaacatcttcacccagagccttgagggccacggggcagtagggcctcagctcattctatctggcccagtctctgtgtccacttgacttaaccatgtggccatgttaattccatcttgaaggcagggagaggtcatgggcagccccactcccccttatggcactctgatgtccccagtcacggctctgggtctctctccacagccttacgacagtctgcctacctcacagacctgcttcttccagctgaggctgcccccgtactccagccagctggtcatggccgagcgcctgcgctatgccatcaacaactgccgctcaatcgacatggacaactacatgctctcgagaaacgtggacaacgccgagggctccgacactgactactgaccgtgcgggtgctctcaccctcccttctctccctcaataatgctcacttctgatttgatgttgatatacttttatggtaactacatagatgttataagaacataaaccaacattataaacaatggccacatttagttactctaaatgtaacaaagaaattagatgtttttatttttctgtgattgtacaaaaacaacaaaaacgaagtgctctcagtcaggtttttccctccatatttttggtcacttttgataagtttgcatgaaaccattttggtgcatttttagttgggaatggtacatttttgtaaatccacccagtgaacatgaaattgtacattgtgtataattgttcattagaaaggacagttttacatgaatattcatatatttattttgttttaatttgaattgcctgttcagggttccttatgcagagaaataaagcagattcaggaattggaaaaaaaaaa

SEQ ID NO: 584210 - DNA, 495 bp, Homo sapiens
atagatgtcgctagtctcagagggcagctgcgtatttaattaaactctggtttatgacctgacaaaaagccaaaaatatcactctttccaggagtggggaaaactgaggatgcctcccaagtctagtggcttcacaaaagatcatcctgtcttctctgtcatgcccactgagctcctattcccctacgtgttacaatacacaatttaaaacgccattgtgggagtgaagggttgacatttaaggaaaaggttgaggggtttctcttatgggctgtctaaaaggagagacacgtatctttcttaccttttttttttggcttagcccaccatgacttgtgacccaaaaccccccagatttaacagaagccctcacatttactctggaagcttacttccaaggagactacagacccttacttagtaggccaaactcaacacaatccagtaatgggtctttaatctaacccgcaattcctagctagcatggaactgggc

SEQ ID NO: 584211 - DNA, 402 bp, Homo sapiens
cccttccctgccaaaccaccagggtcctgccccaggggcagggtgcctctagcgcactacttagaaccctgcccaaagggtggtgctggtgttgcgggaaccctggcattttttccgggacggccgggttcttctgggctcaagggcccttagggaacggcccctaggccttatggggtaccagctcctgccgctaccctttgaggaactggagtcccaaaaaggcctgccccagctcaaaagcttccttaggcaaaagctccaggccctgggcctgcgctgggggccttaagggggcttaggggattatgtggggttcaggatggcccccccctgggggggggatgatttgccctttggttccctgggttttgatttttcattaaagttcctttccttcca

SEQ ID NO: 584212 - DNA, 997 bp, Homo sapiens
gtaccatcccggggcttggggacccctgaattagacagtttggaagtacaaataaaaatgatagtaaagggctgggcgtggtggctcacacctgtaatcccagcattccgggaggcaaaggcgggcagatcacctgaggtcaggagtttaagaccagcctgtctaacatggtgtaaccccatctctactaaaaatacagaaattagccaggcatggtggcaggtgcctgtagtcccagctactcgggaggctgaggcagttgaatcacttgaacccaggaggcggagattgcagatgaaccgagatcgcaccgctgcactccagcctggagtggcagagcaagaatccatctcaacaaaaaaaaaagatagtaaaggattaataaccatatgaaaataacctaatccaggcatccagagagagaactataaaatataaaggaaactggtgaccgagatggcatcaggacctaaaatcccagacactgaggagaggcggaaaacgcggcgaatcactatgacggcacaggacagccagagaccacacacgactcacccatggccgacacccccgactcaactaacaaatactacaaaataagtggacaatgaggcacaacgctacaaaatccgcgaaaacacacgaagacatgagccgaaagaactcagcagcaacccgggaaggtatcacgctatcggtgacgcccacgaacacagccatgggagtcaccaactgtggcgaaacgagccagacatctggctacaaaaaaaaaaaaaaactacaaacttacagtagaaaagcacacgagagagaaaccccaaaatagcacgagcacggacccgactaccgagagcgcagacaaggggaacagaagcatccagccaaagaatacaacgcgcaacgacacacagacatcgtcagagcagcaaagaacactagcaaccaggcgaaagcaaacaacacacaccacacaacaggaccggcagcacatcaacga

SEQ ID NO: 584213 - DNA, 290 bp, Homo sapiens
ttggaccataaatcatcaaattggataatgactaactgtagtcttttcttttttttatttttattcagctgcgggatacaattttcatggtcaaaatggaactgaagttcactccaaattattgtgatcttaaacttttcattccttggaaccaaccaaaacaacttgtggttaacttcgaaatccccgggtttcaaatcatttatagatttggaaggggatttggcatatctacctttctttgtagcaaatggtcccttattattagctcagttgcactataaagcttc

SEQ ID NO: 584214 - DNA, 773 bp, Homo sapiens
  misc_feature (526)..(526): n is a, c, g, or t
atccactcccttaccatcaaatgaatgggccaacaatggtactgagcctacgagtacaccgacgtacgggggtactagactcgttcaaactcctgacataggcttccccgccacttattcctagtaacccagagcgatcctgtcggagtcctttgacgattgacaaggcgaagtagtagtcgcgcatctgacagtcgcccaattcgttgtacatcaatttacagtcacatagactgtcattgcgacgtgcgactggagtctgttctcccgacagttgagtgcattcaaaaatcgagatagcgaattacccaggcactttgcttaatacccgaacagcacgaacttatcatcgcgctaacactgacgcggggtgtaatacctgactgtgctcaagaatgcttctgacaatcatgatgtgagtagaaacacacatgttttcactcgtccctattacgctgcctaagtacacttaattctcgctcgctaatacaactcttttttgagagagtaaagggcccccgtactntcatccacgtattaggacacctcgccgtcttaacacccgcttgctacgatgcgctcacttgataggaggcgtaagcgttacgcaagtcaaagccaggttacacaaagaaagattcatgaaggagcatagagaaccaactctggtgctgcgcggcgtccccctctagcgagacttgacaaaagtaaaaaggttttattttaatcattccactttccacgcgtatgaggggacgcgcacgcaggggccc

SEQ ID NO: 584215 - DNA, 146 bp, Homo sapiens
gttacagtcccctaggagatgggaggagggagataggtatagtaggcgctaagacgagtatgagggttcctactccacgtggcaggctgctgatactgggctaggagcaacaggacactgactctaggtttatgacctgtccatac

SEQ ID NO: 584216 - DNA, 152 bp, Homo sapiens
tccaggctctctgccctgtgctcccaattggtgcgatccgttactgcccgtgctcacggacatggatacagaccctgctgtgctccacaccctgcaggcgcctcgggaagcgccaaaggattcccttcacgttggtgctactgctgcatagc

SEQ ID NO: 584217 - DNA, 187 bp, Homo sapiens
cccttttttgggggggaaaggggggccccctttttttttttcgcccggtttttttttagccccccccccccggggggggggggggggccccttggtttttttttttcccgccccccccggaaaaaccccctttgggggggttttttttttttttttttttaaaaaaaaaaaaaaaacccccccccca

SEQ ID NO: 584218 - DNA, 861 bp, Homo sapiens
  misc_feature (26)..(26): n is a, c, g, or t
  misc_feature (138)..(140): n is a, c, g, or t
  misc_feature (206)..(206): n is a, c, g, or t
  misc_feature (232)..(232): n is a, c, g, or t
  misc_feature (243)..(243): n is a, c, g, or t
  misc_feature (246)..(246): n is a, c, g, or t
  misc_feature (260)..(260): n is a, c, g, or t
  misc_feature (287)..(287): n is a, c, g, or t
  misc_feature (292)..(293): n is a, c, g, or t
  misc_feature (314)..(314): n is a, c, g, or t
  misc_feature (328)..(328): n is a, c, g, or t
  misc_feature (331)..(331): n is a, c, g, or t
  misc_feature (339)..(339): n is a, c, g, or t
  misc_feature (353)..(353): n is a, c, g, or t
  misc_feature (363)..(363): n is a, c, g, or t
  misc_feature (386)..(386): n is a, c, g, or t
  misc_feature (392)..(393): n is a, c, g, or t
  misc_feature (409)..(409): n is a, c, g, or t
  misc_feature (454)..(454): n is a, c, g, or t
  misc_feature (459)..(459): n is a, c, g, or t
  misc_feature (700)..(700): n is a, c, g, or t
  misc_feature (859)..(859): n is a, c, g, or t
gctttattttagtgaattataaaggnaaacaaaaaggaaactgttgagaagtgttcttcattaacctgtctaacgacagcccgaagatcctgaaacacatggaaactgcgacatgctaccagcagaggctggggaatnnnggttctgctctcactgaatggtggggaaccttcaactgcttagcctgtgctttccttttctgattnaacatttacaaaggaaaaaacaatgnttagcactgantantttaaacacacttnagaaaatagatgttaacagtgttagtnggggnnccaggcccctgactagcaacngtggcggggcttcngtncccaaggnggctggggtttggncagctcagtnctgctatgggctgtggctcagcngatggnnaggtgctctccatgcntggtttacaacaacaggtcttaatagttagggacaggcggccatnccggntggggtgggggcgaggactgttcatcctgacaagggtcaccacccacacggtcagagcagaacccccagggactctctgggcctctacgtgccttccaggcaccgactgttcagctgcttggtaccccgggaataaaaactaactgagcagagcagctgatgcctcggcagggcccctcattaggggaggacggtgctggtggggcctgggggcccacgctcccagtgaagacaacctgtnaggaagaactcattctggaacctcccggagtttgctgagaaggaaattaatcacttcgtaacttgatgcagcttaaggcttcatttctaagctgtaacatggcctttaactaagatatcacaatattcaattccaattagagttttagcctgcagagtnta

SEQ ID NO: 584219 - DNA, 131 bp, Homo sapiens
cccggggggggggaaaaaaaaaaaattttttttgaggtttggtgtccccccccccccgtttttttttccgggggttttttttggggcccctttttgggccccccgggaaatttttttttttttgggggcca

SEQ ID NO: 584220 - DNA, 387 bp, Homo sapiens
gtcgagattttaatagcatcttcagcgagatgggggcctggaccttgccttcccactctcctgaacttccaggtcctgagtcagaaacacctggtgtgagattgcgagaggggcagacacttcgtgactcaatgcttagtacccagatagtcaccaaccaggatctttgagggggtcttggagagtcatgcaaaacctgaatcctccaaaccagctccagattgggggtccagggaccttttcataggttggatgatacatggcctgtgagtcccattctagagccagagaggacaaggatcttgactccaggtttccaggaggtctggtcactctcacccagctaatctattcaaagactctgtaccagtcataagcagtgggcat

SEQ ID NO: 584221 - DNA, 1493 bp, Homo sapiens
gtttcagataggaagcactcctcactcttctagtaagggagcgatcacctgaagaatgttgcagctcgccttggcacagacaggaagaaacgagagaactcgttaaaattgatgctctcatagccaagcagcttacgaagaatgctcgtgagcgcgaaagctgcaatgatgtcacgtctcgtcgaaggctagtatgctaggcatcaggaatgctgactggttccagggtctgtgcatactgctagcacttctcgagactagtattgagaatgcctgttcatgggacgaattgcatcgaggatttgcagagcgagacagaacatctcggtcgaggtggctgcaacatgtggagaggttcgcattggagaccggaaactcggcagacatgggactaggtacgaatgagccgactgacgcgagtgcgcccgtttcgtctaatgtctcaaacgtaacgagctgtcgcagaagcgcactgacacataggtgtgtgactgtgccatcagtgtccaccacgacaatgaagaaccggttgtcccggtggggtcccggtggcgctctgttcattaactctggcatggccactatgtgtgtcacaatgtcactcaaagaaaagcgattgggaacttatgggaatgccagctctatagagcagatagatctggctgggtcctaagttgacaatgtgttcccaccacggtcaagggccatcatggtacactgtaagcggcagtaacacgggggttcggctaagttacgtgcgcatgtgtatttgtatgttgaaacgtccttggttcactgagttccccatgatggcatctcgttcgcaattaggacacatggtgtatatgaggggaaaggaacggcctcggtgaattaagggacagtttacgaatggcctacgaatgagggcgtcgcatttcactccttggggcaccctgcgtacacacacgagggccaggttgtggacccggcgtattcgccatgtagaaagcggtgcacaggcggaggagagctacatgcggtcatcttgacggatagacagatgggagtttgacacttcgtctgaagaaacacgtcacgcacatcgaacctgtgtaacatacaaattgacaaagtagatgggagcacgagtcatttgggacgtcaaaggcaatgaaaccaaagaagacaaagccccggtgtagagaaagcgaagacaacggaccaacccgacaatagaaggccacagacaagaggtccaacgggtcaagcaccacgagggcaaggaaacacgaacagacgcgaggggaaaaggaaataagccgggggacagtaagggaacgggcatgcacaaggatggaccaacaagggcgcataaagaaacgaggacaccggaacagcgctgagcgacgcccaggggccatgaacaagaggacacaacagcgacaaaagagaaaaccacgggtgcaagagcagacacccattgtgagaaaaatccaacaaggaggagagca

SEQ ID NO: 584222 - DNA, 870 bp, Homo sapiens
tctctctctctcctctcttttgacttggtggggtgcgtgcgatcacccaccccacgaagaggtgtgtttttctctctcgtggggtggagggtgtgtctgggttgtgttttctcttctctcttcttcttctctctctcgtctcgtggggtggtgtgcgcagcgcgtggtggttgggtctctcccacccccccctcgctgcgacggtgtggctgcgccccaccagagagtgtgcgcactatactattagtgtgttgtgtggtggcttctcatccacacacccacctcgtctgtgtgtgttgtgctgtggttctgtgcatgcaccccaccaccacccgctttttttgtgtggtggaggggtgtgtgtggtgtgtgtggcgtcgcgcgcgcccacacacacacgctcgtgtgttggcgaggctggctcccttccatgtgtgtgtgttggtgctccctctgtgtgtgttgtgtgtgttggtgtgtgtgggtgtgtacgatctgctctctctcttctgtgtggtgtgtggtgctcactcacacacactacactactttgtggttgtgtgtgtgtgtgcgcccccctgtcgtgtgtgtgtgacgtgtgtgtcgtccctctcgcgtcgtgactgtggtgggtgtgttgtgtgcgtcccccccctgcctgtatgggtgggtgagatatacgctcacgccgcaggtggttctcactcccttgtttgggttgtgtttgatgaacactccttttggccggcgccccacatccattggtgtttggtgtcgccgccttccccaatggttgtggattgaatgacactcacactcttctttgtgtggggggtggtggtttgatttccgccccttgatttggttggc

SEQ ID NO: 584223 - DNA, 251 bp, Homo sapiens
acgaacagcagcatcttgagcacttgatgctaacgtcagaatctgccctggaacagcgccgattttgggcattggcttgcacaccacgaacatccttgtcacttgccactgaccattccccactccaacttggctgtaaaaaaacctgggcttagagccctggttcttttcatccccatcgcggttcatcagcttgcgaagtgccgcgttccaatcatcgtgctgttcgcacgggcctgctgccaacaata

SEQ ID NO: 584224 - DNA, 4951 bp, Homo sapiens
  misc_feature (17)..(17): n is a, c, g, or t
  misc_feature (2578)..(2578): n is a, c, g, or t
  misc_feature (2804)..(2804): n is a, c, g, or t
tttcggcaatagaaaanaaaggccacaaaaacatcatttgaatcagccttcagtagcaccgggaaaaactacttctttcccaaagaaagaggtgagacagatcgatcgggaaaaatcagaggcttttgaaagaactgtcaagacaggcggaaaagccaggagaaaaaagtacaattcctagatcggctgatcatcccccaaagttatatcacagtgctctcaacagacagaaggaacaacaaaggattgagagagaaaacttggctttattgaaaaggcttgaggccgtgaaaccaacagttggtatgaaacgttcagaacaactgatggactatcatcgcaatatgggctatctcaactcatcaccattgtcaagacgggccagatccactcttggccaatatagcccattaagagcttccaggacatccagtgctacgagtggtctcagttgtaggagtgagcgatcagcggttgacccctccagtggccaccctcgaagaagacctaaaccccctaatgtccgtacagcttggttataaaacacttttttactttaaacattgttcacacaacttttcttgaagtgctcgtgcatattcctataattctctgtgtaaacatctagaataccgttttagcaattgaaggtgtacaacagtgagttgtaatgtattgttattcagtgcaaaattattgtcaaaaaacgatttaatgtaaaaagtgtttcctgaggatgtatttatatgagatgtatgtgttcttaatagagaaatagtggtatgcatgtgtatcttctaattattcagttgtcatgctgtcaaaatagtagtgatagtatcattgcatgtcgtacccaagatggtcactatatagttttcaatttgtgttattttcatttctttataagtgttataccatgagctcagctcctaaatttggctggctttgtttttcatttgctttagaacttatgtggcatgacatagctcgattgtatgagatttaacacttattatgaaacaaatcttgaaatttgttttcactggtagagctgatctagatttgatgagcagattgagagacgcttctattggagcaattcttgtaattcaccagaggtatctagttgttgtataagtgcactgagttagatcttaaaagtttgatcaatcattccaaaccatttcaaatatgaatattagaaagttcaacttagaagcttcccttttgtgttttcatgcattcaggtaaagtcctatttatgactcttagaaatgaggtaggttttagagctagtcttctaactcgtgaatagtttaaggaccacatcagttgcaaaccaagtatttgttgaatcagtaaaatggcactatcagcatgaagagccgagaagcagatcctgaggtgtgtcggacagtgttttaggtaattcagtatttattatgttattagagaagacttagcgtaagaaagaaatgctttagaaattccagcaagtatttataaggcctgaaaaaactaaaatttgaacaaaaagggaaataaatcacacatttgttgaggctgctgctttaagtattagctaattttcttgttttggtttacttgatttatttgattgaaccctggaagtattatttttaccagtcccacatttaaagacctagtaatcttgatggaatggtaatggcagatagggtttaatgttgttgacttttcaaattagaattttttttctatgaaacttaggcttttatataacaaagtatgttatctcattgttaccgccgtttttcactactagccttttcagtatgcccttaaaatgtattggaaaggttccatgttaaatgacaaatatctttttcagtatgaatttttgatctgtagccacaataagattttcatttttcagtgctcaggctctgtagcatgtatgctgaatgcttttttccttagcacctttaacagtaaggtgttactgcattttacaaaacatcaattcaacatgtcttggatttagtttgtattcatagattttgttaaggatcaggcctgtgaacatgggcacagtgaggttaaataattcacgtggccacaacctggctttgaggttctgcttttgggggccataattttcattcaatgttattcgatgctctgttctggtgaacaagttactatacctgctgtgtatataagcttgagctatactaaaccaaggctttattttcttttgttttttaacttactgtacttttactgtttatataacctatatttcaagagagagaagataatgctgaattttaaatttagcatttgaacatctgtccaatagtgaattaatcagtttttttaaaattgatttttaagttgttccagaaaaaaatatatatatatgttttatatatatagtctttttatatatataaaaatcttttttataaattttattttaaaaatcttttaagaaagatttttatatatatataaagactatatatttatatatagtcttttctgttcataatggcattagtctctgagtacattttatattatctttgttgcnacatgtcaggatacaacacaatagttttataaataacaactgtactttgattttaggtactaatttaatgctttagtttttactactttgaagggaggttcatctaagtattactgataacagggatccaacttaaagtaaaagttggaaagggcaagagtcttttaagcggaacttcaattctgttgtcatggttacttatatataatgaatataaatagacaantaggacttggaaaatgtggtatattctaagtcaagatgctatgaagttgttatagtttaagggacattcttaagaaggaattacttaagtacattactcttctcatttcaaggacatgaaaaagtaaaggatggtctggcactattttattttatttttttttgacttgtactgaatatatgtactttgaagatttacatctataactagaaagtatgctaatccgaggtctggttattaggccagattcttgttcagttattttttaaactaatgttgcctcctttttagtaagattctacgaaagttttttaactattaaagttatttcttaaggggtagctcttatacttcctctgctctctttttcagtttccataaaaagctgttttcttagctattactccaaataaagttctttggtttgcttaaaaatgtagtgtaatgcagttgttttctctccgctaacctgagtgtccacagtagatatcgagacagctttaggaaggtgacggtcatgggtaagtgacggctgtgcctgtcatcttcagattcttcaaatactgcaaactatgaaacatgttaagaccaatataaacccaaagatgtgagttgattatactttaataattacattcataaaaagtttactatcttcaatgccaaaaaagtcttaacctataaatgattatatacaatcttagaaaatgtgcttaacagttatggcttctttatttctatgaggaaagattagtaagaaacttaaaattaacatccttttaagattttctgttccattttaatgtattttaggcatttagaactagcctggcataatgaagaaagaaataaaagaattaaagataactgagttttgatcctatgtttatctctaaaatgggctgtcttgttccaattttcaaaattagaataatttttacgtgccttacaagaccaagaattagtaggaataaagttggaaggatgatgtcagttatttctgtctttgaaagtatttacatggaaaagagtttgcttaaaattatattcttaatcagaatttctttaaactacatcatctaattgcttctgtaaaattattatggtactacaatacagtggacactcttacagcttaaagaaatgggcttcttgttgttgttgttgttgtttgtatttttgagatggagtctggctctgtcccccaggctggagtgcagtggcacgatcttggctcactgcaacctccgcttcccaggttcaagcgattctcctgcctcagcctcctgagtagctgggattacaggcacacgccatcatgcccggctaattttttgtatttctagtagcgatggggtttcgccatgttggccaggctggtctcgaactcccgacctcaagtgatccgcccgcctcggcctcccaaagtgttgggattacaggtgtgagccaccgcgcccggccaggaaatattttttaaaaggagtcatgtatgtcatgtacattgatgtacatgaaatgtacgtcaacatttcatatgtattctatataataaacacactaaagcttgctgcaaaacatcagtttaggaattttttatgagggtttaataaaactagcgccattggaataaattcccgagtagcccctgcagtagcgtatctgagctctcaacagcaaagagcaagaatgctagagcaaataggattgtgttatggcagaaaattttatttgatttttcagttctggtgatggatttttaattcatttacagatatctctggagccaccataatagactcttaagattctgtgcttccatttcaaaatttagttggtaaatccagatggagtcttgttctgtctccaggccggagtgcagtggtgcgatctcagctcactgcaacctccgcctcccaggttcaagcgattctcctgcctcagcctcctgagttgctgcgactgcaggcgcccgccaccatgcccagctaatttttgtatttttagtagagatggggtttcaccatgttggccaggatggtctcgatctcctgaccttgtgatccacccgcctcagcctcccaaagtgctgggattacaggtgtgagccatcgcacccggcctgattaacatttttcttccatgtc

SEQ ID NO: 584225 - DNA, 4892 bp, Homo sapiens
  misc_feature (17)..(17): n is a, c, g, or t
  misc_feature (2519)..(2519): n is a, c, g, or t
  misc_feature (2745)..(2745): n is a, c, g, or t
tttcggcaatagaaaanaaaggccacaaaaacatcatttgaatcagccttcagtagcaccgggaaaaactacttctttcccaaagaaagaggtgagacagatcgatcgggaaaaatcagaggcttttgaaagaactgtcaagacaggcggaaaagccaggagaaaaaagtacaattcctagatcggctgatcatcccccaaagttatatcacagtgctctcaacagacagaaggaacaacaaaggattgagagagaaaacttggctttattgaaaaggcttgaggccgtgaaaccaacagttggtatgaaacgttcagaacaactgatggactatcatcgcaatatgggctatctcaactcatcaccattgtcaagacgggccagatccactcttggccaatatagcccattaagagcttccaggacatccagtgctacgagtggtctcagttgtaggagtgagcgatcagcggttgacccctccagtggccaccctcgaagaagacctaaaccccctaatgtccgtacagcttggttataaaacacttttttactttaaacattgttcacacaacttttcttgaagtgctcgtgcatattcctataattctctgtgtaaacatctagaataccgttttagcaattgaaggtgtacaacagtgagttgtaatgtattgttattcagtgcaaaattattgtcaaaaaacgatttaatgtaaaaagtgtttcctgaggatgtatttatatgagatgtatgtgttcttaatagagaaatagtggtatgcatgtgtatcttctaattattcagttgtcatgctttcaatttgtgttattttcatttctttataagtgttataccatgagctcagctcctaaatttggctggctttgtttttcatttgctttagaacttatgtggcatgacatagctcgattgtatgagatttaacacttattatgaaacaaatcttgaaatttgttttcactggtagagctgatctagatttgatgagcagattgagagacgcttctattggagcaattcttgtaattcaccagaggtatctagttgttgtataagtgcactgagttagatcttaaaagtttgatcaatcattccaaaccatttcaaatatgaatattagaaagttcaacttagaagcttcccttttgtgttttcatgcattcaggtaaagtcctatttatgactcttagaaatgaggtaggttttagagctagtcttctaactcgtgaatagtttaaggaccacatcagttgcaaaccaagtatttgttgaatcagtaaaatggcactatcagcatgaagagccgagaagcagatcctgaggtgtgtcggacagtgttttaggtaattcagtatttattatgttattagagaagacttagcgtaagaaagaaatgctttagaaattccagcaagtatttataaggcctgaaaaaactaaaatttgaacaaaaagggaaataaatcacacatttgttgaggctgctgctttaagtattagctaattttcttgttttggtttacttgatttatttgattgaaccctggaagtattatttttaccagtcccacatttaaagacctagtaatcttgatggaatggtaatggcagatagggtttaatgttgttgacttttcaaattagaattttttttctatgaaacttaggcttttatataacaaagtatgttatctcattgttaccgccgtttttcactactagccttttcagtatgcccttaaaatgtattggaaaggttccatgttaaatgacaaatatctttttcagtatgaatttttgatctgtagccacaataagattttcatttttcagtgctcaggctctgtagcatgtatgctgaatgcttttttccttagcacctttaacagtaaggtgttactgcattttacaaaacatcaattcaacatgtcttggatttagtttgtattcatagattttgttaaggatcaggcctgtgaacatgggcacagtgaggttaaataattcacgtggccacaacctggctttgaggttctgcttttgggggccataattttcattcaatgttattcgatgctctgttctggtgaacaagttactatacctgctgtgtatataagcttgagctatactaaaccaaggctttattttcttttgttttttaacttactgtacttttactgtttatataacctatatttcaagagagagaagataatgctgaattttaaatttagcatttgaacatctgtccaatagtgaattaatcagtttttttaaaattgatttttaagttgttccagaaaaaaatatatatatatgttttatatatatagtctttttatatatataaaaatcttttttataaattttattttaaaaatcttttaagaaagatttttatatatatataaagactatatatttatatatagtcttttctgttcataatggcattagtctctgagtacattttatattatctttgttgcnacatgtcaggatacaacacaatagttttataaataacaactgtactttgattttaggtactaatttaatgctttagtttttactactttgaagggaggttcatctaagtattactgataacagggatccaacttaaagtaaaagttggaaagggcaagagtcttttaagcggaacttcaattctgttgtcatggttacttatatataatgaatataaatagacaantaggacttggaaaatgtggtatattctaagtcaagatgctatgaagttgttatagtttaagggacattcttaagaaggaattacttaagtacattactcttctcatttcaaggacatgaaaaagtaaaggatggtctggcactattttattttatttttttttgacttgtactgaatatatgtactttgaagatttacatctataactagaaagtatgctaatccgaggtctggttattaggccagattcttgttcagttattttttaaactaatgttgcctcctttttagtaagattctacgaaagttttttaactattaaagttatttcttaaggggtagctcttatacttcctctgctctctttttcagtttccataaaaagctgttttcttagctattactccaaataaagttctttggtttgcttaaaaatgtagtgtaatgcagttgttttctctccgctaacctgagtgtccacagtagatatcgagacagctttaggaaggtgacggtcatgggtaagtgacggctgtgcctgtcatcttcagattcttcaaatactgcaaactatgaaacatgttaagaccaatataaacccaaagatgtgagttgattatactttaataattacattcataaaaagtttactatcttcaatgccaaaaaagtcttaacctataaatgattatatacaatcttagaaaatgtgcttaacagttatggcttctttatttctatgaggaaagattagtaagaaacttaaaattaacatccttttaagattttctgttccattttaatgtattttaggcatttagaactagcctggcataatgaagaaagaaataaaagaattaaagataactgagttttgatcctatgtttatctctaaaatgggctgtcttgttccaattttcaaaattagaataatttttacgtgccttacaagaccaagaattagtaggaataaagttggaaggatgatgtcagttatttctgtctttgaaagtatttacatggaaaagagtttgcttaaaattatattcttaatcagaatttctttaaactacatcatctaattgcttctgtaaaattattatggtactacaatacagtggacactcttacagcttaaagaaatgggcttcttgttgttgttgttgttgtttgtatttttgagatggagtctggctctgtcccccaggctggagtgcagtggcacgatcttggctcactgcaacctccgcttcccaggttcaagcgattctcctgcctcagcctcctgagtagctgggattacaggcacacgccatcatgcccggctaattttttgtatttctagtagcgatggggtttcgccatgttggccaggctggtctcgaactcccgacctcaagtgatccgcccgcctcggcctcccaaagtgttgggattacaggtgtgagccaccgcgcccggccaggaaatattttttaaaaggagtcatgtatgtcatgtacattgatgtacatgaaatgtacgtcaacatttcatatgtattctatataataaacacactaaagcttgctgcaaaacatcagtttaggaattttttatgagggtttaataaaactagcgccattggaataaattcccgagtagcccctgcagtagcgtatctgagctctcaacagcaaagagcaagaatgctagagcaaataggattgtgttatggcagaaaattttatttgatttttcagttctggtgatggatttttaattcatttacagatatctctggagccaccataatagactcttaagattctgtgcttccatttcaaaatttagttggtaaatccagatggagtcttgttctgtctccaggccggagtgcagtggtgcgatctcagctcactgcaacctccgcctcccaggttcaagcgattctcctgcctcagcctcctgagttgctgcgactgcaggcgcccgccaccatgcccagctaatttttgtatttttagtagagatggggtttcaccatgttggccaggatggtctcgatctcctgaccttgtgatccacccgcctcagcctcccaaagtgctgggattacaggtgtgagccatcgcacccggcctgattaacatttttcttccatgtc

SEQ ID NO: 584226 - DNA, 176 bp, Homo sapiens
gtgaccacccacagcaaatcgagaaaaactccgcgagctgatcgtatctgtgtccccaagatctatgtgacggatctcctgatacaactgttgaccagccactgaaaatctgccagagacaaggtggtgggaaaggattacctgtttgtgtgactactaacagacgatggggactc

SEQ ID NO: 584227 - DNA, 257 bp, Homo sapiens
cttttggggtctttgctcaaatttacaaacaaacaaaaaaacaaaaaaaaaaggggaggatggaaggccacccttggccttagtgaaaagggagagggaaaggaattaagggggggccacaggtcccaggtggaattaaactgcaaaacccggggggaaacctgaaagaaccctgagcgggcacagggtaaccgggggggggaggggccaaacgggaaaatgagaggggttcccccagcctgagcttatcagttgtc

SEQ ID NO: 584228 - DNA, 4897 bp, Homo sapiens
  misc_feature (17)..(17): n is a, c, g, or t
  misc_feature (2524)..(2524): n is a, c, g, or t
  misc_feature (2750)..(2750): n is a, c, g, or t
tttcggcaatagaaaanaaaggccacaaaaacatcatttgaatcagccttcagtagcaccgggaaaaactacttctttcccaaagaaagaggtgagacagatcgatcgggaaaaatcagaggcttttgaaagaactgtcaagacaggcggaaaagccaggagaaaaaagtacaattcctagatcggctgatcatcccccaaagttatatcacagtgctctcaacagacagaaggaacaacaaaggattgagagagaaaacttggctttattgaaaaggcttgaggccgtgaaaccaacagttggtatgaaacgttcagaacaactgatggactatcatcgcaatatgggctatctcaactcatcaccattgtcaagacgggccagatccactcttggccaatatagcccattaagagcttccaggacatccagtgctacgagtggtctcagttgtaggagtgagcgatcagcggttgacccctccagtggccaccctcgaagaagacctaaaccccctaatgtccgtacagcttggttataaaacacttttttactttaaacattgttcacacaacttttcttgaagtgctcgtgcatattcctataattctctgtgtaaacatctagaataccgttttagcaattgaaggtgtacaacagtgagttgtaatgtattgttattcagtgcaaaattattgtcaaaaaacgatttaatgtaaaaagtgtttcctgaggatgtatttatatgagatgtatgtgttcttaatagagaaatagtggtatgcatgtgtatcttctaattattcagttgtcatgctgtcaaaatagtagtgatagtatcattgcatgtcgtacccaagatggtcactatatagttttcaatttgtgttattttcatttctttataagtgttataccatgagctcagctcctaaatttggctggctttgtttttcatttgctttagaacttatgtggcatgacatagctcgattgtatgagatttaacacttattatgaaacaaatcttgaaatttgttttcactggtagagctgatctagatttgatgagcagattgagagacgcttctattggagcaattcttgtaattcaccagaggtatctagttgttgtataagtgcactgagttagatcttaaaagtttgatcaatcattccaaaccatttcaaatatgaatattagaaagttcaacttagaagcttcccttttgtgttttcatgcattcaggtaaagtcctatttatgactcttagaaatgaggtaggttttagagctagtcttctaactcgtgaatagtttaaggaccacatcagttgcaaaccaagtatttgttgaatcagtaaaatggcactatcagcatgaagagccgagaagcagatcctgaggtgtgtcggacagtgttttaggtaattcagtatttattatgttattagagaagacttagcgtaagaaagaaatgctttagaaattccagcaagtatttataaggcctgaaaaaactaaaatttgaacaaaaagggaaataaatcacacatttgttgaggctgctgctttaagtattagctaattttcttgttttggtttacttgatttatttgattgaaccctggaagtattatttttaccagtcccacatttaaagacctagtaatcttgatggaatggtaatggcagatagggtttaatgttgttgacttttcaaattagaattttttttctatgaaacttaggcttttatataacaaagtatgttatctcattgttaccgccgtttttcactactagccttttcagtatgcccttaaaatgtattggaaaggttccatgttaaatgacaaatatctttttcagtatgaatttttgatctgtagccacaataagattttcatttttcagtgctcaggctctgtagcatgtatgctgaatgcttttttccttagcacctttaacagtaaggtgttactgcattttacggatcaggcctgtgaacatgggcacagtgaggttaaataattcacgtggccacaacctggctttgaggttctgcttttgggggccataattttcattcaatgttattcgatgctctgttctggtgaacaagttactatacctgctgtgtatataagcttgagctatactaaaccaaggctttattttcttttgttttttaacttactgtacttttactgtttatataacctatatttcaagagagagaagataatgctgaattttaaatttagcatttgaacatctgtccaatagtgaattaatcagtttttttaaaattgatttttaagttgttccagaaaaaaatatatatatatgttttatatatatagtctttttatatatataaaaatcttttttataaattttattttaaaaatcttttaagaaagatttttatatatatataaagactatatatttatatatagtcttttctgttcataatggcattagtctctgagtacattttatattatctttgttgcnacatgtcaggatacaacacaatagttttataaataacaactgtactttgattttaggtactaatttaatgctttagtttttactactttgaagggaggttcatctaagtattactgataacagggatccaacttaaagtaaaagttggaaagggcaagagtcttttaagcggaacttcaattctgttgtcatggttacttatatataatgaatataaatagacaantaggacttggaaaatgtggtatattctaagtcaagatgctatgaagttgttatagtttaagggacattcttaagaaggaattacttaagtacattactcttctcatttcaaggacatgaaaaagtaaaggatggtctggcactattttattttatttttttttgacttgtactgaatatatgtactttgaagatttacatctataactagaaagtatgctaatccgaggtctggttattaggccagattcttgttcagttattttttaaactaatgttgcctcctttttagtaagattctacgaaagttttttaactattaaagttatttcttaaggggtagctcttatacttcctctgctctctttttcagtttccataaaaagctgttttcttagctattactccaaataaagttctttggtttgcttaaaaatgtagtgtaatgcagttgttttctctccgctaacctgagtgtccacagtagatatcgagacagctttaggaaggtgacggtcatgggtaagtgacggctgtgcctgtcatcttcagattcttcaaatactgcaaactatgaaacatgttaagaccaatataaacccaaagatgtgagttgattatactttaataattacattcataaaaagtttactatcttcaatgccaaaaaagtcttaacctataaatgattatatacaatcttagaaaatgtgcttaacagttatggcttctttatttctatgaggaaagattagtaagaaacttaaaattaacatccttttaagattttctgttccattttaatgtattttaggcatttagaactagcctggcataatgaagaaagaaataaaagaattaaagataactgagttttgatcctatgtttatctctaaaatgggctgtcttgttccaattttcaaaattagaataatttttacgtgccttacaagaccaagaattagtaggaataaagttggaaggatgatgtcagttatttctgtctttgaaagtatttacatggaaaagagtttgcttaaaattatattcttaatcagaatttctttaaactacatcatctaattgcttctgtaaaattattatggtactacaatacagtggacactcttacagcttaaagaaatgggcttcttgttgttgttgttgttgtttgtatttttgagatggagtctggctctgtcccccaggctggagtgcagtggcacgatcttggctcactgcaacctccgcttcccaggttcaagcgattctcctgcctcagcctcctgagtagctgggattacaggcacacgccatcatgcccggctaattttttgtatttctagtagcgatggggtttcgccatgttggccaggctggtctcgaactcccgacctcaagtgatccgcccgcctcggcctcccaaagtgttgggattacaggtgtgagccaccgcgcccggccaggaaatattttttaaaaggagtcatgtatgtcatgtacattgatgtacatgaaatgtacgtcaacatttcatatgtattctatataataaacacactaaagcttgctgcaaaacatcagtttaggaattttttatgagggtttaataaaactagcgccattggaataaattcccgagtagcccctgcagtagcgtatctgagctctcaacagcaaagagcaagaatgctagagcaaataggattgtgttatggcagaaaattttatttgatttttcagttctggtgatggatttttaattcatttacagatatctctggagccaccataatagactcttaagattctgtgcttccatttcaaaatttagttggtaaatccagatggagtcttgttctgtctccaggccggagtgcagtggtgcgatctcagctcactgcaacctccgcctcccaggttcaagcgattctcctgcctcagcctcctgagttgctgcgactgcaggcgcccgccaccatgcccagctaatttttgtatttttagtagagatggggtttcaccatgttggccaggatggtctcgatctcctgaccttgtgatccacccgcctcagcctcccaaagtgctgggattacaggtgtgagccatcgcacccggcctgattaacatttttcttccatgtc

SEQ ID NO: 584229 - DNA, 133 bp, Homo sapiens
gggaggtcaagactgcagtaagccatgattgcaccactgtgctccagcctgggcaacagagtgagaccctgtctcacaaaaaaaagaaaaagaggcacgtgggacacagacacatgcagagggcaggccacgt

SEQ ID NO: 584230 - DNA, 4200 bp, Homo sapiens
  misc_feature (1827)..(1827): n is a, c, g, or t
  misc_feature (2053)..(2053): n is a, c, g, or t
ctctacgaggatcccgaaagcttatagtggtatgcatgtgtatcttctaattattcagttgtcatgctgtcaaaatagtagtgatagtatcattgcatgtcgtacccaagatggtcactatatagttttcaatttgtgttattttcatttctttataagtgttataccatgagctcagctcctaaatttggctggctttgtttttcatttgctttagaacttatgtggcatgacatagctcgattgtatgagatttaacacttattatgaaacaaatcttgaaatttgttttcactggtagagctgatctagatttgatgagcagattgagagacgcttctattggagcaattcttgtaattcaccagaggtatctagttgttgtataagtgcactgagttagatcttaaaagtttgatcaatcattccaaaccatttcaaatatgaatattagaaagttcaacttagaagcttcccttttgtgttttcatgcattcaggtaaagtcctatttatgactcttagaaatgaggtaggttttagagctagtcttctaactcgtgaatagtttaaggaccacatcagttgcaaaccaagtatttgttgaatcagtaaaatggcactatcagcatgaagagccgagaagcagatcctgaggtgtgtcggacagtgttttaggtaattcagtatttattatgttattagagaagacttagcgtaagaaagaaatgctttagaaattccagcaagtatttataaggcctgaaaaaactaaaatttgaacaaaaagggaaataaatcacacatttgttgaggctgctgctttaagtattagctaattttcttgttttggtttacttgatttatttgattgaaccctggaagtattatttttaccagtcccacatttaaagacctagtaatcttgatggaatggtaatggcagatagggtttaatgttgttgacttttcaaattagaattttttttctatgaaacttaggcttttatataacaaagtatgttatctcattgttaccgccgtttttcactactagccttttcagtatgcccttaaaatgtattggaaaggttccatgttaaatgacaaatatctttttcagtatgaatttttgatctgtagccacaataagattttcatttttcagtgctcaggctctgtagcatgtatgctgaatgcttttttccttagcacctttaacagtaaggtgttactgcattttacaaaacatcaattcaacatgtcttggatttagtttgtattcatagattttgttaaggatcaggcctgtgaacatgggcacagtgaggttaaataattcacgtggccacaacctggctttgaggttctgcttttgggggccataattttcattcaatgttattcgatgctctgttctggtgaacaagttactatacctgctgtgtatataagcttgagctatactaaaccaaggctttattttcttttgttttttaacttactgtacttttactgtttatataacctatatttcaagagagagaagataatgctgaattttaaatttagcatttgaacatctgtccaatagtgaattaatcagtttttttaaaattgatttttaagttgttccagaaaaaaatatatatatatgttttatatatatagtctttttatatatataaaaatcttttttataaattttattttaaaaatcttttaagaaagatttttatatatatataaagactatatatttatatatagtcttttctgttcataatggcattagtctctgagtacattttatattatctttgttgcnacatgtcaggatacaacacaatagttttataaataacaactgtactttgattttaggtactaatttaatgctttagtttttactactttgaagggaggttcatctaagtattactgataacagggatccaacttaaagtaaaagttggaaagggcaagagtcttttaagcggaacttcaattctgttgtcatggttacttatatataatgaatataaatagacaantaggacttggaaaatgtggtatattctaagtcaagatgctatgaagttgttatagtttaagggacattcttaagaaggaattacttaagtacattactcttctcatttcaaggacatgaaaaagtaaaggatggtctggcactattttattttatttttttttgacttgtactgaatatatgtactttgaagatttacatctataactagaaagtatgctaatccgaggtctggttattaggccagattcttgttcagttattttttaaactaatgttgcctcctttttagtaagattctacgaaagttttttaactattaaagttatttcttaaggggtagctcttatacttcctctgctctctttttcagtttccataaaaagctgttttcttagctattactccaaataaagttctttggtttgcttaaaaatgtagtgtaatgcagttgttttctctccgctaacctgagtgtccacagtagatatcgagacagctttaggaaggtgacggtcatgggtaagtgacggctgtgcctgtcatcttcagattcttcaaatactgcaaactatgaaacatgttaagaccaatataaacccaaagatgtgagttgattatactttaataattacattcataaaaagtttactatcttcaatgccaaaaaagtcttaacctataaatgattatatacaatcttagaaaatgtgcttaacagttatggcttctttatttctatgaggaaagattagtaagaaacttaaaattaacatccttttaagattttctgttccattttaatgtattttaggcatttagaactagcctggcataatgaagaaagaaataaaagaattaaagataactgagttttgatcctatgtttatctctaaaatgggctgtcttgttccaattttcaaaattagaataatttttacgtgccttacaagaccaagaattagtaggaataaagttggaaggatgatgtcagttatttctgtctttgaaagtatttacatggaaaagagtttgcttaaaattatattcttaatcagaatttctttaaactacatcatctaattgcttctgtaaaattattatggtactacaatacagtggacactcttacagcttaaagaaatgggcttcttgttgttgttgttgttgtttgtatttttgagatggagtctggctctgtcccccaggctggagtgcagtggcacgatcttggctcactgcaacctccgcttcccaggttcaagcgattctcctgcctcagcctcctgagtagctgggattacaggcacacgccatcatgcccggctaattttttgtatttctagtagcgatggggtttcgccatgttggccaggctggtctcgaactcccgacctcaagtgatccgcccgcctcggcctcccaaagtgttgggattacaggtgtgagccaccgcgcccggccaggaaatattttttaaaaggagtcatgtatgtcatgtacattgatgtacatgaaatgtacgtcaacatttcatatgtattctatataataaacacactaaagcttgctgcaaaacatcagtttaggaattttttatgagggtttaataaaactagcgccattggaataaattcccgagtagcccctgcagtagcgtatctgagctctcaacagcaaagagcaagaatgctagagcaaataggattgtgttatggcagaaaattttatttgatttttcagttctggtgatggatttttaattcatttacagatatctctggagccaccataatagactcttaagattctgtgcttccatttcaaaatttagttggtaaatccagatggagtcttgttctgtctccaggccggagtgcagtggtgcgatctcagctcactgcaacctccgcctcccaggttcaagcgattctcctgcctcagcctcctgagttgctgcgactgcaggcgcccgccaccatgcccagctaatttttgtatttttagtagagatggggtttcaccatgttggccaggatggtctcgatctcctgaccttgtgatccacccgcctcagcctcccaaagtgctgggattacaggtgtgagccatcgcacccggcctgattaacatttttcttccatgtc

SEQ ID NO: 584231 - DNA, 3670 bp, Homo sapiens
  misc_feature (17)..(17): n is a, c, g, or t
  misc_feature (2578)..(2578): n is a, c, g, or t
  misc_feature (2804)..(2804): n is a, c, g, or t
tttcggcaatagaaaanaaaggccacaaaaacatcatttgaatcagccttcagtagcaccgggaaaaactacttctttcccaaagaaagaggtgagacagatcgatcgggaaaaatcagaggcttttgaaagaactgtcaagacaggcggaaaagccaggagaaaaaagtacaattcctagatcggctgatcatcccccaaagttatatcacagtgctctcaacagacagaaggaacaacaaaggattgagagagaaaacttggctttattgaaaaggcttgaggccgtgaaaccaacagttggtatgaaacgttcagaacaactgatggactatcatcgcaatatgggctatctcaactcatcaccattgtcaagacgggccagatccactcttggccaatatagcccattaagagcttccaggacatccagtgctacgagtggtctcagttgtaggagtgagcgatcagcggttgacccctccagtggccaccctcgaagaagacctaaaccccctaatgtccgtacagcttggttataaaacacttttttactttaaacattgttcacacaacttttcttgaagtgctcgtgcatattcctataattctctgtgtaaacatctagaataccgttttagcaattgaaggtgtacaacagtgagttgtaatgtattgttattcagtgcaaaattattgtcaaaaaacgatttaatgtaaaaagtgtttcctgaggatgtatttatatgagatgtatgtgttcttaatagagaaatagtggtatgcatgtgtatcttctaattattcagttgtcatgctgtcaaaatagtagtgatagtatcattgcatgtcgtacccaagatggtcactatatagttttcaatttgtgttattttcatttctttataagtgttataccatgagctcagctcctaaatttggctggctttgtttttcatttgctttagaacttatgtggcatgacatagctcgattgtatgagatttaacacttattatgaaacaaatcttgaaatttgttttcactggtagagctgatctagatttgatgagcagattgagagacgcttctattggagcaattcttgtaattcaccagaggtatctagttgttgtataagtgcactgagttagatcttaaaagtttgatcaatcattccaaaccatttcaaatatgaatattagaaagttcaacttagaagcttcccttttgtgttttcatgcattcaggtaaagtcctatttatgactcttagaaatgaggtaggttttagagctagtcttctaactcgtgaatagtttaaggaccacatcagttgcaaaccaagtatttgttgaatcagtaaaatggcactatcagcatgaagagccgagaagcagatcctgaggtgtgtcggacagtgttttaggtaattcagtatttattatgttattagagaagacttagcgtaagaaagaaatgctttagaaattccagcaagtatttataaggcctgaaaaaactaaaatttgaacaaaaagggaaataaatcacacatttgttgaggctgctgctttaagtattagctaattttcttgttttggtttacttgatttatttgattgaaccctggaagtattatttttaccagtcccacatttaaagacctagtaatcttgatggaatggtaatggcagatagggtttaatgttgttgacttttcaaattagaattttttttctatgaaacttaggcttttatataacaaagtatgttatctcattgttaccgccgtttttcactactagccttttcagtatgcccttaaaatgtattggaaaggttccatgttaaatgacaaatatctttttcagtatgaatttttgatctgtagccacaataagattttcatttttcagtgctcaggctctgtagcatgtatgctgaatgcttttttccttagcacctttaacagtaaggtgttactgcattttacaaaacatcaattcaacatgtcttggatttagtttgtattcatagattttgttaaggatcaggcctgtgaacatgggcacagtgaggttaaataattcacgtggccacaacctggctttgaggttctgcttttgggggccataattttcattcaatgttattcgatgctctgttctggtgaacaagttactatacctgctgtgtatataagcttgagctatactaaaccaaggctttattttcttttgttttttaacttactgtacttttactgtttatataacctatatttcaagagagagaagataatgctgaattttaaatttagcatttgaacatctgtccaatagtgaattaatcagtttttttaaaattgatttttaagttgttccagaaaaaaatatatatatatgttttatatatatagtctttttatatatataaaaatcttttttataaattttattttaaaaatcttttaagaaagatttttatatatatataaagactatatatttatatatagtcttttctgttcataatggcattagtctctgagtacattttatattatctttgttgcnacatgtcaggatacaacacaatagttttataaataacaactgtactttgattttaggtactaatttaatgctttagtttttactactttgaagggaggttcatctaagtattactgataacagggatccaacttaaagtaaaagttggaaagggcaagagtcttttaagcggaacttcaattctgttgtcatggttacttatatataatgaatataaatagacaantaggacttggaaaatgtggtatattctaagtcaagatgctatgaagttgttatagtttaagggacattcttaagaaggaattacttaagtacattactcttctcatttcaaggacatgaaaaagtaaaggatggtctggcactattttattttatttttttttgacttgtactgaatatatgtactttgaagatttacatctataactagaaagtatgctaatccgaggtctggttattaggccagattcttgttcagttattttttaaactaatgttgcctcctttttagtaagattctacgaaagttttttaactattaaagttatttcttaaggggtagctcttatacttcctctgctctctttttcagtttccataaaaagctgttttcttagctattactccaaataaagttctttggtttgcttaaaaatgtagtgtaatgcagttgttttctctccgctaacctgagtgtccacagtagatatcgagacagctttaggaaggtgacggtcatgggtaagtgacggctgtgcctgtcatcttcagattcttcaaatactgcaaactatgaaacatgttaagaccaatataaacccaaagatgtgagttgattatactttaataattacattcataaaaagtttactatcttcaatgccaaaaaagtcttaacctataaatgattatatacaatcttagaaaatgtgcttaacagttatggcttctttatttctatgaggaaagattagtaagaaacttaaaattaacatccttttaagattttctgttccattttaatgtattttaggcatttagaactagcctggcataatgaagaaagaaataaaagaattaaagata

SEQ ID NO: 584232 - DNA, 3616 bp, Homo sapiens
  misc_feature (17)..(17): n is a, c, g, or t
  misc_feature (2578)..(2578): n is a, c, g, or t
  misc_feature (2804)..(2804): n is a, c, g, or t
tttcggcaatagaaaanaaaggccacaaaaacatcatttgaatcagccttcagtagcaccgggaaaaactacttctttcccaaagaaagaggtgagacagatcgatcgggaaaaatcagaggcttttgaaagaactgtcaagacaggcggaaaagccaggagaaaaaagtacaattcctagatcggctgatcatcccccaaagttatatcacagtgctctcaacagacagaaggaacaacaaaggattgagagagaaaacttggctttattgaaaaggcttgaggccgtgaaaccaacagttggtatgaaacgttcagaacaactgatggactatcatcgcaatatgggctatctcaactcatcaccattgtcaagacgggccagatccactcttggccaatatagcccattaagagcttccaggacatccagtgctacgagtggtctcagttgtaggagtgagcgatcagcggttgacccctccagtggccaccctcgaagaagacctaaaccccctaatgtccgtacagcttggttataaaacacttttttactttaaacattgttcacacaacttttcttgaagtgctcgtgcatattcctataattctctgtgtaaacatctagaataccgttttagcaattgaaggtgtacaacagtgagttgtaatgtattgttattcagtgcaaaattattgtcaaaaaacgatttaatgtaaaaagtgtttcctgaggatgtatttatatgagatgtatgtgttcttaatagagaaatagtggtatgcatgtgtatcttctaattattcagttgtcatgctgtcaaaatagtagtgatagtatcattgcatgtcgtacccaagatggtcactatatagttttcaatttgtgttattttcatttctttataagtgttataccatgagctcagctcctaaatttggctggctttgtttttcatttgctttagaacttatgtggcatgacatagctcgattgtatgagatttaacacttattatgaaacaaatcttgaaatttgttttcactggtagagctgatctagatttgatgagcagattgagagacgcttctattggagcaattcttgtaattcaccagaggtatctagttgttgtataagtgcactgagttagatcttaaaagtttgatcaatcattccaaaccatttcaaatatgaatattagaaagttcaacttagaagcttcccttttgtgttttcatgcattcaggtaaagtcctatttatgactcttagaaatgaggtaggttttagagctagtcttctaactcgtgaatagtttaaggaccacatcagttgcaaaccaagtatttgttgaatcagtaaaatggcactatcagcatgaagagccgagaagcagatcctgaggtgtgtcggacagtgttttaggtaattcagtatttattatgttattagagaagacttagcgtaagaaagaaatgctttagaaattccagcaagtatttataaggcctgaaaaaactaaaatttgaacaaaaagggaaataaatcacacatttgttgaggctgctgctttaagtattagctaattttcttgttttggtttacttgatttatttgattgaaccctggaagtattatttttaccagtcccacatttaaagacctagtaatcttgatggaatggtaatggcagatagggtttaatgttgttgacttttcaaattagaattttttttctatgaaacttaggcttttatataacaaagtatgttatctcattgttaccgccgtttttcactactagccttttcagtatgcccttaaaatgtattggaaaggttccatgttaaatgacaaatatctttttcagtatgaatttttgatctgtagccacaataagattttcatttttcagtgctcaggctctgtagcatgtatgctgaatgcttttttccttagcacctttaacagtaaggtgttactgcattttacaaaacatcaattcaacatgtcttggatttagtttgtattcatagattttgttaaggatcaggcctgtgaacatgggcacagtgaggttaaataattcacgtggccacaacctggctttgaggttctgcttttgggggccataattttcattcaatgttattcgatgctctgttctggtgaacaagttactatacctgctgtgtatataagcttgagctatactaaaccaaggctttattttcttttgttttttaacttactgtacttttactgtttatataacctatatttcaagagagagaagataatgctgaattttaaatttagcatttgaacatctgtccaatagtgaattaatcagtttttttaaaattgatttttaagttgttccagaaaaaaatatatatatatgttttatatatatagtctttttatatatataaaaatcttttttataaattttattttaaaaatcttttaagaaagatttttatatatatataaagactatatatttatatatagtcttttctgttcataatggcattagtctctgagtacattttatattatctttgttgcnacatgtcaggatacaacacaatagttttataaataacaactgtactttgattttaggtactaatttaatgctttagtttttactactttgaagggaggttcatctaagtattactgataacagggatccaacttaaagtaaaagttggaaagggcaagagtcttttaagcggaacttcaattctgttgtcatggttacttatatataatgaatataaatagacaantaggacttggaaaatgtggtatattctaagtcaagatgctatgaagttgttatagtttaagggacattcttaagaaggaattacttaagtacattactcttctcatttcaaggacatgaaaaagtaaaggatggtctggcactattttattttatttttttttgacttgtactgaatatatgtactttgaagatttacatctataactagaaagtatgctaatccgaggtctggttattaggccagattcttgttcagttattttttaaactaatgttgcctcctttttagtaagattctacgaaagttttttaactattaaagttatttcttaaggggtagctcttatacttcctctgctctctttttcagtttccataaaaagctgttttcttagctattactccaaataaagttctttggtttgcttaaaaatgtagtgtaatgcagttgttttctctccgctaacctgagtgtccacagtagatatcgagacagctttaggaaggtgacggtcatgggtaagtgacggctgtgcctgtcatcttcagattcttcaaatactgcaaactatgaaacatgttaagaccaatataaacccaaagatgtgagttgattatactttaataattacattcataaaaagtttactatcttcaatgccaaaaaagtcttaacctataaatgattatatacaatcttagaaaatgtgcttaacagttatggcaagattttctgttccattttaatgtattttaggcatttagaactagcctggcataatgaagaaagaaataaaagaattaaagata

SEQ ID NO: 584233 - DNA, 159 bp, Homo sapiens
atcgctctacaattggtcttatgttattacaaaggcagcgaaaccggtttgggcaggacaggagacacacccttgtttatcttttctaatgtcccttgggaaatggattaaacagtgcagagcagttttactttatgctgtcgcattgagtacagatta

SEQ ID NO: 584234 - DNA, 284 bp, Homo sapiens
ctcacacctgtaatcccagccctttgggaggccaagatgggagtatctcaagcccaggagttcgagaccagctcaggcgacatgacaagaccctgtctctacaaaaacaaacaaacaaacaaacaaaaaacaaaaaaaaccaccacaacaaaaatgagctgggtatagtgttggacgcctgtagtcccagctacccaggaggcatgggaggattgattgcttgagcccaggaggggcgactgcactccagcctgggaaacagaatgagaccaactggaaaaaaa

SEQ ID NO: 584235 - DNA, 641 bp, Homo sapiens
gttctagaggagtccccggattggtgacatttcaagatctataacatcagaaataaacagataataacatgattgtcaatcacatgtgagaatgtgaccacccccaccagaatggctatgatcacaaagacaggcagtcaccagtactggccggcctttggcaattagagccctcatacagtgctggtgtctggaagtctaccggacacttcatagaccatctctttgttcctaaaaacactgtaaggtaggtacatttgtgatctcattttacagatgcagaaattggaggcccagcgggtgatgacctggccaaggtcacagagccagcaagatgtgctgggggggacagaacatgtaccaggctactcagtgagcaccagagcctatgctccctccctggtgtgcctcattcaacacccaaaaacatgtgagcaggagcaggagctggagccgcaggtctgtctgtgagcatcagcaagcagttcacccctctgcactccgaggtcctgctctaaaatgaggcaaggcagcagaggctacacctgtaatccagcactttgtgaggccaacaggaggatcacttgagccggagtgagacagccgggaaatggactaccattctaaaaaataaagtagga

SEQ ID NO: 584236 - DNA, 134 bp, Homo sapiens
tttctagaatgtgctgagcctgggggagataggaggctgatcagggagaaagctgaaagttggggatgagatccagagcttcttaattactgtgcccgtgacatgttacttgtgcgcccaataggctataggtg

SEQ ID NO: 584237 - DNA, 811 bp, Homo sapiens
  misc_feature (231)..(231): n is a, c, g, or t
ctgggttcgcgcgggcttcctcccgcccgcgttttagtgggggcgcgcctttcgtggcgctcccctcttggcaatggaaggtcgtctccttgccactcgcccggcggggttatattcgccgccctgtggtggatggtctcccccgcactgctcgcgggagatactactaacgccgcggatttttcatctcgcgcgcttacggaggggctttgtctcgagtgctcacacccngggtgcgcgcctccccctatagtgttgtgttagtgagtgagacaccccttccgcgcgtccgcccttatattatatcgggcgcgcccggcgttttattccgccgccggttattgtactcgcgggggtctctctctctggttgggtaccgcgtcccgttgacggaaggcccctcccgggtattccgttaggagctcttccccgcgtgcacccgccttgtgtctccgtcgccgggcagttctcttcggtcagtcgccgcccgcttgtcttcggtgacgccccacgcggcgtctcactccgcggggctactcactggcctattgttgtgggtcgccaccatgtgacgcctcctcaagttattcgttgtgtagccgcccccgcgatgtagtaatatttcgcacctgcaacaccgcccaacgatctcccacttggcggtttttatggaaggcctccgccgccggagaaacctggctcattgtgttgacataagagtggtggtgtgtgagctcaactgatacttgatgatggcaccagtacgactttggtaaggagagggtgcgtctaacaagaacattatacagaa

SEQ ID NO: 584238 - DNA, 916 bp, Homo sapiens
  misc_feature (35)..(35): n is a, c, g, or t
  misc_feature (81)..(81): n is a, c, g, or t
  misc_feature (92)..(92): n is a, c, g, or t
  misc_feature (95)..(95): n is a, c, g, or t
  misc_feature (127)..(127): n is a, c, g, or t
  misc_feature (140)..(140): n is a, c, g, or t
  misc_feature (146)..(146): n is a, c, g, or t
  misc_feature (183)..(183): n is a, c, g, or t
  misc_feature (190)..(190): n is a, c, g, or t
  misc_feature (194)..(194): n is a, c, g, or t
  misc_feature (199)..(199): n is a, c, g, or t
  misc_feature (203)..(203): n is a, c, g, or t
  misc_feature (207)..(207): n is a, c, g, or t
  misc_feature (218)..(218): n is a, c, g, or t
  misc_feature (226)..(226): n is a, c, g, or t
  misc_feature (232)..(232): n is a, c, g, or t
  misc_feature (244)..(244): n is a, c, g, or t
  misc_feature (259)..(259): n is a, c, g, or t
  misc_feature (275)..(277): n is a, c, g, or t
  misc_feature (280)..(280): n is a, c, g, or t
  misc_feature (311)..(311): n is a, c, g, or t
  misc_feature (349)..(349): n is a, c, g, or t
  misc_feature (357)..(357): n is a, c, g, or t
  misc_feature (363)..(363): n is a, c, g, or t
  misc_feature (384)..(384): n is a, c, g, or t
  misc_feature (396)..(396): n is a, c, g, or t
  misc_feature (498)..(498): n is a, c, g, or t
  misc_feature (502)..(502): n is a, c, g, or t
  misc_feature (837)..(837): n is a, c, g, or t
  misc_feature (840)..(840): n is a, c, g, or t
  misc_feature (908)..(908): n is a, c, g, or t
atagcaaagttgctcccttctgcgtcctgagaacncagaagtctaggtcctgtactttcactaaggctccttgtttttgcnaatcgcgtttntgncaaataaccataaggctacgtttctttggcgngtggttatgcgtntttccngggtccagccaggtcttccccctcgccccccagttcngcctttnaccntttgntccntccntttcttttgtnttgtttcngggggnctctcgggcggnggggttttctagttntgtttggggggggtannnggnttgggtgggggggaggggaggtttttttgtntggtggtctgttgggagggggtttgttttacatatacntgagacanctttantttttgccgcttttcttttanacctgggttatnactgacacccgatataaaccggtggctgcccctggggtgtgggtcgcactggctggccagctggcccgcctgcccaatgccagtggctcaccacagctgtgnttcntctggcacatgacagacaacactggcctgacagtggctgggtagggagcaaacagaggcagtggcatggcccactgtctcaagacactcagggccaaattaaagaacagaaaatgcaagagagatgagatgcgtgcttctgttgctgtgttaaaggtgacctctcccacaggttttctgtgcctgcctgcaactgaggccccagctttcaggtgctggagagtgtccgcacctctttgggggtgagggactaacgctttttatagctggtttgctatagagttctgaactcactttgccgtccttccttccacgcggtccttcttcgcaattttnttngtaaactggtagcagcatttcacaaaaagagttttgaggggagagcgcgagagaccgcgtgacccccncccccccc

SEQ ID NO: 584239 - DNA, 370 bp, Homo sapiens
  misc_feature (15)..(16): n is a, c, g, or t
  misc_feature (94)..(94): n is a, c, g, or t
  misc_feature (96)..(96): n is a, c, g, or t
  misc_feature (98)..(98): n is a, c, g, or t
  misc_feature (100)..(100): n is a, c, g, or t
  misc_feature (104)..(104): n is a, c, g, or t
  misc_feature (106)..(106): n is a, c, g, or t
  misc_feature (108)..(108): n is a, c, g, or t
  misc_feature (110)..(110): n is a, c, g, or t
  misc_feature (149)..(149): n is a, c, g, or t
  misc_feature (160)..(160): n is a, c, g, or t
  misc_feature (170)..(170): n is a, c, g, or t
  misc_feature (181)..(181): n is a, c, g, or t
  misc_feature (310)..(310): n is a, c, g, or t
  misc_feature (340)..(340): n is a, c, g, or t
gacaaagggaatttnntcctatttaaaaagacccaagtcacagaattcttaatttagaaatttcaaggtattaattaacatatgtatatatatntntntntgtntntntntgtgtgtgtgtgtgtgtgtgtgtgtgtataacaactttntgtatataggntctgccaggnaaactgcaggnattgagtatgtcagattttggtatacgtggagatcctacaaccaatccctacatacaccaagggatgactatagttacgtgtggataaactccccttaataaaatgtcttatgttactaaattttgagnattatgagatagctatttttatatattccntttgtcatctaaatactccaaaattatttt

SEQ ID NO: 584240 - DNA, 102 bp, Homo sapiens
tttttgctaactaaagtagtttaaacactggaaattgatgagattgctcatctgctgggtgatcctctataagtcgacctttcattgcagtcaatgcttgtg

SEQ ID NO: 584241 - DNA, 220 bp, Homo sapiens
atccaaagaattcggcacgaggtgacgcccatcaccgttgtgaagcaaggctttgagcctccctcctttgttggctggttccttggctgggatgatgattactggtctgtggaccctttggacaggccatggcttagctggctgcctgaggaggggcaggcccaccccatgtacccgttcagtgcctttggactgtccttccttaagaggccttatgagt

SEQ ID NO: 584242 - DNA, 188 bp, Homo sapiens
  misc_feature (45)..(45): n is a, c, g, or t
  misc_feature (78)..(78): n is a, c, g, or t
  misc_feature (110)..(110): n is a, c, g, or t
  misc_feature (185)..(185): n is a, c, g, or t
gaccagcagctgtggacattatgagaaagtgaaacctgagatccnctgttgattgagaaatgcaacacctcaaaatgngggacagctcctgattaccaggtagaagatgnaaacaactggggtgtccattcaggaggaaacaattgcaagctaagaactgttgagagtgaagctgcattttctgnacc

SEQ ID NO: 584243 - DNA, 155 bp, Homo sapiens
tccttctgccttctgtagtgtgatgatgcagcaagaagacccttaccagatgcaggcccctcaaccttcgacttcctaacatccagaactgttaagaaataaaatttattcctttccttttcttcctcctttcccttctcctcccttttcttccc

SEQ ID NO: 584244 - DNA, 105 bp, Homo sapiens
tatctagagatcctgtgctaggtgagtgatggacatctcggtcactgatcctcgctccgggtcaagtattctcatgctcagctctgagtagtggattacaggtct

SEQ ID NO: 584245 - DNA, 351 bp, Homo sapiens
gtggtcagcagcctgcaggactgacccctcacttgaccagtcccattcagatccggcttggacatgcacctgagatggtgccagagtgcggctgagtcttggcacgacagacataccctttgcgagttgcgcgctaaccagcccttctttgcaactggtctcaaactgctctgtttaattgaaaaagagagctatgcctttttttctttttggaagtaaagcagctaaaaacatgtttctctaggtgagtgttggacctcacaccctccccttccctgtacatttgtctttggtgctggacgtggccatgtgaggccaggttgaggccctttgtagacaacatacagttgc

SEQ ID NO: 584246 - DNA, 278 bp, Homo sapiens
tctgagtgcttcctctcctttgcccgccgctgcgcgctatggcatctcaggctgccccgctggcctgctgctttgccctttcttccgagcctggggcccctggggcgagatcgtctagcgctggctagctggcgccagtccctgcggcctgacatgtcctctgctgtgcggctggcagctgtgaggctgctacgcaaatcgggtggcgggccctgacactgagcccatgtggcctccttttatcagctctatgtgactccccatcaccaacagcactc

SEQ ID NO: 584247 - DNA, 934 bp, Homo sapiens
  misc_feature (309)..(309): n is a, c, g, or t
tttgcacaattttgaaattattcaactgctttttttgactacatgtttccatactcttagagtctaacctcttctcgcaccacccctctgtgctccttggcaacactggcaacaggcacattccggtagggtgccacaccatccagctcgacatgtgtccgaaactattccccccgactatctcagttggttcaaagccaaacaaatcgcatcttcctcaacgagtcgcttacagaaagattggtcccccgagcttaattccagctacttcccttcatagaagggggcctgttgggcaccaaccggaanaaacggtgctacacaagacagacgtgacatgccgatcgatgtgacaacaacaacatttcgcgtcttgcataaaagggtcacccccttctattctgcactggcgggaaacccacgaaatgtgtttaggaaccaagttcttcctagggccaccctccctccattgtgatacacacttcaagtggccccctcttccccaattttttcgccccattcaaatgcgtaatacttgactttcttcctctgtgcccccccttttgtacgccatctccctatccagctcagtccacttatcccatgttcccctccggctgtcacattcatctgctaatcaacgaaccacgggttgttaatattcaacaccagaagacacggttctctttaaatcgccccctttaaaacatcggcgcaacgagggttggatactccccgacccgtccgtaccttgtattcccttgtaataatcatagagcaagtattttccttatttcctcgatacaaagcctcttcttagtgaaagagatcgttcaggcaaacaatcaatcattctccttttgcaaagggcccctatctacaaattgaatcccaacaaacatatcttttttctttcaccgcccaacaaatacaa

SEQ ID NO: 584248 - DNA, 814 bp, Homo sapiens
  misc_feature (2)..(2): n is a, c, g, or t
  misc_feature (191)..(191): n is a, c, g, or t
  misc_feature (366)..(366): n is a, c, g, or t
  misc_feature (397)..(399): n is a, c, g, or t
  misc_feature (516)..(516): n is a, c, g, or t
  misc_feature (535)..(535): n is a, c, g, or t
  misc_feature (587)..(587): n is a, c, g, or t
  misc_feature (656)..(656): n is a, c, g, or t
  misc_feature (662)..(662): n is a, c, g, or t
  misc_feature (671)..(671): n is a, c, g, or t
  misc_feature (675)..(675): n is a, c, g, or t
  misc_feature (685)..(685): n is a, c, g, or t
  misc_feature (693)..(693): n is a, c, g, or t
  misc_feature (729)..(729): n is a, c, g, or t
  misc_feature (737)..(737): n is a, c, g, or t
  misc_feature (804)..(804): n is a, c, g, or t
antactgtttaagtagttcaaataggcttcctcactattaatttgcttcagtaaactcttcagcttaactcattatcttaaatttcagaattaatgaggttttactgtaaaagtagaaaagcaaacacttcaaatgataagactccagtatcacccatactaaaaacttagcaataaaactgcagtttganaagctactgtacaatgcagccagggctaggtgtccatcctgctgggggcgggccgggtaagggccggggaatctgcccggttttttccctgtggttcttagactccttcggcataccggcctgccatctccccatggcacccacctactgctttttggggggccctccggttccngctttttggggcgggggggggggtttttttnnntgtgggcgcggtggtgggctgttccccttcggttgggcgtccccctccccccttggcggccgggtgccgccccccttccggtttctggctggcctgggtgcgggcccccttgggccnctccccccccccccccccnctcccttccccctgggcttccgccttcccctttcccctggggctcttgccgnccgtcctccttccgggccctgtggctttcattacggtcaaatctcaacatgtctcccgcagagtttatnacatcngttattctnaacntgtacatttngctttggnatgatggagagacacagagatatatgtccgcgtccngcgtctcnctccactccgcgtctgggtccacacccttccaggctttgtctggcacattatgtggctggtgcctgnttccccagtg

SEQ ID NO: 584249 - DNA, 257 bp, Homo sapiens
ggtgcgacataaaccttgcttgagataatcaccagttttttgttcatcttcaactaatagtattctcatttccgaatcctaagtcattcattaaaactatgataacgttataaaacatctgatcgagatagattacaaaaatgtcattttcaagtcacttagatgttcagtgcttcactttattgtagtagcaagaaattaacttttagagaaacttatgaaaactgtagtgcgtcgtattacaattgtcgacgcgg

SEQ ID NO: 584250 - DNA, 1285 bp, Homo sapiens
  misc_feature (1036)..(1036): n is a, c, g, or t
  misc_feature (1116)..(1116): n is a, c, g, or t
  misc_feature (1119)..(1119): n is a, c, g, or t
  misc_feature (1125)..(1125): n is a, c, g, or t
  misc_feature (1140)..(1140): n is a, c, g, or t
ggaaagagaataaaaggagaaagtcaaaaaaaaagagaagaaacaggaagaagaagaaacgatgcagcaagcgacatgggtaaaatacacatttccagttaagcatcaggtttggaaacaaaaaggtgaagagtacagagtgacaggatatggtggttggagctggattagtaaaactcatgtttataggtttgttcctaaattgccaggcaatactaatgtgaattacagaaagtcgttagaaggaaccaaaaataatatggatgaaaatatggatgagtcagataaaagaaaatgttcacgaagccaaaaaaaataaaaatagagcctgattctgaaaaagatgaggtaaaaggttcagatgctgcaaaaggagcagaccaaaatgaaatggatatctcaaagattactgagaagaaggaccaagatgtgaaggagctcttagattctgacagtgataaaccctgcaaggaagaaccaatggaagtagacgatgacatgaaaacagagtcacatgtaaattgtcaggagagttctcaagtagatgtggtcaatgttagtgagggttttcatctaaggactagttacaaaaagaaaacaaaatcatccaaactagatggacttcttgaaaggagaattaaacagtttacactggaagaaaaacagcgactcgaaaaaatcaagttggagggtggaattaagggtataggaaagacttctacaaattcttcaaaaaatctctctgaatcaccagtaataacgaaagcaaaagaagggtgtcagagtgactcgatgagacaagaacagagcccaaatgcaaataatgatcaacctgaggacttgattcagggatgttcagaaagtgattcctcagttcttagaatgagtgatcctagtcataccacaaacaaactttatccaaaagatcgagtgttagatgatgtctccattcggagcccagaaacaaaatgtccgaaacaaaattccattgaacaatgacatagaagaacaagtctctgaccttgccagtagaggncaggaacccagtaagagtacaaaccacaaggcaatgattctctcatcgatgactctaaactagccagtgcagatgatatnggnacttgnatctgtaagaaccanaaaaaccgtctcatacaggcaggcaagtgaacaccatcggtccttctatcaagagtgcttacacattcatcaatgcctaaaaagctccatgactacagatgccccactcttgaacagagcaaaggctagcatgacatgcatgtga

SEQ ID NO: 584251 - DNA, 1513 bp, Homo sapiens
  misc_feature (1264)..(1264): n is a, c, g, or t
  misc_feature (1344)..(1344): n is a, c, g, or t
  misc_feature (1347)..(1347): n is a, c, g, or t
  misc_feature (1353)..(1353): n is a, c, g, or t
  misc_feature (1368)..(1368): n is a, c, g, or t
gataaagtacatcttcctggcaaatttacaaagcattggtttatcttagaatattggaggcttacaaggccaatttgttgaaattgttataaaactgtaaaattgtgttacattttacatgctaaaaaggagtattagttcattaatctttgattcccagtgaaaactaaattgattagtaaattttttttgtccccacttggaaaaacctggggatgattagtaaatttcatttgcctgactttgaaacttgtttggtaaaaatgcataaaaccacatgtggtttataagcattgttattcttattgtttaatcaaaatgttttcatttacaccaggtttggaaacaaaaaggtgaagagtacagagtgacaggatatggtggttggagctggattagtaaaactcatgtttataggtttgttcctaaattgccaggcaatactaatgtgaattacagaaagtcgttagaaggaaccaaaaataatatggatgaaaatatggatgagtcagataaaagaaaatgttcacgaagccaaaaaaaataaaaatagagcctgattctgaaaaagatgaggtaaaaggttcagatgctgcaaaaggagcagaccaaaatgaaatggatatctcaaagattactgagaagaaggaccaagatgtgaaggagctcttagattctgacagtgataaaccctgcaaggaagaaccaatggaagtagacgatgacatgaaaacagagtcacatgtaaattgtcaggagagttctcaagtagatgtggtcaatgttagtgagggttttcatctaaggactagttacaaaaagaaaacaaaatcatccaaactagatggacttcttgaaaggagaattaaacagtttacactggaagaaaaacagcgactcgaaaaaatcaagttggagggtggaattaagggtataggaaagacttctacaaattcttcaaaaaatctctctgaatcaccagtaataacgaaagcaaaagaagggtgtcagagtgactcgatgagacaagaacagagcccaaatgcaaataatgatcaacctgaggacttgattcagggatgttcagaaagtgattcctcagttcttagaatgagtgatcctagtcataccacaaacaaactttatccaaaagatcgagtgttagatgatgtctccattcggagcccagaaacaaaatgtccgaaacaaaattccattgaacaatgacatagaagaacaagtctctgaccttgccagtagaggncaggaacccagtaagagtacaaaccacaaggcaatgattctctcatcgatgactctaaactagccagtgcagatgatatnggnacttgnatctgtaagaaccanaaaaaccgtctcatacaggcaggcaagtgaacaccatcggtccttctatcaagagtgcttacacattcatcaatgcctaaaaagctccatgactacagatgccccactcttgaacagagcaaaggctagcatgacatgcatgtga

SEQ ID NO: 584252 - DNA, 1328 bp, Homo sapiens
aaaaaaaaaaaaaaaaaaaaaaaaaaaaaaaaaaaaaaaaaaaaaaaaaaaaaaaaaaaggggggggccctttaaattttcccccgggggggccccatttttcccttcccccttttttttttaaaagggggccccctagatgagaggccgctatttattataagcactacgagaacgacggggcgacgctggtataaaacaacagcttgtggacgaggggggaaacaaactccggtctacctggggactacttctgcggtggagagaaaacctctatatccgtgcgggggggggcgaaccaactagtgtgggcaactatcctcctctcgacatgagtttataaagcctctcaagaggggaaacattatataaaacttctttacacagcggtgtgtttatagctggggtgtgtgtctaacaacccaaccaagcagcaggcatataattctagccgtcgcggaggcggaattagaacaagaaattttgcgtggtctaagctagcgagtagtgactttgtttatttcttctagtggaggaaacattttttttttatccccgcggcggcctcttttcttttgtctaacatactactccggaactataggagaagtaacacacaaaaaaaagaaaaaagaaaaaagagaagaaaaaagaataaaggaaaaaaagcaagcagtacgacagaagaaatcaaagcaaaacaaaaaaatataagatagaaggtaataaacagaagacagacaatgaaaaaagtaaagcagagagaagacaaaaaaagagaaacaagaaaataaaaaaaagaaaaagaacgaacaaaacaataagaacccaaaacagacaacaagacacagaaaatacaaaagaaagaaatagaaaaaaaacaaaataaacaaagacaaaaacaaaacaagctaaaaaaacagaacagaaggaggaaaagacaaaaaaaaaacaaacacaaaaacaaaagaaacaaacaaaacaaacaaacaaaaatcaaatacaacaaaagaacaacaacaaacatcaaacagaggacacagaagacagcaacgaagagaggagaaaggagaaagacaactagcagaaccagaacaagccgcgagcacacgacgtcactacgagaggacggaagacagaacaggcaagaagaagaagagagagcaaggaagcacaacaaaagaaaagaaacacaaacgaaaagagagaagaaacgcgaagaagaaaaaacaaaaaaaacaaagacgaaagacagagagaagaggagcaagggacgagaaaagcgaggcaagcagacgaagcacaagagcacgggaaaacagacaagg

SEQ ID NO: 584253 - DNA, 1052 bp, Homo sapiens
gcgtatgcacctcgctgctccagcctctggggcgcattccaaccttccagcctgcgacctgcggcagacacaaaaattacttcattttcttgccccataccatcaccttgcaggcgcagcaaaaacacattacacattttacacccatgcagggcaaatcgtgcacatccaggctggtccagtgtggcaacccagatcggatgcccacagtactgggcaggtgcatcagtgcatgaaccatggccatcgcacccccaccggcaacctcaccacggggcacagcgcaccatgcaagcatggcaccgccatctcgtgctgtcactaccaaatgaacgccaacaggatgagcaaactatgatatcctcgatgaccaatccatggatgagatcataggacaccatggagaccaatggacctctgattcagctacaggatccctttatgagccagcatcatttcagacccagcacacactattgatcatttggatcagatcatggggacagcgtaaccaacctggagccaaaaggtccacataccacagcaggagcgccggagcatgagttgaatatcatgtaccatggactgtagagtactggaacggagagccagagtcgcatgtcgaccatgcctgacagggccttcacagcatagacccacatctactggcgcgggaggcacacacggactctgagcaatggggcacctcaatcctagatccagcaacgatccagagaaagaagtacccctgaaacagcatcatcgaataacctacagaagagagagccatccacacacaaacgagtcatgacaaccgtgagacgagaccctacgagtgacataccatctccgacacaacaagaggacaagaaacacgatgcaaacatatggcatgacacacgagagcccacataagcgaatctgactcccgacatcgagagctaaccaaacaaaacaacgaggaccaaccaccagacacagcaacacgagtggagaccacaggcccggaaccaagaacatcacaggaacacacgaaaatgacgcacatgagc

SEQ ID NO: 584254 - DNA, 185 bp, Homo sapiens
agaaattgtgggatcctgtggggaaggagtagactcattcccagtacagcgaatacatcctatcggacgggaactgaggcggacagccccgtgtacccaccgtcatccggataaagcaagagcctctggactaaatggacatatatctaatgcaaaaaggaaaacacacacaaacaattcctcat

SEQ ID NO: 584255 - DNA, 845 bp, Homo sapiens
tgcccgcttttctgactgaggctctccgtgcagtctgacctttgactcgtggtttctggagtgcagcctcctgaccccatgtggacctgcctgtgtggctgtctgcggacccagtgaggagctcgtccgccagcccccaggagcaagaccaagaccgcaggaaggactggtggccacgtggagctgctggaggtgctccagtgcgcgggtgcggcagctgcagtgctgagagcgtgtcggaggtggtggtgaacagggtggatgtggctgcgtgctcccagaatgtggcagtggacgatggtagcctccagccacccaggaaggtccagatgggtggccaaggatgccagcaccgtgtgccctgtggacagctgggcaaatgatactggagaacggataagcggacccatcagatgcgtatgcagcggttgaaggcgaatctgcagattgccattccagagcggggagttcaacggcgctgagacaggcgcactgcaggtggagccccggctcctgagcaagcagatggccgggtgcctggaggactggcagcgcaagggccgccgagagcccactgggaggcagcagctgggacacgggactgcatgccgggaggcccccgtggcaaggcttgaagcccacagaaggtgcatcaagggccgacggacaggggcaaggcacgtccgcatgggcacaacgcacacgagtggtcagccaagccagaggcggccataggcgaattcgatccaacagctgcttgccatgaaccaactgacccagagtagccccctcgaaccaagcaacatggcaggggccagccgcaccccagggcacgcggcacggaa

SEQ ID NO: 584256 - DNA, 417 bp, Homo sapiens
ggtgggcgagagagagctttgacatttactcactgaatgcgccctgatgcttaatgagtggcacgggtcagcagcaccgttgtggagctggggctctcagctggtgtggggggggggtcatgtctctggctaaggagcgtacctagcctgcctaagccatgagcctgttggggtggcatgaacagtgactgctcttcaccccaaatgcagtgtttctccttaaggaggcactcagacatttaggaaacggggggaacgtagccacggtgctgttctgggatttgggggctcccccattctgggtgcatctcttgcaaatatgttatgtgctccctttcacggatgagcaaactgaagctttgagagtctcaaagaatgttctttactagactgaaataaaaactagaaacaaaaaaa

SEQ ID NO: 584257 - DNA, 774 bp, Homo sapiens
actgtcaaatttccgggtggggataaatgtgcattgccggtttggtttgggatatggaagatgagggacgcaaggcacgggaggttgtgagtggagttgttttggtctgtaggccatcccagcccacccaggtcagagtacacattcaccaggagccagctttgccataactgcttaagggtgggggttctttgtggaagaacatctgttaccctggacacactgggccttccaaaggccggattggttatgagcatgtgggtctaggggtgactcagatattgctgggaggctgtgagtggagatctgggagtgacactgaactcggagccctggactgtgctaagtgcctcatgctgtgccttgtgaccgaaatctggggagatcgcatcaggatctggggccattgaccattacaaggactcggtcatacttgctggttatatagccagccatggtcacactgaggagactcagctacgagctatggagtggtgtcgatctctgcgtgaatagctacatctgacgaactagaccgtgtttatacatagcccactgtgtgtgatcgctgagaccatgcctttcctagccctggatacagatggatgccgggtattcatgactaccactggcagcacgaggtgggcatagcttacatgcaattgctgaggaagttgctacagcagtccctgccctgttacttggtgaactgtgccttgaaagacattgcgtccctggcttccttgggagtacggcttagaacttgattgtgca

SEQ ID NO: 584258 - DNA, 105 bp, Homo sapiens
tatctgactagcatacttcaaacacagcagaaggtaaatgagtctgttattgtaagtaaagccgtttcttgcgaacagcgaatggtggtccatgactgagtacct

SEQ ID NO: 584259 - DNA, 436 bp, Homo sapiens
cgcgggtgcacatcacttgtattgtctctgaggaaggcggcgacagctcatgggaggtcaagggtcgagctcatcgtgtcttgtgcctcttatcccacgacctacagttatcatcccctcctctgcccaccattggggaccgggcagtgctgacatgctcagaacaagatggttccccaccttctgaatatacctggttcaaatatagtatcgtgatgcctacgaatccccaaatcacccgtgccttccccaactcttcctatgtcctgattcccacatcaggagagctggtctttgatcccctgctcagcctctgatactggatcacttccgctgtcaggcacggaatgggtatgggacacccgtgacttcgaatgctgtgcgcctggaatgctgtggagcggaatgtgcgggtcatcgtggctgccgtccttgt

SEQ ID NO: 584260 - DNA, 325 bp, Homo sapiens
tgcaccgtacattcgtgtccacataagagaccacctgacaggcttagtgtgagcaacatggctgtttattcacttgtgtgtgagtgggctgagtccgagaaaggggtcagcaaaaggtggtgggattatcattggttcttataggtttgggataggcggtgtagtcaggagcaattttttacaggcaggggatggatattacaaagtacattctcaagggtggggaggatgttacaaagtacattcacaagggcagggagggtgtatcgtcacaagggcagggaggatgtattgtcacaagggtgggggacacgaatgttcaggt

SEQ ID NO: 584261 - DNA, 242 bp, Homo sapiens
  misc_feature (6)..(6): n is a, c, g, or t
  misc_feature (70)..(70): n is a, c, g, or t
  misc_feature (157)..(157): n is a, c, g, or t
ccctgncaactccttgcatggactgatgctggaaactgggtcagggagctccaggaggaaccagacaggntcctgttagcaggctcaccacaagttctaaagggcaccagccttgagaagggcagttgggatgtggccaaatgtgaagccaggtttnctgggatcctgactgtcccaggttacaagttcctggccactctgtgaaccttgggcaagttaacttccaacctctttacaagttc

SEQ ID NO: 584262 - DNA, 249 bp, Homo sapiens
acgttatgtgaaaatatccgaattcaaatcacactcggatcttcaatgattcgagtgtgtatccgacacagcgcgcctggagactgagtgaattcctcccatgcatgcccatccccagtcaagtccttcctcatcaccgtccaccagctcacacagtgtcgtagctggctgctcgagcaatttccacagatggtttctccgtgtctttggccactcttgacgtagccaccctatgccccgattcttcag

SEQ ID NO: 584263 - DNA, 1009 bp, Homo sapiens
tggaaatttcctccttttttgccccttgtggctttgaggtattgctatggtgccagttacttgaatgcttgtttttcaaatggcaggtgacatggggtcagttattctcttttttttttttttggaaagggattctcgctctgttgctcaggcgggagtgcagggacatgatcttggatcactgcaacctctgcctcctgggttcaagcaattctctgtctcagcctcccgagtaagccggggttacaggtgcctgccaccacgccgtggctaactttggtatttttagtagagacagggttatcatcatcttgaccaggctggtcttgaactcccgacctcatgatccaccgtgcctcaggactcctaaggtgctgggatcacaggtgtgagctactgtacccggcctgcttgggtttcctatctgtggctctgccacctagctgtgggttcctgtggccaagttacttcatctctcgggtgccctcaggcttcttccaaatgtaaaatgggggataatgggatctgctctcatagggttgtgacaacttactgagtaatgctcttagaagagtcacctcattttgtatataaggcacgcaactgtactctatcgtaatgcacgaaggttactcctgttgtatacactcacataccctggggccaagattggtttgttttgctcgaaaagcagggcaattggagactcactttaggtcggccctgtcgtagaacacgtggtctaaattgccactttgtctattggtaccctggccactaaggagcttgtttaccacactgtggctggtggtgagtgtccaaccaccggttgtattgcaaggttttaaacacttgtcggggagaaacacggaaacgccagacacatctttccaacgcttggtgcatgaacacgccatgcgtggacaaacaagggactagatcagagcaacagccacgtaagcagcatatagagaaacgacatgcagctgtcgtaccctgcactaatacg

SEQ ID NO: 584264 - DNA, 999 bp, Homo sapiens
gccaggccctgtgctttggagtcctgggagtcctcttcatggtccgctcagtctaggctttatgtttgccaactgtgggccacttaggccacgagccgcatgtctggacactgatcaggccctgctggcccagagtccctgtgcgcatgcacatggaggggtcagggccgctccctagggtccctcctgcccaacatgtgcgcaggtggttggttcccatgaacgtggttgtcagaggcggggagacatgcagaggctgcagacatggcccacttcaactctcctcccccagaggatgctcaatggtcttggatcatggcccataatcccaagccgcgaaccccatgggaggaggaggatggaggaagacagaggaggaggaggaggaggaggaagagagaggaggagtgcggacatcgcttaggttgcaacgtactctgcggcagtccaaggttgctgctcatgctcgtaccgtatcagtgtcgagcaaggcatgtgtggtacacgagagttcactgctccgtggcgttgcagtatgagtatcactgacagaatggtggaaattaccagactccgagacccaggtgagggggctggtcgcaggacaaacagcccggaactcaggggctcctggtggcgagcaccggggacacagctgccaagacccaccaatatggatggggcccgtgggctggatctcgtgggcaccctctcacagctctgccaggagaccctgtcttccccagggccatcggctctgcgttggaaaactcgtctcaagaagcccctttccccagaagagggtggtcttcaaggaagtctcgtttctttgggcctgaaaggtcagtttcaggagaacgatgtgaaaatttccggggtagaggtacacgcttctatgtgtggagtccagtaccaaaaggtgtgcaacgtgcagcacagcatgaggtgagtcggcaaaagaggccagtccaagcaaaggggcgttgtgccttgtgacgg

SEQ ID NO: 584265 - DNA, 534 bp, Homo sapiens
gagaaggcgtgtgtcttattctttccctgcgtaagcggcccacgaggaaagggaacccctcccccatatcaggcgggtgttcccaaatggtcccggttgccacggcccacgttggctgccatagaggcccactgtcccccatacgagggatcgaaccccccgccctcgcaaaatgtttggcttttgtgatacaatcacggtgatggcacaactgccagtggtggggcttaacccagtggtaagacacccttgtaggctgcgggtgcctgcccccggtgaggaggcctaagcccaaaagcggtatcccccctccagaacgagaaagcagagcaacactcttgaattcccaccatccgggatggcacaaaaccctttgggcttaaaaagggaacggccttggggttccgcggcccaatcctttgtgtttggccgcccatgatgggaatgatgccccgcaaaaaaggtgccaaaagttccttaagggtttcccccagtttgaaaggtcccccttttaaaaaattgggagaaaaacca

SEQ ID NO: 584266 - DNA, 1560 bp, Homo sapiens
  misc_feature (1014)..(1014): n is a, c, g, or t
  misc_feature (1088)..(1088): n is a, c, g, or t
  misc_feature (1147)..(1147): n is a, c, g, or t
  misc_feature (1186)..(1186): n is a, c, g, or t
  misc_feature (1290)..(1290): n is a, c, g, or t
gttgatatcttgctcgtgggtgtgccccccctcattcggccagttattttaagggtttgttcgcgcacaccaagaggggggggtttttcgcctgtgtttgcaaaaagaggggggccccagctttttcccgcggggatatccccacgggggggtctcgccgccaccgttggggccttttataggatatgttcccttaaaaagtgttgtgtttgttatacgcaccactaatcgaccctcgtggaaacggcgggaggaattatttcctatatctccttgggcggcgcaaacgacccaccagtagtaaattttggctccgcccctcgtccgacacgtgcctgggaaaattttgcttctcgccgcgaccaaattggtcccctggcgctctcctatattggaaaactgttataaagggtttccggaaattctacaagcgcccagcccacagggttatatgcgccaacccaccctcttggaaggggatattccgccgctctcgcgccaaaattggtatataaaagggacagatatgggccgcttcttaaaggcacctttgttaaccacacaggggggttttgcctccccccctctctcgggattgaggcgcccacgatttcccccttgagcccccccttgagtggaaagatgttccgcccctcgcgtttttggggaccccggagctctgttttgggacgcgccctcggggagcccacagtgttttgtggggtgttcgccttaatggccccctcccgccccgctggagaatggtgtgcacagacaggccaccgagagccacgcgctttgcggtgtggggagaagacacatatttgttaagagccacgcggtgttaaaccaaataagagccttcgggagagtttctcttttgggtggccacacatcgtggttgtgttgtctcccacggcccgctcgcgctcgagatgtttctcgtgtgcgtataataactcgctgtgtttggaataataaaaagagaataaaaagagtgtaccccccactggnctcttctctctgcgggtggcccctctcccagagagagacatctgggggatattttaaaagaggggtgttatagnggacagagcggactctgtgtgtggggcccccctgtatatctcatcacactcgagatttngggtgaacccctcgagactcgcgcacactcaccacgctnggtgtttcaattctatatgagactctccgctcgagaagagtgtctaactctccacgagactcttcctctcgcgacctctcctcccaccccgcaagagagaggcnccacagagagttcttctcgagagaaagaaagagctctgggtgtaactcccgctagattaggatccaagcccaatagtgggactcgaatatctggctctgttggaacacgctgttggaagaaaagatgcccaaagaggactctttataataatttggaccgctgttagggaattgtctatatcctggtaataaattcaccgtagtactcttgcttaaaggcccagagatttccagatttactgcttggaattaaccccactcttccatgga

SEQ ID NO: 584267 - DNA, 235 bp, Homo sapiens
atacccagtgggtgagagacaacatgacacaattatattctattgatttaaataaaactatccttgacattttagtgtgtaaatacatccaaacataactgtaattatcttgaaaacatatatgttatgggtattgggatacctggactttctgctgtttaggagtgtgtccttgtaggtatctgtaggctgttcactcaactgtaaatatcttcttaatgtgggtagtcacaga

SEQ ID NO: 584268 - DNA, 143 bp, Homo sapiens
tctgaggatcccagcagccgtctgagaactcgtgatggtggtgtgtcgtgataacgggtggacgacggttaaaggacgccactatattacgtaatcgttgatagctcgaactgactggctcaggcgtgacttcactatgagat

SEQ ID NO: 584269 - DNA, 318 bp, Homo sapiens
acagggagagagggggcattcagcgcctgtctcatggcccctgggaggaaattttaacacaagaaagaggaaaacccaaagacactgttgccaaacggcttaagctgtagcacgaaagaaggctctgggcaccaactgtgtgttctgaaacggccttcaaaccaagctctgcaggcacagggccttgggagggctgggctctgacctgggggtagccaagtctttaccaactcccaagaccaacctgcagtgggtccacccaagggtggtccctcccctaccggcatggaacacaccctaaggcacctgccacctgaa

SEQ ID NO: 584270 - DNA, 335 bp, Homo sapiens
cgtggtatccctagggtctagcctccacattggcacacaaagtaatcaatatatgtttctcaaatgcatgaatgggcaaaggcacatgatgataaataaatacttcaccacagtgagagaacagtttttaaagcgtgttgttgcagaaccaaactgtggcaggccttactcagattttattcggtgggcaatgaggaactactatttttaaatggggcagtgatacgaccaaaactgagctaaaagaagaataaactgacaaaacataaaacaggtgacagctaaaagagaaaacctgcccttaactatgctattgaccttatctgcatctgagg

SEQ ID NO: 584271 - DNA, 169 bp, Homo sapiens
gtcacctataggaacctgagcactcgtatacagagcttcgggagatcaggccatagatcccatgcatcgtggtggctatataaattgatgcagactaacgtgacccaataaaagcttctaatttgccaacgaagtctccctggccctgtttttcgtctcggctgctgat

SEQ ID NO: 584272 - DNA, 574 bp, Homo sapiens
agcggatgggtctgacacggaacgaatctactgatgacgattttttacagaacctagatggcgtgagcagtgccctggtacaacgtggatgcccgatgttcatggaccgccgctgtggtatactaccggaagccattgctggagtcaggcacactgggcaccaaaggcaatgtgcaggtggtgatccccttcctgacagagtcgtacagttccagccaggaggcacctgagaagtccatccccatctgtaccctgaagaacttccctaatgccatcgagcacaccctgcagtgggctcgggatgagtttgaaggcctcttcaagcagccagcagaaaatgtcaaccagtacctcacagaccccaagtttgtggagcgaacactgcggctggcaggcactcagcccttggaggtgctggaggctgtgcagcgcaccctggtgctgcagcgaccacagacctgggctgactgcgtgacctgggcctgccacaaatggcacacccagtactcgaacaacatcgggcagctgctgacaatttccctcctgacagctcaaagctcagagcgccgtctgt

SEQ ID NO: 584273 - DNA, 253 bp, Homo sapiens
aattcgcggccgcgtcgactcgacgcgagggaccaggacatcctcgtaatgggagcgatcaaacacaccaagcattccgggttccggcagagccttcttgacgcgccaaaggaagtcatgtctgagttcctcctgcgtcggggctttgaagctgtgatggttgatgccttgcgggtcgaccatcgcgacaacatgtcgtaccactccgcctttgccggcagtgtccagcccctgtgtcgacgcggccgcgaat

SEQ ID NO: 584274 - DNA, 788 bp, Homo sapiens
aagggacaaagaccaacgccccccaccgcgcgtgaacaacagagcgggctctaagcaaagtgggggggaacgcacacaccccgccaagaggggtgttctctccgcgcgaacttccccacagaggtgcctcacggcagagacgcgcaccacaagggggacccccactccaacagcagacatcttttccatcgcgcagggacaaacggctacgaacgtagtcacaaagaggcacacgagacccaatcggcggatcgtccttagttggggcccccccactctcccctctctcaacacaagcgcggacgaggaaactgagcgagggaccgacgggttagagagaaacaagaaggagtgagagcatgcagagaacgcacaacatacaaggcgcttcccacccagagaggccaccggccggcacccgtccacttcggggcgcggactgtgtgaggcaaagcacccacccgttcgagagaataagactcgatcgagggagagcaggcagccctatggcacacccgcagcgcccacactatacaatatgtcgacacagggtgccaacagcgcggcgaaacaaaagtgggacggggcggactactagaatgcacgcagaagaggatggcgacagatgggcggcacgcctccacgcagaaggtgacctcacctcaggtactcctctagagggccccccaagcaccggagacaggcagtatcccttgaccctgccccgcgcacccactgggggggaacccccctcatcccccaccatttcggttgaccccaacataaca

SEQ ID NO: 584275 - DNA, 651 bp, Homo sapiens
gagagttagagagagagagagagagagagagagagagagagagagagagagagagagagagtgtgtgagagatagagagacagagacagagattgagttctatttttatatccatattcttgtccttgtcatatttatattcttcctgattctgatatccgcatctcaattccattacctgtctctgttctagttcatatttatttttgttctgtgtgtggttcttgacagttcttgtacatgtacatatacatatacgtattctttctgctatttctattcctactactactacgtccttactttcactcttaccataaccctacttactatcacttcactttattcatcctctagctcgctcccgattcccatctctagctatacttatccctattactattccctttcccttgatttacacctttgtgactggcatggccctgcccttaccaatctcaatccccttcttcctcctctcctttctgcctgctttcgctatagcgtccactcccattcctatttccatatccatctctttcccattctcctttgccatttcttctgtagcgttgtctttcgttctttcccttcagttttgcttcttcctctttatctcttccccttatctcgtcatcgcgcctttctttt

SEQ ID NO: 584276 - DNA, 170 bp, Homo sapiens
  misc_feature (37)..(37): n is a, c, g, or t
  misc_feature (96)..(96): n is a, c, g, or t
  misc_feature (137)..(137): n is a, c, g, or t
  misc_feature (148)..(148): n is a, c, g, or t
agctcggcacccctagtgccactactctggtgaccgnagcagcactgcgctgtcagtcctggcaatgctgtttgattcccgtcccatcggcgggcngtgcaactagccaagagctgcacaagacatgtcggagcggntcaacattgcnaccacgttgcagatgcatttgg

SEQ ID NO: 584277 - DNA, 122 bp, Homo sapiens
ggccccattgtatgcaggacgcgcgctccatggtcgataagtacttccgaactgagctccggacaggctctggaagtgctttagacttctttcctacacagcgggacccgccgagcttccag

SEQ ID NO: 584278 - DNA, 748 bp, Homo sapiens
  misc_feature (443)..(443): n is a, c, g, or t
  misc_feature (492)..(492): n is a, c, g, or t
  misc_feature (499)..(499): n is a, c, g, or t
  misc_feature (537)..(537): n is a, c, g, or t
  misc_feature (548)..(548): n is a, c, g, or t
cctggacaagttttggatcggttcatccctggcaccaccaaaagtggatgcactgaagaagatgttgttgatcaaggggcgtttgccccgtgttttctagcctgctttctcccactggtaggggcaacttaatggactgcagcccagggacaactgggccaaactacagcgggattatcctgatgccccttacccccaactactatctatgccctcctgtgcagttagccaacttctacctggcccccctccattacaggttggccgttgtccaatgtgttgctgttatctggaactcctacctgtcctggaaggcacatcggctctaagcctgcctcactccatcgtttccaccttgcagtgatgcagcttgaccctggaacggtcagacaacctcctcaaagtgggcataccagtttccccggggttgggttgccggtcanagcttaaaaggactagcaccctgcaatgccccttttcactttaaaatgnacactgnctgctttagagcccttgataatagttttattccccccncatactaggcnctccataaatatttgttgaaccttcatggccttatcaactttacacccatatcccagcaaatgccactcatcccccctttttataaacacatttgttactttaaccctgcctaggctttttgtagctccagctttttaaaaactcccggaaccctttatatggggccccagtaaatatgttattaaatatgtaatccgga

SEQ ID NO: 584279 - DNA, 169 bp, Homo sapiens
cgacttagaggatccccccttcagtggggagctctttcttctgcttctccttcttgccttctccttcttcacttgggcttcttggccttgccggggatgctctcgtgctgcttggagccagcagcgtgggacttcacatccgtgtccgaatcgctggagctgctgctgg

SEQ ID NO: 584280 - DNA, 263 bp, Homo sapiens
tgccaggacataccaataccaattttttcgaataaaataaattttttaccatcggtgtacctccttccgtaagcaaattcatcaagctccccatgttaatccagttgctgtatgagtgttgggtaggtctatgggttaccttctcattaaaacttattcctgggcaggcacaggggctcacacgctgtaatcccagcacgtttgggaggctgcggcaggaggatcgcttgagttcaggagttgaggaccagcctgggcaacat

SEQ ID NO: 584281 - DNA, 217 bp, Homo sapiens
ggtaagagcggtcttccaaatgaaaagaagctagatattttgtccacactggtagcaaatgtataacacacatagagcaattctgttcctgtgcccccagcagacatcactaatcaattacagtatccattcctccctagttcaaacagcttggattcattctttttttgttcgtttgtcttaatctttttaaggccacacccatggcatatggacg

SEQ ID NO: 584282 - DNA, 228 bp, Homo sapiens
ggtagagatgatcgcttcgtatgataccaggagctaatgacattcaactcttcatctataattctattcgataaaaactataggccacttgacgtctcatgacgtctaaataaattgacgtccagacgtcaaattaatagctcaactattgttaattaccagtattggagctaggtacgcaatgatgactgtatcataaaacagtatgcgggccacgacttgatcggt

SEQ ID NO: 584283 - DNA, 970 bp, Homo sapiens
agcggtcgtaagggctgagggattcatggtccgtacgctcctgctacctgcactcacctgctgttcgcctctcggccgaggaacatgtcggtctaggaacgcccgggcgcaatgagccatggtttctaatggataccggaaaaacaccgcgtggcagccgggaggtggctagttcgaagccgaatgtcgagatcagcccatagcagacgaccagctaacgctaaataatcgcttgagaagaacgggtgtgctgcctgatcatatgaataacgaggcgctagaatgaaaagaatttcgtcatcatgttgaatatggaccacgttcagaattgcacttaggccataagtacttttgagaattcgacgtacgagagagagaaacgtccgtatgatgggtgaaggggtcctacaagacggatggggagtcagttttcgcagattgagaattcaacaagcgacgtcattgcacattgacatcagtcacttctgaaggattgtaacacgtcagtcattcacttcactatcagtctcattgcagtccgaggcagtgtgcaggtggtaagtcaaccgatttgccagaatgcttgttagagtcgacacgtcattgttcacataaagttgcatgaaccgagtgggtctaaatacttaagccaaaaaaagacatcataaaaaaagacctctcttataaagtgggggggcgccgcctaaaaaaagtttccccttggggcggtgccatttcttgccgtatccctttctttgttctctagtcgtggcccccccttgagttctacatatgataaggcaggccctggcgatatttaacccccttagctcctggtgccctgtggggcaccgagcgactggctaagcgcggctggctcgggggggcggctcatgggcccctctttcccccaatttacgctgaggtttgcatacccagtgtcggtgaattggtgcgcccctgcatatgg

SEQ ID NO: 584284 - DNA, 131 bp, Homo sapiens
gccatgcgccaagcattcatctgtgcctgggggtcgacgtgtatacaccactgcggtgcttgcctccctgtaccgttccgtcgaccacgtgagcaccgtgctgacctccaaatatcgttacgctggagcct

SEQ ID NO: 584285 - DNA, 250 bp, Homo sapiens
gttaacttccaatttacatactctgcttagaattatgggggagaatttagaaatataattgacaggattattcggaaatttgttcataatgaatgaaacattttgtcatataagattcatattatacttcttatacattgtgactaaagtaacggcatggctcgtggttaatctggtttattttagtttccacaagcttaacaactaatatcatataaacttgcataaaaagaatgagaatagagggcct

SEQ ID NO: 584286 - DNA, 338 bp, Homo sapiens
gtcatggaccggaaatagaggtatcagggcgcacactaagaccagtacataacgtcagctccagaaaatggagcgaacaggaggccacataccatccccactaaacgcaaggaggactcctcggccgaccgtctggtaccagggctgggacaggaaagaacaagattagcctgaacacactcctgttttagcccatgtcagaaagtgtttaaagaaagacaagagctgtcaaaaagatgccagatgcacaacatgaatattcttggtgctattgaactgtacacttaaaaatggttaagactggccgggcatggtggctcacgcctgaaattccagca

SEQ ID NO: 584287 - DNA, 1555 bp, Homo sapiens
  misc_feature (651)..(651): n is a, c, g, or t
  misc_feature (1320)..(1320): n is a, c, g, or t
tggtatttaaaggtaaaaacggggtttcaccatgttagcaatgatggtctctatctcctgtgaccttgtgatccaccgtgcctcggcctcccaaaggtgctgggattacaggctttggccaccgcgcccggcgaatttttttttcttgagacggagctttggcctctgtgtggcccaggctggatgttcgcaggtggcgcaactctctcagctctcactgtggaagacctctccactcctccgcgggtttcaaagcccaatttctccttgaccactcaggccctccccaagtatagccgtggaatatacaggccattgtcaaccacacaacgccccttggacctcaaaattgtgagctatatttatagagtatagagaccaccgagggtttttctctccaagtgtttgtgggactcagagagccgtggctcttcgacaacttcgtgtgcactcttccaggggtgaacttccaaccgcgaccttttgggctttccccaaaaagtggtgcgtgggacatttaccgggggcatttgtagcgcacaaccttgttgcgcgtggtgcccacaatgaacgcttgtgatttttttgaaaacccatatatagggccatccaagcggggtaaaatgtggcccccccaaagtatctctccanggcaaaaaacgcatgtgaacgggaggtgtcccccgggcggtgtccccgctactggggggggcaggtctcccgttgtgtccgccccgggtttgtacaaccatacgggggggttcctccattgtggcgccccgagaagtcaccatttcccggtggaccccttctcacacgactttcgtgtaaacatgtgttgcatacaaaagggccccgttgtaaaatacttctcgccagaggtctggggggcgccacagcgggttcggtacttattagaacgcgctcacttttgtcgagcctgccccccagggggaggcacttggcccgtgtggtgcggctctgattatagtacccctccccgctttggctttttggcgggccgaggagcaacacacggggtcgtgatcgttcccccacgtgggtggaggaggaatcacccattttttctcatcaccgccatcatacgaggagaccccccgaggggagatacacaacgacgatgtgtgttcttcagtcaagacaggcggcggcggtttcatcggaggtagtagtcttgcaaacacgtacgatatatgacgtagccacgtcttggtagcagccagttgtataataaaaccccccacggtaagtggaatgaaggcggcccacctctctagtagtagtagacacaccaccatntcattagtaaggagaaaagaactcctccccgcatgtggaagaaagagagggacattcctccatttagtagggtggaacaacaacgtcgtggcatctgaaacacaacagttgcttgtaagaacaaaacttgactcagcgagcacacataagaagccacgccgcaccagcctaatcatatgacataggagagaaaacaacatcgcttacagtccatcgactagagacggaagaaggg

SEQ ID NO: 584288 - DNA, 535 bp, Homo sapiens
gaaaacaccaaatggtggatgacgccggtgcagcgggggggcccgggggccctggtggccctgggatggggaaccgcggtggcttccgcggaggtttcggcagtggcatcacggggccaggaggtctgctggccggtggggacagtgcggcctgtgggccctgaggaccagcgagagcatcgacggaagggcaatggccgatggataagcgacgttggatgcccgtcaccaagttgggccagcttgtgtcaaggacatgaagatcaaagtccctggagggaggatcgtatctcgttcgtcccgtgccccattagacgggcaatccagcagcatccattgcatttcttccctggggggccgtcttcttccacaggcattgcagcggtttcggacaggactttaattgcccaagatatggcaagcaaagcccagagaccccggttgcccgagcccaaggcgacaaccaagagttcaaaggcaattaagtcggctatcggggactacaatggcacgtagtctgggtggtaggtgtcca

SEQ ID NO: 584289 - DNA, 84 bp, Homo sapiens
ggtcgacagggcccagaggtggagtatgaacctgacgcctcaagggctgaaccttggtgtttcaggacccaaggtggacattga

SEQ ID NO: 584290 - DNA, 683 bp, Homo sapiens
aagggtcgaggaggctggtagcgtgaccggtccagattcctactcacgcactgcggtgaatgcccttgagcccaataagcagccttctctttgttctcttccttctctctgtaaaaccgcgtttcctgcgcttgttccctcgcactgaacatgctcgttcacctgggcaagcagaggaagctacgttgggatatgtgagcagtgtgctccgtggtgctgctagtgtgacccgccattccctgtaggccccttgccccgcgtagctcccagctaggccctctttcctgcgtcctgcctctttccttcccctgccacatcccaattctgtaggcctgtcgctttcctctttcccatgcccgcgctaggacttcaagcgacgcatttgagcgtgacgggcatggaaagcagggaaccaggaagactcgctggcatgagctagacagaaaaagaccaagggcgtggtggacaccacggagggccaatattccatccaggacactcacacggcacacacaaggaggaaaatcccaaggtcggcggcacctccgcacgcaaccgcgaccccccaaacactaggcgtcggccaggccccccggcacccgttgcgcggcacatcgcacgggtcgggcacggcgcgcggcacgagcaagacgcccagacacaccataggcacacggatggag

SEQ ID NO: 584291 - DNA, 134 bp, Homo sapiens
caatgattacagaatctgtattaactattaaaatttacagcctaggaacaaatagagagaaatgatcttttcaagcgagtactttatttttgctagaagcaggtgattgagtcgtgttgttgatgtagatattg

SEQ ID NO: 584292 - DNA, 195 bp, Homo sapiens
gccagaaagaagtacaaaccgaagaggtggaacagatcccacaatgtccctggccccgaagaaggatcgcgtcgctcaaaagaaggcaagcctcctcagagctcaggagcgggcagctgagagctaaacccagcgaattttctatgatattagacagatatagatgataaacttatgaacagcgtaccacagggt

SEQ ID NO: 584293 - DNA, 1545 bp, Homo sapiens
  misc_feature (363)..(363): n is a, c, g, or t
tcagccccatgttgggggagaaacaagttcgatcccgaacaggcgggggccacccccccacacagaaggggggcggtggtcagtagacgtcgtcgaagccagacgtcctgggggttgtgcagagaaccacccgcggtgcacaaggaagtccgggggttggaaaaacttgccccccacaaagtggggggggagacacaccctacagcgagtgatctactgtctctattcatatatgcccctccttcttcgcccccccctggtagtaagggagaatggtttcccaccaaacattggccctacacaataggcccccgcgtggtaagcacacacaattcttgggccggtttaaattctacgacgacntttggggggggagcgtcccctcctaggagaggtgttggatatagaggagatacgccccgctgttatcccttcatatgagacaccgaggcggggattaataagaagggccccttctgaaggaggggggcccttataaccgcgtggtagtacagcaccaacatctgtagctcttgtggcggcttctcggcggggtacaaccgcgtgggagatgtagaacagagaagagagggcttcttcaccccgctggtacggggcttctctcacagagagagtgtgccaactctgtgagagtctttcgtgtgtcacaccgcacactctgtgtggggagagacacccctcctctggagagaaatagggagaataacaccccctctctgggtgtttctctggcctccctcttcctctcggtcactaaagctacagcacaccatcagttttggcgacactcccacacagagaagctcttggagacctctgtgtgagagatgtctttgctccgcgagagatagttctttcacttcacttcacacacttctgagagaacccgtctgtgtgtcgctcacacacaccacacgtgtgtttgttcctcgcagagagagagatagtctcgggagacaacacctctctcgcttgagagagtttttccctcatctccgcgagagaccttcggagacttttctctctgcgagagttttggtgtcactctccacacggccacacacagagaatagagagtttcgagaatctccgcgagggcgtggtacaacacacaatatatggacacactcatcttttgcgcgcggtttttctcacacaccacatatatatgggggcacacatggcgcgtgtaatgtgagacacactatacaccacacacacattgtgtgcctgtcaccaccaaggagacacgcggcgccacagtggcacactatactttgagtgaacacaaccgcggtttctcccactgtcacaatgaggaaatcaagaattgagagtccacaaggccagcctaatgtcctttttttatccacaacgccacaggagacgtggggcgaacgcctgctgtccccggccggctcactttggccgcccccagcctcccctgcctgcagctccccacacccacgctttgaggttcacatggagatgttaaattgaggagccctgggtcctgcccacaca

SEQ ID NO: 584294 - DNA, 1175 bp, Homo sapiens
  misc_feature (6)..(6): n is a, c, g, or t
  misc_feature (64)..(64): n is a, c, g, or t
  misc_feature (86)..(86): n is a, c, g, or t
  misc_feature (95)..(95): n is a, c, g, or t
  misc_feature (103)..(103): n is a, c, g, or t
  misc_feature (288)..(288): n is a, c, g, or t
atccgncctggaaagttccccaatttgccaagccccattcctgtcctcatcctgtctcctgaangatcctgtcatcccggtgaaanactggcatnacgtgcgngctctggatttgagcttctcggtcagcttctggtggtcgtagccaggataggagctgaaagggcctgacatgcagacagcattcatctgttcactaatttcctgggtcctggaatctatagagacaagcaggactgaacctgtgtcctgaagagccttcactgcccagtggcagccctggggctnagctccagcactggacaggcacagagcaggggctgcccaggaaggagcacactccaggccaggggtgcatggcagaggaaggtggggagagcccagaaggacattgcagacagacagcctgcatggggactctggcatcagaaagccgaatgtttttgggaaacgggtgggtcacacaggcaggggtgaaacatgggctctgaggttggctacctgattcaaacccggccgcgctgtgcacctgctgggtgacttggccaggatcccccacttcgctgtgcccatatggaaaagagggcaaggccagtcctcactgccgagggccgagaaggcggtgccgagcccctgctgctgcatgaaccttagccgctgtcactgatcccaattactctgatccttttgcccttccttcccataacggcctgctggacgccacagcctgaatactggagagagctgggcattgcccaggtcacaggagagagtccgtagagacctgcgcaggagccgggacccctgctgagcagtgggagctttctgtcatccccatggctcaaggataacctacctgcctgcagagaagtgcgaaggtcttgctggatgacttttcacccgcactcacccaggagcaggctcccaagtgaagaaaccaccgaaccatcaccagctcctagaagcctccctcctaccaccttctagtcaccatcccccagaagtaatgactctcaaacctgggggatttgaggccagggggagagccaggctctatgctttctgtaattgtgtctcgtttgtgtgcacgcaggtttgttttatgttttggccattaagattttccccagccctctgttttttgttttttaaactaaatagagatgggatcttgc

SEQ ID NO: 584295 - DNA, 165 bp, Homo sapiens
  misc_feature (23)..(23): n is a, c, g, or t
tttctaaatattctttattgatnaggcaatccattcttgaatccagctacatcaaataatcaggaaaaaaaaacttgacaaaatgttatccaattgaaatgacagtggataaaaccctttaactttaagtatgcataaaagaatatataacaacacagacagatc

SEQ ID NO: 584296 - DNA, 902 bp, Homo sapiens
  misc_feature (1)..(1): n is a, c, g, or t
ntgtttgcttctctcgatttttcccgacgagtgcgtctcagggtgtcgcccagcaccttgtgtctctctgggttttctgctgccgggagacgtcttccgtttggtgcagagctggtggtgtgggtagacagttgttcgtggcgcgtcgtggacccccgtttgggtgccaatcgtgttgggctaggcgcacggtagtccgcgtgttgtgtcagcccaggcggttaatggcctctgttacagcgggtggacaccaggggttggttggtctgtgggcgcaacaggaagtttgcccccctcagaggcttaggggcttctcgccgctgtgggcccaacgtgtagtgtaagcaaccgtatctgcccgaaggaggggggcaagcacgtgtggcttacaccacctggggttaaacacccgctttgatcattcctctattgaccgcggatggtatttcacttgtgaggaccacttgggggtcggtttcgtccaaacactcccacaaagggaactgtgggtcaggagacgacatgtatggtcgcacgatcagaacatgttaatttttgatcaacacgccctttgtacacgtctcgagggctttaaagcgagctttccccaaatatattatgcacagggtcactatgaaaaattacaccttgaggtcaaccccacagggactatatgaacatgatcattcatccaccgataccctttgttcttataaatcaggggcgagcttcatatgcccaaaaagtataagacccatttaatagctcccagccattacccacaccgaatttaggtgttttcctccctccccccctactttttgcaattttatttatagagagttaataccacactttcaatttgtttttttaaaaaataataaatttttttccacataaca

SEQ ID NO: 584297 - DNA, 854 bp, Homo sapiens
ttttttggggttcccaagttattattcaaaaactcatacaaaatttccccaaataaatagaaattataactccttcggttttccctccttctttcttatcggtccgtgggtaaactcttggagaagtatcaactgtaatttcggaaactcttcttatggcatggtatacgcaacttcaccgcgcgcacaccaaggtccacggtaagatatatctcttctcttctaaaaaattatttatatgtgggagtgaagaatatttatacaacatattaccctttatgtgagagagacaaacgggacaccctctcgtgtatgtgtatccgcgtggatgacatctgtgtgacatcatgtgcccccctatattcagacgtgagctccccacaccacccttctcacaacacaaggagtatctcccacaagcaatttctcacagtgtctcaccttgtgagatctcacctatgtctgtgtgagacacaacacgtgtgactctcaaaaacaatatgtgaggaagagaatctcacacttagatctctcacatatcttatatactaacagggagaggtgaggtgtcgccacacactcacagggaggtgtgaaaccttcttcaaaaacatctgttgctctttctctttatgtatgtttgtggaccacccccccatctgtaacaccaccacaaagagctctttttctataccaccgagagacagcacccagttgtgcgatgagctcccagcagccgagaactgataatatgcaccaacaagagggaggcaccctagcatactatctgtagagcatcattgcgcacggaaaccccgggcaccccgcattttccttaaaaagaggttatatac

SEQ ID NO: 584298 - DNA, 1001 bp, Homo sapiens
  misc_feature (675)..(675): n is a, c, g, or t
  misc_feature (679)..(679): n is a, c, g, or t
  misc_feature (685)..(686): n is a, c, g, or t
  misc_feature (688)..(689): n is a, c, g, or t
  misc_feature (693)..(695): n is a, c, g, or t
  misc_feature (698)..(698): n is a, c, g, or t
atagaaggaaagtcatggtcaggtgaattttttacttgtaactggaaaatgaagtatgtcacatttgaagatgaggaacaggcaaacttaatctatggtaactccaggttcacagatttacactcaattatcagaaatattcagtcttgcaaggaggtaaaaggcagaactgccttcaatggagtttcattcaatctgctccagtttgtgcaactcctggagacatttgttggtgaagacgctcccttgagtgtcagcgagactctcacctccttttttaaggagggctatgttgaaacagaacaagagaaaatgaatgccttagaacagtttagccaaaatgctttccaagtccgacagaggcttctcctagaagccatctttcagaagtgggacagtgatggctcaggcttcctggatctgaaggaagttgatgaactcttgtacacatacaaggagggaatggaaaaagaatctatgaagaaaggtaaaatataagaatgttcttatttaaactgtggtaattaacttggcttcaagtttctcagtacacatatacagttaaaatactggttatgctaaaaccactagataacccttcatgtctaccagtatagatatacatttatcttatttatttttaatttctaaaaatagagataggagtctcactgngcgncaggcnngnntctnnntcntgggatccagtgatcctcctacctcagcctcctgagcagctgtgactgcagtacctgccactgtgcccaactctggctataatcttttaagtagaaaataacaagtgttggcaaggatgtgaaaatattagaagccttgtgcatttgtcaacacagtcaaaagtggaatatgttgcagaatgctttgtccaaaattttaaatctatatagttagattccttcagtatacctggctactttcactatgtaactaacctgcacaatgtgcacatgtaccctaaaacttaaagtataataataaca

SEQ ID NO: 584299 - DNA, 362 bp, Homo sapiens
caagaactcatgaaagtttattatggaaccagaaatacactgacagtagcctgagctgttatgagcaaaaagaaccaatctggaataatcacattaccttacttcctttagcatttcttgtagaacacgtctggtgtggattaaatcactcagcttttgtttgtctgggaaagttgttatttctctctcctttgtgtttgaagaatattttcaccagatatagtatcctagggtacaaggatttttaccatcaacacttttaatatatcatgccactctcccctggcctgcaaggtttcaactgaaaggtgtcctgccagaagtattgcagctccatcgtatattatttgtttattttctct

SEQ ID NO: 584300 - DNA, 286 bp, Homo sapiens
ttccgctgggcaatgcacatctccgtttcacgtgaactcgctccctggttcaagcggttctcctgcctcagccttccaagtagctggggttataggcacccaccaccatgccgggctaatttttgtatttttagtagagatggggttcaccatgttggctaggctggtctctaactcctgacctcgtgatccacctgcctaagcctcccaaagtgctgggattacaggcgtgagccagcgtgcccgtcgaaactttgggttagagtcctgccattgggccagcgag

SEQ ID NO: 584301 - DNA, 229 bp, Homo sapiens
agacggtctctaccgacccttacccactactttaaactctcctaactggctgtgaacgtacggtgggacttactacgtcttccactacttacccgactgacggcggtttctacgctgtcattctaccttcctcgtgtctactgactgttcttctcccttttctctttccctgctttgacggcttttatacacagatattctcctgagtcttcttactagctttacaacg

SEQ ID NO: 584302 - DNA, 911 bp, Homo sapiens
  misc_feature (8)..(8): n is a, c, g, or t
  misc_feature (61)..(61): n is a, c, g, or t
  misc_feature (98)..(98): n is a, c, g, or t
  misc_feature (136)..(136): n is a, c, g, or t
  misc_feature (142)..(142): n is a, c, g, or t
  misc_feature (287)..(287): n is a, c, g, or t
  misc_feature (354)..(355): n is a, c, g, or t
  misc_feature (369)..(369): n is a, c, g, or t
  misc_feature (375)..(375): n is a, c, g, or t
  misc_feature (393)..(393): n is a, c, g, or t
  misc_feature (396)..(396): n is a, c, g, or t
  misc_feature (483)..(483): n is a, c, g, or t
  misc_feature (564)..(564): n is a, c, g, or t
  misc_feature (573)..(573): n is a, c, g, or t
  misc_feature (603)..(603): n is a, c, g, or t
  misc_feature (621)..(621): n is a, c, g, or t
  misc_feature (627)..(627): n is a, c, g, or t
  misc_feature (653)..(653): n is a, c, g, or t
  misc_feature (661)..(661): n is a, c, g, or t
  misc_feature (701)..(701): n is a, c, g, or t
  misc_feature (707)..(707): n is a, c, g, or t
  misc_feature (743)..(743): n is a, c, g, or t
  misc_feature (760)..(760): n is a, c, g, or t
  misc_feature (768)..(768): n is a, c, g, or t
  misc_feature (773)..(773): n is a, c, g, or t
  misc_feature (825)..(825): n is a, c, g, or t
  misc_feature (863)..(863): n is a, c, g, or t
  misc_feature (900)..(900): n is a, c, g, or t
cgtgcccntgatttaggggcacagctgccccagcagaaacacactttcatacgcactcacnccccacccccagacacacccccaggtctctggaactngcccagggtcctgctgctctcacagccgctggacaggnctcaanttctaccctcacccccacccggcttcctagcgccctggacgcccacggcccctcttggacttcttggtccctgaggggggacggatggggagaggggcggtggtcgagggcggcggcggtggcaggagtggaggaagaggtagcnccgtgggccccggcaggctggggctgggccgaaacccctcaaaaggggagaacttgagggggctganngggacccgggggcnactgtngaggcgcctgggtgagcncanttgggctggaaggagaagccctccttgatgctgttcaggacagaaggcgccacgtatgttaagcccaggaaggcctggttggcactntcgctgagggctgtttcatcaggactgttcaccggcgtctgcgtttgaagcgggtttcaaactggctcacgtcctcctctnactgcaganagggcctgaaagggggtccacacgccaggncagaaggtcgtcccaatncatgtnccggaaaaagggatgtctctgcacancagccgcntcccctgggccacccccaatccgctggctgggattccgtntcaganactttttgacaaggtcccgggcatctggggtgaggnaggggggcagtccagcntgcccctnaaganctaatccatggttttcttccggttctctgcggtaaagggcggcgatccagtnagcatgttgtacataagggcccccaggctccaccagtncacagcccgcgttgttgccactgcgcaccagagtctnaggggccatgt

SEQ ID NO: 584303 - DNA, 961 bp, Homo sapiens
tccagatggttatggggcctttaatgaagacggcttcaattcaagcccgcacagtagcccgttttagcatacccaagacgatggcagcacatcatgagtgcatgcatgcatggtgtgggcaatctgtgcaaccattggcagcatcagacaaagcgttgggtcattaagaactgccaggcactcagcaagcaacaacatccacactagcattgcccagcatgtataggttcttgctacatgctcaagagcagttcacaaggcacaggctatgtggcagtcaccaccgcaaccaggattgtcaacaacatgcatggtcccgtttacatgacacattagttaattatccaccgaagtgagatgatatcagaagatggacacgaatgacagagagagtcccaatgacacatactatcatcacatggagagatgatgcaaacagaagatcactgatggatcacttgacgataatcatcaaacaagcacggacatggctggtgcccacatatagagacagtagaatgagtcgcactggccatccgttaacattgtcaaacgggcgcgaaatatagggaataaccatgacaagcacgaagcacatattcaagacacgggtccccgatcgtacacggacaaaagtcacaatggccagtctccctatataatggcacaaaaagtattggccacacttcaggaccacaggacaaccacatcgggggagaacggtcacgttgtggccagtggccccgtacgaacagttaaccgttggatacaccacccataataatggcacaacgcaacaccattgggcgggcacggggaaaacataactatagagaaacaacacggaccccacacaagcacgttcttgcaaacaagaccacggaagtcatgtgccaaaccagaacacctcacagagacaacattaccacgcgacaccgcacagagaatacaagaaccagga

SEQ ID NO: 584304 - DNA, 314 bp, Homo sapiens
gacatcggcacggcggtcgccgacaggatcgagcgcggcagatcgatgtccagacggacagcggcagccaggatcattcccggtcgcggcttgcggcactcacaatccgcatccggcgcgtgaggacacatttcgacggcgtccagcaccactccggactgcgccaactgcgcgcgcaggtactcttccagaacccggtaatcaccctgcgtatacaggccgcgcgcgatgccggattgattggtcacgaccaccagcagaaatcccgattgctgcagagcctgcaaggcggcgacggcaccgggaataaactc

SEQ ID NO: 584305 - DNA, 222 bp, Homo sapiens
taaaggcaaggtttgtgcagatacctgtggagcaatggaactgtccgggccggcacttgaaactcagggcagtccgggggctcgtctgagttagtccccgcagtcgtcctcggtgtcacacttccaccagaaggggaatgccttgtcgttcttgcatacaaactggctagccgtgcagttggacacaacagtgtgcgaacaacgctgctgggaaattgctga

SEQ ID NO: 584306 - DNA, 424 bp, Homo sapiens
agctcggtaccccaccacctgagtctggaagcactagggcgggaagccaccctcagcctcagctccaaatacgcatacaagccctccccgctgcagccacaccaaatggcgggggagtcaaaagctgggtagcacaaggttcctgggccagactgcatggagtctctggatctacttcccttggacatgtccactggggggtagggaggcacagacacccaagcctttgcctcaggcccagcaaacctgaaaggatgagaacagaggaaaccaataagcacgctagaagcctgggacccagggcagggtcaaccctcctggctgcttacctgtcacttgcataaagggatgtgtcaacttaacatcctacatttcctttttaccacaatgatacagggcattgcagtaaatgctaggaaagctc

SEQ ID NO: 584307 - DNA, 383 bp, Homo sapiens
  misc_feature (61)..(61): n is a, c, g, or t
  misc_feature (266)..(266): n is a, c, g, or t
tttttttttaatatagaatctctgtacgtcattttattttattttatttatttattttganacacagtcttgctttgtcacccaggctggagtgcagtgcagtggcatgatctcggctcactgcaacctccacctccagggttcaagtgattctcctgcctcagcctcctgagtagctgggactacagatgcccgccactaagcctggctaatttttgtatttttagtagagacggggtttcaccatgttgaccaggctgttctanatcttctgacctcatgatccgctcgccttggcctcccaaagtgctgggattacaggtgttgagccactgcacccagcctaaaatcattttaatttgtaagatatgtttactgtttta

SEQ ID NO: 584308 - DNA, 383 bp, Homo sapiens
tcctgtctctgtgagtgccttgctgcctactatccgtcaatatacaatgccctgggacagcgggtgaagtgggatgccagcctttcatttattctttcacctatttgtcctctttactctgtgtataaaaaaagagaggattatactatcatagactgttgcttctaaacagaaactcaggctgagcacagttatagttcactgcagcctctacttcccaggctcaagcagtctgcccacctcagcttcctttgtagctgggtctacaggcatgcaccactatgcccggctaattttctattttttgtagacagggttttcctgtagtgcccagactgggttcaaactcctgggctcaaatgatcctcccacctttgcattct

SEQ ID NO: 584309 - DNA, 188 bp, Homo sapiens
  misc_feature (92)..(92): n is a, c, g, or t
gcattaggcaaataacgcgcgaagagctcgccctgacgacgtgacgccctgacgacctgacggcgggacctaggctgaccggcatgacccangtgctctccgcggtggcctggccctacgccaacggcccccgccacatcggccacgtcgccggtttcggcgtcccctccgcgcgttattgcctaatg

SEQ ID NO: 584310 - DNA, 793 bp, Homo sapiens
gcgccgcatccgcacgtcagcgtattctctgaccggatcgcaatgagaagaagagatcgccgcgctggtcattgacaatgtgctccgtgcatgtgcaaagctggttttgcatggggacgacgctccccgagccttttttcctatccaatcaggtcagggctgccccagacaccaagaggacgtcactggtggagccatgggccagaacgtgatttcctacgtgggcgacgaggccccagagacaatgcgtggccatcctgaccctgaagtacccccatatgaggcatggacatccgataacccaaactgggaccgaccattgggacgagaggcattctggcaaacagaacacttactacgaaacgaagcattgcagctgttgggcaccccagagacgagaagccacacccaagtagactagcctagaacccagaagagagccacgcccagtagaaacggcccctcaaaaggaccaacaacaggacgacaggacacagaacttgaacataccagcagtataattgctacatagaaagaaccccataaccaaaaagaatacacacccaggatagaccagatagataacagctaagaggaccaaagtccaacaaaagagaccagcaagggcacatgtcacccaatacagtaaacagacaaatacaatagggggagcagagcaaccacaaagataggcaaaatatgcgtcaaaatgggaaacgatcatagaggacagaacaagagggggtacacacaccacaagaacaggggaggcaccccaaaactctaacgagaa

SEQ ID NO: 584311 - DNA, 278 bp, Homo sapiens
tagctgcatcttgattgtaaacggacgggagtagtggctcgatcctgcttgattacgagtgtacgagctggtaccttgctcttggcgccggagactgccggaggcgtgcccttacatttggcctgtgcttgtagggcatcattgtgcaatatctgagatgaatacctgggcagctaatggagatgagccgaattatgcgtgggtctgaggcctcgaagccagcacggttcaggtagtaaccagtcactgcatctgggatcgtaggcgtgtaatcttcc

SEQ ID NO: 584312 - DNA, 138 bp, Homo sapiens
ctcatagcactgcgcgcgcgccttggcactaaacttctaactcttgttttctagtaataatatgtgtattcgagaccatgaagatagtgggtctgtacagtctggggaccgccaggttcatccatgtgtgtggcctgg

SEQ ID NO: 584313 - DNA, 464 bp, Homo sapiens
gtatcgcgtaccgtctgagcagctgggaagccatccaaatgtggtcccggatcagggtgtgcccctatcctaccttcaatccatcctcggatgtcgctgccttgacttaaggccataatggttaaaggtgtggatgaagcaaccatcattgacattctaactaagcgaaacaatgcacagggtcaacagatcaaagcagcatatctccaggaaacaggaaagcccctggatgaaacactgaagaaagcccttacaggtcaccttgaggaggttgttttagctctgttaaaaactccagcgcaatttgatgctgatgaacttcgtgctgccatgaagggccttggaactgatgaagatactctaattgagattttggcatcaagaactaacaaagaaatcagagacattaacagggtctacagagaggaactgaagagagatctggccaaagacataacctcaga

SEQ ID NO: 584314 - DNA, 549 bp, Homo sapiens
aacaaaaggaatataccggtagtgccgcccgttctaatataataaagagacgcagcttacagagatcattgcggtccactgtggctttgacctcctgggctgaggcgggaggttcccttgagcctaggagcttgaggcctgcgtgaatatgatcgggccacttcactccaggctggccgacagagcaagacgcccatgctcagagaaaaataaagaagagacccgagaaccggaagggaggggcagagaaaaaaacaaaacacaaccgagcccgcgcgggaacgcccttgctcccccccacggcgggggggcgccagaagccctcagcaaagacgaaaccacacagaagcaaggtgcggggccaccccgcggacagagaacgcgctcccacatacccccgcaaacagagcgacaagcaaatcaggagacgcaacaacagcaaggcgaccaccacgcaccacacaccagagcccggtacacagaagacctagcaaccgcccagcgtaaccagagcccgtgcacacgcaccgaaccgactcaccccacccg

SEQ ID NO: 584315 - DNA, 104 bp, Homo sapiens
tacacgattcagctcccatgtgctgttccaaattccaagaaaacaggatggtgagcagcacagaaccctgtgcaggaccccgcttcttctctacgcgtgcctca

SEQ ID NO: 584316 - DNA, 246 bp, Homo sapiens
aatgtgcgcccatccatccaggaaagcagtgaacaactacagctgcatggcgccaacgttgtcgggccatccagtaaaaaaccgacaagcctgccttcgaccaggcggttgaccagagatagagggtgtcatgggtaacgaaagcatcaattgggacaagctgggttttgactacatcaagaccgacaaacggtttctccagacctggaaaaacggcgagtggcaagcgggcatgggacccacatt

SEQ ID NO: 584317 - DNA, 620 bp, Homo sapiens
  misc_feature (31)..(32): n is a, c, g, or t
ggatcttttagcacgaatgtcccagcgtcannccaccaaaccggtcaggcgacgatgacacccgtcgcgacggcgcgtctgcacggcatgaggaaatagcgctgcagcatcggcaccaggaacgagttgcacgcataggtggcaaagttaaagcacaacccggccagcaccagccacagaaaggtcggcacagccagcacgcgacggatcgggcggtcgacgcgctcttgggagacttgcaaggtttccgccgcaccacgcttgggttcttttatgtagaacataaacaccgcaaggatcagccccggcaccgccgcgataaagaagggcgcgcgccagctgtcgaacgccttgaccatcgcaccgatcgtaaagaacgccagcaacaggcccaacggcaggccaagcatgaaaatccccatggctcgggcacggcggtgggcgggaaagaggtcgccaatcagcgaattggccgcgggtgcataagctggcttcgccgatgccaatgcccatgcgtaccagcaggaaggtccagaaactggcgaccatgccgttgaacgccgtcagaccgctccaggggaacaggactcaacccacattcggggctcagggtacgagct

SEQ ID NO: 584318 - DNA, 299 bp, Homo sapiens
  misc_feature (264)..(264): n is a, c, g, or t
gatcatgtgaggcatttggagttgggcctgcactgggtaagtctgagtgaatgataacttgtaattatagggaagataagagatgccatttatgatttaaattgactgtccacaaaagtcatcaaacatttattgtgtgaaacatgctaaatggtaggactagatgttcagctgttcctagttcctggtggttctgtagcatgtgtttctgaactgtcatgttttcaggactgtgaactgtgtttccgttgctttcttttgtangacagctctggctctggctattgctcaggagcttg

SEQ ID NO: 584319 - DNA, 213 bp, Homo sapiens
gtataaggcgaaagaagttctgtgctaatctatgaaatctgagtatctgtcatctctctgcccttgactgtcacatctgctatatctctacttctacttgcatttgacctattccatgactcccacaagaaatgcattttatttaccatttacaaaattatgagaggatcatgattttagatcacctgacgtgtaaaacgcttgtggtgccga

SEQ ID NO: 584320 - DNA, 191 bp, Homo sapiens
gtgttgccaaataggccatgaaggctcctccatcactaataggattaaggcccttataagaggcttcacgcagcattcagctagcttgctttcttgcccttctgccttctgccatgtgaagatgcagcaggaaggcccacaccagacaccaaatgccagctccttgatctcagatttctcagagagagaaa

SEQ ID NO: 584321 - DNA, 225 bp, Homo sapiens
ccggacccttcggcgcgagcacaggattgtgggtgtgatccactgtgcctggcctgtgtaaactttaaaatagtgtctttaccatgagggatgatattgtaatggcagaactctggacagtgagttgaaagatcgaaagttgtagttcactttttccaccatcttgaagcttttagaggcctgctgggaataggacttctaaaaggcaaatatgtctggaaggct

SEQ ID NO: 584322 - DNA, 315 bp, Homo sapiens
gtcttcatagattgcaatgtggaaagacgtacgatagatacacgttcagtatataaggacaaaaaagaaggggatgcgttcaataccaaacagctgcttgatatggagaaataccgacctaacgatgcgattacgcttcacagataccaatgggcattgctgtgttcatgctagaaggaaatgttcaccagggctgacttgatttgtgccatttatagggaactcttggtaccttggaaaatgtgaatctggaatattacctgtgtcatctaagtagttgatggcttcagtactcctcagccactctcctagtga

SEQ ID NO: 584323 - DNA, 1099 bp, Homo sapiens
gatgactttgaagatgctacagaattggggtggatgatggagaagtattatggcatggcgtcatctgccttgagaaaatctccaatgatgccagaaaacgcagaaaatgaaggagatgccttattacaatttacagccgcgttttcttcacagatatggtgattgccatccgtgtcattaataattggctcattagaagctgcattttcaagaggccttcgtatgtgaaagcccgaggatagaacgcttcttgctatctacctccgaccatgatgcacgtgtgtaaaccaaccgatgtactgctcaccaaaattgctatggaggctgcaatccaaggtgcctatatctgagtcacaatttcactacccgtgggcttgggatctgaccacaggactccaacagagcacgctttctcactatgtgcaatagacacatttggaaagtgtatgtggacacaaaccattcggacactcaagacacacggatcaggatatccggtttatcctgattattatgggaaagtcgatcattgtaatgacgttgttgaatgtgatacaagggaacacaaagcagatacagctgcaggataactgaactgacgaccgcacatggcaggacaaacggcaagaatcaaaacaacagccccaaccaacaaggcaacggaatacaaaaagagcaccgacggaattgccaccgctcaacggccccgcacgcacaacatggtgaagagcagaaaccaacagatgacagacaacacaggccaaaacacacctaagaaaggacacagaccaagaagccaaaaacaaaaggagcaaatcaacagaagacgacacaaacgacacacaaccacgcgaccggcaaggcacgcacgaaacccacaaaacaaacacggggaaacaaggcgacaccatgaagacaccgacccgcgggccgacccctaaagaccaaatgccccggcaccccatgaaacaaacgacaccaaacaagggacacaacaaagagacgcgaaaacagacgacagaccaggaaccccccgacaacaggagaaaatgaggacaggcgagaaacacaaggcacaaaacaagagacacagaacagc

SEQ ID NO: 584324 - DNA, 1519 bp, Homo sapiens
tgcgctgcccagcatatttctgttgcgccacacttggaagcgtatacctcacgtccgtcgcgtggacgattaccaatacactcggggctgtttcttttcttagtccatagccccatatttggtaacggatatagtatcactgaggggcgggcgtacaacttcctctagcgcacaccgcgcggggtgggatcgcccccgatcataacgggggtgtcaactccatttgcttacgtggcccccacccacctttcgtctgcccctatgaagtggccccccccacaattggattttcggcttcatacacggggcgatcgctgtgcaataccctattagaaaggaaatatgctgaactcgaccaataccaagggctccttccatacacgagctgtcaatgttcaccgtctaaactcgtccagcttcctctctgtcctacacctctagccccaatacatctctcgctccttcgaacgtccatgcctcccacttggtggcccatattcgtgtttcaattccccaattggaaccatagcttctttgggcaacttcccctgcgggaatgggtaatccctcccaccttggatcacatgcaggtttcccaagttggaccccaatttccatcgtcgccccaacctccccatgatagtaagcctcgcctcgtgaaattaggccacccatctttgcgccgggagacaaatccttgtttgggacgctcgtactggagtcctcgcggaggggtttactttcgcaggaaacgcatgttcaagtggcctcattgcagctttcataccttgggacggcctgggcacatacgagtacatagttgtgcgcccacaggagctacactcccctcttgaaggtgcttgacacacgcgggatagtctacatcctcgtgtcatttggacacctctccactgtgtacgcccacaccctgcacaaatgcgtggcttcacgatgcgctggaccttgaccttgccgctctagagaacaacactgccatacactactgaatgacactcaagacagacgtggttagaagcacggacgctcaggaagggcccgcacttgcaaagggcatctctttgcggctctaccacatgagcaccacagcgctgcgtcttcgcttctgtagcattctctaccatgttgtacacgccactgcctcgccaccatgttgaccaggctcggtgcgcctgagcagtgtgccactcatacagaccacatttgtcaagcctctatttccttggtagagacaacagaattgtggactacagtcaacagggtggtggaaccttcatggcactaccatgagctctcccaatggagtaagagcgccctggacacatcagcacccagcaagagcatcaagaggaagagagagaccctcactgactggccactacctgcacactcagtccacccacacactgaatctcccctcctcacagttgccatgtagaccctttgaagaggggagggacatagtgagccgcatcatgtcaggacatcaattataaccttg

SEQ ID NO: 584325 - DNA, 124 bp, Homo sapiens
  misc_feature (53)..(53): n is a, c, g, or t
  misc_feature (64)..(64): n is a, c, g, or t
  misc_feature (78)..(78): n is a, c, g, or t
  misc_feature (88)..(88): n is a, c, g, or t
caagcacaccctgggagacagtgataatgaaagctaagcctcgggcttaattnacacaccaatnagccagtggggtgnacattcaccntggtccacccaaggccagtgcaatgcaatgttgggg

SEQ ID NO: 584326 - DNA, 414 bp, Homo sapiens
tgtatccagacattgtcaaacgctgttgtctgcccagcagtggcactgctgcagtggcccatcgcagggtttatcagatcccccagtgatgcaggctgcagggcaaagacccccgcttggccaccatggcttgacctagaagatgcaggctggtgaatgtgagatcttgctacgagtgtggacctgtgcttgacttcctgccatgggctgggcatgtgatttgacgtgccctgtgcctgccctcaatgatgctgtgtgagcttgtgtacgcaccctactggcaatgccagacttgcgcccggacgacgcctgtgagtggctgttggcccggtgactgtcttgggacactgtagtgcgactgacggacgtgctgttggacgctggccgctggtggtggcatgtgacgggacggga

SEQ ID NO: 584327 - DNA, 165 bp, Homo sapiens
agatacgaaatcgagccggtccctatgacagccaaattatcgatagtctggctgatttttctgtgcgtaatgtagatccatagggtaaacctgaataatcagtatgaagcatacccggcggatgggatccatacctttcatcgaatgggcacataaatcaggcta

SEQ ID NO: 584328 - DNA, 671 bp, Homo sapiens
  misc_feature (91)..(91): n is a, c, g, or t
  misc_feature (107)..(108): n is a, c, g, or t
  misc_feature (131)..(132): n is a, c, g, or t
  misc_feature (246)..(246): n is a, c, g, or t
tgatggtcctagctgactcttgagtataccctatatccgcaatgtagccaacgacgaagcctgtgccgacgtttatcgacaagttcgtcgnactgcaccaggtcganntaccacgcctgcggcctggccgnnttgggcaagcctgaaggctacgtggcgcggcagattcgcggctggggcgagcgctatgaaaaagccctgacgcccgacgcgccaaaatgggaggcggtacgcgcctggctcaangacaagatgcctgccgaccaccccacctccagcatcgtgcacaacgactaccgcttcgacaacgtgatcctcgacccgcacaaaccgatgcagatcatcggcgtgctggactgggagctgaccaccctgggcgacccgatgatggacctgggcaacaccctcgcctactggatcgaggccgcagacccggcgccggtgcaattgatgcgccgccagccgagcaacgcccccggcatgctcacccgcctgcagttttgtcgactactacgccgagcgtaccggcatccagatcgacaatttcgatttctataacacctacggactgtaccgtctggccgggattgtgcagcagatctactaccgcttcttccatggccagacccaggacaaacgcttcgcgcagttcatccacatgaccaactgct

SEQ ID NO: 584329 - DNA, 149 bp, Homo sapiens
tgtgactcgtggataccttttacagtggattgatattataatacccacttcttatgatgtacaggaactgaatgagtgtggaatccctaggaccccgggggaatataatgggccctcggggctttagtttctttccttcttgccggtgg

SEQ ID NO: 584330 - DNA, 186 bp, Homo sapiens
gaatgctgctgaaattcagaccaagactgaggaagaagagatgatcggacccctggggggaactggaaccactctgatgaagaatcctcagaagaagaggaagaggaagaacagctgactgaagacaaaccacgatgagacaggctatacttatcccctgcagacagctggccttactcacctcca

SEQ ID NO: 584331 - DNA, 279 bp, Homo sapiens
gaattccccccccccccccccccccccaaagacatcctggtggggggggtctactggttaaaaatcccctgggtttcccttaaagattgtttctatatttcaccttcatccctaagggttatttccactggatttggattcctgaatggagggtttgggtttagaatttaaaaatgttataccactccctcctggaatcaaccatttttggggagaattccaaagacccccaattttttttccccccatgggggatgtttaattggcccccctggatga

SEQ ID NO: 584332 - DNA, 154 bp, Homo sapiens
tgcttctggatcagctgaaggaggcacgcacattgctgaggattcagaccgcaactatgaagaggtggccaggaagctggtgatcctggaatgggagctggagcgctcggaggagatgggctgatggtggcctgagagcctgagccatgacagc

SEQ ID NO: 584333 - DNA, 446 bp, Homo sapiens
  misc_feature (3)..(3): n is a, c, g, or t
  misc_feature (21)..(21): n is a, c, g, or t
  misc_feature (37)..(37): n is a, c, g, or t
tcncctccgggaataaatttnccttttaatttccccntgacttttagaatacacacagtttttcccgacttttcaaaaaatttgattaaatggttttatagtataatattgggacccccataccgttagccccttgtatgtatcccaacactgcccaaagtaaaacattaggtcaggcatggtggctcaggcctgtaatcccagcattttgggaggctgaggcaagtggataacttgaggtcatgagttcgaaaccagcctggccaaaacagtgaaaccccgtctctactaaaaatacaaaattagccagatgtggtggcgcacacctgtaatcccagctactcaggaagctgaggcaggaaaatcgcttgaacctgggaggtggaagttgcagtgagccgagatcgcaccactgcactccagccctgggtgacaagagcgaaact

SEQ ID NO: 584334 - DNA, 173 bp, Homo sapiens
gggctttttcggtatcagattcaagctggcattgctccctgaagatcgaaattcataacgtagctgcctaagggccggattggtgacaggcgcgaagccatctcctgtgcatgttcagggtatgtctctcggaatggcaggtgagcccggcgcaactggctttgcccaccgaa

SEQ ID NO: 584335 - DNA, 389 bp, Homo sapiens
  misc_feature (352)..(352): n is a, c, g, or t
aagttcttgggaactggggtccacttttccctcccttggggtcctcaagttttacttaacctgtgacgtaatgatctcttaggttacattcagccctaacattctgtgatttggtgaagctaactttaactagagattaaaggtgggatgtgaatgtctttagaatatcgtgctttaaaaaaatcaggagaaatatggagggcatttaagagactttctaggaaatagcgcttaacctcaggtaaatacttaaaactttgaaccatttcaccctcttaaggagctgtacaaggagctgaaagggcctcgttctagtgcctttgcctcctaaggaaggaatttttgttggcgntcaagggacagcccagaggagaatcattctccatcga

SEQ ID NO: 584336 - DNA, 1840 bp, Homo sapiens
ttgcgtcgtcgctgtgtccgcgattgtttatagggggtcgaccaccgccgtgtggtgtgtggatcctttctcgtctatggggtgttgcctccccccacagacgtgtggtgtgggttcgccccgactaatgtcgtcccactggggtcctcttggtggttagtaaagcgcggtcgtgcgctgtggccccgcccttgttgtggcgtcctttgtcttggtcccgtcgttgtcgcccttatcaatagggaggtgttgagtctggaagtgttgccccttcgtggggtgtgtggtccgcgaaagtatttttcccgtgtgccagacgccaggtaagtgcggcgatctgtggagtggttttcatcgcttgggcgctgcccacatgagggtatgtgctccccctgccgctatcgtgggggggccccccgcttaatggggtcgccacagattcccccactcttgtgggtgcggtcgcccccagcatcaatctccccggcaggaagaaattagtgtggggcgcccactgctgttgggtgtcctgttgtggtaataggtgccccccccccccacgactgttgtttgcccccgcccacaccatgagggtaatccttctggtgaccaaagagcaggtggggcggaccagatgtggtgtgccaccacaaccgcggtgggtgggtgtttctcacaaatcccccaccggtgctccggagtgtcgactcccgtggtgattatgagaatatctctcctccgcaccatgagaaacatcgtgtatgagtagggccggccccccggctgccaataaatagccccccacaatggtgggcgtcggcgagctctccacgctgacaatttcttgtgcacgcctcctacggctgacgccatccacacacggcgactggttcctaccgtggtgttgcctccccgccttatccttcctcggggccagccccacaaattctcgtgttgggcggcggcgctttgtgtcctcccctcatcccagcggttatttctccgtcggttgattatgctccacccgcagcggcgcagaatatggggtgtgggtcccggctgccgcgcctcggcggtcgcctcgtccgctgctgacgccttgttctcaacaggcgcctcttctgcggagaggggagaggctcttctacatcgtcggggttgtgtggtcccccgccgccaacattttgtcatctcacatcagagaagaggtggttgttgtcccctcagcgagtcttcactttctggcgacacacttttttctctgtgtggtgagattcctccgcagcagagaagagtggccgcgtgggacgacaccacagggttctcaacatcgtgagagtgtctccctctgctcacaggagcgcgacacacgctgtggtcacagctctgggcgctgtgataaaagcagagagtagtctcctcgcgctctccacacaactttcactctctctctctattctccacacaggagaagacctcttcccgggcctcccacacagagtaagtggagagaccacgctgtgtctctgcgctctgagaagagacactctgagaagactctgcgccacacccacagctctgtgagccgcgagacccggtgcacttgcccccgtctccggagaccgtcttaataaagagaaggagagaaaagctctgaggtctatcccctgagggagaagaagaaagaaatttccaaagcccttctcgctaagtttcccgtattggccccgtgcccaccgccccggcttttcggcatacgggcccaaaagagcccaggaagcccccaggaccggatggttgtataaagaaaaaattaagccctcctggggaccttggaatc

SEQ ID NO: 584337 - DNA, 426 bp, Homo sapiens
gaaatgaccacctcctccagtctgattgttctagtaccagttgaccttctgggtcttatgtcaagtattccagtaggtgggtctgaatagacattggccaaccaactacttggctggccttgggtcacatgtccatctttgaatgagccatcagaggtgaatgagccatcagaggtgccagatagcatcctgaaacatccagtgttacctgtcagtgggtaaatggggcaggttccctagaagaaggtaggggcagtagagacactatccccctaaccaagttaggtcatgtaaggccaggctgaacaaatttatttggcctcactgctgttttggcaatcattttactttcagatttttttttccttttaatctgaccctgacaataaagaaaggactggcgatttggtttcagaacaggatctg

SEQ ID NO: 584338 - DNA, 476 bp, Homo sapiens
  misc_feature (46)..(46): n is a, c, g, or t
  misc_feature (60)..(60): n is a, c, g, or t
gcttggtgtatgcccaaatggctgccagttttgtgcttgaaaccgnggcctggtggtgtnacacctgcaggaatttctggtctgcaggttgcaaaaccgtgagaaaaacatagtatctgggctggataacaccgtctctcatggcacagtccctcatggcttcccttagctaggggagggagttcccaactccttgggcttcccaggtgaggtggtgccccatgttgcttctgctcaccctcggtgggctgcacccactttctaaccagtcccaatgagatgagaagggtaccgcagttgaaaatgcagaaatcacctgccttctgcattggtctctctgggagctgttcctttttggccatcttgccagatcccatgaataaggacttttatagctaaagaggagaagtcagtacctgacttgagagcttcaaaggacaggctgactctcttgttagaggctaatgtagttggtg

SEQ ID NO: 584339 - DNA, 185 bp, Homo sapiens
agggttacaggtgttggagctggaagtactcgagacgagcatgggttggccggacagcttgtcggtgggtcacagggactgcgatctcctgatggtcatggctcggggccgcaacttctaccacattactgtcgtctttggctccctcggtgcggcagcgcatggttcgtgccaccgtgccacaa

SEQ ID NO: 584340 - DNA, 177 bp, Homo sapiens
tttttttttatttccccccccttttttttggcgggttttttaaaaaaaaaccgcccttggtgggtttttccctggggggggggaagaatggtcccttgaaccccaaaaaggggatttttgccctttaaggcaaaaccggtgggttggttccccaaacccataaaaacattaatggga

SEQ ID NO: 584341 - DNA, 842 bp, Homo sapiens
agcgggttgttgaatttgaaaccgcttttaatgaatgcttcttaacagactgatgtctattttcccaagaaaacaactgtctctattggctgctatagcctatgggcaaagaggcagttcttctgggtcttgacagcagatgttggacaaaataaccaaatctgttcttttgggagaaataatttacatttattagtacctatcatgttccagacatttaatatgtcttcttgcatcatagcaaaacaattgttggaggtagctattacaaccttcatttttacagataaggacattgagattcagaggttaactagcttaccccgtgtcatatagcaaagaaggatcagaagtgagaggtaaaagcaagtccatctgcctttttgatccatgcttcctctttgtaaactgggttgtcttttaggagtatatgtgtccctaatttagaactcaagaatctatatgctacaaaatgtaggagatgcaagctcttaaactattctaagttatttatgttatttatagggcttccttggcacccaagtcatcctattaaacattttccaggcaattctgaaagcatagattttttttaaaggagtatctaatttaatacttctcaagagtctttcaccatagaatccaagcaatttgacctgacctggtttttctttgacctgtagccatccaaagagaatcattattcctgttaactgattttttttaaatacatctttaagtataatccttcaatgagtgagagtaggaatttagaatttcaaattacttttcctttatctgcttagtgtcttttgcatgtaaaagtctttgctgttggatca

SEQ ID NO: 584342 - DNA, 263 bp, Homo sapiens
ccctgacaacttgatttttgctagttaaatggaagattttagcactcatcaccagtatgttaattgtagtacctaaagttctgaattcgttatttcagtttttctcttggttgtctgaacttttgtgatcctgaaccagctgtggtcagagaagaaacgccttaggaagccaagcaagtggcttttgatatacagaggagtatagtcagatatttgctcctagaaacaagagggacaggagcaggtcacaaggtagtccgctt

SEQ ID NO: 584343 - DNA, 199 bp, Homo sapiens
  misc_feature (129)..(129): n is a, c, g, or t
cccccagcttcatgtcttgccccatccctatcctgcctgatccctggatctccctcagatcccctcttttcagacagcgccaggccggggtggggccggggttggggccgagccccacagctcggcccntttcccttcttttttgtataatttaataaagaaatggtcgcgcttctgtttttaaaaacccccaaaaaaa

SEQ ID NO: 584344 - DNA, 139 bp, Homo sapiens
actaccgggatgcaggtttgacccccatcccagtgccaggtgttaaggatccagcaagtccgcagctgtgacctagatcacaactgtggctgggatctgatcgctggccgggagctccacatgccgcgagaccgccaaa

SEQ ID NO: 584345 - DNA, 646 bp, Homo sapiens
ttaaaagcttctacatatcaagggacactatgaagaaagtgaaaagacaacccacagaatgggagaaaatatttgtaaatcttacatatctggtaaggaactaatacctagaatatataaggaactccgatgctcgacaacaaaaagacaaaccaattttaaaatgggcaaaggacttaaatagacatttctctaatgaagatatacaaatggccgacaagcacatggaaagcactcaacctcatcagtcattatgcaaatcagcgccacaagaagataccacttcacacctattagaatgacgaaatagacctaggatctaaacctacaggaaaaaaaaatgaataatagagaaaataaatgttagagaggatgtggagaaattgaaaaccttcattcgttgttggtgggaatgttaaatggtgtagccactgtggaaaacagtttggcagttcctcaagttaaaaaaaagaattaccatatgacccagcaagtccactcctgggcatatactgaaaagaactgaaaacaggtgttcaagcaaaaactttcacgcaaatattcatcgcagcactagtcacagtagccaaaaaagaggaaacaacccaaatggccatcagctgatgaatgaataaacaaaatgggg

SEQ ID NO: 584346 - DNA, 1349 bp, Homo sapiens
gggctccataaacctggttagggttcttctactattaggacttttcgcttcgaatgcgaagagatcctaatagtatgaagaaatacgtacgcgataaagcgtggagatgactatatggcatgccctccatccatagcacacattcggagagaacccgtatacataaaatctagacgaaaaaggaaaggaatcgaaccccaccaaagctggtatgtcaagccaagccccatgagactccatgactttgatcaaaagagagcaaagaagagaaaaaaacaaacacacacaaaaaaacaaaacaacccgacgaaaaacaaaaggcgccgacgaggcgcggcgaaagaacaaccacgagtatactgcagaacactgcgcccaaggcgaacacagaaaacgaacacattgaaccccacaagaaaacacaggggacaccccacggctagacacaccaccagcaacccaaaaaccccccataaaagagagacaccaagacataaacatcaatcagagaaacaaccaacaggataaccaccggacaacataacggacgaaacgcggcaacaaaaaagcagagaacacaacagaagacaaaaaaacgaagaaacgaaacaaagcagagacacacagaaccaaaagaaacacaacacagacaagacaggacaacacgcaaaagaaaacacaaagaaaccccgagagacgaaaagaacacaaaaaaacaaaaggaagaaggacaaacaacaacaacaaaccgcgcgaacaccggagacaacaaacccaccgccgcagaaacaccccacgaaaaacaaaaaaagagaagaaaaacagcaaaaaaaaagaacgagaagaaacgaaaaaggacaacaaaacgaaacccagagaacaaaggccgaaaaaaacaaagaagaaaaaagacaaaacaaacaaaagagcagaagaaagaaaaaacacgcacggaaggaccgacaaggacaccagacaagaacacaagacaaaaaccaaaacaagaaaaagaaagaggcgacaaacgacgaccacaacgaacgcaacgcaccacagcagggacacaaacaaaaacaaaaacagacagagaaagacgacagagacaagcaaacagaaacgaagagcacaagaacgaaaccaaccacgaagcgacgaggcagcagagagacaaagggggagaaagggagagggaacgaggcagaaagagagaaaaagacgaagagaagaaaggcaagagagagaggcagcggacccgaggagacagcaagacggggagagggaacaaagcaaacacgaagacaggaagacagcgacaggcaaggaacaaacgaaagggcgcaaaaagaaga

SEQ ID NO: 584347 - DNA, 1162 bp, Homo sapiens
agaacaaacatcaaatatatgttgacacttgggtggaagaatggtgaactaattgatgctttatgaaaagttgatagggacagtgctccaaagaaatcagtttacaaatggataactcgttttaagaaggcataaggtaatgttgaagaagaagcccacagtggcagatcatccacatcagtttgtgagaaaaaagttagttcatggcgtaattgaagaaaaccaacaattaacagcagaaacaacagccaacaccatagacatctcagttggttcaccttacacaattttgactggaaaagttcagcaaactttatacctgataggtaccaaaaccattgcacccagatcagctacaaacaagaatagagctttcaatggaaattttaaataaatgggatcaggatcttgaagcctttcattgaaaaacttgtaacaggagatgaaacatggctttaccagcgcaatcctgaagacaaaacaaagcagtggttaccaagataagtagttcagttaaagcacaagaggactggttgagagcaacaggtcatggcaacagcttttgaatgctcaaggcactctgctgctagacttctgtacgggccacaagaatggtacgtgcttatcatgggagggtaacgagaaactttagccaaagcttcagcagaaaaaaccccgagaaagaacaagaaagtactccagcacaacaaggttcctgagacaatccctctcaatcaacacaggtccatatggcagacgtacgacggggaaacaccacggccgctcaaccccaacaggcactggactgcgaaccccatcatggacacacgggatcccaaccatatacaccaaataagaagggaaagacattataaactaagaaaaagggttaaaaacaaaagcaagagacaatcacaaataactccaaacaccgaagaggaccatcaagccaggggataaaagaacaggagaaaaccacaaagcgagatgaccacaacaactaaacatagatcaagaactcgacacattacatactaagagaagacgaaagtctacgaaagaactgaaaagacaccacgcataatacttatctatcctaccgcagagaccacgacacacgaacacacagatacaaatagaagacatgactgacgcagacaca

SEQ ID NO: 584348 - DNA, 232 bp, Homo sapiens
gggggggggggcccaaggggggtatttttgggtttggcccccccccccccccccttttttcccccggccccggcccccctggttttgggttgggggggcccttggggccccccccccttttgtttggcttggtgccccccggggggggggggtttgggttggccgggggggggccgtgtttttttgcccagcttttttttaaaaaaaaaaaaaagaagtttcccctttttta

SEQ ID NO: 584349 - DNA, 734 bp, Homo sapiens
ttaaaagcttctacatatcaagggacactatgaagaaagtgaaaagacaacccacagaatgggagaaaatatttgtaaatcttacatatctggtaaggaactaatacctagaatatataaggaactccgatgctcgacaacaaaaagacaaaccaattttaaaatgggcaaaggacttaaatagacatttctctaatgaagatatacaaatggccgacaagcacatggaaagcactcaacctcatcagtcattatgcaaaggacttaaatagacatttctctaatgaagatatacaaatggccgacaagcacatggaaagcactcaacctcatcagtcattatgcaaatcagcgccacaagaagataccacttcacacctattagaatgacgaaatagacctaggatctaaacctacaggaaaaaaaaatgaataatagagaaaataaatgttagagaggatgtggagaaattgaaaaccttcattcgttgttggtgggaatgttaaatggtgtagccactgtggaaaacagtttggcagttcctcaagttaaaaaaaagaattaccatatgacccagcaagtccactcctgggcatatactgaaaagaactgaaaacaggtgttcaagcaaaaactttcacgcaaatattcatcgcagcactagtcacagtagccaaaaaagaggaaacaacccaaatggccatcagctgatgaatgaataaacaaaatgggg

SEQ ID NO: 584350 - DNA, 968 bp, Homo sapiens
gcttctttggcgtcgccagtccgagccacatcgctgagacaccatggggaaggtgaaggtcggagtcaagcggatctgggtcgtaatgggcgccatggtcaccgagggtcttgcttgtaagctgctggtaaagtggatattggtggccatcaatggaccgcttcattgaactcaactacatggtttacatgttccaatatgattccacccatgggcaaattgccatgggcaccgtcgaaggctgacgaacgggaagcttgtacatctagaatggataatccacatcaccaatgcttccaggagacgatgatccctccatagaatcaagtggggcgatgctggcgctgagtacgtcgtggagtccactggcgtcttcaccaccatggagaaggctggggctcatctgcaggggggagccagaagggtcagcatctctgacgcctctgctgacgcccccatgtgcgtccatgggtgtggaaccatgaggaatgtatgagaactagctcgaagatcatcatgaatggctcctggaccaccaactgattagctcccctgggcaatggtcatccatgacaagctttgggatcgtggaaggactcatgaacgcagtccatgccatcactggcaccagaagactgtggatggccctccgggaaactgtggcgtgatggcggggggtttctccagaacatcatccctgcctctactgggcgctgcaaggtgtgggcaggtctcctgagctgaacggggaagctcactggcatgggctttcgtgtcccactgcgacgtgtccgtggtggactgactgcgtctaaaaaacttggcacatttttgctccagaggggtgaccaggtttgaggcccccaggttcggtccctgggcacggggttcctggttgggaccacccacttgggggggttgctcacagcttgggctctctgtgccatgtgccgggcgtgccgccgtac

SEQ ID NO: 584351 - DNA, 479 bp, Homo sapiens
ccttgctgggcgcggtggctcacgcctgtaatcccagcactttgggaggctgaggcgggcggatcacgaggtcaggagatcgagaccatcctgactaacacagtgagacactgtctctgctaaaaaaatatataaaaaattagctgggcatggtggcaggtgcctgtactcccagctacacaggagtctgaggcaggagaatggcgtgaacctgggaggcggagcttgcaatgagctgagaccgtgctactgcactccagcttgggcgacagagcgagactccgtctcaaaaaaaaaaaagacccgtctctctacaaaaaatgaaaaaactagcagggcatagtggtacaacctgtagtctcaactacttgggaggctgaggcaagaggattactggctgcagtgagctgtgatcatgccactgcactccagtctgggcaatggaacaagaccctgtctcaaaaaaaaaaaagttgtca

SEQ ID NO: 584352 - DNA, 1474 bp, Homo sapiens
taggtggacagaaagtaaaattaatgggtgagtataaaaaggggggcccccctttggaacccctcatgattgcaggccccgccatttgtccaagaggcgccacgagtgggggatgtacttgaccccacaagccatctggggatagacgccgctatttatcagccaccaatagtctccaaatatcatcacgcatgtgacacttggtggaacgccccatttctattagaaatgtgggatactatctgggccgcgccaatgaacaatctgtggacacttagggcccttgggcaggggctctcacaataccacttgcgctccactatggtattctgagcaagctagaggctcgcgagatgggcgactatagcataaaatccttgtggcacatatgtgtaagcacacccctggtggcccacaatgtacgccccatggaggggtctataccgccagaatgcgccacctcttccgagatatgacgccctgtgtgtcagcgggaccgccctgtgtaccaagcaccccaaatgcaaacaaggagcagaaacataactatatccttgggtcgatcagaatactgcacgagactaacgacgtgcggcagaccagcgggtggcgctaagagatcagccgcctagccacctccacgctgagactaaactgaggaaacacacagctcgcacatctcatgttaggcggcacgaaccacgatcgtgttctagatcatcaaccccacagtagatcacactacctatatgagggcggccccaacacacatatccgtccgacgagcaaacgcacctcacacaaaccgagggcacctactaccaaacaaacgacgaaacaagaagacgagcagccgacaatacggtaaccaagtaccatgcggacagaccacacaagtagcttaggagcacacaacaaaacaagcgcggaggacaaagaccgatcaacatctccacaataaattaggcgggccgcacatagatgcagcccaaggccccaccgccgaggaggtctacaccaaaacagatacgcccagaacaatcacgttcgcgcggccaacctccgacgggaagaaaccacacccccacactgcggcggaaccaagacacagcgcagcgaaacaacacatgtgaggagaagctaaacaagcggaggatgaggacatgcaacataaacacaacatacaccacgccggaggcagtaacaaacacaacacgcagagaagtgggaacgtaacgagagcaccgtcccccacacatgtgagctaacgaacaaccacacacagcaatggaatactcacctaacacaagagagtgcgacgcacccccgtcgagcacgccgaccagaacaatagcaccgggagcagccggcaaccgcgagtacaaacaacgaacctaaaccaacacgcaagctaacaacaatgagacacccaaccgcaccacgaccttcacaacaacaacaccaacaacgacgc

SEQ ID NO: 584353 - DNA, 173 bp, Homo sapiens
tacgagtcggcgagtgatcccgtgtgcgtggctctatgctgcctagagcggatatgaggggaggggtctgtgtagccacacaggtgagctgaaggggttgcgtgcccgacatgcttacttggccacgggtgtatctgaaggttcctgcctggcaatactgtagccttgcttgc

SEQ ID NO: 584354 - DNA, 693 bp, Homo sapiens
agcggattgtctccacctgacccctccatgaccatgcgtatccccaccgcaggtgaggaccctggtggaggacggtgtgggcacgagcgtgtggacatgtcaccttccccacctgctcagagtccaagggtcctgggctgtgaccagtgctctcttctgacctgcgggagatcatgcacgcttccttgtaatttcccgactgcagctgagcgctggatgtttggatgtttgacccgattggaggctctactcaggcatgcgggacatatagggaggaatgggtcatctgctgtctccggaagctcttgtgctgcaaagagagaaggatccgcgggtatctccctcctatactagccaccagtcatactacctagatgccttacgaagtcgcatctgacagactaccacacggagcaagagtgagcacctgccactctggaataatggagtcctaggaggtcttcgtttcaggacgaatggatgagcggctacactagcagcccatcagcgctccactagttaagatctcccatggatgcgtgacccccagtaagggcattgagagctctggggacaatctgcggtgctaagttctgtagcttcctctttgtcctggctgtatggactatggtccacagatgaatgaccaaaagagacacagtgagaggctacgttcctggctggaggggacat

SEQ ID NO: 584355 - DNA, 250 bp, Homo sapiens
ggcaaaggcagaagcccccgcgtggatgggcagcttccccagcagcccggctttcgggccgggcagtcgattcggggccagggaccaacctgcatggactgtaacctcacctttggagccggggctgggtgaccgccaatacttgccaccccgtcgagccccatgggccgtgcccccatgtgcgtgggcagggccggcagccctggaaggggcacttatatttttcaataaaagcctttgttttgcactc

SEQ ID NO: 584356 - DNA, 582 bp, Homo sapiens
ttccacagtgactagacattttttagacatttgctgttcttgcttagttttaaaaagggttatgggtatttagcccacatttcctcacatcttaccttgcctctaagtacaaactggatcgtaaaaacagcaacacaccatatttttctgcctccactccacccataattgtggcacctctattctcctgaatgtgtagacattcacccttttagcttcgttggctgtcaacccctactccgtgccctcccctaaaatactagaaaaacatcactgatccatcaaagtgaagtatcttatgagacttactgcagtatgagagaactctgccttaatggtgtctaggcagtgtctcagaggggaaatgacaggataggttattagggactaagttgggtggtttcagggcgggtcttgcaaggcaggcctctaatagggattgggtagattttgtgacgtaatagctgtagatcggtgggcatagcaggaggagaatattgaagcaagttttgatggggaaggtggtattcttgttaagtaaactcttttagttggtttacaattttcattttcaggaaaaag

SEQ ID NO: 584357 - DNA, 518 bp, Homo sapiens
tgtctcatggccgagctcgccccgcgagctggcccgagctcgcgccttgagttccgtcgcctgtcgatatttatatttaagacatgtcatataactacacagagaaatagaacatataaaatctgaggggttggaggaagaaacgtgatggactcatcaggaagaccagagctggagaggtccattcaggccaacttgacctcctccttgagccctttggcgttctggcttctcctccttggtattctcctcttcggtgacttctttcttctcctctgggtctaactccttttcatcctctgttttgactctcttggctcccctgaagtgggacgagtccttgcggcccccctctccctccttcttcagaatcggagaactcttcctcacaggcaatccggaagtcagaggagcagatcgagatgcgcttgtcagggtcgtcttcgtcctcatcgccactctcctcaggcatggcgtcctcaggaatcgcctgcatttgaaccgggggtgcgccgtga

SEQ ID NO: 584358 - DNA, 382 bp, Homo sapiens
aagaagatataattgggacaacggaaaagatgggtgcttgaaaagaacagagtagacaagcacttaaggtgtcagctagagaaaagatgtagatcactacagtgaggaagtggaaaaggagtcatgactaccaaccattatatgacgtagacaaaggcattataaaagacacactatgcaactggtagtgccaacaaataacatagggtagatgaaagggacaaattcctagaaaaacccaaacggttgaaccggactaaagatgacataggacatctgaatagacctcaaaacaagtagagagaacttcccaacaaagaaaagcccaggcactagccaaccacggcggacagcacggtagtcctagctacttcagaggctg

SEQ ID NO: 584359 - DNA, 311 bp, Homo sapiens
cgtctctagagtatccaccccctccccggggtaatactgtagaaggatgagaaacatatctgaggcagcaatcaggacgttaagcagagatctgaactgccacgctgccctactaaccccatctcagctgctctcctcacttcatgtgaaaactactccagtggctgactgaattgcttacccgttcaagcgtctgtccttttccatcacctctagagcagtctcttccttacatatagtctctccagcaaattagaatctatcaattgacactttgagtagcacctaatatgtgagattagtcctgtgca

SEQ ID NO: 584360 - DNA, 452 bp, Homo sapiens
  misc_feature (417)..(417): n is a, c, g, or t
agagtggaccacagtggagaggccccaaaccagcttttggacaggagcatgagcagctgcctaagtcacaagcagaacctctgtcaggagacaaagaaccattagcagacaccagtagtaaccagcggaagaagtttaaaatgcaatcagctgcattttccattgctgcagatgtaaaggatgtcaaggcggctcattcaaatgagaatctaagcgactctcaacaagagccacctaaaagtgaagtctcggaagggcccgtagagccctctaattgggaccagaatgttcaaagtatggagactcaaatcgacgaagcccaagctgttactcagcctgtaccccttgcgaataagcctgtacctgctcaatctacttttgcttcaaaaacaggggggatggagggaggaacagcantagcaacatcatcattaacagcagataatgatttt

SEQ ID NO: 584361 - DNA, 324 bp, Homo sapiens
gtcttttccacctttcaaaaaaggtgggtggaacctggaaacatggtttttaattaaaaattaaaaaaaagggtaggacccggtccgtttcaaagggcccaaacttttaaagtgggtgggggccctttttttttttccctcccttcaatttggaaaaccctttttttttttaggttggtttaatgcttttgggaccatggaaattggggattttttctctctccccccatccctgccatcaccaaaccctgggggtcctttgattgggactttgtttatccccccctgttgcctgctccttttaggaaaaggatattttttata

SEQ ID NO: 584362 - DNA, 143 bp, Homo sapiens
tgacgcctcaactccggcgtatgtgtctgacccaacaggatgcgcacatctcgacactccatcgagttgatggatgaactgttcccccatgccaggtgcctacaccctggaagagttctgcctgtacatcgccgcctaccgta

SEQ ID NO: 584363 - DNA, 762 bp, Homo sapiens
  misc_feature (440)..(441): n is a, c, g, or t
tccaaaaccagccgggaaagggccaggttaaacggtggggcaggcgtggtgtgtgttggcgtgtgtcggctgtggagcgagcgacgcgccgaggccgacgggtttgggagggtgggggaggggggctttctcctcgggaggggagtgtcttttggggcttaaagggccatggcccaggaatgggggcgctgggttggcttggagatccaggctcctgtggatcccggggcatcatgttttacttgccttaccttggtggacaacaggtaatatcccctgtgtttttcagggagctcccatgttgggggtgaaaaccagcaagggccacctgcacgcctcccagaattccgtgggggttttaccttttgattcccttcctttcagcaaaatgggggcggccagagccctttttggttccccccccctcctgggccctgtgnntgggagggggggtacccagtttccccaccattaaaacccggggcccgggagcctcccacagggggggtttcttgccaccagggtgggcctggtgcaggggcaaaccccggggcccctttttaattccgtccccaacccgggccccttagaaatggggccgttttttggggtgggggcccgccttagcctgcatggggccccccagccccgggggggggagggggcccgggtttgctttaaggggggccctcccctttttccgaaagggtttctggttggggccatggggaaggttaataaaatttttgggccccccccgga

SEQ ID NO: 584364 - DNA, 167 bp, Homo sapiens
tattctttgtgggttggcactgggcatatcgggaggatggcaggggctgttctgtggtgtctcgctgcggctggcccggtcagactcagctctgagctctgggagtatggggactcagcgctgggcactccttccagtactctgacgacgagggtcctggagctgac

SEQ ID NO: 584365 - DNA, 151 bp, Homo sapiens
gtagcacaatctcagctaactgcagcctccaccttctgggtgtcagtgattgcttctggctcagtgtcccgtagtagctggtgttataggtatgctcctcaagcctggctaatagtgtatttcgcactagagatagggtttctacatattc

SEQ ID NO: 584366 - DNA, 105 bp, Homo sapiens
gcctagagtactgctggttcctgtcagcattggcatcctgcctgtgccctctcttgtggctccacctacccatctacctgaatgtctggggtgtttggctttagt

SEQ ID NO: 584367 - DNA, 632 bp, Homo sapiens
ggggattcctgcgggatgctcgtcaggctgagggcgtgctcagcagccaggaatatgttctgtctcacacggagatgccagggacactccaggctgctgatgctgccattaaaaaactggaggaattacacatgatgggccaggagaaggccaaggatgagctgagtgcccaggcagaggtgaagaagcaccaggtgctggagcaagccctggccgactacgcgccagctggtatctgaaggcaacatccacgccgacaagattcgggaaaaggcagactccattgagaggaggcacaagaagaatcaagacgcagcgcagcaatttctgggccgtcttcgggacaaccgggagcagcagcatttcctgcaagattgtcacgagctgaagctctggatcgacgagaagatgctgacagcccaggacgtgtcctatgacgaggcccgcaacctgcatactaagtggcagaagcaccaggcattcatggccgagctggctgccaacaaagactggctggacaaggtggacaaggaagggcgagagctcacccttgagaagccagagctgaaagccctggtgtcggagaagctgagagacctgcacaggcgctgggacgagctggagagcagcga

SEQ ID NO: 584368 - DNA, 790 bp, Homo sapiens
  misc_feature (422)..(422): n is a, c, g, or t
  misc_feature (507)..(507): n is a, c, g, or t
gctggtcaggggcgtaacggagtggtgcgccaaggtgagaggaaatccgtgacgtcggctgagctattcctgtcgcccaagccgttcgtaggacgtcgggaaatgatgcgtttcgtgaaaggctagactgccttttatgacatgggtgtgcactgctgtgggagaggactagtttgtatcgtagtggctcttgagtcacataatgctatggaccacagttagaggatggcgctcagtggtcacatagtgaggcaatgccaccaagcagatgaggcatcaatcaactcgtacaagagctgtccgttgaactaaagcagacgattatccttgcacacaactgttctggcagcgacatgagcggccatggaagcctcgagatcaaggagccttctcgaagatattacttgtgattatcctgtgtnaagaagccgaaagaatgtggagtcgtgttgggcgtgccagtcaatagggaggactgggaatcgaggacattggtgtacgaacagncagcaggttcttacgaggttactgcaagaagtgttcgaaagtggtaggaagctcgagatgtgactgagtggatgaacagaatggacaatgggtggtgtacatgcatgtagagcaaaggcgtttacgaaaatgagcgccattctgagtacaggtagttagaggaggcacatacgaagcgtggggtatcttccgttggtacgtgcccgcacgtacgtgtttggctatcaattggaacaaggctataagctagtagtttcgggtgaccaaaaagggatgtcgattc

SEQ ID NO: 584369 - DNA, 239 bp, Homo sapiens
gtcccctttcctccatttaaaggcaacattccttacccattagtttcagaaattgttttaagcaacagccccaaatgttgggtgcccccagccaagcattggggcccccatcctgcctggcactggttgatgggcccctttgttggttccatcagccaaagttttgccaaaggccccccagtccctttcccaggaggaccctaaaggcaattaaataatgtcctgttccattggcccca

SEQ ID NO: 584370 - DNA, 124 bp, Homo sapiens
tgttcgttcctgtttatcggggggtgttcaaggcgctgccgttcgccaagcgcctgagcgaatggctgatgaaccacacccacgaagcctgggttaccaacaacaagggctggatgaacctggt

SEQ ID NO: 584371 - DNA, 163 bp, Homo sapiens
accatttctattagctcttagataagattacacatgcaagcatcccgtaacagatgagttcaacctctaaatcacctacgatcacaagggacaagcatcaagcacagcagcactgacagctcaacaacgcttacgcctacgccacaacaccccacggagagga

SEQ ID NO: 584372 - DNA, 436 bp, Homo sapiens
aatctgcgctggacaagatgcgtgatcatatcatagctaagaacgtggctgcagacattgccgtccgagctctgtgaatcgtgacgccaacgcgttggaaggggtgaaggggacgttcagtatggggacttgcacagtgaagcaagccctacagtgaggccctggagcggaatctgcagacacatggacgcagtatacatgcgtagcgggacgtaatggatgcacacgttagcgcgcacttatgtcgtcaccgactggcgcgttaatggagtcggggcatgtactcatatggcccggatctgctacaaggtgatagagtggctttagtggcctgattgcagcctgtgatacattatgcgctggggtcgaggagcagttgcgtccactcacggccgcgtgcgagtgccctacactctccatagcagcatggtggcgt

SEQ ID NO: 584373 - DNA, 373 bp, Homo sapiens
tcgcacttggtgtccttagcgatggcacccagcctgttgaccacgttgatgacgaagctctatctccagtgcgaagatggggtacccaatgctctcggatctgtcgatgacgaacaccacgtgcagggccgccacagcgcttctcacagtcgcagcacccgcagctctccctcacgtaggtcatgacgtcacactccgtgagaccggcgctccagggaggccagactcaccctcgggtcctgagactcctcttggcccccgagggcctggctcaccagggtgaccaggatccgcaggctctcctttctctcctttcctcccaggatctcctttcaagccaaagtcgcctcggtctccctcggggccgctgagc

SEQ ID NO: 584374 - DNA, 469 bp, Homo sapiens
  misc_feature (1)..(1): n is a, c, g, or t
  misc_feature (12)..(12): n is a, c, g, or t
  misc_feature (271)..(271): n is a, c, g, or t
  misc_feature (359)..(359): n is a, c, g, or t
  misc_feature (464)..(464): n is a, c, g, or t
nttcggcacggngacactttactgacttgattcctaattctcacagcagtcattcagaatatcactgggtattgtcctcactgttttgcaggtgaggaaagtgataatcagaggattaagcgagactctaaggctgctaggcaagtggtcaggtcttaggcttcagcttgccctttttccactgccccatccagtcagcagctgactagctgagggattacaagcaaattgcttcatctcttgggtcttcatctgggaaaggtctcaagtngttgttgtgaggattactctgtaagcatcaaaatttagataaatgtctgcaaacacttgtatgtattttcccacctatggaatttctnaatactatggaattaggccaggggcaagtgtaacttaacccattttacagggtgaattaggctggagccttaagggtagtcactttggtcttgggtcagtaaggnccctt

SEQ ID NO: 584375 - DNA, 1051 bp, Homo sapiens
  misc_feature (1)..(1): n is a, c, g, or t
  misc_feature (346)..(346): n is a, c, g, or t
nacacagacgcggttcccgggggttttaacgcccgtggggtgggttcttgcgcccccccgccccccccctgggggggggccaccccctcgcctgtgctatccgtgtgggacacccagggcccataccgcgggcgcccgcacgccgtggtggtgccgccgccggagttttcccccgccacaggccaggtctatccgcccccccccgaagggggggctccccgttcttgcctcctgtgagcccccctttcaatgggccctggaggccccttggccccgcaagagtgtgagagcgttttggccgaaatggggtctgcccccctggggacacaagagacctgtcccccanccatggagaaagggtgtcacacaaagatgtttggaggggcaccttcccggggaaagaccccccctggtcggatttgttagcgccacagagatgcacacaataggctcggcgtttcccgccccctgtgacaggtgcacacgtggcttctctttcggggaagtcgccaccacctgctatgaggcccccgcagcctcgaggtgagggaccacggcccttcttcacgagccccacgtgccactgccccctctgtggggccaccccaccacctcgaggagccaccctcgcccccaccccccacgcttatttgttttgagagttctaagcccctccccacttgttcccagaccccttcccttgcgacttccccaggtggccctcgagacccacggagcccacacacatggtttaagggatcccacggagtcccccgcccctggggttttggtccctctcgcgcccatccctgcaagggattgcccccccgtcttcccagaccaccccccctgaggggggcacccaggtttattgctgctgctttcacctgctgcacccgcgccctcggccggccccccgaggcacgcctttgtagctctgcttgcggaggggctgggaggagccctccacggagcacattcccacccctcccccactgctgcccagttgtagctatagctaccaaataaaaaacaaccttgttttcccaga

SEQ ID NO: 584376 - DNA, 270 bp, Homo sapiens
ccgtggtatattatgcttggttataatgtttcatcttgaccttgcggtactatatatattgcgccaggtgcgaatatctatagcgtatactgtatgtgggtaaatggtttggctaaggttgtctggtagtaaggtggagctctctctctctctctctctctctctctctctctctctctctctctctctctctctctctctctctctctctctctctctctctctctctctctctctctctctctctctctctctctctctctctctctc

SEQ ID NO: 584377 - DNA, 574 bp, Homo sapiens
caggaaggaggtgggctcacgtgcggcctggagaccatcgcggcagctccaagtgccgtgctagacccgctcaaggcctcatgaatcctaggacaaacgtgctgtgaagcgatgagtctcgagcacttagcccacaatgttcccatgatctacggagccaggattctggaacttttcatgtcatgccacggctcccatgcaaggaatatagatgctgaggcagtcttgcactgccagcgagcccacatgtatctgggcccaaggccagagggcctcagagagatagcctgagctaccgtgttacctcctctggccctctggctggccccaggagcctttggattcagtaaacgatcccagggtggttcccagcaaagctgcttcatctctgctctctacgcatcctgtcctggcgggaagagagcgtctgggtcacattcaagactctgatgacacccctcccgaggcactcccactgccggggtcccaggacccattcccccttcacctggtgacaggaacactcctttcctggtatggacgtggctccataacacgaggatagtcatcttcc

SEQ ID NO: 584378 - DNA, 142 bp, Homo sapiens
tatgtcgtcagtggatgtctcatgatgtctcatggatgtctcatggatgttctcatggatgtcctcatggatgtcctcatggatgtcctcatggatgtcctcatggatgtcctcatggatgtcctcatggatccatgagaga

SEQ ID NO: 584379 - DNA, 1018 bp, Homo sapiens
gcttatgaaccacagggtgcctccggatatgattattcctatgcaggcggtcgtggctcatatggtgactcttggtggacctaccacttactacacaagctaactattcccaaagcacttcggctggactctacttatcggcaaaggtggctcagcggacttaaacaaactccgctcactgagctcgcggagccttccgatcacaaacttgatgacgcccttctaccacacggattccgacaccatcggcatccatttacccacttccacagcgcacacaccagcgcacccacgaattacacgcaatgccacaagctatccctgcctgcagcaaaccagccgctgcacccccacctacctgcccccactgctccgccacggcactccttacactgccacagcactactccccctcccctccccccctactacgcctgctcgccacgccacgctactcccctggctccacacgctcccctcccccaccccaccctcagcctcgaccgcacaccttgaccccgcgccgctcccctggcccctccctctcccccccccccctccccactcctcgccctctccctgctccctccccccaaggcccccccccctattcccccttcctcgcctctccatccaccccgccgctcccctcgcccctcctcgacgcgctcgtcccctccgccccctcctcctccgctctgttcccaccccaccacctgcccccctggccctccaccctcccccccttctacacacccccacggccctctgcccccccgcgccccccagccccccccgctccccctcaccaccccctaccccccttctgcccccccctccccccccacacaccccacccccccccccccgccggcgctccgccctctcccctccctcccccgcccctccgtcccgccccgcctcccccacccccttcctcccccccctcctcaccccccctgctccccccccctcgccctcccggggcccccccgccccccctcccgccccccccccc

SEQ ID NO: 584380 - DNA, 273 bp, Homo sapiens
tttcagatgtggatagtgttgtcaccttaggtttgctggtaaatgtatctgctgtagctgggctagagatcacacagctggtcacggcacagcacagcagctgaattaatagaccggacatgaaagtgtttgcttttcaaagaactggtaaaaccaaggcgtgtacagaagctgtgactgaacttcatccagaggacactactccctcaggttccttcttctctctatgcgccgaatttaagacaccttaattggtaggggtatggctctgat

SEQ ID NO: 584381 - DNA, 100 bp, Homo sapiens
  misc_feature (3)..(4): n is a, c, g, or t
ttnntgactacgtctactatctctacacaagggtgttactgaataatgctaaaatcatttttctgcgaaaacataatgcgatatcgctaattaaattggg

SEQ ID NO: 584382 - DNA, 334 bp, Homo sapiens
atggcgtttgtatgttggtttgtttgagacggggtttctttctctcgatcacctaggctcgagtgcaggggcatgatcacggctcactgctggctcgacctctcaggctcaagtgatcttcccacctcagcctcccaagtagctgggaccgcaggtgcacaccatcatgcctggctaatttttaaattttaggtagagtaggggtctatgttgcctaggctggtctcaaactcttgaactcaaacaatccttccatctcagcctcccaaagtgctgagattacagatgtgagccaccacaccatgattgcattcctggataacacgttcacgag

SEQ ID NO: 584383 - DNA, 447 bp, Homo sapiens
atagtaagtggcagataaaacctcaaagttgggccgggcgcggtcgtcacgcctataatcccagcactttgggaggccgaaacgggtggatcacctgaggtcaggagttcgagaccagcctggccaacatggtgaaaccccgtctctattaaaaatacaaaattagcctggcgtggtggcgggcgcctgtaatccaagctgttccagaggctgacaggagaatcgcttagaacccaggaggtggaggttgcagtgagctgagatcgcgccactgcactccagcctgggcaacagagcaagactctgtctcaaaacaaaacacctcaaagtttgtgctctttctactacataaaaatatctcttcattaatgtggctgaattctaagggcctgtgccataggggttacactacacaataaagttcgagaacatttgcctgtaaaaaaa

SEQ ID NO: 584384 - DNA, 414 bp, Homo sapiens
  misc_feature (45)..(45): n is a, c, g, or t
  misc_feature (395)..(395): n is a, c, g, or t
ttataaagaaaagaggtttaattgactcacagttccacatggctngggaggcctcgggaaacttacaatcatggcagaaggcgaaggagaagcaagcacttttttcacaaggcagcaggagagagagagaactgccacacacttttaaaccaacagatgtcatgagaactcactctctatcactagaatagcatggggaaaccatcccccatggtacaatcacctcccaccaggtccctctctcgacacatggggaattacaattcaagatgagatttgggtgaggacccagagccaaaccatatcagggtctgaatttattctgttaaatttgaacaggtaggtctgacctaggcaaaagaaagaattttcggttccttggatggttcaagggngttttttttgcttcattcc

SEQ ID NO: 584385 - DNA, 216 bp, Homo sapiens
gctctcgcggtcacgcatacttactcttctcattgcattcaatacggacgtctcaagcgtgcgctcaccgctttctacttctcccatacttgtcttcgcttgtttttccttttctctctgaaactctgacaactacttttacttttctactcttgtttctactcttccccttttcttctcacgtttggccgtactacaccgcgttgacggggtacc

SEQ ID NO: 584386 - DNA, 215 bp, Homo sapiens
ccacgcgtccgcccatgcgtccggcattattctagcagcatccattcttgtttaagccttccagtgttagagatttgaggttacatgatatgctttatggtcataacttatgtggctggagaattggtattgcatttatagcatcagcagagcagataatgtgatgtattttatgcatgtccattaagggatgacctgttcttgttttacagaga

SEQ ID NO: 584387 - DNA, 146 bp, Homo sapiens
ccgtacattccacctcccttcgcggcagccctggggtggtgtacggttatgtgaccagctgtggatggtcagaagtcgtcgggaactgaagtcaggccccagcccatgccccccagcccagctccagccatgcgctggatcgcgca

SEQ ID NO: 584388 - DNA, 150 bp, Homo sapiens
tggatgaatctgaaatcaagttggtattgcttgaagcagcgccaacaatttttaacatgctacaagaccgtcgtttggctgacaaggccttgaagtacatgactgacaacggtgttgatcttcgcctaggtgccatggtcactggtgttg

SEQ ID NO: 584389 - DNA, 155 bp, Homo sapiens
ttagacgaacccgagctcgtacccattgccaacttctttgtctccgattgcagaaatcgtagcaacctgtgcaattttttcaggggtggtcacaggtttagactgcttttgaagttcagcaattacagcatcaacagctaacatcacacctctcc

SEQ ID NO: 584390 - DNA, 154 bp, Homo sapiens
attagcacactgttaccccgctcccgggagatcacatatagatgccgaacttagtgcggacacccgatcggcatagcgcactacagcccagaactcctggactcaagcaatcctccagcctcagcctcccgagatagctgaggattacagagcg

SEQ ID NO: 584391 - DNA, 343 bp, Homo sapiens
tgtgatctagaggatccctgccaggttcttaccttgcgtcagaagatccggaaaatacaaccggtgatttcggagtcccatatcacaagctacaagcagaaccccgagcagtctgggggatgaagatgctgagaaaaaggaggaggattcagaagggctcttccggatgaggatagaggatgaggaccggagttcaggtgctgcaacttttctggaagaaagaaattcagacagctcgcttcgtggggagagttcgcaagtttcctcaaaagagagtggatgatgacagatgaggacctcagaaagatttcgcgaagatgatgagagccggggaccacagggt

SEQ ID NO: 584392 - DNA, 221 bp, Homo sapiens
acgaacaggctcctcctagagggatatgaagcaccgccaggtcctttgagtttaaagctggtggctcgtagtgtcctgggcgagcagttttggtggattaaactggtggaggttaagtggcaaagcatagtgggggtatctaaatcccagttgtgggtcttaagctatgtgtgtatccagtatatgttaaaggccacttccggtagccaatcaacaggggt

SEQ ID NO: 584393 - DNA, 195 bp, Homo sapiens
tatatactgtgcgggcttgacctctcctccctaagagagtatgtagaacggtctccaagaacacgtggcaacaggctggatgcagcggcctcacagctgtaatcccagcacttgggaggccacggtgagcacgactcacctgaggtcaggagctcaagactagtctggccaaccctggtgacaccctgtctctac

SEQ ID NO: 584394 - DNA, 228 bp, Homo sapiens
cagaggctccaggttcacgtgaaaacgggtagacaccagaactgaccccatcagggtgatagtgaagattagatgatttgtacacagttcactgctacctcatgccttcttatactaatccagtcctggttttgtgttcaggcagcctatcccagagtaatcagatgtggtgcaacgactaagccaatccaggaaaatcctgttccattgaatttccattaccttgca

SEQ ID NO: 584395 - DNA, 759 bp, Homo sapiens
tggttaccaaaatgtgaaccctgaaaatctgacgacaggtctcagttaactttagaaagtttagtttgccaaggttgaggacattatggccatgatcacaacctctaggaggccctgtatgatatatgcccaatggtggtgagagcacagttcggtttgtatacattttagggcagacatacgagacatcaattaacatatgtaagatgaacattggttcggtttggaaaacgcaggacaacttgaagcagggcagggggcttccagagtcatacggtcagatacagagcactacattcggttgcacttctttctcgatgtttctcaattagcctttccaatgggaggcaatcagatactgcatttatctcagtgtgagcagaggggtgactttgcatagaatgtgagcgcaggtttaacctaagtcagttcccagcttgacttgtcccttttcagcttagcgatttggggggcccaagatattttcctttcacaccagtattgcacctgtagcttgcttggctcctcagatagggctgacagcttgaagcaatcaaaaatacaggatgcccaggttaaatgtgcatctcagatttaacaaaaactaatgtattgccagtatacaatatgtccaaagtaattcatgggacacccttatagactggcaactctgctctagggagaacctctaagtactccctgattgggccatttgatgtcttccatcttctgggtggattcaagtcagcgaaagcatca

SEQ ID NO: 584396 - DNA, 492 bp, Homo sapiens
ccaccaggcgcacttctcaccactctggttgtctgtattgttgtctctagtacagatctgccacaagtccttgctaactttgcactctcccatcgccacccctttccctcacctacaactgttcctggcactgacgacagggcacgctaaaatcagtggctctcccatatacagtgacacagtcactcgtgctgccactgctgtgtctccaggcacccaagtctgaccagcgccctgaattgagctaagccaccttctcacaacttccacgatctgggtcctcccagcactcgatggcacagctaatgcgagtcgtatccattgattttgctcgccttctggggaccatagctggttggtcaccccacctcctcgaaaccgggtacgggggacacaggtctctgttgagacatcccataccctcgatagcagcatccacgggtgaagctgagatcagccgccctgggtccgagctcgaagtccttctcatgg

SEQ ID NO: 584397 - DNA, 292 bp, Homo sapiens
gagtgaataccaattaatggactggatacccaatgcccagtgtccagttctggcggtgcttgcctgtttccagtcagcactgcctacgagaggaaggctggcaatatccgtcttcttcaaaggagacaagcattgggtgttgactgaggcgtcctggaacctggctaccccaagcacattaaggagctgggccgagggctgcctaccgacaagattgatgctgctctcttctggatgccacgaataagtaatatcatatggtatttgtctattgccagaaccacaaatatcg

SEQ ID NO: 584398 - DNA, 1541 bp, Homo sapiens
tctgggtacccggctctgcatcgcgctcgccactgcactgggccatcgctccagtgcctcgtgcctcagccagcaacacaaacgcgctgcaactccggcacagaacacagcttcaacctcctggaaaccatcaactgcctgccaagcacctactctgcacgcactactcacctcccgacacactgctattgcggcacccccaacgctccactgcactgcaacgcactgccctcttctgcgcaccccccaacctgcggcagcgcacctctgctgcacctgcacccaaactgcactgcgccacaactgcccattctcttccgcacgcacgcactctcacacgctcccacgccaactcccaagccgcgcccaacgcgtcccactgcacatccgacacaccttctaggccgcgggaaccccatgggcactgcaacacgcagcggcttgcggacgcaactgcgagaaccccagcaagttccagcgctaagacctcttacgtctccctcgtgcccacgcggccgcacacattggccttggttcgctgggatatggccgtggaacggcgacccttatcccggtggcgggaaggcccactggtcgaaagcatttggccattcgcctgcgtaaatgcaagatggctgtgtgtgtgggaagcttcccacaggacttgcgcccctttcttaacctcccagggcgcaacgagcgggtgtcgccacacattctagggcgccaatcttaggcaaaacttcaagcatcggacacttcccgacatgaccagaatcgtacctccggcttacacaacaacgcggtacacaccagcacactattacgaacgctgttaaatgttctgccgccgaaaagcgcgttcctagtgaagcacaacgattccgtaaagacgttgccaaacccaaacgcgtctcggcaaccttaaccttgtcaaacatttggaccgcgtatgtagaaaagcccaatgtttcccaactgttcccagacacgcccagtcgcgcctcattcctcccataaggcttcttacacctgatataaatctccgaagaacaaccggcccccgaagtcttttcccgcaccgctgattccccccgaccggcttggacagactttcccaacacttatcccccttctatgatcgagcggcgcccctttttggaccgtacaacacgcacaacgctttttcacggcgcgcccccctgtagagggccacacatttggcccattggccctccccccaacgccccaaacacttggcggcgcttaaccccacgagggccactcctcccggcacacccgcccgcacaccgcgaacaaccgtcggccggggccacccggcgccgacaccacacccgcgcacaggaccacacatactccgcgcacaccccacacgctgtacatcacgaccgcgccagccactagagcagctgactacgtcgtgctcgccacaaccacgaccacacaccgcccctagtgtcgccgcaccatcaacctagccacgcgccaaactacttatcgatccccactgtctgagtcgg

SEQ ID NO: 584399 - DNA, 313 bp, Homo sapiens
  misc_feature (157)..(157): n is a, c, g, or t
tctactaaatggctgttttcttaaaacatgctccactccaaataaatcacagtcaaataatgaagagctcagatgacatcagtcccatttgtcttaaggtcccggtggtgggtggatgacaagccgaagccagttatgatgaccggtgatagatccnaaataattggcacatttgttaacatttttccatttctaaaccatccttaaagaaaatcatatatggggtcacaccatcctcacggtagtccaatagagcaaccatgccatctggattcatgttttcaccaataaagaactgacagccatttaggta

SEQ ID NO: 584400 - DNA, 429 bp, Homo sapiens
gacttagtctggggaaggccaggctcaggaggctctgccccagtcaggtgccctggacccagaactcaaagtcagccccaaggaagcaggcagcatgggaagcaggatggcagagctgtgccaatgggaaatcacagatccagaaggaaataaaataaagggtaccatggcagacatctgtcctggggaggaaactggagtcccatctgaggaatctggcctcctggctctaacagcaactcggagagaatttttccccacagctcctgaaaaaccactatgccttttagtccatgggcctctggatcacttctttccagaaagcaaaatcccctgcccccaaggtaagcaggccagccagtactttcactctagaaggtgtcagagaactacaaggaccttcagggcttgagccaaggaccagcttag

SEQ ID NO: 584401 - DNA, 124 bp, Homo sapiens
gttcaggaataagccaattaattaaccaagcatggttggtttaaatgcttctggtggccagctgcccccggtcgggcgattcggtccagatctcttggtcccttcggtggtcttttcccaccgg

SEQ ID NO: 584402 - DNA, 296 bp, Homo sapiens
agtagcgggactatagtcggtgcagcatgcccagctaattgtttgtggtgtttgtttggtttttggagacagagcctcgactcgtggtgcccaggctggagtgcagtggcgcgatctcggctcactgcaacctccacctcccaggttcaagcaattctcctgcctcagcctcctgagcagctgagattacaggtgtgcaccaccatgcccggctaatttttctgtatttttagtagagacggggttccaccatgttggccaggctggtcttgaactcctgacctcaggtgatccgc

SEQ ID NO: 584403 - DNA, 152 bp, Homo sapiens
  misc_feature (18)..(18): n is a, c, g, or t
  misc_feature (79)..(79): n is a, c, g, or t
  misc_feature (88)..(88): n is a, c, g, or t
  misc_feature (108)..(108): n is a, c, g, or t
gtgaacctgcggaaactncgcggctactacaaccagagcgaggccgggtctcacatcatccagaggatgtatggctgcnacctggggnccgacgggcgccttctccgngggcatgaccagttagcctacgacggcaaggattacatcgccct

SEQ ID NO: 584404 - DNA, 355 bp, Homo sapiens
  misc_feature (205)..(205): n is a, c, g, or t
  misc_feature (292)..(292): n is a, c, g, or t
  misc_feature (301)..(301): n is a, c, g, or t
  misc_feature (318)..(318): n is a, c, g, or t
  misc_feature (354)..(354): n is a, c, g, or t
tgaaaaccatcagaaaactgggtatagaagaaacatttcaacataataaaagccttatattacaggaccatagctagtatcataatgaaagggggaaaattgaaagcctttcctctaagatctggaacacaacaaggatgcccattctcaccaccattattcaacatagtactgggaagtcttagctagagcattcagacaaganaaagaaagtgcatcccaaattgggaaaggaaaaaagttaagggggggcccgggtacccaattcgcccttttagttgagtcgtatttnccatttcanttggccgtcgttttttnccacgtcgttgacttgggggaaaacctgggggtttnc

SEQ ID NO: 584405 - DNA, 204 bp, Homo sapiens
gtgtattcacgctactgcggtgcatgcctccctggacaaggttccgtcgacacgtgagcaccggtgcttgagctccaaatatcgttaagctggagcctggtcgacgtgtattcaccacgtgcggtgcattgcctcccatgtacaaagttccgtagcacacgtgagcacctgtgctgacctccaaatatcgttaagctggagcct

SEQ ID NO: 584406 - DNA, 351 bp, Homo sapiens
cccgtagctcgatcaacggtagtcggtgcggacatcgtcagcgcctacggcggcacggtcaaagtgctggggttggttgaaaacagctccaccactgcgattgtcgagaagatccgcaacaacgagtgataccccgtggggcgagcctgctcgcccctagcttttcttcggcacgatcttgcgcagcatctgccgtgccttgccggtcaagcgcttgagcttcgagtctttttccggttctgccaggccctgctgcctgagccaatccttccagcgaatccgctcatcgcgcaccagccagccttcttgctgggcaaaactttccgccagatagaggccgcgcgtgctggc

SEQ ID NO: 584407 - DNA, 370 bp, Homo sapiens
  misc_feature (1)..(1): n is a, c, g, or t
  misc_feature (255)..(255): n is a, c, g, or t
  misc_feature (280)..(280): n is a, c, g, or t
  misc_feature (315)..(315): n is a, c, g, or t
  misc_feature (324)..(324): n is a, c, g, or t
ntgctgcaggcccagggtggctgtgatgctctgttagcacacagacctttccatcaagttcctgccagtggcctgccgtgacacagcacccagagttgcagctctgcagcctaactcccccttggtactttctgaactgcacagctgccatcctccactcctcagctgtgaccctgaccattggcactgcaggagctctgccaacctgtagctggtggcgtctcatctgtggaaacctttgtttttgcaccctcnagtggttgtccttgttaacatcagnacatctgaaaggtcaggcagaggtagggtttggcntggtgtttntaccctgcaaagggtagagaaaggtgtttccatgacctgaccagat

SEQ ID NO: 584408 - DNA, 477 bp, Homo sapiens
gcttatccaaaaagaatgtcagcatgacctggtgtagacttaaaaaactacatgtttgtgaatattttataatgtggaatgatcattgaaatatcaaggattctagtaattgtatttcctgaataaatgtatgtttatgtattttctaacttacattttgttgtgtcctctgcctacaatctggttttattattgttgtttccagtttgctagtagtgtttattgcccggttatccatgttatggttaagtagtgagacaaatctctcattatttttcgagaactttgatattgatttgcaccgccccagtttccttcaaccgggccctttccacacccgtccgtgtctgcgctctcggtccacgccagcctgcaaggtagcctccgcccctctcacaggacgcatagtttgaaggcccccttctcgctctcggtgtcttgtaccagtaatctgccatcgtggcccgcccgggccag

SEQ ID NO: 584409 - DNA, 129 bp, Homo sapiens
cccgctcggctgccagtaggccagcggctgcgggtgctcggcgccaggaaggtcatgccgacattgcggcgcgcttccgggtgcacggccagcacgtctgtccagcagatactgcgcatcatccagggt

SEQ ID NO: 584410 - DNA, 385 bp, Homo sapiens
cagtgtatctcccatattattgtatgtgagagtaagacttgggaatagtctatgtcgtacagactgcatatagggctcttgaatctatatggagtctagctcatgtctggcttaacaaagtcttgggacaacaggcatatttcacagtgttcaacctcctctaatatgttcagactagctatacggccctagtaatagtttaggtaagtaaacgttttgtatacaattagaaatagtgggtggcctttgtaagttatttatatgtagtgtacacagctcttatagtataaagtatgtggttggtcatgataatatctatgataccctaatagtagttttatttggtgagaccgggtcacacgatgacgatcagagtgtagagcat

SEQ ID NO: 584411 - DNA, 259 bp, Homo sapiens
cccagattaacgagatgtacaagagaagcgacgagatggatggatcacctgaggttagaagtttgagatcagcctgaccaacatggtgtaaccccatctctactaaatacaaaaaaaaattagccgggtgtggttgcacatgcctgtagtcccggctacttgggaggctgaggcaggagaatcgcttggaggttgcagtgagctgagattgtgccattgcactccagcctgggcaacgagagcgaaactccatctcacg

SEQ ID NO: 584412 - DNA, 391 bp, Homo sapiens
accagtgcatccattaagtactgggtgtgtatcaagtcccccctcaagagtcataagtagctgtatccttttaccagtgtcctgttttcgccctacccagatgtacgagaagctatactatagataaatctgactatgtcatccaataccattgcagtcctctgcggcatacatcctcaatgggggctgtatcacccctagattggttctgagatactgcaatgtcttgtgtccttccaaagaaccataatacttgagcaaatatgaacattacttggggtgagggcagaaagagagaaacacaagtctaagaagggccagtaatgaaaaaacagttgagaccttaagtatgatgggaacaggatgaggaaggaggagaaactgaaatgag

SEQ ID NO: 584413 - DNA, 414 bp, Homo sapiens
agcaccggtgcatatatcggaatgaatgatgtcggatactcttgtagccgtccaagacagaggccttggtctcagttcgcaatttggctatgaagtatatgtcctagcagcacggttctatagttctgtgggatcactgccatgaagaaccctgagcgcagtgcagtctgctatggattgataacagggttggtataccagactctgtacacttgcccattttctcgcatattcagattcgtgaggtcagcctggtgctcttctttgcgctatcctacagacacataccctggctttgtggcatactcctaccgttcatttctgttactgctctaaagtggcttcttctggggacggagagacatacaaaatcaatccctttgttgggaccatcctcttctttcgaggggatcc

SEQ ID NO: 584414 - DNA, 741 bp, Homo sapiens
  misc_feature (412)..(412): n is a, c, g, or t
taacggtttgagggggaatgctggagattgtaatggggtatggagactatttcatataagtaatggttagggttggaggggtaggaagtttttccataaggaggggtatgagtgggtcgtagcggaatcgggggtatggctggtgccagaattcataaagaacccggggaggttaaaatgtaggggtctgggtggaccaacatattgttggtgtgtaagactgtccacgggagaagaaggtcgcggtcacttattgtgtgtgccctatgagaaaagaatgtgtagtggtgtagacggtgttgtctctatcttatacataactgtgttggtggtatccgggcatattagaaagacatatgggcgcagaagtgggtgcgcccagtagcggggcgaggattatatctccagaatngttggttttagaacggccgtgaggacctaagtctctgagaccctcccctttctgtgcaaggtgtcgaacggcggcgtgtctcggttgtggctcctctggcatagtggtgggagagaataaatcatatttatggccaaggggtcctgatggcaggagtaaccagaggtgtcctggtgtggtgacgaagggtggccgcggttacgtggagccacttattagtactggttgactagtcagacatgactggctagggtgacttcatatgacgatgtgttgtgggctactgctcgcagtgccgccgatcagggcgtagttggatcttggaggcc

SEQ ID NO: 584415 - DNA, 399 bp, Homo sapiens
cgagtatctagaggatcccatggagaccaggttgagatggagaccagctgaggatgaggctcaggctcctcgggctggtctgccctgacaggatactgagccaagccctgccttgtggccaagccctgagtgccactgccaagctgcggggaagggtcctgagcaggggcatcggggaggctctggctgccttctgcatttatttgctttttttctttttctctggcttcgtagggggtggtggcagcactgtttagaatgagccttgggaacagtgaacgtagagaatggttttaagcagagttggtgaccaaagtcagagtggatcatgggggttgggcagcagggaattggtctggtgggagcctgctctgtgctccccattccatttctctgtcc

SEQ ID NO: 584416 - DNA, 140 bp, Homo sapiens
  misc_feature (56)..(56): n is a, c, g, or t
  misc_feature (79)..(79): n is a, c, g, or t
gatatcagtgatgtgtttagaaacacagagaatggatttcttcaagatgcacttangtaagccccatggaactgtgaanagccatatgtatccctgtaaggagcaaaatacttaaaaaggaaagacattgaatccattag

SEQ ID NO: 584417 - DNA, 1818 bp, Homo sapiens
  misc_feature (568)..(568): n is a, c, g, or t
  misc_feature (1032)..(1032): n is a, c, g, or t
  misc_feature (1329)..(1329): n is a, c, g, or t
  misc_feature (1574)..(1574): n is a, c, g, or t
  misc_feature (1665)..(1665): n is a, c, g, or t
ggcggcggcagggctgagtccatgcgacgctctccattcactctccgcgcccgtgctccgcgctgtcctccctgttccgctgcccggccgctgccgcgcatgagctggatacaggccgagtctcctttctgctcgtacagatctttctttgtgccgcgatggctgtcgtccgggactgtcatcgtcgctgtgagctggtcctgttgtgcctccgaactcgcatgctggtgatcaaatgacgttgtcgtcgcattgctagagatcacaagacggacggaccctatgacaagtgcaaggcagttcagacgcgacacggtaccgagaggacaacggtcagcgaaacgggaggccacttcggtagcgccacgtagcggattcgtacccgggcaatccgccgcaaaagtggggaatgccagtgggggctcgttagccattggttccccagattcccatctgtgacgcgcgaggcgacaccccctttggccccaaaaccgttgatcgaagtgtccatgcgataacgttatacaccccccgagtcttctagattagcgccccgtctagagcgttntacaagccccttttccaaacggcgatttagaccgcttaaccaagaggtggccagcagcaacgttccttttttctccatttgcgtggcgggctcgtcgcctggcgtcgtggaacgccaaacagtagaccaaccaatcatggccgagacgagtacatccttcggagcaacggtggactaagccacttatattaagcgcaggacgatagtccaagaccaccccggttggaggtcagcccagttcccccatggtggcaccacgcgggtttggcacactggctggcctcacgggggcccggacctagtaacccatcagttacagcccaccatatcctgattggacaggtttattcgcggagatggcgttaaccccccccgatggctctattctgggccaactttttcttccagcgtcgcacacaggataataagccaccctcctagtgtcactcgtgtggtctggctcntacgtggcccagggtgtgaaccatcgagattatgaggcgggaacaacacaagggattcctacggggagacccagaccagatgggaaatgagccgaaggcatgagacgaggattattccccctgagaagtgggtgagcccgtttggcggcctgcaacaagcacaccactttgttcccctcgttggtgcattggacaccacgggaaatcttcaaacatcgcaaaaggggaatttcgcccggagacacacgagaggctccgaagcatttcccccaggaggtagcggagccccctattgtnataatccgcccaagcggcgggcgccccgtcttccaaggggatggactatacagttccccccgggctggcccccacatggaggtggtacacagtttccgaagcttccaaagtgtcgcttttaacgccccgggtaggagacactggggtagccctattaaaccaattatgcacggaggcgccgagattgtgctacaccgggcaacgttaccgcggtgctcccagcacgctggcatgtcgcaaccganctttccgagattggtttaacccacacgggggtggccacaaccccgcgattcgggcaaccactatgagtgttcggcgcaaggcgcaaacagngaaattctatttccaaggcagtgcaactttgaacgcgggcggctggacgcaaaaggtgcaccatttcactatctcacaaagcgggagtagtaggcgcatgcggatccccaaagagcggttcaccatatgtgcgaggagggccaatttggatga

SEQ ID NO: 584418 - DNA, 269 bp, Homo sapiens
attctccccctttagagctatgtattcatctgtcaaaactgcctgctattgccacaagtagctatgaattaacctaataacacctcactggacacaacatcccacactttaaggcttaacaatgggtagccaatcactaatcaatgttatttctgtaaatcaatgagaatccgcggcagaactttgtatcagtccaatccttgtccccctccttttttgcctttaaaaatctgcctgtaataaaggccaagtggagctcataaaaaaaa

SEQ ID NO: 584419 - DNA, 173 bp, Homo sapiens
aatcagtgctttcatgccaactctttatacataatagaaaatcttttatttccacctttagtgttccctgctagaatagatgaccacaaaacccaggccagaaacgtactaggtctagccgtagaacagtccagtgaggcactatgttctagctagctagtaggaagtacgcc

SEQ ID NO: 584420 - DNA, 146 bp, Homo sapiens
acttaccagccggctgcctcggagacgtgttgccgagagggcggctgctggctgggcgtgcggacagtgctgagtgggacgagctgcgggtcccatctggaccttacttgcccacctgccagtgtcttgggcatttccttggcgga

SEQ ID NO: 584421 - DNA, 851 bp, Homo sapiens
gaaggagttccataccagcggactggcctggagcaaaagcggggcctgtggttaaaagaactgagcggactgccatctggaccctctgccggatcaggtcctcctccaccctgccaacagggcccccatccatccgcacaggctcataccagtgtcaggtgcatcaagaatgacgatcatgactacccggcatcagtcacttggtgcgcagcagagtataatcacggggagagaagcattaacacgatgcaccatgcagaagatgtaatctgaagtgaacgcatgaaagaaacgtgcagcagaaggagaatccacatggacgagcttgagaggggctcacgcgaggtagtgtaccacaagacaacggccaaggtggggctccacgcaaaagaacccagtacatactaggagagcgcgtgaagaaggcgcgaccaagagcaaggcgaggacacacccgattcgcgcaccacaaagaagcagaaggatccacgacgagcagatcactgaacacaggagggccaggacaccgacgaggacgtggatgtaacaccagttagtgggaaccacgcactctgggccgacagggacggagacccaacacgcacaaacagacgtggcgagaaaaagtaacagcactggggcggaacaaacacaacgcatccgacatagagcagcgaccaacaacatgagacttgacagacccccaagcactaccccagcactagggaccacagccaaacatgactaggaacagggaggcaagacgtaaacacaagggaagggaccaatgtggagaacacgaagactgaaagaggacattgcagtcagataagtccccaccagcatacagt

SEQ ID NO: 584422 - DNA, 93 bp, Homo sapiens
tgagaactgcagatagtacagcttccacaggagcaagggatgtctgagcacaagtggctgagttccaagagacaatatgggtcaatagctgtg

SEQ ID NO: 584423 - DNA, 108 bp, Homo sapiens
  misc_feature (90)..(90): n is a, c, g, or t
cggtcccttctgacgcgctttcagttcctagtgcaggaccacagagcatctgcagaaactttaattcctcctccgttgacacacgcatgngtcagagaatgaaatcct

SEQ ID NO: 584424 - DNA, 633 bp, Homo sapiens
  misc_feature (29)..(29): n is a, c, g, or t
  misc_feature (176)..(176): n is a, c, g, or t
  misc_feature (349)..(349): n is a, c, g, or t
  misc_feature (358)..(358): n is a, c, g, or t
  misc_feature (456)..(456): n is a, c, g, or t
  misc_feature (524)..(524): n is a, c, g, or t
  misc_feature (570)..(570): n is a, c, g, or t
gctgcaggaattcggcacgagcatagttngcaaatatattctcccattctgtaggttgtcgtgtactcagttgatagtttcacttgctgtggagaggttcttgtgtttaattaggtctcataggtcaatttttgtttttgtttcaatttcttttggcttatttgttatgaagtctntgccaggtcctatgaccagaatgatattttctaggttatcttccaaggtttttatagtttttggtttagattgaagtttttaatcaatattgagttaatttttgtgtctggtgtaaggaaacggtccagtttttatcttccacatatgactagtcagttatgccaacattatntattgaatngggattcctttcctcattgcttgctttagttaatcttcttgaagatcagatggctgtaggagtatggcattacttcttggctctctattcctgtcatngatctatgtgtctgtttcatatcagtaccatgatgttttggttactgttgccatgtagtatactttgnggcttggtagtgtgatgacttcagcacttgtctttttgttagaatngctttggtattcagattgcttctgacttcatatgacctcttaaatagatcttctaaatctatg

SEQ ID NO: 584425 - DNA, 215 bp, Homo sapiens
cgcatctttcgtcccatcagcggatttctatacattgacctcttgtttgttatcacaaacagcagtccaacgacgtgtcacacaatgacgctggtccatcttctcccatcagtttcccatcaaaccagcgtcattgtgtgacacgtcgttgtactgctattgttataaccaacaagaggtcaatgtatagaaatccgctgatgggagaagatgcg

SEQ ID NO: 584426 - DNA, 885 bp, Homo sapiens
tgtaatctcagctacttgagtggctgaagcaggagaatggcttgaactcaggaggcagaggtcacagtgagccaatatcgtgccaccatactccaaccgtggggtgacagagactctgtctcaaaaaaaaaaaaaaaaaaaggaaaaaaacacactgtgtgttgggccggccttgggcccctggagaaaaaaggtgtttaatagacccattccggttggggcgcgcgggggccccaaggttgggtaaagggtggaccgtgtgggccaaaaaggtggttcccaaagggaagacccgggcccatggcactaaggggtgtggggttttcctcaccacaaaataaaaaaacgcggcccggggggacaccaccggaggcgtgttcgtgacaccacattccaaggagtggagaggtacggcgaggggccaatacccggtgctctaactcaaacgagagagtctcaacgaggagagactgagatattcaaacattaatcgcccgcgctgggggtagccgacagactgccagcaacacaacaagagcaaactaagaagcgtaagcacatacaaacagcagaacagacgaacaggaggacgcgaagaacagcgcgcgaaaggagagcggacagaggaaggccgaaagacggggggcggacgagagcacgaggaccgagaagagacagcaggacgggagagcgtagaggcagggagaagggaggagggacgaacggaagagagagcagcgcaaagcgagaggaaaaacggagcagacagacaacagagaaagagaagcaagaagagagagagagacaacctgagacggaggaggagaggaagaagaacgaggggaagaacgcggccgaggaacgacaggaagcaggggagaggag

SEQ ID NO: 584427 - DNA, 819 bp, Homo sapiens
  misc_feature (819)..(819): n is a, c, g, or t
agccaccaaaatggtggtgttcgggtatgaggctgggactaagccaagggattcaggctgtggtgccggtgggaactgaggaagcgcccaaggttttcaagatggcagcactctatgcattggtcagcccagtccttctctagacagatgcaaaactcagaagaccaagtgggtcatagcaacatcatagaaaacacaattcttgactatcttagaacaagaacatgacacacaaatatattatcacacatgtggcgacattgggggaacaaacagctgggtttctcgtggaactatcctcaagacttcctggttcagacgcctgcttcaaaggttaaaccattgatgcttggaagacatatgcgatcatgggctacacttccatttagggtctactgtcgttacctgacaagcttattggtaattgatgcttaggtatccagattcatataagccaaggaacacactgtagtaactcacgaggctccactgacttgggcaatacgtcacgtgcgtgctatcgctaatcccaggtttcctttgggctatttacctaacaacatggaacgtcctgggcaacccaacgttatcattaccggttcccactggcccaacccaaacccgcgcaagggctctcaaatcccacttggcgattgacccgctcttggccaatcaccacccgaagccttgaccactttacattggcggaaatatccctaccataaggtcctttcaccgacttcacatagtatccgggacactagttacacgattggagcctaataccgcaacttcattggcgcacggataatctgggan

SEQ ID NO: 584428 - DNA, 659 bp, Homo sapiens
  misc_feature (479)..(479): n is a, c, g, or t
atgaaatattagttctggttgctagtgcagatctggactcggatcaagggtgtcgagagggtcctgggtcctgttccttgcctttcaaaaagactttttacggattgagaatttttaaataccactaggggaaaggtgaaggttctttgcagccttcagtgttgaaatggacgaaggtaaggaagacaaatcattttaagacgaaatctccgattttttaaaaaaggaggaaaaaagcagggtggctaaggataaagaaagaggacttgagaaaatgtggagaatgaaaaacaggagagcagcgagcaaaagcaaagatccagagttcaaagagactggcagaaggaaatagctgcgggctgagtgctgaagaggggagggactgacggctgccggccggtaggagcgcggagctgcgctgcggcggccaggagctgctgcggttcccgctgctcggggagcaggcggtgtgtgcgcgngtgcgaagtccgagggtttgaaactgcaccgggcaagggcgcggctccttgctgtgttctggagcctccgggcgtctcctctgcctcccaagctcaggggctttccaccctcttttccctccttcttctttccaaggttccccggcctcttggttggtcgcaggcttcggcaagtgagac

SEQ ID NO: 584429 - DNA, 178 bp, Homo sapiens
  misc_feature (68)..(68): n is a, c, g, or t
gctggagacgacgtgcagaaatggcacctcgaaaggggaaggaaagaggaagacaggtcatcagcccngggcctcaggtggcttaaggagaaattgtatttggtgtctgccatatctttgaatcctcaaatgacacttttgtccatgtcacttgatctttcttggcaagggaagccat

SEQ ID NO: 584430 - DNA, 262 bp, Homo sapiens
  misc_feature (53)..(53): n is a, c, g, or t
aaaaaaaggggggcccaatttttccccgggggcgcccccaaaaaagggggggntcttcaggtttttaggttaaaagggggcgcctttttttttttccccccctttttttttcgggggggcccggggtaacccccggcccccggggaccccctttttcccccctttggggttggcccggacccccgggggttttgggtttttttcccggggcccccccccttgggtttttttcccagcccctttttttttttaaacctcccca

SEQ ID NO: 584431 - DNA, 498 bp, Homo sapiens
gagcgggtgatctctcgtatagctaccaattgagagcagtttaactgtgcttgagtcccctggcgtgatgtgttcatgagactgaagtttgccgatggatgttgtcagtgtgttgcagctggagggcccagatggatcaatgaggcatttacagtgtagaatctcaccctgaacccagactattcagatacagaactggtgacacgatggctgtacattcagcacagctgtggatgtccacccaagtgccatgacccaggagccaattcagagaggagctggcctatgaccggatgcccacgcatggaggacggggacggcaaggaccactgccagactatgccccagacgcgaagaccgagctgaaacatgccagctgtcgaagagacttggcccacctgcttacaagcaacaaagactgtgggtctatcatcttgttgcttgatggtggagctggcctccttggtgaaactcagtgggttaaacgactagtacctg

SEQ ID NO: 584432 - DNA, 1144 bp, Homo sapiens
  misc_feature (924)..(924): n is a, c, g, or t
tggcccgtggatttacaaagttttatgtgaccggagccccttgggaggcaccaaagtccacattcggtactcagaagggtgagggatgggcctcaggggggcaacatgggcccgaaagggggggaagactcgtccatcccctggggggaaaggaggcatcccataaggcatggcacagggcttgaaggggggcacacccccacagtgggggaggaggaagcaatgatagtctaaagaagggagagagggggcaccccaaaagaattacctacccaggtattaggggttaagaactcttgaaaattggcccctaattagtctaagaccctgggggaccctttagaattcttaagaaactcttaagaaccattggaggtcttagaaactaccggtgcctagaacactatagagaaattttagaaaatgtggggaatctcgtgggcacctctttaaccgagggtctcctagaaggaggcagaaagtgcgagcaagagaaaccttaagagggtgctcccacacttttgagaaatttttttgagaacacgttggggtgctctagtttgagctcaccacactgtgagggtgtgacgaagtctatataacttttaagagtgcttaggactccgggaatcttgggcaccagggggaactctagagtggcctgtgaacacagaacaagaccggttagaaactcttattttaactcttcttagaaactctggggagcatttggagtcgtaagaacttctttagaccccgagaggaaattcttaaagactcttttaagaagtaagggttctttaagaaatattcacacatcttggcgcactctaatgtacagcgggtgcgggcacaacacagagcgtattgggaacagttgggcccgtgggtccatacgcgggtttcccggagacccaagttttntctgtggtaccccaggcgggtaagaacctgggcggggtcccccccatatgagggaagtacgcaataaaattcgaaaaaggccagtgttaaacctggtaaaaaacacgtgacacagaaagcaggtgacgagcgaccaaacagacacagcgcagcagaagagagagaagacacgcaggaaggagacacaacatgtgcaaaaaccaaataggcgtcacgaaaa

SEQ ID NO: 584433 - DNA, 503 bp, Homo sapiens
tcagtcggtcctggttgcgtggggcactggaatggcagcgtgcggcaaggtgggcgttgcaggaggaagacgggccccatgccaggagattgagactagagttagcagcaggctcacagcgcactttcctccttctttcaaaatctttcatcatattgacaaaacagtgaaaaacaagtccaagagaacttttaagatttaacctgcgaaaaagtgactcacactcctggctatgtgttttcatttttctgttctaaaatgttgggttacagaaagtgagttctacttgggaaacttgggaacaggaggactgaatccagtgtctgagtttacagggtggtggtttcgtcaggacccaagcttactatttgctgtcctttggacaaagctgggaaccaatacttttttaaagttaaagcaatagctgagttgtcaaaattgtaatagaaacaaactcttacaaacaaagttggagttcaataaagtagagatagttaaattta

SEQ ID NO: 584434 - DNA, 702 bp, Homo sapiens
  misc_feature (73)..(73): n is a, c, g, or t
  misc_feature (86)..(86): n is a, c, g, or t
ttttttgccagctcgggcatcctcctttttatttcaagaggggccagctccaaacaaagttacaaggttaagngcaactccaagtncctgacacagtctaatcccggctcggtcttcaaaaatatagaggtcggtaatcccttttggaacagtgccttcgaagtggaggtcttgggccagtgagctcttcttcgacatcatctagtgcccacggggtgatccgctcagctccaaagcttcccactcgtgtctggaaagcttggttgggtgtcgtgcgggcagtggtccatgtggctgtgcctcccggtcaatcgtgcttccgtgcattcattcggtgaatgggcccaggcggcatatatcttgggccccagaaatcagagagttaaagtgctccgaagcccaaaatacattgaggaagttaccaggagtgcagaactcacccaggaggcatctaaggtgagtagctcgatccctggcggtaacataggcttaaaagggagggtcaggggaaaggggacctgggttggtgacaaagccgtgagaatgtcatgtggatccatccaccattaagaatcataggggggacattgtgttacattccctttcatcatgtctgtcaacatagtaggatcagcataggagaggggggcctaacttcggattaagttttctggcaaaccatctcggggggtggaaaaaatc

SEQ ID NO: 584435 - DNA, 378 bp, Homo sapiens
ccgagagcatgctaatcagcggggattacatggcatgggccatgtgcctgggcctgggtttaatagttttaaaattttatttaggggggaatgatggtggtttttgggttatacaatgggcaatggctactgaggagtatcctagagacctggagggtcacgtgttgttatttggggatgcctcactattatgggtggcggttacgacgtgggtgactaattactggtacgtttacggctggacatagtacgcaccagacgatacgtgctacgactggtaccacactctggacacctactttggacaacgtacgagccagccagagactttcctgggtcgaactacggactgtacgacgtactgacgaccgacacaca

SEQ ID NO: 584436 - DNA, 646 bp, Homo sapiens
gtagaagagaagcggacggcgatggcgacggtcgcagcaaaatccatactgcatgctgcagtgcgtgcttgtggctgtgctggcaagcggcgtgtgactgaggatagagagccacagcactgaggagctgccagtgcctggacatgccagtggctgccagatatgaaaactggcgagagtgggcgatgaacgtccactgctgtggcctggcgaaagctggttccttgtggagaagcactggtataagcatgtgggatgtgcatactgtgcagggaggggaccatggactccagcaccttccctggctgcatcaacaatgccacactctttcaagatgagataaactggagcctcaaggagggactggtggaacggcgaggattatgtgctgctcccaagcagctgcttggcaattacctggtcagctggtattggtctagaagcatggccagacacccattgaacgcaaggtcactagagctgcccaacatcgcagaaggtcgaagtgtacccagtagaacctgctgctttgtccggcacaatgatttgggcaatctcaccactgtacagttcagccaataccgattctattggctagtattggcaacagctcggggaccgggttacatggtggagcccaggaaga

SEQ ID NO: 584437 - DNA, 135 bp, Homo sapiens
aagtccccatttcttccctggtgatctctcctgcagttggattactctggtggtgaaggcaggacccccatctcccctctgagttatttgagtttaggtgctgctgcatttccccattctaacaattacatagag

SEQ ID NO: 584438 - DNA, 123 bp, Homo sapiens
aatggtgttactaaatggctgttacataaatggctgtacctaaatggctgttcctaatggctgctggattggcgatcacgagtgccatttaggtaacagccattaggaacagccatttaggta

SEQ ID NO: 584439 - DNA, 289 bp, Homo sapiens
gctggatttttgggagctccttgatgggtcccagaccttggcttttgggaattgcacttttgggcctttgggctttggaacctgctttgggtcattggttaaacttggaaggggcagccccccctggctttttggttttgtggttgccagcctcaggtcatccttttaatttttgctgatgggtcagtcctgcctttactgtctttccatagccctggtggggtcccccttctttttcccctggacaaaaaaaccccccctgggatggggaataaagtttagaacatta

SEQ ID NO: 584440 - DNA, 711 bp, Homo sapiens
gcgagatctgcgcgactcggtctcaagcaactcgtggtagacccacggaatggtgacgggtccgttcatgtaacgcgaggtgcgtgcgacggactacgcaccgtctcatcagagcgtgtcaggtcgggcgcttccgtgtaacgagagacgggtcgttccgcaaaggtccacagagacaagcggactgccgagcgaagaaggactgttcgtcctgtgttacagcagctactcgggcaccaagggccggctacagcccccaagcgatacccgccaagtgcccctgatggacaccgaaccgtcttggagcaaatatccaagaagctattctctgaacagtattagatgtgattcagccactagtggagttcgaacaaggtagtcggtgctgaccaggcatcatcaagatcagcctgaagacgctgctggagtcgtgtgcggcatgcgcacctttgggcgcttcgggctgcagcaggtgcaagtggactgcaactttctgcagctctacctgtggcgttttgtggccgacgaagaactcgggcacttgctgctggacgaagtggtggcctctgcgagccctgcgcatgcccagagcctgtgcccatggagccaagtgtggatgaggtaatctgcgagcgcggctaggcgcagccgctgcaaggcaccggtctgtcctgcaccccatgcaccataacccgtggggggtccttcccc

SEQ ID NO: 584441 - DNA, 975 bp, Homo sapiens
ttcgactgaaagtaaaggtcggtagtccccggatctgatcgcatcgggccccagtgtcagcgcatggggtgatcaaacactctgtttaagtgaatatagtcgcctttaatagacccctgtccattgcaagcgacaaactatcattctctatacagtgtaacccaagtatagacttgcctcccaacaggcccaattccaatggtgaccgtgcaaggttgaggactgaagcaaggcatgtcgcatagcgaatgtgaaatcgcaattcaagcgattgtttgcaggaaggcgagagtcactgcacaaccactacaatatagtctgggattagcctggacggcatcgagatacgccttgcttggcacctttccgaacatgagccgtgtatcaactcaaccacaggtaggatagggcgaggaggacgacaaattggctagggccggggagtctcgcccaaggagttcattcgactacctccttgagccaccgtcagtgctgtaacggccccccccgaatgctacgatccattggagataatgaacacgcatagaaaaaagttggtgccacagaaatggcgcgtcaagaatcaattcacacagatgtccttccctttcaagcaggcatatctgccattaaagcaaccctctgtgacccaaccgtcttcacttcatttgaattgaccatgatggcgtagtccgctggaaaacgagcttccattgacccaacttagtccaaatggcccatctaggtggctgaccgcaaggacacacatgttggcacaggacccctaccgaggttacccactgaaggtcccttgatggacacgccggagactcatcccaaaaacgatcccatcctcctggcctccttactggccgcttgccacagtggctagtagcggcaaagggtcaatccccttgaggcttgaatcggggaaaggcctccacatgtacatgggccgttcccgatgtttcccca

SEQ ID NO: 584442 - DNA, 1190 bp, Homo sapiens
gcctgaatctcaggattccaccacaaagacctcagtcgggatcaaagagtgcgagaacaacgaagtaaatattcctccgcgcaaaggggtacccagcatccaatccgtggaggctggtgagcaaggtgacattgcaaccccgcataggaatggtgatgacaccctgcacgagtcaccaactcttcattggcaatcctggcctcatgaagtggacaaatcagagcttaaagatttcatttcaaagttatggaaacgtggtggagttgcggcattaacagtggtgggaaattacccaattttggttgagtagtgttctgatgatgctgagcctgttcagaaagtccttagcaacaggcccaatcatgttcagaggtgacggtccgtctgatatgtcgaacgatgaatgcaagcactcgagctgccagggataggcgatgcgacgagataatcgaccttcggggacctggtaggccctcgtaggtgggctgcgttggtggaactgagaggcccttccccgtggaggcttgtgttgcagaaagcacgatttgccgtgggacggggggctcgcgccaccggccgtgaatctccctggatctccgtgcatccatacgaaacctgggttccagacagaatggtgaattgtccgacagtccttaggcatctcgagagcatgagcccaggtccggttgtaacagtggatagagttcggattaacctgactcgcaacgtgggcaatggcgttggtgcatcccatctcgccctcttgccctttccggaactttaccctttcaccttgccaattcgccggatgatcatttggcaataaacgacttccagatagcccaccacacaagagattccggaaatggcgatttcaccaggcggcattttaattggtacaaggaaccttcccacaaaagaggggttttgctatcactcgacaaagggcggctcactcaccatgcagaacagttacctatacccagagggtaaacgcgcgaacaaaacaagcttgtggacttactaccggccgacccaagtgcttcttgcagtaaacaacccctggaggaagcgcagacaaagacagtacacctagtattactagctgtgcaacaccagtcgtggttgtgcaacctaccgcctgcatctcacagactatctgactgcaacagtaagtagtaagactatat

SEQ ID NO: 584443 - DNA, 1052 bp, Homo sapiens
cgtacgccgttgggctcgtgattgggatctaagaaaaccatttgacttattcatcttgtattcatcttatgttcttgatgtaatgggcgatgagagctgatggactttcacgactgttaggatactgaaatctggataatcatcccccgatgacctcaattacgcatgttagcccaatgactggttcccgtaaccacgtatgaatcacataccaggtctagggtattcaagctcaacatacgtgtggtgctgtgggagaagactcatttagataccaatgtggtcttgggactagacactacgaaggacatagtagagaagtatcattgtattcgtgatgatcaaacaatagttccaactaaatgagccgactagtactagtagaggccgggggcctgcgtgggacgatatcgtgatagtgaagtaggtcaagtactgagaaagtccattcctaaaagtattgtcataggaattcatgatacactaactggaacaacgcttgacctacctaccctctaatgtgtactgggtctaagtgaagacggtagataaggctgctctgaattatcatcgaggaatgagtcatccacctgtggggtaatatcagggtagaccgctactttgacacgactgactgttgccaattctggtattaatagcgctatatcatattggtttctatgcaaaaaaagtagtaagcttattaaagagccatatgtaccactcacctttggggaggccactgccttgcgaggctcccttgtgaccatgtgtgttgtaccagggctggagctaatagtgggcacgaccacgttctggctcctaaattccatgaacgggagtgtcgccttagattttccctgcggtggccgccaggctttgcctttaacccggctttcttgtccaggggggcctataggggaatccgtatgtagccagctggccgccgttgtacaacggtccgactgggggacattggctcgggatcttgggggggccctctttctgggggggccgtttgggccctccctcggagtttagtccgggataat

SEQ ID NO: 584444 - DNA, 315 bp, Homo sapiens
tccactagtgtaggccaatcatggcggagggaaagcaaacatatccttctgcaccaggtggcaggaaggagaagtgccaagcaaaagggggaaaagctccttacagaacaatcagatctcatgagaactcactcactatcatgagaaaagcagcataggagtaatcaccccaatgagacaattaccttacacctggtccttctcacgacatgtggggattatgggacgaacaatcgaagacgagatttgggtggggacatagccaaaccatatcaacatcctctatttcccaatgttgtttagttgtctctccat

SEQ ID NO: 584445 - DNA, 149 bp, Homo sapiens
cgagcccgaccctgatgtttgctggcagtagggcaaataccacatttgtgcatcactgagtaataacaccattagaaaaggcacttcacagaagttattggctaagcgaattcatttgaatgctctgttttagagccaggcaaccgtca

SEQ ID NO: 584446 - DNA, 1579 bp, Homo sapiens
  misc_feature (1481)..(1481): n is a, c, g, or t
atcaccacttattaacaacacacatagaatgatgaattaaacaagagttttctaggacttgctcatctttacttcgtgccacatttatctgataaagcagctgcaaggaattctgtctaaaacagactttttaagcaattgtcttgctcacgctcatgttcttagcaacactgttctaccctgctactactggctacactgtccagcttttaacaaactagttggacattatctcaatccttacaacacttctctactctcacccttgcacttgcgtctcatcaccagtataccttcataacacagcacaacctttctactgcttactacagcagcttacccttcctctctggcactcaagcacctctctacttcacacttctctccaagcctccaccgccctaccctcacctctcctcgacccaactctcactaacgagcacacgcgcacgcgctacacctccgctcgcctctctacacctcgcacctgggtatctaaacaccctcgtgctcgccctcggcctgcgtgctctctggggcacttcctctcactcgcacttgcccgtgccacgcccactcgtctctcccctgcccactctgcgcatagcccgtcactacttgcgctcctctcaacacctcactcaacactctctctcactcagctccgcttatccacccgacccagtcacggctggccattaccccaccaaagcaaagccacctcctcaaacctctcatcacgcattccccaacgtcacttgcataagcccataacttttggagcgctccccaactagtgcgctctccgaactctcaggcaaggacacctagcgctccacacccacattacccggcccacctcttccccgtacatcacatcccaagcgctcgattggctcatctcaagcaacccttatcttctcccacacagcgcttacattctgtctaacacccgtactatttcttatccccacaacaaaacccaattatggcttcaacccctaacttggggttagcacctatcaacattcacaacaacaccgcctctcccttcaccgcacaactctctcccccacagacctaatacccctcatttcaccctttactttcacggaacatacaaatagactcccttgggtgcttacatcctctctacagctatagcacacaaccaaaacctgatctccctcccagcgctctggtttcgacattcccccaactctcggccctgggctcccacttgcaaaggcgagcagaaccaacatccagcttatcgccccaagagataatccccacgggacctaaattgggtgcagcggcaaacgaggcccatcatcgcaacagcacactacacgccccccccgacaccccgattacacacggaccagcatcacggcgacaggccaccttcaaccacctcggcgacccaatctcaccgacacgcgcgacgcacatataaaccaccacacacgcagcactgnaccacataaacgcacacccctctccagccgcgctccaacaccaagcccctatcacaccctgtctcacacacccctaacgagcgatgcgactacgtgag

SEQ ID NO: 584447 - DNA, 148 bp, Homo sapiens
attctctattgttattatagaatgtgcaacttacgcaaccacattaaaactcattaagcctcaattcctcatggctttcattgttatccccactcccacactggctttggcagacaggcatctggggctcgtaggaggggtaccgagc

SEQ ID NO: 584448 - DNA, 555 bp, Homo sapiens
ctatagagcagacaaacatgtgtgtgtgcatgtgtgtgtgtgtctgtgtgtttgcatctctgtattctgcaaattgaatattcagcacaatacccaaaatcaactgcaaccaacatcatccatttatcatcaacacattttatatttcatattcatcacacatcaccaaatgcaacatcacgtgataacccaatgcccaagattaatcattacacatttgcacacacattcatcattttatgcagccttccaggcaagcaacacatccaggtcgtttcatcatcatcttttatgtccagtggtcccagatgcgctcatcgcatcacaaacgctcagagcacacacatcatcacaaacatggcacacacacacaaatggattttacttcggcccagattccaaagccacatcttcacagttggcacattcagctctttccgggaacaccttttatgggccatcggtcatctcttcaggcactccacagatctccaagctcaatcccaaggttctcgctaacacacaatcaaacacacctatcgtacccaactataa

SEQ ID NO: 584449 - DNA, 377 bp, Homo sapiens
cgtttacatctattggcgccatggatgttaatgtatcaaaaaatgttgcatcgaaaataatcctgtggatctgcctctggagtccaatatggttattattcttcctacttcccccttactatggctcttcctattgtagccccatggctcagtaatgccattgaataccctatttgtagactaagtggggtcgcatcatctttggtctatcttatcttgatgtcttctcattaaagtctccatgtgaaccagtataattgacctgcctgtgaagaggcgggcatgacacagcatgtctagaagagtgtatggagttttatatttattaatgcacacagtacctaaccaccgctgttcctgggtgtgtgtgcgctcgt

SEQ ID NO: 584450 - DNA, 406 bp, Homo sapiens
gtgactagaggatcctcttctgcccacgactcgagaagatgcattacgtcaggctggtctttcccttctccccattagaccttggtgtcttgaaggggccggaagaggtatctcctactctgggcatgtgtagaatagctatataagatcctcacaataattgaaacggaaagactcccttcggctctttctgccattccagtaaattcctgctaagtatgctctaggaaaactatgaggtgctgtatgatttctgtgacaggaactgtggctttcctgaggaacagtcttcctttcaatgctgttaacttcccccaagtttgtggtctgttggtggttccggtgtgggcaaagaggaatgaatgatggatggactgcgagcctcccaagtagaagtgggctaagc

SEQ ID NO: 584451 - DNA, 727 bp, Homo sapiens
gaccaaatggcggatgacgccggtggagcgggggggcccgggggccctggtggccctgggatggggaaccgtcggtggcttccgcggaggtttcgacagtggcatccggggccggggtcgcgagccgtggtagcggggtccgcgtgagtccgcactgccggccggatgactcgcagtgagggcaaaggccagaggtataaggatgtggatgcccggtcatcaagattgggccgcgtatgcgtcaaggacatgaagatcaagtccctggaggagatctatcttcttcttcccgtgacacctagttaacgtgaagtcacgagattcacttgatctatcgttcctggcggcgtcatctcgtcaagggatgaggttttgaagattatgccagtgcatgaagcacgacccgtgccggtcagcagcagccaggttcaagggcatttgttgctatcggtggactacaatggccacgtcggtctggtggctgttaagtgctccaatgatggtggccagcggcatcctgtggggccatcatcctggacaatgctctccatcgtcgcccgtgctgcagatggctactgggcggaacaatgatcggaaagccgccgacattgttccttgcaatggtgacaggtcgatgcggctctgtgctgggtacgtcgtcatacctgcaccacagagggctagttggcatcagtctccggcacctgtgcctaagaagctgtcatga

SEQ ID NO: 584452 - DNA, 749 bp, Homo sapiens
  misc_feature (15)..(17): n is a, c, g, or t
  misc_feature (52)..(52): n is a, c, g, or t
tcttgaggattaccnnncccctggggtaattgatatcgtcgagccagcgctncgaacctttccaagggcagctggttgtgtgatcgccatcttagggaaacagatgttctcgctcctgtggcgcacctggcgcgggcgaaccccgttcaacacgccacatctgacagctggtgcacgatggtctcgggggacctccgacaagcagcatccccaggggacccaccggaaccaaccaccgaccgccactcgacaaaacgtggcagaccgccgtccgatggaagagtacagttgtcgaataaggctccgcagaagtataaatgcactgatgatggataaaagagaggggctacaaaaggcaagcagagactgaccacacaccagactgtcggtaccgcctggatacgcaggcgcacaatgccgacaagacacgctgagacaccacaaacacatacaagggcaatacaacaacggacacctcagacacagcacacacggaggctggagaacgcaagccactggcaccaaaccacggggaacgagaggaccacccagaaagataaaccccgtacgacgcaaaacgtaccacatgccacagagacccatcacctaccgcagccataatgcagccatccatacacagcaaaccacccaataacaaagcgccgtacgccagtcggccacacatcctgactacggcagaaaagaagaaactcacccaatacaaccgacgcagcaacccaacaccaaca

SEQ ID NO: 584453 - DNA, 104 bp, Homo sapiens
tagctgggcagacttctcatttcacaggtgaggagactggtgccccacaggatttaagtgccttcccaaggtcaggcttatctccagagggaggtgccctggac

SEQ ID NO: 584454 - DNA, 103 bp, Homo sapiens
tatcagctcgtaccgctgtgatacagtcggctgatggtttcgataataactagttggggataggggtgtaggtgtgccttgtggtatgaagtgcgcctgggtg

SEQ ID NO: 584455 - DNA, 701 bp, Homo sapiens
gcccctcccccagcctcgctgccgccttgcagtttgatctcagactgctgtgctagcaatcagcgagactccgtgggcgtaggaccctccgagccaggtgcgggatatattctcgtggtgcgccgttttttaagcccgtcggaaaagcgcagtatttgggtaggagtgacccgattttccaggtgccgtccgtcacccctttctttgactcagaaagggaactccctgaccccttgcgcttcccaagtgaggcaatgcctcgccctgcttcggctcgcgcacggtgctcgcacccactgacctgcgcccactgtctggcactccctagtgagatgaacccggtacctcagctggaaatgcagaaatcacccgtcttctgcgtcgctcaggctgggagctgtaaaccggagctgtagacaggagctgttcctattcgggcatcttggctcctccttgagtctgaactgcacagatccacttacatgtggattttcttccactgcggcctctcctgagacagcaagaccaacccctccttttcatcctcctcctcctcctcagcctactcaacatgaaaatgacaaggatgaaacctttatgatgatccactcatccattttcttttctctagcttattgtgaacatcttaggctagtgtgtcgacttctgacttggctcatctgaacccaagtccttggaca

SEQ ID NO: 584456 - DNA, 486 bp, Homo sapiens
  misc_feature (21)..(21): n is a, c, g, or t
aagtttatagttctaaatgcntgcttcaaaaagtcagagagatctcaaattaatgattcagcatcacatctggaagaaccagaaaaacaagacaaaaccaactccaaactagaagaatgaaagaaataactaaaattgagctaaactgaataaaattgagaccaaaaatccataaaaagaatcaatgaaaccaaaaattggttctttaaaaggataaacaggatcaataggctactaactagattaacaatgacaaaaagagaagatctaaataagcacaatcagaaacaacaacagtgacattacaactgatcccacagaaatagacaatatcctcagaaactattatgaacaactctatggacatgaagtagaaaatagggaggaaatttataaattcctggaaacacacaatctcccaagattgaattaggaagaatttgaaacactgaacagaccaatatcaagttccaaaattgaatcagc

SEQ ID NO: 584457 - DNA, 133 bp, Homo sapiens
acgaggagagagatggaagtggataatcagtgaggcgatggatcagttggaacgaatgggaatggcggaacaattacagtgtgaggatatggtagtccatgcatggttatgggtgtggtatggccggtggtgt

SEQ ID NO: 584458 - DNA, 241 bp, Homo sapiens
  misc_feature (3)..(3): n is a, c, g, or t
gcngaatcacaagccaattcaacctcttttctttaaaaactatctagtcttaggtatttttttttcttttctttggggttttttcctttggagaaaggatttacctaagaggccaggccggaaaggaagggggccagtttaaggaggttgaaaacttgttgacggcttgcggagaatcaaataaaccttcagccgttgatattgcctaagcttccaccttatacggatgttcgacttgcca

SEQ ID NO: 584459 - DNA, 1818 bp, Homo sapiens
taaaaccctcatcaatagatggagacttacagaaatagtcaaaccacttctacaaaaggccagtatcaggggggggcttcgaaagcccaagaggtgatgtttgggagtttaaaggtgaacatattagtgtgggggtatgaagcagaataggtgcgaggcacaagtgtgacgcccaataagtgcacggtgaagctccggtggaagccgtggtggcttaccacaaaacagtgttgtgacccggtagaagtgccggtcggacaaagtgggtgcacagggaagaactctcgaaagttcacctctgtgagaggccttgtgttagggaggggtctacaacatcaaaaagcacccgagttaacaagtgtggtcaatcaagcaagtgtggcctgtgaatatcttatgtggggggtatctcggggtgtggtattctcttaatctaagaccattttagtggtgtgagagccctcacagaggtgaacatgtgaaataactctcctgtgagagtgccgagagttcacatacacgggagagtgtgtgttctcagagagaaagtgtgggcggaaacatcatctcagaagaggggggacactataaaacgcgagaggggggagtagctagtcgctcctgtagtagtgtagagggaggcgccccccagttgtggcgcccctctctctataaaagttgagggggggggagagaaacaagagaggcgccccataagagcgagtgaggcgacgtggtggggctccacacaggaggggcgcctcaggagaaacacacaaagtccgccgtgggggcgaaaacggaacaaaaaaacaaaaaccatcttttcccgtcgagacggggcgtccacccactaaaacacaattgaaggagggaataatatatatacccccggcggggtaaatttgccggaaagaaggagggcgcccttatttgattgcgtggaaaccccaggcggcgtgggttgttggctcgtctggtgtgttgggggaccccttgtgggggactaatgttgggtagcgccttataacccttcgcggagtgtgtttgtcaaccccaagttccgagcggcgccccccaaaatcaccacacttggggggcggcacacatcaactagggggggggacaagccaggacgcggagcgtgggtaacaagggcagcaacaacaagggtaaacaaggcggccccataaaggaatatatcagagcaaaggggaacgagcgagggtcataatcatgtgagagcaaggtctgggcgagacacaatccgttgtgcgcacaacatcccaccacattttgtgaggacatataagacggccgccggaggaagaaagggggacacaataataaacggacaacggggcggggcttcaagcacgcaagaggggtgccccccccctgggtgaaaacaggggagcgcacacacaaggggggaccggggagggggtatacaacagcagcacaacatcctagggagaacacacgcgggcccactggtagtagaaacaaggtggggggggggcaccacacacataaggggctgtatgatcgacgccggcgacgacaagagatgacacacaggaggcctaaacccacacaaaacacacgggcgtgttacacacaccagcgccgacagcccgcaagaggaacagaaacgacgcagccacaaacaacgagaataactcactagcacacgaagtcagcccacgcgacgaacatcgaccaacatcgcgctgaccgacaaacagctcagaccgagctagcacaaaccgacaagtcgccacctgcgtaggaatacatacgccaagcacagagagc

SEQ ID NO: 584460 - DNA, 723 bp, Homo sapiens
tggctccggtagtgtcgggccctatgttgcagtgtggtgctgcatgccctgtgctctttctggttgtccctactatggtggtctgttgcactgtggccagggcctgtcatgggaacgctggctggcccccattcgctgtctgctggctgtttgctgtatggctctgtggctgtttcgaagactgggcgaaaggtctgtcccggagggtcagacctaggtgccttgccgctagtaggtttctacctgaagttctcctgttcggtcataatagaagtttttggcgatgggagagtaatccagaccatctctggggcagccaggcccttgccttcattttgtacagaggtagcacaattgattcctaacacgtaaactccttcccctttttgaaatgatcttctgttctaatgccatagatcaaaggcctgcagaaaccattgcgtgtttcctctttgaagcaatgacaagcacgtttactttcacggtggtttttgttttcttcttattggctgtggaacctatttttggaaggacgttaaaggggtgttttacatgtgtttgtaagagtgtgtgagtagtgtgttttgtagatttcttgacagtgctgtaatacaggcggcaatgcaatagcctatttgaagtcactacgtgatctgagtgagatgtaaatagtttttattttttagccataagtgaattattttatctcttatgtgaactacc

SEQ ID NO: 584461 - DNA, 116 bp, Homo sapiens
gcgcaagcatccattcacacagtcaagtttttctcaagggggcacatccagcagcccatcggggcatcccactcttccacaaatctcccaaggcgggggtcacggcagctcgcaat

SEQ ID NO: 584462 - DNA, 208 bp, Homo sapiens
tatgggtgcatgaagacccaagcggcaagaaactgctctgctaccaggacgctggatgctccaggacgcgtgcgctgactcgaccttcactggctcccaggcaggtccggtagctaccctgcagtaactccactctcaacagaactgctatttaacaagtgagtctatgcagaaagaacggaggggtgcggggggtgtggtttttctt

SEQ ID NO: 584463 - DNA, 274 bp, Homo sapiens
ctctagaggatcttataaacgagggcgcagcagtggcctgtagccagccagtgcccaggtcattctgtcaggtcagatcagaagcacggagcttggtactccatcaagatgaggctcactccctgagtgtacagttccagggagcccatcccagtaagccagcacgctgtagggcaagcccgtctctacaggttgcgcaggacccttttttggcaaaacggttgaagttatcaagccagaggtccctgtgggccaggcatgagcagcagagtgt

SEQ ID NO: 584464 - DNA, 540 bp, Homo sapiens
  misc_feature (438)..(439): n is a, c, g, or t
ggaaggttttgcctgttctagaagcaacggttgtacttgcacaagcgtgatttgcgataaagactgcagtccagataggagaggggggatacattactgtgccggggaaatcttccactttttgcaaacatacattgactgccaatgtcattctggagtaatgactggaactgcaagttattcgaaaaacttatacctcatccgagtttgtaaccgactggaagctcaggcacttgtgatggtgtcaaagagacgccggagttactgggtcacatttgtggctttctaggaataccattagcaccttctgatgcagacacgagttaatgatgctgagctcatggccgccagtgatgctgaaggataacttagtagactattctgctctaacttgtatagtacatgaacccaaatcgttcactaagttgaccaaggtgnnccttacgcttaactttcattgagatcaagtgttcactttccagcagacttaatttataggcgaccacaggctattctccaccccgggttcggggttgggcc

SEQ ID NO: 584465 - DNA, 189 bp, Homo sapiens
aggatccgtaaaggagctatctagtgagaagggaggacgtgagtctatataaggctaaggagaaaggttttgagtttcctccaaaggtataatacttgggaactccagagaattgggggaaaaagtttaaaagcctgtttgaagttaagcttgcgggctgcatatgcttctcaggataacctggctacg

SEQ ID NO: 584466 - DNA, 211 bp, Homo sapiens
attccgaggatccccgtagtcgcgtaaaacgcccagattagcacagtaaacttaattcttcctgttccaatggaacaagtgatgctgacctgtttgatgcacatgatgacagagataatgatgcggaggctgggtctggtggaggagcacaaggatgcgttatcatgcagtctctctgtcgcaggattagagcttggcaatgtgatcttta

SEQ ID NO: 584467 - DNA, 1035 bp, Homo sapiens
tcccttctgagacagaaggtggtgttggggaactgaagcagttgctgtgggcggacagggaacccttgcgtttctactgtgtgattctgcagcttcctgggcaacgatcgccatgggagtgacttgtgtgtaccattatgtctgtgggcgtgggcgagagtgttgaggaaaccgtagagatccttacccggaagtggagatgcttggggcagagaggcacggcacattgtgtgtggactgtgagagttaccatacggtcgactctacccttggcagccaaggtggagtcctggccctgatggtggtagctagagactgctggagtctgctgctcgagattgcctagcagagatcctcgtaggcagccacacaaccaggggctcccgcagggtgtgggaaccgaccatgatgcggtctacgggccaagcagcatacctatgggtccatctacgagtggccaactcttcaagaagatccgctaagacacgcagtaggtgccggttggcatggggattcgtctcagtgatgagcacgctgccagctgagcctcgttgacaccaggggtactgccaaggaggcagcaagtgctgacctttcagggtccctggacccaagaaactcaggtagacatggacatctactcatctttacaggtacatcagatgtggcaattggtactgaggggatgagtttcgaatccagaagaagcagaggagtagtaacaaagtaggcacccaataccgacgggcattacacccgggaccattgtggactttgtggcggtccacaatagggacatatgcagagggcgacaaatggcacggacccttgttgcgacagccttgcaagactgtccgcgctgacagggggccacacccgacccaacatcagagggcacagccggcgagacaacaaacaacgggctcgaaaacacgtccatccacaacgtaggaacaccaaacgcatacaaggagataacaactgacgacaacaaagaaaaggaagtcacatatgaatacgacgaatgtctcagca

SEQ ID NO: 584468 - DNA, 309 bp, Homo sapiens
tatcagcgggctatcagatgatcagattccgactcccttcacagcaaggtagggactcgaagattgcaatcataatcaagttttctttatgtatttatttatttacttacttacttacagagtctcacttttttttttttttggaaagggagtctctctctgtcgcaaaggcgtggagtgcacgggcattatctgggttcattgcaagctccgcctccggggttcatcccaagttctcgttgcctcagcctcccaagtattctggaatatataggcttgtgccatcacacctagctaattatggatagt

SEQ ID NO: 584469 - DNA, 176 bp, Homo sapiens
ccccttccccctttcccccccaaggggttttaccccttttaagaaatggctttttttaattggttttttttgggggcccgtttttttagccgggaatttttatttcccccctaaatttttttttctcccgtttcccctgattttttttccccttaagggtgttttttggggtccca

SEQ ID NO: 584470 - DNA, 929 bp, Homo sapiens
ccaggaggttccccttggcgcgtgtacctcgggcctccctttgtttctgcgcccctcccctctattgcctcccggtcttcgccacggtgttcccctcggcaaactagttgcgcggctttttttcgaaagtcgccccccccctgtctgggtctcttgtgggcaacctctctgctggactctctatcggtggatccgcctccgctgtttcttggcagtctctctccggacaggggacggtgaaacagcggtctcgcacgctcgctcttcgttccgccgagcagtcacgcagctgcgttcctccacctacgcgtgtcttgctccgctcgccacacctgcggtgttcagtcacatggcctcacctgcgcctcccgggggcctcggctccccccctgttgccacagagctcccaatgtgctcaccagggctggccctctccctctctatctatccggcctatcttacggcgaagcgacgggtgcccacacatgggcacgcctgggtgctccccgagaaagctccttgtctatagggcactcgcaaaaccacctgtgttcctgcctgcgtgtttgtggaccttctcccctcctctctgtagcccctctctgaggcacggctctcacacaagagcgttgttcccaccaagtggccatcctcctcctggggcacacaaataatgctgcgggtatacctcctctgcgcaatcatcctttctccaagcgctactccccggccgcgctaaacctcgcggagaccttgctcctccatgagggacacccccttcctgcaaacatcgactctcacgcctttccctcttggacggattaccagatgttagaccccgcggacgggcccgtgggtcgggtttctatgactgagagcataagttttttctccccaaacaaaaaccaaaatccctgagccacaaaaca

SEQ ID NO: 584471 - DNA, 146 bp, Homo sapiens
tccgctagggtaaggatgaggggcagaagaaagagaggaagtccagtatatttatgccttttaggagttgcaggtgcatataggaggttgagatttggtgctgtgcacttgttttaggtcatagcttctctagtcaggttaggtct

SEQ ID NO: 584472 - DNA, 486 bp, Homo sapiens
gagacagaatgtagcaagcagaaggcaaacacagatcagggcacagtttctcgactaggacagagaattttaagcatagaaatatcaaaagaaaagtactaccttatttcccttacgtggtaataatctgaaaaacacttattagatatactggacaacaagagaactaagtactccaactctactgcagcattacaaaaaaaaacatcccttcaccacagtgtaagatttaagggcaacctgcccaaggatgcatgttatatcaaacacagcaagattgctgctgccctgccaagtacttccaatccctacccaggtcctactgaaatacgggtggtcccaattagttttatcgaaataaatctttaaagaaacagataaagcatttaaaaagacaagtcaaaatgcatcaggaaccacatatccaacacaaactttatcctcaaatgagtcatgtttgcctcgcactaatatcgcacttagaca

SEQ ID NO: 584473 - DNA, 196 bp, Homo sapiens
ggcagggcgtgcaccatggttgaatttgggaagtagaaaagaaaactggttggcatgaaaaagaggagacacttcggcttcagagtgcacaggcacatgccttttcaccaagaaggagaaagagtcttggtctctgacagcttcaaaataaagaatcaccaagtcccagcagctggaaagcacaggttttcatcct

SEQ ID NO: 584474 - DNA, 623 bp, Homo sapiens
accctgttctgcaggtctgctggagtttgcaggaggtccactccagaccctgtttgcctggatatcaccagtggaggtagcataacagcaaagattgctgcctgcctcttcctctggaagcttcttcccagaaggacacctgccagatgtcagctggagctctcctgtatgagttttacttgagtccaacattccaacacaaggaaggcaagtttttcctgcttccatgatgatggaaggaatcaaacttgacttatgaagccaataaagcccttggaaaagctggccttatgttttgtgtacacaatccctgtacggggttcctgacctgtgatgcacattctgattgcctcctttggaaagcttattagaaactcagaagaatgcaaccatttgtctctcacctacctgtgatctggaagcccctctccttgcttgaagttgtcccccactttctggacagacccaacgtacttcttacacatattgattaatgtctcatgactccctaaaatgtataaaacaaagcctggccctaattacctttggcatatgtcattcaggactttctgagtttgtgggccacatcccccacccttggcaaagtaaacccccgatgcggt

SEQ ID NO: 584475 - DNA, 370 bp, Homo sapiens
  misc_feature (2)..(2): n is a, c, g, or t
  misc_feature (60)..(60): n is a, c, g, or t
  misc_feature (279)..(279): n is a, c, g, or t
  misc_feature (312)..(312): n is a, c, g, or t
tnatgctgcccacccgtaatcccagctactctggaggctcaggtgagagaattgcttgancccaggaggtggaggttgcagtgagccaagatcatgccactgcacctcagcctgggtgacagagagagactccattaaaaaaaaatgctcctgaggcctccccagaagccgagcagatgtcggcatcatgcttcctatacagcctgtggaactgtgaacccattaaacctctttcctttataagttactgagcctcaggtatttatagtaatgtaagantggcctaatacagagctcctcagcctgacacgncagcccttttaggacataagcatagttttggggggccttgtagccccccaacacaagg

SEQ ID NO: 584476 - DNA, 1076 bp, Homo sapiens
  misc_feature (213)..(213): n is a, c, g, or t
agcggattcggaagctcgtctgtgtctagaggacagagctaccccgtgaccggcgttatgagaactgcgaaggaggccgcaagctttctccatgcttgaaagcttgtgcacggtataggatagtgaagtcttggatgccctggtagcgtgcgtgactacgagtgttgctgctggttggtccgtgggggaagtgccgacgatagtctacgaaangcgatgaggcgcccggtgcgagctgaggagttgactacctgttggagattggtgagtagtaaagcagtagagggcacagaggttactagataagatgcatggtgatggttatggcatgcgcattgtaggcgcaagcagtgggtctcggccatgtgttgctggaatttgggttctgccttttgctaagttgcttcgcgagggtagaagttcagcgaaagaaatggacagtttcagggaccaacgtatgctgggtaaagactagaattgtcgaaatgggggagcgtaatcgtcaaattccatgggtaaagtctccaattaatttgttcgctttaggaacacattggtccttgttgaggaagagcaaagtcttcctagggagtccttatttgtaggctcgaatagtgactccctttgaaatagggctatttagcctccaaatagggtagactacccacttgtggagttatagaaaaggctaagagcaatttcaagggtcgaaatgcaaggtaacttacggagggtgttaaaataaaagacgctccaaggtagacagtggcttgagaggtaactagaaaatttaaaaaagacggttggtcaagtaaggaggtatacacaaatttttcaatagcaacgaaaaattaagtaagcaaattgattgttcggtggcttgagcgttgaccatttgtataatttgagagaaaaggatggccttaattaaagttgtgtacccaaggaacccccttattggctggagaaaaataagaggaaaccgtggttgtgacattaagagagagacttgagtttgaatcagacagatatacatcgagtaattaaaacatagaggtagaggatttgattttaac

SEQ ID NO: 584477 - DNA, 255 bp, Homo sapiens
ccaggtagactaacactttggaaggctgaggcaggtggatcacctgagtccaggagctcgagaccagcccgggcaacgtggtcaaatcccgcctctacaaaaaatacaaaaattagccagaaatggtggcacacgcctgcagtcccagctacttggggggctgaggtgggaggatcactggagcccaggaggtcaaggctgcagtcagccactgcactccagtctaggtgacagggcaaggttaggtctacctgg

SEQ ID NO: 584478 - DNA, 112 bp, Homo sapiens
gcgagatctcgagtctgacttcggcgaagacgcgatcgatggcgtgaggggcgcaatcatctagcataagatcgagaacgtagcggaagtaacaccgcctctagatatagta

SEQ ID NO: 584479 - DNA, 666 bp, Homo sapiens
  misc_feature (16)..(16): n is a, c, g, or t
  misc_feature (80)..(80): n is a, c, g, or t
  misc_feature (87)..(87): n is a, c, g, or t
  misc_feature (89)..(89): n is a, c, g, or t
  misc_feature (102)..(102): n is a, c, g, or t
  misc_feature (107)..(107): n is a, c, g, or t
  misc_feature (124)..(124): n is a, c, g, or t
  misc_feature (127)..(127): n is a, c, g, or t
  misc_feature (133)..(133): n is a, c, g, or t
  misc_feature (137)..(137): n is a, c, g, or t
  misc_feature (139)..(139): n is a, c, g, or t
  misc_feature (144)..(147): n is a, c, g, or t
  misc_feature (149)..(149): n is a, c, g, or t
  misc_feature (151)..(152): n is a, c, g, or t
  misc_feature (154)..(155): n is a, c, g, or t
  misc_feature (160)..(160): n is a, c, g, or t
  misc_feature (162)..(162): n is a, c, g, or t
  misc_feature (164)..(164): n is a, c, g, or t
  misc_feature (166)..(170): n is a, c, g, or t
  misc_feature (172)..(173): n is a, c, g, or t
  misc_feature (175)..(177): n is a, c, g, or t
  misc_feature (179)..(180): n is a, c, g, or t
  misc_feature (217)..(217): n is a, c, g, or t
  misc_feature (249)..(250): n is a, c, g, or t
  misc_feature (252)..(253): n is a, c, g, or t
  misc_feature (257)..(257): n is a, c, g, or t
  misc_feature (292)..(292): n is a, c, g, or t
  misc_feature (295)..(297): n is a, c, g, or t
  misc_feature (301)..(301): n is a, c, g, or t
  misc_feature (306)..(306): n is a, c, g, or t
  misc_feature (354)..(354): n is a, c, g, or t
  misc_feature (425)..(425): n is a, c, g, or t
  misc_feature (428)..(428): n is a, c, g, or t
  misc_feature (432)..(432): n is a, c, g, or t
  misc_feature (435)..(436): n is a, c, g, or t
  misc_feature (439)..(441): n is a, c, g, or t
  misc_feature (448)..(448): n is a, c, g, or t
  misc_feature (450)..(452): n is a, c, g, or t
  misc_feature (458)..(458): n is a, c, g, or t
  misc_feature (466)..(466): n is a, c, g, or t
  misc_feature (469)..(469): n is a, c, g, or t
  misc_feature (475)..(475): n is a, c, g, or t
  misc_feature (485)..(485): n is a, c, g, or t
  misc_feature (487)..(488): n is a, c, g, or t
  misc_feature (525)..(527): n is a, c, g, or t
  misc_feature (529)..(529): n is a, c, g, or t
  misc_feature (533)..(533): n is a, c, g, or t
  misc_feature (538)..(538): n is a, c, g, or t
  misc_feature (542)..(542): n is a, c, g, or t
  misc_feature (546)..(546): n is a, c, g, or t
  misc_feature (552)..(552): n is a, c, g, or t
  misc_feature (554)..(557): n is a, c, g, or t
  misc_feature (587)..(587): n is a, c, g, or t
  misc_feature (591)..(591): n is a, c, g, or t
  misc_feature (594)..(594): n is a, c, g, or t
  misc_feature (598)..(599): n is a, c, g, or t
  misc_feature (605)..(605): n is a, c, g, or t
  misc_feature (608)..(608): n is a, c, g, or t
  misc_feature (611)..(611): n is a, c, g, or t
  misc_feature (613)..(613): n is a, c, g, or t
  misc_feature (620)..(620): n is a, c, g, or t
  misc_feature (622)..(622): n is a, c, g, or t
  misc_feature (636)..(636): n is a, c, g, or t
  misc_feature (638)..(638): n is a, c, g, or t
  misc_feature (641)..(641): n is a, c, g, or t
acttcacttgtaaaantttatcaacaaagatgtagtccccaaaatcatcaaatccattggttgttgcactatctattaangcttgancngaccctgaaggcntttcngtgttcagaccattctnatnatttcnttantntatgnnnncncnnanntacangnantnnnnncnncnnnannaaggccttcccacatacagtacatcgatcaggtttcnctccagtatgaattatctgatgtacaacaagnncnnactnctgagaaaaggcctttccacattcagcacatatgnaannnttcnctccngtatgaattcaccaatgccctgggaggtgagacttctgagagaaggcnttcccacattcagaacatacataaggttgttctcccgtgtgaattctctgatgtccaatgagatgtgactncgnacanaannagnnnccacatntnnnacattnatagggtngcnctccantgtgggttcncnnatgtatgatgagttgtgacttgcgagagaatgttttnnnanattntgtanattnatanggtttntnnnnagtatgaattatctgatgtataatgagttntganttnatgnngaaggnttnatnanattgagnanatttgtagggtttntnacnagtgtgaattctttaatgtataaaa

SEQ ID NO: 584480 - DNA, 109 bp, Homo sapiens
agtacttgacaccacacactgcacacacaccacacattgacagcacacacactatgtgcacacaccccagacacactgcatacacaccttgtggcacaccacaacacca

SEQ ID NO: 584481 - DNA, 235 bp, Homo sapiens
ttgtcaggggtactggcgccatgtgcccccccagccccagagagggtccaggggcacaccggtgtcttgagccccaggagcagagaaagcgccggaaccgctggcaccaccctccggagacatgagaccagatgcctgtgcgtgccatgggccagcgtagcccctgtcccctttaatataaaagagatatatatatatatatatatatatataaaatatctatattctatacaca

SEQ ID NO: 584482 - DNA, 794 bp, Homo sapiens
  misc_feature (293)..(293): n is a, c, g, or t
gcaggacaccgggggacatgtcgtctagcttcaacagttgctgggacggaacagatccggggactctattacagcctgcgaccgacctcagatttcctatctgttcgcagccttcggtaccatgttctaggtcatatcctgcttctgagacctgccagcaccggatttgtggttagcgacttcttgccaaccaaccatgagctaccagattagacagagttattcaaccgccgtggagggagacgacaacacactgggcaatttgctcgctgcaggtgttatacaactacttntctctgagctggtattaagaccgtgatgttgagactctggactgcgtgagatactacttacgctaactgctgcatgataagcacgagggctacaagtcgacttctgaagatgctaaaccagcgaggcgacctgactctctctcaggacattgatacgtctgatgactatgagtgcagtccccagacgcctggatagctgacatggtcatggaaataaagctgagacagtccctctaggatctatacgcgctgggttctgaccacacggacattcatctctgagactaactggagacttgctatctagatgaagacgtgaagcttatcaaagaccatgggtgtccatctgtcaacactgcacaggcatgagcgagccatgagctacactgagccagtatctctataatagggtcatatgactgacgactaagagactactgagacctacgactaatgggtcccttgcggataggagttatggctaggctctacttcattcat

SEQ ID NO: 584483 - DNA, 739 bp, Homo sapiens
gctcagtcatagtcactgatgccgatgaagagatctccgcaagccacacgctaaccgaggaagagctggtagaagctgaagaagctgagtcatgaggatcagaaacccagggatcaaactgatctgccggctggaacattgacatccgtggagcgaggggaggtgcggcttaggcttggaagtacgaaaagttagtctcctaggccggctgacgctacgtcgtaattcttcaagctaagcaaggagatcttcagcgtcgccgaaccggagaaatcaatggttgactcgatgagaagggcctggtggaagtgatcatccagaacttgtcgtgaggaggacaatagggtcgtacaccgatcaactccagagatggaaaagccataatagaccagattaccgttgacactggtggatgacgattttgacaagcgttctgaggaaggcagatgctcagagaagggactggaagagaacaacaggatccctgatgagagcggccgtagcgcacgcggaaggtcacggaggagtggcaagagcagctgacgtgcaaggtgaccgagagcaagcaaggcgacgtcgcgttacagagggtctgccacgagggcagagtatgccagagggtcagcgatgagccagagacgggaacggggacttctcggcattgaagagtgtccaaccaggacacgggaatcacagagcgaaggagtctgacgagcgaggggacgacgagaacaaatag

SEQ ID NO: 584484 - DNA, 918 bp, Homo sapiens
tctggaggcactgacacccacttagtctcttcgtcctctcatggagataaggtggaggtaaagaatcacgatgccgttcgccgaaaaatcacctttccccaccgatgtctcgatcgtcctgtctaaaaagaggcagttctcctctgccagtttgctcatcagttagaagttgggcgactgggatccacagattgcaacagcgcgagaagtggggatactcttccaatctctaaacaatgccgatcatttacggcacctaaacgacaaagggtcctgagaacattatctgtagctgatatctccccatgtggaagttgccataggccctatgtctacggtgactcggttttctctctatcggctgaatcatgaacttgacaagataagccatcacaagggtattccagaatggcaagcataaccttcgcctctggcccttcagatggggtatcgtgaagatcaacacaaagctcttgtagcatcaaatcaaggagctctggatatagttcacggtgtcaggagggaaagcttcatgcgacctgacatgctataccagcctcaggacacggagccagcggcaggcatgtgctctgtgggcagacagtccagatggacaccgctaaggtgcatccggcaccagtgctggagtccaggacgtagacggtaaaacagccaaaggttccactggacgggccgcgtgaaataacccaggaccgtatggcagaggccatgccaaaacatggaggcatcaggacagcagaatggacagaaccaaaagagtacgagggacgggtgcaacaggttcacactgctcgaggagcgacccgagtaaacagacagacaccgcggcatgatgaaagcaggaagatacacaagaagtgggcgcaaaaacgcggagcgcgacaacgcccgcccacg

SEQ ID NO: 584485 - DNA, 299 bp, Homo sapiens
  misc_feature (35)..(35): n is a, c, g, or t
gtggctgacctgaggacccggatcaggcactgaangcctggtcgctcactgcagcctcaacctcctgggttcaagcaatccttccgccttagcctcggaagtagactggactacaggtatgcgccaccatacccagctaattttttttattttttatagagatggggttttgccatgttgcccaggctggtcttgaactcctaggttgaagccatcccccaaccttggcctcccaaagtgctaggattacaggcatgagccactgcgcctggcaactttgccttcttagtttgtcttgc

SEQ ID NO: 584486 - DNA, 133 bp, Homo sapiens
tgatctagaggatcgcctagtgcagacacactccatgtccggtcaaacaggtacgggttgtggacagtcatctggaactgctccgaggtgcccggtcaagagttacttcgcggtttccccccgcttaaactcg

SEQ ID NO: 584487 - DNA, 235 bp, Homo sapiens
acattggcgatggcaagaaagaacgatggtaactattgcggagcacgcacacttcacgacagactcagagtatatgggtagtagtaggtagagatatgaagttaggaaaaaaaaatagttttgactggcatcgtgcaagagcctaggtgtattagtagtcacagagtttcggatttatttcctagattaaggcatcattaggggtgtatttgtaactggatatatttattggggc

SEQ ID NO: 584488 - DNA, 132 bp, Homo sapiens
ccctgcggccacagagatgacgatgactcacatgaaccgtattgccatatctgaactacattttctggagcgagctaagacggcgcatacggctgtccacatccctaatcacccggagctggctaacacaac

SEQ ID NO: 584489 - DNA, 845 bp, Homo sapiens
ttcgttgtttttccgttctcatacctgtgacaagggcggggggggcttttgttggctcgaagattactacttccgtccttggacagagaaaagaaaaaacataaaaagaaacgcctagtacaaagtccaaattcttactttatggatgtaaaatgtccaggttgctacaagatcaccacggttttcagccatgctcagacagtggttctttgtggaggttgttcaacaccgctgcgccatcctacccgacgaatgggcggactcaccgatgggtgttgatttctaagaggccagcgctaagggtggcaacgggttccttgacttttaaccttagtggtgatggccagataggcgtcatcatacccgcccataatggcaagaacgggtaccagacatgctgtcctcccctccgattgttccaacgccccacccgacccccgtcctgtagccgccccttccccggctcccacccgccgcccacccattacagattcgcatataaggccgctgataagtttgtcttatgtcgggggcgctgtgtgcctacctctagccgcgccgcccgcctccacccgctggttatagcgttcgcctactggcgccagtatcctaatcagctcaccaccgccttgtacgttccggtgtcacgtgccacggcagtggatcggccgatgtcatttgccgcctccccgctcccaccatccgtgctctaatccattcgccccacagccacattccccccctgcccttccgcgcccgttccgtgcggatcgcaaactcagtgtcgttctctcctctcacgacaggtcgcagcattggatcagccatattctcgctcattcagc

SEQ ID NO: 584490 - DNA, 460 bp, Homo sapiens
aaaaaaaaaaaaacaagtttatttgttcacctaaagtagttttaacagcataattttttaaaaatgaacactaatggaagatttatttaagccatacaaaagtagtttaatggaaaagacccagtattttaaacgttttcatttaaggaacatgatgcccactttgggatctatgcatcaccttcaaaatgtgggaaggggtattaatttcacatatttaatgtattatataaaggtatttaacaacctatcaacttttgacattttgaagaattaaaatttaagtctaaggatgataaaaggcttcatttatgtcttttcaagggcaggacaactgccttggccagggagactgagctcccctgacttatgggcaggccttgaccccgttacactggccttatgcattactttaaataaaagcctttgatttacatgactttgggtcaggaataccaga

SEQ ID NO: 584491 - DNA, 541 bp, Homo sapiens
  misc_feature (254)..(254): n is a, c, g, or t
  misc_feature (276)..(276): n is a, c, g, or t
  misc_feature (279)..(279): n is a, c, g, or t
  misc_feature (418)..(418): n is a, c, g, or t
gagaaacggagggtgcaggttgtgtagtagggtcacacatgcgtgcaaaatgcacactctgctcttctgcagacgggcagctccccaagacaggaggcagatcagagaagctaggagagctccagcagaggcacagaggattgggggcaggaggagtctggaacacagacttcatgccccgtgaacccaggacggaccctacccacgacctaaggtaacccagtcgtatactctgtacgcatgtgttgccaggnctgacaaacacctgcagatagntgntagcccacactgggacctagccaggaggttggagcagaaagggctctccctggggtggtgtactcctccacggcattgggatgctgttctgcctagcagcagaaaggtaggatggagagcacactatgggaccggggtnaaggagctgtacatttgcatatcttatagccctgattccaacagtcacgtgacagtgtgtaaggcgtaagtagaatagttacctttctcaaaaacaccacacgaccggttcctttttttccct

SEQ ID NO: 584492 - DNA, 709 bp, Homo sapiens
  misc_feature (41)..(41): n is a, c, g, or t
  misc_feature (50)..(50): n is a, c, g, or t
  misc_feature (57)..(57): n is a, c, g, or t
  misc_feature (63)..(63): n is a, c, g, or t
  misc_feature (83)..(84): n is a, c, g, or t
  misc_feature (86)..(86): n is a, c, g, or t
  misc_feature (100)..(100): n is a, c, g, or t
  misc_feature (116)..(116): n is a, c, g, or t
  misc_feature (124)..(124): n is a, c, g, or t
  misc_feature (169)..(169): n is a, c, g, or t
  misc_feature (174)..(174): n is a, c, g, or t
  misc_feature (223)..(223): n is a, c, g, or t
gagaccagcaatgactgtcatcttggagacaatctatgatnccacattgnagcaggnagatantgatctgcttcgccgtgganntngtactcgacgtcancctactaggacttggngaagaggngccagaatggcttctttgtcttggtgatattattgccttcacttngggtngtggagatgatgacctagatgggctctgtctgggaggtgtgctagattncactctaggaggagaggaccctgagcagctatgtctagaaggggtcctagatttcaagtcagggtcaggtgatgattcagaacagctccgtctctgtggcgttacagattgctcattggcctggggacttgtgatggaccctgtgcctcggtggtgtgccagacttgcacgtttgaggatgaccggagatgaactggaatgactttgtcgttgagggtgtcttagatttctgtaaggtggcggagatgagagctggagcgcactgcgtctgggtggcgtgcgtacgttagcttgagtatgggaggatccagagcgactgcgcctggggtggtgtctgtgactgttgcttagggcatggggaagaccctggaaggctgtgcctcagagacaggccgagatttggcttggaccgtggtgaacgaggagacctgttccgcttgagaattgcgagattctcattctgggcttgatggactgggctcgtgg

SEQ ID NO: 584493 - DNA, 384 bp, Homo sapiens
atagagatctgttctgattaccatgatgaggaaccggggaaccgactcgctttccctggtttagaggggaaggtttagaaaagtctagaataaaagcactgtgctggtctgacatgcaaaatgtcattccacaggtccccagagaggcatatcacatattcaggaatccacttttatccatcagaaatagatgtggccaggccgggcatggtggctcacacctgtaatcctagcattttgggaggccgaggtgggcggatcatgtgaggtcaggagtttgagaccagcctggccaacatggtgaaaccaatctctactaaaaatacaaaaattagccgagcgtggtggcgcgcatctgtagtcccagctacttgggaggctgag

SEQ ID NO: 584494 - DNA, 221 bp, Homo sapiens
ggacagttttcaagaccagcctaaacaacgtagtgagaccccatctactacaaaaaatttaaaaattagccagatagtgtagtaatctacagctactcaggaggctgagcagagaggatcactatgagcccagatcgttcaatggttgtagtagagccatagactgcaccacatgcactaccacgcctagggcaacagaagcacagaccctagtctcaaac

SEQ ID NO: 584495 - DNA, 137 bp, Homo sapiens
cctagcccctagacgcccggcaagggcggtgaggccgcatctggttgccggcgccgtgcgtgtccgttcacggatcacgctgcgctcttactggtccaagccggccttggtggtcggcagctggtaatcgccgcatc

SEQ ID NO: 584496 - DNA, 113 bp, Homo sapiens
cagagtttctgtgagcagcttaaagagggtagcccgaaaagacacaacaaccaaaaggttgtaatgcccgtactaatactttctaaagtggctttgaaatagtcaccacttca

SEQ ID NO: 584497 - DNA, 430 bp, Homo sapiens
ccactttctctactcattgatattacctgcctagcggctataggcattttagtatgtacccacacatgtaacactgcctgatttcttggggtggtagtaggttgtgtcatggatggtaatgactttttcatatgctggaactcttgagccctctggatttgatacccatatcaggtgatgagcttcacttggctccttggccacaggctgagtatctagccttattcccaaataattcagtcatctgagacataattaagaaaatgtggatgtaaacactgttcaaaacttgctggataggagatatacatattaaaattatctttcagatgcaacatattagaaattgtactctggattctgcctgtcagttggcacagtcttgcaaaaagtattgtataagctgcttgaaaaaaaaaaaagtcgacgc

SEQ ID NO: 584498 - DNA, 568 bp, Homo sapiens
  misc_feature (45)..(45): n is a, c, g, or t
  misc_feature (50)..(52): n is a, c, g, or t
  misc_feature (75)..(75): n is a, c, g, or t
attctatagtagtattggcaacaattctcttgatatgtaataggnaaaannncttttcatgatatagaattaatngcctattgtgaaatcaacaattttattgagctgccaaattgctacctgcttttcttaaagtagcattaacttctttttgttagtgtagtgtctccatgcttctaaagttgatgtagtaacaggatgttggcttcagcttataggctccctttatgagtgctgttttggtgaggagtgcatcggaataacttactgaacccttttttttttctcagaattctgccaaccttctgagtcaacatttaagacccttgtctttgacagatatcatttataggtttgaagatacacatactaattttggtaaaatttaattttcaattatagcaaataatgttcattggttttgtttttagtacattttgtatttctttctattataaaagagattttttcctaggtgcttttcttaagtctgtgttcagctttcttccactcttacttgatttaatatgtgactacatggttcaaaacggagaaaagaaaaaaaaaa

SEQ ID NO: 584499 - DNA, 129 bp, Homo sapiens
taagaagagaagcatagaagagactttatttatctagaatgcagaaatgactacctgtgctataccagagaatccagagaattattttgtatctctgtagcctcttacatcacctttattatacagcca

SEQ ID NO: 584500 - DNA, 120 bp, Homo sapiens
taggtcagtgtgtgagccagattcaaaggcaggtccaggtcgggcacagtgactcatgcctgtattccagcactttggaaggaccaggacaaaggattgcttgccgtctacgagcgtaat

SEQ ID NO: 584501 - DNA, 1020 bp, Homo sapiens
  misc_feature (338)..(338): n is a, c, g, or t
gatttcctatcttcacacctgccagctcactgtcacacctatcttcctcacctttttggtggagatggagtctcgtgtctcttgcccaggctggattgcaatggcatttaaccgccatgcatgtgcgaggggccactgagattgtctctgagctattacttgagaatcaaccagaaaagagccatggtagtggtatgcccttgggctctctgggaaatgggaaatcagacaaaggactgagaatgagttacccttaaggtcagtagaaaaccaagcagagtgtgcgtgtgtctgtgaagctgagcttacctctctattcaacctcattcccttctccnatataagccacttgttgccagttcgtggcccctccaggttggagaggccagcaggagaaaggcacagcgtttggaaaacaagacttttcctgcaataccctgggacggaataagacaggatatgagtgttccgaagcgaaacaatcgaggccctggtcaagggcttctgagtacgctgccaggtgtgtgcttcactccccggtgctttcgtgtgctgctagtatcgcgggtccctgatttaccaggacccaggaggcaagatctgcggtgcttcccatatcggagatctatagagcatcgcgacacgtcgcgtctgaccctgcactccagatccttagataaccccacctgatccccctagaaaacggacatcacacaccgcagcctgcggtgtacctgacgcagagatcaacaataacaaagagggtgactaagagccagccgggacaccggcaagtgacctcccaccagcacccgagaaatgacgaccggacacagagcaacatgcacgggacgcaaaccacggagagcacgagcccagcgagaagagaacacggcgcgaagacaacaagacagcaaggcagacaccaaacagacatatacaaccaagaccacaggggacagcaacaacaggcacgcagcacaacgtgagacaaccagacaacagccacagaacaagtca

SEQ ID NO: 584502 - DNA, 760 bp, Homo sapiens
agcggagtgcgtggccgcccggggccatggcgacactcatgcttcgtcttcctgctgctgggaggcagtgtcctgtgcctccggcttctgcctccggccaggagttctggcccggacaatcggtggctcgagtattctgtcggggcgcggcttcccgcacgacggtatcttctgtattacgtcaaccccgccgtgaaggcttcaatgctgctgcagggatgtctatatccgaatcgtcctctctccgtgaagactctgctgaagacgtgaggagtgggtgcttgtccatgcctccagtggggtccgcctcgtaccactggcagtagtcctgactagtccatccaggtccggattccctggtctgagttttaatgatcttccaagttctcatagtaaaaacatccccgtcatcgagttatgagcagttcatcgcagaatctggtgggccctttattgaccaggatttacgtcctgcaaagttacgcatgaggggtggaaacgaagggacctgggaagagaaggtggacgagcggccgtgtattgatcagctcctgtactcccaggacaagcacgagtactacagaggatggttaggcggtatgaggagaccaggggtctaaacgttctcctgtcttgtccgtccagggctcagacctccatcgtggcgccccttggtgctgagaaacacatcagccgggtccgtgattgttcgacagagccgaagaacctacgttcacgaccactatggagggaaacgaat

SEQ ID NO: 584503 - DNA, 120 bp, Homo sapiens
ttagaggatcccccgtccacacttgctgtcaggttgcgatagtattaaaacatggttagacctgggaaaaggccattcaaggaagcagatagtgaagtgatggacggtttgacacccact

SEQ ID NO: 584504 - DNA, 207 bp, Homo sapiens
aactattacacatcaaatctgaggaaggtgcttgcctgggaccagtggcagggaccccggaacctgaaggtgctgacaaagatgacctgctgctgttgagtgagatcttcaatgcttcctccttggaagagggcgagttctacaaattatgggcctatttgttatggtgactgccaatataaggatccattactcactttggtcctg

SEQ ID NO: 584505 - DNA, 401 bp, Homo sapiens
  misc_feature (41)..(41): n is a, c, g, or t
gctcactgcaacttcggcttttggggttcaaatgattctcnggcctcagcttccttagtagtggggatacagggtgcccgccaccatgccgggcttatttttgtattttcagtaaagagggggtttcccattgtggccaggcgggtcttgaactcccgcccttggtgaccggctgggggtctttgattctattattacatcagggtttttgggtggcctgaaattaattcatttttggggaagtcctggttcccccagataggtttcctgttaagcccatggaagcctcccattttcaaggggggggttgagggatttaatgcagctccgacattgcgggcaggggggggttgggaaaacccctacccctttttcccccattattttcctctcccccctta

SEQ ID NO: 584506 - DNA, 799 bp, Homo sapiens
gaattagtgttgggatgggctaaaacagacccttccaaaacttcggctagcagtggagccaccggatcttagattatagctagtctagcctcagtttgtggaaagtgatagatgctggtctataatagtgagcagtcacccatgataggacctccaggttctgtctcatatttgcttcttacttacctcaggaatgctcttgtacatagaacttatttcaccaaaaagctcaggccgatgtcgacaggtgaataactgtaaccgattgtatgacgtgcctgcacttacatgtgaactctctcagaaacagagtcttatactggtgtgttctcttgcatgcttctggttcaggacgtcttgatctgagatatggatttcgatttgagtatccgaacttgtcctgagtgctccaactgtttcactcgttttaaataaatagcctattatttgtagcactagcctagagcagcttccacatagcaatgagcatagttactgtcaggaggtcgaggaaaggaacttgtgctgaacttgtgacatgtatcctgataatcaaggcttagaggaggaagtgtgtagaagataagagaaagttgttctaaattgtgctgaaactattagatgatttagagtatacagatatgtaggtattaatttctctattcactattatgtgatctggtggcccttctcctaggagtaagtatactggtaaggatgaaattagtgaggtaaatgtttatgagcagtcagtacaattggaattcgagaggttacaagatatgtaagggggagggga

SEQ ID NO: 584507 - DNA, 85 bp, Homo sapiens
tttttttagataagccatttattgtaccattcacttttctaaaaaaacacaaatgtgaatggtcaataaatggcttatctttcat

SEQ ID NO: 584508 - DNA, 263 bp, Homo sapiens
tagtaatgtactgaatcctgcctgctcatgctgctttctataatacatgtctccatgtcatcaagaggttggataacttattactaagctcaaggttaaaaatcatgtcaccttttttttttttccccctacacagtcctcaaaaaattggcgattgaggaagtagcatgaccctaaattgtgttgctaaaactcaggcagcccgagcctctggtctctccagaaagcccgtcttcacttttctctatccctcagtctaaaca

SEQ ID NO: 584509 - DNA, 185 bp, Homo sapiens
ttggactcatggttcctcatttccgcagtctgcaatgttccacatcgcactatttaacttcccacaaaacattgcgatttgaggctcagcaacagcaaatcctgttccggcattggctgcaatagcctcgatgtagccggccgagccaagcaggcgccgtgagccccaccagcagcagacgcagg

SEQ ID NO: 584510 - DNA, 1725 bp, Homo sapiens
ttagaggggggtgtggttaaagaggtgtggtgttatgtgtgggtaggtgggagtgagtactggtgtgggtgtagtgatggggagtagtatggtgttgagtatgtgtttgttagagagttgtgtgaaaggtgagagcggttgttgttggaattggggcgtgttgttagatgatagccgtagtgtggttgaagtgtttagtggaagtgagttgttgtgggttgtgagagtgggtggggaagagttggggttgggtattagatgaggcaaagttgcgcgtgtgatgggtagcagagagtgttgtggataaggagttggagtggtggtatgttctgagtcgtatagatgtgtggatgatgaagtggttggggttgcgaggcaagggggaggtgaatttggagatgtggtattagagtggaagtgttaaggctgcgttgtatggctcgttagatgatgggtgtttggggagtatggttgtagagtgtgttagagcgcgtgtcgtgctgatgatggaaagttggcggtcttagtgtgtgtggggtggtacagggagtgtatgaaatgtttgcgtttgtgtgaggtgtaaatggtagaaatttgtggggtgggggggtgaatgatgcagtagagtttaagtttgggattgggaggtttgttgtataagtaagaaggggggttgttagaggtgggtggtggtaaggagggaggaatgtgtgtggccgcacaggggtctgttagataagtgttggtgtgttggcgtcgtgtggcggtgtggtgcagagagtaatggggtgtaaggactagatgtttaatgggaagtgggggtgaagtgcgttgtgtaggggggggttgtgagatagtggtggtgttgaacgtaggtgggcgtgtggtttttagatagagtgtgtgtaataaagataggcgttagtgtgggttgttgattagttaatcagtaagccagggtgtgtggaagtagtttgtgtgagaaggcaaggcggtaggatagttttaggggttgtgtgttggagggggtaagacaagtttgcctgggtcgtggcaggcctgttgtggtgtgtagggtgttgtggcgtggcagaggtagtaaaggacataggagggagatgatgttgagaggtggttgcgtaaagaaggtgagggggcgtgcgtgtgagggcaaggtttagagagagagcgtggagccagggcattgtttgtggtgaaagctagcatgcaggttgtatctaggagagttgtgtgtgtgtgttgagagtgtggagatgtgcagagtcgagcgtagagaggaagagtgtaggaaggagcaggggtgcgtagtgttaggcagcaatgtagagggctgaaggagaaggcagcgtaatgttgtgtgtgtagggttgtaagaagtagtatagtagtattgtgttagttcaggagtgttaataatgtgttaaggcgtgttagtatgagttgtagaagtagtagtgtttgcgtaggttagcgtgtagtgtgtagtgtgagctgcgtgcaaggcagcttgtgtaagagaaagttagggatagttgttaggaagtggtagcactagtgcagttcaaagtgaaagtgtgcctttcacgtatgtcagttctaagaaaacaaccgctcttgtttgcagtcataaattagtcacaaatgcacaaattaaagtctatatagagttgaaatttgtaattaacggctcttggagtagttctt

SEQ ID NO: 584511 - DNA, 996 bp, Homo sapiens
ggagagaactagtctggtttttcttgtttgtatgccctatttatccaaaattaattataatattttattcaggatgatcaagccttcaggaggtcaacgaacacaagcccagcacagagggaaaaaggccaacctgctgaatgtgcagcggcctgtcggggaggggctgaggcttcggccctcggaaggctgaacgcagggaggctaggagaatagaggatcgggctatacaggtcctcccaattccgggagaggtaaacctccccctccgtgcaggaagaacaaagttgaggaaagtggaaaggggcctggtggcaccctcgggggggacaaaccctcggggagggggcgccacgaatgtggccccatcattccatccgaggggggccgaggggcccgacaacacccaccccaatgaaggtgtgtacacccaagcaaagagactggggcggggcaccattaaataaaccgccagaggaacagggtccgacagcagccatctgaccccttcccaatagatgtgagggcaggtagcccctgggaggtggatgagcccctggtttcggacgtcctgggcggagccccaattcgtaaccaacggggggtacaagtctagcaagagcacggacaaagtgcaccgggagccctggacggtataaaagctgacatgtgaacgaataaaggggtctctcacggcccatccccaagaaagtgtgggtttagcaccgcccaatgaatcttcgggcacggggtgtaggtaccaccccggggagcaaaaaccgcggggaacccaggcgacatgaatggcggaacccaagatagagtaattcagcaccagtgaaggaacacatagctagggacactcagctgcaaagagcagagaccgataagacacgaggcacgccacagcaaaaacaagacaccaacagagtcgtagtagggagacacccccaaacaaccagcacaggaccgatgtacatccaaacgcacaacacg

SEQ ID NO: 584512 - DNA, 321 bp, Homo sapiens
acgcgtattaacagcgtaattatacaagcatatttaatgctgagttactttaataattatacatatggtaattgtagggtaatacccacaacaactgcgtttcttacttgggcattagaatgcttatttaagtgttagacttccattctggcaaaatcttgtcccaatctgtgtttgctttctgcttgctacatttgtctccctcacttttcttgagctaaagacaggctttttccaccggcatcatcactgctatcatcattaacagcgtaattatacaagcatatataaagatgaaaaagagagaagggtcatgcagca

SEQ ID NO: 584513 - DNA, 332 bp, Homo sapiens
  misc_feature (32)..(32): n is a, c, g, or t
  misc_feature (38)..(38): n is a, c, g, or t
aagccatgcccctggggaaagggaaggcatcncccacnaagctctaatctttgccttagctttaaagtgagtgctgctaatgtccacccctccacccgaaaatgggggtcgctgcccttcactcctacccccagaggccttggcaaagctgctgctttgaaagggggatcttggaaacaggccatccaccctggagcctcatggaacgggatgatggcactgagaaagccaatgaccgaaacacttttctctgtaaaaatgtagactgaaaagccatgtgtattttcctatgtgctgtagctctcctttggaaataaattacaggcatctgg

SEQ ID NO: 584514 - DNA, 137 bp, Homo sapiens
tgagccggccccactgttaaggtctatgcatctgcgttagatctgaatggcttggagcacctcttcaattttaagagaatcaggccgggcacggtggctcacgcctgtagtcccagctactcgggaggctgaggtgg

SEQ ID NO: 584515 - DNA, 243 bp, Homo sapiens
  misc_feature (141)..(141): n is a, c, g, or t
  misc_feature (225)..(225): n is a, c, g, or t
cctagttttagaagtttcaatagcaacagagacttctcagcagaaaccttacaagccaaaagagattagggtcctgtcttcaacctctttaaacagaacaacggtcagccaagaattttttatcccacaaaactaagtttngtaaatgaaggagaaataaagtcattttaaacaaatgccaggggaatttgtccctaccaaaccagcactacaagaaatgctatngaaacttctaaaactagg

SEQ ID NO: 584516 - DNA, 708 bp, Homo sapiens
agcggatctctttcaaggttactgtgggctgtctgaactgctgggtttctgcttgtgtcctctggactatgcagcgtctggtcgactccagtgaagcgcattctgtcaactagacgagagcggtgcaggaaacctccctcacacctgtctcgcctgctcccagtagcccaacaaaggttttctacagcctctgctgtgccccctggactcactaatcatgatatcttggtcaataggacgtgggcatcctgggccctgttaggtctactttctcagcccaatatgtggatccaatagcagatctgggatgaagtataacgatgtgggaagtcaggaatagttatacagatgtgcttgggccagacccgtatgggctactgctcagatccgatgaaggagatcaacatgcctgtgcctgacggtggtgcatgcgagttagataggagactgcatgacagtctcccatgggtactctgtgggcttggcctggcaacgtaggctactgcagtaccgatctattgaccaatgtccctatagctgtctaaaacgagatggctcgattggaagctcttcgccggattcagagcgataacttggatctgtgagggacctagataatggacacaatgcctgtctacgaggttggtgactgcctccctcttcaaatgtttgccgaactggtatggcagttccagattcctgagggag

SEQ ID NO: 584517 - DNA, 137 bp, Homo sapiens
cgagtggctttctaaacccccaaacacatttccttgcagtattcacatctcagatgagtggtgactacgtacttccggaaacgtccgaacttgacagcatgtattttaaatttatgaaataagtttctctatttgta

SEQ ID NO: 584518 - DNA, 684 bp, Homo sapiens
taacgtcgcgcatctcgccttgttcacccattttgcgctccggaggtccgtgtgttgccctgcacgtccccccgccagggcgccaggcacttctgggcccttgttttcgttgggaccccagtcaccgctttctttgcaatgaccccactctgcctcttttccaacgggatgcgccttaaacgtttcaggctcgcccactcgcctcccggggatgtctcgtgcgcgtcaacacccaaggttccctaagccgtatgacaatgggagaccccgtcgggggagaaccccttgttggatgtgaccttagggtgcagggacgcaattcaggaggctaccaggggagcatgcgctgactgcacccttggcaacactgacatgtgagatacgacatggtgctatgccttcctgcgcctccactagcatcgacggtggaccaagggctttcagtgtcacatgagcaagtgacattggcaccgcccttactctttcagtgagtcttgcccacattcttcatgagatcagtggtccgatgacagggacccgcacacaggcagacagtccgtcgtaccccttcatcgtggctccccatcaacggtgacactgactggtgaacggtcatcttggttggtctggacagtagcatagctgtcatcatgaggaacaatagatataaaacgggaaccagca

SEQ ID NO: 584519 - DNA, 356 bp, Homo sapiens
  misc_feature (352)..(352): n is a, c, g, or t
gcacgagagaatcaatgggtggtacaacacttgctcctgaaagagtggcgcaaaccgtgaaattcatttatgatatgcctcaaacggtcaacatcagagaaattgatattgctgcaaccaatcaaaatgcttaatatttaatatcttagctaaaaaagatactagttaatcgctagtatcttttttagctatttatttcatattttatctaggagataagctctgcctccaaaaacttttatttagaaaatattttcttaaaaaaattaggtcctttagattctttggttgcttcaataatatcagttgccataagttctggtcttatgtgataacgattgtaaagttcttntttg

SEQ ID NO: 584520 - DNA, 313 bp, Homo sapiens
cctccgctggccatgcaaaaatagactaactgacttgtgcctggtaatgataccattaggtgagactttggttcatgcagtcggctgcgcaaaggttgcaccgaaaagccgcatgcctggaacccaaagtcagtcagcggtggtggctcatggtgtcagccgtgctccttccacaaacaccaggtgacatactgtggtcaggcatgcttggtggcaaagaccaagcccgtgtcattgtgcccatccagtccattcagccaggatgcttccgctggccaggaagcttgagcctctactttgatttcctgtactc

SEQ ID NO: 584521 - DNA, 547 bp, Homo sapiens
ttgttgccacagatgctgtaattcataatcacgcccttggccagcaggataccccttatccaacacccataatcttatcttgaagggtgtccttcaacccatgcaatactcgtatgagggtgatgtgaaattctacagggtgagcaggcccctgttgttgacgtgtaaggtttttgcagacattcaatactacacagttgactacacctacttgaaagaaacgccttctctagtgaacgatgaacgggccgcctgaataacctatgcgagaatcgcgggcagcataaggactctctcttccataacacatgaaccgaggagggaccacctctgatagagagttgactgtgacatagacgtgtgacatattgagcatctctctcacagctcacattggtatgcgcattcttgatgatcacacacttccgagtgagctctatatgcttctgagacacggacagagctttagtacttatgtgcagggaggagcactatgctttgttgctggtaaagcgtacttcgaagaagcctggccacttcagttgct

SEQ ID NO: 584522 - DNA, 211 bp, Homo sapiens
gactctcgaggattcctcttctccgaaaggaccatgtgcagcaacactctgatgggcagtccaaactcttgggaggaagtaaattcatggtaaatgtcatgatggctggtcgaggagaaggtccccgggatggggaagagagggagacagagaaatgctacagcttaatacaataacagtaattgagaactagtgtggtttcacacgccat

SEQ ID NO: 584523 - DNA, 491 bp, Homo sapiens
  misc_feature (1)..(1): n is a, c, g, or t
  misc_feature (316)..(316): n is a, c, g, or t
  misc_feature (365)..(365): n is a, c, g, or t
nttcagccctctttttagatagcatatatagtgtaactttatgccaagcacttttctaagcacttgatgtattagctcatttaattctcacaataagctcataaattaggtaatgatctttccttttttacagttaagaacacacttaaggcacagagagattatagtgtcacccaaataggtggtggaaataagctccaatccagcatcttgtctctgctcttaaccattgtgttaaactacagttaaactgtagagtggagtcccctcctacctttgaggcaactatggccataacaatagatgtttctgcatnttagaacatattgttttgtgtggcattttaaaagtttttagaaatggtnaaatatagctgggcgtggtggctcttgcttataatcccagcactttgggaggccaaggcgggaggatagcttgagcccaggagtgcaagaccatcctaggcaatatagtgagacctcatctctatt

SEQ ID NO: 584524 - DNA, 141 bp, Homo sapiens
ccttggggcccccccttcccccttttttgtcccccaatttgaaatgtaaaaaggcttttgttttccctgggggggggggggggcagccggggtttccttgtaccttgtttttagcccagttgaataaaagggcccccctta

SEQ ID NO: 584525 - DNA, 1065 bp, Homo sapiens
atgtcccgcctgctgcatgcagaagagtgggctgaagtgaaggagttgggagaccaccatcgccagccccagccgcatcatctcccgcaaccgccgccgccgccgcagccacctgcaactttgcaggcgagagagcatcccgtctacccgcctgagctgtccctcctggacagcaccgacccacgcgcctggctggctcccactttgcagggcatctgcacggcacgcgccgcccagtatttgctacattccccggagctgggtgcctcagaggccgctgcgccccgggacgaggtggacggccggggggagctggtaaggaggagcagcggcggtgccagcagcagcaagagccccgggccggtgaaagtgcgggaacagctgtgcaagctgaaaggcggggtggtggtagacgagctgggctgcagccgccaacgggccccttccagcaaacaggtgaatggggtgcagaagcagagacggctagcagccaacgccagggagcggcgcaggatgcatgggctgaaccacgccttcgaccagctgcgcaatgttatcccgtcgttcaacaacgacaagaagctgtccaaatatgagaccctgcagatggcccaaatctacatcaacgccttgtccgagctgctacaaacgcccagcggaggggaacagccaccgccgcctccagcctcctgcaaaagcgaccaccaccaccttcgcaccgcggcctcctatgaagggggcgcgggcaacgcgaccgcagctggggctcagcaggcttccggagggagccagcggccgaccccgcccgggagttgccggactcgcttctcagccccagcttctgcgggagggtactcggtgcagctggacgctctgcacttctcgactttcgaggacagcgccctgacagcgatgatggcgcaaaagaatttgtctccttctctccccgggagcatcttgcagccagtgcaggaggaaaacagcaaaacttcgcctcggtcccacagaagcgacggggaattttccccccattcccattacagtgactcggatgaggcaagttag

SEQ ID NO: 584526 - DNA, 410 bp, Homo sapiens
aactggaccgtcgctttaaccagttcgggacgggagtcaaatggtggttaccagaggctgggaagggtaataaagagtagggaggaagagggtttggttaacaggtacaaaaatatagctagataaaaagaataagatctagtgtaaggtagcactaagaggagcactcatagctaacaataattcattgtatatttaaaaaaactggaagatctagaatggtcacaacataaagaaatgataaatctttgagatgatgagcatcacaattacctagatttgatcatctcatattgtaagcttgtatccaaaatgtcacatgtgacccataaattattaaccactaatggtgttattcctattattggttttaaaaaatacaaccattattttggcttacacgttcgggc

SEQ ID NO: 584527 - DNA, 282 bp, Homo sapiens
cgaggcctggtgatcctcgcggtgtatacctacatctatggggaggccgcggtgggtgggtcagctggagtgtcaggagttcgagatcagcctggccaagatagtgaaactccgtccctacttaaaatacaaaaactagccgggtgtggtggcacatgcctgtaatcccagctactcaggaggctgaggcaggagaatcgcttgagcctgggaggcggaggttgcagtgaggtgagatcgtgccactgaactcctacttgggtgatagagtaagactgtctc

SEQ ID NO: 584528 - DNA, 361 bp, Homo sapiens
  misc_feature (186)..(186): n is a, c, g, or t
  misc_feature (196)..(196): n is a, c, g, or t
  misc_feature (245)..(245): n is a, c, g, or t
  misc_feature (255)..(255): n is a, c, g, or t
  misc_feature (287)..(287): n is a, c, g, or t
  misc_feature (329)..(329): n is a, c, g, or t
actgatgtgtggaagactttttattttctcttcatagaaggatacaatagatttgttttgctcaaagagttcattttctgttgctgggcacatatattatactgtaaacacatttctggatatgacgacataatgatgaagagagacctttgaatattttcttaaatgaagattgaaggagtatangctgtgagangagatttttctactatttcagtcctaagattgatcttttttgtcatggntttatccctntgtctctatgcatttctatgtgtctgctcagnatcttatcttctacatttgccctagttccatccttccttttntccatgcttgtttttccatacacctgcccatc

SEQ ID NO: 584529 - DNA, 360 bp, Homo sapiens
agaggggaccccgtgcttccggcgcgcctggagaccaaggtgaccgaggaacacagggccagtcgtagtgaaatcccaagacctccggagcgcaattacccccttggagttcccctcaacttctgcatccagggacacaactctgagggaaacgtttttctaaatagcgtgataagcctggcatggtgatgcgtgcctgtggtcccagctacttgggaggatcacttgagaccaggaagtagaggccacagtgagccgtgactgcaccactgcactccagcctgggatatttgtttatttctatgttactttgtattttttatatttttcaggctacataacattttgacagtttacata

SEQ ID NO: 584530 - DNA, 1806 bp, Homo sapiens
ggcttgaaccccaggtcgggaccgatgtctggcttggtgctgctgccagcctaagcagaggcctgctgcccgatgcttgctggcacgaggccccgtgggtcagtggctggctcctcctgctgctgaccccacgtgaccctcccgacccctgagccccgtgggcttgctggtgcctgcctcctggtgcagagacgcatgcactttacctgtgtgctgtccccgcctgggcacaacaacgtggtccaaatgtcagtgcacatcaacgggtcctgacagtgacgtcgcacagcgagtcagcatcttctccaaactctgtttccgaacaatccgccctggtcacgtgacacgcccaggaggccccaaccctgcacccacaaccctgccccctggccacacatcttagaggctgtgtcgcacccacacatactgcgcaagtcacacgattgacgacagcactgaaccactggacgaacactcccaaaggcacacctcactctgcctgccctgcagcgctccgacggcacctgcctggctccttctcctggcacatcgcaggccataactctacacagtagcgcaacaaggtgccaagcacacctccacacactatcctgacgtaccactgcaacgaagatgatgcatggagcaaccccgcccaccccacagaccacaaaggcgcacgcacggcagctgccaggcgaccgcaccgagcaacccacagccgcgccccccccgcgccgccagccaccaccaagcaagaacacagacccagcacgccaaccaaacgcaccccactagcgagcaacccaaggaaccagcgtcagctcgcccacatcggacacccgtccacccacccacccccgcgccccggacgacccacacccacgccaccgcgctgcaagacgcacacccaaccaccacgacgcgcgcggcgccacccgccgaacccagcgcaacgcaacccgcacgccgcccacgaacacccacacacccgcaccccgcagacgcccgccccacaacacacaccaaagagcaccacacgcccccaccaccacccccgccccaccaacaccgaacccacacccgcacaccccccagcgccgccacccaaggggaccgacacgcccgaacggcgagcccccgccggacctcgcagcgcgcggcgcgccacaccaggcccggcacgcgccagacgggagaacagaagatcaacagtatgagaggagagacgaaggggcgggcgggggcgacgggggggaggctgagggagggcgacgcgcgggacgggacgccgcggaactgcgaaggctgcacgagcgcgagacagaagaggcgacactacacaagtccatcaccactcaccactcctccaaccgacccaccgaaagccactaatcctcccagctcactcagcacatatctaacaccagcgccactcgcataacatacatcacgtaagagcacacagccactacgccgcatcacaccgaactcccacacacgacacttaacaccacactcatctgccacaacacataaccaccacctcaccgccatgcacccaggcgaagcacgcacacgcgacgaccggcgagacccctgccgcgcgccccggcaacaccgccggagagcgacggcgacgagccgcgacagaagcgccgccacgcggccgccgaacggcccagagggcgccgcacggcgctgccgagacggctgcacggaggcgtgatgagaggcgccgcagcgccgaccgccgcagcggacccggacgacggccggcgaccgacgaggcggcgagaaggagag

SEQ ID NO: 584531 - DNA, 308 bp, Homo sapiens
ctccacacatctgtaccattcttgagtgatcgcttaggaatgaatgtgatttgaactcattcatgttgagaggtaagtaaaatatttcacttataataatcaagggctcaaaagatgaaaaatagaaattacaccatcccagtatttcaggtatacacagaatttgtagattacttgcaaaaatttttacaatgtatatattgtatagagagggaaaattaagagacttcatgtctatacctccaaacgaaacttcctgtgttctttgcatcattatttaactggcagttccacatatttcatcctaa

SEQ ID NO: 584532 - DNA, 511 bp, Homo sapiens
agtcctcttactcctcctatctgcatgttcggggcagacaccgtaccctctccgcactcccttgagcaggtctgtacttacagtctccaggtacttaagcatctccagattgcatgtgaaccatttgtcatgttgctatttctagcgtatgtctttcatctgcgaatactcagagctggggagcttcattgctgggctctgggctgggcctggtggtatatccacaggcgtctttgggtgccagttatatggtcttcagctgttttggtattgaaatgatcagctgaggaggaatcgatggagtccttggactaatgtgtgcatagaagtgtgactgttatgagggaaggggagaggggaagacattttctgggtgttgctacccgccgactgtacttatcgaggaggaccccagataaagttgtctgagggcgtgtagatgtagcggggcgaaccgaaggagcttactccgatgctcatctgtctctaatggtctaagcaaaatactcta

SEQ ID NO: 584533 - DNA, 436 bp, Homo sapiens
  misc_feature (4)..(4): n is a, c, g, or t
  misc_feature (28)..(28): n is a, c, g, or t
  misc_feature (380)..(380): n is a, c, g, or t
  misc_feature (423)..(424): n is a, c, g, or t
ttgnatctccccactctggaacccttcncccatatttggaagacctaacagatatcccatcctaccctcactgttatgggctgaatttttctccctcaaaatttatatgttgaagcccctaatcccccagtaccctcagaatgtgactgcatttagagatggggccattaaagaagtaactaagttaaaatgaggcctttagagtaagcccttatctgatctgactcatgtccttataagaagaggagattaggacacacagagagacaccagcgatgcacatgcacatagaaaagtcgtataaggacacagagagaaggcagccatccgcaaaccatggaggaaggcctcaaaagaaatcaactctgccaacaccttgntcttagacttccagcctccagaactgtgagaaaatgaattcanncttgtttaagcc

SEQ ID NO: 584534 - DNA, 1763 bp, Homo sapiens
  misc_feature (1763)..(1763): n is a, c, g, or t
ggtgatcccgcactccagtccggggccttggcctgcggatgccgccgctattcggatatgtcgtgcgaatcccatctctgtagaccccgcggcctgtaggcgtgtcggaggcgttcctcgtgctacccggagattgccgtggcgtctcccggtcgtagctctgggctccccggcgactcatcccggtactgagaagtccgtgtttctcgcgctgatatggtagtgcgcgcgacaggggccggtgctcggcatagttgggtggagcgtcgtttgacttgtttactcaagactgatttccgtttctcgaatcggagacttcaagcgtgtatggattggtcggagatagccaacgacacaggaggtagcgtgatttacagggtgacgatgtacagcggagcccctcggatctcgcaggagacctgagaggggcttcactgggaatcttcttatagtaggacttacctaaaggatatcccctcgctatatccaagcatgcgagcaatgcgctctatacgttcgcacatacgaactatccgtagctgattgctgggtcgcctcccttcaccccggctgcacgatttctgctaggtggggcctcgacgaaaccacgccaggttcgtatccgacgacgatacacttggcttgcgttttcagtgtaggcccttgtctcgcgtgtataccctctagccatagtgcgacaggttccgaacctcttttttccttcctgacgccacctccttccacgcaatttttgcaaggttcccgacatgctctgcccggaacacccgcgcgtgaagccggcagccggattgggctccgttaggccgcacgccgacccgtttgcccctctgacaacaacgcaggggggtcccctcttggcctagaggaacaggcctggtgtgggcggtctccttgcgcccttggattccaaacgacagccaatggccccaaggagctttgaggtccatccccgtttctctctccccccttgggctgccaccagggtccccagctgcggtccttcctggggtggggcccactttggacgcgacattcacgacaaacggcccctctggttctgctgccccatcgtcgggccccccgaagcagtcttacacccccctcgcgaactctcggctctgtctcctacggacttatgcccccattctccttatcggcactctctcgcctcaatctggttcccacaccttgcgtggcgctgctcggcgcccccccaggcggcacacgacgccgcggccgcccacgcctactttctctcaccctcgggtgcttacaacagcggcgacaccccgccgcttaaccgacgtcttgctagcctttcctcttcccgcacgacatccggggttggggcacggaagtgtccttcccctcacaacgggctcccccccgcgcgaggctacactggcccctctctaacacctgtgtgtgggcccccaccctgcgtggaccccgctgggtcccataccctgcggtgcagagagatccccgctcccaacgcacactctgtcaccgtactagtcgtggctctctgtgggcccccacccggcgagcctcccccccctcactctgttagagccggcgctggcggcagccccacgcctactcccccaccctctaacactcacgagcgacgcgtgctcttgtgcagtacacacgacgaccccactgcgcccggcgactgtgcgcgagctcagaactagtatcctggagccgttcaagctcgtcggctggccgttcttctn

SEQ ID NO: 584535 - DNA, 149 bp, Homo sapiens
gtgcctagaggatcccgacaacaactattatatttcaaaaatatttgaactcaacataaattaatttcttaaaaagtacacttctcatactatgtgttgtggcgattagactctggttaactcttgtgcagcagacacctacgagatgc

SEQ ID NO: 584536 - DNA, 442 bp, Homo sapiens
  misc_feature (91)..(91): n is a, c, g, or t
  misc_feature (209)..(209): n is a, c, g, or t
gacttcagcatctgtttgctaacgtggtctcccacaaccagctaaaggctgtttgattgattgccggtcctgtgtgctcggtttgcatctntccaccagccttatcatcctgcatgagttacctctatacatgtgctcatgtctaagggccaggtctccccaagagcaggatcaggtcatgcctttgttactccagcactaacagtgcntacgtgcataggtgtccaatgagtggggagtacttaaatggttgaattctactcaaagactcacgtgaagtccttatgactgcattttctctaagtctgttttttaaaaaatccaataattagcttcttatggttcatatattttctctcaagtgtaagacaatatatattttaggattttgttttattatgttttgctgggaaaaaggaaaactctttctgggacatagggt

SEQ ID NO: 584537 - DNA, 201 bp, Homo sapiens
gaagcctcttactcacgtggcttaaaatggagttcaaaagattgccattgagttctgattgcagggactaacactgttaatctgataaggacagcaaactcatcagactcagtgctctgtgattgtgcttcgagctatgtggtaacatatgaaggatatgcacatgaggctctgtatctcctgtggccttgagcaagacct

SEQ ID NO: 584538 - DNA, 110 bp, Homo sapiens
tcagctcggtacctgactctgtggtcatggcagaagctcctcctggggtagagacagatcttattgatgtcggattcacagatgatgtgaacaaaggaggtcccgggctt

SEQ ID NO: 584539 - DNA, 454 bp, Homo sapiens
ctaaaccctttgcactgacttgggaggtaatggtaagttttattataggggatatggtgcttggtatacacagcgatggattgaggagactgagctggggcagggtaggcttgtgagtgttagtggggtacgatgaggagattgtgctgtggtgaagagtatatgggtgtgttgtggtaacttatagtgtaggaggctgaataattatgaaggagaggggtcagggttgattcgggagatcctattggtgcggggggcttgtatgataatgggcgttgattagtagtagttactggttgaacattgttctgttggtgtatatattgtaattgagattgctcggtggaataggttatgtgattaggagtagggttaggatgagtgggaagaagaaagagaggaagtaaagtttaattatgcctttttgggttgaggtgatgatggaggtggagat

SEQ ID NO: 584540 - DNA, 320 bp, Homo sapiens
gaaaagggtcgctggttgcagctgaaatgacctgaaatgtagcctcagtcttaagtaaagtcagtatgagttgccgcacatctctattgtgtactatagtacggtactaggcagaaaagtcataaatcaacaagccagtaggattttgccttagcccttaagctatacataatagcatctaaattattgatattcctaccaggagactagtgtatatactagtaccatacacctagatgtaattaggaccctagtagtattaaacaactataggacacccaatacactacacacccactatagacgggggatacctacta

SEQ ID NO: 584541 - DNA, 983 bp, Homo sapiens
gacgcaagcagcgtcattgaagcgcttgttatcaaccgcttatgagtgaacctcaagtgcctggagaatatactcgcagctttccgacggtagctgaaccggaatagatagttcctttgcctctcaccagctaggcacgatagtcacacgggtcgtatggactctatcgatgacaggcatggtcctgtaggatagagcatgtcccgtgacctggactgtcttaaggtgtagccgattattcgtcaaccatcgaatattctccattatcttccccatgcttggtaaaatcgaaagagggatttaggaacctgggcttcggtcagagccttgcagccttccatcacacctcaagtcccgttggggccagttgggagctcatatctagacacagagacacatagcatcaacttcaagaaaggtgacaatttgttgcagctccagggatggcgaagcgtgggagatgggtagacgacaatcttgatagcaggaggacaataggtgaagtgcccatgaatgccccacgactaggctatggatgctacttgtgcctcgatctaacatgtgtttgccctcactatcacacacctcccggtcgttccatgtcgacctgtacctttttgcgctcagacctcgattgggacaattattctgagtttcccttaaatgggaccgctagccaacaaggattatccaacggaactatcacgcttcatttactcgggctcaactattacctacaacataattcctggctttcatccgcacaaactaatagttccagttttacaatcccaaacatcactaaggcttcgaagacgcaggctgaataacggcactcggtcacaacgaggggatcgaacaattctggaagtgcatccactatggatgcagggactaccaaaacaagacaagacgaaacgtcaacagaaccgaaaacagaaggggggcacacaaaaaacaaaaaagggcacaaaccaaggacc

SEQ ID NO: 584542 - DNA, 790 bp, Homo sapiens
ctaggaggaagcccggtgttaatcggacgaggcacacagctggtgtggaccatcggcgggagagagtgccacgcctccacagcttgccccaagcgctctgcctgcccgtccactcatctgcccatggggaagtctggctcactgggacaatgggccactgggctggtctgtgtcttgggcctgtcccatggctggtggcatgtgatgtgggtgcccatgtcatgcctcttttggtggcaccctactctcatgccatggtcttgtgccctactgccagtcacccatgcaccccatgatcacctgccatgtgccatgccccacaatgtgtccccattactggacatgtgtcccatgatgattggacaagatgtgcaccacatgtgtgcccccagcctgtcacttctgagcacatgccctgtgtgtgctcccttgacctgatgtgtccccctgccatgtgctactctctaactaactgctgttgcctttcactgtgacccctgcttggaagcttgtagcttgtgcaatggctgatgcttctgccctggcctgctctgtggtggtggtggatagtgtggactgacggccagccagccatgctgtggccgggggccctggtccatgtgtcccgtgtctgtgttgctgtgctgccgtgccgtgtctgatgtgtcagtgctccgggctgcgctgtccctttcatcaaagccttacctttgctttatgctcttgtgggaggcgatggggggccgcgggagccggcccggggttatgctgccacaggggctggtaccca

SEQ ID NO: 584543 - DNA, 114 bp, Homo sapiens
ctcagtttcgtgtgacggggtgcgcgtcaaggacaccgtctacacggacttcgatgtggagccgagtgtatatgccctccagagtgtgatcctgctaccatcgtctaccatgtg

SEQ ID NO: 584544 - DNA, 161 bp, Homo sapiens
gcgattttatcaaaacatttattggtggtaaaatataacaccaaatgtgtcatttgaactggtctatatagtgcagtggtattaagtgccttcataatcttgtgctaccaacaccatcatccagctccagaactttttcatcttctcaaactaaaaatctg

SEQ ID NO: 584545 - DNA, 200 bp, Homo sapiens
gcaacgtgtacatctcggacggccccacgtggaccagcggggattttctcggtaaccacggcagagagcagcgcccatgttaagagtgaattaatgtaactcctggtgttaagagtaatgtaaaccctgcggacaatttagacctctttctcttagactcttctaaaacaatgctctgccttgggcgttacctaacaggg

SEQ ID NO: 584546 - DNA, 126 bp, Homo sapiens
ctgctggtggtcgccgtagccgagaagcgagagaagctggctgaacggcggggagggacatggcaggaggcgacctgttgttatctgagcattgcactatgctgacgccgtctattggcgcaacgc

SEQ ID NO: 584547 - DNA, 149 bp, Homo sapiens
actcttgaggatcccggttgacgtgttgtgtgggtcgagagcgcctcatgtgctggtgctgttgtgtgtaggtcccgtgggacacaagcaggcgccaatggtatctgggcggagtcacagagttcttggaataaaagcaacctcagaac

SEQ ID NO: 584548 - DNA, 988 bp, Homo sapiens
actcgtaatcaagggtttcgccgcgggggttacgcgggtggtcgtgtcctgatccaggagttggttctgccgcccgactgagatttccggccattgcgttttctacacaagtcttcagaggtggtcttgcacaccgtgggggcacgcgatatttcccccgtggtaccccgggctccccgcacgtgggttttctgcccccccggcgtatttgccgccgttccccctttttgtgggtccccaccgggcccacgcagcatgaagttctgcttccaatagaaagacattgtccccgttcggtgtgcaaacatgcggcggacgcccctcattttcagacaccttgtggggggaccaccccactgtaataaatttggtccccccggaagagccccccaccttcgttggggaggcactgtcgcagttccgaacaccattgtgtggcgccccttttgtccgctgtttggaatttgaaggacaaccggacggccaacgcgatgggcgggtctattcaaaaacaacgcgggttcacacacaaaatccggtccgagccagggagccacggagcgcaactcacacattcgtctctccccggtaagaccattccaataggcgcccacagggtaagttttgtgccctcgttgcagctgggcaccccccccgttggtacgcaatgcgggtggcaggagcccggcttgccaagagttggttgtatcatagacaggcgccatcaattactgtggtgacgttaacatcccgtttgaagcaagaacatggcctaagcaggtttaggctcccgcatgtaaagtcaagacaatttctatccgggcacacccgtgcacattatttttatttgtgtcggggctccgtattcaatttttgttgaatgtaaaaaccgacattctcttttcaaggccccataggcccccaaatgtagccaggatctggggcccccatttaaaagcccacatgacaaaaaaaacagacataaata

SEQ ID NO: 584549 - DNA, 670 bp, Homo sapiens
agcggggcctgtcctttcgtggctcactccctttcctctgctgccgctcggtcacgcttgtgcccgaaggcaggaacacagtgacagacctgcggcacactgcagattctctatccttcacacagctctttcaccatgacctggatcacttcctttgaatgcagaagcttgctggccatatagatgtgggaattgttgcccttgagatctatttctccttctcaatatgttcgatcaagcagagttggaagaatatgatggtgtagatgctggaaagtataccattggcttgcggccaggccactgatgggcttctgcacagatagagaaggatattacagctctctttgcatgactgtggttcagaatcttatggagacgcaaataatcctttcctatgattgcattgggcggctggaagttggaaccgagacaatcatcgaacaacatcacgagtctgtgaagactaatttgatgcaggctgtgtgaagagtctgggaatacagatatagaaggaatcgatacaactaatgcatgctatggaggcacagctgctgtcttcgaactgctgttaactggattgagtccagctcttgggatggacggtatgccctggtcagttgcaggagatattgctgtatactgccacaggaccatgctagacctacag

SEQ ID NO: 584550 - DNA, 114 bp, Homo sapiens
atcatagctgtgcagatgtcagtaccgggacagctttcgacgtggatgacgactggcccctattcaggaccattctgtggccgtgccagagctgcatacggatttcacgccaag

SEQ ID NO: 584551 - DNA, 329 bp, Homo sapiens
tgaatgggcaatatcttcacttggtttaaaacctagaaagtaggccaggtgtggtggctcacacctgtaatcccagcactttgggaggccaagtggggtggatcacctgaggtcaagagtttgagaccagcctggccaacacggtaaacccccatctcaactaaaaatgcaaaaaatagctgggtgtggtggctcatgcctataatcccagctactcaggaagctgaggcatgagaatggcttgaacccgggaggcagaggctgcagtgagtcgagattgtgccactgcactccagcctgggctgggcgatagagtgagactctgtctc

SEQ ID NO: 584552 - DNA, 165 bp, Homo sapiens
cgtcccatcttctcatctattcgtgtcttccgccgaaaatatattaacatccactgtccaaaatttcatgttctataacatttgctctgtgctatctccgctatgcaccagttttgaccttaccaccatagtttatatactaagcgtaagctgtgtgatgtcagt

SEQ ID NO: 584553 - DNA, 235 bp, Homo sapiens
tactatcaccccaaggaggtctagactgttattctcagcttgcagactaaggctaagggagggcaaacatcttggcaaggggtgcatgcctaccacaagtggcacggcctggattcaggtccaagccttctgacctataaagtgagggctccacgaaacacacacataaagaatgagcagatatcaaacacggtcttagatgatgagatgcgtatgcaaatgactattttaccaa

SEQ ID NO: 584554 - DNA, 487 bp, Homo sapiens
  misc_feature (13)..(13): n is a, c, g, or t
  misc_feature (99)..(99): n is a, c, g, or t
  misc_feature (236)..(236): n is a, c, g, or t
  misc_feature (301)..(301): n is a, c, g, or t
  misc_feature (424)..(424): n is a, c, g, or t
  misc_feature (446)..(446): n is a, c, g, or t
  misc_feature (451)..(451): n is a, c, g, or t
  misc_feature (476)..(476): n is a, c, g, or t
  misc_feature (483)..(483): n is a, c, g, or t
tcgagcggagtcncttttgggtgtccttggccgcagctggaaactgacggccaccttctccaactcgcagcatgctgttggggttgggcggccggtggncagcgggcctatgccgggccggacgaggacgacgtggtgtgtggccgccgcgctccgaggttccgggatcgctttctggcgtgcggcctcgctagccgagccagagcggctccggagcggcgggcatctagcgctancgagtcttgcgggccacccgggcgagcgcacaagaatacctgtttgttgggaacaaatgtgtccngctgcttccatacacaagttgataagccagaaaatggcaaggctgatttatactggaaacctggcccgaacgatatttggtgtgaaatgtttctcttattctacaagtgttgtcagcctttgnaatatttccccgtaacttcttntcacnaaaataacattaatgttttggaaantttgccntttt

SEQ ID NO: 584555 - DNA, 230 bp, Homo sapiens
cctctgattaggggctgtcagtgctagcatggtttatgtgtccacacaggaagacagaattgagggaacttggcaccccacgggcatgattcaacagggatcgagagacgcaggcgacggatgtagtgcaggtggtgcgtgctagttgtatctctataacatggagatggccaggacgttggaggagccccagtgacgccgagtgttccctacccgtagtggcatgggcg

SEQ ID NO: 584556 - DNA, 943 bp, Homo sapiens
ctgttcatatggctaccaatactcatcgagaatgttcagtgcagatatgtacagttagctgatagacacttacatcagagatcccaagaaaagggaattgatttcatgcaattgaaaccatgccctatgttaagacaaaagcagatagggccttgcgatggatagcagatagaaaatctactttggggaaagagtggtggcctttgctgctgtagaaggagttttcttactcaggatctttagctgctatattctggctaacagaagagaggtctaatgccaggacatcacttaaaaccaatgaactcatcagcagagatgaaggacttcactgtgactaagcttgcctgatgtaccactacttagtaaataagccttccagaagaaagggtcagggagatcatagtgatgctgtacaacattgagcaggagtttttaaacagacagccttggccaagttggctcatggaatgacattgcatatatgatggcaccccgtacatagagtttgtagctgacagctcactagtggaaacttggatttcctcaacagggtttttcagggcaaagaacactcctttttgaattttactgggcacacatttctatagaaggcaaaccaatttctctgagaaagagttcagagtatacgcgtatggagataatggaaaaaaccacgaataagtctcaccatggacggagaatctacaagaccgcgtgtaaaaaccccataaagggtcaaggacaaagagacaaaccctgtaaaaaatccgaattcttacgacggggcgaaaagaaccaacatcaaagggcgtaaaacagatacaaacaggaccagcgacagcaaaacgaagaagaggaggaagaaaagcaaccggacaacaacacaacagaccaaaaaagaaagaaaacaaagacacaaaagcaaagacgaacacacaaa

SEQ ID NO: 584557 - DNA, 477 bp, Homo sapiens
  misc_feature (4)..(4): n is a, c, g, or t
  misc_feature (85)..(85): n is a, c, g, or t
  misc_feature (97)..(97): n is a, c, g, or t
  misc_feature (104)..(104): n is a, c, g, or t
  misc_feature (108)..(108): n is a, c, g, or t
  misc_feature (126)..(126): n is a, c, g, or t
  misc_feature (141)..(141): n is a, c, g, or t
  misc_feature (185)..(186): n is a, c, g, or t
  misc_feature (233)..(233): n is a, c, g, or t
  misc_feature (236)..(236): n is a, c, g, or t
  misc_feature (248)..(248): n is a, c, g, or t
  misc_feature (282)..(282): n is a, c, g, or t
  misc_feature (300)..(300): n is a, c, g, or t
  misc_feature (312)..(312): n is a, c, g, or t
  misc_feature (315)..(315): n is a, c, g, or t
  misc_feature (320)..(321): n is a, c, g, or t
  misc_feature (325)..(325): n is a, c, g, or t
  misc_feature (332)..(332): n is a, c, g, or t
  misc_feature (334)..(335): n is a, c, g, or t
  misc_feature (458)..(458): n is a, c, g, or t
aganaaaaaaaagagacctaacaggggcctcttgcagcccacttgggggagaaaaatgagtaagtctggccttcataatgcttcnaaaaacaaaaanccagcanacgncattattacaaaggaaangaagaaaaggaatgnaagaatcacatccatcttgaggacaaaacaagcatcgacattannaggacgaaacaagaattgcagaaccaaacatggagaaaccgtcaaanccnttggtgtaagcnaagccaagcccaccatgcaggtggaagcagggangcctccccaacccaaccngaagctcagganccncaggnntggnagcagantnnagaccacggaagcacaacaaaaaaacacaatcacaggcccactgctcaccagcacttcgcgctcactccgaagccagtgaagcccccgcagagcagccggggagaccaactcaagggcaccanaggccacaaaaaaaaaata

SEQ ID NO: 584558 - DNA, 612 bp, Homo sapiens
  misc_feature (6)..(6): n is a, c, g, or t
  misc_feature (29)..(29): n is a, c, g, or t
  misc_feature (42)..(42): n is a, c, g, or t
  misc_feature (600)..(600): n is a, c, g, or t
  misc_feature (604)..(604): n is a, c, g, or t
tgaaanaagcagaattgccatttattttnacagatacggccnacggacttgaaatgccttccaccatgcccaaaacccaaattgctttcgccttcggggacttatcacatctgcacacagttgtgcttttaggagttgagaggagttctgccagggaaccacaaggacctcaaagtcaacaaggcaagcttcttccttctgcgcccctgctgccagggggcaaagtggtgaggtcgacgtggtctccagtgaccctggtcttgcggcagtctgtgctccccatctccatcgtcaggaagtacttgatgccggccaccagctgctctgcgccttgatgatgtgcgtgtctcggaagtagtagatgctgttgctgcccatgttgtagctggccgacggccgcctgcgccgccttctgcactgcgggtcgtcgggcgacaggtcccggagttctccgaccatgcgctcctgcggccgggcccgggcgtcgcgtggcagcgccaggaggcagaatgcgaccagggccaggcccagcgccagcgggaggttcgaacgcgccatggccgtcagtgccgtcggagccctcagagccgtgagtgcccngtantcggtcgc

SEQ ID NO: 584559 - DNA, 527 bp, Homo sapiens
tttatctggtatttcaaagttaatctggtttggatccattgctgaaagctagtgtgatttcttgtggatgctgtagaaccccattttgtcatattaccagaattacttttctggtttcttcttattttgggtggaccatttcttcaaattgttcttaaatttatttttaatttgactgtgtttttttctttaatttcttcttttccctcttaaggatctgactttaatgtttatcatttattatagcctaatttgattcttaatgcttttagtggggaagactctgtaggagttccttaaggagagtttttgtgcgctggctttcccagacgctggttgcagtaaccacgcatttggcctgtgggtaagttcactgtctcctgtagggttggaatggctaggatctcttgaagcttatctcattctcccatggtgtacacctttttatttatttaattttttcccagtattttatttactaagctgatgattcagccttcaggccaataggagaggtatccctgggg

SEQ ID NO: 584560 - DNA, 226 bp, Homo sapiens
gtcgacacagagcaagattcttgtctcaacaaaaaaaaatagtaacatgtctcccagcaaagaaaagtccagacccaatggcttcagtgctgaattttaccaaacatttaaagaactaatataaatcctacctgaactattccaaaaaaaaatagcagaggagggaatacttccaaactcactttgtgaggcaagtattatgctgatatcaaaaccagagtcgacg

SEQ ID NO: 584561 - DNA, 567 bp, Homo sapiens
  misc_feature (105)..(105): n is a, c, g, or t
  misc_feature (555)..(555): n is a, c, g, or t
  misc_feature (559)..(559): n is a, c, g, or t
gaattcggcacgaggccgatccaccccatcagggcagagactaggaccaggcaagccaggaaggcaggtagtgcaatacagggtttaattatgtctttccttganatttagatggttgtccatcgtggagttttagcattaattcgatttttaaaatattgcatgaaaatatcccgattgcgcttttaggcccccttcatgcacgctggggcagcgcctgtggcctcccccatctgggccgggtgtcccctcccagcaccccgcccgccgcacctggctctgcgccttgatgatgtgcgtgtctcggaagtagtagatgctgttgctgcccatgttgtagctggccgacggccgcctgcgccgccttctgcactgcgggtcgtcgggcgacaggtcccggagttctccgaccatgcgctcctgcggccgggcccgggcgtcgcgtggcagcgccaggaggcagaatgcgaccagggccaggcccagcgccagcgggaggttcgaacgcgccatggccgtcagtgccgtcggagccctcagagccgtgagtgcccngtantcggtcgc

SEQ ID NO: 584562 - DNA, 151 bp, Homo sapiens
cccggaaggagatctgaaggagaataacttgggctgagaagctgttatataatagtgaccatttctttcacagagacggggaactgtatgcagcctttatctgaaaacccactcatctatttaatcacaactgtacctctccttcagactt

SEQ ID NO: 584563 - DNA, 839 bp, Homo sapiens
tatgcgaagacatcggcaaaaatgttttttcccgcaggggttccaacccggaccccgggtttgagaccacacgttgtcgcacggccggaagacgacccttttattgaggcttcttggcccgcaccactcaagtgtagaatctctcgcggagcgcctttggagatgcgtgctcgaccgccaataactggggctttctagaaaagggaacagtaccacacaaacaatgtgtctatgtaaccaaccgagagagcggtgtgtctccacaaaacgccgtcacaatgcttgcacacacaaaccgttttgtgtgccaaatagggtccaatggagattgttctcccccaaaaatttgctggccgtgtgccccccgcccaagcattccccgcgcagtatagattttcgcgcagaggaaaagcccccacgtgtgtttgcaaacactacttgtttacaatagagtggcctgacccacgtggaagtgtggctcatctatcaaaggggagtcatttcagtgcctcgctcaagcgctgggttacttctgatacacgaatatatccgtgttgaccagacaccgtggcgggaaacaccaatatcttgtgcatgcatgtacatggccccccgtagtttttagtaagatcactagcctcaccccttgttgcaccagaaatcttgcggatggtttgtaaataaaaatcaacatagcgtgctagtttcacaaagggtgggggtacatcccctcttagttaaatttattggcgggcacatccgttcgttcttggagcttccgcagattttgttgtcaacatcgcaatcaaagtaattaaaaccaaaatgggccccccgaa

SEQ ID NO: 584564 - DNA, 198 bp, Homo sapiens
tctagaggatccctgcttgtctagctctgtggaatatttgaccacctaagagctggggcctgcttctggttctgggaactggctttagggggtttctagcttaccaggctgagctcttcaaaattcccccaacttccccattggtgaacaattggcatttcttgggctcttccctggcaagaatctttgaatattccc

SEQ ID NO: 584565 - DNA, 324 bp, Homo sapiens
tccaaagttggtttttttttaatttaaaatggggaggcattttttaattcaaaattatttcttccaatacccctttatctaaaattttactaaaaaatgttttccttttaatttttttttaacccattttctggaaaattgcaccttataaatttttattcgtggtgacaattcgggggttgcactgtcgaattggtgtaaagaaacactattggtctttctgggactaatggggatgtcaactccaactatgggcacgacaccctatttttggacgatggatggatcacaccgggggttgtgaaaacacgcttaaaaatcccc

SEQ ID NO: 584566 - DNA, 145 bp, Homo sapiens
  misc_feature (63)..(63): n is a, c, g, or t
gattgccaagggtaaggaggcctgccaggactttctctcccttgagtacagcttccttgactnagggacaaccctgaaggaaaaggtgtggtcccaccccaagtcaatcttttcccttccctgggggctccatcttgtaattccc

SEQ ID NO: 584567 - DNA, 630 bp, Homo sapiens
  misc_feature (276)..(276): n is a, c, g, or t
tttggatttttaaaaaatcaagacggggtttcactatcttgcccaggctggtcttgaattcacgggctcaagccatcctcctagctgagcctcctgagtagctgacatggtaggattgcttgagcctgggagtttgaggctataatgagccatgataggaccactgaactccatcctgagtgacagggcaaggtcctgtttctgaagaaaaaaaggacattggaatcagggccctctccatcctgaggtgcctacaaggcatctctctctgcaaangagtaaacatcaccctccaactccttacagagtggagcaacaggaaaactccttcacctcatttctgtgctgcttgggaggcctggacagcccaataaccagctcctcgctgatgaagcaatcaggaaatggctcgagttgagctaaggagaatttggatccttcctttggttctcagtaggcagggtaggggccaggcatggtggctcatacctgtaatccttgcactgtggggggccaaggtgagaggattgcttgaggccaggagctcaagaccagcctggacaacatagcaagacctgggtggcatacacctgtggtccctactacttggtaggatgaaaggggggatct

SEQ ID NO: 584568 - DNA, 401 bp, Homo sapiens
cacgaggcgtgcgtcaggccgccgccaccgcctgaccggcaccgctggacatcaccggacgccatcatgcaggacgccccgctcaaaccgttccgctttaccgacgccgccgcactggtgcgcgccggcgtgccggtgacgatggtcaccatcgtcgaggtcaagggctccgcgccgcgcgagcccggcatccgcatgctggtgaccggcgacgacctgatcggcaccatcggcggcggccacctggaatggcgcggcatggcgatcgcgcgcgagatgctcgatgccgccgcgcacggcgaggcatcgtcgctcgcgcccgacgccacgcgccgcatcgtacggattccgctcgggcccgcgctgggccagtgctgcggcggcgtggtgcagctggcctt

SEQ ID NO: 584569 - DNA, 1734 bp, Homo sapiens
  misc_feature (149)..(149): n is a, c, g, or t
  misc_feature (1380)..(1380): n is a, c, g, or t
agacggagtctcggtcgcccaggctgaagtgcaagggtgcgatcttgggtgacagagtgagaccctgtcttagaaagaaaaaagaaaagaaagtgttaatccccctatgggaatctcctcttctcctgccctctctggaacctcatgtnagttcttcctcccactttcctgtatctttaacctatcccccacttttagctccttcccatcatcatttaaattactcaaacttcttctgttttaaaaacctctccctaaactcagggagaggtcttctgcacacacattgagccatctgctcttcctggtgccttctctacagcagcctgagccatgtctctaatctatgaatctcatcatgttactcccccatttacatcacttctccttgcctcagggattaagtccaaactccttaacagcccctgctctgccctgccttgcaaggcagcctcactgcttgcccctctccattacatctgctatggagtccaactgagcctcatctgccccttgaacgcacactctttctcctctgggagtctctgaagtgggtaatatcctctgcttataatatgcttccccttaaacctctactctcttcctagctagctttgactcctctgtcacttgtccgctttggcatcacctcctcatagaagacttctatgactcccgagattctcaggagcatggcaggtgaagtgctcctcccatgaatggatggagattagggagtgtgtgttattcatgcttaattcaccagtgcttagctgagtacctggcataaaatagttactgtggtggccaaagtaataacccccaccgccaccaattgctcatgtcctatgttacacagcacaattacataggaagggggaattaagagtgcagataaaattaatgttgctcatcagctgaccttaaaacaagattatcctggagtatctaggagagcccatgtaattacaagcattctttaaaactggaagagggaggcagaaggttaagaaccagagacggtgggcacaatggctcatgcctgtaataccaatactttgggaggccagggtaggaaaatcccttgagtgcaggagttcaaggtcagccatggcaacatactgaggtcccatctctacaacaaaataaaaacaaaattcactgagtgtcacgatgcttacctgtagtcccagctactgggaaggctgacatggtaggattgcttgagcctgggagtttgaggctataatgagccatgataggaccactgaactccatcctgagtgacagggcaaggtcctgtttctgaagaaaaaaaggacattggaatcagggccctctccatcctgaggtgcctacaaggcatctctctctgcaaangagtaaacatcaccctccaactccttacagagtggagcaacaggaaaactccttcacctcatttctgtgctgcttgggaggcctggacagcccaataaccagctcctcgctgatgaagcaatcaggaaatggctcgagttgagctaaggagaatttggatccttcctttggttctcagtaggcagggtaggggccaggcatggtggctcatacctgtaatccttgcactgtggggggccaaggtgagaggattgcttgaggccaggagctcaagaccagcctggacaacatagcaagacctgggtggcatacacctgtggtccctactacttggtaggatgaaaggggggatct

SEQ ID NO: 584570 - DNA, 1562 bp, Homo sapiens
  misc_feature (1208)..(1208): n is a, c, g, or t
tgagccggtccacatgatgctcaccgctccttcccatcatcatttaaattactcaaacttcttctgttttaaaaacctctccctaaactcagggagaggtcttctgcacacacattgagccatctgctcttcctggtgccttctctacagcagcctgagccatgtctctaatctatgaatctcatcatgttactcccccatttacatcacttctccttgcctcagggattaagtccaaactccttaacagcccctgctctgccctgccttgcaaggcagcctcactgcttgcccctctccattacatctgctatggagtccaactgagcctcatctgccccttgaacgcacactctttctcctctgggagtctctgaagtgggtaatatcctctgcttataatatgcttccccttaaacctctactctcttcctagctagctttgactcctctgtcacttgtccgctttggcatcacctcctcatagaagacttctatgactcccgagattctcaggagcatggcaggtgaagtgctcctcccatgaatggatggagattagggagtgtgtgttattcatgcttaattcaccagtgcttagctgagtacctggcataaaatagttactgtggtggccaaagtaataacccccaccgccaccaattgctcatgtcctatgttacacagcacaattacataggaagggggaattaagagtgcagataaaattaatgttgctcatcagctgaccttaaaacaagattatcctggagtatctaggagagcccatgtaattacaagcattctttaaaactggaagagggaggcagaaggttaagaaccagagacggtgggcacaatggctcatgcctgtaataccaatactttgggaggccagggtaggaaaatcccttgagtgcaggagttcaaggtcagccatggcaacatactgaggtcccatctctacaacaaaataaaaacaaaattcactgagtgtcacgatgcttacctgtagtcccagctactgggaaggctgacatggtaggattgcttgagcctgggagtttgaggctataatgagccatgataggaccactgaactccatcctgagtgacagggcaaggtcctgtttctgaagaaaaaaaggacattggaatcagggccctctccatcctgaggtgcctacaaggcatctctctctgcaaangagtaaacatcaccctccaactccttacagagtggagcaacaggaaaactccttcacctcatttctgtgctgcttgggaggcctggacagcccaataaccagctcctcgctgatgaagcaatcaggaaatggctcgagttgagctaaggagaatttggatccttcctttggttctcagtaggcagggtaggggccaggcatggtggctcatacctgtaatccttgcactgtggggggccaaggtgagaggattgcttgaggccaggagctcaagaccagcctggacaacatagcaagacctgggtggcatacacctgtggtccctactacttggtaggatgaaaggggggatct

SEQ ID NO: 584571 - DNA, 1023 bp, Homo sapiens
  misc_feature (149)..(149): n is a, c, g, or t
agacggagtctcggtcgcccaggctgaagtgcaagggtgcgatcttgggtgacagagtgagaccctgtcttagaaagaaaaaagaaaagaaagtgttaatccccctatgggaatctcctcttctcctgccctctctggaacctcatgtnagttcttcctcccactttcctgtatctttaacctatcccccacttttagctccttcccatcatcatttaaattactcaaacttcttctgttttaaaaacctctccctaaactcagggagaggtcttctgcacacacattgagccatctgctcttcctggtgccttctctacagcagcctgagccatgtctctaatctatgaatctcatcatgttactcccccatttacatcacttctccttgcctcagggattaagtccaaactccttaacagcccctgctctgccctgccttgcaaggcagcctcactgcttgcccctctccattacatctgctatggagtccaactgagcctcatctgccccttgaacgcacactctttctcctctgggagtctctgaagtgggtaatatcctctgcttataatatgcttccccttaaacctctactctcttcctagctagctttgactcctctgtcacttgtccgctttggcatcacctcctcatagaagacttctatgactcccgagattctcaggagcatggcaggtgaagtgctcctcccatgaatggatggagattagggagtgtgtgttattcatgcttaattcaccagtgcttagctgagtacctggcataaaatagttactgtggtggccaaagtaataacccccaccgccaccaattgctcatgtcctatgttacacagcacaattacataggaagggggaattaagagtgcagataaaattaatgttgctcatcagctgaccttaaaacaagattatcctggagtatctaggagagcccatgtaattacaagcattctttaaaactggaagagtcagcgttgtgggatcctctagaacacca

SEQ ID NO: 584572 - DNA, 1193 bp, Homo sapiens
  misc_feature (149)..(149): n is a, c, g, or t
agacggagtctcggtcgcccaggctgaagtgcaagggtgcgatcttgggtgacagagtgagaccctgtcttagaaagaaaaaagaaaagaaagtgttaatccccctatgggaatctcctcttctcctgccctctctggaacctcatgtnagttcttcctcccactttcctgtatctttaacctatcccccacttttagctccttcccatcatcatttaaattactcaaacttcttctgttttaaaaacctctccctaaactcagggagaggtcttctgcacacacattgagccatctgctcttcctggtgccttctctacagcagcctgagccatgtctctaatctatgaatctcatcatgttactcccccatttacatcacttctccttgcctcagggattaagtccaaactccttaacagcccctgctctgccctgccttgcaaggcagcctcactgcttgcccctctccattacatctgctatggagtccaactgagcctcatctgccccttgaacgcacactctttctcctctgggagtctctgaagtgggtaatatcctctgcttataatatgcttccccttaaacctctactctcttcctagctagctttgactcctctgtcacttgtccgctttggcatcacctcctcatagaagacttctatgactcccgagattctcaggagcatggcaggtgaagtgctcctcccatgaatggatggagattagggagtgtgtgttattcatgcttaattcaccagtgcttagctgagtacctggcataaaatagttactgtggtggccaaagtaataacccccaccgccaccaattgctcatgtcctatgttacacagcacaattacataggaagggggaattaagagtgcagataaaattaatgttgctcatcagctgaccttaaaacaagattatcctggagtatctaggagagcccatgtaattacaagcattctttaaaactggaagagggaggcagaaggttaagaaccagagacggtgggcacaatggctcatgcctgtaataccaatactttgggaggccagggtaggaaaatcccttgagtgcaggagttcaaggtcagccatggcaacatactgaggtcccatctctaataacatgttgcccagtcagtttctcttcttggattcagaagtctttgctgtgga

SEQ ID NO: 584573 - DNA, 425 bp, Homo sapiens
aaccttctgaccatcccagattcaacgtgattcttctgccgtcagctcccaagatagcttggactacaggtgctagccaccctgcccattttggtatttgtagtagagacggggttcaccatgttggccaggatggtctggatctcctgaccttgtgatctgcccaccttggtctcccaaagtgctgggattacaggcgtgaccaccacgcccaggctgatttccttttcttaatggccaagtagtattccattgtgtatatataccacaattattaagtccagtcctctgtcggtggacacttagtttgattccctacctttgctactgtgagtagtcctgcagtgaacatacaagtgcaggtatgtaattgacataatgatttattttccttcaggtaagatacccagtagtagggttgctgc

SEQ ID NO: 584574 - DNA, 258 bp, Homo sapiens
gtcgaccgctcgagagaaccccaatggcaggtttcttttcccgggaagccggtgcattaactggcgcgacgttgtgcgtactccttggggctcacccccatgcggcgcacgaaggctttcctcgggccattgggcgttcgaactggctttcagcgtcggatatcccaaccctatcaccgactttcactcgagccaggtcctgccgcagcgacgttaccttttcaataccgttcaattgctcaaactctcgttgagcct

SEQ ID NO: 584575 - DNA, 1422 bp, Homo sapiens
  misc_feature (149)..(149): n is a, c, g, or t
agacggagtctcggtcgcccaggctgaagtgcaagggtgcgatcttgggtgacagagtgagaccctgtcttagaaagaaaaaagaaaagaaagtgttaatccccctatgggaatctcctcttctcctgccctctctggaacctcatgtnagttcttcctcccactttcctgtatctttaacctatcccccacttttagctccttcccatcatcatttaaattactcaaacttcttctgttttaaaaacctctccctaaactcagggagaggtcttctgcacacacattgagccatctgctcttcctggtgccttctctacagcagcctgagccatgtctctaatctatgaatctcatcatgttactcccccatttacatcacttctccttgcctcagggattaagtccaaactccttaacagcccctgctctgccctgccttgcaaggcagcctcactgcttgcccctctccattacatctgctatggagtccaactgagcctcatctgccccttgaacgcacactctttctcctctgggagtctctgaagtgggtaatatcctctgcttataatatgcttccccttaaacctctactctcttcctagctagctttgactcctctgtcacttgtccgctttggcatcacctcctcatagaagacttctatgactcccgagattctcaggagcatggcaggtgaagtgctcctcccatgaatggatggagattagggagtgtgtgttattcatgcttaattcaccagtgcttagctgagtacctggcataaaatagttactgtggtggccaaagtaataacccccaccgccaccaattgctcatgtcctatgttacacagcacaattacataggaagggggaattaagagtgcagataaaattaatgttgctcatcagctgaccttaaaacaagattatcctggagtatctaggagagcccatgtaattacaagcattctttaaaactggaagagggaggcagaaggttaagaaccagagacggtgggcacaatggctcatgcctgtaataccaatactttgggaggccagggtaggaaaatcccttgagtgcaggagttcaaggtcagccatggcaacatactgaggtcccatctctacaacaaaataaaaacaaaattcactgagtgtcacgatgcttacctgtagtcccagctactgggaaggctgacatggtaggattgcttgagcctgggagtttgaggctataatgagccatgataggaccactgaactccatcctgagtgacagggcaaggtcctgtttctggacatggtggcacatgtctgtagtcccagctacttgggagactgaagtgagagaaccacttgagcccaggagtttgaggctacagtgaaccatgatcatgtcactgtactgtag

SEQ ID NO: 584576 - DNA, 95 bp, Homo sapiens
ctcgtggaagtcacatcgtctttaaaccctgcgtggcaatccctgacggaccgcgtgatgccagggagcaagggggacttgaaggtcaaataatt

SEQ ID NO: 584577 - DNA, 1364 bp, Homo sapiens
  misc_feature (149)..(149): n is a, c, g, or t
agacggagtctcggtcgcccaggctgaagtgcaagggtgcgatcttgggtgacagagtgagaccctgtcttagaaagaaaaaagaaaagaaagtgttaatccccctatgggaatctcctcttctcctgccctctctggaacctcatgtnagttcttcctcccactttcctgtatctttaacctatcccccacttttagctccttcccatcatcatttaaattactcaaacttcttctgttttaaaaacctctccctaaactcagggagaggtcttctgcacacacattgagccatctgctcttcctggtgccttctctacagcagcctgagccatgtctctaatctatgaatctcatcatgttactcccccatttacatcacttctccttgcctcagggattaagtccaaactccttaacagcccctgctctgccctgccttgcaaggcagcctcactgcttgcccctctccattacatctgctatggagtccaactgagcctcatctgccccttgaacgcacactctttctcctctgggagtctctgaagtgggtaatatcctctgcttataatatgcttccccttaaacctctactctcttcctagctagctttgactcctctgtcacttgtccgctttggcatcacctcctcatagaagacttctatgactcccgagattctcaggagcatggcaggtgaagtgctcctcccatgaatggatggagattagggagtgtgtgttattcatgcttaattcaccagtgcttagctgagtacctggcataaaatagttactgtggtggccaaagtaataacccccaccgccaccaattgctcatgtcctatgttacacagcacaattacataggaagggggaattaagagtgcagataaaattaatgttgctcatcagctgaccttaaaacaagattatcctggagtatctaggagagcccatgtaattacaagcattctttaaaactggaagagggaggcagaaggttaagaaccagagacggtgggcacaatggctcatgcctgtaataccaatactttgggaggccagggtaggaaaatcccttgagtgcaggagttcaaggtcagccatggcaacatactgaggtcccatctctacaacaaaataaaaacaaaattcactgagtgtcacgatgcttacctgtagtcccagctactgggaaggctgacatggtaggattgcttgagcctgggagtttgaggctataatgagccatgataggaccactgaactccatcctgagtgacagggcaaggtcctgtttctgaataacatgttgcccagtcagtttctcttcttggattcagaagtctttgctgtgga

SEQ ID NO: 584578 - DNA, 205 bp, Homo sapiens
tgtgctgggtgtgatctgtgtgtgtgctgggtgtgagctgtgtgtgctgggtgtgatctgtgtgtgctgtgtgtgatctgtgcgtgtgctgtgtgtgatgtgtgtgtgctgagtgtgatctgtgtgtgctgagtgtgatctgtgcgtgctcgctgtgatatgtgtgtgctgagtgtgatctgtgtgtgtgctcgatgtgatctgt

SEQ ID NO: 584579 - DNA, 1065 bp, Homo sapiens
  misc_feature (149)..(149): n is a, c, g, or t
agacggagtctcggtcgcccaggctgaagtgcaagggtgcgatcttgggtgacagagtgagaccctgtcttagaaagaaaaaagaaaagaaagtgttaatccccctatgggaatctcctcttctcctgccctctctggaacctcatgtnagttcttcctcccactttcctgtatctttaacctatcccccacttttagctccttcccatcatcatttaaattactcaaacttcttctgttttaaaaacctctccctaaactcagggagaggtcttctgcacacacattgagccatctgctcttcctggtgccttctctacagcagcctgagccatgtctctaatctatgaatctcatcatgttactcccccatttacatcacttctccttgcctcagggattaagtccaaactccttaacagcccctgctctgccctgccttgcaaggcagcctcactgcttgcccctctccattacatctgctatggagtccaactgagcctcatctgccccttgaacgcacactctttctcctctgggagtctctgaagtgggtaatatcctctgcttataatatgcttccccttaaacctctactctcttcctagctagctttgactcctctgtcacttgtccgctttggcatcacctcctcatagaagacttctatgactcccgagattctcaggagcatggcaggtgaagtgctcctcccatgaatggatggagattagggagtgtgtgttattcatgcttaattcaccagtgcttagctgagtacctggcataaaatagttactgtggtggccaaagtaataacccccaccgccaccaattgctcatgtcctatgttacacagcacaattacataggaagggggaattaagagtgcagataaaattaatgttgctcatcagctgaccttaaaacaagattatcctggagtatctaggagagcccatgtaattacaagcattctttaaaactggaagagggaggagaggaagaggtgggaggagaggaaaaggtgggaggagaggaagagtgggaggagatgtaaggtcc

SEQ ID NO: 584580 - DNA, 478 bp, Homo sapiens
  misc_feature (43)..(43): n is a, c, g, or t
  misc_feature (432)..(432): n is a, c, g, or t
ctggagcggtttcattgcctacattccgcattggaaaatagangcagggacaatgaagggaaaaggccgaggcatcagcgtgtgaagaccgcaaagacgatcccgagtacagttgtgaacagcattgctgctaggctcctcctgcagatcatctgaaatgaacctctcttattgatttttattggcctagagccaggagtactgcattcagttgactttcagggtaaaaagaaaacagtcctggttgttgtcatcataaacatatggaccagtgtgatggtgaaatgagatgaggctccgcaatggaactgtagccactgctttagcatttatcacttccttccttactttgtcttggtatactacatggcaaaatgggaaaggtaaggaaaatgactcggaaaatgtgcatgaaatgtactagggtttttncttggttaaggtgcctaaatgcttaggtcaaataccctgggcaatc

SEQ ID NO: 584581 - DNA, 1250 bp, Homo sapiens
  misc_feature (896)..(896): n is a, c, g, or t
gtcgacgaaactgaagcagtccctgccccctgaatgcacactctttctcctctgggagtctctgaagtgggtaatatcctctgcttataatatgcttccccttaaacctctactctcttcctagctagctttgactcctctgtcacttgtccgctttggcatcacctcctcatagaagacttctatgactcccgagattctcaggagcatggcaggtgaagtgctcctcccatgaatggatggagattagggagtgtgtgttattcatgcttaattcaccagtgcttagctgagtacctggcataaaatagttactgtggtggccaaagtaataacccccaccgccaccaattgctcatgtcctatgttacacagcacaattacataggaagggggaattaagagtgcagataaaattaatgttgctcatcagctgaccttaaaacaagattatcctggagtatctaggagagcccatgtaattacaagcattctttaaaactggaagagggaggcagaaggttaagaaccagagacggtgggcacaatggctcatgcctgtaataccaatactttgggaggccagggtaggaaaatcccttgagtgcaggagttcaaggtcagccatggcaacatactgaggtcccatctctacaacaaaataaaaacaaaattcactgagtgtcacgatgcttacctgtagtcccagctactgggaaggctgacatggtaggattgcttgagcctgggagtttgaggctataatgagccatgataggaccactgaactccatcctgagtgacagggcaaggtcctgtttctgaagaaaaaaaggacattggaatcagggccctctccatcctgaggtgcctacaaggcatctctctctgcaaangagtaaacatcaccctccaactccttacagagtggagcaacaggaaaactccttcacctcatttctgtgctgcttgggaggcctggacagcccaataaccagctcctcgctgatgaagcaatcaggaaatggctcgagttgagctaaggagaatttggatccttcctttggttctcagtaggcagggtaggggccaggcatggtggctcatacctgtaatccttgcactgtggggggccaaggtgagaggattgcttgaggccaggagctcaagaccagcctggacaacatagcaagacctgggtggcatacacctgtggtccctactacttggtaggatgaaaggggggatct

SEQ ID NO: 584582 - DNA, 553 bp, Homo sapiens
  misc_feature (507)..(507): n is a, c, g, or t
atgtagggataatctttatagatgcaatttagccctgccaaaagtctgtttataatgatgaatagtaaatgaagaaacttacattttgcattaccgaatgagcttgactttctcttttcccctgaataggaagggaaaaggccgaggcatcagcgtgtgaagaccgcaaagacgatcccgagtacagttgtgaacagcattgctgctaggctcctcctgcagatcatctgaaatgaacctctcttattgatttttattggcctagagccaggagtactgcattcagttgactttcagggtaaaaagaaaacagtcctggttgttgtcatcataaacatatggaccagtgtgatggtgaaatgagatgaggctccgcaatggaactgtagccactgctttagcatttatcacttccttccttactttgtcttggtatactacatggcaaaatgggaaaggtaaggaaaatgactcggaaaatgtgcatgaaatgtactagggtttttncttggttaaggtgcctaaatgcttaggtcaaataccctgggcaatc

SEQ ID NO: 584583 - DNA, 985 bp, Homo sapiens
  misc_feature (149)..(149): n is a, c, g, or t
agacggagtctcggtcgcccaggctgaagtgcaagggtgcgatcttgggtgacagagtgagaccctgtcttagaaagaaaaaagaaaagaaagtgttaatccccctatgggaatctcctcttctcctgccctctctggaacctcatgtnagttcttcctcccactttcctgtatctttaacctatcccccacttttagctccttcccatcatcatttaaattactcaaacttcttctgttttaaaaacctctccctaaactcagggagaggtcttctgcacacacattgagccatctgctcttcctggtgccttctctacagcagcctgagccatgtctctaatctatgaatctcatcatgttactcccccatttacatcacttctccttgcctcagggattaagtccaaactccttaacagcccctgctctgccctgccttgcaaggcagcctcactgcttgcccctctccattacatctgctatggagtccaactgagcctcatctgccccttgaacgcacactctttctcctctgggagtctctgaagtgggtaatatcctctgcttataatatgcttccccttaaacctctactctcttcctagctagctttgactcctctgtcacttgtccgctttggcatcacctcctcatagaagacttctatgactcccgagattctcaggagcatggcaggtgaagtgctcctcccatgaatggatggagattagggagtgtgtgttattcatgcttaattcaccagtgcttagctgagtacctggcataaaatagttactgtggtggccaaagtaataacccccaccgccgtcacccatctctaccaagaaagcgtggatacccatccacgaagttttgatattggaattcagattggctatcagcgacgccataaggatgtgttggcttgggtaaaaacgcagaagaactataacgatcgagacataggggatccctctagagt

SEQ ID NO: 584584 - DNA, 301 bp, Homo sapiens
ccaaaaagactacagcgggtgaaggctgaacctttgccagcgtctgcccagctctagggcagcggcgccggtacgtaggccccactcaagacaggctccaagacatgctctgccacgctgaccgaacttaatgaccttgctgagaacatgctgccaacgtacggccgcaagaggctgtgagcggggcccaggcacacacctgaggctgcccctccaagctccggaacggaacggctccagcaagatgctggggctgggaatgcagaggtgtgacagtgcgtccatcctcagcccttcactg

SEQ ID NO: 584585 - DNA, 342 bp, Homo sapiens
  misc_feature (342)..(342): n is a, c, g, or t
acacttcgtacagttacgctgtaccgcgtaacgtacgcgaggactcgaagtcctgagcgctcaagtatgtccgaatgtctagagaaggccatggaggtgccgacaacggcaccgaggagctgtctctgtagagcatagtgcctattttcccgtgacattgctgtcgacgctgagactgtcaacttgtaagtccttgaggagcataagaagcagcttacatacgtacctgagccctattacacagagtctagatgggaccggctactggagctgatgggatgctacagcaggcatcattggctgtgagcatggggtaccagctgtgattcatgcttaaccgtn

SEQ ID NO: 584586 - DNA, 321 bp, Homo sapiens
  misc_feature (180)..(180): n is a, c, g, or t
  misc_feature (202)..(202): n is a, c, g, or t
  misc_feature (209)..(209): n is a, c, g, or t
  misc_feature (243)..(243): n is a, c, g, or t
  misc_feature (299)..(299): n is a, c, g, or t
ccggctagggggagctcactgcagtgccacagagccgctgtagccagaccgtctctctagattcctcctctctgggcagggcacctctgaaagaaaggcagcagccccagtcaggggcttatagataaaacttccatctccctgggacagagcaccttggtgaaggggcagctgtgggtncagcttcagcagacttaaacgntcctgcntgctggctctgaagagagcagcagatctcccagnacagtattggagttcttaataagggacagacttgactccttaagtggggtccctgnaccccgcatggctccttggatg

SEQ ID NO: 584587 - DNA, 701 bp, Homo sapiens
gttgcagcttgctacttcaattgctgctggaggggaatgacttacggatgtctcaccagaaaaaacaccccggatccccgtcttccgctgcagtttccccggcaacagaggacgaggaggagccgagtctgtgtgcagcttcctacttcaaattgcttgctggaggggaaggacttacggatgtctccccagaaacaacacccggagcccccgtcttccgctgcacgtttccccgggaccagaggaacctgctggcgacaccaagaacaagaaattgacattttgctaaaggctggggagacactcctattatgaaaaaccaaaagaagtgggcagtagagcgaacgcgaaccatccaagggactcattgacttcagtcaaaaagttttcttcaacttgtggcctcagacacagattgtaactaatgttgaatcagtcctttgcttcccttcccccacgaccacgacaacgtatggacactctctaatgaagtgtatgggcagctgagtggtaaaacagggtttcaacaattcacctgccaaggatctcagcgcagtgggggatgaacccccacactgagcgactccacctctgcctacttacattgacaatggattttcacaccgggaatcacgacacagctctgcaacaggtctgatgctggtggaaggagacttcgcagctggtgccccatccgcata

SEQ ID NO: 584588 - DNA, 477 bp, Homo sapiens
  misc_feature (50)..(50): n is a, c, g, or t
cccggcgctcgtacgagataacggcagcgcagacgcctcgcgagcgagcnactagtgcgacagcgtctagacacagtgcacgacagagacagactgtgctctctcttgtgacacggggacacgtgtggcacgtgctctccgggaacacacagcgtgtgagaacacatatgaccactatgagacccgactatgaattccttcagcaagacctttctaacgcagaccagataccttagcagacgggctggaaccttagaccggtgccagagtctttgggggagtctgggtctccatttcttggcccttctttccaggtggctcttggcgggcattcccaggcagacaggacctttggccccagggcagcagacagatacgccacctggtcttcccgagaagaagcgcaagagcgcagacttccagacgggggacgggtctggctgcggtgtgctacgagcgcgatacctcgcagtatgc

SEQ ID NO: 584589 - DNA, 186 bp, Homo sapiens
cccccatgggggcttttgggtcggatccggcctccggtttttagcgtaggcggggggggggatttctttttccccctgggggcggttttggccgttgggcctttgggaaagggtttttaggccctcttatacaaggtgggcctccccgtttttgtccggatttcccgggtggaccccggggtccga

SEQ ID NO: 584590 - DNA, 648 bp, Homo sapiens
gcagccccgggcccgggagaccgtttgcttggggttgcacgtttgctttgcaaaagtcatacgttgcctctgatggagcgcaccagctgcttggggctgctcacagcaaacagcatgacgtcactcatgagaggagacccttgctcaacacaaggctcggtgagcactgcaaagtcacttcctgtagcagaagtaaaagaaaggacaataaaaggagagaacaaagaacgacatccatcccgctgacagcacactatagccaagtcaacttcgtcaaactgtccggtctatggtcgtaccttacccagatatttcctgtccagaccgtcttgatattttcacgattcgccatcgccgccggcaagtctgcattgggccaaaggtaaagtccaagtgccagttcgttgcaaatcggtcaaatgaacttgtgagaagcccatgagtctgttaggtttggctagtccctgctcagcccatctgtgtgagcgctgtaaaagtgtctaacagcgatgcgttaaaatgtgacgaaggctttgttaagaatcagatcttcagcgaatcctgagtgaatcttgacttggagggcagcaggaatttttaaatagagaagaacaacaaggatattcacccccaggtgactgttaatac

SEQ ID NO: 584591 - DNA, 101 bp, Homo sapiens
gcttgggcgaaacacttaacacgccacacaaactcttcagccagccgcataagccgcacaggccaaaatatcagccagcttagcacttgctacatagccac

SEQ ID NO: 584592 - DNA, 1201 bp, Homo sapiens
  misc_feature (5)..(5): n is a, c, g, or t
  misc_feature (14)..(14): n is a, c, g, or t
  misc_feature (18)..(18): n is a, c, g, or t
  misc_feature (937)..(937): n is a, c, g, or t
  misc_feature (942)..(942): n is a, c, g, or t
  misc_feature (953)..(953): n is a, c, g, or t
  misc_feature (964)..(964): n is a, c, g, or t
  misc_feature (1015)..(1015): n is a, c, g, or t
  misc_feature (1017)..(1017): n is a, c, g, or t
  misc_feature (1045)..(1045): n is a, c, g, or t
  misc_feature (1059)..(1059): n is a, c, g, or t
  misc_feature (1061)..(1061): n is a, c, g, or t
  misc_feature (1110)..(1110): n is a, c, g, or t
ggcgngcaggaacncaantacggctaggtacgaggctgggtggtggccagataggggagcggaggtggcggcggcggcggtagcggtggccttggttgtcttccagtctcctcggctcgccctttagccggcaccgctccccttccctcccccttcctctcttccttccttccctccccttccctttttcccttccccgtcggtgagcggcgggggtggctccagcaacggctgggcccaagctgtgtagaggccttaaccaacgataacggcggcgacggcgaaacctcggagctcgcagggcgggggcaaggcccgggccttggagatggagaattctcagttgtgtaagctgttcatcggcggcctcaatgtgcagacgagtgagtcgggcctgcgcggccactttgaggcctttgggactctgacggactgcgtggtggtggtgaatccccagaccaagcgctcccgttgctttggcttcgtgacctactccaatgtggaggaggcggacgccgccatggccgcctcgccccatgccgtgaacggcctttccaagggcggcggcggcggttacaacagctacggtggttacggcggcggcggaggcggcggctacaatgcctacggaggcggcggcggcggttcgtcctacggtgggagcgactacggtaacggcttcggcggcttcggcagctacagccagcatcagtcctcctatgggcccatgaagagcggcggcggcggcggcggtggaggcagtagctggggcggtcgcagtaatagtggaccttacagaggcggctatggcggtgggggtggctatggaggcagctccttctaaacagcacaatttaaaatgcctgggagtggctataggggtagctctttccaacagcccaagtggggtcaactcctaagccccaccccctcacanacacngcttccctgtnttgcccttggnggagccacttctaaggctgcttacccttgggggtgtcctctatttgctgcnanctctcttgtctctccctctgaagatggntcggcccacatacncnttgtggtgtcaccgtcattgatggactctattttttattattacttggncctggtcgtttttatactagcagatgtcttgtttcattggggttgggggggggagggaggtgacttgtgttttgaccaacccggtgtgggg

SEQ ID NO: 584593 - DNA, 1603 bp, Homo sapiens
  misc_feature (5)..(5): n is a, c, g, or t
  misc_feature (14)..(14): n is a, c, g, or t
  misc_feature (18)..(18): n is a, c, g, or t
  misc_feature (1339)..(1339): n is a, c, g, or t
  misc_feature (1344)..(1344): n is a, c, g, or t
  misc_feature (1355)..(1355): n is a, c, g, or t
  misc_feature (1366)..(1366): n is a, c, g, or t
  misc_feature (1417)..(1417): n is a, c, g, or t
  misc_feature (1419)..(1419): n is a, c, g, or t
  misc_feature (1447)..(1447): n is a, c, g, or t
  misc_feature (1461)..(1461): n is a, c, g, or t
  misc_feature (1463)..(1463): n is a, c, g, or t
  misc_feature (1512)..(1512): n is a, c, g, or t
ggcgngcaggaacncaantacggctaggtacgaggctgggtggtggccagataggggagcggaggtggcggcggcggcggtagcggtggccttggttgtcttccagtctcctcggctcgccctttagccggcaccgctccccttccctcccccttcctctcttccttccttccctccccttccctttttcccttccccgtcggtgagcggcgggggtggctccagcaacggctgggcccaagctgtgtagaggccttaaccaacgataacggcggcgacggcgaaacctcggagctcgcagggcgggggcaaggcccgggccttggagatggagaattctcagttgtgtaagctgttcatcggcggcctcaatgtgcagacgagtgagtcgggcctgcgcggccactttgaggcctttgggactctgacggactgcgtggtggtggtgaatccccagaccaagcgctcccgttgctttggcttcgtgacctactccaatgtggaggaggcggacgccgccatggccgcctcgccccatgccgtggacggcaacactgtggagctgaagcgggcggtgtcccgggaggattcggcgcggcccggtgcccacgccaaggttaagaagctctttgtcggaggccttaaaggagacgtggctgagggcgacctgatcgagcacttctcgcagtttggcaccgtggaaaaggccgagattattgccgacaagcagtccggcaagaagcgtggattcggcttcgtgtatttccagaatcacgacgcggcagacaaggccgcggtggtcaagttccatccgattcagggccatcgcgtggaggtgaagaaagcagtccccaaggaggatatctactccggtgggggtggaggcggctcccgatcctcccggggcggccgaggcggccgggggcgcggcggtggtcgagaccagaacggcctttccaagggcggcggcggcggttacaacagctacggtggttacggcggcggcggaggcggcggctacaatgcctacggaggcggcggcggcggttcgtcctacggtgggagcgactacggtaacggcttcggcggcttcggcagctacagccagcatcagtcctcctatgggcccatgaagagcggcggcggcggcggcggtggaggcagtagctggggcggtcgcagtaatagtggaccttacagaggcggctatggcggtgggggtggctatggaggcagctccttctaaacagcacaatttaaaatgcctgggagtggctataggggtagctctttccaacagcccaagtggggtcaactcctaagccccaccccctcacanacacngcttccctgtnttgcccttggnggagccacttctaaggctgcttacccttgggggtgtcctctatttgctgcnanctctcttgtctctccctctgaagatggntcggcccacatacncnttgtggtgtcaccgtcattgatggactctattttttattattacttggncctggtcgtttttatactagcagatgtcttgtttcattggggttgggggggggagggaggtgacttgtgttttgaccaacccggtgtgggg

SEQ ID NO: 584594 - DNA, 582 bp, Homo sapiens
cctgatgaatctgcttcacgtatgaaatagcctgagtataattaacctatgacccgttctttgcacactcgaagaggagttccccccaacactgtaaatgccaataaatggaaaaggtttaccttctttagcttccaaagttggaagggttaatttatcacggctaatttctacctgatgaactgcttcacggtgggggagggaaacttatttttatttgcctgatttaagtgttctgagaaacccaatctttgtttcttcttaggctgcacatggaacacaactttaccccgggttttggcactttcctttcctttcctttataaaaacacatgctcagccaactgcacccacgttaactaccacgtttggtaaattgttatgttaacacaattatgaacactctgcaatgctctttataaagcaaactaatttaataaaatcactgttgtgaggacttaaattttgtgttacctccccagagatactttttgagagtatagaacaccagcttcttgggagtacagttctttacgttctttactaaatcttaataaatgcctgacatagttacagctttta

SEQ ID NO: 584595 - DNA, 1071 bp, Homo sapiens
  misc_feature (5)..(5): n is a, c, g, or t
  misc_feature (14)..(14): n is a, c, g, or t
  misc_feature (18)..(18): n is a, c, g, or t
ggcgngcaggaacncaantacggctaggtacgaggctgggtggtggccagataggggagcggaggtggcggcggcggcggtagcggtggccttggttgtcttccagtctcctcggctcgccctttagccggcaccgctccccttccctcccccttcctctcttccttccttccctccccttccctttttcccttccccgtcggtgagcggcgggggtggctccagcaacggctgggcccaagctgtgtagaggccttaaccaacgataacggcggcgacggcgaaacctcggagctcgcagggcgggggcaaggcccgggccttggagatggagaattctcagttgtgtaagctgttcatcggcggcctcaatgtgcagacgagtgagtcgggcctgcgcggccactttgaggcctttgggactctgacggactgcgtggtggtggtgaatccccagaccaagcgctcccgttgctttggcttcgtgacctactccaatgtggaggaggcggacgccgccatggccgcctcgccccatgccgtggacggcaacactgtggagctgaagcgggcggtgtcccgggaggattcggcgcggcccggtgcccacgccaaggttaagaagctctttgtcggaggccttaaaggagacgtggctgagggcgacctgatcgagcacttctcgcagtttggcaccgtggaaaaggccgagattattgccgacaagcagtccggcaagaagcgtggattcggcttcgtgtatttccagaatcacgacgcggcagacaaggccgcggtggtcaagttccatccgattcagggccatcgcgtggaggtgaagaaagcagtccccaaggaggatatctactccggtgggggtggaggcggctcccgatcctcccggggcgagggcggggcgccgggcgagacagacgcttcaggccgggcgggtcacagtacgggtagggcgggaggaggggaaagccaggaggggggggcgccagggggcgccagaagcggggcgaaaacgaaagcctggcaaagggggggggcacgggcaagcaaaggcgg

SEQ ID NO: 584596 - DNA, 463 bp, Homo sapiens
cccggtaatcgcataaaacttacaactttacagtcagaggttcaattcctcttcttaacaagcatcccaagtcattgcaggttactcctagctacctgcagagctgtctagaaagcctgacatagagtgacacacagtgagaggtacccatgaagacgatggacatcacgtctagcatccatgacatcacacatttagctcaagtgagaagtcctaacattttaatattcaagatgacttttttatttggaagataattccagagacgggctgactttgaaggctgtgatagagctctcttctctcaatgaccagacctgaattgcattatcatactgcttgagaatctgcccatcagttgatggctaaagacacacatgagatacaacagactctccaccagtctttatctagatcagaattcttggcacagcttggctggattctctacttcacgatctta

SEQ ID NO: 584597 - DNA, 114 bp, Homo sapiens
  misc_feature (86)..(86): n is a, c, g, or t
ggcgatgcgcgtgcatgtggttgggactcccagacactttaacaaagcagcagcagtctgagagggttgtcagtggaccacctggnacccagactcaactcttgactcttgtat

SEQ ID NO: 584598 - DNA, 1561 bp, Homo sapiens
  misc_feature (1297)..(1297): n is a, c, g, or t
  misc_feature (1302)..(1302): n is a, c, g, or t
  misc_feature (1313)..(1313): n is a, c, g, or t
  misc_feature (1324)..(1324): n is a, c, g, or t
  misc_feature (1375)..(1375): n is a, c, g, or t
  misc_feature (1377)..(1377): n is a, c, g, or t
  misc_feature (1405)..(1405): n is a, c, g, or t
  misc_feature (1419)..(1419): n is a, c, g, or t
  misc_feature (1421)..(1421): n is a, c, g, or t
  misc_feature (1470)..(1470): n is a, c, g, or t
cgctatgtactatgactgttaaaagcagtgtacggcgatctggatgtagggggctggtgttcagttctctcggctcgccctttagccggcaccgctccccttccctcccccttcctctcttccttccttccctccccttccctttttcccttccccgtcggtgagcggcgggggtggctccagcaacggctgggcccaagctgtgtagaggccttaaccaacgataacggcggcgacggcgaaacctcggagctcgcagggcgggggcaaggcccgggccttggagatggagaattctcagttgtgtaagctgttcatcggcggcctcaatgtgcagacgagtgagtcgggcctgcgcggccactttgaggcctttgggactctgacggactgcgtggtggtggtgaatccccagaccaagcgctcccgttgctttggcttcgtgacctactccaatgtggaggaggcggacgccgccatggccgcctcgccccatgccgtggacggcaacactgtggagctgaagcgggcggtgtcccgggaggattcggcgcggcccggtgcccacgccaaggttaagaagctctttgtcggaggccttaaaggagacgtggctgagggcgacctgatcgagcacttctcgcagtttggcaccgtggaaaaggccgagattattgccgacaagcagtccggcaagaagcgtggattcggcttcgtgtatttccagaatcacgacgcggcagacaaggccgcggtggtcaagttccatccgattcagggccatcgcgtggaggtgaagaaagcagtccccaaggaggatatctactccggtgggggtggaggcggctcccgatcctcccggggcggccgaggcggccgggggcgcggcggtggtcgagaccagaacggcctttccaagggcggcggcggcggttacaacagctacggtggttacggcggcggcggaggcggcggctacaatgcctacggaggcggcggcggcggttcgtcctacggtgggagcgactacggtaacggcttcggcggcttcggcagctacagccagcatcagtcctcctatgggcccatgaagagcggcggcggcggcggcggtggaggcagtagctggggcggtcgcagtaatagtggaccttacagaggcggctatggcggtgggggtggctatggaggcagctccttctaaacagcacaatttaaaatgcctgggagtggctataggggtagctctttccaacagcccaagtggggtcaactcctaagccccaccccctcacanacacngcttccctgtnttgcccttggnggagccacttctaaggctgcttacccttgggggtgtcctctatttgctgcnanctctcttgtctctccctctgaagatggntcggcccacatacncnttgtggtgtcaccgtcattgatggactctattttttattattacttggncctggtcgtttttatactagcagatgtcttgtttcattggggttgggggggggagggaggtgacttgtgttttgaccaacccggtgtgggg

SEQ ID NO: 584599 - DNA, 357 bp, Homo sapiens
agcgaacattaataaatgtagcctcctccaactatgtgtcacttccaccatggtatcacagctatttattattcatccccacatatattctccagatttctttctgtctacattgcgtgtgcgtgtgtgtgtcgtatcgtttcgaaggagcgcatcaactcgaaaccatcacaccaatgttcatcacatgtagacgggagcgctttatatcatataaaggtttgcagcctagaatggtggccattatgacaggctgcagaagtgtgccctattgccaaggcaagaggcaggcccttccagggagggaagacgaagacaggactgagaaactatctgagttgactacatatacatact

SEQ ID NO: 584600 - DNA, 1449 bp, Homo sapiens
  misc_feature (5)..(5): n is a, c, g, or t
  misc_feature (14)..(14): n is a, c, g, or t
  misc_feature (18)..(18): n is a, c, g, or t
  misc_feature (1185)..(1185): n is a, c, g, or t
  misc_feature (1190)..(1190): n is a, c, g, or t
  misc_feature (1201)..(1201): n is a, c, g, or t
  misc_feature (1212)..(1212): n is a, c, g, or t
  misc_feature (1263)..(1263): n is a, c, g, or t
  misc_feature (1265)..(1265): n is a, c, g, or t
  misc_feature (1293)..(1293): n is a, c, g, or t
  misc_feature (1307)..(1307): n is a, c, g, or t
  misc_feature (1309)..(1309): n is a, c, g, or t
  misc_feature (1358)..(1358): n is a, c, g, or t
ggcgngcaggaacncaantacggctaggtacgaggctgggtggtggcggtgagcggcgggggtggctccagcaacggctgggcccaagctgtgtagaggccttaaccaacgataacggcggcgacggcgaaacctcggagctcgcagggcgggggcaaggcccgggccttggagatggagaattctcagttgtgtaagctgttcatcggcggcctcaatgtgcagacgagtgagtcgggcctgcgcggccactttgaggcctttgggactctgacggactgcgtggtggtggtgaatccccagaccaagcgctcccgttgctttggcttcgtgacctactccaatgtggaggaggcggacgccgccatggccgcctcgccccatgccgtggacggcaacactgtggagctgaagcgggcggtgtcccgggaggattcggcgcggcccggtgcccacgccaaggttaagaagctctttgtcggaggccttaaaggagacgtggctgagggcgacctgatcgagcacttctcgcagtttggcaccgtggaaaaggccgagattattgccgacaagcagtccggcaagaagcgtggattcggcttcgtgtatttccagaatcacgacgcggcagacaaggccgcggtggtcaagttccatccgattcagggccatcgcgtggaggtgaagaaagcagtccccaaggaggatatctactccggtgggggtggaggcggctcccgatcctcccggggcggccgaggcggccgggggcgcggcggtggtcgagaccagaacggcctttccaagggcggcggcggcggttacaacagctacggtggttacggcggcggcggaggcggcggctacaatgcctacggaggcggcggcggcggttcgtcctacggtgggagcgactacggtaacggcttcggcggcttcggcagctacagccagcatcagtcctcctatgggcccatgaagagcggcggcggcggcggcggtggaggcagtagctggggcggtcgcagtaatagtggaccttacagaggcggctatggcggtgggggtggctatggaggcagctccttctaaacagcacaatttaaaatgcctgggagtggctataggggtagctctttccaacagcccaagtggggtcaactcctaagccccaccccctcacanacacngcttccctgtnttgcccttggnggagccacttctaaggctgcttacccttgggggtgtcctctatttgctgcnanctctcttgtctctccctctgaagatggntcggcccacatacncnttgtggtgtcaccgtcattgatggactctattttttattattacttggncctggtcgtttttatactagcagatgtcttgtttcattggggttgggggggggagggaggtgacttgtgttttgaccaacccggtgtgggg

SEQ ID NO: 584601 - DNA, 806 bp, Homo sapiens
  misc_feature (5)..(5): n is a, c, g, or t
  misc_feature (14)..(14): n is a, c, g, or t
  misc_feature (18)..(18): n is a, c, g, or t
ggcgngcaggaacncaantacggctaggtacgaggctgggtggtggccagataggggagcggaggtggcggcggcggcggtagcggtggccttggttgtcttccagtctcctcggctcgccctttagccggcaccgctccccttccctcccccttcctctcttccttccttccctccccttccctttttcccttccccgtcggtgagcggcgggggtggctccagcaacggctgggcccaagctgtgtagaggccttaaccaacgataacggcggcgacggcgaaacctcggagctcgcagggcgggggcaaggcccgggcctggcgcgactgagagacagccacacgccgtgtatacgtcttgttcacctcggacgccgagcgcgtcaaactggtggcacgacccgacgctgacgttccggtgggccgtagccgccggggcccctctgattgacgcgccccttatgggagacccttcttgaactggaccctgtcgatgcgctggcatgggctgacactcctccagtgacccaacgcagcgtccgcggattagcgcaacatgcgcgtctcggcacgcaccgtaccgtcccgaacgtagctggcagggcaggggccgagaccgcacggccactgggcacggacacgccgcccatggccggcggggagccggcgagcaccgggtggcacgcctcgacacgccgagggcgaggctgacccccggggagggattacccgggcgcggcgccgcgctggacccacgcccaagggacgccgaacgacccgcccggccgcaaaggcccttacac

SEQ ID NO: 584602 - DNA, 313 bp, Homo sapiens
  misc_feature (108)..(108): n is a, c, g, or t
  misc_feature (114)..(114): n is a, c, g, or t
  misc_feature (234)..(234): n is a, c, g, or t
  misc_feature (253)..(253): n is a, c, g, or t
  misc_feature (270)..(270): n is a, c, g, or t
  misc_feature (280)..(280): n is a, c, g, or t
gagggaaattggctcaaaaatggacaacctggcaactgtgagtccctgcttcccgacaccagcctcatggaatatgcaacaactcctgtaccccagtccacggtgttntggcancagggacacctgggccaatgggccatttggaccaaaggtggggtgtggggccctggatggcagctttggcccaaacatgaaaacctcgtgttcctcccccctctattactgtttccccanagctgttttagctcaaatntgttgtgtttttgagtntagggtctgnacccttgtttataataaaagcaatcgtttggga

SEQ ID NO: 584603 - DNA, 349 bp, Homo sapiens
  misc_feature (7)..(7): n is a, c, g, or t
  misc_feature (144)..(144): n is a, c, g, or t
  misc_feature (150)..(150): n is a, c, g, or t
  misc_feature (270)..(270): n is a, c, g, or t
  misc_feature (289)..(289): n is a, c, g, or t
  misc_feature (306)..(306): n is a, c, g, or t
  misc_feature (316)..(316): n is a, c, g, or t
tgagaangcgcgattattaataatggatatatgactacacactgaaagattacacgcgtcggacacaggcactgtgagtccctgcttcccgacaccagcctcatggaatatgcaacaactcctgtaccccagtccacggtgttntggcancagggacacctgggccaatgggccatttggaccaaaggtggggtgtggggccctggatggcagctttggcccaaacatgaaaacctcgtgttcctcccccctctattactgtttccccanagctgttttagctcaaatntgttgtgtttttgagtntagggtctgnacccttgtttataataaaagcaatcgtttggga

SEQ ID NO: 584604 - DNA, 316 bp, Homo sapiens
tactggctgggagcagtacactgatgaagaattcaggccccactggttcagcagactttttgcagttattggagccctgttcagagcagtgacctgaaggactgcacttttatcaggacttttaatactcaaatgatgaaaagagctcttgagatgtggaagatataaatcatggggctattggtgaagactgaaaaaggatgtttcactcctgataagacttactaggcagctggtggcaccacagcttcctttgattttgtggctatctggataaaagttgatgcgaagacctgggaaacagtttggtgcaaaa

SEQ ID NO: 584605 - DNA, 323 bp, Homo sapiens
  misc_feature (21)..(21): n is a, c, g, or t
  misc_feature (172)..(172): n is a, c, g, or t
  misc_feature (236)..(236): n is a, c, g, or t
  misc_feature (249)..(249): n is a, c, g, or t
  misc_feature (304)..(304): n is a, c, g, or t
  misc_feature (310)..(310): n is a, c, g, or t
cccgatgtgtgccaagcaatntttaatgagaaaaatgtgtgtgtccttagtgagaaggaagacaggaagcaaataaggagtgttaagagccagaaagaaaatacagcagggtatacaaaaatggaacatcatggggaggtggtcaggccaggtaccgcctcctctgaggagntgctgattgatgagagttctgcagggagtgagcagggagctctccgagggcctgcaggagtgtntgagcagcagganggaccagtgcccctcctcagccaaaggaacaactcagagtgacaggagctgagtncgaganggggcctgcgatt

SEQ ID NO: 584606 - DNA, 807 bp, Homo sapiens
ccgcacccccaccgactaatatcacttcaccatcacgacacacccgcccttacttgggaactacagcacaagatagactccacctactatggcaggaaatactaaagaatgaaaaacacttagaagaaatcaaaataaacagccaagatttttatgaaaaagaaaaactccttagtaaagagaccagtgaggaactcctgcctctaccagttcaaactcaaattaaaggccatgcctctgctccatactttggaaaggaagaaccctcagtggcttccagccgccctggtaaaacctttcacgcaagatactggatgccaccagatggcacgagccacaatgaatgaatgcattacggccaaatccttcacatgcctacggatgagactatcctaacacctgacaaaagttacaaacgaacgacatcgtcccagacctccgccgccctctcccgccgtagaccatgatagccctccctcctcgcgacgtgcacgttctgaacctctctacctacatctgctaactccaatactggcaaatagacgcaaacgaacaacgccccttcatgttgacccgaggatactcccacacacattgaccccctccacccggactccactcacccgtgagtgaactggccggcccttacagtagtcacgccgtcttgcgcgcattttctgccaaaggtcacagccttattctctctttacagcttcccgaccggcacacctcggtcgcacgacactattatccacaaacaccaccttacacgttcctagtacaccaactcatatcatccctgacctc

SEQ ID NO: 584607 - DNA, 214 bp, Homo sapiens
  misc_feature (161)..(161): n is a, c, g, or t
aatctatctattaactaacttcgcattccgctaacggtcaggccaatccgctgtgacgccgggactcaagcacgagggtttcgtccttttctaaatgcccccaacgcggcctgttagacatagtccttgctacaccttttttaaatttttattccctaaanatgtgggagtcggacccaaacatgagggttctggggccttggcccttatcgaa

SEQ ID NO: 584608 - DNA, 836 bp, Homo sapiens
gcccggcgactccaccgacccgaatgtggggcggcgccggaccaaccgctagacttgaacgattcttctatttatagtcaagcttcattggacaacacagatgatgaacaaccaaaacaaccaattaaaactggcaatggtattgaaaattcagcaaaacataggtgtgattgcagcatttacagttgcagtccttgctgcgggtatctcctttcattacttcaatgattagggtgaggcacaaagaatttcttgatcatccggagaacattgacagacaattatgaatgggtggagatgttaacactccatctgtatttaaaacactagcaccgcagatctgctgacatcgatgcctaatataagaaaacaaccccaaccagcacacactgcgcggccaccggggggaggatgcggggcctcgttggcctcgaaaggggagatcgcacgcccctggccttcaataagtgttaagtcttgaccctcgccgactgactcattccgcgcgcccgcgggcccgatccgcctcatcatatattcactccaccgccccacacccgctttccccccaccatccggcaactactggaagcaactggtgctccaattcccagcaaccgccccccgtgcggtcacacccccacccccttgcggtgcaccctctcataatcccccttgtccccgttcagttcctcctaccgtgtatcctaagcgtgagaatcccaaccgcctatacaagaaccgtgaccctctgattcgcccaggttcgatcgccactgccacctcccattctgagcggacctaggaccgacaacccgctaaattaggcagcccag

SEQ ID NO: 584609 - DNA, 392 bp, Homo sapiens
taggtgactctagcaggatcttttcggtttgtgcatcctcaactcatcatctatgttaggtatttcccctaatgctatccttctctagccccccatctgctgacaggccctggtgtgtgattttcccctccctgtgtccatgtgttctcattgttcaaatcccatttatgagtgagaacatgcagtgtttggttttctgctcctgtgttagttcgctgagaatgatggtttccagcttcatccatgtccctgcaaaggacgtgagctcatccttttttatggctgcatagtattccattgtgtatatgtgtcacattaagtttatcccgttcatcccatcagtgggcacttggctagcttccaccattctcggctatagagaaactaataca

SEQ ID NO: 584610 - DNA, 309 bp, Homo sapiens
  misc_feature (46)..(46): n is a, c, g, or t
  misc_feature (247)..(247): n is a, c, g, or t
  misc_feature (261)..(261): n is a, c, g, or t
  misc_feature (277)..(277): n is a, c, g, or t
  misc_feature (300)..(300): n is a, c, g, or t
aatctgaagtggggctgagctcgtagactggccggcgcatccgggngccggacgtcgcctcggaaggccaacgccaggctgccgttgaccagcggcgggttgcggaacttgacgtggtagtcggtccaccaggcgatgcggaagcggtcgagcggcacctcgacgtagggcccgccgctcggcgcttggtgcaaagcgagaaggagtcgttgaagaggctgttggcgatggcgccgcagcgaatcgnggcaaggccggccnctctgcgctggtaagngggcgcactcgttgacaagggtngcgcacgcc

SEQ ID NO: 584611 - DNA, 201 bp, Homo sapiens
ctccacaaaaagagtaatgggatatccaataaactgagaaagattcttcacaatctccgtgattcttcgttcctcacaagtactcagtttggtcttctttcaggtgtaggataacttttgatccacgacccataggttcacctgtgcctgccctcactgtgaatgatccccctgctgaggactcccaaggtcgcctcacgg

SEQ ID NO: 584612 - DNA, 314 bp, Homo sapiens
aaactttgccctttattttataacaaaacagcccctgaaccaggtggaaactccggttatagcctgcaatgcgggcgggggagcttttggcccccccaaagtgtttattaacttgggcaaaaaaaccaaaaccggcccatgcggtttttgtggggtcccgttcaaacagccccccccctaaagggtttggccccccgggggtcccccaacctccttttagcatttccccggggaaactgagcccgtgaaactccctggttttgtgccaaggggattcctggtgcttaataaaaggggttgctgtccaggctgta

SEQ ID NO: 584613 - DNA, 509 bp, Homo sapiens
  misc_feature (13)..(13): n is a, c, g, or t
  misc_feature (15)..(16): n is a, c, g, or t
  misc_feature (22)..(23): n is a, c, g, or t
  misc_feature (37)..(37): n is a, c, g, or t
  misc_feature (45)..(45): n is a, c, g, or t
  misc_feature (49)..(49): n is a, c, g, or t
  misc_feature (78)..(78): n is a, c, g, or t
acctacaggatcntnncttacnncccaaactctaccntccactgntgtncccaaatgcagtcctcaggttgcccagcnacacacattcacattttagagccagacaagcacacttgattcaatttgttaactaatccttcaattagttaatcagtccagagctacaacaacgtgtgctgattgaaccaaactaaatacttggaggatgcaggcattgatcccgctacccctcgcatgctaagcaagcgctctttaccatttaagataatccctctgtgcctccaacaagaagtatgaaatctcaatgaccgcactgccaaatccctcgtccataagacaggatactttttaaaaagtatgcttgcttcaactgtctaaaagtatttttcatggtaagtacagtaagggtggaagtagtgactgcagtaagcccagtggtggaaatagttgtattgtggggtaagtatccagagctaacacaaatgtgtgctgattgaactaaactaaat

SEQ ID NO: 584614 - DNA, 399 bp, Homo sapiens
  misc_feature (361)..(361): n is a, c, g, or t
  misc_feature (390)..(390): n is a, c, g, or t
ataaatcattctatcctggcacatacctcctgccttcactgattggacaggctctttcttgcaagattcttattacaactttttccctgcggtccatggtttccgatgcatttgacatgttttctttaatgtgatcagaacttcttggaatctacactggcttattatgactgacactatttctttcacggactgcttttcttctgcacaattgcaacttgccatctattttagggcttttaaccaaaagccagggttactcacgtttagatcattcagattagtgtaaactatcacaatgaggaataacatgctcacatactctctccagcagacaaacactagctctatctaaattcancagtcctgatcacttatatgtttagctgnttcagaaaa

SEQ ID NO: 584615 - DNA, 978 bp, Homo sapiens
  misc_feature (475)..(475): n is a, c, g, or t
cttttttttattgttttaaaggtaaaagcttcttttaaagaaaagaaaaataggtctgggcgcaggggctcacgccggtaatcccagcactcggggaagctagaggcaggcgagaatcaccgtggaggctcagggtggttcgagaaccagccgtgaccaacagtggagtgaaaccccagtctctacaaaaaagtacaaaaaccagccgggcggtgggtggcagtgcgccgtggtaatcccagctattcgggagcgctgaggcaggaaaatctgcttgtaaccgtgggaaggcggaagcgtggcaggtgagccaaggatgtgcgccacgtggcattccagccgtggggcaaccaaggaggcgaaattcgcaatcttccacagaaacaacaacaaacaaaaacacatatgagacatggaggcgtgtgggagctaacaaggacatttaagaaaggggcccacacacaaatatcgcagngcacatataacctctataacaaatgtgttaacaaggtgggaggatcgagaacggtggcccagcgtgacctctctacataccgctcgagaaagacgggacgacaaccgagcaacaatatatcaacacgggaatcacccaagagatcaagagacgaaacaggaatatacgagcacaacacccaaagagaaacaaactcaacgtaaaccacacagagcaagacccagcggaagccacccagagggaagcaagagtcacacatacacaagtaagtcaccaatacgaaaaccgcggggacataacaagtcaacacaatagcggcacccgacataccgcacactgagcacacccacccagcataacacaaaagccagaaaggtaaaaaagggggggaagacaaacaaaggagaaaaagtaaacgcactacacacagcgcaaaaccacgattaacaccacgacaatcagcagggaaatcccggaaggaagagaggcgaacaagaaaaaac

SEQ ID NO: 584616 - DNA, 427 bp, Homo sapiens
actaagcaggcatatttcatatcaaaatagtaaagaacttcctttccaaaggcaggacttgcttctgtgaggtactgagccacccgtccctggaggaaagcaagaacagagcagatcagagcccaggcagacatcttggatgatgggtgagatcttcctggggttcttgctgaacctgctgacaaggggcagctctctctaaatgccacggagctggaaggctgcagcctggaacttgctgcagcccacccaggcaagcaagagatgacatagtttcagcacctggatctatggcacccagaagccagatccaaccccccagcccttatctttgaccttgagccagtttgaactggtaactggaagtcacttatctaccagattcaactatcaggatgttactaataaaaaatgactccaaaaaaaa

SEQ ID NO: 584617 - DNA, 338 bp, Homo sapiens
ggtcataaaatggaatattaaaaggggttttgctggagaaggaaaatgcggtaaatgtaatgcccaaaccaaagctgtggagctggaagtttgcccagcggcttccccgggagaaggaggccctgggggccagcggcttccccgggagaaggacgccctgagtgggcggggaatggggggccctctggggggcgggggaggccccgcccgggatttgagcggtagggacccggggggggcccggggaccggtcccccccgaacgggatgggggggggccccgttacccccgggggggaaaggttaaaggcccccccgggaagaaagacccagatttta

SEQ ID NO: 584618 - DNA, 384 bp, Homo sapiens
tgaggtggggtcgggatgagtctgtggtgtccttgtgaatgaagctacgagggtgggtgctccagctcggagtatgagagagagagagggtgtgacaggaggtgatgtgtgtcgtaggggatggcttcccatcctatggtgtggcagctggagcagtctgtgcagatcaggatctggtggtcgtgtgagagggtgggaccgtcttcagggaaggtggatctagcaagatgatgccaaagggtacttatgccatcaggagatactgacgagtccttccgccgctagacctacggagagataaccacaggctgtgtacctgaagagcacccgtgcgggcaggagggcggaggacatgtggccttcacgaccaggacatgttgagac

SEQ ID NO: 584619 - DNA, 1396 bp, Homo sapiens
taaatttataaaattttatattttttttatatattttaaaaaaatttatacccgcggtgcgcgtgggtgtgggtagccgggtgcctaaccttttgtgtggtgacccatttaaacccacacaaatcccccgtgcgcataagagactttcttttctgtgtgttaccaaatatactcaaatctccatatatcaccaacatttgtggaagtgtgtggtaaattttttatatgtgtgtggtgataaaaacaccacccaccccgagagagaagacgctgtgggctctctagaaaaacaaccatgttggaggtgtcagaactctcctataggagaggtgtcacaatgagtgtggacagagagagcgcacgtatatatatttataatttctagaggcgcatagagaaaaaattttagccataccatagtgtgtgtgttctctttgtggaagagtgtcctatatatatagcgcatagagagagggcgtataaaaaaagtgtcacaaagcgggcggagaaaaaacaaaaaaaagaaaacaaaaaacaaacaaacacaaagacaaaacaaacaacaacaacaagacaaacaaagaggagaggggaggcggagcgcgcatgcagaggaaaaacactcccgcacggggagggcaccaaaaaaataggaacgaaagcaccccgcgcttatgtagtagagaaacgaacagggggggcgcacccaataaaataggaccagcgcgataatataaaaaacaccaacagaggaagcgcgaggcggggcacgaaaaaaaaaaaaaaaccagcgagaggaagaggacaaaaaaaaacgaaaaaaagaagggacaacaacaatcaggagaagaaacgcaccacacaaaaacacgggggggaggcagacaacaaaaaggagggaggaaaaaaaaccaccaaagaaagaaagtaaaagcacaccaagagaagaaaaaaacaacacacaaccactcagacataaaaaagagtagaacaaaaacacacgcgacaacaaactaacacggcgcgccaaacaaaacactacacacaacgaagcggagacacatccacaaccaaaaccaatatcacccgacgaggcagcagagaagaatataaccacacgacaagcagcaacaaggccgacgcgacgaacacaagacacacgaacacaaaacagcacccagaacgaccccagataaggtaccaggacgtcaggacagagaaggtagacgagagaaggcaaaaagacaaaagcaaaagaggtagagggagcagggtgaaagagaggagctggcgaggaacagtcagcaagcggagagagagagtatgaaagctgcactaggggaggagacggtaggaaaggggaagaggagagagggacggtagaggaatggccagc

SEQ ID NO: 584620 - DNA, 866 bp, Homo sapiens
  misc_feature (5)..(5): n is a, c, g, or t
  misc_feature (113)..(114): n is a, c, g, or t
  misc_feature (123)..(123): n is a, c, g, or t
  misc_feature (126)..(126): n is a, c, g, or t
  misc_feature (132)..(132): n is a, c, g, or t
  misc_feature (135)..(135): n is a, c, g, or t
  misc_feature (149)..(149): n is a, c, g, or t
  misc_feature (151)..(151): n is a, c, g, or t
  misc_feature (154)..(154): n is a, c, g, or t
  misc_feature (156)..(156): n is a, c, g, or t
  misc_feature (159)..(159): n is a, c, g, or t
  misc_feature (205)..(205): n is a, c, g, or t
  misc_feature (294)..(294): n is a, c, g, or t
  misc_feature (330)..(330): n is a, c, g, or t
  misc_feature (336)..(336): n is a, c, g, or t
  misc_feature (340)..(340): n is a, c, g, or t
  misc_feature (462)..(463): n is a, c, g, or t
  misc_feature (465)..(465): n is a, c, g, or t
  misc_feature (517)..(517): n is a, c, g, or t
  misc_feature (587)..(587): n is a, c, g, or t
  misc_feature (794)..(794): n is a, c, g, or t
  misc_feature (845)..(845): n is a, c, g, or t
attanaaaacagccccctggaaccaggtagccaaggaagcggccgcgcctggggggcggttggggttgggggggaaactgcgccttcctgacaaaggtcgggggtcggggtgnngggagggcngcnggggtnggnggggcgaggcgggntnttntngcngctcggccataccagccactgaggtcctaactgcagccaaggggcngtactgcacacgtcgctcaccctctgtgctctgttccccacagagcaaacgcacatggcaacgttggtccgctcagccactggttctgnggtggaacggtggatgtctgcgctgtgacatcagcngggtgngtgncaacgactgggggtgccgctgacccggggctggggaaggggactcccagctcagacaggcttggctgtggtttgctttggggggggggtgaacatcacgggggacggctcatgtcagccccnngngggtgggctggcccctggtccccgggctccttctggccctgcgggcgttggngggcctcaacctgctgccgcttctccttggcccgggtgatggccgtctgggagagcctgcggtagaggtncacagccagcggagagtcgtcattgccgggtacagggtaggtgatgaggcaggggttgcagttggtgtccacgatgcccactgtggggatgttcatcttggctgcgtctctcacggccacgtgtggctcaaagatgttgttgagcgtgtgcaggaagatgatgaggtccggcaggcggaccgtggggccaaagaggaggcgcgcgtnggtcagcatgccgcccctgaagtagcgagtttgggcgtactcgccaaaatnacgggccatgttctcaatcag

SEQ ID NO: 584621 - DNA, 829 bp, Homo sapiens
ctggttttaataaacccgcgccctcttttgctgccgccctgccatggtcgccgctgcggggccccactccccccacgcgctggtgtggcgcccccccagaagggagacacccgcggggccgtgttaccccctcttcgcggattcttttcactgtatgcgccgccggggcgcggatgatacacaattttttcccacacgcgtgtacacgcctcttgtgccccctggggccctcattgttgggggcaccgccctatgtggtgacccaaccgttgtgtgctcactcagcagaacgcagagcgtggtgtttgcccgcgtctcgcggagtttttcccccgggatattttgttgctcgtgctccccacgcctctcctccgcagtgagtacactcagcgggcgtatatcaccctcacgagggttgtttggggtgcgcgcgctggtggtgtctctcccccccgcggggctcctcgtttataattttcaggtgtcgagcgtcttgtgttgcaccacaaagtttgtcacaaaaaacagaggtggtgcttgtttggcacccagagaggtatagtatctatgatgttcccgtgggggcacccacagatgttagaatggtcgccctttataaaccccttccctggcccaccatgaagccactttttgtgcaccccaaagagtgagagtctgctgcccccccccccctgttgctgaacaaaagagggggggacccaaccccccccctcccccccccctccccccccccacacgggtgtttcctttgccccttttttttgggttttgggtttttttttttaaaacccccttataaattttttca

SEQ ID NO: 584622 - DNA, 248 bp, Homo sapiens
tacctgtggggggagcgggggtaaaggaaggtcagtgaaaagctgggatgtaactacgctataagatgctcgtagacttaaatagcatcgtgccccgcctttcttctctctttattcacttttttttttttgaaacagtgttttttggtttggtttggttttggttcctggtatttggttttgaaacaggctatagtaaagcagcacatctctggctcattacagtctctgcccctcagagagagcgt

SEQ ID NO: 584623 - DNA, 174 bp, Homo sapiens
cctgttttgattttccccaaaattatgatgggccttagttcagaaaacccaaccttgctaggagcggtgcctcacgcctgtaattccagctttttgggcggctgaggccggggggctgctttaacctaggagttttagatagcctgggcagtatagtgagatcctttttttcca

SEQ ID NO: 584624 - DNA, 250 bp, Homo sapiens
gtcagaccaaataatgagttcaaagctctaataagtctcccggcaaagaaaagcctgggacctgatggcttcactgctgaattctatcaaacatttaaagaactaataccagtactactcaaactattccaaaaatagatgaggaggggtaacttccaaactcattttaaaaggccagtattgccttgatatcaaaactagacaaatgcacatcaaagaaagaaaaaaaaagtcgacgcggcctgaattt

SEQ ID NO: 584625 - DNA, 1061 bp, Homo sapiens
tcctacgagatgatgatgcagtgtgtgtcccagcatgtttgtgaccaccccactgccatgtccatctcaatgctgctgccatggtcccagttatgtgtggcatggtgcaggccaagtcacagtgtgtgttgctagcagctcccatatgggcaagcatttacaacagcaggcacagggctgcttgggcattcttctgttggattaatccctcacctcctgggacgatgtggtttatcttgtgaggtgctgtaacctgctggcccacttcatcaatgcctacctggtggatgacagcttcagccaggccctgtgcatcctggagctcataccaagttctgttgatggggcttgcagtgagccatgctgacctacccctatcctgctagttaggcgacctccatggctgtgcaccacacttgcgggctgcaagctggagctccccccttactccccagtgttcaaatcctggattcactgactggaagtacctgagtgtgcagtggccagctcttccgaggctccagccttgccttatccagccgggatgtccatcaggatcatgctttgccctggagtaacctgacatcatctcaacaaacacggtctccaccctggccaccgtggtgtgcaagctgaacaagcttggggccaccttgcccgcacgcatccagacccaacaaacacaccagcttgtgctccaggccagagcggggcttacagttcccatcttggccatggtgtcgtgtacaggatgtgaggagctgaccgggggcttgagaccgcaccccaccagtgctgtcgccaacccgcgacacaccatacgggcaaggtcaggccaagaagacgagcgactgggaaaagatccgcgccaaagcatcggcaaaatacgcggcgagcccggacacagaggcaccaaggagccaaaggacagggcgccagggggcccacaggatggaagtaggacaagtgaacactgggggcgaaaccgcacgccgggcacgccaccaagacagcccgcggcgcaagcggggaaaaagtgaagcacagcaacgacggacagg

SEQ ID NO: 584626 - DNA, 341 bp, Homo sapiens
gctgcattactacagagacctgacgacggctgaatacaaatgatgtggtaaatctataactcatctaacgttctataacatacccagctgtagtagctattcagctctcgcaagaaatccttcatcatagccacactccacagagtgggataaaaacacaaaaatcttggctatccaaagtccaagaatattggtcctagataaagcatcagatcagaaaaacaggaactgctcaagttaattgaagcagacagaaatttaatacagggtgttagatataaaactgtgggaagggctgaaggaagcaaagagtgtgtgtagtaaaccccgtcgttaagctg

SEQ ID NO: 584627 - DNA, 136 bp, Homo sapiens
tcctcctcgctgttcaccttgaaccggccgaaggagctgaagcggttcagcaggtacagcatcacggccaccacgtggcggcgacgacccattcgaacgactgccctatcaactttcgatggtagtgggtaccgag

SEQ ID NO: 584628 - DNA, 810 bp, Homo sapiens
  misc_feature (293)..(293): n is a, c, g, or t
accctaagtaatcaagtggccatggtccaagtgataagtggagcatacctggtatggcagtgagatggtccccatgtcaataggtgagtggaaccacattctctagaagaatctttgcgttgaggtggtcccgtccagttctatgtaaactcatcactgcttcatccacaactatttcatatgggctcttacatccatagcgcactctctctagagatggatatatactcatatgtctcacactatgatgagcgttatgagtgagcccgtattcacacagacagtgtctgtgnacatgcatagtgcagtggaggaccagccccgttcaacacatgaaatgttgttatcattcttggcaagtgtttatcgtgtgatgcgaatcatttgcacagtatcaccttcaatatgtgtctgtcgtacagattcagaatgccatctccccttaaagtagagaagcacagtgtagtcattcctggtgttggaggcacatcaatgattctgtgcatgttatgagagtcgtgtaatgagtttgtagtagacgcgattattatagtcacagtacgtgagagatctcatccacgtgtaggcaacgtgtgtcatatggctcagatttttgttcgtcatatagaactccacggcagatgtttgaaagatcttcatatgctgcttctcgcacggcagagtagatctgtcatactagaagtgcattgacgagcagccacctgcttggtagttcccatgtaggacaactaacaaagctgcaatgatggtggtgctgcatatgaacctgcattcatgaccagtgatgac

SEQ ID NO: 584629 - DNA, 216 bp, Homo sapiens
ttatcggtgcagttcacttgaccaagagcagaataacggtacttctgaaccaactcctcagatatagcaacttcagaatcccagatatgccctgattggggtggcctctcatctggattccgggatagctgggatcacacccttgtatatcctaaagcggagggtcacagagagcagggccaagggcggcggaggggggtccggagctcgaattcc

SEQ ID NO: 584630 - DNA, 418 bp, Homo sapiens
agtttgaggcccaactgggcaacatagggagaccccatttctttaaaaaaaaaaaaagagtagccaggtgtggtggtggtgcctggaggcttaggtactcgggagccttaggtgggaggattgctggaacccaggaggttgaggctgcagtgggctgtgatcacaccaatggacttcagcctgggagacagagtgagaccctggcccccttcttaaaaaaaaaaaaagaaagaaagaaaagaaaaagaaaaaaagaaagaatcaatctagaaggttcaggatgaaaggatttggagtggcaggggaaacaggccattgaggtaaggaaatgaagttgcgcaagaacattaaccagcacatttggcggacaaggatggccaggattatttgaccggggatccccacaggtgtagctggg

SEQ ID NO: 584631 - DNA, 127 bp, Homo sapiens
gtacaccgtggtatatataagtggcttataagcacctccaagcaactggctcctatttgcatcttcacgcatcatctcaacacctactatatcatctgccacaacttattaagacaaaactagacca

SEQ ID NO: 584632 - DNA, 823 bp, Homo sapiens
  misc_feature (199)..(199): n is a, c, g, or t
  misc_feature (612)..(612): n is a, c, g, or t
  misc_feature (711)..(711): n is a, c, g, or t
  misc_feature (713)..(713): n is a, c, g, or t
  misc_feature (803)..(803): n is a, c, g, or t
  misc_feature (807)..(807): n is a, c, g, or t
  misc_feature (816)..(816): n is a, c, g, or t
gcaccaaatggcgtgatgacgccgtgtgcagctgcgggtggtgcccggtggtgccctggtggctcctgggcattgtgcgacccgtgggtggcttccgcggagtgtttcggcgctggcatccggtgcctggggtctctgccgataggacggggccagcgggccagaggacctagtcgagaagcctcagctcgatagcaantggcctgatcgaataaagtgattaggattagcccagatctataccaaagttgagggcacgctatgcgatcaatcggcacatagaagcgactcagatgttcccttaggatggaggactactagtcgtcttgtcatcactctgtcgcgcattttaagggaactcaatcgagcatactagtatgggagtgtgtccattgccctgtggtggtgccacttactttcttacaagagggcacttggagcggttctattgacaagcatataattgccctatgttagcaacgaagaagtcaacgacgcgcagtttgtgccggctcagactgcgatcacaaaggctatctaagagggaccatatctgtttagcgtcatacgaggcgaccatatccaagtagtagtcaactgatcggagatctngtgcgttgtgtaaacgttgctttcgcaataggagaaaggttaggtgacccagcacctggccgaatccccttggtatgagtggcccaattcaatcacgtngngccccaaaaagtctgtcctcgcgattcgggtccccacaggttggctggcatgatgaggctaacgtggcggtgtgaaaagccacatgtatnctgngacaaatgncgcctca

SEQ ID NO: 584633 - DNA, 206 bp, Homo sapiens
aagcccccgttttttttttttccggggacttttaaaacatccttatggtgcccaaagggctttttttaactttaacctttttttttctgttttttttcagtggaaggccccgggttgttttttcaggtttttttaaaaaaaatttgggttttaatttccccctttgggcccatttcaaaaccatttaaaaatttttttttttttta

SEQ ID NO: 584634 - DNA, 397 bp, Homo sapiens
gcagatttaattattcttgaaaaaattttttatcttcaaagggactcaagctgaagacctcctttaggtatgtcgtcggtagatacctacctccagtggctggcttgttttagcctcatggtcaagatgaggaatctcagagtggactgcagcccatgctcttttccagagcgtgtcagaggacaggctgtcacgaaggcaggcttcacagtgccggtttcctgagaccacgggaaatgtggctgaaggggtcattgatgtctaacctcctgtgttattctgggtgcagttctaatgcccagaccattggtgtcccctggaatgtgcccttgggtcagagcaaactttaagttattgttaatgaggttgtgcatatttgcataaactttcaaggtga

SEQ ID NO: 584635 - DNA, 623 bp, Homo sapiens
ctgatacacacatatacacaccctatggaactggacccaacaactggattatcatgaggtgttgctatgatgaacatgatcctgactatactcagagctgtagagacctgattcatctaaccttgacgagatacacaggtccactggaaattagacacgcacagacttgtacacccagaagacccctccgacctaacggcggccagatgagatgcagccctaactgacacagagtcatactagggacttgtctttcgagattcaggaaagctctgccccagaacaccagccatttgaactgagtcactaaaacctccaagtaaagatgggcttagtctaaaagttgcaagaatcccaatacctcgcaaatttaacttgacggggtggcccgaaacccaattggccgtttaatgggggcccaccattgaacggcacaggtttttcacacttagccctggaaaaaccccgggttatccaaccaatagcccttgcgggaatatccctgttcgcatattggccaaattggaaaaaagcccgaactaactggctttcaaaacaattgcaaacttaaacgtacatgggaaaattttaaggcatttttgcggtgttcccgagatttttgg

SEQ ID NO: 584636 - DNA, 588 bp, Homo sapiens
catgatgacagatgagcggcggctcctgtgccgcgggaccgtgagacgggttcgtggccggccatttagggggactgcttgcgacacctgctgcgcccctccggactggttccttgtggcccctggaagctcgctggtgggccctgtgggatggcgtgcatgctccctgctgtgaggcttgcttggcctgcctggcttggctgtggtgtgactgctgtgtgtgctgtgggtgccttgcttggcgcttcttggccaatcatgttgcctgcttctgtcacggtgcctgctgctgttgctgtggctgcgcagcatggatctgcgcagctctacgtgccgctctactccgagagctcactgccgcgttctcctcggcctgcctctgtgcgccggctgcacggctgtcctgtgccatgcctctgccttgatggcggctgtaagccggcgtcttcgtttgggacgaggagaggatccaggaggacggagttgcagagatctattaatgagatgaagcggttggaagaaatgtcaaatatgtttcagagctctggagtccagaccacctccagaacaaagcccaacagaaggcat

SEQ ID NO: 584637 - DNA, 127 bp, Homo sapiens
ggtctggtagatcgtatatgggaggctgaggtagggaggatcactttagccggggagatcaaggctgaagtgagccatgatgtggccactgtactccagtctgagtgacaaagcaagattctttctt

SEQ ID NO: 584638 - DNA, 738 bp, Homo sapiens
gacagctgactcccgtagaggaagacactgtggaggccagttctggagctattgcagcctcggtttgcccggccggggacccgagccgaaaagttatcgtcagaagtgtcgggcaatagacccgaatttggacaaatctttcccttcgcgaatggccacagacccatcattgaagggctcgttttaaaggggacgccacagacagggtccgaaacctcctgaagaacaaaatctctgatgccttaaactcttcgattttcgacagattcctaatagacagatacattacgaaggattaacaaactggttgcgatcgggcgcggacagtggactcgacgaagaacagctggccttttttccactgacgctggaaggcccaaggtttcacaatgccagggtgcactttccagcgacttacacggttaatcccaagaatggtccaatttacaacggccgccacagcttgcaacgaatttccgtaagcgctgagtgcacaacgcgacttcacatttgtacggcagaggggtggtctaacgatgtggggacccaggatattgtggggacccagtttacccccaattgaaccgggagaacctggaccagcggatctattggcaacgctgtggcgccgtggctgtacaacgcccccaacgacacgggttaggagaggacaacaacagaggtgtgtgggctaacaggttaaagaggaacggacacctcaattcgcccagataggct

SEQ ID NO: 584639 - DNA, 736 bp, Homo sapiens
  misc_feature (150)..(150): n is a, c, g, or t
  misc_feature (333)..(333): n is a, c, g, or t
ggcggggggttcctgcagacccccagtgcccccggccggtgcacctggagtgtgtggaccttcaggggccacccttggccctcgaggcctgtcgaagacccagtatgtgcagagccacgtgagacaagggacatgaaagggtcttgcaanggtgagcctacgtaggccagaacgggcgccagcgtcactgcgagaatgcgacctctgcggagctcctgcttcaagccacatggtaccctgctaccacccgatggtactcctatcttgcgcgagtctatgcactccttgggggcccctcgacttcctgcctttagcctacatgcgcggggtctngccctgtggagacttccacacggacccccgcgtagacatccgcgcgagatgcatgcgaggcgcagcagcattggatgacggcccatgtgctggtcatgtctgaccagctaggagctcgcattgtgtgacgccagcactatctatgccaccccagaagtatatggatagaccaccaggcggcacattacgacaagggtcaacttttcgtacacaaaacacacaaacaaaaccaaaaaagaaaaaaagacccacgcagagagcaaaaactcaacaaaagaagataagagatgagtggagcgaagaaaggaaaaaaaaaaagaaagaggtaacaagagagaaaagatgtgggaacaacatgtgggcataccaatgaagcgcgtgggattagcgccctgtaacaccc

SEQ ID NO: 584640 - DNA, 281 bp, Homo sapiens
ttgcagtgaaccaggatcacgccatcatgccattgcactccagcctaggtgatagagcaagaccccgtctcagaaaaaaaaaaataaaatattccatgtgcccagctagttggggtgtgtatttttgccagtactcttaaaattgccttaggtttaaagttattgggttttgttggtatctcccatttcacggcttgctctaaagcatgtgttttgggggaaccagtttagtactgttaaagttctagaccatttaaaacaactagagcagaaggtcgacg

SEQ ID NO: 584641 - DNA, 710 bp, Homo sapiens
  misc_feature (43)..(43): n is a, c, g, or t
  misc_feature (78)..(79): n is a, c, g, or t
  misc_feature (92)..(92): n is a, c, g, or t
  misc_feature (94)..(94): n is a, c, g, or t
  misc_feature (168)..(168): n is a, c, g, or t
  misc_feature (186)..(186): n is a, c, g, or t
  misc_feature (293)..(293): n is a, c, g, or t
  misc_feature (314)..(314): n is a, c, g, or t
  misc_feature (390)..(390): n is a, c, g, or t
  misc_feature (560)..(560): n is a, c, g, or t
  misc_feature (615)..(615): n is a, c, g, or t
gtgggcacctgttgcttgtgggttggtctacgctgtgcgcggnggacgtcggaggcagcggggagcggatcggggccnncggggcctctccngngccgcagcggcagcagttgggccccccgccccggcctggcggacctgaagaactgcagtgaagtgggggcctgngggtggacccgcccccgngcctggcctgcagccatgaactccaacgtggagaacctacccccgcacatcatcctgcctgtgtgtacaaggaggtgacgacactgacctgcagacccacccgatgngcatcaaggtctttcccaacngaggagtgacctcaccgacctccagtgtcaccatcgagggccctgaggggaccccatatgctggaggtctgttccngcatgaaactcctgctggggaaggacttccctgcctccccacccaagggctacttcctgaccaagatcttccacccgaacgtgggcgccaatggcgagatctgcgtcaacgtgctcaagagggactggacggctgagctgggcatccgacacgtactgctgaccatcaangtgcctgctgatccaccctaaccccgagtctgcactcaacgaggaggcgggccgnctgctcttggagaactactgagggagtattgcaggtcagggcccagtctactcacaagagatccagtgggcgccgcgggccagcgcaaggcgaac

SEQ ID NO: 584642 - DNA, 194 bp, Homo sapiens
agcgattctggaacccggcatcagctcagaacacatctggggagagagcagtcgctggggtgacagtgagagagctgtcagcggcaatgctgtggatggagtggggctcatgcatgcagacgctggtgctggcctgcatgtgcctctccactgagcccctagattttgtggtacgggaagcatgtatggtgtgc

SEQ ID NO: 584643 - DNA, 201 bp, Homo sapiens
gcgctttggagccggccccaggcagcgtgtgtcggtcgcctagtctggagaactagtcctcgactcacgtgcaaggatgatgcttaaatgaataacaaggcttatctctaggattcattagtgttgagcccctggcgcgtttatacacacatgggagccccagctctcgcacaagcgcattctctctctacacctgagata

SEQ ID NO: 584644 - DNA, 220 bp, Homo sapiens
gggggggttttttttcccccccctcccgggggggggggggggggccccccccccctggggggggggggggggggggtttttggggggaaaatccccccccccctttttttttttttttttttttttggggaaaaccaccttgttttttttttccggggggccccattttttttcccctttttttttcccgggcccaagggggggggggggggggggggca

SEQ ID NO: 584645 - DNA, 282 bp, Homo sapiens
tccccgctcgggacctgtactaatcacaatgctgtttctcttttgtaaagtggacatacagtacttccttttttttattagcagcaagtccgtctaacaattttcaaatattgtcctctttcctcgattgttctcttttttaccagtctcttgcccttcaaacaaagaatacctcgcctccacatcagcccatttaatgtttccattggttaggtcttggactatgctgggcagctcagagatctctgctacttatctgccgcatttagtcacgggtcccaa

SEQ ID NO: 584646 - DNA, 125 bp, Homo sapiens
ccctgtcgcgatctcaatggctcagcgacttgcgtccttgagcattcggcgaagggatgacctgcacgccggccggctgtcttcatgccgccggacccacgccgtgcttgttcattgcgtatgat

SEQ ID NO: 584647 - DNA, 299 bp, Homo sapiens
cggctaatcggagtgcatggctgtatctcggtgtatgcacctctgcctctcaggttcaagggattctcctgcctcagcctgccaagtagctgggattacaagcgaccctcaccccagctaattttttttttttttttggtattttaagtaaaagatgcggttccgccataattggccagggtggacttgacctgctgacctcaagtgatccagccgcctctacctctcaaagtttggggataacagacgtgagccattgcacacgggacagccattgcactccggttagccattgcaat

SEQ ID NO: 584648 - DNA, 215 bp, Homo sapiens
cggagtcaagccgttcccgcccagtccgtcctgcagcagtttgcctcttttcacatgacagatgcggctgtgttccttcggccaagggactttccttgggcgggtggagttggcccgagccatcttccaagacgggcgggtagcccccattggggcgggtaaaggcttcttctccagggtccaggcaattcccaccaggcagatacattcgggta

SEQ ID NO: 584649 - DNA, 182 bp, Homo sapiens
agacacaggctcagatggtatgattttctttaaggatcgtttataactggcccaatgtttacaatatgtggcaattcatttatggatctatcacctgtcatcataactcgcttctgcttgtcatccacactacacctaggactttatagacaaactggtgacttgaatgccaagtcttgtag

SEQ ID NO: 584650 - DNA, 324 bp, Homo sapiens
aatgtgtggtgttatgcgagaatacatatataggtttatgggaatattgaggtaatttccgaggcacgcctaaagtgaacacgaggaatacaatgaaaagacctaattagtcgtggactgcgaaatgagtagtagaatgtttgggaaccggctgtaaagcggacatgaacatactactatcatttcaatactatatttaaattatatcatcaaaactgtatttagattgtattaatgtaaaaactaacgatacttgtagacggttggaacacataacataatttacggaaacatatgggtaaaccaccataacaccacacaatt

SEQ ID NO: 584651 - DNA, 278 bp, Homo sapiens
tgtgattgcttttggtcagtgcccctggctcatgcccggctcctctatggcaatgatgcctgaggatctttggagctaccacgtggctggtgcagagcgtgggcacggatggacgtgtcttccatttcctagtgttcatctgaataccacagacctggactctaacgagtgtgtctagaatttgccctgtttgaatttgtacccctaatctatcagcatttttggtgtctcccagtgatcaaaaagagagtggttgtggaacctgttggccttatgag

SEQ ID NO: 584652 - DNA, 123 bp, Homo sapiens
aagggaaaaaaaaaaatgggggcccccttttccccggcccccttgggtttttaggggcccccccccccccttgggttttttggttgggggggcccctttttaaacttttttgcccccggggga

SEQ ID NO: 584653 - DNA, 937 bp, Homo sapiens
  misc_feature (40)..(40): n is a, c, g, or t
  misc_feature (629)..(629): n is a, c, g, or t
  misc_feature (860)..(860): n is a, c, g, or t
tggtataggtaatgagagtataggtgagcaggccacctcnagatgactactgggattcatgctataagtattcatttttcctaggtatttggaaacataattttcaggtcaagagggaggggaattttgtattttttgtatttgagaagataatgcttttgctttactgagacattgtttactttgactatttttggttcaatactactactgagggcaccatttatgactctgaattgtatagttggaaagttgctaagcatccccgcccctagtgggtgagtgtgtgcacagtctatcaatgagagaggtcaagttcaagacccttacgtaccgtctcctgttcacttatcatttttaacagagaattggatatggatgtaccccgcgtataggacgggcatatacaagatgagatgtgattggtcatttgtctcgttctttatcgtgttgcggcatatgaaatgccgcgtatgatctattaactgtaatacattagttctagcggcccctggcccgctggacctattacagcatttctctttagagaggagtgattaatgcccgcgtagcgaactccaaattgcgcctggcttgatagtctctagtctaatctctcccgtcagtantcatatcgcgtattagtcgaatctattgtatccgccgcgtattctgactcccccccccgtgaagcatgtgtatccgatctccacgtccgacctggtcgcttgcttgcgagttatgtgcgaacggcccgacctctcgcgtcgctagtacattcattattgtagcttgtggttgcatagccccttgatcgtaggcattagatgtaggcgcggaaggaatcgctgtatgtactntaaatgatgaatttagtctgtagcatctatgtatgatttctgttttgtaccgatgcatgaaagaagaataatcgggg

SEQ ID NO: 584654 - DNA, 545 bp, Homo sapiens
  misc_feature (269)..(269): n is a, c, g, or t
  misc_feature (288)..(288): n is a, c, g, or t
  misc_feature (353)..(353): n is a, c, g, or t
  misc_feature (377)..(377): n is a, c, g, or t
  misc_feature (388)..(388): n is a, c, g, or t
tttttcagacactcagatgccttcagtactatttcctttcctcataaatgtagttcacattgctctctgtaccccagtgtcaaaatctagttctcaggtagctctaggaaactccagtgggtggcaaacatgttcaagttacagtgctctatgtaatgaagtcccttactccttgaaaggtttcaaagagagaggggaaatgacataattccagaggtcagggaagtatgtatccgtgtgtatcccatttgtgtccctagtgtctaacntatagtcagtactgaaaanaaatttgaatattattgaaaatatggaatatgtgcgtacatatatatatacagttgcttttatcnacttaaaaattttttaatttttanttttttgtagngatagggttttgctatgttgcccagattggtgttgaatttttggcttcaagcagtcctgcctctgcttcccaaactgctggaggttgcagtgagctgagatcacccactgtacttcagcccgggagacaatgcgagactccgtctcaaaaaaaaaaa

SEQ ID NO: 584655 - DNA, 200 bp, Homo sapiens
tctaacgtgatcgagccatccttttgttctaaataattcttcctccctccctacctgtttaatctttaacctcttgaggcgcagacttggccaggatgaacttggagcaagggttgaccttcagtgcaggaacccattctctaaggccactgagttctaggactggagtaggagaggagctgttgtcaaggttaaggtca

SEQ ID NO: 584656 - DNA, 460 bp, Homo sapiens
attcgcggccgcgtcgactttttttttttgagacggagtctcgctctgtcacccaggctggagtacagtggcatgatcacagctcactgcaacctctgcctcccgagttcaagtgattttcctgccttagcctcctgagtagctgggaatacaggcatgcgccaccacacctggcaaatttttgtatttttagtagagatggggtttcaccacattggccaggctggtcttgaactcctgacctcaagtgatccacccaccttggcctcccacagtgctggccacatgtgtgagccactgtgtccggacatgcctaattaaaaaacaaatctttttttttgtagagatggggtcttgttatgtttcccgggctggtctcaaaccccaggactgaagtgttcctcctgccctcgtagacgcggccgggaatttagttgtagttgtcgacccggtaatttcg

SEQ ID NO: 584657 - DNA, 143 bp, Homo sapiens
tgtgtttaaggtgccaggtatacgtgtaacatatcctaggtacatgcgcgttcacacagctatacacgaagaatctcagcccttgtacttttgcatagtctgatacgtgtatgagactatgcaaaagtacaagggctctcgtg

SEQ ID NO: 584658 - DNA, 617 bp, Homo sapiens
agcggagctggattggatcaccagacctctcccaagaggggcctggcttcctcctcgctggagaactcggtacggagctcccctacgtaaatcctctagggagagtggccaggtagccgggatcagtgaagaggcctctggtgcccaaagggctgtccgcagaggctgatggtcccttgcgaatgtgcacagcggaggagaggtgacatcagacttccagccgagttcaggcttccatgtcagactgcgtgtgtttatgcagagggtgcaactcaggaattagctgaggagaaacgtacaggtccaaatttaacctcctctgagagacctctaaccctgctcatcaccacgtcctcgctagaaaagggccctctcacagggaagaagccagagggagagcgtcggaattctcctccccatggaggaagagtgcttcctctacccgttaatgtatcaagctgacaacaattcaaaccgaaggaaactaggatgtgacaaataaaggaagccttggcatgctctgtgtccactggcgtcgggcaagccccggtggaagtccaaggaaaagagtctaagacccaaacagatggtatgcgccaaaagttctgaagtgtatc

SEQ ID NO: 584659 - DNA, 102 bp, Homo sapiens
gtcgacacggaatctaaaaatgataccagtcgtcgaccttaaaagttcaaatggtcggctgggcgtggtggctcatgcctgtaatcccagcacttttgggag

SEQ ID NO: 584660 - DNA, 155 bp, Homo sapiens
  misc_feature (23)..(23): n is a, c, g, or t
aatcgtcgtccctctctcacacngggcaagagcgagatccatctctaaataataataataataataataaataataaataacaaaccagtctttattttaaaagaaactttaggaaacaaacccacataatagttgggaaccagtgtggagagag

SEQ ID NO: 584661 - DNA, 502 bp, Homo sapiens
caaggctgaggcctcagccccgggccctgggctacttctggcctgaccccgcagcccctacgacagcccgcagctctggctcctccggctgcccctacgcctacaccacagtcctctgaccccagaatgtcatactcttgctcccaacccacagcactttgcacccaagacacacgtctactacctgtagctttgcttgtcctccaacatggcgtcacgctgatagaacacacgcgacaaggcgcgctcggcgaaacatcagtcaggtccccacgaatacatctcacggcaggacataagacgcacacaacgacccacccttctccaccactgccgctgcccagagcgcagcaccaacctgtagaacaaccaacacctacctatgcaccaaacgtgacaagtctcgctcagcacaccgaccacgcccacgagccactacacacggcggaagacacgcaacaaccgaaaccaactaagtcgccccccatcctagaccccacca

SEQ ID NO: 584662 - DNA, 258 bp, Homo sapiens
  misc_feature (5)..(5): n is a, c, g, or t
gcagntgggagcagtgctcatgcctgtaatcccagcactttgagaggatgaggtgggaagatcgcttaagcccaggaattcgagaccagcctggccaacatagtgaaacccgtctctacaacaagtataaacacttagcttggtagtggtggccatgtgcctgcaactcccagtatactccaggaggctgaggcaggcaggatcgcttgaacctggagaggcagacggttgcatgtgacgctgacgaccagtgcaatt

SEQ ID NO: 584663 - DNA, 402 bp, Homo sapiens
tttttccatgtggaatgcagatgggtgctagaggagcctctcccacatcactatagtgtaatattattacaccacactgaaatgtattcagaaacagatgtttcaatttcattctttctccagaggtggtccagttgtaccaatgatactattccttgcactgaatatatataaacactcttcagtgtttatattggggaaatactgggaaagaaatatatttgttaaggatgaaggctgtatctgttgtctttataaacactggttcatttcttttgagggtggaatgcatttttcttcctgttcagtgctttatcaccatctgttgtttgtggtcacagtgaccatagctatgtagcggacgtttccaaatgtatagagtgaaataaacagttactagca

SEQ ID NO: 584664 - DNA, 328 bp, Homo sapiens
tcacccgaagaccacagaagcttatgaaaagtaagtgatgagatcaggcttgtattttagaaataaaaacttgggtatatctattctttacagaaattgactatgtactgggccacaaaggaagcttaaatgaattccaaagaatctatagaccacattcacaaaccgcaatgtggtaaaattaaacatcaacaacaaaaagagagccaaaaaggtgtagatacaatacaccttaaattagtaactgcagctgcttctgaggaaggggccaggaagtcagaatgaacttttttttttaaccacgtacatctattacttacgatttttt

SEQ ID NO: 584665 - DNA, 988 bp, Homo sapiens
agcggaggtgccactggtgtagcttctgtcaccctgccacgatcgggccgtctccctgagcgttggtacaccatctgcttcattctccaccgcgcctatggtcccatcttggagccagcgtgccgggcctggcggtccgcgggttggtgagagagcggtccgggagagcgatgaaggcctctgggagatgcgtgcatgctgtctctatactcgagtcttcttggctttcctgtccatcgcttccatgcgtgttgcttgcctgcatcgtatgcgggccccttggcagtcctgctgctggctcgccgaggcctgcgccaaggatcgtctgaggcctcctggtccctagtactcactgggaccattacactggcacgttttggtcgaacgcaggaggcccacgtaccctccctttgcacccgaggccagccggcgtcccagctggtggtcgtagtgacgtgaaatgcatgcgggggtgcccagcgtggggtgtcctcctctggaaggggtaggagctaactggtggctatgcatacgccattgttggccccgagtgccttttgatggaacgcgcatcgattcgactggtagggagtaaaggcgcccgagtggacaaaggccacgatgggagttgccgggcctctgcgtggatgtagcgccctcaaacctcctttggtcagaacctaatgcccccagtgtagcccctaggccgcggctccctggaaccggttgtttgagagtgcgtgggatggagcggtcgtgcggctgcctttggattgttccatttgcgctggtgtcagtggacgagctcaagggtattgaaagaatcgcaaagaaaacacccggaacgaacttagggaatgcattatgggacagatttctatgagaatcccttagagcacttagtaaaaacatcacttcgaatgttcgaacccccgttatagtaaagcagcgatgtgtacttgaggtgacacgtgtattggaccaacca

SEQ ID NO: 584666 - DNA, 179 bp, Homo sapiens
ccacttaaggatcccctgagagaatcatttgaaccccggaggtggaggttgcagtgagctaaaaacgcaccactgtactctagcctgggtgacaaaacgagaccttgtctcttataacaaaaaacaaacccattcttgctattgtcatttaagtgggtttgcaattgtaaataacactg

SEQ ID NO: 584667 - DNA, 144 bp, Homo sapiens
acccccagacacgacggtgaaaaacgcccctgtggaaaaagtttttttttcccccccgggggggggggggaaaaacccccccctcgaaagggtgttatcctcccccccgcgccggggggggaaaatcccccctccccggggggg

SEQ ID NO: 584668 - DNA, 111 bp, Homo sapiens
acaatggtggtcttctcagatgctgtaggaaagacctctacctatcagtgaaagtatctacccagaccaagaggtattttagtttcctgacttgcgtccgaaactgagaca

SEQ ID NO: 584669 - DNA, 206 bp, Homo sapiens
  misc_feature (1)..(1): n is a, c, g, or t
  misc_feature (41)..(41): n is a, c, g, or t
naagggaataatgtctattgtaatttagataggttatgtgngagtataattaaaatatttgtgaatgagttatttttatatagtctgtgatctgtctgaaaactacaatcttgtttaaagtaaccaaagcaaaaaccttaaggtacaatcgttagggtttgttttttggttttttttttctgggagacggattgagaccctgtctc

SEQ ID NO: 584670 - DNA, 449 bp, Homo sapiens
  misc_feature (292)..(292): n is a, c, g, or t
acgaaggaaccacttgctggctgggcagatcaggaccactaaccctggcagtggagagttgaggaccacagtggtgaatgaagcaggtgccagccacactgacctcagtgaagataggcaggaaagtagaaataaaaacatcgtaccccaaggctccttaaagaaggcagtttggttctacttgcctaggaactcatacctggtgctgaactggaagcagaattttctgtggcatcttgtgccccttcgatattctccttgttctccccctgtttcttcagcgtccgggtcntggaaggaagtgtaggtaatcgaggcagacatggaacaacagatgaggaggaggctgctctcccgagctcctcagctacctctgtaaggaggacaaagggaccggtaataagaacaatttcatgaccaaaacggggaagtggttccttgtcgggtac

SEQ ID NO: 584671 - DNA, 192 bp, Homo sapiens
  misc_feature (94)..(94): n is a, c, g, or t
  misc_feature (111)..(111): n is a, c, g, or t
  misc_feature (152)..(152): n is a, c, g, or t
  misc_feature (164)..(164): n is a, c, g, or t
  misc_feature (169)..(169): n is a, c, g, or t
  misc_feature (173)..(173): n is a, c, g, or t
  misc_feature (181)..(181): n is a, c, g, or t
agttttagtttaaagaatttatatgtagcaaggaaaaggggctttttaattttaatccctttgatcaaaagggcttttttccaaatggggtaanggatcaaaatgaacccngttgatgtgaattcagttattgaacttgttacttgtttttnccaaaaatgttnttaanaaangtcaatgngggggataata

SEQ ID NO: 584672 - DNA, 434 bp, Homo sapiens
  misc_feature (244)..(244): n is a, c, g, or t
  misc_feature (259)..(259): n is a, c, g, or t
  misc_feature (284)..(284): n is a, c, g, or t
  misc_feature (317)..(317): n is a, c, g, or t
  misc_feature (319)..(320): n is a, c, g, or t
  misc_feature (333)..(333): n is a, c, g, or t
  misc_feature (409)..(409): n is a, c, g, or t
  misc_feature (427)..(427): n is a, c, g, or t
ggcagtcatttggatggtcctgtgaggtagaaaacattgtccaacgttctacgcgaggaaatgtggctgggccacaggactggactccccagtcccgcttttgcctgaagacttcgagggacgcattggagcgcaagctcctgcttggcggtgaggcagaggggctaacgaccttcctctcctaaattcactgatgcggcggcaagaatggcaccgcctcgtagagctaccgcatttcccaaantcgtagtctcaggancatttatactcataaaaatgagggncccaagctttttgctaatgtgggttacagctancnnatgtttaaccacntctaagtttaaaatggctttaaagtttttgttggtttcgttgtcagccgggcgcggtaactcacgcctgtttcccncactttgggaggctgggngggcttt

SEQ ID NO: 584673 - DNA, 83 bp, Homo sapiens
  misc_feature (27)..(27): n is a, c, g, or t
  misc_feature (29)..(29): n is a, c, g, or t
ggacggtagaacgcagggcgcacacangnggattagagtccaccaggtgggctctggggaactcgtggttgggatcaggggcg

SEQ ID NO: 584674 - DNA, 293 bp, Homo sapiens
tacgatgttctcaataagttctagctcatagaaaatgaacatctatcttgtgtgcactgtgtctttcatttatacgaagcagtagctgctggttgtgtgtggctttcagtattaacatcattcacagagctttcctcttctgaatgtcatgcgcgctgtgatgtccagttctatgtcatcagtacacaggcgaataatagatggggtttattaaagcggagcaagtctgccttttacctggtgcgcatgagtggggtctttcagagtttggtggctctcccatgtttctatac

SEQ ID NO: 584675 - DNA, 117 bp, Homo sapiens
ccattgacatgtatggcgaggttaagagaaagatcaaagaaaacctatgctatgtattacttttgtcctcactgtgccttcttattttatgtttattcagttctttgtttagaattg

SEQ ID NO: 584676 - DNA, 356 bp, Homo sapiens
ggcaaataaatacaagagattgcttgcttttctctttaaagaaggtgcatcttagttgcgcaaaatgctaagaaatatttaggaaataaacgaaagaggtgggctggtcccagcttaagaccaccttgtactgcatgggcagatagtgctcattgtaaatctccttctcaacgacagaatcactctgcggtttacgcaaacctttaagccttatagcgagttgatagtgttctgaacacatgaccttcctcacatgccaaaactgtctgccagtttttgaccatccggtgttggtcaacaaagctggaaagctcactgaactagcggcatgtttctccggtgatccctaaagcttg

SEQ ID NO: 584677 - DNA, 972 bp, Homo sapiens
gctgcaccggcagagtgctgcgtgggcggacgcgcgtggccggcgcagccatggtgaagattagcttccagcccgccgtggctggcatcaaggtgtcgacaatggctgacaaggcgtcgcgcgtcggcccctgtcgccgtgcctcggacacctgagatcctgctgactgcctggctagggaggagcagccccacaacatcgatccaagagggggagctcagtgggcggcgtgtgctacctgtcgatgggcatggtcgtgctgctcatgggcctcgtgttcgcctctgtctacatctacgagatacttctttcttgcacagctggcccgagataacttctttccgctgtggtgtgctgtatgaggactccctgtccctcccaggtccggacttcagcatggagctggaagaggatgtgaaaatctacctcgacgagaactacggagcgcgtctaacgtgccttgtgccccagtttggcggcggttgacctgcagacgtccatcctatgactttccagcggggctctgactgcgtaccatgatatctccctggacaagtgctatggtcatcgaactctagacaccattggtgactcgccccattcgcaacttctgggagctcctcattgaacgtcaacagggggacctaaccgtgacggcagaacgtacatcattcgcaggaggacatggggggtcacgtgcacgccaatgtcacgttgacccaaggacgtcccttgaggatccgttcatatagcaaccttgtgccacacggggcaaacagcagcgcccataacggggcgtcctgtggccccgggtccacacacgtatcaggggcggatacgcaacgcgttgcggccacagacacgtgccaatgtgcccacccgtgacaatttgacacaaacaccttacctagctgcgaaaacgcgttctatttctcaggggtttcgatgtgaagagcccatgctcaccccaca

SEQ ID NO: 584678 - DNA, 407 bp, Homo sapiens
  misc_feature (254)..(254): n is a, c, g, or t
  misc_feature (265)..(265): n is a, c, g, or t
  misc_feature (275)..(275): n is a, c, g, or t
  misc_feature (300)..(300): n is a, c, g, or t
cggacaggttacaaggattgttatacttggtcttggcctgtgaattatagatactgtgaatggttcaggagtctcttaaatgtatcttgtgaagggtatgttgacggtcttcatagcgttcagacgtctatgaatggtaacaaatcatataattggattcgacatgtaaactactatgttaaactcacccatcatactttgagattactcagctggtagtacgaatatagtattgcccgtcatcctgtatgaangagagatgtgngcttcctttntgagtcttgtgttaggtgctgagancttttacatgggcttatacagggagagagtcttcaataaatgtagtcagcactattttctgcatccagtgtggttgcgtttctcacctgagagtaatcaagataaca

SEQ ID NO: 584679 - DNA, 325 bp, Homo sapiens
  misc_feature (172)..(172): n is a, c, g, or t
  misc_feature (183)..(183): n is a, c, g, or t
  misc_feature (193)..(193): n is a, c, g, or t
  misc_feature (218)..(218): n is a, c, g, or t
gtaatggagtcgtgtgtctctcataacagatgtatgctctctagtacttgcgtaataaatctatcttttgtattctatacaacgacgacatgtaaaacgcaccgatgagactgttggatgaacgacgcacgtggttggaagactatagtatagcagcaaatcctgtatgaangagagatgtgngcttcctttntgagtcttgtgttaggtgctgagancttttacatgggcttatacagggagagagtcttcaataaatgtagtcagcactattttctgcatccagtgtggttgcgtttctcacctgagagtaatcaagataaca

SEQ ID NO: 584680 - DNA, 710 bp, Homo sapiens
ctgcctagtcatttcaaagtcgctggtctcccggctttttgatacctcccttgggctgtccacgactgcccttgtagaattcctcccagggcgccataagtgttcttaattgagccccccctgggtctaatatctccgatgggactgaattctttcactaacgtaagcctcctgagttacgctgggtgcttcgataccgaactgagggctctgtatctctccgctcatcttcaaggtctcctgataagtttatcactcccctgtatgagcgccttatttaagaactattctctccgaactagtgttttaagactttactcgtacactccccccctcaggttctatcacctccttgtggagaaatacttatccttagtatgtggcatcaccccccttctctctctctggtgttctcacaagttccgcctttctctacataccgtcacaggcagcactcacgccacacaatagtcgccccccccgtagaatctgcctttacacagaggtttccgcgaccccctaggggggcactaccgcctccctccccattgccctcctcaggcatcactcctggtgacgccactattgaggccgccgcagcccactattgttaggcacccctacgcccgccgatgtatcggtcacgatgcctccgtaatcaacccggccatcctaatatcgcgggggcatcccgttctcacaatagcaga

SEQ ID NO: 584681 - DNA, 755 bp, Homo sapiens
tatcaaggttttaaatctcggagaaagggctttcgttgcttggtaatcggatgcttatatacctttctgataagcacaacattggctgtacttcatcttacagacaccgagataaaagttaaccctcctcaggattttgagatagtaggatcccggatacttaggttatctgcgtatttgcaatggcaacccgcgccactgtctctggatcagttttaaggaatgctagcagtggaatatgaacataaaataccgaaacatggtagtgaaactatggaagaccatctattactaagaatctagattacggaagatgggttggatcttaacaagggcatagaagcgaagatacacacgctttgaccatggccgaatgcacaagattggatcagcaaggttcaaagttcctgggcatggaacttatcttattggagtatctaccacaaggaattcctagaaactatggttcagggatatggactgcgtatattacaaatggcgatattgactctgtgcttgtgaaagctggcataggtgtacttcttgataccaattacaagcttgtatgacctggtatgagggcttggatcatgcattacagtgtgtggatgacgtcaaggctgattggacgaaatataggatgcagatttccctatttggaggcatcagactataaagatgtctatatttgtgtcaatgggttcagtcagagaaaaagcgtattagatcagttatttcaccttttcaggttaaaa

SEQ ID NO: 584682 - DNA, 465 bp, Homo sapiens
tggatggcttgatgaagaacagcgaaatctaatgcttcacagttcccgcactacagttccccagttccggaaagccttatcagcttgctcatgagagtgaaatccaatgcctagtattgaatgagatagcccaggaatatgaatctagaaagatacaaacatcctgtagaaaactgatagcaaatgctcaggcttcaagagaaaagggtccagagccgcactaacatcaaagaattttactgtgaaaacatggcttcttggccgctccacagccagtctatctgaggtgctggtgcgactttaaaacatattttggggctggacatggtggctcgcgcctgttatcctagcaccctgtggaggccaaggcaggtggattgcttgaggccaggaattcaagaagagcatgggcaacatggtgagacccagtctctacaaacaaagctcacacctgtgatcccagca

SEQ ID NO: 584683 - DNA, 765 bp, Homo sapiens
agcggggaggcaagtgggtggatcacctgaggccaggagttcgagaccagcctaaccaatatggtgaaacccatctctattaaaaatataaaaatggttgggcgcggtggctcacacctgtaatcccagcacttggggaggtcaaggtgggctgatcacgaggtcaggagatcgagaccatcctggctggcacggtgaaaccctgtctctactaaaaatacaaaaaattagctaggcctggtggcatgcacctgtggtcccagctactggggaggctgaggcaggagagtcgtttgaacccgggaggcggaggttgcagtgggctgagatggcgccactgtactccagcctgggtgacaagggcaagactccgtctcaaacaataacaacaacaacaacaacgacaacaacaaatatatatatatatatatataaattagctgggcatggtggcggcgcctgtatcccagctacttgggaagctgagataagagaattgcttaaacccgggaggcagaggttgcagtgagccgagatcacaccactgcactccagcctgggtgacagagtgagactctgtctccaaaagaaacaccaacttggccaaaataaatcgtcggtattttgaaaatgctgtgaattgacactaatacttcattttttgccagtcatgtgatcaccgtattatttaccagtgtagggggaaaacgcaaagaactgtttgtaggaaccctgctggtttgtactctcctcgtttctcactca

SEQ ID NO: 584684 - DNA, 800 bp, Homo sapiens
ctgatccgaggattaattgcgatggaataagacctccgaaaggaaagaaaggaacggctagaggcgtagaagggcaagattaagaaggaaagctccaagagggagctgcttatccgacactagcccatactaaacgagacccactagcacccgctagcctgcagccctaccagctagcttagtgaatacgcaaacaggcagtagcctaggaatagaggcctctatcacctagcaaaaacgctagtagagccagcagtacacaaccacagagaagagaagcatgaggcatagagatactagtaagacaccactagccaatctagagccaagaagtcagtagaaagatacaggctacacctagagacgtagcgtactcataagagacatagtagaaaaagccacagcttacaaagaaggtaacgggaacgtagcccaacggctcattcccgggtacccttcacaacgggccgtgcatgcaccgggataggaagccttgggcccttgaaacccgactaatcctgaaagacgagacaagtggaagacaaagcgaaccagaacaaaaatgaaggacatggcgaaaacctgtactcagcaaggccccagtgcccccaggacccaagccccttttggacagacaaacacacaaagcggcccttccttctcccgttccacggaacttcgaacattcgacgggaaaacttcagaatgaattccaattccaagccatcaaaggtacacttacatagcaacctgtcctacaatccctagaggccatgggacaggccaaaagtcccctcaca

SEQ ID NO: 584685 - DNA, 387 bp, Homo sapiens
tcctggcagacccttctcttccaccaaacgtgtgcacatccttgagagccgtgagcaacttgctcagcacacagctcaccttccaggccattcacaagcccagagtgaatcccgttacttcgctcagtgaaaactatacctgttctgactctgaagagagctctgaaaaagacaagcttgctattccaaagcgcctgagaaggagtttgcctcctggcttgttgagacgagtttcttccacttggaccaccaccacctcggccacaggtctacccaccttggagcctgcaccagtacggagagaccgcagcaccagcatcaaactgcaggaagcaccttcatccagtcctgattcttggaataatccagtgatgatgaccctcacca

SEQ ID NO: 584686 - DNA, 1118 bp, Homo sapiens
cattggcaacaagggagtggaacagtcacccgtaaggcatgggcaaatgaccagctgggaaccgacgctgccttgatagcatcgtggacttcgcaagtaccctatcgctacccaacatcagacgcacaacttgatcaaagcctcttgcaggctctgactcattccaaggaattgtttaacaactatctcgggcggggatatgggacactggtccccgtggtcgttgctcggacggcggccagcaccggggatggcgctctcaacacaacgcccgggctcgagtgggggtgggacccacccatgagaggcatccccaggatccaagcaccgctaaacacaccgggaaacggcgtgaaacagaacacggcaacggacaagtggcaaccaaaggagagagcgccattgtgttggccggcctgaacacgtcgcgttcctatttcccgctggagacgccggaatcaactagctggattggcgcggccattttcaaaaatggcttccaatgagaacaatctggttggctcgtgtgggtccaacagtgggaactgtgctcccggactccgcgggggccaacagcgggtttacggcccatggaggtttggcaaccaaggggcctacaacggacgacatgtgaaccgccctaatccgaaaaattcgggcgaaccatggcccaacgtccatggcgccattgtacacgacctatggggcgttcccaagggggttttgcaactctaaagttccgcgctcgcaaaaagcgagaatttactcactacgggggccccgaacacaagtagaatggctctggcccgggggcacctttacttaggacacacccccattggtacaaactcgaaggggaatttggggcgccacgcaaaccggggcccattctaacgccattagtgggccaagctgggcaacaagcgcgtcctacaggcccccaggaacgtgccttcggatgcactcggtgcgcacacacagacccgactctcgacggacaatcaccggcacccgggattggcccgatcgacgggttcacacacaacgaaggctcttgcgcggcacacagcacagtcagcggctccctcacgtcaaaaacaacgttccctcgtggaaaa

SEQ ID NO: 584687 - DNA, 305 bp, Homo sapiens
  misc_feature (72)..(72): n is a, c, g, or t
ccttttcttttcatagagcagtttggaaacacttctaattgtaaaatctgcaagtggatatttggacctctntgaggccttcgttggaaacgggatttcttcatacaacgctagacagaagaattctcagagtcttctttgtgatgtgtgctttcaactcaccgagataaagatttctcttcatagagcaatttggaaacactctttttgtagaatttgcaagggtacattgagagcgctttcaggcctatggtagaaaagggaatatctttccataaaaggtagacagaagcaatcgtcgacgc

SEQ ID NO: 584688 - DNA, 563 bp, Homo sapiens
ctgtaagaagactgagtcgtcttggcatacctatgtgccgccactaccccatctcaatgtcaccttgctttgcattcttggatagcttgtatatgtagtagattgatgaataatttaaagaaaaacacctaaaattcgaaaaatgattgtaggatcaaaaaaggcagatgcacttacttcatactcagatgtttaggagcagtatccttttaagattagttggattggctggatttgaacgcatacaaatatgcagcatgcaatatatgcttatatttccatttcaatttctgatatataatgcacttcttgggagcagtactgaatctttgatgtattcagtccatgtactcaagtgcaatataacaatgtaaccaaatctagcataattcaaagttgtcattaattaagtaagcctaatataaacaaatatatgtatcattaaggtaaacaggaaagagtgattaagtgaggttattacccctaaatggccattctgcattgtattcaggctggaatgaatattcttaccagttttgaacactttgcaatatcctaaggta

SEQ ID NO: 584689 - DNA, 512 bp, Homo sapiens
cgctgctattgttgcagtggtcgccgtccatgtggtgctggccctctttgtgtatgtggactggaatgaaggctcacgacagtggcgtgaaggcaaacaggattaaagtgaacatcacctttttatagcattaaattcattctttaaaatgataaatgctggagggggccatctgatttgaataaagttgaaagaacatgttaaagtcagtcttaaggagtcacgtttgagtatgtaaattttgatctttctaatatgttggcttggatatccaggcttacctggattaatttggattgtaaatgagaaattggcaaagctaaattagttaccaggaatacgtcattttaattagacacccctttgtaagaattttatcctcctttaacaaaacatgttttatttttttcctcacaattcgcccccccaaacccctcctctcttaaatgttaacgctgcgccccctatggggcctccatcctcattatgtctcgccccctctctccttaccg

SEQ ID NO: 584690 - DNA, 436 bp, Homo sapiens
gcaaaggaaagggggagatgttgagcatgtacatacagcgtggctacagctggctcccactattgtctccagtctcgatcagctgcgcatcactcaggatttcaatggtgcgcctggagattttagtggtgatacctaaagcctggaacaaggaggtcttctcgggcccgagaccagtgttctgggctggtacagtgacttcacatggggcaatggcaccagcacgggtcagcagctggcaccttattggccagcaacatgtccctgatctcagtgaggtcctccttggtgaacacaaagcccacattcccccggatatgatgcagcagtttctccagagctgggttgttttccaggtgccctcggatggccttgcgcatcatggtgttcttgcccatcagcaccacagccttcccgcgaagggacatgcggatct

SEQ ID NO: 584691 - DNA, 176 bp, Homo sapiens
cgcttatctttgggacggcggcggaactttggacgtatctggaaaagcagagtcagcctgcagacaggggactggtgtgggtgctcttcctgccccacccctgcaccaggcctgctctgccttgcttctccctggggtacggggaaaagtgctgggggcagggtgctcagtggtga

SEQ ID NO: 584692 - DNA, 217 bp, Homo sapiens
tgaggtgatcccaggtgatcggggtcttccgtaagccatgcttattcaatctccagtcgagccttttctccttaactcatagtcaagagagcttcatcccatcctctgataactatgcctactccgaccttaaaacttaaaggcttggcatttttcttacttcttttgcactatgtttgaactattcagtatcacaaaacagtccctatcttgatag

SEQ ID NO: 584693 - DNA, 97 bp, Homo sapiens
gcagcacaagagtcatccatggatacagttccaatcattataaccacttctaaaacaagatcatcttctgcagcacctggttttagtttatccttga

SEQ ID NO: 584694 - DNA, 234 bp, Homo sapiens
ctaacgaaggttggagctgctgaaggatagggctgctcagttacctgtagcccagaagatatcgtgaacaaggatgccaagagcacactgcgggttgctcatatggtctgttctgcaagcacacgcagaaaggcacacatgggacagtgacgccccattggagccccagaattgaccctcacgtgcctccaagagcccatgagcctgccctgtcaggcccatgctggaggggcc

SEQ ID NO: 584695 - DNA, 408 bp, Homo sapiens
ttagctcataatagtgtattttaatagtagaaaagacataaagggagtgtctgtgtttgagtttttaaactcactaaagcagctacatgactgctgttgatggtgctttttagtcataatagtcatgtatatgattttgttttaaatacaagagtgaagaaagaatgttgtggttttgtcaatactgtgcttatagatatcatattgtctcagataaagcagcaaacatgtctttcagcatactcccatgctaaaatatgaatgaggattgtgtgttatttaaagtctgtatgacctattatgatgatattaagatattttttgttggcataatagtctagccgtattatgaggatgcaggatttctgtttaaacatttggatcctccattaaaaatactaaatatca

SEQ ID NO: 584696 - DNA, 369 bp, Homo sapiens
aagactccccatggtatcgaatggctgagccccaagtcctgcctgaggacatgcaccgctgtgctcactttcaacggcatcaacatggtcccaccgaataccacgacgccaccattgaagaccatcatccgcttcctgcagggcccgctcctcccgggactcatctgcaggctctgacaccagtttggagggtagctgcacccatgggtccaagctaaccagtccccagttccccagacctgctgtgacttccatttccatcgtcctttctgaaggaacagctcctgaaaccagtctccctgggctgagacaacctgggctcttcttaggaagagagaattcaaaccacttccctcatttgggagtagg

SEQ ID NO: 584697 - DNA, 314 bp, Homo sapiens
  misc_feature (43)..(43): n is a, c, g, or t
tctgagatccttatgtatcgccacacagaaatcattgatgcantatcacattatggcagaacacactatatatcatctcactgatgcaaaaatatatttgacaaattcagcactctatcagaaaaactttagaaaactttaagaaaatttggctgggcgtggtggctcacacctgtaatccagcacttggagaggccaaggtgggtggatccattgaggtccagagtttgagatcagcctgacccaacatggtgaaaccccgtctctactgaacatacaaaaattagccaggtgtggtgttggggataacatca

SEQ ID NO: 584698 - DNA, 153 bp, Homo sapiens
ccagaactcctcagactgtggcatgccatagcctttgggaaaagtccacttgaccctctagaaactgcatatcagaagtatggacctgtactctagctttaccatggtaggcaagacatttacttaccttctggggagtgatgctgctgactg

SEQ ID NO: 584699 - DNA, 678 bp, Homo sapiens
  misc_feature (505)..(505): n is a, c, g, or t
  misc_feature (599)..(599): n is a, c, g, or t
agcagtgtctcacacctctaattccagcactttgggaggccgaggtggacagataacctgaggtcaggagttcaagaccagcatggccaacatggtgaaaccccgtctctactaaaaatataaaaattagctacgcatgggccgggtgcggtggctcatgcctgtaatcccagcactttgggaggctgaggcgggcagatcatgaggtcaggagatcgagaccatcctggttaacatggtgaaaccccatctctactaaaaatataaaaaattagccaggcatggtggtgggcgcctgtagtcccagctactcgggaggctgaggtaggagaatggcatgaacccgggaggtagagcttgcagtgagctgagatagcaccactgcactccagcctgggtgacagagcgaaactccgtctcaaaaaaaaattaacttggcgtggtggtgggcgcctgtaatcccagctactcaggaggctgaggcaggagaatcactagaagctgngaggcagaggttgcagcgagctgagattgtgccagtgcccttctgcgcaacacgagtgaaactctgtctcacaaacacattatataaattagtngtccttattatgttggttgaatggataaatttgttcaggacaccaatattcttggcttaatgcatggggttatcctttc

SEQ ID NO: 584700 - DNA, 166 bp, Homo sapiens
gcaactggtgatgttggcattgtcatgcaggccaaagatctcagtgcatatcatttgagtggtatgtgctcttgattgtaggagcagtgtagcctgtgtcaggtctgtagtgtaggctgtggatcttggtggtcgactgccctgatggcgctgtactctgtgctca

SEQ ID NO: 584701 - DNA, 150 bp, Homo sapiens
  misc_feature (1)..(2): n is a, c, g, or t
nncaggtggggtcagagaagagggatgggaactgaaagcactgggacttaggcaaagcaaccaagactggccaaacctggtggtgcaggctcagaggccgagcgtgtattttcccctttacaatgcggatgaatgggagaaccaagtctc

SEQ ID NO: 584702 - DNA, 289 bp, Homo sapiens
cctggaggtggaggttgcagtgagccaagatcttgccgttgtactccgagcctgggtgacagagcaggactctgtcgtcaaaaacaagacaaacaaacagaaacaaaggaaactcttatgaattgttgtagggctggaatttgtcatttaatagtgtcagactgtggttgatcacaggtagctgaaattggggaaagcggagctgtagataaggggcctacatactttcagctggatatgagctcatttgtatacagctgtcagcgtagttgatctctctgggcttctt

SEQ ID NO: 584703 - DNA, 425 bp, Homo sapiens
taaaatgacatacttaatcttggtttgtgttaattctgaaatttgaaatgggtgtatttcatagttattgatcaagatagcagcagcacctaaaggtgtttgtaaaacgacaggggtcccttttcatcccttttatgtgagtggtgcttttcctgaatcctatcccaagctcaaaatatgtaattattcttttaattttaatattttatttactgtaaagagtaaactccagttgctacagtattaatatgtagtcaaatctaagtagaggccttttcagtacgtcatatccaagctagcacaaaaaataatttagtacaggaataaggcaggagaatcccttgagcccggtaggtcgaggctgcagtgagctatgttggtgccactgcgcttgagcctgggtgacagagcaagaccctgtctca

SEQ ID NO: 584704 - DNA, 181 bp, Homo sapiens
agcagaggcccacagtgaactgggaatatggaaatggcccttccacacagacagtttgggaggtgcggccctaggcgagcaggaggaacctggccagtgaaggccacagccgcatcagcagggagacaggcctgtgtgcacaatgctgccattaggaggtggtttcgaagcccgggtaccg

SEQ ID NO: 584705 - DNA, 383 bp, Homo sapiens
  misc_feature (280)..(280): n is a, c, g, or t
acgtgaatacgccctcattggcctccgttagagctaagattacaggcatgagccaccgtgcccgtcctggggcaattgttataattatccaataaataaactattggtgacagtggttttccaatgtccttggcttttcagacaatttgtttttatattttgtgtttgcaaataatttgagcatgccatatttcattttatgctgtggttattgttgcacagaagggaagaaatgatgggcttgattttttaaagactgttcagatctggaggttttggngagattgtgttttcttattgttggcggcttaatttcctgcttgaaagggtgggtcccatatagcatatgaataaaaaggataatttcagtagaaaaactgctt

SEQ ID NO: 584706 - DNA, 318 bp, Homo sapiens
actggaaataggaagtctagaattatctgaatgaagcaggaaggtgtgtaatgtccctgtgaacaggaagtgctattttccatatgaacaggaagtgctaaattatccatatgacccagaaagtgtggcaatatccctatgaaccaggaagtgctacaattatctggatgaaccaggaagtgtggcaatgtccctatgaaccaggaagtgctattatccacacggaccaggaagtgtggcaatgtcactatgaaccagaaagtgtcacaatttccctatgaaccaggaagtgctacaattatccatctgacccatctt

SEQ ID NO: 584707 - DNA, 122 bp, Homo sapiens
tgcctacacggagtcggtgtgtcaagaagcactaagtttgggtcccaggcctgtgccttttgtcctttggcaagttgcttcacctctctcagcctgatggtctcctctatctgggatgatgg

SEQ ID NO: 584708 - DNA, 167 bp, Homo sapiens
tcccatagaagagggggtctcgttaaatggcccaggtgggtctcaaattccgggccctggcaatcctctcacctcagccttccaaagtgctcagattacagacatgagccactgtgcctagcttagctctttttttttttttttggaaaagggattttggcagtgtc

SEQ ID NO: 584709 - DNA, 209 bp, Homo sapiens
  misc_feature (14)..(14): n is a, c, g, or t
ccccttcccccttngggggtttttttttcccctgaaaaggggaaaaccccccttcccaaggagggttggggtttttgggcaaaggccccttggggttaagggcccaaaggggcctaactttggggcaaaaccattttttttgggggtgggggacccccccccgtttttgggtttgggggggaaccccccccaaaaaacccgttttttta

SEQ ID NO: 584710 - DNA, 456 bp, Homo sapiens
  misc_feature (36)..(36): n is a, c, g, or t
  misc_feature (70)..(70): n is a, c, g, or t
  misc_feature (122)..(122): n is a, c, g, or t
  misc_feature (182)..(182): n is a, c, g, or t
  misc_feature (220)..(220): n is a, c, g, or t
  misc_feature (224)..(224): n is a, c, g, or t
  misc_feature (243)..(243): n is a, c, g, or t
  misc_feature (253)..(253): n is a, c, g, or t
  misc_feature (259)..(259): n is a, c, g, or t
  misc_feature (268)..(268): n is a, c, g, or t
  misc_feature (334)..(334): n is a, c, g, or t
  misc_feature (356)..(356): n is a, c, g, or t
  misc_feature (372)..(372): n is a, c, g, or t
  misc_feature (389)..(389): n is a, c, g, or t
  misc_feature (414)..(414): n is a, c, g, or t
cagatagagtttttgcgctccggaggggcaatgatnttgatcttcatggtgctgggtgctagggccgtgntctccttctgcattgggtcggcaatgccagggtacatagtggtgccccctgntaggacattgttagcatagaggtccttcctgatgtgaatattacatttgatgatgttgtngttggtggttttatggttgttagttgatttcttcccgntganggatgggtgggacagggtntctgggcagnggaaangttcatttncgttggtgttgatttgcccattaggcaacttgtaagtgttctgaagggaggttggggatgcggcanttgccatctcattttcaaagtncagagctacataacanagtttctccttgatgtnccggacaatctcacgctcagcagtngttacgaaggaatagccacgctcagtgaggatcttcatgagg

SEQ ID NO: 584711 - DNA, 397 bp, Homo sapiens
caggagtgagagagggaggaacaagttttcttgaagatgttttaaagctggaacaagccttcttctgttggtgcttgaactcttgcctgggaataacttttttaacctttaaaaaccattcactttgatctcctctacctctttcctctctgtttgcctaactcccgcctgctggctccgctttcctctctccccttgttgttatttttagtctgtgcgtgtggacacttttggagagttggaagggatttttttctcctgacttgaacatagggtgactttttaatattgtattttagtgtggattatctctttggaccgcgccggacttggcctcaggaaagcaaccaaggctgcggaaggcggctggtgcagaacgctctgctctacagaaggg

SEQ ID NO: 584712 - DNA, 369 bp, Homo sapiens
cactggcaatggctatgagggcacatattagcaaagcagtcacattagacaggtaccagctgcgtttctggaatgaccaatgggcagtttcataaaaactcaggtgtcaggctttaatgcactaggctccagatcctctagcccttggtttgagcttaaactcttggaaaacatgtaagaagcacaatggttcattactggggtaggagtccagccaagacacctatcttaacagtactgctctaaaacctcatgagatcaccaatgatcataaccaagcccttcaggcctatgacaaccatccacccgattatccaggcccaggaactctgaaggattccaaggtaaagaaagggactgatacattct

SEQ ID NO: 584713 - DNA, 1421 bp, Homo sapiens
  misc_feature (1296)..(1296): n is a, c, g, or t
gggtcccgcgggtctgtctcttgcttcagcagttgtttggacggaacagatccggggactctactgtccagacctccgagctgcgcctctcgcatttgcctctgccgcttgtcagagctccgtggacccatcattcctcggcccatcatccttgtcgtgtctagcggtagccattgactcagtcagcccgatctaattgtaggttatgctctcttgtccttgccaaatcacaatgccatttgagctcctcagcattcagttcaatgaacttattactcgaccagactgttgaatggcagccgtcaacgagcgcatgagatcgagagtatatggttacgctttgcctaggctcgtccataaccaccatcacctcatctcttcgggcgttctgatttccgcacccgcagattgcatagttggcgtctgagaagtgcggtgcatgccactttcttcgcgcagatattaggcgcgagtgcagaagcgacgaagtggcataacaggagcctgtgcgtccttgaatatgagttgcgagagagagcgcaaggcgtaggactgggctccgctgcatcttcttgcccacggtatcatttcataggataggcccacgccattgataatgcagttgcacgtttgggggtgttaagaaaaccccactcgaaaggaaacaggctcattgaacaaaagccatgccctacttggggcctcttagtgcaggacacacataggccttgcacatcccaagggccaccccatattttctgggcatttcttttccaatcggccctccgttgtgcgatattcgtttgcactccgccaatcggggaacaccctccccaagtgcttccttcgttggagcatattgccttgtgcaagtagcattcccaacttttgctcttaagtaagtccgcagtgcgcacaccggttgggacataggcctctaagtacaagaagcataagggacattgggttgtttggaaccccccattcccttggggaagcccaaaagtccgttcccgcagacaatgggactttggggggttggggggcccggggaaagtgcccctagggagaggacttaggggcggacctcgacacgttaagatcccttccttttaccgggagagacagggccttgccactcttacgtggccaaagggccgaaccggacactcttgaggaatccacagaccctcttccgtaggaaggtctcccccaagggcgggaacattgtccttctgaaacagtgggggcgccctccccgtttcggtcaccaacaacggctgagatctcacaggnggagctgtggatctctgagccctttatatggccgcgttcgtttgccacccgtacaccacaggcgcacacacaattcaagaggcgccaaggtcatttaaccatataacactttaatgtcccttaaa

SEQ ID NO: 584714 - DNA, 696 bp, Homo sapiens
cgaccgttgactattctctacaaaccacaaagtacattgtgaacacttatacctattattcggcgcagtgagtctggagctcctaggcatcagacatctaacgcctccttattcgagccgagctgggccacaccaggcaatccttctaggttcacgaccacatctactaacggttatcgtcacatgcccactgacagtttgttaactacatcttcgttcaatagttaattacccactcagtagagtcgaggaggctgttgtgcatagctgacatagtttccccctaagataagtcgttgttgccgcccgaaatattggctgattccccgcgctattaacacaaaccataatgtcttcttgaccttgcttaaactcccttctctccttactcctgctcgcatctgctactaagtggaggagccggcgtcacgtgaacaaggtttgaaacagttctagccctacccttattcattgggaacctactccctagtcctggagcctccgatagacctaaccattcttcttccttaatacctagtcaggtgtctcctctatcttcaggggccatcaactttcattcacaaacgatttattcaatataaagatcccgctgacataacccacaattagcgaaacgccccctcttcgttctgatccgtcctaatcaacagcaggcctacttcatgctatctttcc

SEQ ID NO: 584715 - DNA, 739 bp, Homo sapiens
  misc_feature (700)..(700): n is a, c, g, or t
ggtgcaattaacagactttgagaactctgcctatgtggtgtttgtggtactgctcaccagagtgatcctttcctacaaattggattttctcattccactgtcaaaggttgatgagaacatgaaggtagtcacaggaaagagatgctgtcttgcagggaatgtgttatttcaggaaagatatttgcaaaggtggcaactgcgacgtgcgtggcatgcgttgtggcaaggcccagaacatgcactggagctcgctgctataggagtacaccctcatgatgcaatatactaccatcatcatatgggacaggaaggtgtgttgtcctggactgatcccaaattctgaactcttaccttgaaaacatggtaacgtggatgtggatcaccagatgtagtattctgaactacctaaatgctacattcacgaacgcacgagcatctggagaactaattgacagttgccagatggatgagggagtttatcgcaaaccatcctgactactagcaagacatgtgtcataactgatgaaactgacttatgtgccttatttcgaagtgttaaccaagatttgcaaatgaattatgtgaatgcccagagttacttggatcaggcatttaggaaagtaaaatatagtggaagtaaaaactgatcatccaactagacattctacagaacgaacaaatgccttattgacgaactggntacagtaacatggctctcagcccgtgtgtatactctgag

SEQ ID NO: 584716 - DNA, 135 bp, Homo sapiens
cttgcatgtaccggggcacaccacaggtcaggccctcagctgttcatgctctagtgagccactaatgacacagatctccccctgacagaccaagccatctgacatgcagggtccccgagtacattgcaaggggta

SEQ ID NO: 584717 - DNA, 787 bp, Homo sapiens
ccatggttaaagcgaagagcaactctaaattctcggagcctaaatttgagatccttaggccagtacaggatgtaggtcctgataattgaatttgcttacatgagaagcctttacagagtcctaaacattaaatcaaactgaatgtatgcatttacggaaatcacccttgactagtaaagaatttaacttgtataaactcgttgggtactcagagaaaggtagcacgatagtgacactatagctaggatacagaggaaattacagggtaatacgttttgtctattcatgtatgctctccaatcaatgaaaataaagtgaaaataaggacccttaaacaaagtggaaaagaccgttcattaccagttggtgtaaggaataccaaaaatttcctcccctcacgtaaaacgataaggcccttcatccatcacttctcatctaactccttcatccatcgatagggcaggcaagctggagggtggaataacaacccgaaaaaagcccagcgtacgacaaaaatcgtaagtacatacgtccgtcaaaattaaccacacaatatggaattgaattaataagccagataacataccggaaacaatccctaaaaaataacccatttccttaattcgatcttatccatttgtttgaaagggtaaaaccttgaatatgagcatgacattaaaacacaaaattaaacttacactgcggggcgaaaagatccaacttagcaaaaaggaaacctttaaactctccttattgcctggatacatcccgaagtaaaaaaagacaa

SEQ ID NO: 584718 - DNA, 148 bp, Homo sapiens
ggattgactctagagtgatcccccaatagtcaaacagtgccatatttctgaagtgctacgattggatgagtatttggatgttacaacacactttcttgaataccactgttagttggcctccaattgccattcgctattgggtcgtcca

SEQ ID NO: 584719 - DNA, 657 bp, Homo sapiens
  misc_feature (57)..(57): n is a, c, g, or t
  misc_feature (184)..(184): n is a, c, g, or t
gttgaatcattaactcacatgtaggatatgggtacgcctgcatgtgagtacaaatanaatcggttccatcaagctatggctcaggaaacgtcacgaataaaggcctgggctgaaattcaggttctagaaagcacagtaacacatacggtttcttctcatcatgtatagacaccattcttggtcntgatggggcttgtaagggccatcaatacgtggatagactgagtttcatacatctccagtagacatgatgtatgagacagcagcgtactggtcttactctcgagcatcatgcacatctcatcaggcgcatagcaaggggtggagggctgatctactgaatggcgtcgccggtcaccacgagctggttctataacccaattgctatctctgatcaccagcgatgtactaagcctgctggtttcatcagggcagcaatgaacgtctctatgaagtaacattgtctagagggagttcaccaatcatggcagatactaagtgtatgtagccggtccaaagattagcatttcgcctgcataatctcatgtagcatttcccggttctgttgcgcacatattatctatgaacccatttgcacgagtagtaaccgaactcagccactgtcagagtgagagaatgattgaacctgcatctagg

SEQ ID NO: 584720 - DNA, 926 bp, Homo sapiens
tgtgggccgtccaggcaggccacgtggctcgggaatcgcgcggatccgtacccgcctccatcgaggccccgtgctcttagggcctgctcgccagtggcatgacgggagtcagcctgaacacgagactcgcgcaaggctcaggggcggtggactcggtccctccctgggattccctccgaagggttcggaccaccagtcgtgctcgacagcctttcccctacccgggcatgtcagctactccaatccagtcccccgtctgtgtaactcgtactgaacgctataggtctcgagtcgtgtgtcaacacgacagcacctcgctagtgcagtgtgtccgttcaaaagtacgtcagcatggacgcagttggtctgaggccataacttcagagctttctcagagatctagatttacaatctcgcatgtttcacttaaccgggcgaaacatgccccgagccactgagtgctgtagcttcagtcactgaagagttagatcctgaacccagcggtcgtcaagcagactgctctcaactgccccagccgtctgggcacctgaggagtatctcccctcagttctacccatctcgtaaggcgtatgcagccgccttcgccccaacgtctgtcgcagactgaggagaaatggggggagttcatacggagaagcccccaatctcgccattatgggaatagggaaccttcgcatcagccgttaaacacgtgggaaatgcatgctgcccccagtgactcttggtttacgtctcgcacatacagaaccaggttggaggggaagaggtgggtctcagttagcaggggtccaccagggcaagtcagccgcctccctcatgcgtctctggtcagtgtgccttagggtaggcctctcactcccaccactctgggcccttgggatacctccggggaggagccagtagga

SEQ ID NO: 584721 - DNA, 616 bp, Homo sapiens
  misc_feature (28)..(28): n is a, c, g, or t
  misc_feature (322)..(322): n is a, c, g, or t
gccttccgaggagtttcccaaaaccctncgggccggctttgaccgcgctaagatggcgactcccatgcatcggctaatagcccggagacaagcattcgacacagagttgcagcctgtcaagacctttggatcctgattcagccatccatcgttattagagacagtgttgcccaggctggtctcaaactcctgagctcgggtgatcctgccttggcctctcaaagtgccaggattataggcgtgagccactgcgtccagcctcatacctgagctttagatgatattgtgaatgtcgtatttataacaataaaaaacaaactcnaaaaaaaaaaaaaaaatttgggggcggctgggccccgggaaaaaagttttcaaaaacacatcggtgggggcggcggggcgcccacagtagggtagggggaaccggggccaacaggcggcgcccagagggaaatgcgggcccaggaaccaggcggctgtgggtttccccacattaaaaaaagcgcgccggggacaccgggcgcgctctcgaaagcaatctcccgagggggtttcggagcgccataaggggttcctacacaccgggggtcccaggggagttcgaaaataaattagc

SEQ ID NO: 584722 - DNA, 997 bp, Homo sapiens
  misc_feature (28)..(28): n is a, c, g, or t
gccttccgaggagtttcccaaaaccctncgggccggctttgaccgcgctaagatggcgactcccatgcatcggctaatagcccggagacaagcattcgacacagagttgcagcctgtcaagacctttggatcctgattcagccatccatcgttattagtgaagcaagtaagcaagatgtaggatgtcgatgaaatgcttggattgtggatgttggacttatgattgcataggatagggagaatacgcatacgaataggccctctaagggatcgggcatgattcgtaaatgaaaggcttgaaaagaatgagaaaagggattattggttggaacatagagcgattggaggagaacatatgtatgaaaagagaggccatgtaaaaactgggtctaatgagtgtaccctacgcctccgagtatgcgtggagcagtgagagtccttgccagtgattgttcatcgaggagacgtgaagaatcattttaccttgcttctctcgctcagagtgagcgtgactctggtgaacgctccctgctaggttctcatcctcagtctccatctcagacctgttcctcctccttctggattcagattcagattccacgcgcttgcaggatcatgtagcgacagcttgtttgcagtctgtcgatgatcaccaaaagaataagatgtgagaattgagtggctgcattcaatattggactgatggtgctgtactctgtgatgttgagcttgaggggagtctgactatgttaaggcaagagtaaggtgagattttagaatcaagtcgtaatgttacatggagagcttgagaaatgggcaggtggagaggacttgtggggggactggttgttcttaacttatccgagttcgcgaagcacctgtgggaagtgttctcggaaaacaatgtaaggtagggggcaaaagggggggggggagagagggatcaccgaggagggaagtgtttcaaaaagtgtggtgtaggttcgcacaacatttt

SEQ ID NO: 584723 - DNA, 979 bp, Homo sapiens
gagccggtgtctccgactgcatccctgctgcagcaaccggactggagtcggatcccgaacgcacgcttgccatggactcagcactcagagatccgtataacggtcgagtgccgaggcagggcggctccctaccaagcagaactacgcggccgtgcttccaggcccgagggcatcggcgctggcctacggcagcctcctgcatcaatcgtgggttcgtctggccatcttctatctgggggccgctgtagcatcctggtactgctgcgccctggaggggagaaggctatcataggatgactgaaataatcaccaggccgggaattgcctgcccgcgttcctgcatcgatctggtcaagctgcacatctcgttggggctcgtattctcttattcgaaaaattattcgtccccaggagtacatctaatgctccgtgctgtgcatggtatttcttcgtgctgggaatcctgtgccctgtcccagacacatcatgcccttcatgaataagtttttaccatgccagctttccaaatcgagagtatcagctgttcttcacatagggttctggggaagaacgaggaagagatcatcaattatgaatttgacaccaaggacctggtgtgcctgggcctgaggcagcatcgttggcgtctggtacctgctgaggaagcactggattgccaacaacctttttggcctgggccttctcccttaatggagtagagctctgcacctcaacaatgtcagcactggctgaatctgctggggggaacttttactctacgatgtccttctgggtattggcaccatgtgattgtgacggggcaattcctccaggcccataaatggtgttcccagaccggggaaaaggtcgagaaacacttgccgctggctggatgcgctcaggactaagcggggggctgaaaagtaaaaaccccttacatggcattgcgggcacaagataaaacgcaagcaccaatgga

SEQ ID NO: 584724 - DNA, 541 bp, Homo sapiens
agcattaacgcccatcatgttttctatcgccccagggagaggaagcaggtgtagacagcagcaagagggagttgtgatgagggaattatctctgtagcgtagatgtgtgctcacgttctctgaggagttttgaaatcagtattgtttccgttgccctgaatggttacaaggagagaacactggacttggagtcagaaaactttcatccaagtcattccctgctctaagtcccatttctgttccatgagattgtttccacctcagatgagattagacttaaggtggcattggtattggctgtggtaaaacaagatatcttcgagggctcttcagtgacttacatccatacatcccttttatgggatagtggcttctgaaagcttccttggcagtggcagatagagcattgcacttatcttccctagtgttcaccaataagttgactttgatttattacacataacttcttactagccagtcaggttcacaaaatgatgtggagtgaatttctttttatgtaataaaaaacgttatataccca

SEQ ID NO: 584725 - DNA, 341 bp, Homo sapiens
  misc_feature (28)..(28): n is a, c, g, or t
gccttccgaggagtttcccaaaaccctncgggccggctttgaccgcgctaagatggcgactcccatgcatcggctaatagcccggagacaagcgtaagtaaggatccggttcgggtccactggagggctgggagcggggaaacgcgcgtcaacgggctggtgtcggacccctattgggaccggcggagaatgtccgtttctcaaacactcttctggctcccggggggctcgggcccgggcgataagtctggtgaccgggggttagcgatttcgcggaagacagccgcgtaaagtctgcggcacgggacagagcggggtttgaagacaactgtcgcgtttgg

SEQ ID NO: 584726 - DNA, 533 bp, Homo sapiens
agcggactccccattcttttttcttccagtgtgctaatctactttctgtttctttttttttctactttctgtttctatggattgcatagtctagacatttcatataaaaagaatcatatggattttgtgcctcctatctttaacttagcataatgtttacaaggctcatctacattatagcatgtgtcagtatttcattccttttgtggctgaataatattccgtgtgtgcatatatttatatacaccatatttgtttacccattgtcagctgatagacattgggtgtttctactttttttgactattaagaataattatgctatgaacattctgtgtacaagtttttatgtgcacatatgttttccatcatttctgtgacgaaggatcagagattgggtattcgggcagactgttcccgatcatctgcagctgaaagacattctcagaaaacaagatgagtatcatatggttcatctagtatgtacttctcggatcctcccagttctccaaaatccagcaccaatagagaca

SEQ ID NO: 584727 - DNA, 303 bp, Homo sapiens
atccccagctgcgggcgcggcgttcccggtgtgccatagaagatgccttggtgaaaggactcattgaggaagtaactttttagctcggctttgtatgatcaagagaagttcaccacaggaatcggcatgcagtgcggctatgttttctgcgagcactgagttatgtatggggtgcgagagatgttaaacggttagggtatggattcctggatgacagacgctggatgttgattaccctgctgggttttggtcctgtccttcatgcggtgggaacccccctcgcactcgggaacgccccccgca

SEQ ID NO: 584728 - DNA, 501 bp, Homo sapiens
  misc_feature (86)..(87): n is a, c, g, or t
  misc_feature (156)..(156): n is a, c, g, or t
  misc_feature (195)..(196): n is a, c, g, or t
  misc_feature (206)..(206): n is a, c, g, or t
  misc_feature (236)..(236): n is a, c, g, or t
  misc_feature (417)..(417): n is a, c, g, or t
  misc_feature (484)..(484): n is a, c, g, or t
ggaaaacaccctcagacacccacaataaggactgctccatcgcagccactggaaaaggccatctgcccgcttcccccaccagcggnngaagaagaggagggagatggatgatgggctggctgagggagggcgcagcgatccaacacatatgtgatnaagctgttcgaccggagcgtggacttggaccagttcagnnagaacacgcnactgtacccaatctgccgcgcctggatgcnaacagcccctctgtgcgcgacgtgaatgctctcccagctcacccctgcccccgctgcctgaggatgaggagggctcagaggtaaccaacagcaagagtcgttgatgtgtacaagcttgcccgccaacccacacccccgggggccaaccgaagaatgcctgcagattcccgcatcccatctncacttgcagccttgagatgcagggcaccctgacgatgagcctctgagcccgagcccttaaccttcanattcatttattgcaaca

SEQ ID NO: 584729 - DNA, 151 bp, Homo sapiens
cagacatcctggcccagggctttggctcccttggcctgatgagtccgtcctggtctgccctgatggaagacgattgaggctgaggcgctcatgggaccgtcacccgccactatcgggagcaccagaagggccggccaccagcaccaaccaa

SEQ ID NO: 584730 - DNA, 586 bp, Homo sapiens
gaaaaaagaaatatccacaatgatctgaaatgcctatctgtatgagactgtcctttgttcacattttttcaagcaaatatcacacaataaattgaatgcaggtacaaatgacatatcaaacatcaaagaaatttgcaaaagatgtaagactgtactaccttgggtttagaaattttcttatcataaaagcatttataacaatattttgtgagcttttaaggaatattttaagtatttctgatttaatttctagtgataaataccaatagatataacccacatacacaaaagctccttgggccctcaatatacttttaagagtgtaaaggaatcctgaccccaaaactttgagaactgctgccttcccctctaactttattccttccctagaatttcttccttggaagaaacattcctttgccattctatgttaacttacatagttccattgaggccagttttgctacctctctcccatctttccacatccctctcttgacacaaaacctgaccaaaggactctaccggcccgccccatttccagtgattagctgtcaggtgggctaagcaagaaaatctgggtttt

SEQ ID NO: 584731 - DNA, 284 bp, Homo sapiens
gagactggagtgtaccgtgatgatgggtgacgggatgttccaggtgatgggtgagatgtcgtgtgtagattggtgagatgctccatgtagagggtgatgggatgtaccgtgtgacaggtgacgggatgttccatgtgatgggttactgggatgtcccgtgtgacgggatgacgggatgctccgtgtgacaggtgatgggattgttccgtgtgacgggtgagatgttccatgtcagccgggtgacgggatgtaccgtgtgaagggtgcgatgttctgtgtcaccg

SEQ ID NO: 584732 - DNA, 493 bp, Homo sapiens
gttatgaaaatgcaaggtgaagaacatgaagtctgtgtctgtattcattttattccgaaggagctatcgtcttaggtgaaagttatgtaccaaccagattataatctctacccacatcctgcattttataggtctaagtttaactggtcaacatttaatatggattggagctattagtacatcaagtgtgatgggctttgttgcccaactgcttttacatgctgccctgaccccttcaacccttgtggcctttgcagcccttgctttgctgctgcttgccatattgctttgggtgttgtatgtggtttgctcagttgaatacatgagctgaatgagctcttatttttcttatgtttattaaccgcttaggtctatttggatgtaagggtgaaaattcatgtgatggaaatacttgtgtatatttaaagacccaattgctcctctggagcttgtacgttcaagaatgatacccctgtgtaataactgtactcgt

SEQ ID NO: 584733 - DNA, 1304 bp, Homo sapiens
  misc_feature (1103)..(1103): n is a, c, g, or t
agataatacgtgaaccaaagaaagacttagaccccaaaaaccctaatatccttggaaagataagatgatgcatccaatacaatcaagcatgctatgcaaacaagtccatgcatcaaaagagcaacagcaggcaacataagtcacatatcatatgtgcaatcaacacaaattccagataggcacaagtaggcaagaatcacacagtccaaggcaactcgtttcgagcaaccacagtcagcgaagcagcatgcagcatatgcaacaatcagcgcatcagcacacacatcaggcatcacagcaaaactccagcagtggatccacattagcatcgcagagccgtaagcatcaataatctcaaatcagcaacgttcgacagcagcagcaacaagcaaaaaaacaagacagacgtgtacataaacagacaatgacacaaatggtacccatgaaacggtcgacaagctagggaagtcatactatgccgcttgacaaggggacctggcatagacgacccttggacaacaagatgacagtgaaaggcttcaggtccaagaatgacccaagaacggataaacaaaaaggatggacaattcaacacaggggacaggcacattgaaaccaggaaggaggaacaaaagggactatcccaacaggtaggaaaaaaacccaaggggccaacaacaaggcaaacagggaagcaagggcaccatggggataacaagacgaacaccacaatggggcctttcaccataaatggggttggaaacaacgctggggcacgcgcacacaaaacagctcggggcaaacgaggcgaacacaagtacaaatatttagaccaatatatgcctttcgaatatggagaggacaaacacgggggagggcacatattcacaccattccttggcatcgaagacgcacaacccccgggggacaagatgggcaacagtaggagaatatgacaggaatcatcaccacaagggacacatccacaacatatgggacaaagagcacaccaacccagtgcaaagacaatatacacaccgcaagggaatccagaagaggacaaaaaatcagattatacgcacagggcagccagtacgggagangtagaccccaaaacgacacatgagcgatgggcgaggaaccattggacacaagagaacgaccaaacaagacacaagaccaaaatgggcacccaaaggacaatggacataacgtacaaggaaaacataaaacaacggatcggaagacaacaaggggagttatcaaaacagaacggatagtgcaccacaaggaaagcgatcccg

SEQ ID NO: 584734 - DNA, 638 bp, Homo sapiens
gtggtggtgcgcacctatcgtcctcaagagactgaggctgcagtgagctacaatcacgccactgcattccacatcaccctgggtgacagagcaacactccttctcttaaaaaaaaagggggggggaggggggagaacaattaaaagaaattaaggctgggtgcggtggctcacgcctgcaatcccagcagagaagaacaaaaacaacaatgaagccgaaatgaagataacctaaaagacatttacaaaattacctaaaaagaccaaatctaagaattatgggtatttaagaggaagtggagaaacagagaaagtggcaagcaataataacagaacacttttcacaacttgagacggcagatacaaatccaggtcacaggcacggtccgacataccaaacacgatgtgacccaaatcagactaccccaagggcatatatcactcagtcacggacgctctcgcaacacagggttcccacaaaacggacagacagagggatccctcacacaaggagagcccctggacgcaacaaggtacaaaaccatttagagcatttccaagttttgggggttcccacaacgagggacgtttctgcaacagggggacaattccattaccagggtacaagcaacggtggag

SEQ ID NO: 584735 - DNA, 980 bp, Homo sapiens
gcgatgccaacctgccgcgctgctagaatagtatgtctgcgaataatgtttgctgctcaagcgagcaccctcagttggacccctcctttgtgtggtcaacccacagtctgctccaccgggcgttttttttagcaagcgggccgccctaataagaactcttctcgtgtgtggagaaaccctttgcgaaaccttaccaggaaacacgcgcggctctctgtgacggccttaaacaggccggcgtccgtggtgccccctccccccggggggacccgtttcctgttttggccccccctgaataacaggccgggtcctggctcacagatgggaacacgcccccccccggaagaccgtggtgtcgcaaccgcccctcttggggcgaccaggccaccatttttgcagaatagggaaaaggcaccccaaatggtgtgggccgccccacaccccccctggagatggaccctgggggtaaatggccccccccgtctcgaagattgtgcagcaccacgggggggacaccaaaaggcagagggggaccacccatgtgccaggaccaccacgtgggtccgtagatagtagccaccatttgggcgcgctcggggcgaacgcacaacatgcacgtccgacatggggcgccaaacaaaatagtcttccccgccacgccaccgccggtgggaggaccacacaaccacagagaggggggtgaaaggggaaaaaaaacaaatgttgttcttgccagcaaccccgccaaaacaagttggcgtccacaaaaagagagagccccccctgtgtcaaatacacacgaggatacccacgtggccatgccacagaaaagggagacggacacggacaccgcagggagcccaccaccaggtagaaacccccactttggggacgacgaggagcgggcagggacatcctgcaggccaccgcggtttgagacccccggggcgaaaaacaaaagcggtgataccacaaacata

SEQ ID NO: 584736 - DNA, 310 bp, Homo sapiens
agagacttacgtgacctgataagaacccgtgagaaacatgtgcttccaggcttgattcgatttcgcttttatatttttttgtggacgacagaactctcaccttgggttcaccaggactgggagtgaacaggggtgacaaatactcaccatcactggtcaacgctccgtccatccggggtttacaagcaatgtactcgcgtgcctcagcccatcccaacgtagctggagactactaggccactgaccaacacacgccgcggcataaataaggacgtagtaacaacgtaagaagaatgggagaaaaaccaag

SEQ ID NO: 584737 - DNA, 314 bp, Homo sapiens
gtcaataggggctgcttcctattaaactgcagcttatctctattagcacttccaaagtagggtccaaagaattcactgggagccatgtacttagccttcagatgagtaacttttttttttttttttttattttataataagaaacagggtctcactaaattggcccaggcgggcctcgaactctggggctcaagtgacccttcaacctcggcctctcaaaatgtagggaattacaggcatgagccacggaaccgggcccaagatgagtaatgtatatgtacctcccaggctagaaaagattggtaaatcccata

SEQ ID NO: 584738 - DNA, 122 bp, Homo sapiens
  misc_feature (44)..(44): n is a, c, g, or t
ctgctgatcgcttagcatgaagactgcattgctgtccaccaacntactatgtttactatgacacggacatggacaggcgatgagcgctacgttccatgcccaggaagaggctgcggaacaca

SEQ ID NO: 584739 - DNA, 530 bp, Homo sapiens
  misc_feature (408)..(408): n is a, c, g, or t
ccccatgtcacagttattaaaataatagttctctgttttttattatgtactaagctgcttaaaagtaggaaggtaggaagtaaggccaggcatggtggctcacccctgtaatcccagcattttgggaggctaagacaggaggattgcttgaggccaagagttcgagaccagttggggcaacatagtgagaccttgtctctacgaaaaattttaaaaatttacccaggtgtggtagtgtacaccaacggtctccagctatgcaggagactgaggtgggaagattgcttgagctgagaggttgaggccgtagtaacctgtgatcgcaccactgtgttctagcctgggtgacagagcaaagccccacctcaaaaaaaaaaaaaaaaatgggaaaggaatattgggagattnagagtaggtataccagaatcatcaaagatagaggtaacatttttataactggaaaaatacctaaatattttctcaggaggacctattaaatctattatccagctctacattacaaaagtaaa

SEQ ID NO: 584740 - DNA, 839 bp, Homo sapiens
gcctgcgctttgcactattgtgggcaaaaatgtcttaacgcagtgggtgaacctgccatcccaccctgaccctcagcctgccacagtcccctacacacacacacacacacacacacacacacacacactacatggactatgcacacacgggactgtggcgaaggcaagtgctagtgcgtgccctgtcagggcacgtgtcctttccccatatctgtacagggtgtcccaacgagggtgtgtgacgggccgtggacagacgcaccctgtctgatcactcggtgtgctagtgttgctcgtgctccacgatgcgtgcacccaacagtaggaacacagccaccacacgcaaacgagacgacgcgatgaacaacacacccacgctgtacagcaatgacaccgcagaccgactgtgatctgctgtgacagccgcaccagacggcgcacgacagcgggcacttcatcgtttgagaacacagctggcacctcaaatgaacgttccctggctccttcctaacattcccccacacagcgcaagcacgtaacgtaccgttggagcgaaccccaactacacacgcccgaacgtcagtgtgatcgaacaggagcgaaggcgagagacgcgaggtagtcagtgggtagcggccacaccgagccgaagcgtcgtacgccccacccagcgaagcaccaagcaatagcgcgcgagactcccacaggcacgccgccgcacctctcgagcccgcaacgacgtcgcgagacacacacaaccacacgcgccagggccggtcaccgtacactgcaagaaaacagacggccagcgagtgcagcagcacggacaggtctcacgg

SEQ ID NO: 584741 - DNA, 317 bp, Homo sapiens
gtgttcagctggttgacagtgtcagatctgtgttattttactgttttcatcagatcattctatcaattggtaagaagggggtgagatgatctccctttaatccttttgagtgttgcttcatgccttttaaagttctattattaggcatatacacatttatgattattatgccttctgataaattcacccttttaacactacaaatagtgcctttaaaaaaatctctgcgaatagcaagtgaaaacctgacaacaagctcttggtgactctggacctgggcagtcctcagccttctgttcagctgcaaacacacaatg

SEQ ID NO: 584742 - DNA, 270 bp, Homo sapiens
attttttttcccaagaatccccaactcaataaaaccgtgaaacaattgctggggatgggtagagaaaacccatttatagtacttttctgccttcttgtggttttcggctttgcgatcagggactgaagatagaaggaaaaaaaaaaaaaaaaaacaaacacaaaaacatttcaaaagagaaaggaaaaaactttttccaaccaaaactcctaaaaaacccaaaaacagaacaaccaattaaacccgacccgacacaactaccaatgactg

SEQ ID NO: 584743 - DNA, 221 bp, Homo sapiens
tctagaggatcgtctatacaccatggctgttttatttaacaatgcctgttggcttggtatgcattaatgttgggatgtaaagatggtgtgtctatccaacagggagccacagtatttaaattggaccaacctaatgttacaacttacttggacggtggccaaactgtaaacttaaaagccttaacttaaacgtggtatacgggtggtatacgggtggtatc

SEQ ID NO: 584744 - DNA, 287 bp, Homo sapiens
gactcaggaggctgaggcagatgaattgcttgaatccatcaggcagaggtcgcaatgagccaagattgtgccacggcactccagcgtgagcagcagagtgagactctctctcaaaaaaaacaaaacttggctgttaatgtctgccctctgaattcacacacactatattagaccagaccaccatgtgtcattgtgtgtgtgtgtgtgtgtgtgtgtgtttgcctgcgcatgtgtaaaggagagagctgggtccctgagataatggtttccaaacattcaacccgtca

SEQ ID NO: 584745 - DNA, 244 bp, Homo sapiens
gtcttctatgaatagtactaccattttcaccctcttagatgctagctgtcatctctgtctctttcagattttttgttttttatatttgttttgaaaatgggattggattatacacattactccgtagcttacttttttttgtcttaaggacagtacagttaaatctaactcattttttaatagctaggtacattgtggtgtatttttttctatattcttcagctattcctgtcaatagagatca

SEQ ID NO: 584746 - DNA, 110 bp, Homo sapiens
atatcggctgaacatatcattcctacctctcaggagttgctgtgttgactaaatgaagtcatgcttgtgtatcacgctattgcaaaattacataccccaacacaatctat

SEQ ID NO: 584747 - DNA, 668 bp, Homo sapiens
gaagagagagtggggacgtccggcttcggagcgggagtgtacgtggtgccagcgactaacataagagagatggaaactatgggtgatcgtggcgagaaggcgagaagattgtctgattatagaagtggttcccagttgccacacccgttgaaatgggaggcaagcactgagactggagcctacacatgctccactggtgctcttgtgtggcaggaagacaggtcaggcccctggatactcttaacactatgcgccatattgagatacaataggcatcttcttggggagacgtagacacttgattggagtatttgggtacgagatcccatgtaaagtacgtctctgggaataatatatggatctgttgtcggggattgaagaagaaggaaggacatgggcagagttgacttaggctgtatctacaggaaaagctactaatgagtaatatatgggtcagtggttatttatgatcgaaactagtaaacggtctcatgactttctgatgtgtaccatcctttaatagatgctgcagtaacagaattcagatcatgagatgactgacagagatatttgtggggcgagacctgatttaaaagcataagatggcttgtggtctgatgagtatgttgagtgaagaatttcaatagtaactcacatttccagtaagg

SEQ ID NO: 584748 - DNA, 125 bp, Homo sapiens
cctaacttcaggttcctccgtctggaaatgtatactgtatatattatatacactcacacttctctatcctatgctcagacatgtgggataatgcgatgacacataatgaagaacgtcattaacca

SEQ ID NO: 584749 - DNA, 141 bp, Homo sapiens
cttcaagaccatcccagttcctgaaaaagatgccgcagtaccagaaggagctgaataagtattcaacgcacctgcatctagcagatgattgtatgaagcacttccaagggctcggtggagaagcttgtgtagtgtggagca

SEQ ID NO: 584750 - DNA, 301 bp, Homo sapiens
ttttttttttttggggcgggccccttcccttaagctaaaggttttcaagggtcctttatgtgggtccccggacccgccccttatttttttggggggcccgccaaagggaaaaccccccatttgtttttttttcccttaataagggggcttggggttttttttccttttttgggttttttaaaaaaagccccggggaccctttgggggcaagttttttggtttccttttcccgggggtaaaccccaaaaagggaatttttggggggaccccaaatttttggtgccaaagggaaaaggcttta

SEQ ID NO: 584751 - DNA, 536 bp, Homo sapiens
agatatagataataaacttatgaacagcaactataaaaaaagaaaaaaaaaaaaaaaaaaaaaaaaaaaaaaaaaaaaaaaaaaaaaaaaaaaaaaaaaaaaaaaaaaaaaaaaaaaaaaaaaaaaaaaaaaaaaaaaaaaaaaaaaaaaaaaaaaaaaaaaaaaaaaaaatttggggacccttttggccccgactctttataactctgcctatttttttcttggggcccaattttgggcccacttggccaaatccccctttggggggggaatttacatttaatgggccccgttttaacacgcactgtcttgggaaaacccgggggttccccaatttaacagctttggaaaaaatccccttttcccccagtgggataatactcaaagggcccccccgaaatcccttttcaaaaaatcgaccatcctttaggcataagggaaattatgccgtttaatattttggcaaaaatcccggtaaaattttgtaaaatcaaggtttttttaaaccaatggcgccgaaatggcaaaactccttt

SEQ ID NO: 584752 - DNA, 448 bp, Homo sapiens
agagcaaagggatgaaaatgtaaaaagttggtgaaggtggaaaacaggtatgggagacctttgtgcacctttagaaattatatcaacataaaaattacaagaaagtctttcttgatcccccactcaagccccacctgcttagggaatccttgtctgagtccgcactatgtagactgctatcatttcattccccacactgcattaaaagagcctgttccagagccaatcattccagtggtagctagcacacccaacacctgagtgggtcagctttttaaaatcatcctccttctctataaaataaaaatatttttagtaataatcataacatgaaacaaataacaataaacatcatgaaaaaaatacgctggtaattctctgttgttgaatttcacatatgaagccctgccagttaaaatagataaattaataatagataccatagcgc

SEQ ID NO: 584753 - DNA, 170 bp, Homo sapiens
tggacgtctggcatacctgcgacttctggcatactggaccttctggcatacctggaccttctggcatacctggaccttctggcatacctggaccttctggcatacctggaccttctgcataatgaattaactagaaataactttgcaaggagagagaaggtccaggtatg

SEQ ID NO: 584754 - DNA, 197 bp, Homo sapiens
atcgaaccgagcttatccacctcgatgttggatcaggacatcccgacgtgcagccgctatgtacaggttcgtcttgttccaccggatttaaggtcctacgtgatctgagtacagaccggagtattccaggtcggtttctatctacttcaaattcctccctgtacgagaggaccagagaaatatggcctacttcacga

SEQ ID NO: 584755 - DNA, 825 bp, Homo sapiens
gaatttttgaattttcctagcatcgccctgtgctcatcaggtaatctgctaaggaggaaaaaagaaaagaaaaaaggaaaaaaaaaaaaaaaaagcaaaacaaaaacaaaaacaaaaaccctaccagaaaaccagaaagtagagagatttaccatataacttatggactttgaaatgtctgtcctttgtaaggcaagcagggaaggcctgggtgcgaaagcatgtgggctttggccctttcacggctccttggcagggcaggtgaggcttggcctttggaaaggcgtgcccttggagaaggctctgggcgtgaaacactttgacctttgaagaaacaccaatccacaaaagcggcgttggggctcaggcgctagcgcttaggaggtgaaagcatcaacattggaaccattcttcagggaacgccgcattcggcctctttccggaaggctcctcactttccagggacgcctgtcctttgcaaagatgcaatccatcgtctcctgggcttttctcatggctcatttaaattctctggtaagaaaccccatttggtcatatagctccaacgtgtaacatttggcggtcagggcagaacagaataataatggggaaatctcgggagttcgacacctatagtggacgttcagcgtcctctgaaatggtgctacatcagcgaacaagtcggcgcttgaatgggatttggaggttattttaacccatggaattatttttatagaaggggacaaatgtttgtgaaagtctctaataggggtatactctcctaaagtggtgtctcttggggaatgggattggatttattattga

SEQ ID NO: 584756 - DNA, 1869 bp, Homo sapiens
gcgccgcttgcgccgcatggcgtccgaatcggaaagcggggctgctgctgacacccccctactggcagaccctaagcttcccatggtgcatgcaagagcattcatcgcaggctggtcagaaacttgatccccggttcacgccggaaccctagcagcatgaccttggccacaggcagatgcgcacagcatagtagtgcaccttagcacggcacagcaacgcaggcaggcaagccagggcacaccgcccagcaggggctcggcgttcctcagaacccctacggcacgggcggtagggtcaggccacgccatggcagcggccccagcgaacgaacaataacgcgaaagaggtccaccccttactatggccacagtttggcgcaacagatcaaggacaactcgtgggatggtaccaacaggagtgattgaatgccaccatggtgaaacagccccgaagagagacacacacacactcaagcgcactattggggcacaagcgtgtgaccccaggagatgatgcgcttgcacacacgcaatttgcacaccgacaacacggccgcctatatacggctatcactgctggtcccgtggcacataccccatgacacggccacactgcagcggcagacaagacccattttggcagttccctatactcatgcgcacgcgcgtcgtgattggcccaacggaggacaccacaacttatatcaaccagtgcaagccgtaccattgggactgcgcaaccactctgtagtcttggccccatatgcgcgacatatgacaacttcacagcattgagcacccaaacagtatggacacaacatatacacacaacacaccagttacctgctatataaccgccatatggaggggacccacccagaaccaaaacgcgcggagcagcgcaacacaccaaccagttgggaaacgaaaattgggaggacaccagcatcaccagttactggcgatacaacaacagacggatggggccatgagcggtaccacaacggacgacattgagcggaacaccacaacgctatcacacacggcggcaacacggccgcaacggggaatcacccttgagggtcatcaccaccgcatcatcacagcggacacacacgcacacggggacgagaaagagaagccgcgcagtgggcggacacacgcacgttggcagacaaccattcgacgcgacaacgcatgtgacggcaccaaacgtcaccacacactcgaccgaagcgagacaccacacccgcagcatgcgtacgccaccaactcgagaagtcagggcgagcagcgggcagcaagcaacccgacctagcactagcgcaagacacagacagaggcaaaaacgagacgaaccacacgagcggacggaacactaggcaatgcgaagagcaacaaaggcgcctcccacccggacaacataggggcacagctgaaaacgccagtggcacgacaacgcgaacaacacagtatcgcacacaagcgcggagtaacaccgcgccgacacaaccacgagggccgacccaaacgaaccgagcacacaccaagcatgcatggcgagagacacccgacagagacgatacacaagtcaccacaccagtgggacagacgtggaccgaacaccagcaaagcgacgagaccgtgtcaggagagccaacgagggacaccaatctgcaaacacgaacactaggggacgagcacaccagaccacacacaccgaagcgcaacctaaacagcgaggcatacagcccgtgagacaacggccagccagaggagcaacacgacgcaacccagcacagcccacacgacacaggcaaacaacagccgaacaaccaagcaggggcataccaagtggaagcaggagaa

SEQ ID NO: 584757 - DNA, 338 bp, Homo sapiens
tggggggttaaaaagccccccccccaaaaaagggaaaccggttgtttttaacataagggcataaggttctttcagcccaggattttttccggaaggttttccccctttaaaaaattaggaaggaaggcccttccaaatttaaaaaaagcccaaaacaggcctttttttttgggatttaactctttttaccctcccaattgggatttggggttccaacaaaaggttgggtttgggggaagaccccccctttcccgttttaaaacaagtttgtttggtgctggggtttttaaacaagggccgggcccccggtaagcccccaaaaattttttgtgaaatga

SEQ ID NO: 584758 - DNA, 167 bp, Homo sapiens
caccatggtgtgggatgtatctgttgtctctagctactgtggcaaggagaggctggaggatcagatcagtccaggaggttgtggtacagtgagttatgacatgcccattcactacagcctggatgacaagcaagaccctccctccaaagaaaataaagctcaattaa

SEQ ID NO: 584759 - DNA, 104 bp, Homo sapiens
aattcatgcatatttcagacttagcatagtgaaacttccaacaagacctgtttttaggttccttgcttggttggtaagtactaagcgttgagagggttaccgag

SEQ ID NO: 584760 - DNA, 1449 bp, Homo sapiens
ttttttgttttagttggtttggggatcccgacctggggttaatacacaaacacaatttcttccatctctacacataacaatagtacaaaccacaagggtgcatcttaaaatggcgtacaaagggtgttaaaacctcaaaagagaagaaatttatataggtacgtggagcgtggtgacaagtggagaagcgcaaaaaagagaaaaaaacataaaagcgcaatggtgccttgggtgtgccgagagagatacaccttgggagaagagacaccacaccattgagagacggcggagggggaccacactctagtggggctgtgcggtgtgagagtgagactctccgcgagaaagacgcgtgggggtctctctcccactctcaactctcgcgccaaaatatctcagagaatgtgacacagagtggcgtggagagtgtgagcgaggcgtgtgtgtgcgcgcatccgcaggtgaggcccaacggggccacccgagccacagagcaacacacacagaggagacgccgaggcagacactacaccataggggtgtgcggaacaagagagatcctctgatggggcagagggtgtggtgggcaccctcttggaggaagacaaccccagagaacagagaagggccctcacgaagagagagggccccgagggggccctaaaaaacggagggggtttttcgggggcccaaggctggggcgcgcacttaacaaaaaagctggccctttggtgtgggggagcacaagaggctctatccacaactaattatatatgcaaccaaaaaagaggggggacagaccactgtggggcgcccccaaagacaaaaaacaagcgccataagggggcgccacacgggggcccgtggggggcccaaaacaaaattcccccagagggtacccactcccggggggagcaaaagcgggtggaccacacacgtgtggtggtggctcacccccgaagggggaataaacagccccaaggggggtcttccaaaaaccgctaacacgcgcgcacagaagagagcccccccacacaactgttttatactccccccggtgaggggggggggacccctctgttgcccccacacttaggagaagagctctgggggcagactctcagtgatgaaggaaacaacccccgggggacacaccgcgccggaaagtcagaagcgcgttgatcaaccataaaggccgccaagatagaacaccagcagcggggggagaggggggagaacactcgttgtgtgcaaagccaaagggggcccaaccacgcaacaggagggacaatatccccaaaaagacccgccaaacaggcgagggacgcgacgattttgttgtgtgggcacaaaaccgcggtggggaggccgccccgcggggtcaattgtggggcacccaacaagacaaaatgagacgatatgaggacagtaggagacccgatgaggaca

SEQ ID NO: 584761 - DNA, 1278 bp, Homo sapiens
cgacagcaccgcacctgccagagctgatcctccctaggccctgcctaaacttgagttggcccccaaatccctctggctgcagaagtcccttacccctcaatgagaggaggggcagtgaccagatcttttgagagctgagggttagagggcagttgagccaagcacacgagattgtgtcgcctctgtcccctgaagacgacctgcaccctccatgcggatgccagagactaggggaatggaactgatggaagattataacttacgtcttcaaggtggtgctgatcgagtcgaatcaggtgtggggcacacgacctactctatctctccacggattcagcgcgacaactgagttcaagtccacgacacgcgcgccatccaccgatcggggcttgagttctccacacccgcactgtagatgttgtggcaccgactgcctgtcaaaggctcagaatctgtgtgacatcatgcttggccctgcgaccgcgctaccgcagctcactcagcactcaggcgatacttacatcgatggctgcacgtgagcgtggcctctcctgtgtgctcgtcgacccgtagacccaatgcacgcagaaccgtactgctgtcggtgcgacacgaatgcgcctgaccgcgacgctcctattgcaccactgcgttgcaacgtcgcgacgactacgatcggctcatcgcatcctgcgcgttacacccaccacacgtgaccctccacggcacacgcgggccccgggcaagatgccacacttgcctgcgaagcgccacgacatagcttaccgccgttgcacatctaccaacctaggcggcacgcttgtgactccttctccctggcgccaccagccctctacgtccctcctggggaacattcgtaaccccaactctgctcttcacgcctatcgacgccttctggaagcacgtggtaccgctggcaagaagacacattcctctcggcctacacgctcgttggctcccaaccgcgcctcatcactgaaccgatgcacacctcaatgcacgtacccgtggtccagccacatactcgccccatctcacccctttacactcgggtcgcgaccagtctatgacccccactacgtgactcttggggagacaacatcacgccagacgcactagcaagcatccccttgggcgtcgagaactaaccactactgcgcactcattgcttagcgctattcctagctaccgctccatcgaaactctcttggtcgtgccacgccgtaacaacaccttacgccacctagacacacttgg

SEQ ID NO: 584762 - DNA, 266 bp, Homo sapiens
ggtcgtcgtaacaaggtagtgactgggaaaagagctatgtcggggaatatgatatgacaggctggggataggactaggagttaggtattgtaatgtaaaggaggggaggtaatactggcggataggaatgggcctaggatgcatatggagggcgactggagctggggccatcgatacgcgtacgtcgggaccgcggacatgtacagagctcgccaaggactagcggccacgtgggccgcgcacctgaagcgctggcacaggccgac

SEQ ID NO: 584763 - DNA, 909 bp, Homo sapiens
tagatttatacatgattgctcctgcatgaatagactgtgactttttctttttacttctcccttccttcttgattacccatagtatagataagcatgcatactttaacttctactagtatttcctcctttagcatgggtcgtcgttcacgctttaacgactgcgtttacttcgtcccttggcctttgaactcatagagtaagcttagtgcaaaggcttcaggtagtttaaaatgggcctcttagctttcttcgtagagtcattaaaacgtttttctatttaggtttcttatagccaatagtggggctgagttgtcgcacctgtgattttttcaaccttatttggattagtcagaaatgactaactgctttgtcttcatttcataaacagcaaactctgcatttagagtcacctatttagaacggtcgttacatgatgacagattctagctggttctctattgtcactcgttggtacagctgtttggttccacttgcaacatttgtacatataccttaatgttgtcaagtgccttaatcgttaaaatctctgcgttcaaagtttcttgggcgcaagggtcggtttacctcacattttttgtctccattatctaaatatcctagggtacctcacactcagtgtctctcattgctgccatggctgtcaggttccagtcgacgtgcgtaggattacttcgaacattgcgctgattcctactttcccatgtgggcaccattcaggttccgatgtcagttgtcattacctggtttgatttcctgcccacttcttgttacctttttgccccttttgtgcgccctttgttgaggtttccggtttgggccgctcacgccagtcttcaccgtcggttggcgcaacagggtgccgccccttttttccctcgggggtcgccc

SEQ ID NO: 584764 - DNA, 2115 bp, Homo sapiens
  misc_feature (37)..(37): n is a, c, g, or t
  misc_feature (1329)..(1329): n is a, c, g, or t
  misc_feature (1655)..(1655): n is a, c, g, or t
  misc_feature (1827)..(1827): n is a, c, g, or t
gccagaacgcaggtgtcgtgaaaagtagcctcgtaanaagccaaatagtgggagaggaatcatgactcatatcaacatggtcgtcagttggacagcggtaggattcgggcaacgttccagcacactacatggccattctgagtctattaaatatgcgtgtgtgcatcgtagcaaaaggaactcatatgaataatatcagaggaagggagggctgcatgaagaatggtgaagaggtgctcgcattctagagataatgtcacttgggatcctgtaggtacttagaaaactcgtagacacgtctcgtaagacgttcgtagaaagtttgcgttcattccaacgcaactttagactaactacttcccatgtgttcgcggacacattgtgttggaagaacacgaagtcacaggtgacattagtagtggcaacgttataccagtttaagcaacttggccacacgaaggggagcgaactacgtatggagctctatcaatccatagacaaagcaagtgggaatttcaaaccaattgcggggaacgacttactgtctcatgtgccgtgggcaccattggtgggccttctgctcccccgtacgcattttgggttctgggcatggacgtggggtcgtttttggctggcaaattaagttaggagaaggtcctagggtttaaatgcggtacgccacaccgcaaaataggcgagtccaaggtagccgcaccgcaagggaaggtcccaattaggcaccaccatttaccttggagaacgtccttaaaccacctaaactgggggcagatcggtcggaagatatccaaaaagctacaacatttgcgtcccagggttgtctctaaagccaagaaacatcgtgtgagtcttcacaaacatgggaaaggtctcaaacacctcatgatacaatggtccccatcagacacgagcagtgaagataagtcggacgggggacataccattcgtgtctatcataaccagggcggacaccagttgccaccagacgatgtcgttttacgctaatattacacccgaaaagacatttgtgggggcgtaacaaattgccctccgcgaataccatcagcagatacagccgaatttatttggggtctggctccaaacaacttaattcgttagcggctcaaagggacagcttaggagcttgaaagacaacaaacgaattgaggcactcggtgacaacgcgcgcaaaaaaggtagggatgcattaaacggattagagcgcctatcggagttctcgtacacacacggggtgcggcactttggtcgggcccaccacgagcttcaacgcacacccgagtgtatacaggntgaatatggccgtgcaccatggggcccagagagctcggggtgcaacaccacaatatggcgtagcggatctattaggaagctgtggccggcctatctgggtcgcacacttctaggatatcttgccggctacaacagcggcagccgaacagaactgtctgcgctgtcggcgaccaactgtaagtgaatcgcgctacgtgtacacattctatggtcgcggcgacactggtcgaccccatacctaacccacaggcgacagtgcgctacatacacaacacacacacacatgcgggcgctggcgacacaaacagcgagccacccaggtgagnccccaagcgtgatagagcgccagcagcaagtgagctggacaccagggcggcgttgacactagcagacagcacccacggaagcagctaggcggagctccacgcaacactgcagcgacacacaactacacaagtacgtctactagcggacgacgcagcacacaacccgccggcngacacaacgagtccactcgaacaacacagcagaggaagcagcactacaggcagagacaccacggcgcacgccgcgcaccaacaacgactcgcgaagccaaacaccaaccacgacgcacaccgcacgccagcacaaccaaaccgcccgatgaaagacagcagccactccacaagcacagccaccagcaacagaccacagcagagaacagcaacacagaccagcgcacgcacacaaacaacacccagcgactgcgctgatccacctacagcaacacaccaccataacgaa

SEQ ID NO: 584765 - DNA, 87 bp, Homo sapiens
ggatttgctggtgcagtacaactaggcttaataggggcatgccactgtactccagctcgggcaagagtgcgagactctgtctcaaaa

SEQ ID NO: 584766 - DNA, 629 bp, Homo sapiens
  misc_feature (285)..(285): n is a, c, g, or t
ccgctgaatcattttgttggtttccctcggtctccccggaatcaaacgtttgtccattctgagaacttagtgtatgttatggtactattgcggtccgttgtattctttccgcgccttcaaacaccacaggcggtcgagagccacactgttcctaggcgcccacgcagactttctttgtctccaccacgggttgctcgctaacaaaacagctctgatgtaggtggttcttctgcattcgtgtgcgccacgcgagagggttttaagaaggatggcttagataatagngatcccactgggtccaccctgtgaatcacgtcagaaaaggcgtttttgtaggagacacgtgtttggtgcaccacaaaggtgctgctatatgttgtgtcaactagttggtggacgacacgtcgtataatcttttcgccgcgcccctccttttatagagaaggtttttaatcctctgctcacctgttttacagggttcttgcacaagtacactacgcccgcttgtttctcagcagtttgttctaaaagtagtgagtgtcttgaaactagtgtttaggcaagccactttagcgtgacactaatgttggcaccactataacttcccccttggcccgcaataaacgcaa

SEQ ID NO: 584767 - DNA, 259 bp, Homo sapiens
cacatagtcgattccaaatatcagatgcgtgctacaggaagtcccttgccactcgctaaagagccagcccagttctctctaaggagaatggcccaatcctctccctagtccactcaggggaggtgataacattgctttcgtgtaaattatgtgatgcaaaatttgatgaagtcttcgcctcattacttacgaatctagttcaattttgaatgatgagcctgacgtgcccccccttccccctattttggccccctaatcg

SEQ ID NO: 584768 - DNA, 162 bp, Homo sapiens
  misc_feature (25)..(25): n is a, c, g, or t
  misc_feature (45)..(45): n is a, c, g, or t
ctatctaaatttacattcaagtggnaaaacacatcagctgtgttntaataatttattgagtctctctcaggataggatattttatgctgtggtgcacaaagacaaaatctcgggagattaacaccacagacatttagtttttgctataaatcagtgggaacg

SEQ ID NO: 584769 - DNA, 558 bp, Homo sapiens
  misc_feature (17)..(18): n is a, c, g, or t
caacgatggtcctcagnnctacttgggaacgaagcaggagaatcgcttgaacccaggaaacggagattgcagtgagccaacatcgcaccactgcactccaacctaggtgacaaagcaagactccatctcaaaaaaaaaaaaaggttttggttttggttttcttggagagggagtctcccttggctgcccaggctgggagtacaggggcatgatctcagctcactggcaacctcggcctccggggttcaagagattctcctgcctcaacctccctagtagcggggattacagggcgccggccaccgggtcgggctaattgtaatattttaagtagagtgggggtttggagggtcagggtctcaaactcttgatctcaagtgatcggcccacctgggcctcccaaaaggcggagattagcaggcataagctacggcacccagccccaaaaaagactttaattagaaaaaagctcatagaatagggatataaagaaaatatctttgtgcagcggtacagtgtataggggttaaaagctaagtgttattacaagagttcaaa

SEQ ID NO: 584770 - DNA, 361 bp, Homo sapiens
  misc_feature (45)..(45): n is a, c, g, or t
  misc_feature (219)..(219): n is a, c, g, or t
  misc_feature (312)..(312): n is a, c, g, or t
gttaaagatgacagggcccagctggggtcaagtttgagccttgcnagttcagtattgggtgctaagcacaggtggccagtgtctgtgttttgtcacgtattttgctttggcgccatgatgaaaaaatgttaattggcttaccccacgcaaccccttcggccacacttgcaaaactaagaggcttttgcttaaggttccataaaacagaaaaagaatttnctttgtgatgccgcagttgggcccttcagggactatagtgtgggcaagcagagtcactagggaccacctggggcaaagggtaacctaggaagnctggggatgcttggccaaaaggtaaagtatttctttacccattaggact

SEQ ID NO: 584771 - DNA, 239 bp, Homo sapiens
attattgctaaatattttgtttatactaagggcccatttttttaagcccctgggtttaaaaaaaaaaaaaaaaactctgtttctccaggggatgatattggtgagttgccaaaaaaccaatacagcatatctgcttttgccttctgttgtttatcttacccgcagatattaagaatgtatgccttatgtaaaatgcccaattatatatttttgttgagttttttaattaaagccttgta

SEQ ID NO: 584772 - DNA, 863 bp, Homo sapiens
acacaacctttttttttttcccaaaggttttcaatctacagtggatccaatccggggaatgtggaaccgtggatacatgggactgactatatatggttaataggcatttggataacttcctatgagtataatgcccatttaactttattttttttcttttcaaagccatatgaaggattaaggcctcaggatcttcgtagactaaaagatatgcttattggtgggaaactggcagacatgcttcaggctcctctctttactggctgaagctttacttcgagctcagggtaatgaaccgaaaggtcttatgcttctaagaacatgagtaactttggaaacttctgagtttttaaaagggctattttggtattggaatacagaacaaaagggttggttaaaaaagcctaagtggtgtttggtggcagtggttacttctatactcagttcctcataacatctgtgtatttggaagtataaatgggcatatatctaagaggagacacgggaaaatccttttagaaatggagctactaaagcaaattatagaatgtctaatcttagaactatgtctaattcgagtgagatggagcattggaaatccatagtcctagccgtggttttggacattaatttgggctgaagtcattcaggtttaaaattatgggtagttcaattaaatacctaagaatggtggctataagtatgggtcaggtggtataatgtaatatggtagctaatttttccccattgaagtgcacaagtgaaggtaaagggtcactgggaacttttttggccctttaaggggggtacttgttactgggtttggtataggttatagagattatagttttataaggaaattt

SEQ ID NO: 584773 - DNA, 439 bp, Homo sapiens
gtaccgccagggtctaagaacccctatccataggactcaacaaatatatcctattggttctttagatatactatagcactaaattaggtgctagggatataatggtggaacattatatcccactgatgctgtggaaccgacataatagtagaagaaataaggacagagaacagtcatctttgaattcttctgaacagcctggaagtgacagtattcttagagtagccccctcttagtataatacttccttctttcattatcttagtaactagcctcacttggagtcctgactagggaaggtagttacggagaggatggatataaagagcctcagtcagtatatgataaagttagtccgagtcagagtacaagggaagcttgttactagggcactacagaatgggtaatcgagataggagaagagggcatatatatactg

SEQ ID NO: 584774 - DNA, 634 bp, Homo sapiens
ccggggccacacctgctggccgcccaatgccagtgcaatggcccagtgtgcctgacatctgctcccagcgctcgatgtgacctgagtgcctgctgtgtgagtgacacctgtgctccctcgtggacctgctctggattcctggccctggactgtccccttgtgagctctgcatctccaacctggaacccaacccagaagtctcaagtttgactgcatcactgtggctgtgcaggatccactgagtggtccacagagaggggcgcccatctcctgcgtctcagttatcctggtaatttgttgtatcttgcccatattgtatcgttgcctcattaacttggctttctagtgttgcacccaccttgccaccagagaagtccaaatcctgacttctctccaaggtgtaagggaattctgtgccctaaagaattccgactcagatccgaacgtgggatctggtggaatcgagggtgaaagaccagagggacaatgtatctactatcccaactgtgcttcagcgccacacctggctgctttgccaccatctggcttggcggcgactcgcggcagccggttggttgacagcgcgatacctgagggtgactgtggctgacacacctgcgaggacgtctcgatt

SEQ ID NO: 584775 - DNA, 961 bp, Homo sapiens
  misc_feature (114)..(114): n is a, c, g, or t
  misc_feature (116)..(116): n is a, c, g, or t
  misc_feature (169)..(169): n is a, c, g, or t
  misc_feature (171)..(171): n is a, c, g, or t
  misc_feature (173)..(173): n is a, c, g, or t
  misc_feature (269)..(269): n is a, c, g, or t
  misc_feature (271)..(271): n is a, c, g, or t
  misc_feature (295)..(295): n is a, c, g, or t
  misc_feature (349)..(349): n is a, c, g, or t
  misc_feature (383)..(384): n is a, c, g, or t
  misc_feature (398)..(398): n is a, c, g, or t
  misc_feature (421)..(422): n is a, c, g, or t
gggcggccgcacctgcccaacccaacccgcacggtccggaagtcgccgaggggccgggagcgggaggggacgtcgtcctagagggccggagctgggcgggcggccgaggacccngnctcccgcgcaggacggagccgtggctcaggtcggcccctccccaacaccaccncngnggcctccgccccttcctgggcctctcggtggagcatggacccgaaccggtgcccatccagtccggtgccatctgaagcccccttcccagcagcctngngcaccatcttctcattcatctccnaggactgtggtctccaagctgcggatcatggagcgcctcaggggcggcccgcanagcgagcactaccgcagcctgcaggccatggtgnnccacgagctgagcnaacggcttggtggacctggagcnnccggtccaccaccggagtctggctgccggacggtgccttgcggccttgacctgtgcccttgctcttggcttgccggctggttccctgggagcgcctctttccctcgcccagcgcgccgagggactgcactgcaccttccgcgcctctgcgccgaactccttacaagggccctcggctggccgccttaccagccgctgggggtcgttgcgcccgtgccgtcacccgtggccttcttgcacgctgcccaacacaggcgagggtcttccctgggaggcccatgaacggtgggggcccccgggagccaggccgtgcagaatgcttaggcgagggcctccccttcatccagcggtgtctacaaggtctcccagaaggctctaacgccgagcactcccttggcttgaccttgcccttaaggcggggaaagccagggccgcaccggctttacctgcttggcgaatcttgcgcttggggtggaccagggccgtggaagatccggggcagaagccttctggggcgctcgcgcggaccaggagaaccta

SEQ ID NO: 584776 - DNA, 855 bp, Homo sapiens
  misc_feature (114)..(114): n is a, c, g, or t
  misc_feature (116)..(116): n is a, c, g, or t
  misc_feature (169)..(169): n is a, c, g, or t
  misc_feature (171)..(171): n is a, c, g, or t
  misc_feature (173)..(173): n is a, c, g, or t
  misc_feature (506)..(506): n is a, c, g, or t
  misc_feature (508)..(508): n is a, c, g, or t
  misc_feature (532)..(532): n is a, c, g, or t
  misc_feature (586)..(586): n is a, c, g, or t
  misc_feature (620)..(621): n is a, c, g, or t
  misc_feature (635)..(635): n is a, c, g, or t
  misc_feature (658)..(659): n is a, c, g, or t
gggcggccgcacctgcccaacccaacccgcacggtccggaagtcgccgaggggccgggagcgggaggggacgtcgtcctagagggccggagctgggcgggcggccgaggacccngnctcccgcgcaggacggagccgtggctcaggtcggcccctccccaacaccaccncngnggcctccgccccttcctgggcctctcggtggagcatggacccgaaccggtgcccatccagtccggtgccatctgaagcccccttcccagaacatgagccacagagcaagctgaccccaagtgacacaagcaccctcgcagccctactgtactttccgttacctagtcacagatagaatggatgacgtcggagcacagtgtttcaagtctcgaaagtcgtccttggtcacgtttcacacgcagttgtcatcagatgacgaacggaagaggtcttgctggacccctacattgccacgctggacagtggcctaggtcaggtctctcgagcagcctngngcaccatcttctcattcatctccnaggactgtggtctccaagctgcggatcatggagcgcctcaggggcggcccgcanagcgagcactaccgcagcctgcaggccatggtgnnccacgagctgagcnaacggcttggtggacctggagcnnccggtccaccaccggagtctggctgccggacggtgctgcgcctgtcccgcgccctgtcctggctagcagctgttcctggagggccttgcgtaccagccccgaggacgcacgcacctccgctgctcttgcgcctgagctcctacgatgcctcgttggccgtctaccggcccctgggtctgtgcgccggtgccgtacc

SEQ ID NO: 584777 - DNA, 156 bp, Homo sapiens
  misc_feature (143)..(143): n is a, c, g, or t
  misc_feature (149)..(149): n is a, c, g, or t
acgaaacaacaaagcaggggatttctcttctgattattatcataaaaaggtccactgtcttatatacacatgtatataatgttacattccatcactgtaaaaagtcccctttgccccctcccccaaaaaaagtttcagtctangcctcncaaactt

SEQ ID NO: 584778 - DNA, 117 bp, Homo sapiens
agaagaggcccaatgagccagcataagacacaacagaagacacagagcaagacgaacattaagaaatggattgtggaacagatgaagaagaagaaaccgtccctttgctagagcctt

SEQ ID NO: 584779 - DNA, 308 bp, Homo sapiens
  misc_feature (12)..(12): n is a, c, g, or t
  misc_feature (32)..(32): n is a, c, g, or t
  misc_feature (71)..(71): n is a, c, g, or t
  misc_feature (128)..(128): n is a, c, g, or t
  misc_feature (224)..(224): n is a, c, g, or t
aaaaaacaaganttttaggatttttgaaacanttgatgagctttggctttaacccaaagtcaccagctgtnttagctcttaagagagtcaggctgtcctttgaagctttgaagctaggcattcatttntcccctctagctaggaaagtcctagatagcatcttcttccaatagaaggctgtttcaactacactgaagatccgttgtttagtgtagccatctttntcaatgattttagctacatctcctggataacttgctacagtttccacatcagcaacttgctggtccgttttccacttgtagggt

SEQ ID NO: 584780 - DNA, 890 bp, Homo sapiens
  misc_feature (220)..(220): n is a, c, g, or t
ttgtggctccggaaaggcgtagggatgccaacgatgaggctgctgtcattggtggtgtgggctctatttgctgtcactcaagcagaggaaggagccaggctttggcttccaagatcactgactgaacagagtacgccgtggagcggacgatgacctgagccttgcaagtacaacatctacaactgttgtgctgcgaagtgctgcgattaggacgtggaanctatctgtatgattccttccactccagacagactattgggcattgtgtgctggcaatggcctcaagtgtacagaatgggtaccgagattgctcgcctgtcatagccaatgtctccggccacactgtggtcctgtcgccctctcaaggctggttatttgcaaccttcacgctcggcaacaattacttacctggtcccaggaggatgggcccgttgtgattggtgtctaccagtgcagctggaccagggaggaatcctggctcagcgggaggttggacaggcgattctccgcctcattttctggagctgggcaggctttggggtcatgacccttccctccatcggatatccccctgctatgtggtactccagtcaagaggaaatatgatgactcccgaaaaacgaggaagaacttgattggggcttccacagccctcctgctcccagaaatccagggtcgctctcccaatgaaatccaggtgtttccagactccaaggggtatcttatatggaaatctcttctctcttagccttggcaacttttcctgtatcctggcctgtctcagcatagtgaagacagccctaggagtcttggaaagcctccttgtgtccatcggaaggataaaaggaatgctttggatagttgagctaaagggccttgatgccatgagt

SEQ ID NO: 584781 - DNA, 307 bp, Homo sapiens
gggggggggggccccctcctggaatcccggccctttgggggggttgaggcagggggatccctttagtccaggggtttgagcccagcctgggcaacatggggagacctggtctctccaaaaactaaattagttgactgggggggggcatgcctggggtccccgctcctgggaaggttgagatggggggatgttttgggccttgggggtcaaggccccagtgagctgggattgggcccctgtactgcggccggggcatcagagcaagcccccctttcaaaacaaataagcaaaacccccaaaattttta

SEQ ID NO: 584782 - DNA, 127 bp, Homo sapiens
agctgagggagatggggtagcgtggtgttgagtggaccatggggtacgtggagttgagggaactgggcagggcacatgtcacactcctgtactgggcattcgtgttcctgcttcaggttggccctgt

SEQ ID NO: 584783 - DNA, 112 bp, Homo sapiens
tggaggagaaggcagagaatgaagtgtggagggcaggcctgggcccactgctcagggaagctccccccctccagatgctcccttccatccacctcctctgacagagaggagg

SEQ ID NO: 584784 - DNA, 413 bp, Homo sapiens
tatgaacatcatttgtagtcttgtattaggtaatagaagttaggatttcagaacgtaatgggagacttgggggagactgcttgttttgaagttgaaagcagtacattcaaatatgtaagtaacagcatagaaaaatgtatatagggttaacgtgcagaggtttgtatttaggctttcctgtaaggttaaatcctgttgtttaaaacaaatattcagataacaataacactttaaaaccattcaagagctgggcatggtgactcatgcctgtaatcctagcactttgggaggccgaggcagaggaatcacttgagcccaggagtttgaaaccagcctaggcaacgtggcaaaatcccatacctacaaaaattagccggaagtggtggcatgcaactacaggcccagctactcag

SEQ ID NO: 584785 - DNA, 383 bp, Homo sapiens
agaatgtgggcttcaccaaggacgtgggcaacatcaagtttctggtctgcgcagactgtgaaattggaccaattggctggcattgcctagatgacaagaacagtttctatgtggccttggaacgagtttcccatgagtaactgaggggtggggttctcatctccatcttcaaagatttaccttcttcccacaagaactggcctttttggtggtttatactgttccgtggcctttttgtttgtgcttttttaatttctgtttcccagcttttttcttttgtacatgcatagggatatttcctgtatcctaaaccctaaagttcttgccttcctggcttaattatactttgtttcaattttccctaagcttctcttttcccctca

SEQ ID NO: 584786 - DNA, 660 bp, Homo sapiens
gttctttcataatttggctctctgtttgtctgttattggtgtataagactgcttgtgatttttgcacattgattttgtatcctgagactttgctgaagttgcttatcagcttaaggagattttgggctgagacaatggggttttctaaatatacaatcatgtcatctgcaaacagggacaatttgacttcctcttttcctaattgaataccctttatttctttctcttgcctgattgccctggccagaacttccaacactatgttgaataggagtggtgagagagggcatccctgtcttgtgccaattttcaaagggaatgcttccagtttttgcctaatcagtatgatactggctgtgggtttgtcatacatagctcttattattttgagatacgttccatcaatacctagtttattgagagtttttagcatgaagggctgttgaattttgccggccttctacgcatctattgagataatcatgtggtttttgcctttggttcctgttatgtgatgcattacatggtttacattgcatatgttgaaccagccttgcatcccatggatctgaaccacttcgctctggcgcatgcttctcgtcgcgctctgcattccgctctcgcaccttttatctgccgatttcaccttatcgttttccg

SEQ ID NO: 584787 - DNA, 281 bp, Homo sapiens
agggttctctctatcctttctgtttatcgactcccaactccttgttgttcattcatctcttcctgaatctgtgcccctgtaccctgccggcctccctggaggaacaacgcatgccatacccctttactacccaaggcattaccttagcagttcaccttctcttttctgcacccttaattacttttctctacagcatatatcccaccagcatccaaatacaccctcctcttaactatccactcaagaaccgtctcttgctcctctgccccattccactactt

SEQ ID NO: 584788 - DNA, 625 bp, Homo sapiens
  misc_feature (8)..(8): n is a, c, g, or t
  misc_feature (241)..(241): n is a, c, g, or t
  misc_feature (243)..(243): n is a, c, g, or t
  misc_feature (263)..(263): n is a, c, g, or t
  misc_feature (265)..(265): n is a, c, g, or t
  misc_feature (277)..(277): n is a, c, g, or t
  misc_feature (290)..(290): n is a, c, g, or t
  misc_feature (360)..(360): n is a, c, g, or t
  misc_feature (403)..(403): n is a, c, g, or t
  misc_feature (458)..(458): n is a, c, g, or t
  misc_feature (561)..(561): n is a, c, g, or t
  misc_feature (579)..(579): n is a, c, g, or t
tattggtntgttaattgttagtgcagttttttaatcttattgtaggcttattctgaggagaatttttttatgttactgatactaacattagttcttctatagggtgatagattggtccaattgggtgtgaggtgttcagtgatatgtttgggattttttaggtagtgggtgtggagcttgaacgctttgttaattggtggctgcgttgaggcctactatgggtgtgaaattttttactctntntacaaggttttttcctagtntncaaagagctgtncctctttggactnacagtcaaatttacaaggggatttagagggttctgtgggcaaatttaaagttgaactaagaatctatctnggacaaccagcgatgaccagggtcggtaggtttgtggcctctncctataaatctccccactattttgctacaaagacgggtgtccccttttagctgtnctgaggtagctcgtgtggtttggggggtgtgagctttggctctgcttgcaaagtgatgtctagtgaattcattatgcagaaggtataggggtgagtgcttgcnatatgatgcttggttatnattcttcatctctcccttgcggtactatatctatggcgcgaggttt

SEQ ID NO: 584789 - DNA, 143 bp, Homo sapiens
atgggcgatgccaacattactactcaggtaccccagatacagaaggaaatcatgcgtgtgatcggaactcagtttacacaaactgagggggcgccagccctcgtaccacccctgttaccccagggtccatctgacccactctt

SEQ ID NO: 584790 - DNA, 357 bp, Homo sapiens
  misc_feature (12)..(12): n is a, c, g, or t
  misc_feature (46)..(47): n is a, c, g, or t
catgtcctaganccattgtttgaatattaatggtgaaagacacccnncaagagaatgaaaagacaaacccacagactggggaaaatatttgcaaaacataaatcctgataaaagacacatatcctaaacaatataaatggctcttgaaaccccaatgacatgaaaacaactcaattaaaaagtgatctgagcggacttcttttgagaagtgtctgttcatgtcttttgcccactttttaatggggttatttgttttttgctcattcgattgtttaagttccttgtagattctgggtgttagacctttgttgactgaatagtttgtgaagattcgctcccattctgtgggttgcctgt

SEQ ID NO: 584791 - DNA, 194 bp, Homo sapiens
atcacacgcacatctcactgtgctgacctgtgctgtgctattcactgccgtgagcatccagtcgcgaaccgacaggtattcatttatgtccgcaacacagatattgctataggctctgtgacatcatgaaggacatgtgtatggttaacttctatgggcacaaggacagagtactcggcttgaaggccttgttc

SEQ ID NO: 584792 - DNA, 231 bp, Homo sapiens
ttttttagtttttggttgaactcggggcttgtttgagttaaagctaattttgccagttccttgggttgggggcaaatctcctccagattgatgtgtagagaaggtagtgggcctgattaatccattgaggaagtagtagaattagccagttggaacactgagcaagtcattccctttgaggatcgatttctacaagtggaaaggaattgaacaggttctaagaagacggta

SEQ ID NO: 584793 - DNA, 129 bp, Homo sapiens
cccaacaccgggctggggcataactcgatgattttgatgatcgaggcccaggtcacctacatcctcgatgccttgcaacaaatgcagcgccatcgcatcgccacggtggacgtcaagccaacggtcgac

SEQ ID NO: 584794 - DNA, 686 bp, Homo sapiens
taaaggccatttagtaacatgtccggttaagtcttgtaacacaaacccggggttatgttctgggcgaaacattttgggcctagaaaaatgaattggggctttgccactagtaaaagaaataaaatgcccttttacgtctccctcccctacaattgacctttgggtaggccccaaacttgaaaagccagcctgatgataatactccaacctatccgtcccatagacaagatacccagcctttacgcggtggtcggtcgccgtgcaaggtcgcacctcacagtgtttagagcctccatggtctatcaacagcactgtgttcaggatagtgtgtgacacgcgcagcacatcgttcgatccgttcagagccagtcatgtcaagtcaagggctgccgcgtccttcatggagggccacgtgaagtacagaagccagtcaggttccttttttccatcacgaggatatggacacctggcctcagcttgagcccttaggtaacaagaacttcagctcctcctgacgccaaggatgattctaattgttaaaaattagatctgtcaataatccgtccttataaagaatggaatatgctatcctataagttccactggttgccccctgtgcagttttaagaaattaaacaaaagaagatattccctctcctttgaaattagacaataaaaatttggca

SEQ ID NO: 584795 - DNA, 182 bp, Homo sapiens
atcagcacggtgaaaaagccgacattggcgccggcgtcgaccacgcagtctccggccttgatggcgcgggtcatgacgtggatcacctcggattcgggcagctggcggttctgcgcgtaccagagcaggttgcggtcggactcaaactgctcgggctggaggtcgaacaggagcttggggcg

SEQ ID NO: 584796 - DNA, 310 bp, Homo sapiens
cctaaccagtatctaggatgtattccagaagggaagtgcaaaccatggtagtagagaaattatttggagaataaaatcatcacaatttttcacattgggtaaagacaaaaatctacaaattcaagtaacttaaagaactgcatatagcataaagtcaaagagactcagacctatatgtgttatcatccaactctaaaagccagacaaagagataatctttaaataacaagagattttgggagccgaggcaggcggatcacctgaggtcaggagttcgagaccagcctggctaacatggtgaaaccctatt

SEQ ID NO: 584797 - DNA, 760 bp, Homo sapiens
  misc_feature (10)..(10): n is a, c, g, or t
  misc_feature (170)..(170): n is a, c, g, or t
  misc_feature (219)..(219): n is a, c, g, or t
  misc_feature (227)..(227): n is a, c, g, or t
  misc_feature (329)..(329): n is a, c, g, or t
  misc_feature (360)..(360): n is a, c, g, or t
  misc_feature (386)..(386): n is a, c, g, or t
  misc_feature (452)..(452): n is a, c, g, or t
  misc_feature (454)..(454): n is a, c, g, or t
  misc_feature (460)..(460): n is a, c, g, or t
  misc_feature (466)..(466): n is a, c, g, or t
  misc_feature (480)..(480): n is a, c, g, or t
  misc_feature (482)..(482): n is a, c, g, or t
  misc_feature (491)..(491): n is a, c, g, or t
  misc_feature (509)..(509): n is a, c, g, or t
  misc_feature (515)..(515): n is a, c, g, or t
  misc_feature (520)..(520): n is a, c, g, or t
  misc_feature (525)..(525): n is a, c, g, or t
  misc_feature (559)..(559): n is a, c, g, or t
  misc_feature (564)..(564): n is a, c, g, or t
  misc_feature (567)..(567): n is a, c, g, or t
  misc_feature (583)..(583): n is a, c, g, or t
  misc_feature (640)..(640): n is a, c, g, or t
  misc_feature (649)..(649): n is a, c, g, or t
  misc_feature (676)..(676): n is a, c, g, or t
  misc_feature (679)..(679): n is a, c, g, or t
  misc_feature (684)..(684): n is a, c, g, or t
  misc_feature (691)..(691): n is a, c, g, or t
  misc_feature (694)..(694): n is a, c, g, or t
  misc_feature (711)..(711): n is a, c, g, or t
gccccaaganactggcactggccttggccacccattttctcaactttaggctcagtcagaccaagcatagaaagaacaggaggctctctatgttgcctgaggctggcagtggtgaccctcagaaatcacaagggagcggagagagctgtgttcaacatgacacgcttgangaggaagggggactgtgatggggtcgtttggcctactgccctggggggnccccaggnggcctcctctcctgttggctagggggtgaggtcctatgagccggggggggtgggggggcgtgtgggggcttcttctccccacggcccagccatgggcatggnggggccgtacctgggcctagagatgatagtntggtctgccaggcagttgctgccacnctctttcctgtgggtcccagcgggggtggcctggtgccctgtctcggctgtgctgcttcccggggngncaggcngtgggnggtcatgctggcgncntcctggccngccgcccggggggtggtnggctgntgtgntgggntgggctcttgccctgggttggtctcatggtgcanaagancantgttgggatcattctnatgcttcagggtgcctcatgtgccccatggggctcagacatcaggaggtgctgggantctatttanccgttcgatgatgcggttgtggtccangangtcanatgccancancttcatcccctcgcagnctcttgcatgcttgctgagactctcctgggcccctgggcttctgtgtta

SEQ ID NO: 584798 - DNA, 126 bp, Homo sapiens
cgttatgatgttcatcgcatcacggagctggtctccgagcaaagaaagacaacctgtgcaaaacagcagcagcaacaacagaacgatgtggtgaagctcacgaaggaacacgtaaaccgaaagaaa

SEQ ID NO: 584799 - DNA, 154 bp, Homo sapiens
gtaatgctcatatcagttcacagtccaggcggtaattcccaaactctgagcccatctgcgctgcacctcgtagccatcagggtactgtgagggcaccaggtggatagcgtgtgtcctgcaccaggctagcgcacacgtatgggttcccatacgc

SEQ ID NO: 584800 - DNA, 124 bp, Homo sapiens
ttttttttttcagcttcggaatgtgacaatttatttggggggtaaaagaggcttttcacccccctttcctggcgttgttacttttttgaagagcagcattatcatacggacaagacaggtcgac

SEQ ID NO: 584801 - DNA, 213 bp, Homo sapiens
tcatcgagctcgcccttattaccacgatcactcgctatcttttttttaaacagagtcttgctctgttgcccaggatggagtagcagtggaatgatttcagctcactggaacttccgccatcccaggttcaagggatactcgtaactcagcctcccgagtagctgggactacaggtgtatttttgtatttctaatagtgatcgtggggttgtaa

SEQ ID NO: 584802 - DNA, 1662 bp, Homo sapiens
  misc_feature (392)..(392): n is a, c, g, or t
  misc_feature (657)..(657): n is a, c, g, or t
tgggtgaaacaaaagaacacttacttaaaacattgtactggtggtgatgattcccaggggccactgtggttcagccgtgtgtggaccccgtggatgtgctatccacacccaccttattcccttgcagcttaatttaagctgtgactcttcataattttaacgtgagcttcttaatttatagctgactcagaattttggcttggggttaaagttctcctttttataatgtggtctctatagaagtgtgtttctacagagagtctcctcaaatattctcgagttataaacaagcataattttatgagggtggccatataaacattataaattagaaaaccgctgttaagttctccagaaagacaccccttaagtgtgtggtttctaaaacaccncttgagagagacacacacttttctcaaatgttgtgcactcccaaaatgtttgtgcacacgtgcgcccacaccagagtctcttttataaaacaccactgtggacactatagaagagacagacactacagtgcagtgtagacacaccattctataagacaaacaacagagagtgtgtctctccgaatctgcgacagagagagagcctcttatctcgctgtggctccccgtggtgggtgttttcccccgagtgtgtgcgtgtgacacnccacccgagtggagagaggtcctccgccgtgagactctgcggggctctcaactctccgctattttctactcgccccacacccctgtgttgagagacaacatgttgtggttgggcagaaaaactctccccgatgtggggaaagagaggggccaaaaaatatgtgggccacgagaaaggggttttcaccatgtggtctcccccggccgtttttgtggacaatatttcttcccttcgcgtgataaaaaagacaacaaaagacgccgagtggtgtaatatacacccccgtgagaacatataaaaccgcgcgaggcggacctaccactacccggaatagaggaccctccctcgttgatagaagcgcgacattaagcacaacttttggggacaatttctcccccacagaaaaactcccctgtttggcaagcccatagtgggcatttattaagaatgttgcgtctcccccctgcgggggaacaaggggcttgcgccttgatgaaaggttatcccccaattttatttttggttgcgcacaactctctcacacacaatatgatattaaacaacacaccatttcttatgtccttataaaggtttcccccctgtggagaaagacgcgtttttacgttggagaaccctcaacaacgggccccagccggtgttctctcttggcgcccaacaccaaaacggcagagtaggagtagtgccgggagaccttaggacccccctcacctaaaaagggggagcagccccagtgcgcaaaaaaatacccgcaagggggaggacggacatagggaagcaacttgcagcagggaacacggggggggccgtcaaacacacccacccgtggtgaagatggtaatgcagcatccccacgcttatataagcaccccgcggaaaagggtgatcagccacgaaacatcatataaaggggggcgcccactcgacgagagatataagacacagccgagtcgagggcaggagaacaacatctgggggggagacaca

SEQ ID NO: 584803 - DNA, 444 bp, Homo sapiens
  misc_feature (131)..(131): n is a, c, g, or t
  misc_feature (172)..(172): n is a, c, g, or t
  misc_feature (174)..(174): n is a, c, g, or t
gaggatccacggaccgcgaccagagacccaggaagctggcaaggcaggcttcagggggcactacggagtgctgtaaatgcggcttgaagatgactggctttttgaggttgccttcgtggcaaaactaattncttcagtacccaagtcctggcagtccaatacttagagcctnanagagatgtcaggttgcattcctgtggttttttttcttttcctgtgttcactgtgaaagtgattcctgggtgcctgtgaagccttcacccaaaagcaggcttataatggtgaaatttcaggcatggctggaggcctaaagacacagatccttggggaataggagcggctgagttttagaatggctccaggcaggagctctgtgcaggatgtgcagactcagtaaggcacaactcaggggcaccctaacccccggaggatctttgcctcgtg

SEQ ID NO: 584804 - DNA, 1397 bp, Homo sapiens
  misc_feature (904)..(904): n is a, c, g, or t
  misc_feature (968)..(968): n is a, c, g, or t
  misc_feature (981)..(981): n is a, c, g, or t
  misc_feature (984)..(984): n is a, c, g, or t
  misc_feature (1002)..(1002): n is a, c, g, or t
  misc_feature (1010)..(1010): n is a, c, g, or t
  misc_feature (1025)..(1025): n is a, c, g, or t
  misc_feature (1185)..(1185): n is a, c, g, or t
  misc_feature (1189)..(1189): n is a, c, g, or t
  misc_feature (1236)..(1237): n is a, c, g, or t
  misc_feature (1246)..(1246): n is a, c, g, or t
tgttctgcttgtctgcatggggtctatggttgcctctgtctttggttctggccccggcggttagtcgttgttgcttgccctgggtgtggtccgtaagtgggactgcgtttttcttgtgtcctgcatggtgggggatgcttcctccttaattagtggggtactgcccccatgttgtcgggtgccctccgctgtgttacacgccccccggattgggctggggcatttatcgcaggggggcacccacaaagtgtcttctatgttgccgccggccttggcagacgccccccggttcgtcttctggtgtttgaccccgtgaagagtgttttttcctccccccccctccggtgtttgcttcgccgcctattgccgtctcgtcccgcccaaccaactcagggctgttagcccacccccccgtcgcccccaggggtttagtccgccgtgtcccagactttttgggtttttaccgttggtgtgaggatactttttcatttgggccacccacccggtccgcagggcgcaagtaccagccttgtcccacccgccccgcgagagggaccttgtttgggaagtggggcccccctcccccgggaaaccttttggcggtgtaatggcccccggggcctcttcccggaccatcatgccctggccctccgtgtgcttggcgcctgccacaaggcctgttgggccacaggtcactccccctggaggctgttacccgggagaggcttcacttggcactgggcccctgtcccggtgtggcacccacacgtgccccacagctggttccagctgggtggaaccctgtgaccctggccgcttcttagaaaagaaacactcgcccacaatattatgtgatggacagatttcacagagaagagttgtgtgtgatagcacacgggcgctntcgcggagggacacccccctctccaggggccacttctcctcgggggcttacacaccttgaggcncccccgcgtggtnctncctcttgagactttccancacgcgancaccccacacttccntccaccctttgaacctctggggctggcaattgccctcacacgagccacctttgtcaagctcactttcctggtatgaccaccgaaatttggctacagcaaacacagggtggtggaccctcactggcccaccactggcctcccaggagtaagacccctgganccanccagccccacgccagagcacccagaggaagagagagaccctcacctnnctggggagntccctgccaccacactcagtcccccacccaccacctgaatctcccctcctcaccacgttgccatgtagaccccttgtaagaggggaggggcctagggaaccgccccttgtcatgtacccatccaataaagtaccctgtgctccaacccaca

SEQ ID NO: 584805 - DNA, 404 bp, Homo sapiens
aacacagctctatcacagatagcattgttcacttgtctcactactagaagatcttataaccagtgccgccttttcaaggctatggccagtctgcagaatgggagagatccctgtgcatgagctggagaaattcgaaagtcagaggaagggaagcagaggtctgcagctcagccttccaccagcccagctgaagtacagagtttaacaaaagctatgtcttcactccaaaatgacagagacagactactgaaggaattgaagaatctgcagcagaaatacttacagattaatccagagatcactgagttacatacactgaaggctcaacttcaggagtatcaagataagacaaaagcatttcagattatgcaagaagagctcaggcaggaaaaactctcctggca

SEQ ID NO: 584806 - DNA, 324 bp, Homo sapiens
tactactactactactaaattcgcggccgctttgacttttttttttttctttctcttttgatctcagtctctttccagacctcctaggttttattctctagtactaaatgttttctgctttactttttttttttcttagagacagacttttgctgcgttgcccagtctggagtacagtggcatgatctgggttcacgggactctccgtctcccgggatcattgccatacgctggcgtaagactctttattgattggaactactggggcctgccaccacacccggttaattactggagtttttagtagaaacggggtttaaccgt

SEQ ID NO: 584807 - DNA, 621 bp, Homo sapiens
  misc_feature (151)..(151): n is a, c, g, or t
  misc_feature (158)..(158): n is a, c, g, or t
  misc_feature (174)..(174): n is a, c, g, or t
  misc_feature (255)..(255): n is a, c, g, or t
  misc_feature (287)..(287): n is a, c, g, or t
ttctcaccgaacgatgttcggtcctatcatagggtgtctccttataacgtagtgagcccattcttaatgcataaatgtggtatgtctatccacactgtctctctcagtagtgcagacgtacagatgcccgttgcatagaagttcagtgcgncctccanccaacagtcataaccnctgaggatattgtttctcgtcagtagccgtaagcactggccagacgtaaggcgtaaacatttcttagttaggcatgatgcnccacgtaacctgtataatgtgtaagttatcanacatatcagtatagtggtatccaaccttagatatgcgcatttacaattatgtatggcaacagcaatgtgcagccgtcttacagtctttctggcgtttggcctagttgccctcgatcagtaagcacagccactaaatcatgggcccacatatgggctgtctggcagtctccaggcatgttttcggcatcaacaaggagcatcacattctattcaaggctcagcccccccggacctttcatcaaaccgtacatgtggagcctgattaatacaccggttccccgtattcacaacatgtgttcaacgcccatccttccaacaggcattattactggag

SEQ ID NO: 584808 - DNA, 306 bp, Homo sapiens
atgagatcatcgtatgcgattttcggacaattctcaattggaccatctatgctaacacatagtagctgcggaccaagggcttcactctatagtcgtgccgcaacatggtgaacctcatggatcgtgatggccatgggaagctgagcctggctggagttcaccatcctgtggagcccgggtccggaagttacctgtccgatcttccggagagttttgagccctggactagtcgggcagcatgagtgcctacgacatgcgtattggcattgagtccgcgggcttctagcctcagctagaagctgttca

SEQ ID NO: 584809 - DNA, 261 bp, Homo sapiens
  misc_feature (159)..(159): n is a, c, g, or t
ggggcccccccccttaggttttttttttaggggtttggtttttgttcccccggtttttattgggcccaaaaagggggtttaatttgattgcccctgccccccctgggggggggttctttattttttccccccccaatttcccggttttaagttagcccnactcctttgccattttctccttttttggttggttaaaaaccccccaattattatagttggggggccctttaccctttaaaagggtggcccctttttccttga

SEQ ID NO: 584810 - DNA, 211 bp, Homo sapiens
ggtgtacgtacagcccatccgagctctgcatgagggatatatgccttgttgagacttatggtcagagcacttactctaggcagatcaagcaagttgtaggatgacattccagcgacttctctagaaaatttatgtgctcacttgtgattcaagtatctgaacagggcctggcccaaccagcactctcggtattgtgctgctgattagccga

SEQ ID NO: 584811 - DNA, 227 bp, Homo sapiens
ctgcattcagcattaattatgcatattttcacttaattctcttccatttttaattttacttgtatttgtattttattttactttatttttatcttttgagatggagtcttgctctttcacccaggctagagtgcagtggcgcatctcagcttactgcaacctctgcctcctgggttcaaatgattctcctggcctcagcctcccgagtaactgggtttacaagcacc

SEQ ID NO: 584812 - DNA, 290 bp, Homo sapiens
agtcggtgtatactgtagctaccctgtcacttctcatggactctcctctccggctaggctttgtatccataattaagagtcttctgccagtgccatagctactgttggctgctggaaccgccatagccaccttggtttcgtggttaggcaaagtattggcctccagcgccataggggccagaggttctgcctccaagaattgcctcccttcatgggtccaaaatgtgacgactgattgttgtaagttcccaaaatgattgtagcttccaccaactcaggatgcttcttga

SEQ ID NO: 584813 - DNA, 270 bp, Homo sapiens
gcctggcgcgacatcctggaaggtctttgtacggaactgcccgtaaacaagcagctgaggaggatctaggagaagctcttctccaaatatggtcccctgtctgagctccactaccccatcgacagcctgaccaagaacaccaaagggtattgcattcaatcaccttcatgttcccctgagcacgctgtaacgggcctactcggaggtggcacgggcaggtcattcccagggcaaggatgctccaacggttgttaccaatctaccattcca

SEQ ID NO: 584814 - DNA, 184 bp, Homo sapiens
  misc_feature (5)..(5): n is a, c, g, or t
tagantcagaaataggttgagccctgtgtcaagggtcctcattaggtatcaaaaggtagcagccgtccatcttaccaagtatatcttctgtttacggggactgctaaacaggttcaagtggaataaactgggacagcctcaaaaagtgttgatgtggcctgcatgtgccaaacaacgtcctttt

SEQ ID NO: 584815 - DNA, 830 bp, Homo sapiens
cggtgtgaactactgacctttgctccggcctcgtcgtgaagacacagcgcatctccccgcctgtaggcttcctcccacagaacccgtttcgggcctctagagcgtctggtgagatgctgttgccgctgctgctgctgctaccacattgttgctgggccgtggaaggtcaatgaggccccggtggcgtctccctcaccacatcatcatcttctagcgatgagtccaacgcctttcaccgtgcctggagcggtctcgggcctaccactccgcacttgtgagtccaggtcacacgagtgcacctagttgcgcactgcggcagggatcggctcttgactgtagccagtgcgaccggtcttgccgtggtcctcatataggtcgagcttcctactgctacctaactaccttggcgctcactaagccccctgtttatccccctcccaacccgggtcctaactgcatcggtcgtcccgtgactagccttgcgatgcgcaccaagcaacgcaagatttatcagcacccagacagcaccggtccacttcatcggtgcagacaaaacaacccattgccaaaacaaacaaaacaagaagcgcgcccgtcaagcagcacagacaacgagtaagattccccacctagatgccatgcccagtatgcgcacccgagagcgcatcccaccccaggcccaaaaaacagggggcacatcacccacatcccctgtaacagcacagagaaacaacacctctgatttcgaaggggaccctggacaacaaaaatcacagaccaacgcagagcacaagccgcaccacaacaccaccaccccagcaacaaagcac

SEQ ID NO: 584816 - DNA, 922 bp, Homo sapiens
  misc_feature (323)..(323): n is a, c, g, or t
  misc_feature (685)..(685): n is a, c, g, or t
  misc_feature (882)..(882): n is a, c, g, or t
  misc_feature (907)..(907): n is a, c, g, or t
tttcttttttgggctggccgcgttagagcagtgcgcgtcgacagcctcgcgcacttgccaagaccacacctgtagcacactgatcagatataattcaacttcttgtccccaatcttcatccatatctcctccttactaacgactagatttgcactcttttatatttaatatatctatatccacctaccgtggacgccgggcacactcgcggcgagcgcgttgcacgtcgcctcgcaactatacagcgacaacgacggggacgagaggtggagaacaatatataagaaatacacagaaactaactgttgtattgtttatattgngctacgacgacggcatgttagttggggtggggacctgaggcgcagacgcggcgcggcgcggcgtgttggagatgatcggagcgcggtgggcgcgtgcctgactgtgcttgttgctgactcgccccctgctggcctgcgtcggatctcacgccacgctgcaactacataccactatccccaataacttgtcacttaatattcctcaacttatcatcatatagatagtatactctatatagtcttcttcctctctcccaccgtcgtctttcccttctctttccttctattagaggtatttagctattgccaacctgctctatccgtctggactctcttcactaccgtgcgcgacgccaagttgnatttcctctttctcgatcttctgtatctctttattcccaatatcctttcttctctccgttcttcgtcctatctcgtcatcgcagctctgtatgactgttttgtggtgtagcaggcggttagcttctcgagagtgtagcagtgcgcggcaacgtggaagacgcgggatgtattctgctcgagagtcctagttctctcngtggtccgcgtatggctatcagttnatatcaatatcaacg

SEQ ID NO: 584817 - DNA, 260 bp, Homo sapiens
  misc_feature (235)..(235): n is a, c, g, or t
cctcctcgctcttcctgggtcctctgcttttccctcaggtggcatccagcacgtccctctgctgccggagtcatcctcactcctcttcttaacaagtggatgcctgctccacgttgctgggtcagcgttggtgacttttgatggcttgctcccttcagcggacctccttcatgccttccagcttcttccttccagcttcttccttcttgcagggagtcttctggacggggtcctncttcagccggattcagctccttctt

SEQ ID NO: 584818 - DNA, 1601 bp, Homo sapiens
tggtggtggttttttggaacagagggtctctcgctcttttcacacccgaggcgtgcgagggcaggtggccacaagctctctcggcctccatgtgcagcctctccgcctctcccgggcctcaagggtgaatcttctcccctctcttcaaccctcctgtgaaaaagcttggacaacgtgcaggggtgtgtgttgccccacaatcaccgtggctataatttctcgtgtgatatattttaagtataaaagacggtggggtatccctccaatgtgttgtgccacgaggcgtgtgaatctctccaaaccctcactatatgcgaccaaccacaacctctgcgagactctattctctcagcaagagagtgtctcggggaatatatcacaggagagacatgtgaacagccccacccatatctccccgtggccctgttgaaagagttatttcccacaacacacatttaagagagaactcatgtgccaaagactccctatataatcccataaaaaacagtgtattttaaaacacccacagtcccctgtgcgcttctatcaaacctccgtgcgcgcgacacactctgtgagacactgttggaaagatctctgtggggccccgacaggcttcacatccattcaactcgctgcgtgccgcgcggagcagtcttttaaaaccacaccacacacacactatcatacagacaacccacaaccttttctggcgtcgggctccgacggtcacatcaaaaagagcaaccagacggcgctcacaaaaaaaaaaaatgtggggcccacaaacgcgcgtgcgggaccacctttaaagagacacccccccagaggggggcccacaaaaaagggaagaacacacatacccccacaaaccaccaaaaagaccactctctcaggacaagcgaacaacagcactggagcgacatcctgagacgaagacgcgacaattctgcgcacacaccaaccggtgggtggaccccccgctcggagccgacctaaaacaggacgcacaaatacgccacgaactacaagcacggagacaactacaagcatcgcccccagcgaacacaatccagggtcggaacgaaagcccccaacaacgatggcgcagtaaaacacacccctagcaacaacataagcaggagccacaccaacgacgacagaggtgaccccccccaaagtcaacacacacagagtccaccccacataaacaagcaacactagaagagaagacccaacagagcaccagcgtgggagaccaccacacatggtgaggaacaaacggcacagtcgacaaccaacggggctcatactagaaagaagcaacaccaggcgagcgaactaccaccgacgccgagataactacaccacagcgagcctgcacagaacaatcagtagaagaacagagcaccccccacataccactaagtcaagtccacagcagaaagaatgctgcggagtaagttcacaccccagaacacccccgcgggcccaacgccggacgaaaagcaccaaccaaaaaacaaaaaccaacgagcaatctagaggaagcacacagagggaggggccactaccaacacctcaacaggcagggtatgacc

SEQ ID NO: 584819 - DNA, 336 bp, Homo sapiens
cacaaagagagaccaccaaaatgtggtactagccggtgcagtataccggtggagtactctgactcagtgtacacagaacgttacatgggactcccaactccagaagacaaccttgagcattacatgaacttcaacagtcatgagcagagctgaaaattataaacaagttgagtacctccttattcatggaccagcagatgataacgtacacttacagcagtcagctcagatctccaaagacctggatacgatgtaggagtggatttccaggcaatgtggtatactgatgaagaccatggaatagctcgcagaacagaaaaccaacatatatatacc

SEQ ID NO: 584820 - DNA, 331 bp, Homo sapiens
gggccccggcctggggggtttttttttcccaggggggggagtttttttggggagggcccggcccccccctcccccccttttccccaaccgggtttttttttcccccccgaagataaaagggatttggccttttccccccgggccctttttttgtttttttttgggattgggggttttccttaacccccgctgaactaagttttggggggtttttttttaaaaaaaaacccgggttttaataaagccccttgggttttttccctttcccttgggggaagcctttgggggggggggttttcctggggataataaaacccccctgtttttttta

SEQ ID NO: 584821 - DNA, 802 bp, Homo sapiens
  misc_feature (175)..(175): n is a, c, g, or t
  misc_feature (199)..(199): n is a, c, g, or t
  misc_feature (201)..(201): n is a, c, g, or t
  misc_feature (204)..(204): n is a, c, g, or t
  misc_feature (206)..(206): n is a, c, g, or t
  misc_feature (208)..(208): n is a, c, g, or t
  misc_feature (237)..(238): n is a, c, g, or t
  misc_feature (240)..(240): n is a, c, g, or t
  misc_feature (279)..(279): n is a, c, g, or t
  misc_feature (598)..(598): n is a, c, g, or t
  misc_feature (606)..(606): n is a, c, g, or t
tggccggggaaaaacaattttttatgaaagttatagtcaagtcttttggaaaagttattggaaaggaaagatgaagtgattgctaagatgatgtctgtcaaaacagtcacaattaagaagtgtttaaagaagtcattgtacttgttttaaaaagcaatacttgccatctttccgntcttttttatcccggtgggtcctncnctngngngcagagatgtcacaaatttattcccactnnanggacgttcaaataatcactaacatgttacactttttggnttgggccccatataatatatttgtatagttcaaagaaaagtattcgatatttaaggtaaacagggtggaataaaaccaggttctagaacctttcccactcctaaaaactaatgaaataaaatcttattttctccagaagcccattagactgggcaaagcttaacctatagaggatctgggtacaagtttcccagattaaatttgaccaaatatagaattaattattttaaaattatgccattattcgggccgaatacaagggcaggacatcaagaccttcctggcttaccacttggaaaccatataatatatagtttgnctcttgtncccctttgtcggccgcctgggccccagccaacttttaactccgaacaaagctattccatcccgcccgaatttcaggcttattttggccaattcgccttttagggagttcgttttacacattacccgggccggggtgtacaacgcgggtgcttgagacctcttctttccccatcttagcccggggcacattcctttt

SEQ ID NO: 584822 - DNA, 536 bp, Homo sapiens
gacacctacacggatcaactgaggcaccacaatctcactggaaaggccgcgagtccgatcgatcactccgcgcagatcttgtccctgttcgccactcaggtgtatagccaagctgacaatgggtttttcccactcgccggcgatcgcatagtcaccgtatttggaggccaggctttttgcattgatggtcgcgtattgaccgaagaagcaaattttctgggagggcttcgcctctttaagctgcttgtgcaactgcgttcccgcagtcagagagtcaaaaagcggtaccgcagatgaagaccaaatctgcatcgctgaatctctctagggaaaagcccctcaacgtagatatcgatcagctgcgcgttcgatatctgcatcgagtagagctgttgtagcagatatccgcgtgaagcggttgataaccccccttcgaatgtacttgcgaccaggtacttcattctctttctccttggagctcaggcacggacgatccggtgactggcgtccctgagtggtttggtaggaatccgaag

SEQ ID NO: 584823 - DNA, 1155 bp, Homo sapiens
gcgattgtggcttgcgggaggtggtgtgcgccagtgttcggtggcctgttttggccggctatgcagtgattgtgcaggagctgctgatgctcacacttgcctcgccgaccgcatttcacatccagcagagtgaggcggggtgcagcctgctgagactggtttttcacaatggtaatgaaaatcctgccctgcgtgagtgatgggagtgcgacggcgcatgatctcgtgccgctgcgtgcctcgctgggaggcgaagggtgctgtggcgggctgtgctggaaactgtggctggggcccggtggtgcgtgacgcagcctgtgcccttctcagtggtaaacgccctgcgtgctccgggcgactgtgtgcccctggggtgccgtgtgcggaaggtgtggtgggtgcgctgctgcaggaggacgacggggcattacggcctactacaaagtggccgccacctgggggtatcccccattccccgaactgttgcccgagcgagccacgggagatgcacccctcctccttgtgacttgcgtgacacggggtcgtggcgcccgtgggccaatatgaagatggaggacttacgttcaaaggccagcggggatctttcacaagggtttatgcagacgcggggttggcaagcatccaaggtgcacagggggattgtccccagctagccgaggtaatacgtacccggacccgcttatccgtatccgcatcttcgggccctaagtacagttccgttccgatgtgggttacgcatcgtgaaccccagaagtggctgggagtccccggtggacaccgcagaaagatacggtgtgtaagggacgcttggacaaagattcgcagggagagccgttcgctcagatcccataggtagagtcgtcgaccaccagagggaacgtggtcgaatctacagacgagcttgcgcgagacagcgtcgaggtgccacgcggcaccacaggggcctggtgagaacgcgccgggggttaagcacgggtgcagctgcgcccgagtggtctccccaggagagccggctgagtgcagagcggtgataagctaccccggacgggcgggtaagaggcaggcgacccgtgtggggcaaggcgccggactgcgagcttaccagagttgagtccaagcgtcgggagcggtggg

SEQ ID NO: 584824 - DNA, 203 bp, Homo sapiens
agttgagaaaaagaaggaagaggaggacgatgaggaagatgagaggatgaggaggaggaggaagatgaagaagatgaagatgaagaagaagatgatgatgatgaataagatggttctagcgcagtttttgtttttctgggtctataaatgcatttaactcccccgggtacacaatctcactcctatttaagagaaaaaaatgg

SEQ ID NO: 584825 - DNA, 117 bp, Homo sapiens
ggctctcattgtggttttgatttgtatttccctaatgactaatgatgtcgggcaccttttcacatggttcaggatgaacttttttaaatataaatctgattctgttattccttgggt

SEQ ID NO: 584826 - DNA, 152 bp, Homo sapiens
tgtgatttggctttcccgctgtctttcctggtgatgccttagtcggggtactgtgggtttgtggtgggaacgacgggccattctgtcctagatgtagcctgctatgctctccgaagggccctgcgtggcctgtgcttgtgtgagctgtgtgg

SEQ ID NO: 584827 - DNA, 567 bp, Homo sapiens
cctaacccaaggtttcccaaaaatcagtcccgcacaatccattgtggctttagggggggcgtggtcacggcggaatgattgattagttttggggctgggcgtttaagttttgcttgttcgttcttcgatacgcttcctttgtatgagtctagatttctagcgtgtgatttgtttctgggtggcttcctttggtgtttcttagggaacgagtttgctaacggcgcgttttctcggtttttatttatcgagacggatctttctctttcgccgttaggaagtggtttcttgaaatgcgaggttcttaattaatattttatttcagttttctcggcgctttgcttatttcgctctgctctatgcttgcgtaatttctagaggatcgagtacggtttttgtcttttctcctctatgagtggaataatcttttcctctagtttttttttatggtttttttcgttgtctttagttttctagggtttaggtgtaggtatatgaacttttcttgttgaggttcgtagctgctatgtcgatgattccgggtggggcctttcccttcgctgacgtgct

SEQ ID NO: 584828 - DNA, 235 bp, Homo sapiens
aggagtccgttttccgatgcttctcccgtgcgcttttcttgtttttctgtttttttttcttcttccggagttgccacttgcatgagactgctcgtgagggcactgtctcggtgtcatctccgatccgtcttgctctctgtgtttccacgcgtgaccccattcctattgttccctgagtgccacagacgtctgtgtagcgcacagaccagacctcatccccagttcacctacaggg

SEQ ID NO: 584829 - DNA, 285 bp, Homo sapiens
tttagaattttctggtgaattttattctttttgatcaagcagtattttaagttttctatggcaagtggatgtatagcttatgtaataacagcaattacagaaggggtgtgggagaggccactgccaccagaagatccttacagcttttatttctaaagggctgctagacaagggacagctcacagctgtaatacacagaaaaatcaaactcatctttcagttctcagaaggtccagatacttcttgcactttgtgggcacagaatatacttctgccctctgcaag

SEQ ID NO: 584830 - DNA, 363 bp, Homo sapiens
  misc_feature (284)..(284): n is a, c, g, or t
  misc_feature (341)..(341): n is a, c, g, or t
ccacaatgcaattccacaccatacacactaagatagctgtattcaaaaagagagacaatgccaagtgttgacaaggatttggaaaaactgggtccctcatgaatttctggcgggaatgtaaaatggtacggccaatttgggaaacagtttggcagttctcttcaaagtcaaacataaccttgccataggatctagcaatttcattcctaggactctacccaaaagaaatgaaaacaagccgggtgtggtggatccatgcttgtaatcccagcactctggaaggnccaagggcaagaggatccacttgagggccaaaaagttcgagacttagcttggggcantcatagtttagaccctgtctct

SEQ ID NO: 584831 - DNA, 417 bp, Homo sapiens
acatgactgggtctagggcacccaggctgattcagctgatttcctaccagcctttgcctcttccttgcaatgtggtttccatggggattttgcttcagaaaagccaagtatgggctgttcagaggtgcacacctgcattttcttagctcttctagaggggctaagagacttggtacgggccaggaagaatatgtggcagagctcctggaaatgatgcagattaggtggcatttttgtcagctctgtggtttattgttgggccccctctctcccctatccattgctgaatccagtgatgattttggttttaaccgtgttccatccgcatgcattgctttcatttttccctcgccgctcagtatatgagcgcacaatgtaggtaatgaccatctcatatttaattaaatggtatagtcg

SEQ ID NO: 584832 - DNA, 188 bp, Homo sapiens
gcatgaggctccgtggacatgtcacgagtcagcatcatcttggctggtggcccacttcacctaggaagaaggaggtcttccccatcgccgggaagcagctgttgcagtcctcatataagccccggtctccagccgctaagatcaccaacatcccgtcattacacagctgctgattccctgagacgggg

SEQ ID NO: 584833 - DNA, 1085 bp, Homo sapiens
acctccctgcagcgccaagccggctccccaacctggtctgctgaacgcaaaccgcatgagagtttgctgcacgcgccccctggggcccccgtggctgcctgagtccctgctaatggcaaagacgccagcaagcgaggaagcgcagcggaagaaaaacaatgcgggcgcgcgaggggagccgccatggagggcttgcctgagttggcattggcatgtgctggctccctgccctctccctggtgtggcctctgcctggctggctgactgtgcccggatggactgctgctgctcctgaaaagttagactcctgtgtgcggtgtggtgcgcatacgccgacgtcccctcgacgtaccccttcctcgctgcagactccggtgaaaggaactatgtaaccttcggacccaggataggggagtgtgccagcaggggaccgagggtggggaacagccagagggagacgcgaaccaggccgcatggcgcgagggctcagggggagcgcagaggcgacggcccccatgccggcaggcaacactgatggagaaccggacgttgcccgaaccatgcagggtgcccgagaccgacaagagaagcgccacgaaggggcagacacggacatggtcacagaatacagacgaaccccacggctacgacacacggcgcaacaagatgcgccgcaatgaagaacgtacaggagagcaaagacctgggagcacccgcggatggccgcgggaccatggcccggccgtcttgagccccccggaaaaggaagttccctgaaagttcgcaggcatcgaagatcacagccactcaagcagacagagagcaccccgatggacaactggcccaaccacaaggacgaccgatgacaaaaaacatcaccacgacggtgacgaaaagagaaccgaagaatcaaaaaacaaaagcggcgaaaaagaaacaagtcaaacaaaggaaagaccatcaaccaccaccacaaacgagaacgcaaacagacccaacggcagcaaccaaatgctactaaaaagacccgaaaataacaggcaaccaaaacaacaccaacacaacacacaagagcaacacacacg

SEQ ID NO: 584834 - DNA, 112 bp, Homo sapiens
aacatctgtaggaacccagaactgggatttccctgagtttcccaaatcacctgtgtgacctgtttttgccctgcttgctaatggtttcttctaataaatgtttacttatata

SEQ ID NO: 584835 - DNA, 375 bp, Homo sapiens
actctttcaataggaatagctatggttcataggatttatgggtaatctatactgctgtggtatcttgggagtgatagctcctttagatattttatcttctgttataacccttacaaataacacagtttattttcatgaggcttgaaatagccatagctaatttcaaaagaatttacttcctgtggttgtaatactttattatagaaagtactgtacaaagaagttacagtttgagtgacagttaattctcacatatgtataaaatatattccatgttaattaacttactattttttttcccttggcatagtgttatgtaccatgagggtagacttataaccattaaacattttaactttcttccataaaaaaaaa

SEQ ID NO: 584836 - DNA, 970 bp, Homo sapiens
  misc_feature (498)..(498): n is a, c, g, or t
gctgaacagagagctggcagaacagaaggccagcgaaaagcagcacatcacgttagccttggagaaacaaaagctggaagaaaacgcgggcgatttgactctgacagtagcagaaatgcattagaacatcacagaagtgaaatacaggctgaacaggatcgagatagaggatagaatgaagtcagagatgccatggaaaatgaaagtgagaacccagcttcgacgacaggcagctgcccacactgatcacttgcgagatgtccgttagggtacaagaacaggaatggagagtctgaatttgatgcatgaaccgtgtcgtgagaaactctcgtgaacagagaattacaagttgtcggtcgtcgtcagtcacagagcaaggttgacaactttactctggatataaatactgcctatgccagactcagaggaatcgaacaggctgtgcagagccatgcagattgctgaagaggaagccagaataagcccaccaaatctggnctttcagatggcacggcagttaaacgtacagcagtgaagacctcatctgcagaaagcacctagctatcccgctgggctagtgcggttgaggccatcaaagccaactgttctcgataatgaacttcacccgagagctttaaccgcagctatccctccgagagtccctgaagccgtggggtgtacagtgaagagacccttagagcccgattctatgcatgttcaaaaacgtgtgccgaagggtagcaatgattgatgaaacagtaaatagcttgtaccagtaccttcatcgtcctacctaacagtccctgagtcctaatacccaggctcagcaacgtgaaggccgaccccaagagctctggccctagagggatatatacaccctttacatttactgtgcgtaatgctccctattggcttgagcatgggagacagggagtatagagcaagcttggcaatcagtgcagagggggac

SEQ ID NO: 584837 - DNA, 118 bp, Homo sapiens
ttgtattttggattttaacaaaattgtccttttccccgctccacggggttccccggttttttccaccctgtggttggacgcccaggccagccggaaatttttaaccggccggttttta

SEQ ID NO: 584838 - DNA, 206 bp, Homo sapiens
  misc_feature (81)..(81): n is a, c, g, or t
gctctgtagcagacagagtcacctctctgatattgggaggacgaagtacaggtgtcgtgtgagtgggagctgctctgctgncagatgctaacctgacttggatctgctgctcggtgttgccactgtcccattacatttcccactctgtctgctgcattcctctgttgcgggtaggcttgatatcacctctaggatgtccgagcgga

SEQ ID NO: 584839 - DNA, 484 bp, Homo sapiens
ttgggggccttttggtcacaagtttttttttggggttttccccgattttggggaaaaccggtttccccccttttagggaggttaaaccgcttccccccccccaaccccccaggcccccgagttatttagggaggaaggggaaaagggccccatttgcaaacccccttttcccggggggtgggggattttttaaaaaaagggggccgccaggttttccccttggaaaaggggcagggggggccccccaattaatgtggggtaggtccctccttaggcccccccgggttttccctttttgttttcgggttgtattttggggggaatttttagggggataccattttccccagggaaaaggtttggcccttatttcccccaggttgaaaataaccccccttaaaggggaaaaaaaatgggggtcccccccgggggggggcggttttaaaaaaatgggtccccccgggggcaggaatttgggccggga

SEQ ID NO: 584840 - DNA, 776 bp, Homo sapiens
tggtaaaaagagacattaaatacttctgtttacaaaattcaggcgtacatttcagttggcccgggaccgtgcccaaagctgtgtgctcatctctgcgcccctcatgtacttctgacgaggggggtgcagggcagggcaaagcaaagccgtggggtccggaggcttcactggaccacagggggcaggggaatgtgaatgtggcctggcccagaaaatctccccatttacatccgattttggctttggggcagataaacggaagcaaatggtcggggctgcctggcctgggtctagaggaaatgcgctggggccatcttcccacagggtcgaaacgtggcacgcggtcctcacggcaaaggggacgcctgggccaccaggggtcttgggacatcgcgctcacctgggaacccttgggtggcttgggccctcgagacaagcgcggctgtgtgccccgtggtagagcgtgtcgctggagaggtgaggtcgtagggtgcgctaaggtggcgtgcgactgttatgtggccctagagtggactccgggcctccctggggtgggcacgggggcgcgttaaaaacacagccctgtaacagaggtctcttgggggaagttcacttgaaaggagccgcggccatttggagcaagcccacggcccctcttgcgagggaaaaaccagatgtttcctcggtggccctcaggacaagaatccccagcgagtggccctttgatccccgggagctgcaaacgctgaccggtaggccccggagaaagcggtgag

SEQ ID NO: 584841 - DNA, 271 bp, Homo sapiens
  misc_feature (15)..(15): n is a, c, g, or t
  misc_feature (122)..(122): n is a, c, g, or t
  misc_feature (168)..(168): n is a, c, g, or t
  misc_feature (193)..(193): n is a, c, g, or t
  misc_feature (223)..(223): n is a, c, g, or t
  misc_feature (246)..(246): n is a, c, g, or t
  misc_feature (257)..(257): n is a, c, g, or t
tgccgacccctcagnaatataaccctcatgcctgggacccctgagagcttctgatcccagctattaggggacagaagaagcctccaaatctgggaagggtgctgaatgccctggctggactngggaaagtttcaggggcactgtatgggggtcttacctgggttaagncggaagggcctgtagggaaacctgntaggctttcaattcatgttctgggtaaccnggctgcctgtaggccccaatctnggggttggtgnagggaaataggggg

SEQ ID NO: 584842 - DNA, 172 bp, Homo sapiens
ggtcgcatgatagtaacagtcagtgcggtgcagcccatgctaggcagggccgatgcagcaggtctcgatcatagcttcccacactccacacagactggagaggtaagaggctagggccgtgcacaggctggaggcgttcatgcagctgagggcacttgagcacttgctctcg

SEQ ID NO: 584843 - DNA, 251 bp, Homo sapiens
  misc_feature (246)..(246): n is a, c, g, or t
ctggagctgaggatgctcgtctgatgatgggacatgaaaacaatgaatgatgtcgttatctggaactctatgaccttaatagagacttgctacaattggatataaaattctgctgttacaagtcacacatgagctgttgggaaacctcataagcagtaaatcaatgcaattcaatagagcagtgtcgtctgcgtggttggaaaatcaaatgaaccaggttgatcactgtcattgtcgtggatgcanactcg

SEQ ID NO: 584844 - DNA, 275 bp, Homo sapiens
tgttggccaggctggtcttgatctgagttcctgaccccaggtgggtgggtcgcccgaggtcgggagttcgagaggagcctgagcaacatggtgaaaccctgtctccactaaataggaaaaattggctgggcgtggtggcgcatgcctgaatcccagctacttgggtgactaaggcaggagagtttgttgtacctgggaggtggaggttgcagtgagtcgagactgtgccatttcactctatctagcctgggcaataagagtgaaaactccatcac

SEQ ID NO: 584845 - DNA, 537 bp, Homo sapiens
  misc_feature (1)..(1): n is a, c, g, or t
nagtaagggcttaatcctgccattttatggcatattctggttgttttgtaactcctcttttcatccattttggactaatgtctatgtggttaagtcatttcctctgatagtatgttaattcattgctttttatttgtagtgaatctgtgctaggtatgtgcattttggccgccataaggcttacatcaaacatcacaaggtattttacatagatggccacgtatgttagctcgcaaagaaactattagaaacaaagattctaccactctaaatagcaactcacagcatgaatccctaaagttcacccctgcagcaacattagcctgtgagtgaagatctggttccggagcacaccggaatattgcaaggcatccccctataccagtacgactgttcgtttacgtaacgtccttacattctccacggcttcagagtgcgacacattgtccccctaggctgtccaagcctataccaatatctgcaggcagaatacaagtcatatagtccttccagcaaagggcttcaaaggcatgccct

SEQ ID NO: 584846 - DNA, 1059 bp, Homo sapiens
ttcctactcctcattgtacccattctaatcgcgatggcattcctaatgcttaccgacagcgaaacaattctaggctatatacaactacgacaaaggccccaacgttgtaggcccctacgggctactacaacccttctgctgacgccaatagaagactcttcatccaagagagccccataagagactccgaccatcatctaccgatcaccctctactatcaccgcccctaccttagcgtctcagccatcgctgcttctactagtgaaccccgcctcgcccagtgagccaatcgccctggtccaaacacatacaaccctttagaggcctctctgaattgttatttactgatgctcgagcacttctaagtccctagccccgaattcactccaatactctcctcgtggactcacgaggattgaatcgatcctatattgcgaaacagacagcgctcatgcagattcggctgtcactttgacctgaagctagttaaactcgctaaaagcatatctcctctgtaatgccaatcgatcgacgcccgtagggcccatgttccaggccctgtgactataacttcaaaacctacttggatcaatgatcgctaggccgtgcgggggcgttccccctcgtttacattaccttccttcacaatagcccactcctaatgcaaacctccgttgacccaaaggaaacacgaccaccattccttgcactttgtaccatccacagtggcacccaagttcggactgcgaaccccgccttttgagacccccaaattaccaatctcatctggccactgagcgcaggtccctaccccaaagcgacccttaggagcgacgacaggaacacccaaaggcgcggcatatgaacccgccctgtcgtttctaacgagaaacgcgtggtgtcccccggcacatggagtgagcgcaagaatctcgtgggaaaacacttatgacctccatctccagccagcccttcatccacaagacagagctcgggacaaagttgaacgggccaccagggcatggggtcgccccctggttgtacgggccccgcgctcaa

SEQ ID NO: 584847 - DNA, 206 bp, Homo sapiens
  misc_feature (35)..(35): n is a, c, g, or t
  misc_feature (85)..(85): n is a, c, g, or t
  misc_feature (89)..(89): n is a, c, g, or t
ctctgaccaaggccacctgtgccccccagcatgcncgaccgggtcctgggcctgctgacgccagcaaggtggtggccaaggctgngggntgagcaggctacgtaggcagaagagcagcttcacagtagatgcagcaaagcaggcaacaacatgctgctggtgggggttcatggcccaaggaccccctgcgaggaggagaagcagca

SEQ ID NO: 584848 - DNA, 427 bp, Homo sapiens
  misc_feature (162)..(162): n is a, c, g, or t
  misc_feature (186)..(186): n is a, c, g, or t
  misc_feature (188)..(188): n is a, c, g, or t
gaggaggaagagcaggaggctgacaatgacggttagaccgaaagaacgaggacacgaacggtggggacggaacgaggacggacggaacgaacgaacggttgactggctgacgcgaaacgaaggaactgggacgaactggacacgcactgaagggacacgccntgggaggttccagagcctaacggngngccaaaatgcggtgtggcagcctgaaacgactagactgacggaatagacgattgttcgaataaccccaagaaaagccagacaagaaccccgtgagactggaaggcgcaattgggaacccttaaaggaaaccccaaaggccaaaaaaaactaacaaacaaacgcgggcacaacacaaaaaagggtttttttaaaaaaaaacgccgttttaaaaacaacacaaatataaaataaaaaacaa

SEQ ID NO: 584849 - DNA, 752 bp, Homo sapiens
ctccgagccggatgcgccttcctttcctctccagagcaggctgccctgcccgctggaatcccgcagcgtagagcaacctcgcatgcaccctcagaacatgcccctgctgggtgctgctgcctgggctgccgcttggtgaccttatcctgactgcccctgaccccgcatcctggaggctggccgcgaagtgtctgcctggcctcctccctggctgcatgcctcctgtggcctccctgtgcacatcactacgccgctgggtgccctggaaacctgttttccggctctttcgctttcggctggggctgtggcggcctgctggttgctcgcgctagtgcctgggcctggtgctgcatctgaacatgcccctgttgcgtctgcccctctctgtgcctgccgccctgggcctggcgaaactgttgttcctggtggacctgtgtgcgcacccctgcagccgggcgagctgctgcccagtgctcccgcgctgcgcggcaacctggtgccggctgctgcgttccgtctcccctgcctcgccccacccccccccccccccccccccccctccccgcccccgcccccccccccccacaccccaccccccccccccataacacacacgcctccatcccctcccacctcccccaccaccaacatcataccctacaccaactcacactcccaaaatccctccccccacaccacccaccccaaaccccaccccccctcccccaccccaacccccaccccacacaccc

SEQ ID NO: 584850 - DNA, 209 bp, Homo sapiens
ggggggggcccccgtttttttttccccccgtgaccccctttttttaaaacctagggttttttaccaagcttttttcccggaattttttttttttgggggccccccctttttcccccccccctttttttattatttaaagggcccccccgttgggggccaaagggggtcccccttttttttttttccctaataaacttttgggtttttta

SEQ ID NO: 584851 - DNA, 341 bp, Homo sapiens
  misc_feature (7)..(7): n is a, c, g, or t
gttcagncaacgccaacataatagctgggtttagaggctgtgtgactaagcctagtctaatttttgtattttaagtagagatggggttccgtgctattggccaggctgagtctcgaacacctggcctcaagtgatccacctgcctgggtttcccaaagtgttgggattacaggtgtgagccaccatggttggccaagagttctagatttattcatcctgcataactgcaacttggtattccttgacataagtgtcccctactcccagcatatggtaaacccaactttctactctcttgttattatttattagagaacatgtaaaaatcatgcaatagcttt

SEQ ID NO: 584852 - DNA, 132 bp, Homo sapiens
ctccgtctcaaaaaaaaaaaaaaaattgcctatcaggctgggcgctgagtcttgcccctgtaatcccagcgctttggaggcccgaggtgggaggattgcttgagcccaggagtgcaagacgtatctcttaaa

SEQ ID NO: 584853 - DNA, 152 bp, Homo sapiens
catggtattttcttctcttctggaaagttctgggcttgtagacccctcccctccttggcaaaggtatgggatagaggggtcagatgcagatctctactggtaaaatggggctcccgtggtatctccttgtcttccctacgggctccaaaccc

SEQ ID NO: 584854 - DNA, 433 bp, Homo sapiens
  misc_feature (104)..(104): n is a, c, g, or t
  misc_feature (124)..(124): n is a, c, g, or t
  misc_feature (143)..(143): n is a, c, g, or t
  misc_feature (147)..(148): n is a, c, g, or t
  misc_feature (163)..(163): n is a, c, g, or t
  misc_feature (334)..(335): n is a, c, g, or t
  misc_feature (343)..(343): n is a, c, g, or t
  misc_feature (367)..(367): n is a, c, g, or t
  misc_feature (375)..(375): n is a, c, g, or t
  misc_feature (414)..(414): n is a, c, g, or t
cagcggtcccgctggaccccggtcatcaaggacgatatgaagacccccgtggaggaccggttggacagaaacttgtggccctttgtatccgaccccgcccccanggcagttccaggccgctgtnagtgcccgtttgggtcttnggcnnaagaacaaggctggngtaaaagcccgggggggcccccggctctttgtgtatgtcatgggcggtgtggccatgtcaaaaatgagggccgcctacaaggtgaccagggcccccgagggcaagtggaaggtgctcattggctcctcacacatcctcaccccgacccgctttttgaatgacctgaaggcnntggacaanaagttggaggacattgccctgccntgaccccnggccccgccccctacccctccctttccagagaaataaanttttcccgtcgttttgcca

SEQ ID NO: 584855 - DNA, 152 bp, Homo sapiens
ataccagacgctgagcagatgctagacaccatgctacctacacagctgcagaaacatgagccagttaaaccactatataaattacccaggctcaggtatttctttatagccatgcaagaatggtctaatgcatatgctcattgcaacatctt

SEQ ID NO: 584856 - DNA, 316 bp, Homo sapiens
tgatatggagtgggactaacaagaagaacagaaggatgccctgcctacttaaagctgaacgctgacgttaattatgttatgtaaacaattacttccaaccacataattcgtttttttcaagcttcattctgtaaatcacctgatcaatattgagtttttctgctttagagatgttttaggaggggaagggaaaaaaccaaagcactaggctaaattattaaagacccatgagcgaggcgacaaacctaccgaataaagactagcatggacgaagataccgttatagaagaaaaagcttagacagaatttcaaaggt

SEQ ID NO: 584857 - DNA, 564 bp, Homo sapiens
gaccatgactacggctgcacgcctggtcgttcctcatgagctacttcttctgaacagttatctatacctcgctggttgctcagccacaaaataaatgttgggagaaatgatatataccactttcccagaaaaaaaaaacttacacttgggacttggcaaattcctaggcacaatttttttcagcagtaacaggaaaccacttatcacatggagacctaatgtaataatagaaaaatactcatgatagggagaaaccaagagaagttttgtttttgtttttttccaactgtgttcattagaacagcgtgttctaagtatttgaaactgaatgtttattccttgatactaaaagatcttctccaatcctatcactgatagtgtccaaattctcaccagattgctcctaagcttcaaatcagaagcagaaactggcaggccatggaccttaattgtccctcaggtagattttgtttggtatgcagaatgtttttaaaatatgagtgggtattgaaaatatgatgtttcacataaaacctcattctcggacccatctttgctcatggc

SEQ ID NO: 584858 - DNA, 981 bp, Homo sapiens
agcacactgtcgatctacagccaatactaatacctacgctccggtggtagtggggccatctcttttagaagagtacatgccccgcactggtggttcccccccgggtataatcccgggtatacctgcgcgcaggagtggtgtgttcatctccctcggcgcggcggttgtattgttctcccccccctggtggtgtcataatcactcggagaactccgttttttctaccaagggtctctcctggttctacatgcggctttcgcccccccctcttgggggcgcccctatggtcctcggggtattctaacgcaaacaacggggggtgcccttggcccacctggcgttttgtggggcccagggcatgacaaagttcctcacgcgccacgactgggctggaacgcgtgcccttgggggatgcacaccaaggggggacttctgtccccccgaggcacacggggattcaagccggcacactctggtcgccggtggcgaggccgccattcagaaaatctgcttgcatgtacaggaaagaagttcacgcccccttaccgttggcgcgccaccagtgtttgccccccgctggtgtagtgccactgaagcaaacggcacggccgggttggtgcggaaaagcccccacaatatttggggaggaatactctgtgcggttacggataaaaaattgtactcaaacccttgttaagcaggaggcaacaacttcggttatattttgggagaaagatttataatcgccagggccgcctcagagtgctgcttttcttcggggagtaatattattgagaactcgctctcgtggtggtgaatatagaaaatgtgacgtacccagtagattggagagggtagagatcttaacaccccggtggtacgacaacgataaaacacataagttgttccaagtccttctctccaaagaaataaaaaagggaaaaaaaccaacgaaattttttggaccacccccacaaaaca

SEQ ID NO: 584859 - DNA, 163 bp, Homo sapiens
gggacaactgtacgtttcgaagacccaccccaccaatcactctggagaggcaatgtgtgcagcctctctcttaagtgcaccttagagaggctttacgctgtgactggctgcaagcaggacaaccgtgagcagcattttgcttgtcgaaggcacaggtcctcgt

SEQ ID NO: 584860 - DNA, 1228 bp, Homo sapiens
  misc_feature (1228)..(1228): n is a, c, g, or t
gtgctcgcgatgtgtatccagtaattgagaatgaggtgggggtgtggccattcaggcagagaggctcagtggtagcgaggtgcgtagaaagcggggatggagctcgttcaatcgtcatgcatatgctgatggtgcatcggtagccagtgatgaatgggccatggtgaaacggagccgtgtccagacaggacacttcatgcggacgctgatattgcctgcgactagtccgtggagccttctagcccttagttccatctgtggcctgagctgtgtctttctaatgtcgctggtgcatagggcaacttttttccctcattgggccctgaggctcgtggccacatgctggctctcctcaagctgatcatccaagcgatttcctgtgtactagctcgttggtgcctgtgcccattggcaacgcacgtcctggttggtcctgcacatcgcggctcggttgcacataccgcctactttcgcgccactcctccccatagtctttctagatctctagtgccttcctagttgtgtgcgcattgtatttgacttcgtttagcatcatctatatattccctcgtgggccttcgcaacgttactgacatggcctttgccagtggtttaaacccaccgactctcggggttggcccacactccccaagttaatttcgttctattctgcccatgtgcaggaacactgctctcaatgttctgcgatgactcacccttggtcccgatggttctcgacatcaggcgccgatttctgctcggtgtggatctcctggctcccttcatctactgactgctcgcgcctttcgggcgccttctttccctttgctatctcctcgtggctctccctgtggtgcggctccctgtctggtctccgctgtatatgcgggatgtccccctttttttctttccgtttccccttggggtgacggtcgggtactgttccccctcatgtctgttcatctttccctttccgtggtccggtatatctttcgggtcctagcgttgttcctcgattgattcacatcgtccacatctgatgtaagtgcatctgcatttaactcacgtggttctctcctcagtcgttgctgttcgcctcttgtgattgatgtcctcgctcggtcattttttcgctcccctgttgtgttcatcggataggggtgacactctttttgggcgtttggcgttctgcgcatatttcctcccccatataggagtctcctggcgn

SEQ ID NO: 584861 - DNA, 448 bp, Homo sapiens
catcatggggttctggaatggagccacgtggagagcggcaagcgctcccctgactcccagagcccactgagcctcccgtccatccgtctgtccactagactattcagagagggctcacagggaccacacatgaagcaccttgttgctcagccacttggctgctccagttccaacccgggcagtgcgcagccccactcggggcattcccgcctgctgtatagccctggctaacacctgccacgtgctgacgggcccttgggcggatggctcgacgacagctgtttgcagagccttgtgggacatcccagaggtatcccttgaccctaaagcttgggctccgctggatcaagggtgaccttgagctaaccggttccccagaagagcttggactccatccgctaccattctccacgtgagctggccaagtgagactctgtgcaaagcctcc

SEQ ID NO: 584862 - DNA, 881 bp, Homo sapiens
  misc_feature (217)..(217): n is a, c, g, or t
  misc_feature (296)..(296): n is a, c, g, or t
  misc_feature (435)..(435): n is a, c, g, or t
  misc_feature (452)..(453): n is a, c, g, or t
  misc_feature (497)..(498): n is a, c, g, or t
  misc_feature (507)..(508): n is a, c, g, or t
  misc_feature (583)..(583): n is a, c, g, or t
  misc_feature (586)..(586): n is a, c, g, or t
  misc_feature (810)..(810): n is a, c, g, or t
cacgatgtgctgatctggggtcggggagcatgacgtggtcggtatagtacacgcgaaagtaggccgcgcggtagatgatgatgccctgcacggagacgctgagcccatggtccaggccccgtatgctgtcggacttggtggtcgtcacccagacagttctcgcgaggccctcgggagctcagcgactctggtgcactgacgtattgctcaccgtccnagctgacctagagcagggattcttgactgataaatcctagccgggagtactacgaaatgcacgagatgatggttcgtcngccagtccagcgacctgccgtgagtgccatgagttggcccagcagaaggtaccctcccagatactagcgtggtggcttggtccatcggccgccccaggaatgatgctggctgtgtacttcatcccttgaagggcgaagnttgagggcttgagtggnnggaaggtagcgaagtgacggttggcaaggttgcccctgccagannaggacagcnnacgcccgtggctcccttggggtatgcgggacaatggcaggtccaccgatggccctttgtacttgcttggtcgggncgngcgatctgcccttgctggcggtgcatggacctgcagcatgcagcccttgacccgctcgatgcgggaggccacgggccgtcattggagatgggcgggcgggcgatgccctccgggccagagaagttctttgggcgaaggagatgcgcctgttccgtactatggtggcagggcggggcagcgggaacgggaggtacagccggagaatcgtggcgcggagagtgaantggagaggcgtcgctgggctcagacccatgcacgccgctagttctagatcgcgatgcgggccgctctatgt

SEQ ID NO: 584863 - DNA, 413 bp, Homo sapiens
tgtactcaggccggggcacagagtgggactccatcttaaaaaaaaaaaaagtatggtaggcggggcgttgggtagctcaggccggtaatcccacaggtaaggagggcgaggcaggcagatcaccggaggtcaggaggcaagaccagccgggccaacagggcgaaacccggtctctacaaaaatacaaaagattagtcgagtgtggtgtctcgtgcctggtgtgtgtgtgtgtatgtgcatgtgtatatatgtgtacacacacacacacacgtggttctggcctggcacagcccagtgacaacctgggccccactctggtccctctgatccattcaagtcaggaatctgggtggtgtttgggaggcttgggggtcccaggttcatccatgatacaggtgggtcgccaaggggta

SEQ ID NO: 584864 - DNA, 311 bp, Homo sapiens
taaacaagtatgacagtcccacctacaggtcatttttaacgccaccaccggcatgactttcaacgaagtgagtttccaaaatgtttaacttggcctggcaccatggctcatgcctgtaatcctggcactctgggagactgaggcaggagactcgcttgatcccgggaggcagaggttgcagtgagccgagattgcaccattgcactccaacctgggcaaacatagcgagacttggtcttaaaaaaaggaaaaaaaaaacggaacggtttcttgcctctgtctacacgcacaggaggctggcctgatgggag

SEQ ID NO: 584865 - DNA, 161 bp, Homo sapiens
aaaaaaaggaatttttttggggaaaaaaaaaaacctgccaaaaaaactgggggcaaagtttggtttctcaaaaagttttttttttttcaggggttttgcccccccccccttaaaattgttttaaaaccattttttttttaaaaaaaaggggggcatttggc

SEQ ID NO: 584866 - DNA, 137 bp, Homo sapiens
cagggagaacacatagttagcgaggcaggcggcgacagtattattgatgaaactctgtctctactaaaaatacaaaagagattagtcgggcgtggtggctggcgcctgtgtcccagctactcagcaggctgcaaaca

SEQ ID NO: 584867 - DNA, 448 bp, Homo sapiens
  misc_feature (357)..(357): n is a, c, g, or t
aacccctgcgacagagaaggggactgtgatccagagactcagaataaaaagatccttcccttctatgcaggggggcaagtttactggggggttttgatttgggcctctcttccacaagaagctaaaggaagagaaggggagtgagagttcagggaggcccttcctaccctgtgaggcttgacttgatctggattggggatgacaggaatctcaccctctggggtgctggcaaggaggtctttgcacaggaaaaggggtagctcatttcagtttgttttttctttaaattgaatcctcaagtcattttctgttcacctgccgcacagggacaagcttgacttctattttctgtgtagngaaaacaatgtcatttatttggtttttcacctcagccctctcataggagcatagaatgttagggtctttactccctaatgatgtctgattg

SEQ ID NO: 584868 - DNA, 679 bp, Homo sapiens
actagattctagatcgcgagcgggagcggagagcggaccccagaagagccctgagcagccccgaccgctcgacgccggcctaagttaccaatcaacaccccgaagaggagccgcagcttgccgcagccggacccgagtcaccatctaccgacaaccatgagcagcgaggccgagacccagacagacagcggatggacgataacggatagagagacgatcgcagaggagtacgtcataagagcgagagcgcccgacgaacataacagtaaaagaataaagaataccgtaaaaatggaggaacaacgcatcagagacagagcaaggactaaagagaaggagaaaagagaggcacccgcgtggagacagaagtatcagagcgagatgtccaaataattcgcacagagagtataaatggtatatatagatcgcatctaaaacattggggatccaaacaacgatatgagagacaaacacagtcaacactcacgctaggggtagggccaacaaccacgaacgcaacattcaccagatacaactatggcaaacaccacgtaggaaccagggggtaagggagcaagcgagagaacgccagcgagggagagacacagagcaaagcaccaaccaatgacgcggggccccagcgcgacccattgactaatataaggagaaggggagcaag

SEQ ID NO: 584869 - DNA, 124 bp, Homo sapiens
gggacccgcctcgggcttcggcgatggctcctcggaacgaggcccgcggctctctggactcggccagacaccggcggcgcgcaggagatagcccatcgagctctcccggcagtggcggcggccc

SEQ ID NO: 584870 - DNA, 135 bp, Homo sapiens
gtgaaagtgaacccaagcctgggaactgcaggcctagacaatgcaggaaatggcttgaacctgggaggcagaggttgcagtaagccgagactgcaccactgcactccagcctggtgacaagcaagactctgtctc

SEQ ID NO: 584871 - DNA, 425 bp, Homo sapiens
  misc_feature (425)..(425): n is a, c, g, or t
tctagaggtcccccacgccgcacgagcggttcaaaggggggttgtctctggcgggcagagtcggggtcataaggtgctcagtaggggagcttttgagccaggatgagccaggagaaggaatttcacaagacaatgtcatcagttaaggcaggaacaggccattttcgcttcttttgtggtggaatgtcatcagttaaggcacgaaccggccatctggatgtgtacgtgcaggtcacaggggatatgatggcttagcttgtgctcagaggcctgacattcctgtcttcttatattaataagaaaaataaaatgaaataggggtaaagtgttgggacagcaaaaatttttgggggtggtatggagagataatgggtgatgtttctcaaggctgctttgaaccggcggtgcggcgtggggtaccgagn

SEQ ID NO: 584872 - DNA, 104 bp, Homo sapiens
gcctacagtgcagacagatcctgaatcatctgttgcgacagcagcacatgcgtatctcgcaaaagacctgtgcacagggtgcattaaagaatgcacctctaatc

SEQ ID NO: 584873 - DNA, 351 bp, Homo sapiens
taacttccttttttttttttaagaaaggaaaaaaaaaaaaaaaatcaaacttgaaactttttttttgatgttcctattgtgggggttttggatagggtgggacagggatgggggtgtgtttaaaattttttccttttcagcacaacctttggttttaatataggaagagccaagggagtcctgggttgaacttacgaaatttgccccaaacctttgtaaccccaattgaaatgaggagcttccttttttcctgtgaaggatatgccagtccagcatcaatgcctgtgccctttggaaaaatttcctcctagcccttccagggccttatcataaaattttggatttagagta

SEQ ID NO: 584874 - DNA, 1032 bp, Homo sapiens
gagtgatcgcaagtcagaagacaggagctgcagaacagaaacactttcgtcatgtccaggggtcagattacaatggtgaacctattgatttatgttgagtaatggtaatgcatcagattaatttggttgactttgttagcactgtattcttatcaatgtttattgtaaaggagtctgttgagtgtgtcggtcaacatgaatctgatttatagaatttcatagtgcagatggctatgtttgcaagtgtacacgtgccagtccaaggcatacgagttatctctaaatctatctaatgttagctattctgggttataatatttaagagtggatttcataaagttctattaaagagaatttagagatgtgttataatgtaattgtatggaactaagaaataagtacaaggttatgtggcagtgtaacttctggtgtactatataaggttaggtgagacagttagcaaataatcacgttagattacgttgaatacgattaataaccagtttaatgagtaatagatttgaatgtcactagatcataggatccattgaagcaatttgagctcataatacacggcttgatctcaaacgttactttacagttggcttgactaaattcatgtagtgcacgcttgtctcttgcagatcccccagggatgcatttgatacggtcagaggctaacgttccattgggtgaagacacccaagcatggtcgatgaactgttgtcgaattactccactaatgaacggaagcctattcattcgccattcttaaagctgaacacttggaaaagtacaccctttattgtataccttggagataatttctaggttcccaggggccccagcaaaatgtgtcaaattagccatcccacgctccaactccagcatgtgggcggaaagtcggccagtcagggatatatatacacaggtttttaccaagggctatcatgtttgcacaacacccatgcgtcactgggcatacgacatagctgggtaaggtgccatgtcaaacggtccgtgaagaaggcc

SEQ ID NO: 584875 - DNA, 427 bp, Homo sapiens
tgcttgcccaaaaaggtgctttccttcaaacggtgcagggcctgggccaaccttacaggtcagtaaactaaactcgactacttggggtcagtgatttttttgtaacgagtctttcatgatgtgacttttaggccccaacatgacaacccctgggcccccgggacccaaaaaaacagccccctgccccattttttggcacaggccattccgagggcatgtccctgttgccccctgcattattaatgaaacccccggcccctgccacgcatgttgcacctgtgccatcgtgctccctcctgatgggccccgtggtggaggaagtcacccaactgtttttcagtcccaaaggccggtggctggttttgaacttgtgttgactgttgaaacttatttactgtataaaaataatttatcatttgtcccatga

SEQ ID NO: 584876 - DNA, 1659 bp, Homo sapiens
gagtgtccagtacaatggataaaaataaatccattatcaacacatcactaacatttcaaaatcttcatggagaagattctgtaagtttctggggagagagagaaaaaatacatcacatacagaggatcacttaccaggactgctttgaacttaatagcaatggtaaaagcaaacagacaagcaactacttcaaaatgttgaaaagaaaattatttccagctttcaattctatactcagacaagctatcaaacaaatagagggagccagccatttttagacatccagggtctcatttaccttccatgtacccttttcaagaagttaggatgtgctccacagaaacaaaaataaaaccaggaaatggaacactttggaatgtagaaaatgggataatcaacatagaggataggcaagaggaatttctgggagcatggtcaagtaggattccagcaccacagttgtgcttcttgatgtagagagcagtcagtccagaatcaagcagcatgactcacattgatggctattatcactaagatccctgctgccattgtatcatctttttaatctgaggacattatgcccaggcaagcctggctcagattcttaccggtatttgccttgtcttgaccatgtggtgatgaaattcctgctctcttctgtgctgtgctgactggaccaactgaggacactcatttttacccttctttttcaacctattcctgaaagctgatgttgggcgttggtgagcttaaagcagaaaatagccttcctccttcccatttttgctatgtattggccagaaatcaggtatcaattctacactttgatctttccacatgcttcagttgtgaggagcccagtattcactcatgacattgcaaattaacttctctaggagggatccagaaagcctggagaaggtaaagccagactagggctgtttggctttaattaacagcagcattgttgcccttttccttgctagattcgtgcttgctgctcaaattgccaaaattaaatatttagggcaatgttcatgagtgctgggaaaactaaagagaataagcaggaagtcattagaggctatcttggtagagatggggaaggagaagcaattggagaggggcacatgggggcttctaagacttttgtttcataacttgaatgatgggtacccagatgtatattttactttaatttgtacattcatattttatgcagtttctatgtctaatacgtataaaaatttcagattaaatgaaatacatgaaggcactggcaccctgcctttcaaattgtaaaaggtgtaaattttgcaaaatgcctaaaggggcaggtgaggtcacaatgagaatctacactattgtacttcggggttcaacccaaacagaagttaacaggagaacttaaattatgtagcgcatgatttttaattgagtatggtactgtaattttaatccacattttctgctagttaactataaaataacccttaaaactgatctaaaagcctattttaaaaatataagttgcggccgggcacggtggctcacgcctgtaatcccagcactttgggaggccaaggtgggtggatcacaaggtgaggagatcaagaccatcccggccaacatggtgaaaccccgtctctactgaaatac

SEQ ID NO: 584877 - DNA, 397 bp, Homo sapiens
  misc_feature (25)..(25): n is a, c, g, or t
  misc_feature (93)..(93): n is a, c, g, or t
  misc_feature (96)..(97): n is a, c, g, or t
  misc_feature (122)..(122): n is a, c, g, or t
  misc_feature (135)..(135): n is a, c, g, or t
  misc_feature (302)..(302): n is a, c, g, or t
ttcgccgaagtccgcggctcgaagngcatcacgtcgcttcccgtcgccatgaagtggatgtttaaggaggaccactctctggaacacagatgngtnngaaatccgcgaagatcagagcgaantaccccgaccganttccggtgatcgtggaaaaagtctcgggctctcagattgttgacatagacaagaggaagtactttggtcccctcggacatcactgtggctcagttcatgtggatcatcaggaaaaggatccagcttccctccgagaaggccatctttcctgtttgtggacaagacangtcccacagtccagcctaactatgggacagctttacgagaaggaaaaaagatgaagatggattcttgtatgtggcctacagcggagagaacactt

SEQ ID NO: 584878 - DNA, 648 bp, Homo sapiens
tacgggacgtcgactcagagagaaccaccatggtgctgtctcctgccgacaagaccaactgtcgaggcggctggggtatggtcgttgcgcacgctggcgagtatggtgcggaggccctggagaggatgttcctgtccttccccatcaccaagacctacttcccgcaacttcgacctgagccacggcttctgcccaggttaagggcctacggtccagaatggtggcctgatcgcgctgtaccatacgcctgtggtcagcacgctggactgacatgcccaacgcgctgtccgaccctgagcgacctgctcgcgcacaagcttcggggtggacccggtcaatcttcaagctcctaagccagctgacctgactggttgaccctggtccgtccaacctccccgacgagttcaccccgtgcggtgcacgcctcacctggacaagttcctgggcttctgtgagacacctgttgcatgaccttccatacatactctggataagcgcttggaggacctctggtaggacagttgcttatctttgcgccgcttagttgcccatacccgttgggtgccgtgggcgcctcgcgtcaagcgtacatcagtagaagcgtagcgaagtgggtaagttcgccagcagttggcacaagctctcgcg

SEQ ID NO: 584879 - DNA, 211 bp, Homo sapiens
atccccccctgtgtgctccctgtgtgctcctgtgtgctccacctccccgtctcgcctgccgcgccgggcagtgtggagcaagagcgcacgtgttaggacccgaaagatggtgaactatgcccgggccagggagaagacaagagaaaacctctggtgcaggtccgtagctgatcctgacgtgccaaatcggtcgttccgaacctgagatata

SEQ ID NO: 584880 - DNA, 1975 bp, Homo sapiens
  misc_feature (281)..(281): n is a, c, g, or t
  misc_feature (326)..(326): n is a, c, g, or t
cttgtatattgttctacgagctacatatactgtcgtacatatctactagcaatggtacgtaattcatgatctgatggggactgcatagcatagttcgtagataggtgcctcaagtaggcaaagctctgcgtcgtagtggaccttcacttgttgcgttaattgtacaatactcaaggtccttatgtcgggacatggagtaagcaatcgcgtgctgtcctgttgggtctgcatcaaaacaggttggtgagttccataccagagcaaggctaattcagtgggcntagccagctgatcgggtgaacgtataataatgctaagaatattcnacttgatatccacgaaaatggcatgataatgcaactgagtgttcgtaccccaagatagggcagataatacatgataccttacccgacatgacacggatgatagctgatatcagtgacatactaacatctacacactgcagatgtgtgacagaatctgtaactcatcacacagcgacagccacagtggggggcctcttactctctgatttgtgggcacagcaatcacagtgcacagcgccctatcagttgacgtggtaggtaagaaaaaactgaccaattccagaggcagagcggaaatcttccatgagtttcttagaaggcaattggatattgcgctcggctaaaagcccgttaggttgttgctcagtggctcaggttagatcccataaagcggttcacactcagtgggaaacacctctggcaactcgtacacccttttaatactttactcccttaatggtcattaacgccgggatttgcattggggaacccatataattggcacggcacattccatggtggataattccataagacgtgggttccagagagtgcagcgggggctgtccatgcgcggacaatacttcacaggtaacaatcaggtctccgaaacaaataccaacaggttatgttatcacacgagcgaatcggacaacgtggtcatttgcacttccatacaggcgccaattcacagtctcatcagtgtcggcgtgaccatgttgcgtaacctccctgaaattggggtttcattaccatggtaaaatatctacacttgggtcaatgtctatggattttccacgagccaaggggggccattcgaagttgcaacatttatcagggttcccttccatataacgtccacagaataatataccccatttgcgttacttgcaacctacggttacacacggaaccggtgtatagtgtcccccatgacaaacgtgataagtgacgcttttaagatgatgaacctccatatcaccctgtatgacgtgataagtcgtttccgatgagccacaagctgtgggcatttgggacgaacgtgtctcatgtttatgccacgccccttaagttgtggcacttattgggcacataacgactaacgatgacattggagacataacaacagaggatagggggggcagcacgcgcttattcacacgtatacgaatatccgtggcggagagacgaggagcagctcccacagcgcgtcatccagaagagctaccgcccagaggggcgatatatttgagaaacacaacagtgggaggggtacgacacacaaggtggagccagtgcgcaaatgaacagacagactcaaggacacccggcgtgcaagaccgacgctaacactatcaccttcagcgcggcaaaaagtgtgatacaagacaaatgaaggcaagatcagtaggggacaaccacgaaagccacaacaaccgccagcccgagagataggacggcccacaaatggacgacggagaccaacccacaaatgaaagacaaccaccacgatagacggcgtaaaccccacaacgtatcgagtgggctgtcagacgatatgacacgcacgaacaaagcgaccgctgagacatacaagtcaatcagacataccaagcgagagacagatgaaacagaagctaacaaacaat

SEQ ID NO: 584881 - DNA, 107 bp, Homo sapiens
gaatttatatattttgggtaagggtcacgtgtcttatatctctttgctaatagtatcagactgtgtctcatccgaaggccgctgggaagcggcgtctggtttctcct

SEQ ID NO: 584882 - DNA, 100 bp, Homo sapiens
actgaccatagtctgagctcgcggtcgcacgggcgagcatcgtggttctgctcccccgatgagcggtgagcgcgagccatcgagaagctcgcggtggaag

SEQ ID NO: 584883 - DNA, 831 bp, Homo sapiens
  misc_feature (622)..(622): n is a, c, g, or t
  misc_feature (660)..(660): n is a, c, g, or t
cggggccagcccgccaaggccccccaagcgcgcgggcccccaacggcgcccagaatctgggggggttaccccgcgcttcctcgaagggccgtcctaggttcgcgcgaacccaagcgcccaaggggccatcaggggaagcggggaacatcgccaccacagggcgacgctttccccaaaaggggggcccccccgccggcgttaccgcgtttcgttgcgcctcctgcacgctggtggtaccgcgacccttgtccctcgtcctctaggctcggagcgggtttcccttcgagggggccctcggcttgaaagttggtctctcgtttccgcgagccccaaaccctttgaagaccgcgtaatcggatcccgtatttcaggtccaacgcgtgagaagcacgttttctcaaccgggcactatagatcttggcccttcggggggaaattcgttccccttgcggggcacaattgggggtcaccagcgactgttctacccactgcttagcgagcaagcctctatggtccgtgagccagcccaccaaaactgttaaacgcttgagttattaaaagcgaaccaggtgaatcctggtttactcttaaaattggcctgcacttcgtgaccctgagtganaaggctaactatccgtactattcttatagtgagcattncagacgaccgcagctaatgttaaaacacctttaaacggaactaaaaaaaaggacgccctcccgtccagtgtccacatgccagttcaaccccagagggtcgggcaggctgacatatttattttctgtctattctgtaggcatatacaccatgtccagatcctgcttaacggg

SEQ ID NO: 584884 - DNA, 408 bp, Homo sapiens
  misc_feature (120)..(120): n is a, c, g, or t
  misc_feature (127)..(127): n is a, c, g, or t
tcattccaaggtcagttgaacccatggacataggaggctgactgtgtgtgtgtgtgtgtgtgtgtgtgtgtgtgtgtgtgcatacagacacacatatttgctgcacacaactcgggcttnaccaacnaagttttcaaattctctttttaaaaaaattattatcacagctaaacaaattaccagtaattcttttatcctcatatacccggtgttcagattttctagattggctcctaatttttttacagattatttgaatctgattcaattcatgtactgtaatgtttgataacttaagtaccctttataggttctcttttacctcttctttattaaattccttgtaatttgttgtactaaatagattgtcttctagaatttcctgtagtctgaattatgtagtattgt

SEQ ID NO: 584885 - DNA, 211 bp, Homo sapiens
tgctgggattacaagtgtgagccactgcacccagccctgtagtttaatacgtctggaaatcaggtgtcagggtcccaacttggttctactttatcaaaatggttggcacttttctaggtccttttcgtatgaatttcagaattagttggtccatttcagcaaacacacacacacacacacacacacacacacacacacacacacacatatc

SEQ ID NO: 584886 - DNA, 316 bp, Homo sapiens
aaaagacggcacctccttcagactttgtcctctgatgtgagtgagctgttaaaagacaaaactcatctccaggaaaagctgcagagtttggaaaaggctcacaggcactgtctttgacaaaatgtgagctgggaaaccaaattgcacaactgataaagagaaggattgcttgtcaaggaatctgaaagcctgcaggcagactgagtgaatcagatatgaaagctgaatgtctcaaggcctcgagcgcactgtgagaagtagtcgcatgagctgactcacacagaggagtcatcactgagagagcatcagaactaga

SEQ ID NO: 584887 - DNA, 374 bp, Homo sapiens
agtgctagaccagttcatgtaggatcttgcaggccttcgggatagccttgtattgcattgtgggtgtgcagagaacctactgggaggcttcaatgttgtccgcccctaacgccacgaaaatagcatgcacaaatgccaggagatgttgctaaggtctggtacttggcttttatcctgctgctactaccatgttaacctgttagtggtaccatggatcctggcaaaagacatgagattcctggctcaggagtgttgtaaagtgggcaagatctcactgctatgcgtgcacaaagcgctgagctccaagggaactcttctgagtgggaaggggaatgataactcagtccatacttacagaatctgagcctcagtca

SEQ ID NO: 584888 - DNA, 438 bp, Homo sapiens
gatatctcttttgtcatatcagacttgtgcatattcagatctaactactacatgtctatgtcaatctagctagcagtatatcaatcttttttttatcctttccaagaacaaacttctcattttgtatatcctttgtatagttgtcatgggtctcaatttcatttaattctgttctgattttagttatttctttttttttctgctatctctagtttagttttgttcttgtttttcttttttttttatttaaggtccaatttaagtttgtaatttccagatttattcttccttaatgtaaactttcagtgcctaaaaatcttcctctctaaacgctgccattgttgtattcaaaagtttagggtatgtggtatctcttttttggtttgttccaaataacagtttgatttctgcctaaattattggtcaatttaagagtct

SEQ ID NO: 584889 - DNA, 89 bp, Homo sapiens
ctttccagccttggaggtggaaagagattttcttccttttgtctatccagatgaataaagaagagaatcagacggacttaaataaccct

SEQ ID NO: 584890 - DNA, 262 bp, Homo sapiens
cttcttccttaacaattcggtctctcttcagtgttcccatgaatgctttcttctcctccatggtctggaagtggccatggccaaacttggaggtggtatcagtcctataccaccataccactataccaccctgataccactctgataccaccataccaccataccaccataccaccataccactctcaccaaccaatttatcccattttcttatataaggagatgatgatggatataggttctttacatcggtggtatagct

SEQ ID NO: 584891 - DNA, 598 bp, Homo sapiens
ttctaaatggctgttacctaaatcgctgtgctatgtagaaagcagggacatcaacaaacgtgatgagtggatattgaatgcatcacagaatctgacaaaacgagccctttcacagatgaactaatatccaagcatcctgaggccgccttaggttggttgccaacaataccaacagtcctcccattcattcttgcaaaaaccaacaatgatgttcttggcataatagggcatgatctcaaaaaaattcacgctcatcaccaacagagtgtctgatgtccacccatgttgtaggccttggttgattccaaagggacaatagtgtccaggctcaggaaccagagggtcactgggatcgtggcaactcacggaacggagccgggtcctgattgctcagggcaaaatagttgaagaaatcccggagattacacaaggcatcaacatcattctcacaagctctgtgagcaaacctgacattgtgatgtgggtcttggaaccaaccgagctcctcctggttacatcctcattgatgacagaacttcacaaatcagggccagcgataacaagtagtaggtgcctataacatgaacttgagtctgtt

SEQ ID NO: 584892 - DNA, 227 bp, Homo sapiens
tgcatgtcggaatagattgttttcctgttgtcatttttgctattttttacaaaggttttttttctcctttgagattatatgaacatggtcacagagcaagtaaagtcagaagtaggacagagaagcgctccgaaggctggtttggtcatccgatgatcattaaaaagtggctgacccctaacaaatatgtaccccgactctccctctttccggtctccagaatctaa

SEQ ID NO: 584893 - DNA, 163 bp, Homo sapiens
tataattgaagtcctcctgctttgggggctgcttcccagagtcccccgggtgctcccctgccgaggtcagtgagctgaccaagccctggccctggtgactctcatctgtcatcccagtgacatgtcaacttggtcacgtgtcgggtcacttggagcctccagt

SEQ ID NO: 584894 - DNA, 126 bp, Homo sapiens
tgcctgggcctctatcgccccaaactctgttgactgaagagagggctacatgttgactgaagggagggctacatgttgactgaagagagggctacatgttgactgaaggagtttggggcgttaaga

SEQ ID NO: 584895 - DNA, 199 bp, Homo sapiens
ggattttttttttttccccaaggggggggaaatccctttgaaccggttgggaaaaacctttggggggaagggggtggttttttttttggggggggaaatttgggatggcggggggggttggccccccttttccttcccctttaagggtttggggaaaaaacccctttttttaggccccccccttaaaatttcctttgga

SEQ ID NO: 584896 - DNA, 431 bp, Homo sapiens
gctgacttagaggatcccatcacatcggtactgcgatctttttaatgaggactgcgactcggagctgaaagagatcagggaatcatatgatgctgacgacattcaggagagcatttctcagagcttaaaactttggtgttgctgtgccccacaagcagacatgatctatgaccccagctgacaccatccgcctccactgataccctattattccaagatggtctttgaaacaggacagtttgacgatgctgaagattgagtgtggagcttttctgccttgtagggtgggcgggcctccacgtcaagatctcttttcctgtcttggaggtgaaaagtcatatctgagaaaaattgtttggcaggtgacccctagtctggggtacacagaccagtgttcctttattgacagtgttcaataaggccccgtcatt

SEQ ID NO: 584897 - DNA, 292 bp, Homo sapiens
aacatagtctgtatataccaaagtataggacgttgtatccatcctcatattaattagttagttggctcaaaattagtgctaatgacttagtaattcagtgatttctgttagctttaaaacctttatttcagaactatttcacctcttggttttcatttttgctgtgtgtcactgcctgccagctgctaatttattaactcccagtgaatcacgtgtcctgtgaagggactgaatattagtggcaaattatgttgatgatttatattttgaataaatagtttgaatacataga

SEQ ID NO: 584898 - DNA, 508 bp, Homo sapiens
cgagggtccgtgtgacataagaaatacacatttggtctatgccccaggttcctggcacagagcttgtaaaatgatagtaacttcttgagtgctaggggtgacgggaacatcttgtcttttacataagaaaccctcctcaaacagatgtgagtttatgttaatgatgtgactggcagaggatgggggctggttgccagagaatccatccatgtgattagaaggttgaaactttcaaccttatcttcataaccgggaggggacagggcatgaagactgagctcatcatcaatgatttagtcacttgtgcccatataatggagcccccacttccaaacgaaggttttcagagagcttataggttggtgaacacatccatgtaccaggaggtgtaccccactccacggggacagaaattcttgtgtaggggacccttttagatttcattatatatacctcttcagttggatgttccttttataaccaaccaataaatgttatgtcaagtgta

SEQ ID NO: 584899 - DNA, 186 bp, Homo sapiens
tgtggtgtcagagacccagtgtctgagcccggatgttgctccatgtgactaaagctggcctgtctcaggaccttttctttgcttttttccttcttttttcttttgacaccggagttccggctcttgttgtcccggctagacgtgccaatggcttgatcccaggatcaccgcaaacgtgtacctccc

SEQ ID NO: 584900 - DNA, 1414 bp, Homo sapiens
cccaccgctgactgcgccgcggagaaagccagtgggaagccagacccagtaggagacccgcgtgcccgtctcggtctggccagggcccgcgctatggatgttcctctgggcgccctctcttgggtctgtgcttgcagatctggccgctgctgacttcgccacacccgttctttctggaacagttcaaatcccagatgtgccggaatgaggactacaccattacatgtgctacgtctgaatgatctatcgtggacatcagtctgtccgaatctatgaagagtcactcttgtgtgtcgacgatcggcttcgccaattggcaagcaaggtataatacgtagtcacctctgtggtggatcaatgagcgagctcacccagcatggtgccaggaccgcaaggtccaacggacgctagaggtctctgctggctaggttgccatgctgggccgagtgcctacaagtcatttggccgcgagatcaaacgcatggtcctgcatcaacatgcttctcgcgagcagcgcttcatcgagcctttttcattcccatttgggtgacaatgggaaggttccaagaggacaggggtacgcattatggcggtacagtactgtatcgatcttgcctagaagccccaaggtcgctagggcagacgagtgcaagaggaaccccgacgtgaccattctggagcggggggtttttgaaaagcggtgttttgaacgttggctccatagggttgggggccataccattaattctagccgggtcgcaacggttgggttcaaatgcaatagcggctcccttggatgtggggagcacttcactcgatatatcgggcttctgcaaatatacgtcgtaaaggtataggccgtggcggagaatcgtcacgggggaccctacagtctaggaaatagccataacggcgagactttgggttcaccttagagggaaaaaggtttcgtattcggcagaggaggcccccagatgggcgctcaaattacataccataggttagcaatatttaatccagtgggtccccacatcctttgggcgccgctccattttttaggagtaaaccgcgggttacgctcctagagaagtgtccgtaaacattaaaccccaagcgtttccctcgaggggtaccgtgttcacaccagcgacctttccacacggatgagtgacccctccgttacaagaggggccagcatcagagtttgggaaacgggcaaagttcccccatacgatcggcggaactgacaaaaaggagaagcgaaagcgtttagcgcgagagagcgacggcagaatttggaagccgctcccaaagaacaatgggtttggcagagggattgtaccgatatacaggtaaagagtgcgcattctggagggtacccgcgacgaggtgggaccttttgacacgcccagag

SEQ ID NO: 584901 - DNA, 273 bp, Homo sapiens
ggatcccccgtacagatggacctctcatttattccttgtggaaaacagaaaaacaccaatcttaaaaaataaagaaagtcagagtaaacctggaaagatacccagatttgataacctgttagacaggacaatccaggctcaaggaatctcattttctcaactttgcatctggttgtccagatggagactggacttgaccaacgtgatggaccacagacaagggcaaatttcattgtttttctacctcatccttgtacctcttttttcattaaa

SEQ ID NO: 584902 - DNA, 811 bp, Homo sapiens
agcgggttctgcagccatttcaggccccggacaggaggcagtgccgcttcggccgaaggcccgagcgcccgaggcgtctgggatggtgtgggaccggcaaaccaacgactggagtatgagtggaaacctgacgagcaagggcttcagcaaatcctgcagctgttgaaggagtcccagtccccagacaccaccatccagagaaccgtgcaacaattctagaaactggaacaacttaactcagtatccagactttaacaactacttgacttttcgttcttacaacaattaaaatctgaacgcatgaacccacaagatcatcgacgctggtcttatcttgaagaataactgtgaacagcacactttcagaacttcccaaactggtgtaacagactttattaaacacgtgaatgtctaaactaactattggctgactcctctcctctgacttagagccactgtcggtactttcgatcacaactatagcctccaagggcagaactcgccgaacttggcctgacctcttaccaaaactctgtagcctgtcggattctgaagcactactactacctgtgagggaccatccggtgcccttcagcaacatttgtgacagattctgctgagattttagacagtgatgtttcagatcgtcctctcaccatcatgattcccaaatttttacagttcttcaagcatagtccgtccatacctaacgtctcacgcgctgcatggtgtcaatcagtttactatcagtagactcagctctaatgtggcactggattcttctattgcaattcttgcttagttgtgtgag

SEQ ID NO: 584903 - DNA, 708 bp, Homo sapiens
  misc_feature (502)..(502): n is a, c, g, or t
ctcgtcccgatttcgcacgaggttttggagacataattttaggacattaaatgtggcagacactacagggccactgggttcagcctataccatctttttgaactaagcgtttaggggtctgaaagataagtaaagtgtctgagcaagaaaaaatgtgaagctcattgaagatatacccaaagaacccaagtctgtagagcccctgtatgagggggccaccaaaatatactaaatctgtgctgagaaagggagatataaccaactttcccacaaagggagatgttgttcactgcttgtgtacaggagcactacacgatgggactgtgtttgtactaatattcaaacacgtgcacagaagaggaaaaatgccaagcctttaagttttaatgtcggagtaggcaaagttatcagaggatgggatgaaactctcttgactatgagtaaaggagaaaaggctcgactggagattgaaccccaatgggcttacggaaagaaagacagnctgatgccaaaattccaccaaatgcaaaactcactcttgaagtggaatagtggatattgattgaaatagcagggcttcagctctatggatattagcaacactgatataacttggccttgagaaatttacacaactagttagaacttgttactattgtaaaggaagagtcaactggttcaaggaggtaatggtcttactctctacct

SEQ ID NO: 584904 - DNA, 102 bp, Homo sapiens
agtcctcacggatgagtccacggtatacagcctctgtactttgtaaggtcaccctcacggtaggacagcagtgagtgctgacactagtagaagactgcaggt

SEQ ID NO: 584905 - DNA, 106 bp, Homo sapiens
  misc_feature (1)..(1): n is a, c, g, or t
nttactagctgtaattgcaaataacatcattaccattaacaaggaccaaaatgtctttgactccaagaagaaagtgaaattaaccaatgcggaaggagtagagttt

SEQ ID NO: 584906 - DNA, 249 bp, Homo sapiens
tggtcactctaaggttgggaaacgctgatatcatttatagttgggtgaacaagcagaagcacacgagtaagtactcccgtcatacaaacacctggtgttttcagaagtttgaattttttggggctttttttttttttttttttctaagaataggtctgcttacacccaggaggaggagggagatcgttcactgagctcaactccgggccagggatctccgagaagcgggtacaggttgtgtcaccacac

SEQ ID NO: 584907 - DNA, 257 bp, Homo sapiens
ttcctttctagaggccgggaagttaaacttgtagccaccacctccctcttcccgtcaacctcggccccacttcgggccgaaagcacggtacagaggctgttggttgctttgcacggcaccccacccaccccggatcgcggctgtcttaagggacccggagttcattaagggctctttcggggcctctgcgagtgtctgatctgctccgtttttgcaaaaagcgcctctgtctcgcagagctcgtgtgagacgagaca

SEQ ID NO: 584908 - DNA, 575 bp, Homo sapiens
cgtctcctagaggatccccgtactccccgttggcctggccaacaagtggtgtggtgctcctgagccctccaccatcgtcgcgctctctagcaaccactgtccctagagtcaccaaactaaccgcgaataccgaggacccctcgcactccccggacactcacagctcaaagactggagccagacatcagcggtgttacccagatgtgtgaaacgagggatcggatgactggattgccgaagatgccgtcgaataaagaaagacaagacacagttcaaacccacccttggagagccatgtgggctgggtgatggattcccgtgagcacagggcccgtactgcttccatcagctccagcccctcagaagggacgcctacagttggcagctatggcgtgtacccctcagtcattgcccaagttccagcatccttcccatgaactgctcaaggaaaatggcttcacacaacacgtctaccataagtatcgtaggcgctgccttaatgagcggaaacgcttgggcattggccagtctcaggagatgaacacactcttccgcttctggtccttcttcctccg

SEQ ID NO: 584909 - DNA, 132 bp, Homo sapiens
tggatcccggttcatttgtctacaccaggcttggatgcgacagggatcctaggatagtcagtagaattagaatggtgaagatgataagggtaggagggaaggttaagggttggatattggctaggggtggcg

SEQ ID NO: 584910 - DNA, 225 bp, Homo sapiens
  misc_feature (60)..(60): n is a, c, g, or t
cccacttctttgagttctcaccaaggagctagccctggccaggaccggatacttatccgnttttccccttggagtcctggcagattggcaagatagggccgtcatgacttttttatgattggcacggagggatccagggcatctttgaactgctgctattacagagagatcttttggcagagtgagggctgagataaccagctttgattatcccgatgcacatcc

SEQ ID NO: 584911 - DNA, 492 bp, Homo sapiens
gcgaattcactagtaattagctgtgaggcagtgctgctggtgcatgacccacttaatggctagatgggtcagaaagtacccagttcatgatacgcagttcaggtcgcatcgtgacttgatgacccatggtcaaatgttcagtttccaccaaagcccagtaacaagccaagagctgtctctcaaaaggagagtagttacctgcagattatggcagggccttgctccaaaatcctagatgcctccactgtgattcacctataggggcctgccaaaaggctccaaaaagcatcccccgtctggcaatgacacctcaaataccattgaatctgctagggtcatatggaccaagtggcagagcagcttgtacagcagcctggacctatgtccgttctggaccccactcaaaactggggtcccagtggcctctagggacacttgataaatgtggccagaagtaacacacctatgaataaggcatgtgatgactcccaa

SEQ ID NO: 584912 - DNA, 166 bp, Homo sapiens
aggactatggtccgctagcggaatgctcatatgcctagggttctgaccaatggaatgtaagcggaagtgatgcaggctacttccattcaagctctagaaggaaacatatccttcctttctctccctctaggcctcatggagggggcgcgctgcggagcaccaaaca

SEQ ID NO: 584913 - DNA, 286 bp, Homo sapiens
gtagtgggtgatctagaggatcccagtttatggggaagggatgggggaaggtgcgctgctgtctcgtgtggcctgccgccgcctacgaggctgtgcggaactgggagcctggaggggttgcgtggaagagtcctggactgcgctcctacacgacgacgtgtacgtaggaagacgactatgccccctgacagtgaccctctgtgccctcactctccgtaccggtacttgtggacagaagcgacacgggccaagcaagctctcgccttcaacaccgacacccgcttaa

SEQ ID NO: 584914 - DNA, 263 bp, Homo sapiens
ggtggaagcacccatgtattgaggcccccagacatgaaggtgtcagcctccgctcttatgttctcacggcacttctatgtacattcctcacgtcccaatgggctgatgcttctgcttggcctgtgacatagtgcacaacttcacagatgctgtcatccaggagcggtgtcgcaccctcactagccagggtgtcgatgacttcctgcaggccaggggcaagtccacgactttggacttccttgacgtgctcttgctggcccagg

SEQ ID NO: 584915 - DNA, 830 bp, Homo sapiens
ggccctgggctcgcggggtgccggggatggcgggagccggagtggagccgagctcgcggcggagcggggggggtcgaggtcgagctcggaccaggcgccgcgcgcacggggcaatatcctcgcacaacactgggccttgcagggttcaggcctgcggccggaagcagggattgaggggatccgcgaggacctgggggttgtggggaacaaagtgcccggaaccaggtggagggctcttcgccggggcacggggcggcggcgtgacgggggctacaagcaactcccgtggatctagggtgaaaagcggttcatcaaggggggtacatgagcatgttgccgcacaactctggggacacaatgtgtgtctggggggagggagggccctcttattggcgggctttttcaggctacgcaagggactttcgtggaggtcggcggcaaagatagggttgtccggaggctgagtcccgggtgttgtcacaggcctctctatggtgactcgggggtaagctggaagaaggtttcccctcaaatgggtttgggcgggtcccacaaggttgatatgaagatttcctgaagaaggtgtgaaggaagctcttagaatgatgaggcggtgtggtccggtggtgggaccacccggatgtcattaaagggctgtggtccagttggtggaggaaggcaagtaccgggtgtctgcccatggaagcttacaaggagggcggagttcggggataccaaccggagggggttctggggtgaacggggcatcacagcacggggagagtcaccgcgccggataaaatctggggcggatgaaccctgagggcctg

SEQ ID NO: 584916 - DNA, 170 bp, Homo sapiens
gaaaaatttttttgggggggtttaaaacaccccgggttgggggttttttccccccttttccccccaggggggggggggggggtttttggggtttttttttttgggtttccccggccggggcccgggggggaacccccccccggttttcctttaggtttttttttttttta

SEQ ID NO: 584917 - DNA, 189 bp, Homo sapiens
gtggtctgaacctcctgacctcacatgatctacccaccttgcctccaaagtgctgggattataggcacccccgtcccctctccctcatttctatgtgctctctattctcctattagatttggggacctatgatgctctgtatctccgtcattctctctcctgtttcatctcttgcctttgtcttttgtg

SEQ ID NO: 584918 - DNA, 346 bp, Homo sapiens
  misc_feature (25)..(25): n is a, c, g, or t
  misc_feature (55)..(55): n is a, c, g, or t
  misc_feature (100)..(100): n is a, c, g, or t
  misc_feature (205)..(206): n is a, c, g, or t
  misc_feature (250)..(250): n is a, c, g, or t
acttagtggggaaaagctaaaagtntttcctttaagaactggaacaggataaggntgcccactttcatcactcttattcaacgtagtactattaatagangtgctagccagagcagtcaggcaagagaaagaaataaaagacgtccaaattggaaaagaagaagtcaaactgtccctctttgcagaagccatgatcttatatttnngaaattcctaaagactctaccaaaaaactcttagaactgatgantgacttcagtaaagttgtggggtaaaaaaaaattcagcatacaaaaatccagtagccaattcttttacacccattaattggacctcattgggaagg

SEQ ID NO: 584919 - DNA, 213 bp, Homo sapiens
gtagggaacccgatttctgaaatgggaggaaaggaggtaagaatggttgtgaacacagataaccttttaagaaaaaaatgcagaacgtattcacagaaaggaaatcatacctttttggcttcacttatgttgagtaagtacgaggcatggtaattctgctaagagtaagcagcaggtggcattcacaacagggagctttggaggagaggggat

SEQ ID NO: 584920 - DNA, 256 bp, Homo sapiens
  misc_feature (65)..(65): n is a, c, g, or t
tcgaggatcccgccacggtagattccacggtagatatatctgttgtgtttaagtcaccagatatntgttcccatcggtttagcccagagatagacagtagaatgcaatacctccctcccctaactgacgggaggctgcaaggaggcccaaaaccagggcccaatgcaaggcacgtggtttccttttctcctctctctgcatctgcgctttccagataagcccaaagacagcaacttctccactcatgacaaattta

SEQ ID NO: 584921 - DNA, 559 bp, Homo sapiens
  misc_feature (466)..(466): n is a, c, g, or t
tttgagacttagattcactctgtcacccaagctggagtgcagtggcaccatttcagctcactggaacctttgcctcccaagttcaagcaattctcctgcctcagcctcctgagtagctgggattacaggtgcatgccaccacacctagctaatttttgtgtttttagtagagatgaggtttcaccatgtttcccaagcaggtctcaaattcccgggctcacgcaatccatctggctcaacctcccaaagggctgggattacaggcgtgagccaccgtgctcggccaagaaataacagcttttctaaagtaccaagaaggaagctgcagatggtctacaacgtctgccctttcttgtaacaagaaaactctttcatattaagagtatttttgaaaagcatcgcattttctcaattcctcaatagtagggataatatttagtaagtctttcgctttgagaattgtaangtctagatttaaaaacacaaatgtccctctcctgccttatataacttgtgtaatggttcaattttataaaattaaattatcaatacgtcctcc

SEQ ID NO: 584922 - DNA, 876 bp, Homo sapiens
ggcatttacttgcactcaactaatgcggtgtcgctggcgtgctgagcgagcgcgcggagagtctctgttggtgaaatagtgggaagagatacatgtaggcatcgggaacgagcctgaagtccaccattatcacaataggacagttcgatgctggcggtacagtctactcccgtgacctggctggccgtgcaacagtctggatcatcatcgttgaactagttaggctattcgaagcttctcaagtccaagtgggagaacgactcaaggaaacgagtccaaagcaattcttctagaaaccctatagaagtacttacttcagttaccaggtcaaacacagtgagaaccaaactttcacaggcatttgaactccaatgggcctgaagggttccagaggaccaagtctacagatactcacttgaagtgacagaaagtgctgcataactgccagtttactcatcgatgatattgaaggacaaggtcaaaactccgacgtggctgtcccagttggccacaggcatctatggaatcccatctgtcatcaattctgacaattaccgtgtatttccttggcttggagaaagtcttaacccttgatcacccagatgcagtgaaagcttcatacccggcagctttggaactcatcagggacaaggcgtagatatttactggagggattattacacttgtccactgacgaagactataaagctatggtgcatgcagaaacacctggtggacctggtttgcattacgcaagtaggcctcaatgcagactgtactctgcttacacagcagactctcaacactcccacctcactccacttgggctcattactcaaattacgcatgattatggcactctacacctcccacagc

SEQ ID NO: 584923 - DNA, 598 bp, Homo sapiens
gagaatgcgtcatataaagctagttaacgcatttactaaacgcagacgacaaatggcaagattaattgggagtggtacggactgaaacaatttggagaagatagaagtttgaagtggcaaactggaagacacgaagtacgggaaggcgaagaaaagactcgagaagatagggaaattagaagatcacaaacatacttttagacgaaaaaagataaatttaaacctgacaagtaggcagcagaagtactagagacaagctaggaaacaaaaagctaagggcaaaatgtacaaccttagaagaaaattggaagatagaaacaagatagcaaatgcaagatatcgtcaagagtttcagatagcaactgaaacaacaagctaagacaagtctcggagaagtatagaagatagacaaatatcacgccaaacatcggatacaatagcactgacaaaatgaggaaattattggtaaccaatttattttaaacgcccatcaatttaatatctggtggtgccgaagttagaaggtagagcttgagaagatgagggtgtatacgtagaccagaaccaattagaagaatacttgagctctggccagggg

SEQ ID NO: 584924 - DNA, 221 bp, Homo sapiens
atgaccgtggctatcctgctggtgatggagggactttcagccttcctgcacgccctgcggctgcactgggtggaattccagaacaagttttactcaggcccggggtacaagctgagtcccttccccttcgctgccccagatgactagggccccctgcaggtcctgccagacctccttcctgaccttaggcaggagaggaataaagacggtccgccctggca

SEQ ID NO: 584925 - DNA, 258 bp, Homo sapiens
gtagaagtgaatagatgagtagtagcctacaatcaggctctagcttctcccggaacactacaggatcaatttagttaaaatatgcatgaaactaacaggcattctctcaaatgagtttaaatgcattttcattttcagacaacctacatgacatgttttacttaaaaacacaggcctccactccaaataaatcacagtcaaaataaatgcaagagctcaagatgcacatcagtcccattggtcttaagtcctggtgtt

SEQ ID NO: 584926 - DNA, 234 bp, Homo sapiens
gattagaaaatcacaccagccatacatgatgtttcacttctgtaatccccgcactttgagaggccaaggcgagagaatcacttgaggccaggggtttgagaccggcctgggcaacatagtaagacctcatctctatgaaaagttttttaaaaaattggctggatgttgtggtacacacctgtaatcccagttcttcaggggcctgaggtgggaggatcacttgagtccaggagt

SEQ ID NO: 584927 - DNA, 677 bp, Homo sapiens
  misc_feature (327)..(327): n is a, c, g, or t
catgtccctatacttcgtgtgcttttcctttttttttttgagacggaggctcactccgtcacctaggctagagtacagtggcacgatcttggctcgctgcaacctctgcctccctgattcaagtgattctcgtgcttcagcctcccatgtagctgatattacaggcacttgccaccatacccggctaattttggtattttagtagagatggggtttcaccatgttgcccaggctggtcttgaactcctaacctcaggtgatccgcccgcctctgccttccaaaggtgctgggattacaggcgtgagccactctgcccggcttatttnctttatggttaggccttcgaaagaggttctgtggagcagtgattgtgcaactcttgctgacgttgctggggaagctttaaaaaaaaaaagagttgccccacagagattcggattctaaatggtgcggatcaaatggcctgggagtagaattcaggcatggatatcttgaaaaatctccccagttgtttgagaaacaattttagagagttgcagaagtaggtatatcaaattcacagaatcttactgagttgggaagacggttaatacaatgggcttgggtttctacattggctttgagcatgggatcggacgcatatggtgcccttgtgactgtcgaagttgcttggtca

SEQ ID NO: 584928 - DNA, 1227 bp, Homo sapiens
  misc_feature (48)..(48): n is a, c, g, or t
  misc_feature (57)..(57): n is a, c, g, or t
  misc_feature (64)..(64): n is a, c, g, or t
  misc_feature (175)..(175): n is a, c, g, or t
  misc_feature (209)..(209): n is a, c, g, or t
tgacgtcctgcacagcgacaagaagctgactttggttttgtgaattcntgtgaccanggacctngcagaagtattttggaccagttgcaacatgagtgaaacctcgaatccctgagaacttgtaaaacgctcaagttcccgttcttcccaaggctacactaaaaacacggggggncatgggggaactttccattgatacaacgtaaagncccccgacaaaaagttggtttggcccttaaccctaaccccaaagggtggaggaaagccgcctgttggtaacaacaggcctccgccacacaaaaaggaaaaaatcacccgtttgggccgtttaaacaacgcgttaaaaagagagcccaacaaggggggcaacaaacacttggtcggcggcaggaaccacagggcccagtttgggaacaaaaactcgtttctttcgggaggggtcccctttgctgacaccttcctttgttccttcgggcaggcggccccccctgtgggtggggtccctcttttaccccgcggaaaaatgggggcccagcccgatttctttacattagagagggaggggaaaaaaaccttttcttttatccccgaccaatcccgaagggggaagtatttaccaaacccctagaggggccccgtatttgtggcggttttgcgtttataaaacgccgcctatattccccccaagaaagaaggggagccccttctattggggggaaaaacaagggaacggggcgatttttggacgcgagaggattattaccacgagaagacccgataaagaagaccccatttttttgtggaggagattattgtgggaggggcagactttttaaaaaaagcaccgacccccataggggagggaccaccgaccccggacgccgtgaaaaataaaagccgcacacccctgagtgggtgatggtggctagaaaaacaaacttatttttttgagcgcaggtgtttttttactcgacacgccagcagtaattttttttaccacccacgcagctgtttgtttgttagcatctttatacatagttgtggggtagagacgaacgtagtctacgcgagagaacatagagggggtgaacaacgcagaccacccgcgtaaaaaagaaagaaaaaagaaacagacgggaggaggataccaacacaagtatatttttttggggtggggagcgcgtttttttagaaagagtcaccccaacacgatgtttttttacaccg

SEQ ID NO: 584929 - DNA, 939 bp, Homo sapiens
tttctttccttctccttacaccattactatctgaatcaaatctggacgatctcgctccttgaacttgtttgtgatgagtgtactcaactaacagagttgaacctttctttttacagagcagttttgaaacactctttttgtagaatcttcgaggggatatttggatacatttcaggatttcgttggaaacgggaatatcttcatatacaatctcgacagatgcattctgagttagacttcttatccttggggactgtgagccatataaacttgtgttcatcataaactaatactcactaacatcaaaaaatataatatctacaaaactaacgattataaaaaatatagcatgttatgttagatagtcacaagctctacacctctcgccttctcttcccccaccccctctggaaagaagtagtagacgccacagagacacccttcgctccagcgtacacgcgcggataagttcctgtcctctctttctcatgtccgtctcttaatgtccagacaccaagacgcacgtttattaccgagttttgtatatttttacctcgtccgagcttgtgatcgcgcacaccatctctaatactatataaattcatccatattgacagtgcgtatctatacataatcgtaatgtcttacgaatcgtctcgtcatccccttttaacatgtctttcctgccctcctcttccgccacatctcctctcttcttcaattcagagtagtagtccaccgctagtatttgtagttgctgcccaccctacacctctttacactacgtcgcgtgattacttgactattgtgcttgcaaatctccctacgccttgtctccgaatatcggtcgtagcgcgactatcacaatatcaccacactctactccctaatcatacgtcctctacttccgatatactttttacccactggccgccgccg

SEQ ID NO: 584930 - DNA, 249 bp, Homo sapiens
gcctgctgtacggggtcgtcgtgggtcctcccctgttttgcaggaccgatagcccctccttttttttgggtgcagttagttcgtcgtggcggtcccccagctgtagtcccgcctgtgtctctcttctgtgtaggcggcactcctcctctggggggcggtgtcccgcacagctgtttgcttcgttattgttcggagcaaagaagcgcgggtattttattctcccgcggccgaacaatagcaagacaagct

SEQ ID NO: 584931 - DNA, 232 bp, Homo sapiens
caacgcatgtgccgctcccgtgccaaggcgggttggtcggctatatcagctatgacgccgctcgttatatcgaacggcttccaccgctggctgtagatgatttgcagctgccgtctatgcagttttttgtatttgacgatgtggcgatttacgatcatcaaaccgatcgccttcatttgctcgcttatgcagatgaaggggaagtaggagaagcggagcggcacatccgttg

SEQ ID NO: 584932 - DNA, 139 bp, Homo sapiens
  misc_feature (7)..(7): n is a, c, g, or t
  misc_feature (9)..(9): n is a, c, g, or t
  misc_feature (34)..(34): n is a, c, g, or t
  misc_feature (109)..(109): n is a, c, g, or t
tttaaanangaaaataaggatgtttattaagganatttctagcccacagctagggctcatactcgctctatgagccactgtccgacctcatccccattcaatgtgaatnacattagggaggccgggccacaggtagatc

SEQ ID NO: 584933 - DNA, 242 bp, Homo sapiens
tcccccccccccccccctagggcttatttcccctggcttagttttttagggggttccaggaaaaggccccccaccctaaccaaaatgcaaaattgggagtgaaaggctgggaatggaggggcaaaacccagaaaatccccccaaaaaaaaaagtaccaaaaaaaatgggggtcctccaggggggcagccacaataaataaacacgcccggcacccccagcttgggggggtgtttttccctta

SEQ ID NO: 584934 - DNA, 145 bp, Homo sapiens
  misc_feature (16)..(17): n is a, c, g, or t
  misc_feature (106)..(106): n is a, c, g, or t
ggtatgatggtgtganncctctagtcccagctacttgggaggctgaggtcagaggatggcttgagcccaagaggcagaggttgcagggtcaagatcgcaccacttncactgcagcctgagagagagagagccagaccttgtctca

SEQ ID NO: 584935 - DNA, 1623 bp, Homo sapiens
cctggtacctgtgtcctggttattccctggtgatatatgtctgacccactgctgtctgaataaaaaaaaaaaaaaaaaaaaaaaaaaaaaaaaaaaagaaaaataatatatgtgtggtggtcctctctgttagtgttactactatcatggttggttcctcattgtaagtcactttttgtgtgaggaacaagtgaacgcatggaaaggctgtgtaaggggagaaggatgcctcttcagacagtggagtgaacagcgtgtgtggtgcgcttattaggagtgtaccagaaaatagtgttatctctatgtacccaggttgtagtctccgtctgtagagccccagcactcccctgtcgtaggccccttcccatccattagtaacgccgcgccacgtagtgtgttcacacccaccggcgtgggcctctccccgcgtgtgctccactaggtgtgggatatctctcctctctgtgagagaagccccgcctctgcgtgtgcgggccacaatactatactcggtgcgcggcgagatatatgttcggcccccgtgagtacattatggcgaattatacaacccacccaccacagatgttgcatcctacccactctctcgcgtcgcaccatagccaacaaaaataattaagtagacataaacatcttagcagagcggctactgcaccaccaatctgctatatttcgtaatcacctgtcattactattcaatgaagtaacaacaaacaacaacgtgcttccagtacaacaaacaatagtaagacccgccacaaacaactacctcattgagaaaccactctctttacacaaatatgctccccccaataattaattaaactacctaataaagagatccacagagtcgaaaataccccccaaatataaattatccattatgaaaacaacttctctctcccaagcatctaacactccaccactttataagatcactcccacctatttttggaatcatatcacgagaaaaattctactgcccactcacaacaactctcttccggtgtgcgacccttttccccccccccaaatctcgccgtcttaccaaaaaacacaaacctcctctaattaacaacactatttactaccacatctccacaaacacaattttattccccctaaaacttctctcccacgactgttcactacacactccacatattaaactatccccctcctatcaataaattctacaccaccgcccccacaccttttttatcaacacgatccttgttatgcaccacaaacacatgcgcttttttcacacacaaccctttatagtattttcacacacctaatgtgccgcaccttaatacacgattcttctagtgccgccgctcgcgccgccgtgggtccctcgctggagactgcacgcgggcggtggtttcggaccccctcctcctcgtcacaggcgtagctgggcaccatatttttgttgggcgccccccatgttggtgtccccttacgtgtggtggggtgggcccgccttgttgcgcgtcacttgctcgtgttgcgcaacctgtcgccgcccacttctatgtcgtgacgccccacatttgctccccccagacattgtgtttccgccacttctatcctgccgcc

SEQ ID NO: 584936 - DNA, 264 bp, Homo sapiens
gactaaggatccctcataggtcgcaggaaagcatattatctgtgctggaatcaccgttcctcatggcatgttctcttgttctcttatggcttctcttggctatgggaaagagttccctgaccccttgtgcttccaagtgaggcgatgccccaccctgctttggtctgccctccgtgggctgcacccactgtgtaaccaatcccagtgagatgagccaggtacctcagttggaaatgcagaaatcacctgccctgcgaacctatg

SEQ ID NO: 584937 - DNA, 388 bp, Homo sapiens
aaagatcaaggtgtcttctaagcctagatgcagaacagtgctgagaacaaggtctagagttaggcagatccaggtgtgagtcccactcccatgactatatctagctggtgtagcttctgagatgtcccagatacctctctaagccttggtgttctcatctgtaaaatggaagtgtcagagcaggtatcagattagaagaaacttgagaagtactaggacgtagtggaggctgctctgatcacatcataaacaccaccacaatcaacagcagaatcaatgtcactgtcatcatcaccaacacatattagcatcaccaccatcatccccataaacactacataataatcactatcaccatcactaccatcataattatcacctacatcac

SEQ ID NO: 584938 - DNA, 303 bp, Homo sapiens
cgggcacgtgggcgatcacctgagcctaggagtttcagaccagacttgggctacagtggcaaatacccgcgtctccacaaaaaatattctcattcgttgggtctggtggcatgtgcttgtagtccccactaccccggtggttgagacgggagaattgcttgagcccaggaggtggaggttgcagtgagcaaagatggtaccactgcactccagcctgggtgacagagtgagatactgtttcagaatcaaaacaactacgacaaaaagagaatttcagttactctattatcacgtccgtactgg

SEQ ID NO: 584939 - DNA, 427 bp, Homo sapiens
tttccaaagcagccaggaacatcaggtgcttatcctcttgacttcaccccctacatcttatcatagcacagtcaatcagtctcccgtcaatgatgcacacacaggtctccaggaaatcgtgcatgcatgccagactcccccagtggggcttctgagagccccgatcaccagacgtcatttggttccaaggtcgctccacccaatcctcgcagtggaaatctcaactcaggaccacgcgggccagatattatgctacgtccacactggaaactccttgaccccctaggttccaccaatacaactactggctgatcacccacagatggagccagagacacgggcaaccatgggaccagagactcatccatgcaaggtggtactgggcacccatcaacccacgccagacaccgccatggcactgggcaac

SEQ ID NO: 584940 - DNA, 590 bp, Homo sapiens
gacgccggagggtgtatgtgctctgaggcaatttatccttcactgcatatgactagtcatttgtgtagaggtgttggcagtattctctgatggtagttggtatttctgtgggatcggtggtgatatccacaatatcattttttattgcatatatttgattcttgtctcttttcttctttattagtctagctagtggtctgtctatttggttaatgtttttaaaaaaccggctcctggattcattgatttttttcttgaagggtttttcatgtctctatctccttcagtcttgctctgatcttagttatttctggtcttctgctagcttttgaatgtgttggctcttgcttctctagttcttttattttggatattagggtactgattttagatcttccccactttctgatgtgggcacttggtgctataaatttccctcaaaacatgctttagctggctcccagagattctggtacattgtcacttcgttcttatgggtttcacgtaacttacttatttctgccttaagttggtaatttaaccagtagtcattaggagcaggtttcacttccatgtgttgtgcctttgag

SEQ ID NO: 584941 - DNA, 487 bp, Homo sapiens
  misc_feature (74)..(74): n is a, c, g, or t
  misc_feature (121)..(121): n is a, c, g, or t
  misc_feature (229)..(229): n is a, c, g, or t
  misc_feature (233)..(233): n is a, c, g, or t
ctctgctgtctgcctcgctctgctgtctgcctcgggctctagtgaccctcagcctcagcctcggctcccgaatngttgggattacaagcatgagccatgtgcctcttttcacttctgattntggatttttacttaacttgtttgtcccactccaccccctttttaaagttagactctttttcctggtcttttttccccggtggactatgctcaggatcgacatagtctngttngttccttggttgtacaaatagtcattgtgcttcatgtgctcacgttgccatttgttccgggccaaatggaaatcaagcattcagcctatccagtggtatgttggtaaatgtttaacaacgggctttctggggaggaaaaaaacctcctggtttgtaacacttgctgatttccatggcgttaatactcccaccacgttggagttgagctgccagggtgatgtcctgaaggtggaagagggaagagaggtatgagg

SEQ ID NO: 584942 - DNA, 186 bp, Homo sapiens
ggttgttagatgaccggcctcaccaactaccagcagaaagcagaagagcttggaggcaacttaaggcgtctggatccactgtctgcgctcctacccactatgctacactgcctctaactatgaggaagcaagggcatttttttttttttctggtgactaaaaagataagagttcaagtatgcggct

SEQ ID NO: 584943 - DNA, 473 bp, Homo sapiens
catcctggaaatgagctaatgcagacattgccatttgctcactacaaatccattttcttttttgttgtggcagaaacttgccaactgtaaacaatatctgtgttatctttctccatatacccatttagactgtatgatctaatcctctttattaagtggggctatgtttctgagtgtaggtagcagaacatacatagatgtgatatgtgccatttccatgcctagtccttaaagcccgacttacttctccacactccctttctttcctggaagccagatgtgaacaatacaatatctgcaggccagatgtgaactatacaatggaggacgctgagcctctgagggatgatagagccatgagatcacaggcatttggatccctaaatgattacatgaagcagctcccccaccctcaatttccattgtactgtgatgtaaacaagaatgatgtcttgtgtgtgtatgtgataatc

SEQ ID NO: 584944 - DNA, 894 bp, Homo sapiens
ccgtgtcccgttgccctgctgcacttggagggctccccaaacccctcggtggcccgccccccggaatataacctcgggcccccgtccgcagccagtctatcatcgggggaacatctccgatgggcgtacggcctgaataaggcgaaaaccagcgcgcgcccaaaggcgccccccccaagtgggggcagcccccgaggggcaacaaacgcccccccaagcgggggaaaaggggtcacccccccaccaaaccccgtcgtgcggccacccaccagaaacggcgccggtccacacatctgcgctgtcccaaccatctggagacaagagtgcctcttcgcgtgattaatccccttccgcgccgcctcaccaacatgggtgcttctctccactcattccccggggggagcaccccttcgataggtctgctacccctagttcattcctccggcgcgcccccccgttcattgtgtatacagggagatacgccccgccgttttcttcccccgcccgggcgagggattgatcgggcctctccgagcctatgttgccgccccccgcggtgttcatagctctgggcgcaccgccaccaccttggtcgcgcacacaggccactgaccagagaaggacaaaaagacaacacaacagcagggcgtaaacgtcagagagacccgacccagcaagccccggcagacgtgaaagagcctaccgactgacccggggtcccctcccctttaccaagaccaccctctcgatgacagcaggtgcccagaactcccccacggggcgccaggttgagcggcactcactcacgcacctccgctggagcagacggtcatgcctccgcccccgcatgagcgggcgggcccagacccttcacaattacccccaacaatgaca

SEQ ID NO: 584945 - DNA, 481 bp, Homo sapiens
ggcccgtgtccccttcccctttagggccgaaaagaagggctgaagagagacctggcttcctccgacatcaaattggttcacccctgccccatccccgggaacacaaaggagtttcggcagatggcggccaaccgcgaggtgccccggcccctttcccccctgcccatgttcaatgtgcacacaggtgagcggctgcctccccgggtgggcagcgcccaggtgcccctcattttgggccagcactgacagcccagccagtggttccaggtccagccctgactttatcctcccttttctgtcccccccccgagtggcccatcccccctgctgattccagctcctggccctcctgggaccccggcttttaacaagcagggagagggggtggggtggggtgagagtgtgtggagtaaggaccttcagaattaatatttgctgctttgctcccccattggtgctggcagcctttcccgtccaacca

SEQ ID NO: 584946 - DNA, 174 bp, Homo sapiens
gttggggtgatttaaactgagttctgctggggataagctgaatctacgcttgggctgaactgagccagagctgacccttgggctggcctaaactgggctaacctgagtgggctgacctgggctcctgggctggactggcctccacacagagcccatccgtcttccccttgaccc

SEQ ID NO: 584947 - DNA, 348 bp, Homo sapiens
  misc_feature (24)..(24): n is a, c, g, or t
  misc_feature (179)..(180): n is a, c, g, or t
  misc_feature (285)..(285): n is a, c, g, or t
  misc_feature (307)..(307): n is a, c, g, or t
  misc_feature (312)..(313): n is a, c, g, or t
  misc_feature (344)..(344): n is a, c, g, or t
caggcatgtgccaccatgcctggntaatttttgtatttttaatagcgacagggtttcactgtattgtgcaggctggtctcaaactcctgacctcaagtgatccacccacctcggcctcccaaagtgctgggattacaggcatgagctaccacgccgtgccaactacatcttattcttgnntatttttcactttctctatctaactcagagcaggatacctagtaaaattggttcttcatcagagcggttgagaattcagagatgcttttttttatgtgaaccganttagacatttagagacattgtncactnngaaaatgactcagaaaatagaacatctatantggg

SEQ ID NO: 584948 - DNA, 528 bp, Homo sapiens
  misc_feature (489)..(489): n is a, c, g, or t
aattctgaaatttgtgattttttttttaaaagcaccagtgatgaagaatagaaattaacttagaattccaaaaagaatgagtattaaaaggtgtgttttagagactgttaaaaataaaaatcccttctgtaccaacctcccaggcaatcattaagagtcttttgactacacgatacaacacacattaagagtggatattgcacacttcattttagagggagttttatttgaattctgacccaacttcattttaaaatgatattttgtttggaaaagacttaaggctgttttctacagataacttccgagtagcagtaccaccagtctttaacttcccaaaacttgccaagtgcagcgataaaggtataaactgtgtttaattaaaaccacttgctttaagtaaatggagtaagagtttatcattcacatcacctcccaacttctcttatcatgccagctcagctcttctctgaaggaggctactgctgntatccttagtgatggaaaacgggtacaaggtcaacatca

SEQ ID NO: 584949 - DNA, 228 bp, Homo sapiens
cataaattcatgtcaaggaacagctattaagaatcaccctttatataaaaccagaattagtagaagaaaagataataaaaatcagagcagaattaaagattttgaaataaagtagcacaaaagatcaatgaaacaaaaagttggtctatgaaaagataaacaaatttgacaaatctttagacagaataagaaaaaaaagagagaggagccaaataagattagaaatga

SEQ ID NO: 584950 - DNA, 916 bp, Homo sapiens
agaccgcaacctcaacaccaccttcttcgacccctgacggaggagtgagaccccattactataccaacacctattctgatttttcggtcaccctgaagtctatattcttatcactaccaggctatcggactaatctcccatatcgtacacttactactccggaaacaacgaaacacaaggacacataggtatggtctgacgctatgatatcaatcggctctcctagggatcatcgtgtgggcacaccatatattcacacgcccgaatagacgtcgacacaacgagccatacacacacctccgctaccataatcatcgcctatcagcaaccggacgtccaagtataccagctgactcgccacacctccacggaagcaccatatgacctgactccgactgcagatagctcactgagccccacaaggcatccaatcctttccctacatccacacgatcacagatggacccagacaatggcacatcgcactacagcaacacccccaaccaacctaacaaccatcgtacctaccacagacacaagaatcagtaaccgattggcaagacacagctatccacaaccacttgcccactaattcacataaggtaagcagacacctacggcacacacaaatcatgacgggaccttccacatcaccacatgacagaacaccaccaacaaccccaagggcatatcaaaccattagccacactcaacaaccactacagaaaccacatacttacatacactacaacttaacctcactatatcccaatcacgaccatacacaatccatacaccattaattatccccactaacactacataataaactgctctaactccccttacacttaccccacataccgtctaacatacaataacactacacctcaacatatcatacacaccctaattt

SEQ ID NO: 584951 - DNA, 354 bp, Homo sapiens
  misc_feature (23)..(23): n is a, c, g, or t
  misc_feature (49)..(49): n is a, c, g, or t
ttttgagacagggtcttgatctntcacccagactggtgtgcagtaagtngcacgactgcagttcactgcagccagcctcgaactccctcagcttcaggtgatcctcccaccccagcctctagggtagctagaactacaggcatgtgccaccacaccgggctaattttttgtatttttttgtagagacagggttttgccatgatgtcaaggttgggtctcaaattcctgggcctccagtgatcctcccacttcagcctcccaaagtgttggggattataaggtgtgagccaccggaacctgaccaaattctagatttggtgtgtgtgtcttttggtaacatctctatgcatttct

SEQ ID NO: 584952 - DNA, 338 bp, Homo sapiens
ttttggggggttttgggggggggggaaaacaaattggggtttggggggggggggaaacatttttggattcccccggctggggttgggggcgggggggggtggcccccctttttttccaaggtttcccggggggttttttttgggggttggggctggggggttttttagggtttttttggaggggggggggggggttgggtttttttgggtcccctttttcccccagggggtttggaccccccccccccactttttttttttttttagggggttttggttttttttattttgtgcgggaaggggaattttttttttttaattaaaattgggaatgggga

SEQ ID NO: 584953 - DNA, 225 bp, Homo sapiens
cacgaggatcgtcttattgacaggtaatcctgtttctgtgttcacagtgtaaccacatctccctcaatgttcactgtgacaaagttgaatcaaacaggaacttctgtctcgaaatctttcataagatctgtcagtcccttgctgtccatgtgctgacttcctgaccagatacgatcccaaaacattccgtggagtcacgagcgctgccgtttggtcctgccccca

SEQ ID NO: 584954 - DNA, 175 bp, Homo sapiens
ggagtaggatatgtcgaccacgcgtcgctttatattcctataaatcattaatggcccagataaagttatacaacaagaacaggatgtaccaaaagagttatggtggagcgggagaggcaaggtgtaaggcgtagtgcgatataggacgtcagataaggagtgtaagcagtggata

SEQ ID NO: 584955 - DNA, 1068 bp, Homo sapiens
  misc_feature (18)..(18): n is a, c, g, or t
  misc_feature (250)..(250): n is a, c, g, or t
  misc_feature (287)..(288): n is a, c, g, or t
  misc_feature (306)..(306): n is a, c, g, or t
  misc_feature (545)..(545): n is a, c, g, or t
  misc_feature (835)..(835): n is a, c, g, or t
tgtttaggtattttcgcnataaaattctccgtttcccagggcgtctataaagcactctctacctcttcatgggatatacttttgctgcacgaacatacaatgctttctctttatctcttcatggcagacctaagtgtgagaagaaggttgctggtgatctaccacaccacagcctgagtacacccaagcacgcacctttaaaacatgcccaaacatatgtctgtgagaagaaagcaccaccgaattccantattcacagacttggttggcgcggggggcgtgtgttnngtttgtgcttgctggtantattaagtaatcacagttcatatccttgggaaaattctcccctgaaggccaattcattcgtaataaaaaccacattttgagcagtgagtgaatccagctggttgcactagtaagccattttcattttttatagcacatttcagctttccaagtattgcatatttgtatgggagaaatgttttctgaagtcaagcttaatgaaacatgaagtcaatgatatatgcaaacatctatttatntctctgctgtctgggaagttttgatcaagaaaacacttctgctcattagagaattgaccagatgcagtgctattaacatttctgtgatcaaataaagctcacccagatgaaagaagaatgcaacactaacagcctggaagcactcaaccggtggagatattacccccatcagttgaattatgctacgataccacccttctgtcttcccgcgcctcttacgtacctgtgccttgttacctttccgattctggcgcgccttttacccgctcatgcttctcttcctattatgngttctagaacctcctttcattcacgtacctctttagccctgttttttgcttatccgattgcactccatatcttcttcctctctatcttgctctcccctctccttgtcccttttactttcacacacctattcattctgtccacgttgcctcctagtctcttttatcccgttctttctctttcctcctcctcctccgtccccgtttctttcgcgccgttactttttgtcacttct

SEQ ID NO: 584956 - DNA, 117 bp, Homo sapiens
ccccacgcgctgagtatcgaggaggcataaccactcttgtgtgtggctatagggctggaaaatgctgaagatgactgctttcactggaggtcaaggattgtagtattgtgcagcgct

SEQ ID NO: 584957 - DNA, 303 bp, Homo sapiens
  misc_feature (46)..(46): n is a, c, g, or t
  misc_feature (75)..(75): n is a, c, g, or t
  misc_feature (123)..(123): n is a, c, g, or t
tgaaacatcagtaaaatccacattattccgcaatgcttctggagtnctgtattctggagatgtaaagaggcagtnaggcttaactcgaagttggttgtggggtgacaacataggctacccaangggtgcagtcgatttggggtatgacttcattcctgcacagtgtcacaaagatgtctctccaatctggttgtggtcatgctcatcttgaataaggctttttttgtttaataatgcatacctttatttcaagcacaaagctccaaagacaaggggtagttgcagcaaatcatcaaaatgaga

SEQ ID NO: 584958 - DNA, 1152 bp, Homo sapiens
  misc_feature (1152)..(1152): n is a, c, g, or t
gcgctgtcctgggtgcgcctcgggccgctgcgctcctggaccagctccccccagcgcctgggaggcgacccccagtgcgccctgggttcaaatgtgccctgtgcgatggcatgttccatgcccactctgtggggtggcgtgggatggctgacgtgggagtgtgttgcacgaatgccatgaaaatgccctgagaccacagcctgtgccagctcctgcgcagggatgggcagctgcgctctgacaagtttattgacctgcctgcgagccaacttcctgtgcctggagcttgggagactgcatgctgatgctgaatctggcctggccatcgaagccccacacgagcctggatggggcgacggccagacttgtaccacgtgacaccatgttgcccgtttcgcgtgccaccaatgctggccggatccctcctgtgtcctgtgtgcctccgtgcggccgtgatcttagggtttcgatggaggccgggtggctttgttgtgctccgttttatcaggggtgcttcacgatggttggaaccgttcctgagcctggcaaggggattatcagtgttggccacttttggacttcccccaaaggatcactgagagagcagttgccctggagccaaggttgcatgacatgtgcccggtttggttcccccaagagacagccacaccagactttagtgtaaatggatccaagaggaaatttccttaggaacggcggaggagggagaaacccttggggtagggaaacaatgggacaggacaactagtggtgatggggggcactttgtgtgggcgcacgcatttgggggacatggacagcgacggcaatagaaaccctttgggtttgtgagtgttttggtgagacaccccatttgtgggcagccggcaacagcgtgaggatgaacacccttgggtgtggtgtcgcacccgcacacagggaaaaccacacgaagcacacaaaccttgatgacgcaaaggcaggggtgaattaaccgccgacaaaaatgtagacccacaccgtttggtccgcagcaacacgagtggtgcccccgcattgggggtgtcagccacagtgggagacaacggcaccaaagaggtggccagggtgacacccgacaaacatgagtggtacgtcgaacaccaccgcgcn

SEQ ID NO: 584959 - DNA, 352 bp, Homo sapiens
acagccattaccccatcctctcctctcagattcaccgaggacagttccggtggtaaccttctcttagggtcgggaactcagcagagggagcagctgagagaggttccggccatagttgtttgtaatcttagggctctgggcttggctgaaaccatgcaggtcattgcttggtttcaggcttgcacactgccaggcgcctattgcttgcactctgtttcaaatgagggcacttccagcatcagcacagcatggctcttttcagatttcattgccatgaaggagttacatcatccaagttaaacagcggacccaacatggttacattctacaagctgtgaggttcttcaacctg

SEQ ID NO: 584960 - DNA, 88 bp, Homo sapiens
gcggccgcctactactactactgctcgaattcaagcttctaacgatgtacggggacatggagcaagttgctgtcataaaagctgcctt

SEQ ID NO: 584961 - DNA, 352 bp, Homo sapiens
agtccatctgggagtaatgggagatagtgacagactatcaggcattagattctcataaggagcctgcaacctagatctctcgcatgtacagttcacaatagggtacgcactcctataagaatctaatgccaccactgacctgacaggaggcggagctcaggccataatgcaagtgatggagagtggctgtaaatacaaatgaagctttgcacactagccttgccactcactcctgctgtgcagcccacctcctaacaggccatggacaggaaccggtctgtggcctgggtgtaggggatccctagtttaagggccttaacataaatgtaggctaacataagaactgagatct

SEQ ID NO: 584962 - DNA, 197 bp, Homo sapiens
gatctacaggatccccgtttgggccacgcaccgtgtgctttaggggtgcccagccattttaggtatgagaaggacactgttgtggtccaggattcgggctacatcttcactcgcctgtccactctatagcggatgtggcatcagtgcactgctgacgctcaggggtataaagtgctgcatggatccccaccctgtca

SEQ ID NO: 584963 - DNA, 100 bp, Homo sapiens
atgactgcatggcctccctggatatagaaagctccgaggctgtctttgcttccgccttctcacattgtatttcctgaatggagctcttccacctccttgt

SEQ ID NO: 584964 - DNA, 402 bp, Homo sapiens
gtctctattttcctgtctcgatcacattatatcgactccagtgtaatgcctctactgcgagaatcccaggaccgactactaccaagagctgcagagagacatctctgaaatgtttatgtcagatttatcaacaaggggtgttgtctgggcctctccaattattaagttcaggccaggatctgtggtggtacaattgactctggctttccgagaaggtaccatcaatgtccacgacgtggagacacagttcaatcagtataaaacggatgcagcctctcgatataacctgacgatctcagacgtcagcgtgagtgatgtgccatttcctttctctgcccagtctggggctggtgtgccaggctggggcatcgggctgttgtcgctggtcatagctggtgctgg

SEQ ID NO: 584965 - DNA, 149 bp, Homo sapiens
ggagggtcagacgagttcttcttaatgcgactccaggatttccatgcgttccaaccgggaagcctcgtcagcgtcttcttccgcggtgactttgccttcttcctcgagcatctgcacgacgccttcgaggtccatcgagagcatggtca

SEQ ID NO: 584966 - DNA, 557 bp, Homo sapiens
agaggagtcgtttctctgatcgctcatggagatccaatgccctgcctaatggaagacactcccaattctgtttgggtgctgcgaaggaaaaatatgtctttagagatgtggtgcagataacctgtctgcatgggtttgaagttgtggagggacgtgtagatgcaaaatctttctattcgacttgtcaaaagcaatggaaagtggagtacttccaaattgaaatgtcaacctgtggactgtggcattcctgaatccattgagaatggtaaagtggaagacccagagagcacttagttgggttctgtcatccgctacacttgtcaggagccatattactacatggaaaatggaggaggtggggagtatcactgtgctggtaacggggagctgggtgaataaggtgctggggccgaagcttgccgaaatgtgtaccagtctgtggagtccccagagaacgctttgaagaaaaacagaggataatgggaggatccgatgcagatattaaaaacttcccttgacaagtctactatgacaacccatggactggtgaagcgatc

SEQ ID NO: 584967 - DNA, 245 bp, Homo sapiens
tggcatatcaacctgctgcaggtgactctgacttctgaggaagaggcccgtatagaagaagagtgcagatacactttggaggatccaaaaggagctgcaatattaaagtcttctagatgtcatatcattatcactagtctacggctacacacaggattctagagtggaggttgtagcatgttagtcctattttatcatgatcgtgtgcattcacagcacgtaatattttacagatggcactggga

SEQ ID NO: 584968 - DNA, 154 bp, Homo sapiens
ggtcagcatcggcccccgccacgacactgctggaggcggcagcaagttccagttccacaccttctgcaacgtctgcgtgtcctttctcggtgcgcccgggggccacatatgtcgcttggggggccgcgtgccgctgggcggcgttggctgcagt

SEQ ID NO: 584969 - DNA, 1459 bp, Homo sapiens
  misc_feature (514)..(514): n is a, c, g, or t
tattatttgcttgtgcggtgaggtgtccgggggttcgcagtgttgggggttggttgcgtcagtgtttcgtttggtgagcgttctgttcttgctgcgagggctcatgttgggtgtggtgcgtctgtgtggtgccgtggagggccgtgttgtccacgcccgtgtgggggccacgttggtcgcccgtgctggcgttttcctgggggggttataattgcggtggaggcccctcctacgaagccttttgtaagaagtctttttctcccggggggaacaaatatgggggcgtttgaaaaaggtcaagagaaaaggggtttcttccacgaggatgtgtttcctgtcgggggacaaagggttgtcgttgtggggtgtcccgcccatgaaagtgtggggctcctcgctccccattgggagcgccgatgcttggggcttttcaattggttatacacgggtgggagttatttttcggctggggaccagttgccaacggtcccgcaattatatggggcctcccggngtatatgtgcccccccttgtaattttggaggtttgcacacccaccgggggtctacccaaattgcgcaaatcgcaaaggttttggctctgaggccttgataggggaaaaagagatttgtattctcccccccgctctctctggggtacaaaaaaaagccgcttggggagaaagagttgggccccccctataaatattctctgtgagaaagttctctcgggtgagaattgctgtggccgccccatgtgggttgagatatatggggtgtctctctgggcgacaagccgcacacattggtgggtgtcgtttgagagagagccgtgtctctctaggaggcgtagtatctcacccgctctcttgtggtggggtcctgcgtgtttgccttggtgtctcggtagatatatatggagagagcgcgaggctacgttttgtcgcggcttgtggggtggtctatctctacagaacggccactgttggggagccaccaagagagtgggcgttggctttgggagagctttgtgtcaaaaggggtcaccgcacaaggtcttgcgcccaagagagatgcgtctaagagaaggcgtttaaatgagaaatttatatctccctataatatccctgcgcacgccccacacttcttaaatacacgtgggtggagaagagatcggtttctagaaactgtgttgtttcacaattggccacatttaaggtttaagtatagttaaagagtctggttataatgagataaccacaatgcacttcgttaaacaccttcagagaggaaaggagaatgttttgtggagccacctttggttttcttttttgcgtgtggcacgttttaagttacttagtttcttaaaaatcacgtacgtttttaactggagaaacacaacttgagcccaaaaatttgtcacagaattttgagaccccattataaaaagttaaatgaga

SEQ ID NO: 584970 - DNA, 366 bp, Homo sapiens
actaaaaaacaaaaattaggtgggcgtggtggcacgcacctgcaatctcagcctactcaggaggctgaggcaggagaattgcttgaacctgggaggcagaagtcgcagtgagctgagatcgcgtcactgcattccagcctgggtgacagagcaaaagcccatctctaaaaataaataaataaataaagagaaagaaagaacagaaaggaactaaggaaccaccatgggaaggtttttaaaaatgggtcactgccacacagttaagcaagagtcccacagccctagggggccacccatcttggtgttaaattgacaactggaagaaacaacaaagacactagatcagctgccagaactagagaaatg

SEQ ID NO: 584971 - DNA, 406 bp, Homo sapiens
ctagaggatccccgtcgacggtaccaacaaacaaatatataacaaaataaaacggttattctgtacactacgattactggaatatcattaactatgtatacttggacatacccggctggtgaaaaccaggtaacggatctatattaccattaaagctcaaatattagagtcccatgcagagctgatcagatcgttaagctgaacctctgtttcaaagggccttgcaggcaaaggagatgagaactacctatggagagacatttagattcctactcataagcctaatggagatgactatacccaaagatgctgaagaatacatgtaatttactgatgagcttgtaaccactaaggataagatggattgatatggagccttagatgagtggctagagaagttggtaaa

SEQ ID NO: 584972 - DNA, 102 bp, Homo sapiens
atccctggaagctagccacgttgtcttcgtttccttcaccacgcaccaggagctcagagatcaaagcggctttccatcttttctcccagcttgagacaccga

SEQ ID NO: 584973 - DNA, 116 bp, Homo sapiens
agcgttgagacaccctcaaggccagtgctcccgtgcatccaggccttacctgtgctctgagctggcctggctggcaaggggtggaaacagctgtgcccaccagctcccaggagagc

SEQ ID NO: 584974 - DNA, 274 bp, Homo sapiens
ggtggtgaatgaactagaacatccagaactccaacaggagacatgtcagaaggattaacaaatctgaccttgaccctgggcaacatagtgagaccctgtctttacaaacagttttttaaaacttagctggatgtggtggtgtgcgcttgtggttccagctattccggaggctaaagtgggaggttcgcttgagcccaggagttagaggatgcagtgagccatgatcacaccactgcactccagccctggcaacagagcgagaccctgtctcttt

SEQ ID NO: 584975 - DNA, 248 bp, Homo sapiens
  misc_feature (79)..(79): n is a, c, g, or t
  misc_feature (89)..(89): n is a, c, g, or t
  misc_feature (102)..(102): n is a, c, g, or t
  misc_feature (133)..(133): n is a, c, g, or t
  misc_feature (149)..(149): n is a, c, g, or t
  misc_feature (183)..(183): n is a, c, g, or t
aaacttttttttaacaaaatgtatcattcgataaagtgaattttaaaaaagttacctaactcttcattttttatttccnaatcggaggnttttttaagctgnagaactggtatctggaataacttgctgtagnaatatcaaatcatttngttgcccattttgggccaaacttaatttacccgnaatcagtctcgtcaggattattaatttaccctttaagtttggattggtgggaaagtccccatctt

SEQ ID NO: 584976 - DNA, 260 bp, Homo sapiens
gacagtggtatggcatgatttttatcatcataaagaataaaaatggctaaagaagggcggcaaactcagctaattaagtattgtaaacactcagcatcatgtaagacatccagccaaatacagatcaagggtgttagttacagttacccaagatgctgtaacaggcaaaccgcaagtaccagtggacagacacccaggaggtacacagctcacgttaaggctaaaatgcgtgtttctgatcagtggatgaccttccgcat

SEQ ID NO: 584977 - DNA, 347 bp, Homo sapiens
  misc_feature (22)..(22): n is a, c, g, or t
  misc_feature (322)..(322): n is a, c, g, or t
  misc_feature (340)..(340): n is a, c, g, or t
ttgagacagagtttcgcacttnttgcccaggctggtgtgcagtggcgcgatcttggctcactgcaacctctgcctcccaggctcaggcaattctcctgcctcagcctccagagtagctgggattacaggtacccaccaccatgcccagctaatttttgtagttttagtagagaagtctttcaccatattggccaggcttgaactcctgacctcaagtgatctgcccaccttgtactcccaaagtgttgggattataggcgtgacacctggtggcctggctgacaagtggtagctttctttaaaaattaagttgcaaggtggnatctgaaaacatgtcatnaaacttt

SEQ ID NO: 584978 - DNA, 855 bp, Homo sapiens
gggaagcggcgcggctggcagctgctgggccagagccccggcgccctgcgtcagccgccgggtgtgtgcgcccgcgtagcccagctgtcgcgcctcgtggcccccacgcgcccacgcagcgcgcgcggggacccgggcggggggcagagggagggccctggtccagtgcaggagaatggggccggtcctcccgtgcgcaggcatgcagacgcggcagcccaggaggcggaggcagcggacaacgtgcagagacagcaaacagttgcccgacacgaaagttcaagccccgtggcctcagtacagagacccctgacacactgggacctgcacctggacacggcgccagaggaacacgaagtccgatgaggcagcacactcatcaccgacattggcaacacagcattaacaacgggaaaacattgggttagcaacccaacacgggaatcatccaagccccagagcctccacccaggatccgaaccaaggaggaaccctggtgcctggcccgtcacaccgcctgcacaagcttgtcacacccggccggcctaggaaccacacctaacacatgccggcatggacaccaacctggacagcctcgcacccaagacccctactggaccaccttccctagcccgacaaacctgcaggccaccacactcccacacattcgacaacacacggcgcactcccaccaagtagacgtacaattatcacttaccaacgccaactcactattgcccccgaaaacacgtactcgaacccatctacccaccaccactgaagcacaacaacaacattaaaccaacacacaaagcccacacaatgctagcccaaagaaccaaatagacacaatga

SEQ ID NO: 584979 - DNA, 332 bp, Homo sapiens
tctgcttgcaggctgcctccgagccaaagatttagctgacttgctggcctctatctggtattccgtggctccctggtccatgtgatcactcatcatgtaacgccatggactcagttacatattgcagtcgataaccatccgtgccagcttctcctggatcagcccagagtggtgaattttctccccaaactgggtacaattagtggcatgatctaccgacttagcaatgatgcctctcatggtacctgccgagtccgcagacatgccaaaccttccattgtcgaggatgtgcatggcaaacttgaaggtaccatgagagtctccgtcgaact

SEQ ID NO: 584980 - DNA, 144 bp, Homo sapiens
ttttttttttcccaaaaaaaaaaacccgggggctttttttttttatttggttttcccccaaaaaaacccccggggtttggtggggcccctttttaaaccccccttttttaaatttttttttttaaaaaaaagggggggggggga

SEQ ID NO: 584981 - DNA, 616 bp, Homo sapiens
tatgtacaacacgagacagttctctccctagctgcaactactaatctaacttactgtctctatggacttgcctattctggtcctttcttataaatggaacgacgcaacatgcagcccattgttttctggctgctttcactgagcataatattttcaagattcacccatgttgtaacacatatcagtgcttcattcctttttatggctgaataatactccattgcatggacagaccatatttgtcttatctgttcatcactgacagacatttgggtttgttccattttttggctgtcatgaataatgctgtcagcatgtatgtatgtacgcggtttccttagtttttatctaatgtcattttcctgttccaggatccccttcaagataccacattatgtttagctgtcatgtttctaggctcccttggctgtgacatttctcaggttttcattgtttttactgaccttgacagttttgagttctggtcaagtatttcatgaaaactccctcaattatggtttatctgatgttttcctcatgattaagctgggttatgtatttctgggaggaagaccagagaggtaaagtgccaccgtcatcacatcatgtcaggagt

SEQ ID NO: 584982 - DNA, 351 bp, Homo sapiens
tgtgtagatgaaacatttgttcttaatataattagtcctttggttcttcttttcacttgggatagagagtgatatgtacgtatcttagtttcttttttgttttggtccttttgggtcctatttaattttaagggttaaaaaaattttctccccttaagtttaacggatgggttaaccatatggatggtctccagtgcatggtaatgggctaaataaggtggaaaatgatagtgaccatgtatggagagctcatggtatgggaggcataactctgggctctttttacctttccttttatttaaatttaggggggaaccctctaagagtcacccgggcgggcttgtcaagctg

SEQ ID NO: 584983 - DNA, 255 bp, Homo sapiens
caagagagaggagccttctctaccaagtcatccacgagatagctgatgaaataatatctatctcatttctcgattccatttcagcacaggagctgttttccacactgatacacatgtggcgagcagtatctcttctgggaactgagatgccatttcaagaagaatttcactttctttagtttgcatgtaacttacgagagtgtctctcaggctccactgagggcggaagcgctcctcggtttgggtctggggcac

SEQ ID NO: 584984 - DNA, 123 bp, Homo sapiens
tgctgagattacaggcgtgagccaatgcacccagccggtcttttgttttttcttggagctttttttatctgtcaagttgtatcttcatagtaaattcctagaagttgccattgggccagcggg

SEQ ID NO: 584985 - DNA, 230 bp, Homo sapiens
ccgtctggtgtggtgactcgcgcttacgaactggtattccacaccagttacctatgacaacctgagtgctgctgtgaaagaaaccggattgtgaggtgcggcttgtggacagcgagtgtaccgcagcctgaaaaagggcaagaacatgcagcaagcacaagcaaatcccccgcaaccagtcaggtttacttcacgctaggatgttttgcagtgtgacttcgtggccgggg

SEQ ID NO: 584986 - DNA, 1026 bp, Homo sapiens
tttagcacaattataaaacctgggtcggatacacgggactgttatgtaaaccactcccagcaattcacaggtggggcgttctcttagtgtgcaccggtttcacaccaaaactttcgtggatcaagacgtttgttgtaaaatgacactcttttcttatactcgcaatccaagagccctgtccctctagaagaaatttgaacccctggacaacacacctctgagtggcataaaagcaaacacccattctgttttcccttgcgagatgtgctttttcttaggagagaaaagttgtagcacgccacccaattaccgtgggggtctaagccacaagattctgtgtagaataaggtctcacccttcacccagcggttttttcctcaagtagggaaaccctcctttgagaaagaacttaataatgttcgaaaacgcctcgtattgttaccttggtttaacaaggaaggtgcgcactagacattaccccccacagattgttaatggtaaactattgggaaccacccgtttgtaggccagcacagcccttttttcttaaacgcacagaattctcgtggcgttaaatcagattaattggtcccttgaggccccgtactctggctttccactaccccacgttaaatatggagataaattttaactttgcaccacttaccacggcccacagctattaaagttaacttggccttttggagaaatttgtaacttgaggtataaactgtaccaccccgcgttttgtaatttgtgaaactcatctctgtggaggatattatagcgaatccccaagccactttaaagttttgtttttgttccataaagatatgtcaaagtattcttatattattttaacttatttggaatttaccacgagcaccaccctaaggcccacttaggatattaccccaactgcctttaacccctctttttgccacccttttgttttttaagacccttttatttttataaaagatgaaacttataaataaatttttaaattgtaaatacttttaaata

SEQ ID NO: 584987 - DNA, 107 bp, Homo sapiens
aataaagtaaataaaacaaccactaaaagagataatttgatcaggaagggtttaaaacaatagacttttagatcaaatatagtacttgtcctcatttgatgttgtca

SEQ ID NO: 584988 - DNA, 962 bp, Homo sapiens
ggcaacgatgaaagatacacctagtcttgccagtctcatcgcggggtccgtcttcttcctgctgctgccgggaccttctgcggccgatgagaagaagaaggggcccacagtcaccgccacggtgtctatgacctacgaatcgcagatgacgatgtaggccgggtgatctttggtctcttcggaaagactgttcctaaaacagtggataatttaagacggccttagctacaggagagaaaggatgtggctacaaataactagcaaattccgatcgtgtacctcacatggacttcactgaatccaggggggatacttcatcagggcgacgatggccacaggaggaaagagcatctacggtgagcgctctccccgatgagaacttcataactgaagcacatacgcggcctggcatgttgtgagcaatgggcggagacagcaggcaaagacaccaacggcgtcccagttcttcatcacgacagtcaacacagcctggctagatggcaaagcatgtggtgtggggcaaagttctagagcggccatggaggtggtgcggaaggtggtggagcacccaacggaagacagccgggataaaacgcctgaaggatgtgatcgctcgcagacctgcggaagatcgaaggtgaagaagcctcctgcgcatcgccaggagtcggcaccacgggacggccgtttcctctagaagtgacagacttgggccgggccatggtacccaggccaaggggtattcatgctgactggcccggtgctggcatctggtgaagcggaccaccccccatccaccttcggaattgcctttggactactttatgtagaaacgacaaccggcctggccaataacgagaatggggtagcctgaaaagcgacacacccattacaaacacaccgacaagctttgcaaactgcaccgaaacagcccgtctgcgaaaacatgttcgctcaacaaa

SEQ ID NO: 584989 - DNA, 113 bp, Homo sapiens
gcttctccccttgttaggtagttatgagtaaatctgcaaaaggaaatgaaaatgccttaaattttatcaataccagaattattgtctttaaaaaaaaactaatacttatcttt

SEQ ID NO: 584990 - DNA, 1355 bp, Homo sapiens
tggaccaacaaggcggttaatttcaccggggtgcaggtgggctgagtccaaaaagtagtccgtgaagtggaaataggggtgtggggccgtttatataggattggggtaggctaggtgggaaattacagtcaaaggggatgggtcctcgtgtataggcaggaagttgggggtctcacaagggtgctcagggggggagctttgggacccaggaatgagccaggagaagaggaattttcacaggggtaagtgtcatcagcttaaggcaggcacgcgccatttccacttctttggggaattctccagcttacttcaggccatcggggatgccattactgtgccgggttcaccgaggggcatactgagtggcctataagctggggcctcagaagaaccggattatttcgcgtggtcttccttcccaggggtacaagagtttactccaaaagcgtggggcactcgtggggacgcggtccccagggggcgtttcccacaagggtcaactctgggaaggactcagagttttcagcgcggtttaaaccttgaagaaagatccgggatttcaaacatcggggcggaaacttgtccccttgggggcgtgggttaggcgccctgacggaacgcacacagaattcgcaaggcggggcacctttcctccatgggaggccaaagcagcccaggacggacccgggggcatttggatctcccccaaggggaagggccccccgtgaatccggagctgattggggcccccaaaacttccattccgccgttggctctgtcacaagaagaacaccagaaacagggggttcggggggtgggggccaacaaagggctgggcctacttaccaccgggtgggggcaggcggatggggacaatgttcgcggaaagaaccgtggtccgatgactttaggcccagttggtgtctccaggggcaccggaatcagccagaagcacactttccccgtgaagcaggacgtggtaactacaatcaacagagcgccttccacgcacaggggccccacgtgagtaaaccctctgtggaccgcagacttcaacggggcaccacagggcgcgcacctcacagaaaagcgggctgcggataaacgcggcaacacacgcggtctcaaaaacggttcccccgagaaatcaggcggaacatatatcgagaccgcacactcattcgaacagatcacccccacgacacgaagactgtacaatacagcccgtacatcgctacttatgccctgttgtacgaatgtagttagaagcagcactcgaagaaatgcatcacatcaatctagctacaactccgcatctaccactgcagcaaccatacgtctatagtagcagtatg

SEQ ID NO: 584991 - DNA, 399 bp, Homo sapiens
ggtagcacttatttctagacagttgccttatcaaataccatatatgttgtgccatttaatctcacagttacctgtgcattagagattagcatcaccacttgatatatcctaatattggtacaggataaacactttaagtaatcagcccacaattactcaccaagaccttaagcctcccaaagtataaaccattcttatgttcctcagtgtacatccatagagtctaagggatgtaaggccttgttgaagccagttttgaccagaagcagcaatgagcctattcctgtttgttctccatgttaatggggcattgaaaattcactgattaatcaatccctagtctgaccccagtgttatctatgcaggttcacaaaacttttagattactttacaccccct

SEQ ID NO: 584992 - DNA, 199 bp, Homo sapiens
ggtccatgcagctgggcgacagagcagactccgtctcaaaaaaaaacaagaaaaagaaaaagaaaaaaaaagttaaagaagggcaagaggaagagaactagagttggtggggtgcttttgatggatttgggagaggcttctccccatacttttcaattaaacttattcttcaacaatgtaagcaacccaagcttgcttg

SEQ ID NO: 584993 - DNA, 954 bp, Homo sapiens
atcattatcgtagcatctttgctgatgcgtcgtatctgctaacgtaactggtaattgttgatggcagcggtgacacgtccaggcaatgcccgacactggccattgggttcggggtttcttctttctttgagtggtacgtattggctgtgtgaccgtcctgttgtgagtaaaacatccacatggtacagggcatcctccatgcttaattagaatataggtttatacgtggttttaaatgtgttggcatcttatcacttgggattaacacacgtgacaagggacgtgcgtagagaccaatcgtgtacggcgtttgctatgttcggggactcgtcttgaataccatgttgctccgttttaatggtacaagatactgctatctgggtcgccctgtatctcctgtagcttctgaagtagtaggcaatagtgtattgcaggtaggtgactgggagtggacgattagagggggcacactcactgtggtctcttactcttgattgtttgttcttaccaggtacatatagctcataaggctccattgtttagcccggccaatccctgcgcccagtctttctaccccttggtcctgtgccccatgttggcacacagggaagtgtggctcttgtaataccgccaccccaggctcactcatgcaccacagagctgggggccacctcgagaagtgtcatctctcgccgtgagcacagctattcccctcgctagcagtccgaggatcatgagcaagattgacgtgtatgcctggcggcagagatggcctagtggatggaataggtgttctagaccagtcgtttgtaaggcgctctgtcggcactctgctgatacgcccccacctgacagccccatcctcaaagactctctataattactcatggcaggttctagagacttaaggggaaaagctgctttcaaggccaccacatgtctgtgcttccccaa

SEQ ID NO: 584994 - DNA, 189 bp, Homo sapiens
acccccccccccccccccctttttaaaacccctggggggttttttgggggttttaatgggggccccccccccccccccctgggggccaaagggggggggggttccggggacccttttaaggggtttttggggggggttttttggttttccctttttttttttatccggggttttttttggcccccccca

SEQ ID NO: 584995 - DNA, 237 bp, Homo sapiens
  misc_feature (84)..(84): n is a, c, g, or t
tatatgctgtctcaatgtagtacaaatgctgttatcaacatttttcccagttcttagtgtggtgccttagccatacctaagcangacgtgagaatgagatgtgcaatcatttactcctaagtatctgttgagctcccacaatgtcccagacacactgtatttaagcacccagggattgcaggagtgaaggattagacccccattccctgttccccatgaaaaagcttcactccttct

SEQ ID NO: 584996 - DNA, 201 bp, Homo sapiens
gggcttgacgtacaggaactcggggtctttatcgatgtatcggctgatcagccacggacaggcgatacggtcgatcttcggatgttccctcgtaatccatttcatggcaccacctcacagggtgagtttcaagacgaggcctatgacggcgcaggccgctatgacctcgatcacaccgcgtttgaacttgaacagcgcaat

SEQ ID NO: 584997 - DNA, 765 bp, Homo sapiens
gacaatattacacagctcgtcctcgtttaattcattcctgggccttgttcttcgtttaacttactgtgcctggttcgacacatacagaaatcgtgcactatgcaggccggcagtgcggcaaccaaatcggcgccaagtattagggaggtgatcagcgatgagcacggcatcgaccccacgggcacctaccacggggacagcgacctagcagctaggaacgcatacaacgtagtaactacaatagaggccaccggcggcaagtacgtagccccgcgccgtgctcgtaggatactaggagcccggcaccataggactaccgtgcgctacggggcccttcgggcagatctatccggccggacaactatacgtatttcggtcagagtaggtagctgggaacaactagggtccaaggggcactaacacagaaaggcgcggagctaggtaggactcggtgctaggatgttgtgacgcaacaggcaggctgagagctgtgactagcctgcagggtttccagctgacccacgaccctgggtggggggactgggtctgggatgggtaccctcctcatcagcaagatccgggaggagtacccagacaaggatcatgaacacgtaaagtgtggtgccttcgcccaaagtgtcagacacagtggtggagcctaacaagccacctctcagtccaccagctcgtaaacacacagacgagacctactgcattgataacgaagctcctaagaatttgttcagaacctaaagtgacatgcca

SEQ ID NO: 584998 - DNA, 95 bp, Homo sapiens
tgggggggggttttttttttcccccattttttttttggttccaaaaaaaaggggggggggcccccttgggggtcaaaaaaacccaaaattttttc

SEQ ID NO: 584999 - DNA, 443 bp, Homo sapiens
atagatgcaatgatgtcgggttagtgaagactcggagatagagtgactaggaagatgtactaaggatggcctatgaggagagtgagatggagagagggctggagagttacagaagttccatttctggtggctcctgtgtctgaggatatgaaaattgcttcttttcctatagcgcgaagaataacatgatgtttaccttccacaataagctgtttactggcttccacaacgtatgccttccataatatgaccatatatcaaatctacctcacagcatttttgaatcaatctcacagcatcctctgtggactgttatacggtatgcgcagtcactttctgcttgagggatactccaatctcagaagataaactcctggtgactcacgtcttgcgcctggggttgctgtacatattatctgtgcgtttccatagaaagatatctg

SEQ ID NO: 585000 - DNA, 772 bp, Homo sapiens
  misc_feature (11)..(11): n is a, c, g, or t
  misc_feature (104)..(104): n is a, c, g, or t
  misc_feature (130)..(131): n is a, c, g, or t
  misc_feature (133)..(134): n is a, c, g, or t
  misc_feature (146)..(149): n is a, c, g, or t
  misc_feature (174)..(174): n is a, c, g, or t
  misc_feature (216)..(216): n is a, c, g, or t
  misc_feature (286)..(286): n is a, c, g, or t
  misc_feature (346)..(346): n is a, c, g, or t
  misc_feature (406)..(406): n is a, c, g, or t
  misc_feature (423)..(423): n is a, c, g, or t
  misc_feature (436)..(436): n is a, c, g, or t
  misc_feature (484)..(485): n is a, c, g, or t
  misc_feature (501)..(501): n is a, c, g, or t
  misc_feature (503)..(503): n is a, c, g, or t
  misc_feature (531)..(531): n is a, c, g, or t
gagggccaggnactgctgactgtgaccactggacagttattcgtgtctcttacaattaccaaacagaatggacaagcttaataaaataaccgtccccgccagtnagaagttgaggcagcttcaaaagatnntnntttttttttttnnnnttttttgtgtgtaataatgaataanatcaaaaagctaaaagtcaaagcacctccaagtgttcctcgnagggactacgcttcagagagccccgctgacgaagaggagcagtggtccgatgacttttacagcgactatnaaaatccagatgagcactcggactcagagatgtacgtgatgcccgccgaggagaacgctnatgacagctacgagccgcctccagtagagcaggaaaccaggccggttcacccagccctgnccttcgccagagggagntatatagacaatngatcaagccagaggctttccccacccttcagcaagacacttcccagtnntttttttttttttttntntaaattaatgcttacctccatcctgtcnggctcttattgtttttcataaacctcaagtcccacccaaacccaaaggcctccttgaggatgaggctgattatgtggtccccgtggaagataatgatgaaaactatattcatcccacagaaagcagttcacctccacctgaaaaagctcccatggtgaatagatcaaccaagccaaattcctcaacgcccgcctctcctccaggaacagcttcaggtcgaaacagtggggcctgggaaaca

SEQ ID NO: 585001 - DNA, 709 bp, Homo sapiens
  misc_feature (338)..(339): n is a, c, g, or t
  misc_feature (348)..(348): n is a, c, g, or t
  misc_feature (350)..(350): n is a, c, g, or t
  misc_feature (361)..(361): n is a, c, g, or t
cgagtttttttctcccttgacgccataaagtcaatttctcggtctaaatcctggttctcaaccctagagaggatcaatgtccccatatcaacaggaagtagagccagtgacatttctacctcacccagagtgaggaccaggttggttgtgtgaggtgaagcagagctcttgcggggggctagtgtcatacccctaaccccgccttccattaaggccaaagctgggccctgcggggctttgtcccatggccagacgttttcatcagaattaggtgctgttttcttcattgtgtggagagtggatttgatggaagaaggtcatgtaattgggggaggtgnncagcctgtntntgaactgactnggaaacctggtggtgaattgagcattggagccattattagggcagcacggtatctatacgaataagagccatggcagattatgacagatgtttgcagaccctagcctgaacgctgtatacgctttgtaacgcttgcatctgcccatgttctaggttcatacgcccaggtcaagctattccatactgtccactgaagctcatgcacatggattctacgttaatcttcatgttaacaggatgttttaactggattgtactaccccctttttcaaataatgatcgtctcacaggcctccggtttctctggatttttctacctgccccgtactatttgatagcttggtgcct

SEQ ID NO: 585002 - DNA, 839 bp, Homo sapiens
  misc_feature (38)..(38): n is a, c, g, or t
  misc_feature (95)..(95): n is a, c, g, or t
  misc_feature (114)..(115): n is a, c, g, or t
  misc_feature (136)..(136): n is a, c, g, or t
  misc_feature (161)..(161): n is a, c, g, or t
  misc_feature (176)..(176): n is a, c, g, or t
  misc_feature (202)..(202): n is a, c, g, or t
  misc_feature (219)..(219): n is a, c, g, or t
  misc_feature (231)..(231): n is a, c, g, or t
  misc_feature (315)..(315): n is a, c, g, or t
  misc_feature (327)..(327): n is a, c, g, or t
cccgcgggtatctgaatttgcctcattccggcggcggnccaaaggaatgacgggttgggcccgcggcggccactgtctccgcgctcactcacgcnggccttcgctcgcgcccgnnaggtctcttcgcgcacggccnggctcacgttcgcgcttctttggcngctctgcgttccggnccgcgcacccctacgctaccacggcngactgggcaccgccgcngctgtcactggncagccgccgccgccgcggggacgacggggcaggcgagctggacgggcggggcaggcgtcctggttgtgacgcacgccaccgcgngcgtgcgcgtcnccgcttagcaccggccctcagtgcgcttgcgccactagatgacccgccccctcgggctgtcggggggtcgagacagtggagtgttcctgatgccagctcacggagggaatccagggaattagctgatgccaagagcctctttttggccagcacttactaagcaccagagacacagcgagaagcagaagcatacgagcacatcagtgtgattctgctgtgatgaagggcaagagagggctcactttccggcgtgacattcaagctagccccgaggcctgagcaggacccgcccaggggaagatctggaggaaagccatctgaacatacaacaagagcaaaggcctggtggagtcaagaccaccttggctgccaggtggaatggtggaataactcaggagtctgtcaggtctctgagatgtcaaacgggtaaggccttgtaggaagtaggcgtttgaatgagatcataatttgagagccacagacagaaaaataaatttgaaagagttcactca

SEQ ID NO: 585003 - DNA, 229 bp, Homo sapiens
gcctagagcagaaaaaaacaaacacacaaaccaaaaccacaaacaaggaccaaccagacagacaacagaaaacagaacgaaggagggacaggagacaacacggaccaacaaaccaaaccaaagagcagtgaagagggcaaagcggggagaagagggcgctgcgagagcaaagggcatggagcggagggggggcccgcgccccgaggagggcaggcccggggcgccgggc

SEQ ID NO: 585004 - DNA, 430 bp, Homo sapiens
gaaccaacacggaaagctgaagggctttggaatccaatggcctcaacctcatcatttcccctttaagtgagtctatccagagaaatgacagaaatgtgaacccagatttctgttcaaagaatgttcacacagtggtagatctaacaggggaaaaccctttagttgggctgtgtacttgtgatatgtttgcttgtttgcatctgtatcttattgtcaagaatgttgagccaaaacaacaaatgccatggacaagcaccctacaaggaccatgttaaaaggcactgtccacttggcactagcaaaacactttttgaattcatttgctcaggatgttaaatatttgccacactggcttgatggacatagacctaatggagcccagtgaaagtaagtgtaggcttccagaatggtaatcgaattcctgcagccc

SEQ ID NO: 585005 - DNA, 598 bp, Homo sapiens
acacctggcgcaatagatatgtaccgcacgggaaagatgaaaaattataaccaagcatatatagcaaggactcacccctatccttctgcataatgaattaactagaactcactttgcaaggagaaccaaagctaagccccaaacccactccagcttacaaccagacaaccttagaccaaaccatttacccacatagcgtataggcgatagaaattgaaacctggcgcgatagatatagtaccgcaagggaaagatgacaatttctaaccaagcataatatagacaaggactagcccctataccttctgcatcatgaatcacctagacaatcacctatgcaaggagagccaaagctaagtaccccgagaacaggacgagctcacctaagaacagctaaaagagcacaacccgtatatgctaccaaactagtgggaagatttataggtagaggcgacaaaacatacgagacacaacttagccaagacattataccccgatcacgtataggcgctagaaatagaacctggcgcaaaaatataataccgaagggaaagatgacaattataaccagcaatatatagcagactaacctatactc

SEQ ID NO: 585006 - DNA, 157 bp, Homo sapiens
tcagcgtcgttacggctgggagtacggaatcagatgttacagaggatggtgagagcctgaagatccctcaggaccagagggtcagctgtccgaggagagagaaagcagatcagcagcccctgagcgggaagaggagctagagcctgaggccagatga

SEQ ID NO: 585007 - DNA, 1027 bp, Homo sapiens
atgaggcggcggttgatcccagtgctggctgagctggctggctgacctgaggcggcgagcggggcccggcgccgaccctgagtgcagcctgaccctgccctctgcgcgctgcgccctcccctggcctgggcccactcgcctgcgctgcccagccatgaacctggcgagccagagctggggaggcctggctgccggccagctgctcttcgccaacttcaaccaggacaacacagaacgtgaacaggggcatcaagagcagctggtcttggccgctcgcgctgttgctctggtcccatagctgtctggtacgctaagtccggttataacatttctctccctttcttcctgtggataacgctgcgaacagactcctatgcaatgcaccgactaccggaagcactgtgtgcactcgctagcagacgcacttgtctctccacgcagccatagctggccatcgctgagccctctacagcaccacaggcaacgctaacaggctcatgccaccttcacagcaaggcgaactgacgactcctgcaaacctaccacgctacatccaaacaaccgcacttctgggcctagtgaacgcttcaacccaggcacgcaggccctggactacgctattgccatgggcagcgacgtccccatgctaccactccaagcaaccacttccgcgggaccatgcaacgcgtgccttgccgactaccgcactcagggccagaacggccataccaaagacccctgacaggggcctgccgctgccggcttggtcaaattcaaccaaccggatcgcaactggccttaccttggggctggtaccccccgcgggcaagccgccgaacccaactccggcgccacgcagagcgacaccagcggtcctcaccggagctacccgaatttcaacattcctggaacgaagccttggccaacacccacttggactatccccggcgcccttccacgcaaccaggtcccatttacacccgccgccacttgggccgttttgcaagcccaagtgtgggcacacttg

SEQ ID NO: 585008 - DNA, 190 bp, Homo sapiens
tgggggggggggggggcttcttttggggaggggggaaagggggggggtttttttttggggggcccgccccaaataaattttttgggttggggcccccccggggggggcccccgggcctttttggggccttttttttttttttgggcccccccccccccggccccattcccattaagggggcttttcccca

SEQ ID NO: 585009 - DNA, 309 bp, Homo sapiens
taatcattccattaaactctcttcttcttggccgagtcactctaaatagcaacgagtcagacttcaccatgtggccgttactaggttcaaattcattactcggaaactgcaagggacgggaaatttccaggttttgtttagcattgaggtcaggattcaaaggcacctgctttttacctcctgggaacttgcccttattggacaacatcacatcctttcttctttttgtggcaaacgtttcacaagccaggacttccagggctaaccagcacattttgttccattttctcgcagtttggtgcatggcct

SEQ ID NO: 585010 - DNA, 812 bp, Homo sapiens
ctggctcctggacgcgtctgggtcctggcacccgcctctccctggctcgaatgccccctccactcccgagccgggtggatttctccctggcttggggcactcaatgctggcttcaaggagacccgggccagtgagcgggcagagatgatggagctcaatgaccgcttggcctagctacatcggagaaggttctgctttcctggaaacagtcaaaacaagggacgctggctgtctgagctgaagccagactgctgtggccaaggatgccctaccaatgctggcaagacgtctaccatggctgagcgtgcgagatgcatgcgagtctgcggtgtcgactcaactcagcgcgccaaacagcccggcgcccgagactggaagtgtatgacgtaagggaacaagtcttgagcaccaagtggagccctggtcctagcttgtgaagggccatgacacgcatcccgaggcattgaaacctcaaacactaggaagggcttgggagaaaggcacgtaggcaagcgaagcgcgtgtggcttgcccctaatacgaagcgagggaaatggcatggactgcaatgtcctacccctgtgcccggtcttggatccttgggatggctgcgacacgatccgaggtcgctcgcgagcgcatggaagatcccgcgtgtcctggcacggacacgagtcctagcgacggggaggcagggttcggagcgaaactcccaaggcagcaatgctggccccagaacagcgagggtccagtgttggggaagcatttgactgtgggccaaaggcacaaggaccggtcaccgggaaggacca

SEQ ID NO: 585011 - DNA, 857 bp, Homo sapiens
agcggggggcggggcgcggcggttccggcccagccatggcggacgaggccccgcggaagggcagcttctcggcgctcgtgggccgcaccaacggcctcagcaagcccgcgtgcctggccggcgtgcccggcaagccggggggcgcgtggcggctccaagaagctggtcatcaagaacttcctgagacagaccgtctggcatgaccgacgactacacgcaggacacgtggcggaagctgcgacgaggcggtgcagggccgtgcagagcagacacctaccatcaggtacaagctcgacggagctctaccaggctgtggaaaatctcgtgttctcacaaagtgtccccaatgttctacaagcaactgcgtcaggcctgtgacgaccactgtccaggcacatgatccgttccgttgagagaagactcactagatagttgtacgagtttcttaagagaagatgaacacgtgctggcaggaccactgcagagcaagagtgatcatgatcagaagcggtcttccgtgttctttggatcagacctatgtgcgtgcagaactccgacgcctgcctccatctgggatatgggcttaggaactgtttgagaacccatattgttagtgataacacatggttcagagtacagaccattgcatggcatcctacgtgtgatcgagcgcgagaggagcggactgaaggcgtggtagcggagcctgtgtgcaggagcctcctggggatgctgtctgagctgcagggggtataaagattcatgttgactgtaaattttggagagactaattggtaaaattgtgggcaaggccaaggttaatggagcgaaagaaaggttcggatatttttaccagg

SEQ ID NO: 585012 - DNA, 257 bp, Homo sapiens
agttgaagtgctccgagaggtaacctcttttaccagggcaactccccaggacagtgagaagagttggttcaagcgtggcgatcacccggaccctgcagcagggcgaggagagccttttatgagctgacgaaacatgatctgctctttcctgcagacagctccagagcagttcccctcggaagagttcccaatttccgaatccaaagtctacatggacgtgaatttccccggcagcagttccactatagggcgtaccg

SEQ ID NO: 585013 - DNA, 353 bp, Homo sapiens
  misc_feature (154)..(154): n is a, c, g, or t
  misc_feature (172)..(172): n is a, c, g, or t
  misc_feature (205)..(205): n is a, c, g, or t
  misc_feature (223)..(223): n is a, c, g, or t
  misc_feature (250)..(250): n is a, c, g, or t
  misc_feature (256)..(256): n is a, c, g, or t
  misc_feature (299)..(299): n is a, c, g, or t
  misc_feature (301)..(302): n is a, c, g, or t
ctttcatttgatactgcatttcccagagttcagtaagcgaaataacttttcttgttcttgcttcttcactttgtacccataagaaagggtagaacgtgaaggcttccgttgccgataattttattacgtcttctcgccattgctgccatcgtanattttcatagaaggtatntaaatcaccggataatgcccactgaagaaactnagaatatccaacttccanactttcccaattcagcgtatctggcgnaaaatnataaaagcagccagtatcttccccaagatcgccaccattaagngnnaaaattacccctgcgacatcgtcagcgatgggtaaagcccgcacgcctgcg

SEQ ID NO: 585014 - DNA, 984 bp, Homo sapiens
gaactctacaggctcaagattagattatcgtcgctatgcagacactctcttcgatatcctggtggctggcactatgcttgcccctgctaggaacgctgcatcagatgatgcgtgactaagaccatatgatgacgcaaccagctgtgtgttatatcaacccaagtgagcgatcatgaaatcatccgagactatgtcgcagggtctccacattcaaactcactcaggagatatcacgctattcggagcaacggcagtttgcaagatgacacggaagagaagcttgctcctcttcctgtaaagccttgttccgaagcagatgcaagatgaacgtttggcgagtgcctgtcggggatcctgcgtggagcaatgcgcacccgggctctcgcccaggctatcctcaccagtctcttccagcgacaggttagtctaaagaaggcatctgcggcctcatatgctgtcaggcttcctcagaagcgtggatgggtagacgaatggatgccgaaactcgcgttgaactcgtcgtttgatgcacatcgccactcggtagacgatgaggctgcttgaactctttgccgagtgaaaccagacagacgtgtggatcattccgctgaatacttcactgacgcccggtccttaagtgagctgtccgagtcctccgattcctgcagtccctggcgtcgccaggacgaactggagaactgggtccaggcaccgtcggtcccaagaaatgcccgacaagaggggtgggtatgtgcacacaagaatgaggggattgtcttccgaacagacggatggcttctggggcatgatatgaggccgtggggggccaccagagccattttcgcccacgggcgtgtgcctagaaaaatgacctggggggtatcaagagaggagacaccccagggaggaatgtacacatttaccacaaagtggttaaaaagtagagacaacaagcatacacacaacaactggaacacgcatcgt

SEQ ID NO: 585015 - DNA, 107 bp, Homo sapiens
agcgtcatcttcgattaccgcctgagagcccccgagatatctcatcaacaaccgactaatcaccacccaacaatagactaatcaagctaatcctcaaaacaaataga

SEQ ID NO: 585016 - DNA, 202 bp, Homo sapiens
ccgccgcttcttcactaagtagcacactcttcatctgcttcacccgttcactcttccatctgggactctctctatatatagctctcacagggttgagaggagagtaagaacttgtatatattgtgctcggctcgctttgtactgtcggcccctcatgtggacacagtgccctgtgctgctctgctctgtgaactccctgtcg

SEQ ID NO: 585017 - DNA, 373 bp, Homo sapiens
  misc_feature (55)..(55): n is a, c, g, or t
  misc_feature (154)..(154): n is a, c, g, or t
  misc_feature (182)..(182): n is a, c, g, or t
  misc_feature (286)..(286): n is a, c, g, or t
  misc_feature (326)..(326): n is a, c, g, or t
  misc_feature (369)..(369): n is a, c, g, or t
tcaagaacaatttggaaattcacatgtcctattctaagctgtttctttcccccanaccctcgaatgggagcagattgagttttagaactaattgggctgggcatggtagctcatacctgtaatcccagcactttggaaggctgaggtggatggntcctttgaccccaggagttcaagaccancctgggcaacatggtgaaaccatgtctctacaacaaatacaaaaattggcagggcatggcacacgcctctagtcccagctacttgggaggctgaggcgggaggntcacttgagcccaggaggttgaagctacagtgagctgagnccacgccactgcactccagcctgggtgacagagcaagacactntctc

SEQ ID NO: 585018 - DNA, 900 bp, Homo sapiens
aggctgcaagtcccggaacaacaggcacaacatcatggagcaggagcggcagcggcgacggggcaggagctcccccaccccgatccgcacagtcaccgccccgtccctgggggcgggcggagggggctggcggagcgaagtggtgggtggggggttggatgtaaagtaggtcagcgtgcaggtattgttatgcatggggatggtccggaaggagacaagtgtcgtactcgcatgacctctctgacagtccgtatagtgtagtgtgcaagtatttcagcgagggtactgtattatggagaccgtgcgagatatgaacatagcaaaccattgaaacaggaagaagcaaggtgtacagagctaactacaaagtcatcccttgcctgttcctcaagtctctcatcgatagtttggacgcacgttgtgaaattgaatacaggcgaagctgagtcacgaaattcaatgttttgcaactgtaggagcaggttcagagcactgggtgactgctattgagttgttcctgggcaacccttatgtgggcgtacgtgggccttcctggagtgagcacccctggggctcagtggcccggaagactccgagacagaagccaccgccgtgggcaccaaggaagcaggttgtgccctatgctgccgtgggaagagtgccgataccgggggcactgtggtgtttccccgcggcatccttgtgccttgtgtggccgcgagtccggcatcccggggggtgcccgggatgccggtattcaatggtgcttggccccgttgaaggctgtgccctttgcggccgccgccgacttttttggactctggggggtgttttaaccccgcttggtggtgctccccggggccaccgtctgttctgggggctctgtggcacactcgtcgg

SEQ ID NO: 585019 - DNA, 859 bp, Homo sapiens
  misc_feature (351)..(351): n is a, c, g, or t
gcaaaataggttaaggtatacttgttggaaatggagcttttcctaaagctattggagagtttctttcgcgaccttcttgcgggacccaactcttgggaaggaagaggcccactggtattctgcacgaggcaccttagcttgttcagaatcttctcgcacttgttaataaaaggcttctttaccccacgaaagcacttttttaggtcaattgcgtttgtacccacggtataatttttcgccccgggggaatgggttaaagaggtttgggtttttctctggttgggaaattggggttgtgtgggttatatttttttgttagaatagcgctttatagtcgcaaggcgcctgttntcttgagggcacaataaacacacggttgtcctgttgagaaaccacgcacatggtgcctgtcctgcgcctttggtaaacctgcacatggagaaacctgtgttcacacacatggggttttttctcgtccacacggttataatacaacgagaatatatatgtgtataaactgtaggagaaaatgcacaagatgttagaataatgtgtgttagaccacgcttgcactgagagggttggttatattataaaatatactataacactaataaacttataattatactttataataatgtagataataaattaatagtatggtgggcccttgttttacacaacctttataattacacttttagagaatcacaagttgatagtcttagttatcttttgagtaagagaaagctttcctaaagtcccacaaacaatttggagccactggcacgctaaattttgtaaacttaagcattcatatggactacctatggacatttatttaagtgattgacca

SEQ ID NO: 585020 - DNA, 861 bp, Homo sapiens
gggagaccggggtatcttgctcttggtgtacccgtctttttgaaatatagacatggatttataatggcattttatatttggcaggccatcatagattatttacaacctaaaagctttgtgtatcaaaaaatcacattttattaatgtaacatttctaatcgtatacttgctcactgttctgatttcctgtttctgaaccaagtaaaatcagtcctagaggctatggttcttaatctatggagctgtgttttaagaagccagttgtcaatctgtggtacccccacagttgtggccctgctgtcctactgtttacatagaacaactgtttttacatttggttcaatggtattagagtaattttttctctctgcctccttgtgtgtcttgttttaacggagactaacctccaggagtaggaacatggattcatcatcctccaaagcaagaggcttaggagagaaacaccgaaattcagatagctcagggactgtaaccagagaactacatttttcttatggccttgaatgttaacacacaggacagcagatttcttcagtgactttgtggtcctactaaactacaaccagttgtgggtgacaggcctggtaaagtcccagtgttagatgagtgacctaaaatatactaagatttctaaggtaatgggctctcaggtccaagttcactattctaagcagtgcaatcttcccagttatttgcgatgaagatcctgtatgagatgtctttaaaatttctaaaggctgatgttaccaagggcgggaataatacccatggcatttcaaacccgaagaagagaatttcgggacaattaaaagtcctaaaggtgggctgaacatgctcaaa

SEQ ID NO: 585021 - DNA, 180 bp, Homo sapiens
cgaacagctcttacgactaagaaaataaaagaactcacagaaatgaatgatacctgagcttggcccaggcagcacagctcagtggttaacggtacctgttgtgaatcccaagtactaggcactgtgacccaggcggctaatccattcagcctatgcgtgttcccccccaagaattcttcc

SEQ ID NO: 585022 - DNA, 459 bp, Homo sapiens
  misc_feature (37)..(37): n is a, c, g, or t
  misc_feature (47)..(47): n is a, c, g, or t
  misc_feature (75)..(75): n is a, c, g, or t
  misc_feature (94)..(94): n is a, c, g, or t
  misc_feature (111)..(111): n is a, c, g, or t
tggaactcctcctaaaactcaaggaaaagctgctgtntgcaccccangcccccaaacttcaaatctttgcccttnaagctaacctaaccttgantgattgaattgattgantgaattgaacagaatctcgcctcggtcacccccaggctggaatgcagtggcacgaatctcggcctcattgcaagcctccgcctcccgggttcaagtgattctccctgcctcagcctcccgggtagctgggattgcaggcacgtgcccaccacgcccggttaatttttgtatttttagtagagatggggtttcgccatgttggccagactggtctcaaactcccaacctcgagtgatctgccatcttcagcctcccaaagggctgggattacaggcatgagccactgtacctggcctagctagctttaaagtacagtgagttatggtgttggtgagaagtaaaaaaaaa

SEQ ID NO: 585023 - DNA, 215 bp, Homo sapiens
  misc_feature (2)..(2): n is a, c, g, or t
  misc_feature (19)..(19): n is a, c, g, or t
  misc_feature (91)..(91): n is a, c, g, or t
  misc_feature (106)..(106): n is a, c, g, or t
  misc_feature (112)..(113): n is a, c, g, or t
  misc_feature (117)..(118): n is a, c, g, or t
  misc_feature (156)..(156): n is a, c, g, or t
  misc_feature (199)..(199): n is a, c, g, or t
gngagagagagagagaganagagagagagagagagagagagagagagagagagagagagagagagagagagaggagagagagagggggctntcagcctctgacagntcaggnngtgnngccccatgccactccacactgctgggacatggcagggncttcacagtgggggtttttagctggctcacagggctccctcancctggggaacattaaa

SEQ ID NO: 585024 - DNA, 1054 bp, Homo sapiens
gcctagaaggggagtcaccaagtaacctctcccaggtttcagagatcttgcgtgtcttatttactgcttttgatctccagggcctagaacacagtgcgtggaactgatgaagttttattgtaggttgttggtaggtgaggtatttcattcagtttaatgaggggacatgaggagccaggggcaggaaggactatggtaaggcggtgtcctcacccaaatcgtcatcttgaatggtagttcccatagatccccacatgtgcgtgggaagggacctaatgggacggtaatttaatcatatgagcagtttcccccatgctatgctgtgtgactagtgagcaacttctcacaagatctgatgggctttataaggggttcccccttcactggggtctcatcttctggctgtgcatgtgaagaaggacgtgttgcttccccttctgccatgaatatgctttctgaggcctccaagccctggggaactggtgaatcaattaagcctctttctttataaattaccctagtctgtgggcatttccccaatagggcggggtgggcgcacaccggtaattaaacctttattttaagaaattggccagggaacaccaaacttttggaccacaacgctgtggcacattagacgggcgctcaaaattcagcgaaggaccccttggtccgacacaaaggtttcacctgtgctgagagcgacggataccatagcctttgcacagcggacgtcaccacaggggacgcggcgggagagcacgcgctacaacccactggttcgacatttcgggcacactactcggtggcgaacactcagcaggggcgcaaccaaactagtgtttttctggtgtgattgttatcgtgtctaaattattatatcgttcttttgtgttttcgccacagatagagagcgacgagcacagagagagcaaagacagaggcacacacgacgcacagtagcagcgacagacaaagtaaagaaggacggcagagcgacaacaggagcacacagacagcacggcgacagagaatggaaacagagaaaacactt

SEQ ID NO: 585025 - DNA, 175 bp, Homo sapiens
tggatcccttcacattatatgcccagaggcttgcagtcatactatcatggtctcaaataagatacgttttacacaccttatcaagcatctctagtgtggtcctattggacacaggaaacagcatctaagttttgaacgggctaagttgaaaacaagtgatttattttcgaaccaa

SEQ ID NO: 585026 - DNA, 221 bp, Homo sapiens
acatttttaatttttcttatttttgggccaaatgtttggaccgtttgtctttttagttaactagtttgtgaaagcattttgtatgttggacaaaaaatgttcagatttttttattttggaagcaaacatttttttccaactcttgtaagttgtttgttggccccattcaaaaggactttttccaaataaaactttgccttttgaatttcaaaaaaaaaaaa

SEQ ID NO: 585027 - DNA, 613 bp, Homo sapiens
  misc_feature (49)..(49): n is a, c, g, or t
  misc_feature (80)..(80): n is a, c, g, or t
  misc_feature (83)..(83): n is a, c, g, or t
  misc_feature (132)..(132): n is a, c, g, or t
  misc_feature (175)..(175): n is a, c, g, or t
ggtttacatccgccgggtgcgcggttcgccgcccgaggtcgttcggctngggtaccatcctccgcgccatggacaccagnganctgttcgccagctgcaggaagggggatgtgggccgagtgcggtacctgntggagcagcgagacgtggaggtgaatgtgcggacaagtggganagtacccccttgtactatgcctgcttgtgtgggcacgaggagctggtactctaccttcgtggccaatggagcccgctgcgaggccaacacgcttcgatggtgagcgctgcctctatggggcactgagtgaccccatccgccgggctctacgcgagttacaagcaggtcacggcttccttgcaggaaggcggcgattcactatgactgactttcgttgcagtcggcttcgtagaagcaggggcattcctacgagtgacggatggtcctttgtacgtacagcgggatagtccatgtccgggatgcactcgctgcggtcctgtggtgcacgatagttgcctacttgtgccaagcatgctggacagccaaatggcaagggcaagagtgtcgctggttctcaggcgacccactgatcaagccccgtggccctttggaggccgc

SEQ ID NO: 585028 - DNA, 331 bp, Homo sapiens
ctaagatccgtgaatgatggtggatggaccacgttctctgggcactagttctctctgggcagcgagcagcctttacagtgcactggtggctgctgaatggacttggcagcttctaatatctgctcctcaaagttaaggactcatctgcctccttgggtttggcccggggcttcagctgctctagctttttggctgcagcctcaatggcggctgcaagctcccaggagctcattctcagcaatgactgtggggtcctctgggtctacccattctgttcccttcatggcttcagcagcctggatgagctcagtgacggaaccagccacacgct

SEQ ID NO: 585029 - DNA, 1623 bp, Homo sapiens
  misc_feature (371)..(371): n is a, c, g, or t
  misc_feature (573)..(573): n is a, c, g, or t
  misc_feature (1529)..(1529): n is a, c, g, or t
gacagggtcgtgcatcaacgaatcatgatccgctggttatggacgcgcgatggtgggtagaaaatagcacgcactgtgcacttggaaggagagtagagcctcggttggttccatagtatctgcactacaagcataaaacggactaataagcaattgttggtaagcaactacaatatgcaattccctgtgtagtggttggcatctcggaggcacagattcgcggctacacataactgctatgtcactgatcctgacaaacgtaaatgaacacgagagctagtatctaactgatatagatgaagcaggattatgagtgctaggcgggacaacactatattgtcaggagaactatagcatggatgctaaagctngcggaggagcccgtggtctatttgtgaagaaaaagtatgcgatgtaattcattccaagcgacatggtatatcagtggataagctaacgattcatcgaggcatacgtaggaactattgcacgtgtgaacatcgcgtataattgtactgagggatagtcaaaagaggtggggatagaaaggccttcgggttgtgccgaaagcanagtgtggcgattatatccgggtgtcattatgagtgaaaaatctccatttgatagtgttggaaactaatccgggtggttctgttggcgctttcggggagaataacaaacctggaatatgtattaatctttacctttcaatgttcctccgctatgagtgacttgttaaagggagggccgttagtcttcctctaaattgtgaccattgaaaccaattctctctggtaagagtgctcacagaggagaggcggttgggactaattacgaaaaagtactttatcgtccaaggggaaacatcggcggttgacaacaaatgttagggatcggactcaaattgggggtgaattagtgggggtcaatttgtcgatatcttcaacctaggaacaagattgggtgatgaaacttagttgatcgtccggcgcactagaggtgtaggtaactgcttgaagcatttgaattatttttgaacatgggtcggatatccagaaaggaggagagccgaatcgtgggatagggacttgtgtggacaaacggggtcgcagtagcgactctgtggcataagacctttagcgttgacgcagggattgtttgagaaaccttcgcaccacgcaagtaccccatgttttctggtcccattgtaccggtcacaaaacccattttcccttgttaacgcttctgtttcacttgggggcacatttccctataacatattacaagggtaacgcccgtacatgaatcatccgctggcaaagaaggcgaaggcactggcccttccacgattaacaattagacgaagcaaactggggtcaaaacgacagggtgacgactgctacaggaaaacgcgtacaaggtgaaacgccaggagcccacacagtaaccgcgccgcaagacagttcggcaaccccacacggcgacctcctgggcccgcgagaacaaacaccgggtcacaagaagcccgnagcgacagaccacagacgagacgacgcacacaaatcgctatacgcagacagccgacgagacacaacaccgacgagtcaaccaccagcaacgcgg

SEQ ID NO: 585030 - DNA, 148 bp, Homo sapiens
ttgagaaagtggagcaggagtggcagagagaagggtggttacggagaatgaagaaagcctgaatataaggaatctcagaccatttctcattgcgatggcaaaagttgtctaagtctctaagtatattgaaatcgaaagtgccattata

SEQ ID NO: 585031 - DNA, 374 bp, Homo sapiens
cctcatgcttatacttcaccaacaagataaaaggtacagctgggcacagtgtctcacgcctgtatccccgcactttgctgaggccaatgacgggttggtatcccttgaggtcacggagttcgagaccagcctggcctacatttgtgaaaccccgtctctgcttgaaaatacaaaaattatccgggtgtggtagcaggggcctgtaatctcagtctacttgggaggctgaggcagtgacaatcgcttgaaccttgaggttgaggttccagttgagccattattgcaccactatactccagcctgtgccacaaagtcagagtctgtctcaaaaaataaaacttttttccattgactctttctaatttttttcgttt

SEQ ID NO: 585032 - DNA, 433 bp, Homo sapiens
  misc_feature (86)..(86): n is a, c, g, or t
  misc_feature (118)..(118): n is a, c, g, or t
  misc_feature (166)..(166): n is a, c, g, or t
  misc_feature (175)..(177): n is a, c, g, or t
  misc_feature (194)..(194): n is a, c, g, or t
  misc_feature (206)..(207): n is a, c, g, or t
  misc_feature (273)..(273): n is a, c, g, or t
  misc_feature (282)..(282): n is a, c, g, or t
atggccacgccgtactgtagagcctgtgggatcacctctagtagcaggcgccgcctaccttatctactacaattactgcggcgccngcgtcgacgtggtggggtgtataacctggtcntagcaaaaagcgaataagtaatgaatgtatacagtgtcagccagtggnctgattatnnngtgctggcatacctgangcttaggataanntacagataatatgaggcaaccagattagcattggcctcagtctctacacacattagggcattacancatggaagnttggtttgcatggatttcaaatattgctttttagttggttcattatacttaggaatagacatgcacctagggtaaatgataatgaatactgtgtttggaataaaatgctgggtttccttatttaaaaaaaagtcttaataggcatttagtt

SEQ ID NO: 585033 - DNA, 130 bp, Homo sapiens
cctgctgacgtcttgctgggtcgtctgggttcatggtccattgtccggcagcagtatgtgttgcacagcaggcatcagctcatcagcacaggcattcatggcatgcgagttgcattgcagtgcacatcca

SEQ ID NO: 585034 - DNA, 639 bp, Homo sapiens
gggcacgagtgggacccccatggtgggggctgccctcaggatgacggccactcagggacctttgggagcgtcctggtggggaaccgcattcagatccccaatgactctcgtgcctgagaaccccggaccactggtgccccatctcgggtggtgggtggcgtggggcctgtggcagctggtgagcgacgacaacgccctgtaagcagtgatgctgcctgcggatgcgtgcactgtggctgagcgtgaaacttggctgtgctgtactgtgcatgtacgatgatcgtgctgtgagccagcaggatgcccactttcacttccaccagatcctgcctgcagagcttccctgggccactcgggggcctgtcaatgtgctgtggcacccctgagcagcgaggacttcttcctgagcggcagcaaggatcgtacctgtgctgcctctggcctgctgtacaactacggcgacgggaccagcgagacggccccacgcctcgtctacacccagcaccgcaagagcgtcttcttcgtgggccagcttgagtgccccacagcacgtggtgagctgtgacggggctgtgcacgtctgggaccccttcacagggaagacccttcgcacagtggagccgctgacagccgggtgcc

SEQ ID NO: 585035 - DNA, 378 bp, Homo sapiens
gctacggagtcagagtatacatacagctcccaagatcctagacctggcactggtcgtttccggagacgggagcagcgggaccccaaggctgcatgatgatgtgctggagctggagatggacgagctcaatctggcatgagtgcatggcgccccgtgacggccctgatcaagcacatgcacagaatcctgggcccgcctccatggagaagaggattcatgtggcaattgaggatcttccttcttgagatgaaattcctccaatggcaaatctgggaaactccaataagtaccacttaaactatcctgtctccttcttcgcccaagcttttgttatctaatacaagaagacggtcttaccaccccctcctgcgcacagca

SEQ ID NO: 585036 - DNA, 1545 bp, Homo sapiens
  misc_feature (5)..(5): n is a, c, g, or t
agcgnagaggctgggcgggcgggcccgggagcggcgcagcatctgcgggcggcggggtttcgagctcgccgggccgtgtcgcgccatgcccgctggctgagcgccgcagggcctcgtcccgccaggcgtgggggccgcgcgcgcccaggccggggcccggcggccgaccatggtgctgccgcccccggaccggcgccacgtgtgcctgaccacgctggtgatcatgggcagcatggccgtcatggacgcgtacctggtggagcagaaccagggcccgcgcaagatcggcgtgtgcatcatcgtgctggtgggcgacgtgtgcttcctgctggtgctgcgctacgtggccgtgtgggtgggcgccgaggtgcgcacggccaagcgcggctacgccatgatcctgtggttcctttacatcttcgtgctggagatcaagctctacttcatcttccagaactacaaggcggcgcggcgcggcgcggcggaccccgtggcgcgcaaggcgctgacgctgctgctgtctgtgtgtgtgcccggcctgttcctgctgctcgtggcgctggaccgcatggagtacgtgcgcaccttccgcaagcgcgaggacctgcgcggccgcctgttttgggtggcgctggacctgctggacctgctggacatgcaggccagcctgtgggagccgccgcgctccgggctgccgctgtgggccgagggcctcaccttcttctactgctacatgctgctgctggtgctgccgtgcgtggggctcagcgaggtcagcatgcagggcgagcacatagcgccgcagaagatgatgctgtacccggtgctcagcctcgccaccgtcaatgtggtggccgtgctggcgcgcgccgccaacatggcgctgttccgggacagccgtgtctcggccatcttcgtcggcaaaaacgtggtggcgctcgccaccaaggcctgcaccttcctggagtaccgccgccaggtgcgcgacttcccgccgcctgcgctatcactggagctgcagccgccacccccgcagcgcaactcggtgccgccgccgccgccgccgctgcacggcccgcctgggcgcccccacatgtcctcgcccacgcgtgaccccctggacacgtgacagggcccgcgcggcccccgacacgcccctggggcgcagagacaccgggttggcttggggcgcgcggtttgcatgggatggggtgggggcgggctcccctagggacaggtgcctcgagtgcccgtgcctggggtcccgcggccgcttcttcatctcaggaatctctcggaccgcggatcctcagcccccgctccaccagcccgccccagcgcgtgggtctgtttgggaggcctgggccggagcagagcagaggtgatccggcccctgcctgctgggccgcccgggttggaagggagggcagtgtgggcggagatctgctccttcggtgggggcctctggctcagatttggggccaaggaggcctctgtcattttaaagactcgtgtttacagttttgtaaaaaaaaactcgtgccg

SEQ ID NO: 585037 - DNA, 171 bp, Homo sapiens
tacccaggcaggacaagagacaaggattaacaaacgggctcaaaaacttttaggggttacaggattgttctaactcctggggtcaagcaatcctcctgccttagcctcccaagtagctggggctacaggcacacatcaccacacccggccaatttttttttaagagacggg

SEQ ID NO: 585038 - DNA, 792 bp, Homo sapiens
  misc_feature (5)..(5): n is a, c, g, or t
agcgnagaggctgggcgggcgggcccgggagcggcgcagcatctgcgggcggcggggtttcgagctcgccgggccgtgtcgcgccatgcccgctggctgagcgccgcagggcctcgtcccgccaggcgtgggggccgcgcgcgcccaggccggggcccggcggccgaccatggtgctgccgcccccggaccggcgccacgtgtgcctgaccacgctggtgatcatgggcagcatggccgtcatggacgcgtacctggtggagcagaaccagggcccgcgcaagatcggcgtgtgcatcatcgtgctggtgggcgacgtgtgcttcctgctggtgctgcgctacgtggccgtgtgggtgggcgccgaggtgcgcacggccaagcgcggctacgccatgatcctgtggttcctttacatcttcgtgctggagatcaagctctacttcatcttccagaactacaaggcggcgcggcgcggcgcggcggaccccgtggcgcgcaaggcgctgacgctgctgctgtctgtgtgtgtgcccggcctgttcctgctgctcgtggcgctggaccgcatggagtacgtgcgcaccttccgcaagcgcgaggacctgcgcggccgcctgttttgggtggcgctggacctgctggacctgctggacatgcaggccagcctgtgggagccgccgcgctccgggctgccgctgtgggcccgaggggccctcaacctttctttcctactgcttaccattgcttgcttgcctgggtgcttgcccggtgcggtttggcggcttccaag

SEQ ID NO: 585039 - DNA, 334 bp, Homo sapiens
tgtaacagtgcagagcgtaggaatagaccctggcgtccagtgtgcgatgtgcttcatcctaccagagcatcaagtctctgcagcaggccatgcttgggtaaagaaatgcctaccacaaactctccatccccgggcttcggtttcggacgttgcttcgccggaatcatctccgtcactggtgactgccacgatgtgtatagtacagttggacatgcctgggtccatacagaccgctggagaacattcggcaatgtcccctttgtagccagtttcttcttcaagctcccggagagcagctgcttctgggagtacaccatcatctatgagacccgca

SEQ ID NO: 585040 - DNA, 128 bp, Homo sapiens
aggaggtctggtacatcatttcagaccccaactgcgagatcgcccagagcacagtctgcaggcctgtggatgtggatgagatgtgtctgctgactgtgagaagaaccttcaatgggtctgggacgtac

SEQ ID NO: 585041 - DNA, 223 bp, Homo sapiens
attaactgtcaaacttcaactattcaaatgagtggagtcatttttgtaaggcttgatatattaattgtttatatcatgagaatgactctcagttaaatctcaagagctttcataaaccctagggtgacactggcatttaataagatgttggatatactccctacctttaacattctttatataccttcttgtttgattcctccaccacagttatcatctaacc

SEQ ID NO: 585042 - DNA, 303 bp, Homo sapiens
tcagctcggtaccacgattctttgcgatggtgcgtgagatccagtcggcggtgtcggcaggcgtgatgggcattgacaaattctccgaggaggtgcgccgcggcatgtctgaggtgcagcaagtgggcgagcaactgtcgcagatcatccatcaggtacaggccctggcgccgcgggtgttgatggtcgacgaaggtatgcaggcccaggccaccggtgccgagcagatcaaccacgcgctggtgcaattgggcgatgccagcagccagaccgtcgaacccctgcgccaggccagctttgcca

SEQ ID NO: 585043 - DNA, 542 bp, Homo sapiens
  misc_feature (526)..(526): n is a, c, g, or t
cgcccctactgggaagtgaggagccgaggtgcccggccacgaccccgtctgggaggggggtccagcgactcattggggatgagccatgatgacaaaggcggtatagcggaatagaaaggcgggaagggcggggaaaaaatagagaaaccggatgggagccggactgtgaggatagaagcagacatgggagacaggtcagagtgggctgaactaagaaaaaatctggagccttgggagcctgtagatcagagacctgagaccgaaccctgggctctctgaaacatgtgctgtggccacacagggctaaatggattaagggcggtgcaagacgggcctccggaaacagaagcttgaaggcagcatgctcgataagagtcatcaccactccctagactcaagacccagggagacaaacactgaggaaggccgcagggtcctcagcctaggaaaaccagagaccgaaggtcacttgtgtatcaagggaccgagcagccactagtggcctaggaccgagacaagcccccgntgggaagaaacacaca

SEQ ID NO: 585044 - DNA, 3847 bp, Homo sapiens
ggcacgagggagagaactagtctcggtcgagaggcggcgcccgcgccgagcgccagccagttgagccccatatgggggttggcaggcagcagagaggcccctttcaaggtgttcgggtaaagaactcagtgaaggaactcctgttgcacatccgaagtcataaacagaaggcttctggccaagctgtggatgattttaagacacaaggtgtgaacatagaacagttcagagaattgaagaacacagtatcatacagtgggaaaaggaaagggcccgattcgttgtctgatggacctgcttgcaaaaggccagctctgttgcattcccaatttttgacaccacctcaaacaccaacgcccggggagagcatggaagatgttcatctcaatgaacccaaacaggagagcagtgctgatctgcttcagaacattatcaacattaagaatgaatgcagccccgtttccctgaacacagttcaagttagctggctgaaccccgtggtggtccctcagagctcccccgcagagcagtgtcaggacttccatggagggcaggtcttttctccacctcagaaatgccaccattccaagtcaggggctcccaacaaatgatagaccaggcttccctgtaccagtattctccacagaaccagcatgtagagcagcagccacactacacccacaaaccaactctggaatacagtccttttcccatacctccccagtcccccgcttatgaaccaaacctctttgatggtccagaatcacagttttgcccaaaccaaagcttagtttcccttcttggtgatcaaagggaatctgagaatattgctaatcccatgcagacttcctccagtgttcagcagcaaaatgatgctcacttgcacagcttcagcatgatgcccagcagcgcctgtgaggccatggtggggcacgagatggcctctgactcttcaaacacttcactgccattctcaaacatgggaaatccaatgaacaccacacagttagggaaatcactttttcagtggcaggtggagcaggaagaaagcaaattggcaaatatttcccaagaccagtttctttcaaaggatgcagatggtgacacgttccttcatattgctgttgcccaagggagaagggcactttcctatgttcttgcaagaaagatgaatgcacttcacatgctggatattaaagagcacaatggacagagtgcctttcaggtggcagtggctgccaatcagcatctcattgtgcaggatctggtgaacatcggggcacaggtgaacaccacagactgctggggaagaacacctctgcatgtgtgtgctgagaagggccactcccaggtgcttcaggcgattcagaagggagcagtgggaagtaatcagtttgtggatcttgaggcaactaactatgatggcctgactccccttcactgtgcagtcatagcccacaatgctgtggtccatgaactccagagaaatcaacagcctcattcacctgaagttcaggagcttttactgaagaataagagtctggttgataccattaagtgcctaattcaaatgggagcagcggtggaagcgaaggatcgcaaaagtggccgccactcccaggtgcttcaggcgattcagaagggagcagtgggaagtaatcagtttgtggatcttgaggcaactaactatgatggcctgactccccttcactgtgcagtcatagcccacaatgctgtggtccatgaactccagagaaatcaacagcctcattcacctgaagttcaggagcttttactgaagaataagagtctggttgataccattaagtgcctaattcaaatgggagcagcggtggaagcgaaggatcgcaaaagtggccgcacagccctgcatttggcagctgaagaagcaaatctggaactcattcgcctctttttggagctgcccagttgcctgtcttttgtgaatgcaaaggcttacaatggcaacactgccctccatgttgctgccagcttgcagtatcggttgacacaattagatgctgtccgcctgttgatgaggaagggagcagacccaagtactcggaacttggagaacgaacagccagtgcatttggttcccgatggccctgtgggagaacagatccgacgtatcctgaagggaaagtccattcagcagagagctccaccgtattagctccattagcttggagcctggctagcaacactcactgtcagttaggcagtcctgatgtatctgtacatagaccatttgccttatattggcaaatgtaagttgtttctatgaaacaaacatatttagttcactattatatagtgggttatattaaaagaaaagaagaaaaatatctaatttctcttggcagatttgcatatttcatacccaggtatctgggatctagacatctgaatttgatctcaatggtaacattgccttcaattaacagtagcttttgagtaggaaaggactttgatttgtggcacaaaacattattaatatagctattgacagtttcaaagcaggtaaattgtaaatgtttctttaagaaaaagcatgtgaaaggaaaaaggtaaatacagcattgaggcttcatttggccttagtccctgggagttactggcgttggacaggcttcagtcattggactagatgaaaggtgtccatggttagaatttgatctttgcaaactgtatataattgttatttttgtccttaaaaatattgtacatacttggttgttaacatggtcatatttgaaatgtataagtccataaaatagaaaagaacaagtgaattgttgctatttaaaaaaattttacaattcttactaaggagtttttattgtgtaatcactaagtctttgtagataaagcagatggggagttacggagttgttcctttactggctgaaagatatattcgaattgtaaagatgctttttctcatgcattgaaattatacattatttgtagggaattgcatgcttttttttttttttctcccgagacagggtcttgctctggcgcccaggctggagtacagtggcatgatcttggctcacttcagccttgacttgggctcaagtgatcctcctacctgagccttctgagtaactggaactacaggtgtgcactcctcgcctggctaattttttattttttgtacaggcaggatcttgccaccttgcccaggctggtcttgaactcctgagctcatgccatctgcctgccttagtctcccaaaatgctgggattacaggagtgagccaccatgcccggctggcagttgcatggaagagaacacctctttatggcttaccctctagaatttctaatttatgtgttctgttgaaatttttgtttttttacctttattgaaacaacaaaaagtcagtattgaaacatatcttcctgttttctgttgtcaaatgatgataatgtgccatgatgttttatatatatcattcagaaaaagttttattttttaataacattctattaacattattttgcttgccgctggcatgcctgaggaatgtatttggctttgattacacactaagtttttgtaataaatttgactcattaaaaacctttttttttaaaaaaaaaaaaaaaagaaaatctcattagtgaacttatctttgcagctgagtacttaaattctttttaaaaagataccctttggattgatcacattgtttgacccagtatgtcttgtagacacgttagttataatcaccttgtatctctaaatatggtgtgatatgaaccagtccattcacattggaaaaactgatggttttaaataaactaattccctaat

SEQ ID NO: 585045 - DNA, 323 bp, Homo sapiens
cagattaacataaaagaaaagagggaatcacagggcatttaagtgcacctttcccattactttccttaaatcacctcatagttaggctgggcgcggtggatcacgaggtcaggggactgagatcatcctggctaacacgatgaaacctcatctctactaaaaatacaaataattagccaggcatggtggcacgcgcctgtagtcccagctactcgggaggcagagacaggagaatcgtttgcacccgggaggcggaggttgttgcagtgagccgagatcgcgccaatgcactccagcctgggctacagagtgagactccatct

SEQ ID NO: 585046 - DNA, 2396 bp, Homo sapiens
  misc_feature (2352)..(2352): n is a, c, g, or t
ggcacgagggagagaactagtctcggtcgagaggcggcgcccgcgccgagcgccagccagttgagccccatatgggggttggcaggcagcagagaggcccctttcaaggtgttcgggtaaagaactcagtgaaggaactcctgttgcacatccgaagtcataaacagaaggcttctggccaagctgtggatgattttaagacacaaggtgtgaacatagaacagttcagagaattgaagaacacagtatcatacagtgggaaaaggaaagggcccgattcgttgtctgatggacctgcttgcaaaaggccagctctgttgcattcccaatttttgacaccacctcaaacaccaacgcccggggagagcatggaagatgttcatctcaatgaacccaaacaggagagcagtgctgatctgcttcagaacattatcaacattaagaatgaatgcagccccgtttccctgaacacagttcaagttagctggctgaaccccgtggtggtccctcagagctcccccgcagagcagtgtcaggacttccatggagggcaggtcttttctccacctcagaaatgccaccattccaagtcaggggctcccaacaaatgatagaccaggcttccctgtaccagtattctccacagaaccagcatgtagagcagcagccacactacacccacaaaccaactctggaatacagtccttttcccatacctccccagtcccccgcttatgaaccaaacctctttgatggtccagaatcacagttttgcccaaaccaaagcttagtttcccttcttggtgatcaaagggaatctgagaatattgctaatcccatgcagacttcctccagtgttcagcagcaaaatgatgctcacttgcacagcttcagcatgatgcccagcagcgcctgtgaggccatggtggggcacgagatggcctctgactcttcaaacacttcactgccattctcaaacatgggaaatccaatgaacaccacacagttagggaaatcactttttcagtggcaggtggagcaggaagaaagcaaattggcaaatatttcccaagaccagtttctttcaaaggatgcagatggtgacacgttccttcatattgctgttgcccaagggagaagggcactttcctatgttcttgcaagaaagatgaatgcacttcacatgctggatattaaagagcacaatggacagagtgcctttcaggtggcagtggctgccaatcagcatctcattgtgcaggatctggtgaacatcggggcacaggtgaacaccacagactgctggggaagaacacctctgcatgtgtgtgctgagaagggccactcccaggtgcttcaggcgattcagaagggagcagtgggaagtaatcagtttgtggatcttgaggcaactaactatgatggcctgactccccttcactgtgcagtcatagcccacaatgctgtggtccatgaactccagagaaatcaacagcctcattcacctgaagttcaggagcttttactgaagaataagagtctggttgataccattaagtgcctaattcaaatgggagcagcggtggaagcgaaggatcgcaaaagtggccgccactcccaggtgcttcaggcgattcagaagggagcagtgggaagtaatcagtttgtggatcttgaggcaactaactatgatggcctgactccccttcactgtgcagtcatagcccacaatgctgtggtccatgaactccagagaaatcaacagcctcattcacctgaagttcaggagcttttactgaagaataagagtctggttgataccattaagtgcctaattcaaatgggagcagcggtggaagcgaaggatcgcaaaagtggccgcacagccctgcatttggcagctgaagaagcaaatctggaactcattcgcctctttttggagctgcccagttgcctgtcttttgtgaatgcaaaggcttacaatggcaacactgccctccatgttgctgccagcttgcagtatcggttgacacaattagatgctgtccgcctgttgatgaggaagggagcagacccaagtactcggaacttggagaacgaacagccagtgcatttggttcccgatggccctgtgggagaacagatccgacgtatcctgaagggaaagtccattcagcagagagctccaccgtattagctccattagcttggagcctggctagcaacactcactgtcagttaggcagtcctgatgtatctgtacatagaccatttgccttatattggcaaatgtaagttgtttctatgaaacaaacatatttagttcactattatatagtggggtactcttgngtcagcagggccacatggtaaaggtatcgtggcggcccgcctgt

SEQ ID NO: 585047 - DNA, 188 bp, Homo sapiens
ttattatttcttaaacatttagtgagacagagtctcattctgtcccccaggctacattgaagaatttgtcaacagctaattgagccccaaccctcctgggctaaagtgatcttctcactttagcctcttctgagtagctagacccaccacactttgtccactactttataataaacattgatttggtc

SEQ ID NO: 585048 - DNA, 4181 bp, Homo sapiens
  misc_feature (3252)..(3252): n is a, c, g, or t
  misc_feature (3652)..(3652): n is a, c, g, or t
ggcacgagggagagaactagtctcggtcgagaggcggcgcccgcgccgagcgccagccagttgagccccatatgggggttggcaggcagcagagaggcccctttcaaggtgttcgggtaaagaactcagtgaaggaactcctgttgcacatccgaagtcataaacagaaggcttctggccaagctgtggatgattttaagacacaaggtgtgaacatagaacagttcagagaattgaagaacacagtatcatacagtgggaaaaggaaagggcccgattcgttgtctgatggacctgcttgcaaaaggccagctctgttgcattcccaatttttgacaccacctcaaacaccaacgcccggggagagcatggaagatgttcatctcaatgaacccaaacaggagagcagtgctgatctgcttcagaacattatcaacattaagaatgaatgcagccccgtttccctgaacacagttcaagttagctggctgaaccccgtggtggtccctcagagctcccccgcagagcagtgtcaggacttccatggagggcaggtcttttctccacctcagaaatgccaccattccaagtcaggggctcccaacaaatgatagaccaggcttccctgtaccagtattctccacagaaccagcatgtagagcagcagccacactacacccacaaaccaactctggaatacagtccttttcccatacctccccagtcccccgcttatgaaccaaacctctttgatggtccagaatcacagttttgcccaaaccaaagcttagtttcccttcttggtgatcaaagggaatctgagaatattgctaatcccatgcagacttcctccagtgttcagcagcaaaatgatgctcacttgcacagcttcagcatgatgcccagcagcgcctgtgaggccatggtggggcacgagatggcctctgactcttcaaacacttcactgccattctcaaacatgggaaatccaatgaacaccacacagttagggaaatcactttttcagtggcaggtggagcaggaagaaagcaaattggcaaatatttcccaagaccagtttctttcaaaggatgcagatggtgacacgttccttcatattgctgttgcccaagggagaagggcactttcctatgttcttgcaagaaagatgaatgcacttcacatgctggatattaaagagcacaatggacagagtgcctttcaggtggcagtggctgccaatcagcatctcattgtgcaggatctggtgaacatcggggcacaggtgaacaccacagactgctggggaagaacacctctgcatgtgtgtgctgagaagggccactcccaggtgcttcaggcgattcagaagggagcagtgggaagtaatcagtttgtggatcttgaggcaactaactatgatggcctgactccccttcactgtgcagtcatagcccacaatgctgtggtccatgaactccagagaaatcaacagcctcattcacctgaagttcaggagcttttactgaagaataagagtctggttgataccattaagtgcctaattcaaatgggagcagcggtggaagcgaaggatcgcaaaagtggccgccactcccaggtgcttcaggcgattcagaagggagcagtgggaagtaatcagtttgtggatcttgaggcaactaactatgatggcctgactccccttcactgtgcagtcatagcccacaatgctgtggtccatgaactccagagaaatcaacagcctcattcacctgaagttcaggagcttttactgaagaataagagtctggttgataccattaagtgcctaattcaaatgggagcagcggtggaagcgaaggatcgcaaaagtggccgcacagccctgcatttggcagctgaagaagcaaatctggaactcattcgcctctttttggagctgcccagttgcctgtcttttgtgaatgcaaaggcttacaatggcaacactgccctccatgttgctgccagcttgcagtatcggttgacacaattagatgctgtccgcctgttgatgaggaagggagcagacccaagtactcggaacttggagaacgaacagccagtgcatttggttcccgatggccctgtgggagaacagatccgacgtatcctgaagggaaagtccattcagcagagagctccaccgtattagctccattagcttggagcctggctagcaacactcactgtcagttaggcagtcctgatgtatctgtacatagaccatttgccttatattggcaaatgtaagttgtttctatgaaacaaacatatttagttcactattatatagtgggttatattaaaagaaaagaagaaaaatatctaatttctcttggcagatttgcatatttcatacccaggtatctgggatctagacatctgaatttgatctcaatggtaacattgccttcaattaacagtagcttttgagtaggaaaggactttgatttgtggcacaaaacattattaatatagctattgacagtttcaaagcaggtaaattgtaaatgtttctttaagaaaaagcatgtgaaaggaaaaaggtaaatacagcattgaggcttcatttggccttagtccctgggagttactggcgttggacaggcttcagtcattggactagatgaaaggtgtccatggttagaatttgatctttgcaaactgtatataattgttatttttgtccttaaaaatattgtacatacttggttgttaacatggtcatatttgaaatgtataagtccataaaatagaaaagaacaagtgaattgttgctatttaaaaaaattttacaattcttactaaggagtttttattgtgtaatcactaagtctttgtagataaagcagatggggagttacggagttgttcctttactggctgaaagatatattcgaattgtaaagatgctttttctcatgcattgaaattatacattatttgtagggaattgcatgcttttttttttttttctcccgagacagggtcttgctctggcgcccaggctggagtacagtggcatgatcttggctcacttcagccttgacttgggctcaagtgatcctcctacctgagccttctgagtaactggaactacaggtgtgcactcctcgcctggctaattttttattttttgtacaggcaggatcttgccaccttgcccaggctggtcttgaactctccgtggagctctcaagtgccaantctgtgcctgtgcctttagttctctccccaaaatgtgcgtgggatttcacgggagttgagccacccagtgcccggctgtggcagttgtgcattggaaggagaacaccttcttttagtgcgcttttacccttcatagaaattttcccttcaatatttaatgcgtgtgttcctgggtttgggacatatttcttgtggtgttttttacaactctcttttatttggacacaccagacccaaaagaatgtcccactgatatttggacaacctatttatttctttcccctgtgtttttccctggtgtgtgtcccacactatgcgactgcgaataatatgtgtggcgccatgaagtgttttacacatatatatctatctccatttctcaggagaacaacacgttttnttacattttttttatacatatacaccattttcctatttataacccatttctacttttttgggctttttgccccggctgtgggacatatttgtccctgtgagaggacaacgtgactactgtggggcgcttgggattttaaccaacactatagagtcttttgtggcggctcatatcacactctttgggggatctccctatttttaaaaaaaaacctctttttttctctttttataacaccaacaacataaacaacacacaggggagaaaaattttcctcctctttatgagggggagacctcttttccttctttggcgccccggtctgaggagtgatcttctttatagagctcctctttctgtccaaaaacagagtattccccctctttggggggttttggtgctcccactcttttttggcctttgggccccccaagtttttgtgccttgtggtatcaacttttgtgctcgtgtacataatccccgtctttgggatttcctccaatattgggggtgggcgaatcttgggagc

SEQ ID NO: 585049 - DNA, 449 bp, Homo sapiens
  misc_feature (5)..(5): n is a, c, g, or t
  misc_feature (84)..(84): n is a, c, g, or t
  misc_feature (87)..(87): n is a, c, g, or t
  misc_feature (96)..(97): n is a, c, g, or t
  misc_feature (448)..(449): n is a, c, g, or t
catantattgactgtacccctccaccctacattgtactgcctatttagtcaaaccctttacagtagtcccacagaattaaaaanccntcctcctanncccagaggacatcctaaaagagaccctaaactttatatcaagagcacaatattgggcccaggtgtggtggctcatgcctgtaatccccagcactttggaaggttgaaagcaggtggattgcttgagctcaggagttcaaacagaccagcctgggcaacatggtgaaacactgtctccacaaaaaatacaaaaattagcagggtgtagtggtacacacctgtattcctagctactcgggaagctggggtggggaagatcactcgagcctagcaggtcaaagctgcagtgagctatggttgcaccactgcactccagcctgggcaatagagtgagatcctctctcaactacann

SEQ ID NO: 585050 - DNA, 183 bp, Homo sapiens
gggcactaaaagttaggaagtggtaactttttgggttaatgtccttactacatccaaaatggtaacgtgtgagtccaaaaagtgtcttaaatcacacaaaaaaaaacccatattaaaattttaaaaataagccccaaataccccagaagaaaagtgcagtccagaaactataaaacgaggcgt

SEQ ID NO: 585051 - DNA, 797 bp, Homo sapiens
  misc_feature (35)..(35): n is a, c, g, or t
  misc_feature (97)..(97): n is a, c, g, or t
  misc_feature (112)..(114): n is a, c, g, or t
  misc_feature (116)..(116): n is a, c, g, or t
  misc_feature (119)..(121): n is a, c, g, or t
  misc_feature (124)..(124): n is a, c, g, or t
  misc_feature (126)..(130): n is a, c, g, or t
  misc_feature (164)..(164): n is a, c, g, or t
  misc_feature (173)..(173): n is a, c, g, or t
  misc_feature (194)..(194): n is a, c, g, or t
  misc_feature (205)..(206): n is a, c, g, or t
  misc_feature (215)..(215): n is a, c, g, or t
  misc_feature (217)..(217): n is a, c, g, or t
  misc_feature (224)..(224): n is a, c, g, or t
  misc_feature (234)..(234): n is a, c, g, or t
  misc_feature (251)..(251): n is a, c, g, or t
  misc_feature (267)..(267): n is a, c, g, or t
  misc_feature (290)..(290): n is a, c, g, or t
  misc_feature (311)..(311): n is a, c, g, or t
  misc_feature (322)..(322): n is a, c, g, or t
  misc_feature (354)..(354): n is a, c, g, or t
  misc_feature (358)..(358): n is a, c, g, or t
  misc_feature (365)..(366): n is a, c, g, or t
  misc_feature (390)..(390): n is a, c, g, or t
  misc_feature (450)..(450): n is a, c, g, or t
  misc_feature (476)..(476): n is a, c, g, or t
  misc_feature (482)..(482): n is a, c, g, or t
  misc_feature (499)..(501): n is a, c, g, or t
  misc_feature (516)..(516): n is a, c, g, or t
  misc_feature (530)..(530): n is a, c, g, or t
  misc_feature (624)..(624): n is a, c, g, or t
  misc_feature (644)..(644): n is a, c, g, or t
  misc_feature (656)..(656): n is a, c, g, or t
  misc_feature (660)..(660): n is a, c, g, or t
  misc_feature (677)..(677): n is a, c, g, or t
  misc_feature (689)..(689): n is a, c, g, or t
  misc_feature (698)..(698): n is a, c, g, or t
  misc_feature (730)..(730): n is a, c, g, or t
  misc_feature (797)..(797): n is a, c, g, or t
tcaacagtgtgaatttctaacaggggcaaaactgngcaccatagtttacaagtagaaagaccatgcttggggacaacagaagttcactaagggtgcncgattgatctgagannncnccnnnccncnnnnncgccctcctcctcctcggggtccccttgttcgtnggccgtggngtcctggtactgctggtactngggcaccaggnngttcatgtngntctgggnctcggtgaantccatctcgtccatgcncttgcccgtgtaccantgcaggaaggccttgcgccgggncatggccgtgaactgctcggnggtgggcttgngcagctcctggatggccgtgctgttgcggatntttntgggggnnatcttcaggtcgcggggtgggatnttgcacacgggcgttttcacgttgttggggatccaatccacgaagtagctgctgtttttnttctgcacgttgagcattttttcgtncacctncttcatggtcatgcggnnncggaggatggggggnggtcgagtgggggncgtggcgcgggtcgcaggcggccatcatgttcttggagtcgcacatctgctgggtgagctcgggcacgtgagcgcccggtactgctggctgccncggctggtcaggggcgcgancgggcatgaagnagtncaggcgagggaagggcncatgttcaccgncagcttgcncaggtctgcgttcagctggcccgggaagcgcngcaggtggtgacccgctcatggtggccgacaccaggtggttgaggtcccgtagtggggggtggtcan

SEQ ID NO: 585052 - DNA, 219 bp, Homo sapiens
  misc_feature (8)..(8): n is a, c, g, or t
  misc_feature (12)..(12): n is a, c, g, or t
  misc_feature (93)..(93): n is a, c, g, or t
  misc_feature (103)..(103): n is a, c, g, or t
  misc_feature (172)..(172): n is a, c, g, or t
caactgtntgcnattctctcctgatgggaacagatttcccacagccagtcctgacggccagatatacatctatgacgggaagactggggaganggtgtgcccnctgggcggaagcaaggcccacgacggtgggatttacgcaattagttggagtcccgacagcacccatttncttctgcttctggggacaaaacttccaagatttgggacgtcagcgtg

SEQ ID NO: 585053 - DNA, 960 bp, Homo sapiens
gcattgacttttcgacgaaatggtgacacccagtgtcttgaatggtaacctcatcctgtacaatgcttctgctaactaattctagctccataggcacagcgtgatattagagacaagtacgaatgtgtcccgcaatctcatgcacatcagcagtcctccttggcaaaaggcataagtggaacaaataggcttctagatgtagtagatggggtgtatctggtcacttttcccattatgagaattcatgtgtgatttgtatgcaattggtcataagcttggagtctatcactcgacctgtgtagaataggcctcttactaggagaatattaacctttgcctgtttttcccagaccgtaatacgtggatctctcttcggtgctttaatctagctcttcattcctccgtactactacccacaatgccagaggatcaactgaaggagtagcgtaaggttgtaataacaaagaagagaagagcttcggggagcaagctaatagagtcctaataacatttttgggatacgtcaccaccaagaaagttttcactaattcctgaaagggttaattcgtagaaagtttgtccccagggcctgtctcagctgacacaatcatgctgatgtagcatgtggtagctccctcagttctaggtatgggctggacatttggggggaagttcaaatagcggtacacccttgtgcggggtgagaaaataggcgctctggcctgaacaaagggatctacgtatagttgggaaaaagctccacgacctcaaggaattcgttcgcttgggggcaacggtagagcagagaatgtacctgaattgaggggagccaaaaattctcgaaatagggagaccatggtcctttatgctcgggaggaatatgcggggactttgtaacgctcgtggggactccgtgtgcttgtcctgcagtaaaatcctgtcttgcctatatagggtacc

SEQ ID NO: 585054 - DNA, 461 bp, Homo sapiens
accaagtactactaagagaggaaaaagtgtgttactttttaaaatatcccctgtaaatgtccccctccataattttaatgtccttgtgaggaaaaaagtaaaaacatgtttaattttatttgactttcgcattggttttcaacaaggcaaatgttcaatgtgttaagacttgtactagtgttgtaactttccaagtaaaagtatcccctaaaaggcacttcctatctgatttttccccagcaaatgaggcaggccattctaagatcttccacaaaacatctagccatctaaaatggagagatgaatcattctacctattcaaacaagctagctattaagaggggggttggggtaatctactccttaggatttcagggggtcttccaactgagatctcactgtgctcagtacgagaaaaactgtgaataacatatgctatgttagggaaggcgctttacccc

SEQ ID NO: 585055 - DNA, 336 bp, Homo sapiens
gaggttacttatcgtgttgcaccccggagcgagctcacactccctgcctgcagatactgtccacaacctgtacctgtttgaccggaatgcagtgtgtctgcactacagcgaatggcacgcaagaagcaagcagggattcccaagggaaggaaggaagttataggctgatggtacgggatgctcttctctatccgctcgtttgtcaagcaagatgtccccgctagacatgaaggatggcttccttggccttccaaactagccgttacaaactccattactacgagacgcccactgggatccaacgttgtcatgactactgacttgggcgttggggac

SEQ ID NO: 585056 - DNA, 641 bp, Homo sapiens
gctgcagaacgcagggaagctcagcctgatccacagattagggtaaaatatcccggggggccgaagtggaaaccggagttgcgtcattgctcccacccgatatcaccttggcagcgaccgcggctgaccacgttcccggcctgtcgcgaatctcacccaagggagctgagtctcagcttccctggtccctggtcccgagttccgccttccccccccgccccgtggcatcggcgtgaggggaaaagataaagactacctcctgagacctggaaatgtggatggctgcggaaaactcaccacaggaaattttggcttaaagttattctctgcttcccttgactgtgtgataggcaccgctctatctgctagaggacaggtgaaaaagatggggttccctcttcttagaactcactgtgcagtgggagaatgtataaataaatagtaattacaacataatcttctggaatagaaatgctcacaaaatcatccagcagtcgatgacctcctttagccagggaagatattgctattcgcctcttacagaggaggaaaccatggctcagagggacaaggtgaaagggtgggaaattgaggcatggaaagtttaagtgatatgcccaacacgaatctggcaatcaatg

SEQ ID NO: 585057 - DNA, 274 bp, Homo sapiens
cgaccggaagtgatgaattctgacttgaattttaaaagatcactttgacgccatgcgtggagtagataatgaggattcttgtgcgagaggcaaatgaatatccttgtgcatgaggcattgctgtaactggagtaacctggagttaaacagtaatcttcaccttttaggaacttgccatctgtgcccaacaactatgatttttgaagtgttgagcaattgctggcattctttgagcattgacatggcaggcactttaccgagcattttacaggtg

SEQ ID NO: 585058 - DNA, 647 bp, Homo sapiens
  misc_feature (31)..(31): n is a, c, g, or t
  misc_feature (78)..(78): n is a, c, g, or t
  misc_feature (110)..(110): n is a, c, g, or t
  misc_feature (140)..(140): n is a, c, g, or t
  misc_feature (151)..(151): n is a, c, g, or t
  misc_feature (158)..(158): n is a, c, g, or t
  misc_feature (193)..(193): n is a, c, g, or t
  misc_feature (213)..(213): n is a, c, g, or t
  misc_feature (218)..(218): n is a, c, g, or t
  misc_feature (221)..(221): n is a, c, g, or t
  misc_feature (227)..(227): n is a, c, g, or t
  misc_feature (241)..(241): n is a, c, g, or t
  misc_feature (272)..(272): n is a, c, g, or t
  misc_feature (303)..(303): n is a, c, g, or t
  misc_feature (306)..(306): n is a, c, g, or t
  misc_feature (325)..(325): n is a, c, g, or t
  misc_feature (328)..(328): n is a, c, g, or t
  misc_feature (333)..(333): n is a, c, g, or t
  misc_feature (335)..(335): n is a, c, g, or t
  misc_feature (349)..(349): n is a, c, g, or t
  misc_feature (462)..(462): n is a, c, g, or t
  misc_feature (466)..(466): n is a, c, g, or t
  misc_feature (481)..(481): n is a, c, g, or t
  misc_feature (530)..(530): n is a, c, g, or t
  misc_feature (544)..(544): n is a, c, g, or t
  misc_feature (567)..(567): n is a, c, g, or t
  misc_feature (573)..(573): n is a, c, g, or t
  misc_feature (621)..(621): n is a, c, g, or t
agttttattatttcatctttctttgaaagtnttttttttcatcttttctttatggttcttcagtagaagcaagaatantgagtagcccagtaaggagcatataaactgcnatactgattaagtatcttctaaatattaanggccaaaaacnggattcnaaaggaaaggcttttggtcttttcaataaattgcngaaagggtaaaaatacattntaacncanaaacanataaacaaattaanaataaatcttggaatcaagtattgcattacnaatcaaatttacaatccacctttaagcttcnacnggagtaatgtacaattaanctncaaanangtaaatgcagaaanactggtggatgcaaaaaaaagtttaaaatataaagaaaagggcataaacaatgaaaaactaaagaaaagcaaacaagaagaagtaattaaaaagcactaaataaaattacctnaacnttttctgaacaccanaaaagtaaaagtaaaaaaaaaaacattaaacaaatactgtaattgggtntttatatgtataanaatacagtagaataaatataacnagaacnattagaacctgccgacgttttcgaacatccttgtctgttatgacttcngtggttaaatagcgaagaatgtttgg

SEQ ID NO: 585059 - DNA, 321 bp, Homo sapiens
attcggcacgaggctctgttgcccaggctggagtgcagtggaacaatctcagctcactgtaacctctggcattagctgggcatggtagcctgtacctgtagtcccagctacttgggaggctgagatgggaggatggcttgagccagtgaggcagaggttgcaataaactgagattgcaccactgcctcctgggttcaagcgattcttataccttagcctcctgagtagctgggagtacaggtcctttaaagaagtcctttaaggctgggcacggtggctcacacctgtaatcccagcactttgggaagctgagatggacgg

SEQ ID NO: 585060 - DNA, 132 bp, Homo sapiens
aaaaattaaagaaaaaaggagaaagaaaaggtgggaataaaagattcccaaggaaaagccgagggggaggaaaaggaggagggaggggggaggagggggggggaaaagaaaaaaaaagggaaaataagaggg

SEQ ID NO: 585061 - DNA, 310 bp, Homo sapiens
tggcaggctctctacctcatcaatcggacggatggtcttatagaaggggaaaatatggacacagagagagacaccagagggtcgtgcacataaagacttggaggacacttcataagggcgaccatcggcaggccaaggagaaaacagcaagccggccttcacctcaatctggaacttccagtctccacaacactaagaaaattaatatctgtggtgggtgctacctagtcaagggcatttggtaatggcagccggagcagataaacacacaagggcaagaatctgccttttctttctttctttctttctt

SEQ ID NO: 585062 - DNA, 867 bp, Homo sapiens
gaggttggggaagttcagcctcgaggacactaggggacgaaaaacttcaaaaagaagactctttttattaatatttggcgttcttttggagaggaactttgggatgtagcctttacctgtttcctgaatttgacatccaaaaagcctttggaaaacaccattctaaatttatcctgttctgaatcaccatcgcttctgatagatgcagttgcttgctgacatcgtgatctttgatttgtacaacgctattgggctaactttgggattttacttgtgcttagaatttgaaagtagtattcatggaaagagactccaagaaaatactcgaagacatcaaaagctggattcgagggtataacgtgtttggttcgtctttaaaatttcgcgcaacattacggattggccgcgtgattctctttcccccctttaacttagaggaacgaggattatacagaactctgaacgtaagtgacaaatcttcctataaatctaaatgcagtaggtcttcgggcagtacggctttttacgtgccatctgtctgagcatgtttcctgaggatcgtcggactccagtcatgtggaaatttcctgcagggttgcagttactgcgcattccgggtgatacctgggatattctggttgagacgatgggactttctctttaacgggatcactttttgggcacgaacggttatactacactgggtaatcatattccactcctgtacatgttccctagttgggaatattattccaagggagcttacatgcccagtggggggcctcacgggattatccggcctacaccggaagaaacggctggctacgggagagcgagcactcggactcgtgcaatggacacgtatgc

SEQ ID NO: 585063 - DNA, 2086 bp, Homo sapiens
cccaacgcgtcgactagttctagatcgcgagcggcgcccttttttattttttttcttaaaatataatatatatttataattaccgggccctcaaaagcaatcatggtagttaagaaccaagtttggaggtcattaggatagaggccaacttaaaacatctccagtgcagatggcacattaggcaaactgggctttcagacacccccacacagtctacttgcacaatcacctttaaacacgttcaagtagcttgtcggcacacgcaggaatcaaggctagatcaatccctcgaggctctgtaggcagtggctgggccaccaccctgcgcgtgctgcggcgaaggcggcatggcggggagcaggcccgaccctaccctcgacaggcctagacaacaaagaacatgccacacctggcacacgcgggaaccggcacactcgccctatgctcccatgggactccacccgccgtggctatcccgcctgacagctagactagaacttccatccgtagagaaacacttgacacgtacctgagcacaggaaatccatgccgatatgggttaacgcgccagtttcttctagaacctgatactatcaggctaccactcattgaagctcatttgtcacacagaacatttgactccctcgtactcaactacttcatgtgcacgaaacacgcgccttgttccccatgggctcacaactgctcttgcaaccagtgagggcagcagcaagtacccggtactaacaccggggaaaagccatgacgagcaatcagtcaaggcatcagtaactctgatcccccggtgcgaccgccgcaccggccaccacccagctgcgtcaggccctcctcgcgacaccacacatagaatcaccacacaccaacgcggacgcagccacacacagcaccaccacagcgccgccaacacacacagagcaccatgcgagcagcaactaatactgacttgacaagtatactgccagcagaaccacgacgacaggacacagcagcacaccagaagacgacaacagggcaagagacgcagaccaaagaagcaccgcgaagcaacgcgccactagagccggtaatacagcaagaactgagcgcctacagccgcagccacatgaacaacagcaccagcaagacacagaccaccgacgccgcggcacagcagactaaaaggacaagccaactaacaagaagacgaaccgacacaggaattccgaactaccgaacacgagacataacagagcacagtgcaaccacagatacacacatgaacagcgcaaccacagcacaacgacccagaggagaaacaagagcacgaagcgaacgggcagcagaaagcacgacgaccgacacacggacagcgaacgagccagacaatggcagaacaggacgaagaggcagagacgaacaccctaggagagaccgacacacggcgagaggcaacaccgagccacagaggagcacacgacgagcgcggggacaccggaaagaccagacagcagacagcagacgacaggaagccagcgaacgaacagcagaggacagaaagaaggacaggccgaccgacgaggacacaggacgaaggacaagcgagcgcgaggaggggcggagagagctgaagcgcgaggagagcagcggtcggaaagaggaggacgagagagggggacgcgcacgagaacgccgcgacgcgagcggcgaggagcggacccatgcggccgagagcaagggagagactagagggaggacgagccgagagacacggagaaagacggcgggaggggacgcaggagcggcaacaaggcagacgatgagaggacgacgcgacgacaagaacacagcagagcaacgagcaaggacgaaagaacgataagcgagaggaggagcagcagcgacgcgccagaacgaaggcatgagacgacaacagaacgaagagaagcacgagcatagcaacgcagccacgcgagcgcacaagccctcagcgagccagcgcagaccagcaacgagacggacgagcacccaacgcaaggagcagcgagacgacgcagagagaacgacaagacgagcaaggaggtgcagg

SEQ ID NO: 585064 - DNA, 1332 bp, Homo sapiens
ggttgtccctgagacttgtctgggttccagaatcctgacgacccgggcgacggtcgacgtctcttgtcgacgtaaaagagcagctgtccaggtggctccagacctaggagtctaacgcgggaccggcctcccgtcgcacgtgcaccattgcgccaaggttctctggacaacttggtaaatatcatccgagtctgcgaagagactttcgatgcgaacttgcgtcaaatgctgcgtgtggtggtgcaatcgttgcttgcttggacgcgacatggattcgcgtggctgtggctgacacgacagtcactaggacctagccagatgggaggtatctacatgccagagagtggacgaccacgtttctgagcatcaagatagccgtcctattcgatcgctgcacgcacgcgacaagagatttgaccttcttcaaggggcttcgcgtggaggagcaggtaacagcacgtgcacgcagtacctgggtggagtattgcgaggcagcgccgctccgtgttcacaagcatcccaccctagtgagtccacacacttggcggggaggacgctggtaacaccctaagatgaaactggcggtcccttcgatgggcaaggttcagcgcacacatggcctgctccgtcgtaccattgaggagaaacagactgctggggacacccgcacgtataggaaccctctcatggaggagattcatccagtgagcggaatcaactcagacggccaatttcagaacattctgaagtaggacaactttgaaattccccgttgggaagtcgcttgcaaccccgagacgtctcaaactctgcagcggatcaccgcagtagggtagccagacacccaacgggcggactcaatacacggaatcatcaggaagaccggatggaacgggtcggcgatccccggaccgggtccaacaagcgccaggaagagagacggaaagaagaagccaacttcactccaaggcccgccactgcacttcactcgcggaacgcgtgagaacaaagacaagcactggaacacgccacgggccaagcggagacaaccccatgcgagctcacaagccaggagcagcagacaagggaacagaaatgccaccaagagcaacacactcgcagaacccacaacccaccggcagaaaatgaggcaacggcgaaagaaacaactagcacgaggacagcaccagaaacgcgaattcaccacgaacggagagccagccaagagacaaacgaacaaaacgaaacgcaccccacgtccacacaaggatcaagcggcgacgctccacacagccaggcacagcgagatcaacaacccaagtccccagcaga

SEQ ID NO: 585065 - DNA, 824 bp, Homo sapiens
ggtcacatatgccatgtggaggaggtggatgcagtatgaatgcaggccacacaaggtggatggaagagttgtggaacaaagagagctgtctgagagaagattctcaaagaccaggtgccattaactgtgaaagagatattgtggtggattaaagaagaactgaatgaaatcactaagagattatttggaacagtatggaacaatcgcagtgattgaaatccatgacgtgacacgatggccagtggcaagaatagaggggctttgcctttgtaagctttgatgaccagtgactccgtggagtaagattgtcattcagaaataccatactgtgaatggtcacaaacgtgtgaagttagaaagagccctgtcaatagcgagagatgggtagtggttcactccacgccaaacgaggatcgaagtgtgttcgtggcaaagctttaggtgagtggttcgtggcaggtgggtaaccgggggagaaatgacaattcgggtcgtggagtgcaaacttcagtggatctggtggatggtttagggtggagccgttgggtggtggttggatatggttggcgtggggatgggtatacatggatacggtgactgatgggagcaaatgtttggaggtggtggaagttactgatgagtttgggaagttacaaaaatcagtcttctcaatgtggactccatgaagggaggaaactctgggggcgaagctcctggccccaatgaggtggtggcaatctttgccataacagaaaccagggggtatgggggtccgacaacggggttttgggtggcaaaatttcttggaaccacgtacgaaatgg

SEQ ID NO: 585066 - DNA, 200 bp, Homo sapiens
agtacatctgtctcaattattcgtgagattttagtgcattgtatcatttgtgcaagttttgtgatattttgggtggataaacccgggggacccaggagtgaaatagcaagcacaccgagaatggactctaaaagcttgggcacatagagcgagtccatgggttgagagaggagtaaggttctaagggggatagggagaag

SEQ ID NO: 585067 - DNA, 468 bp, Homo sapiens
cacacatgcacaaatatgtgattgagacgaaaggacatcagaagactgtctaaaggatgcctgtattcctcgttatatcaggactctaaatactctaacagctgaccagtgttggtgattccagtggactgtatatctgtgaaaaacacaatcatgcctttatgtcattctatctgagcacgttggaagttcaattagctcatccaaccaaccaaatttctgcattcgagtcttaaccatatttaagtggtactgtggcttcaaagaagctattgagctctgaagtagtgggttctgattgagttgactggttttaaaaaactgccaggattttaattgtgatgcacaagctatagtaacatacattcggttttgcacagacattaattgcactctggtggataagttcaataaaggtgatatcccaaagctgccagaatgatctttctgactctagggagagcctcg

SEQ ID NO: 585068 - DNA, 315 bp, Homo sapiens
gggggttttttccccctgggggccccgttgggtttgggggagggcccggggcccccggggtgggggttgggggaccccccagggtttttttgggttttttacccttcccccggggggtttttggggggcccaaaggcccggggggggaaaaaggggggttttttttttggggcccctttcccccttttttggggggggacgggagcccccctcctttttttttgggggggccccgtttttcccccccaaagggtttgggggggttttttccccccccccccccttcggggcccaaaaaattttttttccccccca

SEQ ID NO: 585069 - DNA, 218 bp, Homo sapiens
tcgagataccctattatgtgctttaaatgaaggtgggcagcgatggagcaccttgtttctctagtaggctcccatgctgtaggcaggggaactcgagaatgtagtcctgacctcaggattgagcattgtctttctagtctcatccggcttaatttaaaaaagaatatgggtactgatctcgaatgcgtgttcatggttcgtagcgggtaccaagctcg

SEQ ID NO: 585070 - DNA, 143 bp, Homo sapiens
  misc_feature (28)..(28): n is a, c, g, or t
  misc_feature (44)..(44): n is a, c, g, or t
  misc_feature (82)..(82): n is a, c, g, or t
  misc_feature (123)..(123): n is a, c, g, or t
  misc_feature (129)..(130): n is a, c, g, or t
  misc_feature (140)..(140): n is a, c, g, or t
ctatgtgaaaaagacattactattctcnggaaggataaacgcgnaatttgagaatggtggatatctggggtgagaggtaccntttcactgttcgttaaaagtttgatattttggtgtttgccnattcgnnaaaatggttnaaa

SEQ ID NO: 585071 - DNA, 102 bp, Homo sapiens
tatgttctagcactgcaggggggtgaggtcattaaaagcgaggaaaacactagctaaaaacctttcctaaaagtgccctgtgaggagtgagcagctgactga

SEQ ID NO: 585072 - DNA, 874 bp, Homo sapiens
ggaagacggaggcgggttctacagagacgtaggctgtcagggagtgttatttcgcgtccgcttctgtttctccgcgcccagtgctgcccgatcaatactcgtccagaaccggctcagcctctccgcgcagaagtttcccggagccatggccgagtactcctacgtgacagtctaccaagctcgtgctcaagggaaccaggacgaagagtaagaagaaaaaagagcaaagataacgaacacgaacagcgacgaccgaagatgaagaaacccagtttgatatgggtggggaactctggtggacagtaacaaacttgtggtgaaatttcaggaaccatagccatgtgaacatggactaagggaacctatatacattgcactcgaacaatggtctttttaccctgggagctccaccacaaagacagtgggatgagggcctagtccctcccagagcagttacgggtgtccaaattatctgattccagaattcgccctgaagttctgctatggacaactatcttggtttaactcagatgggcttgtggtgggcgtcagatgcattggccagagaccatgggaaccagtctttccaaaatgggaacatggctggttgggctcaaataggtggttttttacgattgcagggacgcgggacttgaagcaccgtccacacgcggggagaggcaggtcagattagtctggctgaaggaaccgcaaggtggtgtccgagagccggctgtccccggactcttgtacgaatcgagtcgacccattacaacgaggcggattaaggcgaagctggacgtctgaggcctgcgcgccagggtgccgtcggggaagaaaaaaagggcagacagggagattcatgacacaaggc

SEQ ID NO: 585073 - DNA, 1334 bp, Homo sapiens
  misc_feature (676)..(676): n is a, c, g, or t
tcgtcgggagtctggcgccacaaaggcacaccacgaaagatgtgcagatatcttatcgggggttttccacagagagcagcctttcaagagaagcttctttgcgccccatgatggacatcagcctcgtctgagaaacacctcttcgggggagatttttctgcggagaacacgctggctgggtttttgccagcctctgtcataaagggggggtgccaccccaaatcttctggaagagacccttttgtggggttgtagaaaattgtacaaagacccttgcgtcgcggagcttgcagtaatgtccccccggggcgcccctttgtttcactaaagtcccacggtgggtcaaaaggggagcaataggggggggaaacaccgaaccggtggtaaacaggggtgtcccaaataacgcacacccccgtttggcccccccccaggaagcttgtatccccccaaaagttttccgccaagaagtggttttccaggagatattactcccccaaggttaccagtgataagccaatggacacatggtgcacacaaagattctctgggagcactcgggaggttgaaaaaaggggaccacttttgagagaaattggccctctcccacgcctattttcctgtgaaagttgccgccacaccacaggccatatctcacagctctgtgcttttttgncacgagagagaagcgtttcactccacacgccccactctgagaaagaggtgtttggagaacctccccacatatagggcacttgaatcacggaattatatgggtttctccgcgttcttgagaagattgacacacatgagaatgagatatatctcacagccacgttcttatatcacgaaagaatggtattgggattctctccccctttgccacaagccacatccctgtgagatgaaaacccacaaggagagagatgttatgagagagaaaatctcctgggtggcctctctttgttggagaggagaaaccttagcacattctcccttgatggtcctccaagactataggatctcagaagaacctttgaatatataataatatttctcatccctataaagacgcttaaatataggaaaagattttttccacacacagggattaccacggtgtagcgtcaccctcacacatagctgtaaaaatatagccctttaaatccatttttatattataactctggtataatagaagaataagatcccattttttaaaaatggttttctccccacaacaccattaaacccctataccagattgtttttagataaccaaacatgagaaagaagtttatgtagctgtgaaattaaatgacgtcaccagacca

SEQ ID NO: 585074 - DNA, 933 bp, Homo sapiens
cgctctcttttgtgccttctctcgtgctgttcgtttgtggtctgttgttctgtcgcgtttgccctttcgtttgttttgttttttgtcgttgcctcgttcgcgcgtgcctctcctcgtgccttggttgtccgttcgctctggtggtcttgcgtctcctgggcgtgtcgtgccgtctgctgcggtgggtggctcggttcgtgtgtcggctctcttgtgtctgttctctgtggtgtggttcgctgctgtgtttgcgggccgtcgcttgtcgcgcgctgcgttcgactgtccgctcttgtcgctgctcgcggctttctctgtgtgctgtcgctcgtcttcttttttcttgttcttgtttcgttctttcgttttttgtctggttccttccttggtgtgggtttcttgttccctgtacttgtttgtgctgttatttcatctttgctcgggtgtgtgcctgtggagctgtcgtattgccatgcttgtctggttcaatctacccatccggacggtgctggccatcagatgtacgttgggcgggactggccggcaccagtcggatctgtaacctcggcatgctgacgggagtctgggtcctcccgaggctcttgctatgccacgctggcgctctgtagccttggccgccatcgcggacgcagtgctccggggttcggcgctgctcggtatgactgttctggatgctgagcatctgagcctggtcggggtgtctccacagaagctgtgcctgggcttgggtcccttcggccatgtccctctcccggccaggggagacggagcccatccacagtgtcagctatgaccatgtggcccgcctgccagctcatgggccatcacatcgctggcccttagagggcgtgggagagagacctagctacctcgtgcagagccctcaggcggaggtactaactgcgccggcca

SEQ ID NO: 585075 - DNA, 633 bp, Homo sapiens
ggcatgggtggttcagtggtagaattctcgcctgccacgcgggaggcctggaactttccctgagtccttcccacccaccagcccatgacccaacccttgcgtgagtgcacccccgggaccacgcacacccatctcctaccagttctagacattcccagcgagcctcctgacttcagagaagggcttgaccgcctggcctccccaagccagatggctcccacgcatggtccacctgggaggcgccgagcgtcaccaaattgcgcgtggggacaccaggagctacgcattctacccaaacttggggggcccctccagggtccccagctgcaaccattcaaagaccctccgcggcagagtcccggcaagtaccatagggccaaagcgagcttaggacctacggggtgaactggccttccagttgcgtgccacaggcgtgatggggccccccagcaatgtggcgtggagccggggaggccccagaagcagctgcgtggagacatgcatcccggaacgtgaacaacgccgtgatgaagcctacgtgtacctacttggggccaacccgatctccctaatgaacaacaagtgacgaactgctttactctgtttgagaagcaatgatacgtgtgttacccc

SEQ ID NO: 585076 - DNA, 644 bp, Homo sapiens
cttccgacgctccgccgatcgacgtatctctgccggtcgcaactggaagaagagatcgccgcgctggtcatagacaatggcatccggcatgtgcaaagctggttttgctggggacgactgctcccctgagaccgtgtttccttccatcgtctgggcgccccagacaccagagtgcgtcatggatgtggcatgggccaagaatggactcctactgtgggctgactgatggcaccatgatgcaagcgtgtgcatcctgaccctgtaagtaccccatatgagcatggcatcgtcaccaactgggacagacatggagaagatctggcaccacacctatctacaacgagctgcgcgtggccccggaggagcacaccagatgctgctgaccgaggcccccctgaaccccaaggccaacaaaagaagaagatgaactcacataatgatcgagaccatacaacaccaccggccatgtaccgtggacccatccagagaccgatagctgtacccgtcttaccccctcttgggctgcaacacaatggaataggtcatggactactggagaccggggtaccacaaaatgtgcccatctacgaaggatacaaattaaaccatgcccatccatgttctgaccttggttggcgtccctg

SEQ ID NO: 585077 - DNA, 247 bp, Homo sapiens
aaaaattttttgcttgccctatgactgggcagactttgggtcgagcaacccgggggaattcccccccaggggcctccccccccttttccagggagggggtttcagtcccacccccgggggggcccccccttttttgggcttttttccctgaggcctttttccccatccctagggggttgggtaaaactcttttttaactttatgccccggggagggttcctttttttttttaacttcccccgttcca

SEQ ID NO: 585078 - DNA, 208 bp, Homo sapiens
ttcagacgctgaactactgtgatttaggatcgtaccagcagctttggaggccgggctgtggtggctcacacctgttatcacagcactttgggaggccaaggtggggcagcatcacctgtagttcaggacgttcgacgaccagtcctggtccaacaatatgcgaacatcccccaaccctactaaataacacataaaattcacgctgatg

SEQ ID NO: 585079 - DNA, 849 bp, Homo sapiens
  misc_feature (23)..(23): n is a, c, g, or t
  misc_feature (156)..(156): n is a, c, g, or t
  misc_feature (611)..(611): n is a, c, g, or t
  misc_feature (627)..(627): n is a, c, g, or t
  misc_feature (660)..(660): n is a, c, g, or t
gtgtattctcatatacatgtagnaataagatgacaacataaaagggccgttctgccgtcatttttctgacttcttcactcagtcaagtaatcatgacattgagtgctggaaggaatcttggagcagggcctgttgaatgtgcaggccgtatttctnagccagtgagccgaggaatggtgccaggagaacctctggggatcacagaatgggatggggcctgggaacctttgcataagctctccaagtgatttacgctgagtaagtaggacagcaggtcctctaatgactatagcctccctatttttatttgcatgtcccttcctcaaaaattatttggcctcaccccattgtctccccagagctactgctcttaccccattgctttgaaagccctgtattctatcatgtcccattgtagtgttgttacctgtggtatgtcactttcccactaggaagctccttggtggccgggacctgttctcctcatcctgtgcacagggcccagtacatgacgacattcattaactatttgctgaatgaaaaaataaatcagctgcatagccaaggaagctgttagttgatctgttgcaatgacaaagccagccctaganccctcattctcctggncccctctacattgtagtttctgcattgcactgntgctcacagagactgatttaattggcacaaaacagtttactagtttgagattttttttaaacttctctgaattatgttagagtgattaaaccataatgctgtaatcttctgatagggtgggcagattgcttgagcccaggactttctctactaaaaataccacaacattagctggtcatagtggcaggt

SEQ ID NO: 585080 - DNA, 823 bp, Homo sapiens
  misc_feature (288)..(288): n is a, c, g, or t
  misc_feature (511)..(511): n is a, c, g, or t
gcatctggttctgtcaataaaggaatgtatagatggtttggcatggaaacaaacagcactagtactgagctttcctcttataggatagttaataaataggcacgtgtttagagaaacctgaattagttggtaaagtgctttaattgtatgtactcagaatataggttggtcattggaagatttagctctttacattgcaatgtatactggtagattatgtgaacagaaggcggaagtttctagtaattgtgatttatggtttagatgtggcttgtgaaattgacctcnttatcgatatgtgtgttaaattaagagttgtaaatgttactcgtaatgatcttatgttgacagtaggatacatcatgaattactgttagagatggcttataagatttaagaaagttatcatcagcgaaacagtagatgtattagtacttctcagtgccacgtataaatttattcttacgatggtacttcatggtttacatgattgtattagggaccatttganttgcatatacattgtaaacgaattcgtcattgtagagtaacaatcgtgggcagaataaatattggaacaggtaatgcccatcgaaggctgagattcgtttaagattaagtcatagactagtaaacattaacgatatttgggagatattgtgtatgagcattgaggatttctcattgtagtcatattgtaggaactattataatcttttataagaggacctatagactgactagaacgaaaataggggcaacgacgacataaagtaacctttgaactaaaaacaattttaaggaacattgggtttaaggatac

SEQ ID NO: 585081 - DNA, 348 bp, Homo sapiens
  misc_feature (16)..(16): n is a, c, g, or t
  misc_feature (32)..(32): n is a, c, g, or t
  misc_feature (94)..(94): n is a, c, g, or t
  misc_feature (97)..(97): n is a, c, g, or t
  misc_feature (116)..(119): n is a, c, g, or t
  misc_feature (128)..(128): n is a, c, g, or t
aaaggccccaacctantatatcttaaaaatcntttatatttattgacattgttatcatttaaaatcaacagtgaaaacaataaaaacaaagaangcnactattataaacaggtcannnnaaacccccngggtggtgatactttggtagaacttctgtaattcttagagtttccggtccaggaattccattttgctaataatactgtatagtcagaatgatttttaagaattaagaaatgcttttctatctcaaaattataaacatattctcctgtatgttcttctaacatcttatagttttggctcgtacctttatctttaaccatctgaagttaattgctttctttt

SEQ ID NO: 585082 - DNA, 284 bp, Homo sapiens
ggctcgatctagccgagcttataatgtggtgttacctgtcacacgcacgtatacacacacacgcatcgaagcttccaggccaggcactggatccgagccacagcttgtcacctacatcacagctgtggtacaggctggctcctttaacccactttgctgggccaaggggttgaacctgcatctctgcactggcccccagccccctgcactgggattcttcatctactgtgccacagtgggagctccctaaaattaaataaacattgagtcaagagaactggatc

SEQ ID NO: 585083 - DNA, 285 bp, Homo sapiens
taaaagaaacactttggctatgtttcccagggtggggctgaaacccggggctaaagggatcctcccaccttagcctcccaaggggcggggattacatgcgggaaccaccaggcccagttggtttctgttttatgggcctgcctctgaaagactgggtcttccatgaggggggaaactacatttgtcttattcactggtgaagaccctcagggcttagcacagggccagcgcatggcaggttttccagcccagatgtcagaatactggaggaatcaagaaacaagc

SEQ ID NO: 585084 - DNA, 294 bp, Homo sapiens
acaaaattgtagaggttaaatcctgatcaagtaactgaggctgggcgtggtggctcacacctgtaattgtagcactttgggaggctgaggtggatggattgcttgtgctcaagagtttgagaccagcctgggcaacatagtgagacctcatctctacaaaaagttaaataatcaggcatgatgtgggtcagtttgaggtctgaggtgggagaatcgcttgagcccaggaggtctaggcttcagtgagctatgattacatcactgcttgggtgagagaaagagagaccctgtttc

SEQ ID NO: 585085 - DNA, 1089 bp, Homo sapiens
ggagagagagagagccagcggtgtgagtgcgcgaggcgaggccgagccgcgagcgacatggtgtggacctgggagcagctgctgcagcatgggcgctggcttggcctgagcaggcggagcgctacgactgacatggcctccgctatgaagtgcggtgacagagctgaatgaacctctctccaatgaagatctgaaatctcctctctgtggcctacaagaatgtggttaggtgccatggctgatcttcctggacgggtcattagcacgcatttgagcagaaaaccatggctgatggaaactgaaaagaaatttggagacacgttaaagcttaccgggcagaagattgagaaggcgctggagacagttatgcaactgatgtcctgtctctgcttgacaagttcctgatccagacctgcaactgatctccagtatgagagcaaggtgtcttacctgaacatgacgggtgattcctaccgctacttagccagcagtgtcgcttctgcgcggagcaagaataacagtgtcgtcgaagcttctgacagctgcctaacagggaagccttcgacaatcacgaacgagcagatgcacaacccacgcatcccatcggctgggcctggccctcaacttcttccgtgttctaactatgagatccagaatgcaccttgagcacgcctgcctctaaagcaaaacacgcatcgcatgcatgccatactgagctggaacacactacaccagaggattcctataaacgcataccagctgaaccacatgctacacgagaaacacaagctacactcttgacaaggacaagaggatgagcaagaggagaaagcgcgtcgaagatcttacaggccacgcgacacacagttcaaacacgacgatagtacaggagctcattgccgcaccgaaaaataacagggcgtagcatattgattggagcgcagtaaaagctcgactcgatccttggagcagcacaaagcgcggaggataatatgtttatgcaactactcacagtggcgaggcgagcagaacaaagagcagagagaatagaacagataagaaaggaaaaaagggatgacttgcacaggg

SEQ ID NO: 585086 - DNA, 773 bp, Homo sapiens
taccaagtgttgggttgttctaaatgctactgaagaaacacaactaccttatatcagttttatggcaaagctactaacaggtgtttttagaacatatgtcagagataacactttaaccagtgtcttcttgagtggaagtccttaaaaagtttgttaagttgcattgtagagaacaccattcatagaccaacgatggtcccctattagctgatattttcatttatgtaagatccttgtgacattctgttgttgtgttggaacaagattttcaactgtttttaattctcccttttctgcctgttcctaaaaactttcaaaataaccatttcaatgtaatttgtcttgaagaagtttacccaatatctttgtcattgcaactaatgtagtatggtgatggtcaatttaacttattgcttataaaatgaacttgattgcagtaaccatggtatcgatgagactaatgcagtgaagctttattactaatatatatagccttatcaacagcaagctaagaagcttgctttcacataattaactaatttacacacaatactccatctacgatgggattcagtttgtccacacgcaagtgacgataccattccaacaggtaaactaggtattctctgtcaaatttacatctctacagacattagagattagtttttacttgctgtatattctacaaaatgacctaataggttactgtctttttaactgcattctgttattctttcgtaattttaagccctcggactggacgttagaccatc

SEQ ID NO: 585087 - DNA, 327 bp, Homo sapiens
  misc_feature (80)..(80): n is a, c, g, or t
ccaaacccggtttgtggccctgaatgccccccccctttccgggtaatggaggaccctttgtgatttccattaaggccaantgcattgactccccagcctcagccgaggccgtgtttgcctccgaagtgaaaaagatgccacaggagaacattaagccgcaggagcagtttacccttgagccatatgaaaaagacccttccgtggttgtgggagtgtaccggcccccccccaaggtgaaaaacttaagttcagccctgtcaggattgcgaaaaatgtgtgttgatactgttgcccgtgtgtttttttattaaaagactcctccgtcca

SEQ ID NO: 585088 - DNA, 368 bp, Homo sapiens
tcttggagagtgaccggggatttgttccttaggagaattttgtgtattcttttttggatatgatttaaatgcctccttcagggtacctgtggtagggcacttacctaaaaggaaagacaaagcctcttttgcattttggcactaacaggatctctggatagtaactggcctggtgcagtgctagctagactcaggaagtcatctgccctgccaccctttccaaattcagaggcttaggtaatttgttggaaatgacaatcggaaactggacttttgctggattttcccaaaaaataaatagaactttttcctaggcctggaattgtaaatttctcggaaaaagaatgagggacacctggcacagaaag

SEQ ID NO: 585089 - DNA, 198 bp, Homo sapiens
attcattcattcatttaatcacttttttgtataaatgtaaggggtacaaatgcagttttgttccatggatatattgcataatggagaagtctaggctttcagtttatccatcaccagaatagtgtacattgtgccctttaagtaatttatcatccctcaccatgcctccccactctcccacccttctgtcgtcttctc

SEQ ID NO: 585090 - DNA, 476 bp, Homo sapiens
ccaaagtttaggcaacttttagaaggcaggcatagagataactatatataaagggaaaaaaatgagagttataattgcctgaagtattactaaatccataggtaggctaaaactgtccttattccctatggtactcttatgatttggaaaaggagaaaataatagccaaaaaacattcagtaagacagtcaaaaaccaaaaccgtaaggcaaaaataacagcatgaaaaaggacggggaccctgggagagcccaaagcaataacagattattcaagtcctttaaaaaatatgaattccgaacaggcgcaggggatcacgcctctaatcccagaactctgggaggccgaggcgggcgtattggttgaacccgggaggtgaaggttgcagtgagccgagataatgccattgcactccatcctgagtgacagagtgagactccatcttaaaaaaaaataaaattattattatttctaga

SEQ ID NO: 585091 - DNA, 366 bp, Homo sapiens
agctctcgatgatgacaaatacatagagatcagacacactatggtctcggaccattggcacaggatacgtagtggcagggccacaatggacagctaatggagaccacaattcgggaacatgtcttctcaaagtcagcatggatagacatctcatcaccttcacagaatcctttactagtacaattcgagcagagacagacacccgcccatcaggaatgaacatgcaggaaactattacatttctttaatagcagacacaggtgccattaaatcaggggtatagacatccaccagatccactacttcaaagtaaaactatgtctcttgagttggctggctcgggcggtcaagaaaagccttaaccca

SEQ ID NO: 585092 - DNA, 261 bp, Homo sapiens
gccaatacggctctctgggtagtggattctaaggccttccccacattttatgtaaacccagtgcagtttctccttctaccacagcttccgtctcaggcttttctagaaatgagctgcattccttaccttctcgattttgttcaagccccttctttgttaggatgcaagttactgccataaaatggctataatagcatcaacccatttactagtgcagatttctaggcttcatccgttatagacatccccaaacagcacggg

SEQ ID NO: 585093 - DNA, 686 bp, Homo sapiens
ggtgcgcccgcgcagcgttgggggtccccgccgagggtttttgatccgcgccccgcgtattgtgtctgcgcccgtcgtcacttagagtttcacccccgcctaatcgttttgtgttcgtcttcactactgcgcaaggggcattttcgattcgggccccggagacacacatttgggagtcgccgtcctctcgttcatgcaatagcaataagcccacgtttaactactctggtgtctacgacagccaataagttgtctcacatgctgcccgtggcgacagcatagatgatacgtctgcgccacaaagcggaccatcccggtggctttcctgcgggccgccaccaagtgcatgccaccacgtccgcctgcagcgtaatattccaggcatgcttccccgcggcccacgttcgctgcgaagagtcatctcgtgctgcgcgtatcgcaggctgcccccgacaaattggggaccacgcaatgggtcacgtactaccccccatcctactgtcgcggacgccgatgcgcgctcgccctcgggcaatgaatgcgagattccgcttgtcacgctcctgctttaccacacggagtaatcgcgcgcgtgcgagtgcccccacggcccgggagagaccacaaccgggggagacccgccccccaggggtttttaaaaaaatccctaaagcggcccacaaaac

SEQ ID NO: 585094 - DNA, 197 bp, Homo sapiens
ctgccctagtccgtccctgaccctgtcctcctgctctaactcctccctgtaccagtcctccagccctaactcctccctgacctgtcctcctgccctaactcctccctgacccgtactacctgccctaaactcctccctgtctcagtcctcctgccctaaactcctacacctgtaccagatcctacctagcccataac

SEQ ID NO: 585095 - DNA, 1449 bp, Homo sapiens
  misc_feature (244)..(244): n is a, c, g, or t
  misc_feature (281)..(281): n is a, c, g, or t
  misc_feature (299)..(299): n is a, c, g, or t
  misc_feature (301)..(301): n is a, c, g, or t
  misc_feature (303)..(303): n is a, c, g, or t
  misc_feature (438)..(438): n is a, c, g, or t
  misc_feature (459)..(459): n is a, c, g, or t
  misc_feature (465)..(465): n is a, c, g, or t
  misc_feature (626)..(626): n is a, c, g, or t
  misc_feature (770)..(770): n is a, c, g, or t
  misc_feature (852)..(852): n is a, c, g, or t
  misc_feature (991)..(991): n is a, c, g, or t
  misc_feature (1100)..(1100): n is a, c, g, or t
  misc_feature (1213)..(1213): n is a, c, g, or t
  misc_feature (1245)..(1245): n is a, c, g, or t
  misc_feature (1306)..(1306): n is a, c, g, or t
  misc_feature (1318)..(1318): n is a, c, g, or t
ggaaagcgagagaggggctcagtgatatgacaaaaacgttttcctctctttctatgcctcgccgatctcctcatcaattgccacttgtgattcgcatgttctgctaccgtctactacatgggtccaaccacacactatggttaaagttgccgttcgtcaagtggttaggctctcctttgtcactcgtgctcactcgcagtctcggtcctcgtctgatggtatctcttaccttctatgaacaagncattctatatgccctaccctttccatagtcttgatanatctatataacaaatagncntntactaactgattaatgactcattactaattcattgacttataaatcagtaacttgtgcataagttcgcgtgtcaccgtattgcaagcgggtactaagaggttctacgagaatgatctcatatgaaccttcgtgtncgtttgcccacacaaacccangtgagngtgcacagagtgcccacggttccgttcgtgtctgcagattagagttacctagaagaacttcaaggacgctggtagcttactgtggatggggcggtcacaccactcatgtgtacgttttgcgcacgagcatagtctgtgtgcgcatgtgtccctgtagttgntcagtgtacacatactttcatgggtaagaagaatgcctcaagcgtgaggaatcgagcaggtgctagtgcatagtaggaacgacccataaggattatgcgaaatgttgtcgcactagataagactctcaatcaactatatggggnctcatcgacagaacgtcatatgtatccgtcgttgaatctttcgcaacgaaaagacacatatataccgttattggggaaatcnttgcagtaagagagggcgagtgcccaccgggaattaacatccatacactaaacacttcccaatatactaagggtcgaccgattctagttggtttatctaaagtgcccatagtacatcggctagggaaacacaaccaggncggggtgctatcgaagcaatggaagacggaattcccagttgtgcccgcttacaccctaagccgtaaagggtgccacaccttgggtggtcggaagtaaatcccctggccntttgtgagcgcgaccaattacgacggactaagagaagcggaatacccatgtgtgcgagcccacacgcacgatcatcgcctatgcgaccaatcaactgcaataacacccaggcncttgaatagtgcgacagaaacagtggccaacnctgctcgaggccgcgagaacatcactctcgcgcgacaacatcaccgggtggcacagtctantgcggacaaccncggcgcatggtgtgccaacacatatctgagccaccctggaggagactgaccatctctaatactaaaggagctgaccgcggaacacacctgttatctccagctgggaggaggccccctctcatatactagcc

SEQ ID NO: 585096 - DNA, 161 bp, Homo sapiens
tacttcttttgacagtggggcagtctcagagcctcccaatggatacaaagaagatgtacctaaggaagcctggacaggtgctatccctttccatttctttttgttccatcactcttctctcaacctgtgtttcttatttttaccgaggaggagaagcagca

SEQ ID NO: 585097 - DNA, 786 bp, Homo sapiens
  misc_feature (48)..(49): n is a, c, g, or t
  misc_feature (64)..(64): n is a, c, g, or t
  misc_feature (66)..(66): n is a, c, g, or t
  misc_feature (92)..(92): n is a, c, g, or t
  misc_feature (275)..(275): n is a, c, g, or t
  misc_feature (303)..(303): n is a, c, g, or t
  misc_feature (378)..(378): n is a, c, g, or t
  misc_feature (751)..(751): n is a, c, g, or t
  misc_feature (753)..(753): n is a, c, g, or t
  misc_feature (760)..(760): n is a, c, g, or t
  misc_feature (764)..(764): n is a, c, g, or t
  misc_feature (779)..(779): n is a, c, g, or t
gctcgggttaatcggcgaggcggaactatcgcattaataccagactcnnggtgaaggctatgtnancccaatgagggtgctatcgtgaggtngcactggaagggtactacaaggacaagctctttgaccagcgggaagctccgctttgagattggcgagggggagaacctggatctgccttatggtctggagagggccattcagcgcatggagaaaggagaacattccatcgtgtacctcaagcccagctatgcttttggcagtgttgggaaggnaaaagttccaaatcccaccaaatgctgnagctgaaatatgaattacacctcaagagttttgaaacaggccagaggagtcttgggagatgaattcagaagcagnaagctggaacagagcaccatagtgaagagagcggggcactgtgtacttcaaggaaggtatgtacaagcgagcttgactacagtataagaagatcgtgtcttggctggaatatgagtctagtttgtccaactgaggaagcacatgagagcaacagggcccgttcgactggtcgctctcagcctcaacctggccatgtgtcatctgaaacatagcaggccttctcgtgcatgccattgaaagctgtaacagaggccctagaactggacaggcaagcgacgagaagggcctcttccgccggggagaggcccacctggccgcgaatgactttgaactggcacgggctgattccagaacgtcctgcagctctaccccnancaagaangcgncaagacccagctggntgtgtgc

SEQ ID NO: 585098 - DNA, 107 bp, Homo sapiens
agcggtctatgttttgttttgttttgtttttttcttttcttggtgtaagctaaggttaatctttgcttgcttcctaagccagctcctttcttgcttgccttcttagc

SEQ ID NO: 585099 - DNA, 719 bp, Homo sapiens
  misc_feature (349)..(349): n is a, c, g, or t
  misc_feature (596)..(596): n is a, c, g, or t
  misc_feature (599)..(599): n is a, c, g, or t
ctttggggaaggatgcaatggacagatttgaggtctgttctggagcatgagccaacaggatgcaatagggctactgggggtggtaatagaaagagaggtggtggtttctcactgggtgtgttgggaggaagatctttggggaagcagggattgggggatggatgaagagtgatggctctgtcctccttcctcctttggggattctccgatggttctgcacaaacataggtgccatgcacaacgcctcaagcttggaagtggtagagctgggatctctacctggagagtccttctctaaatctgtgcggattctgcagaaaccagccactgctgacgggatggagtgganggtggcttgtgccatggccaagctgggcatggatgtggactggcaagtccagtacacacatgtgtgcatggcccagatgcattacactgacatggtcagaaagcgatgtttctgcctcttggtcccaaagtctctgcccagaactggctttttgcaaatgttctgaagtcttcagagcctcttatgtgagcctctttcaagcactcagggggaagcctcacttgcttactaggaggctaagcttggnccngcccatgaggcaaggggatgggtctaggacatggacccttcaagtcccaagaaccctttttgtgggaaacaaccatttggcctaacggccttttgctagcctttcttggaaacaattcat

SEQ ID NO: 585100 - DNA, 818 bp, Homo sapiens
  misc_feature (48)..(49): n is a, c, g, or t
  misc_feature (64)..(64): n is a, c, g, or t
  misc_feature (66)..(66): n is a, c, g, or t
  misc_feature (92)..(92): n is a, c, g, or t
  misc_feature (275)..(275): n is a, c, g, or t
  misc_feature (303)..(303): n is a, c, g, or t
  misc_feature (378)..(378): n is a, c, g, or t
  misc_feature (783)..(783): n is a, c, g, or t
  misc_feature (785)..(785): n is a, c, g, or t
  misc_feature (792)..(792): n is a, c, g, or t
  misc_feature (796)..(796): n is a, c, g, or t
  misc_feature (811)..(811): n is a, c, g, or t
gctcgggttaatcggcgaggcggaactatcgcattaataccagactcnnggtgaaggctatgtnancccaatgagggtgctatcgtgaggtngcactggaagggtactacaaggacaagctctttgaccagcgggaagctccgctttgagattggcgagggggagaacctggatctgccttatggtctggagagggccattcagcgcatggagaaaggagaacattccatcgtgtacctcaagcccagctatgcttttggcagtgttgggaaggnaaaagttccaaatcccaccaaatgctgnagctgaaatatgaattacacctcaagagttttgaaacaggccagaggagtcttgggagatgaattcagaagcagnaagctggaacaccagagccacccatcagttgcacaagcagctgcgggccactggtgtcacttcccactggacaggtcacaatcaccacagccacagctttcactcacagttcatacagcacgcatcgtgtcttggctggaatatgagtctagtttgtccaactgaggaagcacatgagagcaacagggcccgttcgactggtcgctctcagcctcaacctggccatgtgtcatctgaaacatagcaggccttctcgtgcatgccattgaaagctgtaacagaggccctagaactggacaggcaagcgacgagaagggcctcttccgccggggagaggcccacctggccgcgaatgactttgaactggcacgggctgattccagaacgtcctgcagctctaccccnancaagaangcgncaagacccagctggntgtgtgc

SEQ ID NO: 585101 - DNA, 160 bp, Homo sapiens
attctctttttagggggaatgggaaccggccccctcataaagggttcaaagatcatcaatttttttgcctttttaaatcattatcattattatttttaattaaaaaaaggcctgtatccctttttttggtcggattgtaaataaatatcccattgtccta

SEQ ID NO: 585102 - DNA, 530 bp, Homo sapiens
aaagtctgcttctcctgctgcagcgatgggaacattgctgtctgggacctgacaaccagaccctgtcagagttcaggcaacagatggggcactgatagaattccatgatggacaactgtggacagggggctgaaacacatcctctgggactcggaggccgacactacacagcatgacttcattcccagattctcctggctatgccacttgggagtggctggctgtgggcatggagagcagcaacgtggaggtgctgcaccacaccaagcctgacaagtaccagctgcacctgcacgagagctgcgtgctctccctcaagttcgcctactgcggcaagtggttcgtgagcactgggaaagataaacttctcaacgcctggaggacgccttatggagccagcatattccagtctaaagaatcctcgtcctgcttgagttgtacatttcagcggatgacaaatacattttacaggctctggtgacaagaaggccacgtttatgaaggtcactacttaacaggactcccgcagg

SEQ ID NO: 585103 - DNA, 140 bp, Homo sapiens
catagacgtccagttcttgcagtacggaagcctttaatcacatctcagcccttagcatcggaaagcttatactgtaaataaacgagtaaacttcaggttggtgggtgacaagtgctgaagagaaaaaaggacattcggga

SEQ ID NO: 585104 - DNA, 767 bp, Homo sapiens
ccacgcgtccggcttatcgccacactaggttttcctctgaaacaaggccctggattacaagtgtcattggtggaatcccaaggcatgcgaaagacggccaaggatggcatgctggcgggagaagcctgcgaggacccgatccctttcgaggatccatccctgcagatgactggactctctgacaaaaggcacgccagtgtagcatctgcgctgcttcctgcgaggctggctagccctccccacaagcgggtggtgccacatcagggctcagacatcatcctacactgtcgagaacagatggagcgcccaactgtccatgctgctggaacgtggtctggtagggggtgaataggctacgcgagcctgtgtggccaccatgcctgtggcctacaggcacttgtgtgacaaaggacatgcatcaggcgtggcaaggccatgtatgtgtccaggtcgcaccggaagggacctcccatgggttgtagacgccgccgtcctcgtggcaggcgaaatgcgttaccagccatttctcgatggaattacagagatcgtcattaggccccatgacgctcttcaatgcacgcttcctctaagctccccatcacaccaggtccacatgaagccactctcctgccctgttgaagttaaggccataactcaaacggtaacactcttgtccgtccgagtgacccttccctttaccctaccagattgagcgtgcgccaagccagtggatgcttgcctggacgcttatgaaaaattgcaataag

SEQ ID NO: 585105 - DNA, 815 bp, Homo sapiens
tttttgattattcttgtatgattagttgaccatggtaataaaaaatggtacccaaatataaaaggatcagaaaatgggatcaacgtcgggaacataacccctatagttgtatgatgacaatttgtgtgacgtggcagaatgtgaagaaaagccatcgagaaatgtgcacatatgcgttgtgttatgtgtgagacatcgctcaaattacagtgccacaacaataaggtaactcctcagtgtaagaacatgattaggatgagatgaactcctatccaaatagcctctcacgacgactacaagggtgacaaacaaacatctgttgcgcactcatctttcagtggtagatcacgagaaaaaaaagtggagaaagacgagtgacgaacgacaatatatatcaataatcactactatcaacaatgtagagacacactgacacctaacatatcccaatctagagactctacaaacaatccacagagcaatataataaccctgatatacaaaacatccacaaataatatattctgaatagaaaagatacttaaaacacagaaaaagataagcgataagacgaagaaaaaaaaacagcacaggaagaacgaaggaggacacaagaaaagagaacatcgtagcaggccagacataggaggcgatagaagagggagaagaaattaatcagaaaaaaaagaagaacatacaaaagaaccaacaaatgattaaacacacacaggcccacaaaccgacaacagcacaagatgaagaaagaaagacaacacacccaggacaagcacaaccaacaatccacaaaagaaaca

SEQ ID NO: 585106 - DNA, 448 bp, Homo sapiens
  misc_feature (3)..(3): n is a, c, g, or t
  misc_feature (49)..(49): n is a, c, g, or t
  misc_feature (78)..(78): n is a, c, g, or t
  misc_feature (129)..(129): n is a, c, g, or t
  misc_feature (440)..(440): n is a, c, g, or t
tgnagggaaagttgcctcaggaatgaatcatgcccttgagtctcacccntgtttgatttagacgagactctgggcttnggacttttgaatggggccattgggatggaatgagtatattttgtatgtganaagaacatgaattggtgtaggggcagggatggaatgctacggtttgaatgtttttatctcccaaactcatgttaatatttaattgtcattgtaacagtgttaagaggtgggatccttaaagggtgattaggtcagagggaggataggctggaattggtgctggtataataagatgagcttggccctctcttgcccttccaccttccacagtgacacaacaagaaggattgcaccagacgctggcaccttactctgggacttcccagcccccagaactgtgagccaataaatttctattccttataaattanaaaaaaaa

SEQ ID NO: 585107 - DNA, 255 bp, Homo sapiens
ggtgggtgatctagaggatcccggctcccactgggttgctagtaacttaacatgaaatcaagaacttatgggtcaacactctatacaccgtcaggagtggctgcggtgactagtcgtggaataggaaacgggagcgattctaaatccattaccaccataaaaggaaaagtgatcccaccaccagatatccacattggacagctaatggggaaaataatctaaagcttaacccttgaccatgggagatgtgatatc

SEQ ID NO: 585108 - DNA, 294 bp, Homo sapiens
ttcggcgcgcgccggcgcttaaggaacgtctcccagctgtcgtgccgcgctcaggtgcgtcagagggccgtaatccagcgccgcgcgcttcaagctcttgtcattcaaggggaaactgcaaggctcgatgacgtccagccccacgccgaaacaggcggtgaggcggatggcggcgccgacgttctggggaatacccggttgaaaaagtgcgatacgcataataagcgaaccaaccacaagggcagcaggggctttgccgcgaatcgaaaggacttgcggacttggcccgcgcgt

SEQ ID NO: 585109 - DNA, 468 bp, Homo sapiens
gaactttaaagaggaaatgatgtacccccctgggagccagtgaggtggcagcgatggtgattaaggagtgaatatctcaaggaggtggacgaattcggggatcactagctcagctgcccctctccacctggagcatctccttccagtgctaccctcagaacatctgggctttgctctagtgagggagagactagcaatgaaggtgtcttgagatcagcactgtaattccaccaggacgccaccggagtccggtgttaagcttctactatggcaacagaatgagagcgtggatgggttgaaatgccatttcaacaaggaaatagtagaattagaagaagcataagcactaaaaggaacattttgtagcagaaatgttaaaaatctaaaggaggcaagtgaatcaacaatgactcttctattctgggcaagtccagcccatttatgtaaggtggttattctgcatctctg

SEQ ID NO: 585110 - DNA, 1031 bp, Homo sapiens
gggatttgattaatcatatcagaggactaaggtcatttactatggctcggccttcgagcccaatgctggtacagtggtgttggctgctcgaacgaggataagcggacgtggtgtaaagtgtgaaatttctccccaatgacaactgccacacagcgtcgctgtggcaactgcgaaatagagtctaagcacgtttagactcttaagtgagtaagtgtaatgtggtagaaggtccgtgccgtaattgccagtatcacatggaaaagttatgtgatataagtaagagaagcccaagtgatgagatcaaagtatgtgaccaagcaagagaagtcatgtggctaacagagatactgagtaagtagatgatgagacggcgtgtggataagacaaggacttcagttggtaaatttagagttgatgatgcagcagaagggtgaaagtggtctaaatacagttcgcgagcgttgtttgggaaagcgaacagatttttagccgttaaagtatctaatgttaacttcaactgggagacgaccatgggaattttcactaacagtggacgcttcagatggagcgggaggctcatcatattgcggaaaagacttgttaccattgtgcactgcgtaaaagattcttgttgaaggattcccagtgcacgaagagtggtgaggggtggcaagcccaagattctgaaataacttgggcggcaaactcatcaggggtgtacaggaatgcttcgcaatgtacgtaaagctcagaggtggttatgcaagtacaatgggaggtaatcgtggagaaagaacgaggggatattaaagagcgttggtacttacccacagagttggtttaaattcaagcataggtaagaggggccctgtgggaccattccgtgggaagaacgggacgccgtggctcttggcgtgagaatgtcaaaggagtggcggagacaaaatatgtcgacgacagtacaatcagagtaatgggccgcatatagccatatagagagttgaccaatacgaaaccagaggctaactgaa

SEQ ID NO: 585111 - DNA, 370 bp, Homo sapiens
ggttccaccatgcacttctattctctaggaggttataattttaagtcttacattcgtagtcacattagggcttttcttacggtacgtttcgggaagatttggggggagggctcttttaagacttgggcctccgttgtttaacagtctctttactatattaatccgcactaacatctctgtgatctctgcacatattgtagaggttatcatgtcttctagattacttgagggcattggattgggctgcttggttagggtcccttttaagattaattcatctgattgcgagacaggctctgaatgacctctgttgtcttcactatgtattgatgacttaccactcgtagcttgccctcagatggtgcatgct

SEQ ID NO: 585112 - DNA, 107 bp, Homo sapiens
atggaggtgtcctgcgggaggtggtgaagcacccctccgtggagtccgtggtccagtgtgagatcgacgaggatgtcatccaagtctccaagaagttcctgccaggc

SEQ ID NO: 585113 - DNA, 1419 bp, Homo sapiens
  misc_feature (140)..(140): n is a, c, g, or t
  misc_feature (628)..(628): n is a, c, g, or t
gatttcatcgaccgactaaagattccgtgctgctactgcaagtcatagactttcctcttcgatttccgcctattcacgctctgatagaacgctacagcgcatcacatccatttgcgtgcacgtgccatcgtacccatccnacaggatcggccaaggcgtagtgtatgtcctaaatcgtggcaattgcactcgatcgggaacgcgtcctcacatgccgtcgttaaccactgcgcaatccgacgccacgtataggtcagataagctaagttgatagggtacgcaatcggtcgcggcatgcacgattcgactgtcctatctgagcagccctctcattcaatgtccgtatggactcggtgggccctctgtgtccaatacaattagtccgcgcgcgggaggcgcgcctgattattgttacggagcattcgagtaatatcctcaatcaacgttccaagtatagaaacggtagaagatatccagtcaacgcttcggagtctaactcctctcatccccgtcgccattgtctgtccctatcctcaattcaccgttagaaacgacgagacccttttcaattcaacgcaggcggtgacttaagtacgcataccgcaaccggttctggaggcgcgacccnataaaattttaaaatgagtgctcctgaagagggggcgagcttcaaaccaagggcaattttttgagccaaaaagtgtatggaatcccaattctggggacgcctactggctcggtgtggcgccactcgggggagcatctcaggcacccagtccagtgtgtcccccggtaggcacagttccgttcgcacgggggaggtgtcttcacatcggggggctttgtccacttagggggctctccgtacgccacttcggacctcctcgtgcagttcggcgtgtcgtgcaccccttttgggcgatacctttgcaagagtctctctagcccccgtcttggtccatggtctcatcactactggtcgacgaaagaccgcccgttttcagttccaatcggaagagctttcgcacaaatatcaaattcggcgcctaaaacttggtcacatttggtcccaccaagggagacatgggggagtgggaatttctcccatacatatatacatgattgttaacccccccccccgttaaagtcgggacacacactttccgaaagaggggttgtcttcctacccacaagtatcttacaggcagggaatagtttattcaacagagcattgttgcgaaaagggcccgttcttctttcaaccaacacaccctttttcacccagttttacccattcgtagaaacgtcctaaaacacgcagagaaaacagtggcccagacacatttcacgatggtggatatagtaaccaatctttcctttcggaaaattatccggggtagttacccttctttttcccat

SEQ ID NO: 585114 - DNA, 455 bp, Homo sapiens
gcgtgcggcccagcgctggcgcaggtgcatcaggtccaccagaagcaggaagatggccacggccatggtcagggacaccaagatgtctcccatcaggagccccatggctgtcctgttgatctctggctcctctggtcacagctgctgcccctggttcccaaggcactagggaccaggcaggatgctctaagcacaccctctgtgctcccaggtgcagaccgtttctttaataagggagccaactgctgtgttgtccatgttttttcaggttgcacgcagtggccagtgtggtcaggttctcaggcagccacagaggtccttgcccctcctgtcctcctcatgggcgtacccctggcgtggtgctgctgtcaatgcgttctgagaagaagcacggtgggggcaataggtgctgattcaccacacagacaccgggagttgagtgaaagggagctaga

SEQ ID NO: 585115 - DNA, 630 bp, Homo sapiens
  misc_feature (384)..(384): n is a, c, g, or t
tgggtgttcttgtagttgaaatacaacgatgtgtttttcatatcatgggtcggggttgtagcccgttgcgaaaataatgatgtatgcttgggtgttctggtgaggaggtggtgggtgtatatagtaatgggggttatggtgggggttttcttctaagccttctcctattatatggggggttaaagtggagagtctgggaagacagactgtgcaggaaatgggcaacctcaaaaggggagacagggaaacaagaagggaaagaacacagggtcgcatacaagctctcgctggaccctccatgggttggtctaagaaggtgaagaagaaatggtgatattgggtgtgttctttgcgcataatttctttgggcttctcctctccaangaggaccatctttttgtgtccccagtggttcactgagatccttctctgtggccaaaaaacacccatactggccgggtgtgaaactgggtggggaaatagaaagcgggtaaaggggcaagaaccagaagaatgaattcctccaccattattgctggctaattgttggggtctggcccagtggatggtgggccccaaatggggcgcaaagggacgctgggtgtattcacctgccctacacattcaaac

SEQ ID NO: 585116 - DNA, 292 bp, Homo sapiens
cgtgcgaggaatgctgagtacatttggctggtgtatatttaggtaaaatgcttgtgttcattatctggtggtgggaggggactgaagccgtgtagtcttttccagatgcaaccttaaaatcagtgacaagaaacattccaaacaagcaacagtcttcaagaaattaaactggcaagtggaaatgtttaaacagttcagtgatctttagtgcattgtttatgtgtgggtttctctctcccctcccttggtcttaattcttacatgcaggaacactcagcattcctcgcaacag

SEQ ID NO: 585117 - DNA, 752 bp, Homo sapiens
  misc_feature (13)..(13): n is a, c, g, or t
  misc_feature (17)..(18): n is a, c, g, or t
gatgatagcatgnaccnnctagacacgtagtacgccaagcttgaaactaagccttaatgaagggaacaagaagctggagcttcaccgcaaggggctggcctgtctataactactggcatactccggtctgtacgaatactgcacgaagttataaagtttaactataaaactaatttttcttacacactaaatgggcatttgttcaaaataatgaatttatggcttcacatttattgcaggggaatatggaacttatataaaacatggggggaacttcatttgtcaaatcatgtttgaatctacataacagtaggactagtgatcctttttgaaacggggtcctcgctctcaaaccacgctggattgcagtggttctaattaatctcactgcaagctctacctccgaggttcacaacaattctcgtgcctcaaactacctactagatggtactacaagtgctcaccaccacgcctggctagtattatgtatttttagcatagactcactattaccttgtaaactcagaaggtcttgatctgcagatactttgaaatgcttcatcttgcgctctcaaagatcagcgtattactggcatataacaaattcgtcacagtaaacatactctcactaatttctatgtatatggctgccatttttatcacttttaaaagacttaaacatgattaaatttttgggaagaataattttttttcgaatttaaactgatggtaaaatatcgggaacaatttta

SEQ ID NO: 585118 - DNA, 569 bp, Homo sapiens
ctgtagtattaaaattccatggggaggcaattaggagagaaacttatacagatgttccttagcggggccgtggaaaaataaagatcaagaaacaacagtagaatgatggattggggatttataaccttattatttggtgtttgatgaagcacttcttcagtttttcttgaacttctctcacaagctgaaatagatcccacctgttctagtataggagctttggttcataaggttaaggacccactactacctccatgatttaaaatccttggaattgtagcctgttaaatggaagggacattggagacattgaggggaggctttcctgttgatccaccattacagcaccctgacaggtcagttccctgtagtaacattacagtgtgataagccctagacaattttcaaattcagtttagcccacttggtatcattcggaatttatatatttcaggaactagtatggtacttctgtaatgtgccctttggtgggagaataatgaaggttttgttagcatatagatcttgggttagtagcttttaatttgttacgtgacatctagtgttat

SEQ ID NO: 585119 - DNA, 192 bp, Homo sapiens
ccagtcttccattgttacggctttggcacatacagtataagataaataattcgaccacataattataccaaattcctcttatcaactgtcatactaagttgttcttcatctacaagtatactccgtgataacaatactagggaaaccttgattaaataacagcgtaaaagtagagatattactagtgcaata

SEQ ID NO: 585120 - DNA, 170 bp, Homo sapiens
accggggaagggttattaacagaagtatcgtccaacatagagaatcttagtgtcatgcacgcaggtatggcaaactgcactctccactcatgtgtcagggctcaacgggctggttggtgccactgaagacgaccctggcttgtaactacatttctgctcctttaccttga

SEQ ID NO: 585121 - DNA, 511 bp, Homo sapiens
ccagagaggtcatttagttttactcctgataggtagatgcagctctttcttatatttacttgcgaaagtgcagtggggaagagggaattctagattgatagggctggcgccttctgaatttggtatttgaactaggagtccctatagaggggctgctttatgggaagtttttctctgaccaggtacaacacctgagtttaaaggcctgaaatgctaccatttcttcctctggctcaaaattcttccctgaggagagagttatattcccttatttattgatatttagtccagaacaccagatctaacgaagcatgcgtgtctcttcatctacaggatgcaataggctgattgtatttaaaaatcaaagtacccaaaactgagtcccttgggctcagaaatgtctgtgtgattgggtcagactctgaccaacagattttatgctagatagcacaatttctattgagccttacctgcaacaatgaacccttaaaagatttttttcactcccgta

SEQ ID NO: 585122 - DNA, 774 bp, Homo sapiens
attgatattataggatttgaaaactttctataatcagcaggagtaaaactggctcaaaattcctaggcaagattatgttataatagaaattgatcgtcctaaagcatgctccaccccctttcagaagtttagtcccccaatagcatctttcttgtagatctcttgacctggatggggatctaggccccctaagggcaaagggactaaacataaatcaatgtgaatttttttcccaacaggggttaagggaggtactcctgtctgatatttgaccactagaaagtaatctttttttaccaaaactgtttttctaggtgggtggaaagtgaaactgcccacatccctgttggtttaatcccagagatccatttgccaaccaccgtagatgtcccggttttgtttctgtccttttattatgaaaactatgttaagggggaaaatgtggacttatggtaacccgaggaatccctagcccttgttttcccttagaagacttgtttagtgttttatcagacgtctgttgtagttgtagacaggaaagcgttgtgagaaaaaccacccacctggagccctgtacaatgtttttgccacccaccctgtaaagcatttcttggacagctggcccattaaaaggggttttaccatttaaaaaaaaatgtaactgtgtccttgtttacatctgtaactttttcctcccctgttctcattacacccttctggcgaaatgtaggccaagtagcttcccgttttagaataaataaccctttggattga

SEQ ID NO: 585123 - DNA, 162 bp, Homo sapiens
tagttatatgcaatgtcccattcctcaaaaccaaattactgtgttaggctgttattgcattgctataaataaatatctgagactgggtaatgtgtaacagaaaagaggtttaattagactcacagattctgcagtactgtacatagacgcatggtgtacagc

SEQ ID NO: 585124 - DNA, 134 bp, Homo sapiens
agcccggctacccccaagacccaaccggaaccagccccctatgcggacaagacatcaccatggggacggtggcgcgaaacgccccacaatgccgcacccaaactatgcagacccccagattcaatgggcggccg

SEQ ID NO: 585125 - DNA, 450 bp, Homo sapiens
  misc_feature (120)..(120): n is a, c, g, or t
  misc_feature (129)..(129): n is a, c, g, or t
cagtacataagcttggatctctagagcggcgccgcggcgcgggcgctggcgcagccgcccgtgccgttcgacttcgacgtcgagttccgcaacgtcgcggatctcgaccgcacgattgancgctcccgntgcgggttggatccttttgccgttgctgcaattcctacaatgaattatagttctgaagccttccattcaaaagatgatgcccagtgctccatatgtttaggtgaatacaatgataaagagatactgcgtataatgcctacatgccgacataacttccatctggaatgtatagacgtatggttacagaaacaaactacttgcccaatatgtcttatctcattgaaggaccaacctggtgcaaaatctacagcatcccctctccgtaccctccctcaaatattgggacatgccgagagctctgtcaatagatcgcctcattgg

SEQ ID NO: 585126 - DNA, 919 bp, Homo sapiens
tctcaatcccctgacaaaacacatagcctaccccttccttgtacctatccctatgaggcataagttataacaagctccatgctgcctactgagaaatagacctaaaatcgctcattgtgatactcgttcaatcagacgcacatagccctcgtagtaacagcccattcgtcatccaaaccccgctgtgaagcttcaccggcgcagtcattctcataatcgcaccacggacttgacatgctcattactgattctgcctagtgaaactcaaatctacgaaagcgcactcaccagtcgcatcataatcctctctcaaggagcttcaggatactactcccaggtaatagcttgtgtgatgactttctaagcaagccgcgttaaacctcgcgttagcccccatattaaggctactgggagaagctctctgtgctaggtaaccacgttcgtcctgatgcaaatatcgactctcctactatacgggactcaacatactagtcaacagcccgatactccctctacatattgaccacaggaaaggggggctcaatcatcgaccacattaacaaacttaaaacccgtcattcacacgagaaatacagccttccatggttcataaaagctatgccccatctcatacgtattcctcaaaccccgaagattcataaacgggggttctccctccttaatgaaacgtcaaaagatcctcaccaagctgggaccgaccgtaggaaaacaacacaacgtttgggggggcgcgtcccgcatggaagaccatagacaactttggcgaggaccggaacggacgccacgcacaagcagccaagagcccagcagaattgggggggcacccaaaaacccggggccggtttcaaaccaagggtgcctgcgacacgggacgaaacccgcggaaacagaaagacat

SEQ ID NO: 585127 - DNA, 362 bp, Homo sapiens
  misc_feature (89)..(89): n is a, c, g, or t
acaattcgggcaagctgccgggcattttccccaggattatctttgcatgctccttgaacacctagcatctgaaacaggcttgttgaggntagtaggttggtcccaccaccacaccgttcctaatctctatagagtggcatggtagcagcagtgatatataaatcttcatttgtggggaccactgtgcttcgcattaacagtaattacagttggaatctacctaacattctggtgctgcatccttgtccacgaggcaatgtagagtggcggtgacaatgtttgctgcatgggcgttgtagcctcctatgctcccagccatggcagagcccactaaattcttgtaaatgtgtagaaatggaaca

SEQ ID NO: 585128 - DNA, 516 bp, Homo sapiens
ggttcagaggattcccagaacttatatctagctcaggcattgtaatacaccaatcagcaccctgtgtatagctcaaggtttgtgagtgcaccaatcgacactctgtatctagctgctctggtggggccttggagaacctgtgtgtggaaactctgtatctaactaatctgatggggacgtggagaacctttctatctagctcagggattgtaaacgcaccaatcagcgccctgacaaaacaggccactcggctctaccaatcagcaggatgtgggtggggccagataagagaataaaagcaggctgcccgagccagcattggcaacccgctcgggtccccttccacactgtggaagctttgttctttcgctcttgctactgctagctctttgggtccacgctgcttttatgagctgtaacactcaccgcgaagatctgcagcttcactcctgagcccagcgagaccacgagcccaccgggaggaacgaacaactccagacgcgctgccttaagagc

SEQ ID NO: 585129 - DNA, 528 bp, Homo sapiens
ggccgcacgtgtcgggcgctgtgatgaactgcgtggtatgggccagtcctgagggaagggccttctcgctgtcctcccattgaccatggagaaacgggctccctcaggcccttcaccgaggccactggtcctgtacagcggcttcaccctcacgatctaatcacttcccccaaagctccaccttttaattccatagctttgggggttactgtctcaatatatgaattgggaaaggacgtattcagacaacagcagatgttaagatatgtgtatcctgggacatgggtaaaaggtctcattgtcttgggatgaatgaatagtacatatcatggtctcataataaaccagccaacagtatgctatgggctgaactgtgtccttccaatatccactgtatttggcgacaggtcatgtcaccaggtgattacggtaaaatgtggtcactagaatgggccctattccaacaggactggagtcctaagaagaggagatggggacacagacacacacagaggtacgaccacgtgc

SEQ ID NO: 585130 - DNA, 1111 bp, Homo sapiens
tgagcggggtcgctctcatgcgatcccggtgtggctgtgccgattggtcctgtgcggtcacttagaccaagatgcctgaggaaagcccagacccaagatcaaccgatggtaggaggaggagagttgagacggttcgcctgttcaggcgagacagattgcccagtttggatgtcgattgtatcatcaagtacctttcctactcagaactacagagcaatcgtttcatgacgagagcgtgatttcaaaaactccactcagcatgcaatcggaccacaaatccggtattgtataagcttgagcatgaatcccgaagtgcacaatatacgagctcatggtgacacaggaagctgcactactttacccattatacgcgataccaacaccagaatcgatcccgaacctcatccaccttagtctggtgcgatacccttgggaacttcggaccatgacccaacgtggcttgacgatatagaatccaacttacacgcctttggctcaactaaatacgaccaaacagctcctcggcgaccccacacagggtgttctcaatgagcacatgacctctatgcacggcctcgagcttgccagaattattctccttatcggatcccgaggcccagctttccgagctgttctggggactccactaaatacccttggcgtcttactctcctggcgtctaggccttcggacagatcacactacgtactcacgcctcggctagacattccgactccccaccacacatttacaacgcgacatcgctactcggactgccgaggctacaccggcccatctgccgcgcaaacgttaccccgctctaacgcgccaacagagagagcagccaactcccccacttcccccaccccgcatcgccaagagggccacgcacggccaccgaaaccaaggcgggtctaggcaagcacccaccaaaattggcgcggcctaccaggagtaggacggacaaacacacacacacgacggacgttcaatcaccccccatcacacgaccccccctcgcacacaacagaacaacggaaacccccccacacaccctcggcacatactacaccatctgcgccacccgagcacacccgcatcaccgcgaacc

SEQ ID NO: 585131 - DNA, 391 bp, Homo sapiens
cagactgtgacaggttgagttagtggcacatattgctttactgacctctgcctcccgggttcaagcaattctcctgcctcagtctaccaggagtgtgaggactacgggcctgtgccatcacgcccggctaatttttgtattttctcatagagataaggtttcaccatgttggccaggctggtctttaactcctgaactcaagtgatccacctgcctcggccttccaaagtgctgggattacaggagtgagccaccgtgcccggccatgtctctctttttaacactaatgttaccctgacctttgtacgtcacgagcacttctgttctagaaccttctatctctacctaatgtctctactgctatgacgtggtacagccaaactggtcgaca

SEQ ID NO: 585132 - DNA, 149 bp, Homo sapiens
cttagcaggatctccccgactagcccgacagaaagatgaccgggtaggggtaaggtagacagtgcctttcttgtgtcctttgaaggcttctggcacgtactttcatgtcatttgaacgtgttatccccccctgtcgggctagtcggggg

SEQ ID NO: 585133 - DNA, 1210 bp, Homo sapiens
tatcagtgttcaagcacaggagaccaagcagaaaacatatgcatttgagtgtttgactagttgttgtggttcgtgcacttatagctagggtctctcttctctcctcggtgtgatatcacatctttgtgtgatacgattgacccgtgtttctatgtgtggtccgccctcgtcattgggggtgctcccccttttacgccctcgtagaggtgtttgtgtactactgcgttatttttgcgccgcacctgatttgttcgtattgatggtctcctcccgcttctctctcgccgtcgtttttgggccccgcctgtctgtgttgttccctcccgcaaacgttgtgtgctgagaaaccccccttgttaagagcctccgttggtgggcctcccagtagagcctgtatttgggcggccgccttcctcttcctcccatgagatatgggggggttgtcttccctccggggggtggacccgtgcggtggtgccccggccccgtggggtctgtccccccccccccccagatgtggtgggtgtcgggcttctcctcgtgtgtggtggttgtatcaggaaagaggtcgggggggtcaccacaaaggtgttggtgtgtggggaaccccccgctgtctgggagaatttagaggtggtggcaatatgtttctgcccgcgccggcgttgaggaggacgctgtggaacctgcggttctctagagagtggtgaggcccccccccaccggtggaaaactctctctcttgtgcggggggcaaaatgtgtgaccactctcgtggagaagacgttgttgaacacttgttgaaaaattgtgggccccctctgtgtgacgacgctcttcaatacacagttctcaaagggggtgataatgtatataggcgcgccttctggttccccccgccccccgcgggttttcccccagggtgtctctgaggaggttgcaccccccgaaatgtgtgttagaggtagatatctgtgtgtgtcgtaattcttttcacacaacacacgcacacacaagttcgctcgtgttttttggggccgcggagagagaagaaagtgttttataagtttgtgggaatttgaccttagggtgtatttctcagccccccgcgttctccccgttgtggtgaggttaagaaaagtttgtggggctccctattgaaatttaaagcggtggaacattttgcgaacacaacaatgagatcgcagaa

SEQ ID NO: 585134 - DNA, 94 bp, Homo sapiens
acgactccatgatatgatgcctaatacctcaattttgtcaagggtttggtggactcagtagtattcccttgatgttcccgcgagatctccagca

SEQ ID NO: 585135 - DNA, 210 bp, Homo sapiens
tttaccggcgccatgcggacgagttcaccccgaccatgacggccctggtcaagatgaaaacccgggggggcgagcaggaggtgcgggtattcagtcttcgtggcgccatttgcttggcatgtttgcgcgcacggaacgggccaaagctttccggcgaaaagtcctcgatgtgctggatgagcaagcgcgccagggacagtcgcttggcgt

SEQ ID NO: 585136 - DNA, 89 bp, Homo sapiens
ggcacgaggccgccaggcgtaggcggggtggcccttgcgtctcccgcttccttgaaaaacccggcggccgagcgaggctggaccacata

SEQ ID NO: 585137 - DNA, 852 bp, Homo sapiens
ggttacttcgtctatagctccatggcagactgctggcttctgggcggttatatgtcttttgatttcaagagttaggagctcgagaaccgtttggcaatcatgtacgtacgcggcatgcatgcatcatgcacatatgcatgcaggcatgcatgcatgcacacatcaccccgcgaccattagttggccaagcaagctatgctggacataggtacatcaagaattcctcatatatagactgagcaaaggcattggcttaagaccaatcacgcctggattctccatatattggaataggacgtatatattccctcgacttgctctcagtcacacaacagacacatagtaggaacgaacagcatcctccctataagaccctatcatgtgcatgaacagccctcacgccaatagcatacagttagggaagcacagatatcgaagaggcaaaatctgctccacggaattaacttacatggagatgaacacgcattcttgacacaccaatatagtctcaaatcactcatcccacacagcaacctataaccacccaaattatggacacaagaccggcagaaacttgcgtagcattccattaccacacccaaatatgtactgacctccagaactggaacactcactatacaccatctttcataagcgcaaattccatacaaaacattaactatcccatggccttcatccgccctttccataaggtttaggaataccttaaaccactaccaattctcaacgtccaacttctcaacccaagaaagtcgatcgcactgacaaccacatttacaccgacatacccgccattcactacaacacattatattaactaagcgaaaaact

SEQ ID NO: 585138 - DNA, 364 bp, Homo sapiens
gcccatccggctcctaatggctgtttccaattttggagtgtgtgtccccttgtcagggcccgtctggcgtcaagtacaaaagtaggagtaggctgggtgtggtggctcacccctgtaatcccagcgctttgggaggccgaggtgggagaatcacttgagcccaggagttcaagagcagcctgggcaatgtagcaaggtttttttaactacaaaaaacccaaaaattagctgggcacccctgtaatcctggctcctcaggaggctgaggtgggaaaattttttgagcctgggaggtccaggctgaagtgagccaaaattgccccgctgcactccagcctgggcaacagagcaagaccctgtttca

SEQ ID NO: 585139 - DNA, 104 bp, Homo sapiens
gctcccgattacatcgcgccgtggcctgctcgtcgcgcaggtcggccgggtattgcccagaatctccaggatgctgatgcacaggcgcaggtgccgctggatcg

SEQ ID NO: 585140 - DNA, 250 bp, Homo sapiens
ttagcactgaactctgctttgggtcagcatctcgtgctcagcctctcgagtactgggattagctcctgaataactgggattacaggtgcacaccaccacatccggctaatttttgtatttttagtaaagatgaggtttagtaaagatgttggccaggctggtcacaaactcctgacctcaagtgatctgcctgtcttggcctcccaaagtgctgggattacaggtgtgggcctcccaaagttctgggatt

SEQ ID NO: 585141 - DNA, 229 bp, Homo sapiens
ggagtagggggtgtgggtgtgtaacagagaccgagagcatgagtggggtgtgctcgtgtgcgttggatcgtgtgtgtgtgtgtatcttgtatatgtgtgcgcagagtgcatcattttcagactctactatttccgtcaagtttctgtttgatttggatcatctcaggatcggattctgttttagagtgtttctgggccaggaaccgggcccctgccctcctctgcacct

SEQ ID NO: 585142 - DNA, 186 bp, Homo sapiens
agctcggtacttgactctcacgttcagtgatctcccacctcagtcctatgcctggactgcaggcatgcaccaccaggcctggcaatttttgtatttttttgtagagacagggtttcgccatgtctcctaggctggtcttgaactcctgagttgaagcgatccacccacgctggcctacagcacatg

SEQ ID NO: 585143 - DNA, 225 bp, Homo sapiens
ctccctttttttttctttagtaagacgagggagtcaccggtgttagccaggagggtctcgatctccggacctcgtgacccacccacctgggcctcccaaagggcggggattacaggcgtgagccaccgggcgggccaggagggtctacagtttacaaagcctttccataatagatatcactccatgggagccggtgcagaaggaaagagttctgaaccgacggga

SEQ ID NO: 585144 - DNA, 607 bp, Homo sapiens
  misc_feature (3)..(3): n is a, c, g, or t
  misc_feature (25)..(25): n is a, c, g, or t
  misc_feature (32)..(32): n is a, c, g, or t
  misc_feature (64)..(64): n is a, c, g, or t
  misc_feature (109)..(109): n is a, c, g, or t
  misc_feature (160)..(160): n is a, c, g, or t
  misc_feature (181)..(181): n is a, c, g, or t
  misc_feature (196)..(196): n is a, c, g, or t
  misc_feature (263)..(263): n is a, c, g, or t
  misc_feature (313)..(313): n is a, c, g, or t
  misc_feature (555)..(555): n is a, c, g, or t
  misc_feature (582)..(582): n is a, c, g, or t
  misc_feature (591)..(591): n is a, c, g, or t
  misc_feature (604)..(604): n is a, c, g, or t
ccntgaaaatcttcttcttgacgantacagancatgagcacgcgcaacttcacaggggaaaatntggggaaacagcatgcagcccgcgaaacctttccccatgaatgcngcagagcccccttgagcgagtcgcaagtctctcttggtgaaagtggaactntgccaaacttgggaatttccnggaacagggggcccnagggtggtcagcaacctgctgagggaatcagcttgcatgaatcaagcttctgcgggccaactggtcnggtctccaggttctcgccttggttcacgtaggcttggcagggcagggtcngctttcagctttgcagtggagtcagagtagggtctgcgcttctcctgccactcgaggacgccgctccaagccagcagcttgttgctgagccggtgctcgctcacggcccagacccccgagggtgagcccaggtgaggagggaccgatgggacccagtgccccgaagacccgagcaccttccatgggagggccgagcgggcccggatccgcggaggctgcgggcctcgggggctggcaggccnaggagcgcgagcggacggcgcgcaccnacagatgtnggcggagggcggncgc

SEQ ID NO: 585145 - DNA, 899 bp, Homo sapiens
gacagttggcacaagggcaaggtgaccacatgttaattgagtggctgatggcagccatacggactgtttggaatgatgctgcagagataatagaaattgtgagtaaatggcaatcatatactgatttggtgcaggtactccaggagatgggtatgtggcaggctatgtttgatctgaatacccaggggctgaatgatgaacattttacctcccacatgagggatcttgtgctgggctcagcgcccctgagtgcttttggctctctagctgctgttccactccgtatgtggggtgccacatacatgaagtgactactgctatggcagccctcagggaagcagaaggcctttggcaggactggggaacccatgcgataaagaaggggaaggtgtcccctctgcaggtaaccaccccaggagatcaacaggggccccagcgggtgacccatgtgcagcatgtggattgatttaattgcagctggggttgcttgggagaaaactgacaggcaacccaatgggatgccgttggctctgtggaggcaactgtccgcagagcagcaattccagaacatgtccgaaagggggcaaaatactcttgatcaacccagccccagccagatgctgtactcaaggactgtttgctcgacggccaaagagaccagaccttcctttgaccgggaactggccaaggtgcccagcagaggccacgtgtggaactggcaatccattggcctcccaccaatgtacagtgggtcctagcactggtagatactgggtgccagactgccggcttcgttctatggaagtcccggggtaagtttccgcgccccagcttgcttcattgcatggttcttggcggccagttggtgacgttaacaccggtgtctctgcatcttcgca

SEQ ID NO: 585146 - DNA, 1243 bp, Homo sapiens
  misc_feature (409)..(409): n is a, c, g, or t
  misc_feature (646)..(646): n is a, c, g, or t
  misc_feature (663)..(663): n is a, c, g, or t
  misc_feature (704)..(704): n is a, c, g, or t
  misc_feature (719)..(719): n is a, c, g, or t
  misc_feature (1064)..(1064): n is a, c, g, or t
gaagatgccgatcgggaaggagagggcgagggaaagacacggtggctccggacccagttgtcgtgaagatgcaggaggctagatgaaagatggtgaatcggccgctgttctggagcaaacaggccgtacacggaagtttatggcgactgtgtagcaggtaaacaattccgagcccacgagagacagcagtaccgtgcaactgcgtcctatgtgtgggagaactggtgcccgactgatgatccagggtatgtcaggcgtggcgagcagtacgaccgaatccattctagttacacgcctggccgtagaacaatgctggcactctcatgtcggacttaagcccaggtttcaccgcgcgaagggactccctggaatcccgtgcatagacgacgtcttcacccgtcagtcgtgncattttagatggcatgggcggccatcacagggatacaagtatcctaggcagggagcagatacggcacacgcatgagaagagagcaatgaaggaacgtggtgttgcgtcacccgtgtggctcggcaaggagaaggacatggacctgcatggagctagagcggggatcgtaccctaagcgtagagaaagaaccacgcctgtctcgtgtcgatgtcgagcgcagttttaatcgacctcgntcttaccctacctcatntgagctgtgcacgtagaccgagaggacaccatgcattcgantacctgtgctgaggnttgcacttggccaaccaagctggacctgctgagaactgcacgaatttcctgaagaccgtggcggtttcgttacttttccttgtgtcccattgcaacacatagtcgattccggtggacagaaactcggtggtggggggtaccccccttgttagcattgtctactgtgaattctaagagggggcggcagagaagtgtccgaacggaaacttgggttggaaccggtacttttagactccccacacccacggggacatgtacccctttgcaacgcggaccgtttgatcgtgcgcggttttcaacggaaccgcgggggtggtaaaccttcggggccaccacaacgaaaanaagggccgtccgtttttggggaactttacacgacttgggttgtgaaaagccttaattctaagggaacccgaatttttacatgagtgccatcgaggattgagttgaatgtaaggcaattgccgtccagattcaatagttgcggtgcgttggcccagagggctccctttggtggctcccta

SEQ ID NO: 585147 - DNA, 319 bp, Homo sapiens
gagctcgaaccggcacgagcgcccaagtggctgggatcacaggtgtgacaccacgcccacctgtgtatgtatttttagtagagatggggtttgccatgtaggccgggctggtctcaaactgctgacctcatgtgatccgtcaacctcaacctcccaaagtgctgggattacaggcttgagccaccacatccagcctagcctttaaatttaaataccctaaagtttttatagtaattgaaaaagactatgcctctctattattataccttaaggaaccagggcaaagagaaatgaaagattaattcttctactctactac

SEQ ID NO: 585148 - DNA, 457 bp, Homo sapiens
tatactaacataagttctactatagggatgatagataggatccacttgagatgtgcggagttcagttatatgtatgggattatttaggtagtgggatgttgagctagaacgcttaacttaattggaaggctgcttttaggcctactatgggtgttaaattttttactctcactacaaggtttaatcctagatgtccaaagagctgttcctctttggactaacagttaaataaacaaggggacttagagggttctgtgggcaaatttaaagttgaactaagattctatcttggactaaccagctatcaccaggctcggtaggttagacgcctctacctataaatcttcccactatttagctacatagacgggtgtgctctttaagctgttctaaggtagctcgtctggttacgggggtcttagctttggctctccttagcaagttatttctagttaat

SEQ ID NO: 585149 - DNA, 407 bp, Homo sapiens
gggggcctcatatagacacgccaggatatggagggtcttctactattaggacttttcgcttcgaagcgaaggcttctcaaatcatgaaaattcttaatattactgctgttagagacctgcagtgagcctacagatgataggatgttccatgtggtgtatgcatcggggtcagtccgaatactgtcggggccatccggatcaggccgagcaaagtttgtgggcagcaacagttcagcattcacgcctgatgaatcatgcatagtgcaaatggcatttgggcagtcaggttgggtctagggtgtcagccggcagcataggggaactcagtgcaatgaagcctcctatgatggcaaataagctcctcatggggtctgaacaccagtgcagggtaccgcagctcgaatgcg

SEQ ID NO: 585150 - DNA, 592 bp, Homo sapiens
gcaactgcacagacgagtttttattctgctgtctaactcttgtaaagcacatggtaagatctttgccgattatcgggtcgaacgaaaatgccaaaagtctaatgaagccggaatgcacccctatatggctgggagttgattgtgccaacactggatgaattagaccaaaagatgacagaagctgaaacagaaccgcatgagggaaagaggaaagtggaactttttgtggtccatcttcaggagccaccaccaaaaaactcgttacatcttcgaccttttttacaagtggaaagccatcagcagagaactctatgaatatttgattaaagaaggctatgcatacaaaaacctgtttcgcaacatggaaccaacttcaggacgaacttggattgccgggtgcccaaaccaagctggaagtggtccgaatcatcgagtgcacacactgcggctgtcgaggatgctcatggctgaggctggcgcgctccaccctgggcctctggacttccgaaggttcctggctgttacgccaccccccttcttggaagcaactgggcaatgcccccaagcccccgattgggagcaccggctctcc

SEQ ID NO: 585151 - DNA, 558 bp, Homo sapiens
gtttcttgtaacagtcatagtcatctgacaaagtaatggcacacttgtctcgagtccacttataagtctttatatctatcctatggttttggctaatttacacagactagaatctagttcagggatgaatggtatcattcccactaaaagtctcaaaatctgatattatctgatagagacacggatctggtgctactcatgcctggctggtagtgtcctggcacaatcaccgctcacttcagtgttgaactccggggctcaagctgatcctcccaactcagccgtcgcagagcagctgagtccacaggtatgtgcgaccatgtccgcactaatttcgttttcttggtagagatggggtcttgccatgtagcccaggcgggtctcacactgctggcttcaggtgatcctcccatctcagcatcccagagcactgggattacaggcatagccactgctcccagccctataaaagtagttttaaagtggggaacaaaagagacatcgtacaggaggacccaggtgctgatggctcatttcaagtctactccttcatatgtt

SEQ ID NO: 585152 - DNA, 153 bp, Homo sapiens
cacatatctgctgacttctgaataatatctaacagcaggttcttctattttggcctctgaatattctaatgtgcccatacaaaagtagcactaaaatctttaatcaaacagaagagaagcctgtaacagcgaagaacacacatcttgaatctg

SEQ ID NO: 585153 - DNA, 709 bp, Homo sapiens
tgggtctgggaggatgggggaccccaaaatccctttgggcagcagaggtgaaacgaagtcttcacaaaagtagtgttctaagcaacagccaactcagttttaatcactctccagaaaccccgtggcttattgttgggatttgtgcaacccctccccaatctcaatgtttccccgaaaaactcaggtgaaaaagggttttgtgagttctcacacgtgagtgggtggctcgggtgaactcaggctcataggaaaattgcgacctctctctcaattaacgcaggccctatattctccataacctgtgatctctgtggtcccccagagaaagagaggtctcatatccctgtggaggccacggcaagaaaaaatatgtgtgacaagagacacctgtgctccagaaatgtgtgaggggcttcatcacccctgtgtgtgtgaaaatgttgtggaaagagagcgccggagggggggtctcacgaggctattagcgccccgtgagacgaagtgtgggtgtagatatatccccccgcgtggggcctgagtgtgtgtagcagccgcctttttacaaagcagtgtgcgcggagaagaaagtgtgggttttataaaagaccccatattatatttcctcccttatttttgtggatgtgagagcccaaattgtggggaggagggtatcacccgtgtgcatgtgacagcgagagagcgcggggct

SEQ ID NO: 585154 - DNA, 414 bp, Homo sapiens
aggaagaaggagcaagaggaaagacaacaagagcagaagaggaacacgcgaggacacacgcagaacaaacgcaaagagaaggaacacagagagaaaaaaagaacaagccagaaaaaaagaagacgaggagggacaggcgagggcgagcgcatggaacaaggcggggagcaagcagagcaacgggcgcgcgacgcgaagacgaggcaggaggagaaagcaagcaccgacagacagggagagaaaccgaggatgcaagaaaagaagcacgagaaagaacagcggagaaagagagaaaggaagacgaagagagaggaatgagaagagagaagcaccagccagaaggaaagaaagagagagagaggagcagcaggagagcagaaaagcggagagagagaacacgcagcagagaagaac

SEQ ID NO: 585155 - DNA, 406 bp, Homo sapiens
  misc_feature (60)..(60): n is a, c, g, or t
aagaatttccaacccctcaaacatcacccccgggctggcccagttccctcagctggaaanccccccgtttggagaagagatgccctgttgtttcaaaaaacccaacattaaggagtaccaaagatagtttcctcctaatgagaagtttgattttccgcaacccaccccaaatatcactttctttgtttatgtcagtaatttcaccctggcccatcaaaattcaggtgcaaactgaacaatgaggacgcatggacacaggaaggggaacatcacacaccagggcctgttgtggggtggggggaaggggaagggatagcattaggggatatacctaatgttaaatgacgagttaatgggtgcagcacaccaacatggcatatgtatacatatgtaacaaacctgcatg

SEQ ID NO: 585156 - DNA, 749 bp, Homo sapiens
ctaattatgtatttttaatagagacgaggttttgctatgttgtccaggttggtctcgaactcctggcctcaattgatccgcctgccttggtctttcaaagtgctaggattataggcacgagccactgcacctggcctcaaaaatcatttttaaaagaagcagtatattagctctgggtcttctcatgactaaaatgactatttttaaacataagaccatattttataaatgtacagataattcaaatctattatctaatgtattaggttaatttctatttgttctatacttttttttttttttttttttggaaatggagtttggcttggtcgcccaggctgggagtgcaggggtcgcaatctgggctcactggaaagtttccgcctccggggttcatgccattcctcctggctctcggccttccaagtaagtcggggactacagtggtgcccgccccgacacctgggctatattttctaaacaaatattattttagtagagacagggttccaccgtggtagccaggtgggtctcgattctccgtgacctcgatgatccgcccgtattgggcctcccaaagtgctgggatacacagggcgtgagcccaccgaacccgggcctatggacattctttcaacggttcccagattccctcggggtgtctagcaactcgcctttaacttgtcaaacgactacttggctaattggacttgaaccatggctttgcgggcctaccatttgtctgtgtc

SEQ ID NO: 585157 - DNA, 687 bp, Homo sapiens
tgcggaggggccgatggaaagggaaaggtggcctgtcctcccctcccgacaccaggtctagctgcgtgggtgtgcagaggcaaagcggtgtgtgatggaatggctgggagtgtgaggggcatgtgagactgaagccaacctcgtacttgaatgatgcatgcttgtcagttgcatgtggtgatgtgatgccccatgcccctgctgactgatggagtgaatgctgtgagctggatgctgctgagtgcatgtttgacctgtgcctggcagtactgtggccctgcacctggtgatcacacggctgcaagctgctggtgtcggtgccaatgcatgatgggcttgtgatgcctcccccagaggtgttggcatggtgctgaatgacccaccccggagacccccgcttccagtgcatgtctctggcatctctatacccctatgaggcaccacgtaatgacctcctgcccttagctctcttgctcaccacccaagaacctcaggacagaagcgatgagcccattgctcctgctcagctcaggcccggcttgcggaggaacccttggcaggcatgaacctggctggtgtccagaggctcaactcctccatctaaccagcaggctcccagaggtccccgggaatgagcctgcgcaaggcttaagccagagtgcttctagatggagagtggtcactgtg

SEQ ID NO: 585158 - DNA, 152 bp, Homo sapiens
tagcaatcgtcctgcctgcggtctcgtagtagctgggacttacgggcatgtggcacgcgggcgggctaacttctggtagtttgtagtagagacagggtttcaccatgttggccaggctagtctcgaactcctgacctcaggtgatccgcccg

SEQ ID NO: 585159 - DNA, 548 bp, Homo sapiens
cagatgtgttgcgcgtggattcgattgctgaagaagaggtgaatcatgggtgccatatctatcgatgaaattctagattagtgctatccttagtaactatgcagtttatggattgagggatctgaactataaaaccaggcggcagcctcctgcatcctgtggtttatactaccgctatcattctcctcttatgtctcttagccgtcatttgtcagttacatataccatcacagttttgattagaatcagccttcaaagagctggcacatgcttggtgaacttgtgctttcatattttcctaacctgtgtggtcctttgtggcgacggaataaacccagactaacggaattgccaagcatctggcccaaggcaagatggggaataaattcttcactaatttccaccctctgccacaagtactatgggtagagaagtgcacagctcgaacacttctacaggcaagtcactaaaaaagctaaaagatgccaggatcctgattgaaccaacactcaacaagaccaatgctcagatttacctgattgtggtgg

SEQ ID NO: 585160 - DNA, 752 bp, Homo sapiens
attcgtcctttacatcagccttcctcgttagatgcaagtcctttatatcaaagatctattgacctgtaccattcaagagatgaaagagcagctgaagcatgatcaggacgtcaagggaaagggctattctcctgtagtgggacaaatttattgtgcaaacctctggagacaatttagggttcgttgactcgcgtaatacacttcagattttcttggagagactaaagaatgaaattaccaggtgaactacagtaaaggcatcgacactggatagcttgggtcacctttgaagatagatttagaggcctgttctgggagacaggggttcctaatccttgcttcatttcttagaaaaaaccagagagctttgagactgggtactctgttctggcccttgatattctaataaaaaactatagtgacagcttgacagctgccatgcattgatgcagttctagatgagctcccacctcttatcagcgaccagtgatatgcatgtttcacaaaatggccatcagtttacttacgcacttgggcaaacagtatatccctcctccctttcaacagatcagtggatccgattctcaatgaacttatggacttgtgacgatcacccttatgcacggggggagctcttagtgcagtggttagacttgttccaagctctggttgtcaactggaacacataattgaggatacatggattcgagcgcattgccgactggtgccggttaactcttccgagcaacagt

SEQ ID NO: 585161 - DNA, 933 bp, Homo sapiens
  misc_feature (29)..(29): n is a, c, g, or t
  misc_feature (223)..(223): n is a, c, g, or t
  misc_feature (226)..(226): n is a, c, g, or t
  misc_feature (230)..(230): n is a, c, g, or t
  misc_feature (255)..(255): n is a, c, g, or t
  misc_feature (259)..(259): n is a, c, g, or t
  misc_feature (267)..(267): n is a, c, g, or t
  misc_feature (278)..(278): n is a, c, g, or t
  misc_feature (281)..(281): n is a, c, g, or t
  misc_feature (300)..(301): n is a, c, g, or t
  misc_feature (313)..(313): n is a, c, g, or t
  misc_feature (327)..(327): n is a, c, g, or t
  misc_feature (330)..(330): n is a, c, g, or t
  misc_feature (346)..(346): n is a, c, g, or t
  misc_feature (348)..(348): n is a, c, g, or t
  misc_feature (354)..(354): n is a, c, g, or t
  misc_feature (368)..(368): n is a, c, g, or t
  misc_feature (372)..(373): n is a, c, g, or t
  misc_feature (376)..(376): n is a, c, g, or t
  misc_feature (384)..(384): n is a, c, g, or t
  misc_feature (395)..(397): n is a, c, g, or t
  misc_feature (402)..(402): n is a, c, g, or t
  misc_feature (407)..(407): n is a, c, g, or t
  misc_feature (424)..(424): n is a, c, g, or t
  misc_feature (428)..(429): n is a, c, g, or t
  misc_feature (436)..(436): n is a, c, g, or t
  misc_feature (438)..(438): n is a, c, g, or t
  misc_feature (441)..(441): n is a, c, g, or t
  misc_feature (447)..(447): n is a, c, g, or t
  misc_feature (451)..(451): n is a, c, g, or t
  misc_feature (460)..(460): n is a, c, g, or t
  misc_feature (470)..(471): n is a, c, g, or t
  misc_feature (474)..(474): n is a, c, g, or t
  misc_feature (482)..(482): n is a, c, g, or t
  misc_feature (491)..(492): n is a, c, g, or t
  misc_feature (508)..(508): n is a, c, g, or t
  misc_feature (577)..(577): n is a, c, g, or t
  misc_feature (586)..(586): n is a, c, g, or t
  misc_feature (601)..(601): n is a, c, g, or t
  misc_feature (932)..(932): n is a, c, g, or t
gataatgaagctgtattgattgcaggagngggtgagggtgaagcagggtccagctgtgaagtgcttgggcaggagaggggatcttccagtgggatctgtgtccacacggggggcctcctaggcctgagcggggctgggcagcctcagttcttggtgcgaaggacctgctcgtgggtggacaccaccttgccatcgtgcacatccatgaccttggtgcggattnggnggcnggaggaggtcacatctctggatgantgcnatccagangagaactgggnggnggagaggtgggcgtcctcnncctccagcaggnggcggtaggtggcnatntcttgctccagccgcntnttcacntccagcaggatttngtannccnggttctgntgctccatctnnnagcgnactgngccagctgctcctccangctnncaatcangnccnggatcngggncagctgcangcagtagcgnnctntgtctccnccaggtttnnctccagggatgctttnatgctgagctgggactgcagctcaatctccaggttctgcatggtgcgccggagctccgagatctcgctnttgccgctnttcaccagctcgctnttggtggccacctcgcggttcatctcctctgtcttggtgaagaaccattcctcggcatccttgcggttcttctctgccatcttctcatactggtcacgcatctcgttcagaatgcggctcaggtccacgccaggtgcagcgtccatctccacattgacatctccacccacctggcctctcagggcattcatctcctcctcgtggttcttcttcaggtaggccagctcctccttcaggctctcaatctgcatctccaggtcagctctggccagggtcagttcgtccagcaccctgcgcaggccattgatgtcggcttccacactcatgcgcng

SEQ ID NO: 585162 - DNA, 976 bp, Homo sapiens
  misc_feature (266)..(266): n is a, c, g, or t
  misc_feature (269)..(269): n is a, c, g, or t
  misc_feature (273)..(273): n is a, c, g, or t
  misc_feature (298)..(298): n is a, c, g, or t
  misc_feature (302)..(302): n is a, c, g, or t
  misc_feature (310)..(310): n is a, c, g, or t
  misc_feature (321)..(321): n is a, c, g, or t
  misc_feature (324)..(324): n is a, c, g, or t
  misc_feature (343)..(344): n is a, c, g, or t
  misc_feature (356)..(356): n is a, c, g, or t
  misc_feature (370)..(370): n is a, c, g, or t
  misc_feature (373)..(373): n is a, c, g, or t
  misc_feature (389)..(389): n is a, c, g, or t
  misc_feature (391)..(391): n is a, c, g, or t
  misc_feature (397)..(397): n is a, c, g, or t
  misc_feature (411)..(411): n is a, c, g, or t
  misc_feature (415)..(416): n is a, c, g, or t
  misc_feature (419)..(419): n is a, c, g, or t
  misc_feature (427)..(427): n is a, c, g, or t
  misc_feature (438)..(440): n is a, c, g, or t
  misc_feature (445)..(445): n is a, c, g, or t
  misc_feature (450)..(450): n is a, c, g, or t
  misc_feature (467)..(467): n is a, c, g, or t
  misc_feature (471)..(472): n is a, c, g, or t
  misc_feature (479)..(479): n is a, c, g, or t
  misc_feature (481)..(481): n is a, c, g, or t
  misc_feature (484)..(484): n is a, c, g, or t
  misc_feature (490)..(490): n is a, c, g, or t
  misc_feature (494)..(494): n is a, c, g, or t
  misc_feature (503)..(503): n is a, c, g, or t
  misc_feature (513)..(514): n is a, c, g, or t
  misc_feature (517)..(517): n is a, c, g, or t
  misc_feature (525)..(525): n is a, c, g, or t
  misc_feature (534)..(535): n is a, c, g, or t
  misc_feature (551)..(551): n is a, c, g, or t
  misc_feature (620)..(620): n is a, c, g, or t
  misc_feature (629)..(629): n is a, c, g, or t
  misc_feature (644)..(644): n is a, c, g, or t
  misc_feature (975)..(975): n is a, c, g, or t
acaggacctcccttgtacgtggtgttattattgaaatgtatgtttgagctcaaaaggcccgaccaccccccttcgggcgggtgaagcagggtccagctgtgaagtgcttgggcaggagaggggatcttccagtgggatctgtgtccacacggggggcctcctaggcctgagcggggctgggcagcctcagttcttggtgcgaaggacctgctcgtgggtggacaccaccttgccatcgtgcacatccatgaccttggtgcggattnggnggcnggaggaggtcacatctctggatgantgcnatccagangagaactgggnggnggagaggtgggcgtcctcnncctccagcaggnggcggtaggtggcnatntcttgctccagccgcntnttcacntccagcaggatttngtannccnggttctgntgctccatctnnnagcgnactgngccagctgctcctccangctnncaatcangnccnggatcngggncagctgcangcagtagcgnnctntgtctccnccaggtttnnctccagggatgctttnatgctgagctgggactgcagctcaatctccaggttctgcatggtgcgccggagctccgagatctcgctnttgccgctnttcaccagctcgctnttggtggccacctcgcggttcatctcctctgtcttggtgaagaaccattcctcggcatccttgcggttcttctctgccatcttctcatactggtcacgcatctcgttcagaatgcggctcaggtccacgccaggtgcagcgtccatctccacattgacatctccacccacctggcctctcagggcattcatctcctcctcgtggttcttcttcaggtaggccagctcctccttcaggctctcaatctgcatctccaggtcagctctggccagggtcagttcgtccagcaccctgcgcaggccattgatgtcggcttccacactcatgcgcng

SEQ ID NO: 585163 - DNA, 344 bp, Homo sapiens
gttcacaatgttgattctgatgacctcattaccatgggatccaaggacagtaagctacagttaagttactaaagaaaactgacattccatctgtctttattgttgaatcttcagttaatactctgaaagctgaattcgcatatgaacaagggggccaccttatcttagtcctagaattcagtctaccttgggcatactaccttattccattccttatcatagtgggcatctgtctcatcttgatagtcattttcatgatctcatagtttgcccaggataaacatagagctctaagaaacagacttcgtaaagatcaacttaaaaaacttcctgtacataaattc

SEQ ID NO: 585164 - DNA, 648 bp, Homo sapiens
gcgctaggccccccgtcccggtcatggccatgctcaggatccagcccgaggcccaagccaaggtggtatgtgtttcgtgaagacctctgtaccaagacagagaacctgctcggtgagctatttccccaacgaagatttctgagctggatgcatttgtataagaggagccatgcttctcaatgaagccaagcttgagcaattgtgaatggccccgattggtacatctcgcagtgcctgtgatcctacgtcaatggacgaaatgaggaaacgcaggacgcggagagaagagcatgcatggatgaacggaatgacaaaggcatgaaacacgaacgacaggggcgaggactgaacgagcagaagggtccgtcccgtgttggtcccacgttgaacctgtcaactgacaacacgagtcgctggatccgttactgcagtcgccttgaacgcgctgaggatcaacggactgtcacttgacgcagtctcaagcctggatcaccaaccttggcttggcagcatgctagcatcaccgtcggaacttagacggcatcggctaaccaagtatattgcgcagatggcatagtcccaggcagcaaccggtgtcatagcagcttgcatgaacctagctctcccaacaccgaagcctacgcacag

SEQ ID NO: 585165 - DNA, 485 bp, Homo sapiens
  misc_feature (12)..(12): n is a, c, g, or t
  misc_feature (25)..(25): n is a, c, g, or t
ctgttagaggcncaggctgtatgcntgcggtccttcctccggccagagtggaggcccaaggctgctagcacaggtggaaggctggggcccgggggcgggtgctctgccgggggctcctccgtgcttctctcctaagttctctgagtgcagggagcggacagagatggcggagtcggagcggcggggagtgctgatggggggcatgctgtcctcctcgtcccgccgcgagtaggcaagggtattgaagtagaaaggtgtcatgcagtactgcttgtaggtactggtcctgtcagcttttgtgatggtggtgccgtctgaaaaggcgggtcagaaggtcgtttccattatggtccctgtggtaacgtctggggtggtaaaaaggatgggccccccgtagaattggttgtaacgggcaatattgcttgagatcatgttctagagtaggcatgtacggtccttgggaagcacctcccgcccgcggccgc

SEQ ID NO: 585166 - DNA, 938 bp, Homo sapiens
  misc_feature (751)..(751): n is a, c, g, or t
gccagagcctcctctctcctgtgcaagatggcaactcttaacggaaaagttcattgcaccagttgcggaagaagaggcaacagttccatacaataagatcactgtattgcgtgtgtttggacaagttggtatggcgtgtgctatccagcatgctgggaaagtctctggctgatgaacttgctcttgtggatgttttgcaagataagcttgaggacgaaatgatggatctgcagcgtgggagcttatttcttcagacagctaacaattgtggccacgatagaagattattctgtgaccgccaattcataagattgtagtggtaactgcaaggagtccgtcagctcgaaggggagagtcggctcaatctggtgcagagcaaagtgttgatgtcttcaaattcattattcctcagatcgtcaagtacagctcctgacttgcatcggtaatcgtggtttccaacccaagtggtacattcttacgtactgttacctgcgaaactaagtggattacccaaacaccgcagtgattggaagtggatgtaatctggattctgtagatttcgctaccttatagggtgaaaaacgtgggatacatcccagcagatggcatggatggatctgggggaacatggcgactcaagtgtggctgtgtggagtggtcgtgaatgtgggggtgtactctccacgaattgaatccagaaagtgggaaccgacaatcgatagtgaaacatcggaaggagtgctagatggtnttgaaagtgccataagtcatcgagtcaagtgttacacgggctatggtaagtgtgtgtctatgaatccggcggatccatcggaataccggtaccctggagggtttggtgaaaaactcacccaggtcaagccgggaacgttccaaaagatagttccaaaagacccggaccaggcactggccggaaaccc

SEQ ID NO: 585167 - DNA, 135 bp, Homo sapiens
tcagaaacagtgtaccaccgcaaacgattatccgcggcttcggctgcggtagatgtgacttcggtcacacggcgccccgagcgcggtctgcgcattcacccaagacgagcggcattatgctgaataataaagata

SEQ ID NO: 585168 - DNA, 177 bp, Homo sapiens
  misc_feature (159)..(159): n is a, c, g, or t
tgggcattgccgatccgcaatggggcgagcggcccttcgccttgttggtggtgcgtgaagggcatgtgatcgatgcgcgagagctcaaggaacacctcaagccttttgtcgagctgggccatttgagacaagtgggcgatcccgaagccagtatcgccngttgttactgtaaattcc

SEQ ID NO: 585169 - DNA, 347 bp, Homo sapiens
ttaaagtcagaatcatagacgatcccccgtatgggtccctgcttgctgctctatctgcttgtacatctcgagctgcatgactatacttgtaccttcgagagagccctactttaccctatctgtaggtagctcctgtttggttcaggctctaggcggtattgatagtcttttctagtggagtctagatagtctttattccaacaacagttatgcccagacggcagagaggtaggcgtacctagattatctacctataggtagcctataccttacgcaggtatcaggggattgtacacggaactagtagtgtagccaccgatagaggttagcatacctatatgagaatt

SEQ ID NO: 585170 - DNA, 872 bp, Homo sapiens
tgacagataaagctaggtgctgagatctggtttgccctctttatgatgtcccatcggtactagaaagtgaagtcatgctccaatttggaagaggagagaataactggctgaggggtgagaaagacagaaatagctcgcagctcttttttttttttttttccaacaaagggctctcaactctggttcccccaggctgggatgtggcagtggactatggtatccacggtattcactggcagtctttcagttttaaaaacagtttttaattaactattttctcttggtgggaagctggttatttctaaccttaagtaacttcattttctggctggggtctggaaagataccttctagtagtgggcaacttggtgtcaagtagagtcatggggtctcttggtaaccttaccccttatattaagggaccagcggggtgcgggcttacaataaacacacttagggtggccacttcagctgaagacaggggacaaactaagatagttctgaagggtaaaaaaccaaacaaaaaagcaaaaaacaaaaacaaattttagataccaagttatgctgaatggttgccttagaatgtgtgttttccgtggttcaggaagaggtaggtgtgggacccctatttaaattactaggggttcggagggagggtctggaatcgaaagtttttttggtcttgacctggtctggatgtggtctaaaatcctaaggtcaaggggggtgatctaaggggggggggggggcctcgggtggttgggaacatggtgtatgtgggggttttcccattggaagggggtgtgtacacagggggtctttaggcaaacaagtgtggtagatagataggtgaagagggccgcttgtagaac

SEQ ID NO: 585171 - DNA, 377 bp, Homo sapiens
taataaaattgatttgtgtacccccaatctcaagagcttcataagaatggctccaaattttaaaaaaaaaaagggtaaatggtatatgaaataaaatataaccagctcaaggaaagtgtgcttcataaaataccggaagcttcaacttcttaagtccgagtttcctgccagatagtaaccatccattcacaaggtatttttcttaaagggtgtaaactctggtttgaaaattcttcagtcacagacgcagcctacacatgccatttagaacctgcacacactctatatgcgcgtgaaagattacacttagcgcacagacacaacgagtttctgagctcctcagtagtctcgtgtcttttataagtctcgctcgtgcc

SEQ ID NO: 585172 - DNA, 950 bp, Homo sapiens
  misc_feature (2)..(2): n is a, c, g, or t
  misc_feature (66)..(66): n is a, c, g, or t
  misc_feature (135)..(135): n is a, c, g, or t
  misc_feature (137)..(137): n is a, c, g, or t
  misc_feature (146)..(146): n is a, c, g, or t
  misc_feature (149)..(149): n is a, c, g, or t
  misc_feature (159)..(159): n is a, c, g, or t
  misc_feature (182)..(183): n is a, c, g, or t
  misc_feature (189)..(189): n is a, c, g, or t
  misc_feature (208)..(209): n is a, c, g, or t
  misc_feature (212)..(212): n is a, c, g, or t
  misc_feature (263)..(263): n is a, c, g, or t
  misc_feature (297)..(298): n is a, c, g, or t
  misc_feature (300)..(300): n is a, c, g, or t
  misc_feature (319)..(319): n is a, c, g, or t
  misc_feature (347)..(347): n is a, c, g, or t
  misc_feature (349)..(349): n is a, c, g, or t
  misc_feature (351)..(352): n is a, c, g, or t
  misc_feature (356)..(356): n is a, c, g, or t
  misc_feature (364)..(364): n is a, c, g, or t
  misc_feature (366)..(366): n is a, c, g, or t
  misc_feature (368)..(368): n is a, c, g, or t
  misc_feature (371)..(371): n is a, c, g, or t
  misc_feature (374)..(374): n is a, c, g, or t
  misc_feature (383)..(383): n is a, c, g, or t
  misc_feature (403)..(403): n is a, c, g, or t
  misc_feature (414)..(414): n is a, c, g, or t
  misc_feature (419)..(419): n is a, c, g, or t
  misc_feature (868)..(868): n is a, c, g, or t
  misc_feature (941)..(941): n is a, c, g, or t
anaaatcctgtatgtagaaaactataaggaattcacaaagaaactactacaactagtgaataaaanaaggacgaaggatacaagaacaatggacaaatcgattgtatttctacaggttagcgttaacaacctgananccaaaattnganaacacttccnccattcaagacagcatggcaaannaataanatacttggcaataaatttnncanaaaaaattcaagactcgtacaccgaacaactacaaaacactgctgagaganattaaatttagagacctctgtgtcatggattggnnanctcaacgttgttgacagtnagtctccccaaattgatctataggttcnangnnattnctaccatntntnctnctnttttttttntttttttttttgctgatatngtcaatttgtntggtnctgtacaggtcccggcatagtcaaaacattcctgaaaaagttagagggcttataattccaaatttcaaaattcactataaagctacagtcagtaagacagtgcagtattagcatgaaggatacaccttcagaacaaaagagaactcagaatccggaaataaacccttatatttatggtcaattgattttcataagatgctacggcaattcaataggggagggacagtcttttcaataaaaggtgctggaataatcacacacccacatgcaaaaagataaattatacccttacctctcactataaacaaaacaatatagatcacagacctaaatgtaggagccaaaattataaaactcttaaaacgtacgagtaaattttcattacctttaattaggcaatgtttcttagataaccataaaactgcaaaagcaatttttaaaaatgatanataggacttcatcaaaaggtaaacgcttcaaaagatactactgagaaagtcacagaataggagaaaaatctgntgagactct

SEQ ID NO: 585173 - DNA, 647 bp, Homo sapiens
atcacaagtacacccctgtgtcttgtgccttcttcaacgttccgccaagcagatgcgtctctgtagcatcaggattgggataatatcaattctgttgacatgcctctttgggagtctttgttttcctaaggggagcccagtttaattgagtgtgggatgttagtatcatacaatcagcagccagatggtccagagacggggatttggatacatgtggtctctgtccttcagaaggaagtgatgtgctgcgttctcgctgtgtctgagatgctgtaggctatcgggcagatattaacaataggcggtcgtcagtgcaaatgcaatactgtgacgatataagtatgagcacaatctcagtcctgagatgtctttctcctagtatgcattcctccagccagcaggagttctggaggagaattctgagacttgccagcagggcaatctggttccagttcgagattcgcaaagtgcgtcaagtgagtgaactgaggcccggataagactccctcgagaaagtaagtgacgggcagaccacaaaactagaggccagattactaaactctcattatagtgctcagttttacccacaattctggatctagattattcaaacatagaatggctaatcctttactggatatctaaga

SEQ ID NO: 585174 - DNA, 727 bp, Homo sapiens
  misc_feature (36)..(36): n is a, c, g, or t
  misc_feature (63)..(63): n is a, c, g, or t
  misc_feature (77)..(77): n is a, c, g, or t
  misc_feature (87)..(87): n is a, c, g, or t
  misc_feature (91)..(91): n is a, c, g, or t
  misc_feature (109)..(109): n is a, c, g, or t
  misc_feature (125)..(125): n is a, c, g, or t
  misc_feature (148)..(148): n is a, c, g, or t
  misc_feature (156)..(156): n is a, c, g, or t
  misc_feature (208)..(208): n is a, c, g, or t
  misc_feature (227)..(227): n is a, c, g, or t
  misc_feature (264)..(264): n is a, c, g, or t
  misc_feature (304)..(304): n is a, c, g, or t
  misc_feature (341)..(341): n is a, c, g, or t
  misc_feature (347)..(347): n is a, c, g, or t
  misc_feature (349)..(349): n is a, c, g, or t
  misc_feature (369)..(369): n is a, c, g, or t
  misc_feature (383)..(383): n is a, c, g, or t
  misc_feature (439)..(439): n is a, c, g, or t
  misc_feature (494)..(494): n is a, c, g, or t
  misc_feature (613)..(613): n is a, c, g, or t
  misc_feature (656)..(656): n is a, c, g, or t
  misc_feature (713)..(713): n is a, c, g, or t
tcagtcgacatactatggctcattcgtgacccgggnactcctggactctcagttgagtgaccngcatgccattgaanaatctgtcgntctnatttatgatcccataaanactgcccaaggatgtntctcactaaaggcagacagactnactcctanactgatggaagtttgtaaagaaaaggatttttcccctgaagcattgaaaaangcaaatatcacctttgagnacatgtttgaaggagtgccgattgtaattaaacattnacatctgatcaatgtcctaatgtgggaacttgaaaagaantcagctgtggcagataaacatgaatggctcagccttnccagcngnaatcatttggggaagaatcnacagtggctgatgnacagagtggatgaaatgagccaagatatagttaaatacgagacagacatgaggaanactagtaaacgacagcagcagagacatcagtttcagcagcgtcgccagcaggagnatatgcagcgccagagccgaggagaacccccgctccctgaggaggacctgtccaaactcttcaaaccacgacagccgcctgccaggatggactcgctgctcatggcaggccagataaanactgactgccagaacatcaaggagttcactgcccaaaacttangcaagctcttcatggcccaggctcttcaagaaaacaacaactaagaaaaggaagttnccagaaaagaagtt

SEQ ID NO: 585175 - DNA, 1033 bp, Homo sapiens
cccaaatggtagtaacagactttattaaaagtgaatgtttaaataactaattggtgactcctctcctctgattagagccactgttgggtattattgatcacaactatagcgctcgcaagggagacttgcagaattggcctgacctcttaccaaaactctgtagcctgttggattctgaagattataatacctgtgcagggcagcatttggagcccttcagcaagcatttgtcgcaagcattctgctgagcattttagcaccagtgcatgttttcagcatcgtccgtctccaacatcatgcattccccaaatctctctacagttcttccaagccatcagtagtcccaaacaatcaaggtctccacgctgttagcaatgtgtccaatcaagtcttatccatccagtcaggactccaagctctaatgttgcacattgacttctattaaattgagaaatctcatttgccattagctggtgactgcaagaaccagaaggtacggcaaacacatgtgtgccgagccacttggtgctgtcagctcgaagtttcgcaatggcatcgccctgcttcctcaccatgcatcatcatagtggagtacatgctacagcggactcaagatccagatgcacacatgtgagctttcagacagcctggtgactattggctaaccttaacctgcaaccagcccaatactgcaagaatgtcactcgcacgggcatcttcctaagttgatcctggtgttcgtggacatggcccttgtcagtatcatcagcaccatcagactcttaactcccaactttccaggatgactatacgaaccaccaacatccacaacagaaccaccccgcaaacaccatacaccaggccaaacaagagcaccccagttaataccacgcgatacaggcgacaggaggagacacacaagcccgtgcacgaagaacaggccacccacaccaagcaaaaaaccaaccaccaaaccaaccaaccacgagcacgcctaccaacccaacagacagtcagagaccagacagcgacc

SEQ ID NO: 585176 - DNA, 316 bp, Homo sapiens
ggtgttcagtccgagtggagctgaggctcgggacactgcaggaaaggacgccgctgcccgggctcctggagaggcagaacttggtgtgaggtcttgggaaaacagttcacacctgatgttataacgacgccagaaaaacattcccaccccgttgacttggtaaccccactgtggtggggatattctcttagagggataagataccgggcacaggggaggtgacaatgctcaccactgccaaaacacggtgcttgcaactgcaacatcggaggatgagagggagcagtcggctgtggtgcagaatgctcagcagccc

SEQ ID NO: 585177 - DNA, 1370 bp, Homo sapiens
gggagaatccagcggggctagaaggcagggcacctttggaaacacacattgaagggaatgtgagcacaaagcatactgtcttataaccagcatgtatgttgattgtacgatcatttctgtaattatcctgtaactagtatgtattaggtcagcaaccatagggatgaaatcgttcccagattaattccatcagttcgctgtaagcagtcaattcggaattcctctttgcgcacttttggtaaggtgtactggactactcttaaatggcatgattgcctcgctactcctcgattagtcagtggagaggggagaacaggtgtttagagctctgttggcttgagctggagatacgccacatacagagagatccgcatagtggagaaggactacaccgacgtagttgtgtgaaaaatcccgtacgttggtttcctggtaaccgaagagtaaactttagcttcaacaacctaggataagagtcgcaatttccgaggtaaggcaagtatacagcggtagaaacaagacagaaagcaaagaaagacagagagatagagtgttgcctaagtgtcaaaagggtgtgtatcaaaggcatttattaacagcataattcgtaatttgcggtattgacattgtttgcaatttacggtgaatttttgtttatggattatatatattgtattcgaatggtgatgagaagtatgaacgcaaagatataaaggatggggtaaaggaacccatcatagaagaacactaaacaaatatgataggcgcacgaagtcatcgtaacacgccctcggtcaataagaacatggctattacaaagaaaattgagaatgcaattgtcgcacccgcatataattcgtataggaacgggtggaaggccagctatacaagtattggcgtggttcacataggccgtcactttagaagaacggacgaaacgaacaaggaatacacgaatacagcaaccttggtggatactagattagggcgctaccctcggaagtaatgaacggcgccagattggattagaaaacacgatccacgttccttccagtatacctcgccctattttccatgggggttctttgggaccaagccgttgcactgggtacgtccctgaagaacagcggtgggccagtcacgtccaacacatagggtggccatatgggggtagttcaaggtgccaagtgggcctggggaagtaaacaaatccgcttggcacacttaagacgtaaagttggtttaccagaaaaaacgtgtccaggaacacgattggaacttatttaaactatggtagtgacaaaagctttgagcacttcagagcaggtatatgggaggagagaaccgacctggagatgcacaacccccag

SEQ ID NO: 585178 - DNA, 366 bp, Homo sapiens
  misc_feature (8)..(8): n is a, c, g, or t
ggctgggnggctcatttatgttattatcagcactatgcaagaccagcgtgtgggataacttgatgctaggataccgagaccagcctgcgcaacatggtgataccccacctctactaggagacttaggaagtttaatcgctagaacccgggaggcggaggttgcagcaagacgagatcacgccagtgctctttgtcctggatgacagagtcagactcctcacaagttatagcaatgtcggggtagttggtacttgtcggccgactgggcccagtagagtctagacttgagcaaacttatgtaagaggccttaattggagttcaatagaccaattggccctattgcgagccggattactctggccggg

SEQ ID NO: 585179 - DNA, 126 bp, Homo sapiens
gaaaggtcaagcagattacagaggccataggcccagcagcatcaggaccttgctgtggcagggcctgagatgcaggtaaaactgctccagtccctgggcctgatatcaaccctcttcaccggccat

SEQ ID NO: 585180 - DNA, 1041 bp, Homo sapiens
acttcagatcacatgaaaatgctgatttaacatttgaggtatcacagcattaaaagaaaaagaaagtaaaccagtccttatgtattcagtgacctaatggggtgccatcaataagctgcgatatcagccctggtagctcagtacagccacaccttccgtagcactcctattggccttattcattgaaaagtgagttagtgaatctgccagatctgtgaatgatagagattatgctagattaatgctgattctttgtgtgtgtgggaaatctctgtagagcacctgtttctttcttgagagtaatgtaacccagtgtacaatgtagttgttgaactggaataattagaacttcgggcgttctcttagggaaaagacgacgttccgtaggtcactaggtgtccgtatggggcaaacttgtattgtttatttagatgtcctgtgtccttgaagtgcgtgcaaattatcagtatctataaatgtaacttgattttggcaccacttgcttcgttactgtgaccacggcagaatcacagtgtcttctatgactatatctatgtcccgttattgcgaatggtatctgttcatttgagtgagtatgaagatcagcaactaacaactgacgaatcagagtttgccagtgcaaattcagcatggctgcagctgcattaatgacattcgctctgattattctttgctagcctcatcttactaatggacttgtatactgggccagttacaaatggggctcccaaattgctgtttgcaacaggtcttagacctttcaggaaagaccagttagcgaaaaataagttccaggaacatttgccatctgtctccctgctaactttgcaaagggcggctaacataattaatggggcatttctcaccgacgtttgttcacggaaatctgtggtgtaacaaggggaccaatttcccttacacaaagaaaaaggggagcactaaaatacctcaaagggccacataacagtcacacatatgtgaaagagagcgaatagaggacataaaaaacgacgagtatca

SEQ ID NO: 585181 - DNA, 396 bp, Homo sapiens
gtggtacgatatatatacccaagtaatgctcataagcaggtaagtggctgacctagggctcaaaaatgcttcccactccatcatactgcaaaataatttgatccagtgataactaatcaaagaaaatctatgatgagaggaggtggaaggagggaagccctttcactgcacacttgggatgaacagatgcttttaaagtgaatagcagaaaaacatcttttcacgatgaagttgggatacaagcagtcaactgacatctctcagcagcataaaaaaaaaaaaaaaaaaagggggcctttccaaaaatgtatgctttcaacatccattcaacaacaaacttgtggtttggtgggccaagggctgacctgtggtcccagtcaaaatttggccaaaaaa

SEQ ID NO: 585182 - DNA, 842 bp, Homo sapiens
  misc_feature (15)..(15): n is a, c, g, or t
  misc_feature (91)..(91): n is a, c, g, or t
  misc_feature (116)..(116): n is a, c, g, or t
  misc_feature (118)..(118): n is a, c, g, or t
  misc_feature (138)..(138): n is a, c, g, or t
  misc_feature (143)..(143): n is a, c, g, or t
  misc_feature (192)..(192): n is a, c, g, or t
  misc_feature (199)..(199): n is a, c, g, or t
  misc_feature (201)..(202): n is a, c, g, or t
  misc_feature (223)..(223): n is a, c, g, or t
  misc_feature (258)..(258): n is a, c, g, or t
  misc_feature (266)..(266): n is a, c, g, or t
  misc_feature (313)..(313): n is a, c, g, or t
  misc_feature (364)..(364): n is a, c, g, or t
  misc_feature (367)..(367): n is a, c, g, or t
  misc_feature (458)..(458): n is a, c, g, or t
  misc_feature (660)..(660): n is a, c, g, or t
  misc_feature (839)..(839): n is a, c, g, or t
tgtcgattccgacanggatttccaacgacaaggaaaaaatgaccccacttccttatttgaaaattctcgtaattaataagatactgaatanaaagaactatctcaattacttgttnantaatcatattatcattttgntaacnatctttggagagcacagaaaaaatgatagaacaacaaaagaaaattcantgatgcnanntttaaatgtatatttaatccnattacttttttcaaaaagtcacactcacgtctgcntgagagtnttagaggaatataatgtatgagagagaattccaataacataatgtanaaaaatgttgtcacatacagaagagcaaaaatctacgtattggggactatngcngtgggaagaagggcctgatcttcatactcatcttcctcattgagtaccatgaccccttccaattcatccatactacaccatcatctgtgcnatgctttgccatgtcccaggtgtactgtccaccccagtagtatctgccgtttggattggctgcatgacatctattataccaccatccaccaccgtcttctttagaacactgttttctgggatctgatgttaaccagccgtcattgtctctgtcatacgtgctgaagaacatgccgttgtgaatggtcatggtcctgttttcngccatcagctgagatgctccatccatgagggcattaccggctgttcctctgtatttgttcactgagatctggtatttgttggcttcattctgtacagtgaatcctccatagtgagcctttactttgtctcctttccagtcctccatttctatcaaaagttctgtgggtcccatcctggnaag

SEQ ID NO: 585183 - DNA, 141 bp, Homo sapiens
ccgctaccgaggagcccccagcgcctccggagttccactaccaagtgtgcgaccagagatttacacagtcctggtttttcaaggaccaacatgcgtaagcacaagccatcaataagatcatgagtatccggtgtgcggccg

SEQ ID NO: 585184 - DNA, 142 bp, Homo sapiens
atcccgtgtggtcgacatatgatataatacatatgattagttctgtggctgtgcaatgttataattaaggagattcgtacggagattagtatagagaggtagagtttttgtcgtgattgtggcaccctgggtgaagtaagca

SEQ ID NO: 585185 - DNA, 134 bp, Homo sapiens
agcctttgacaagttttttattgtgaaatattggatctagaaaaaaagtacaaaatgtcaacagtcagatgtgtacatgtttattatctttttagtctatacatgtgaacagcttaacaggttcactgcagaat

SEQ ID NO: 585186 - DNA, 637 bp, Homo sapiens
actccccacgcgcaccggttcaaagtggtagttcaagaatgttacaattgatgaatcgtacgtatacccgcgaatggtatatggcgaaagtggatcgtatcaaagaactactccccgactgtggtatcagttcagatatcatcgcaggttttggtactgagacagaggaagatcatcaagagacactcagcatcatgcaatacagcggatatgacatgagctatatgttcttctacagcgaaagacccgggacactagcagcaaggagatatgaagatgatatacctgacgaagtgaaaaagagaagattgcaggagattgtagacttacagggagagttatcacgtcagagtaacttgaaagatttaggaaaaacattcaaagtgtgggtagaaggaaacagtcgtaaaagtgatgctgattggatgggcagaaacagtcagaataaagtgattgttttcccaaaaaaagatatgaatgaacaactgaagggaagttatgtaatggtgaaagtgaccgattgcacaaagacaacgttgcgaggagaaagagaattgtaatgttgaatatcaatgttgcatgcgttaaaaatcaataaaggatttctacttagaaattcggatcagggatcataatt

SEQ ID NO: 585187 - DNA, 111 bp, Homo sapiens
ctgagagtgtggtacagccatctcctagccttcagatctgcttaataatttttctgcttcagcaatggttgttgcttcctcttcagccaagagaatataagcagttgcaca

SEQ ID NO: 585188 - DNA, 326 bp, Homo sapiens
acagaccaatgaggcaaccacaatgaacttgacaagactgtctccttcctaatggtccataaagaccaaggtctactacttctagaactgtgattctccttggtaggggaagggcgtaatcagaatactccagcagactttccacactccacaaatcccacctccagttactgacttgcctcctggttgagatcctccctgctgtggaaacccactgataacgtttctggaaaagagctgtgacccatcattgggagggcaatcatgaccaaatgttcatccaattctaagattctgctagtttaatcttcgcgattagggtaagt

SEQ ID NO: 585189 - DNA, 146 bp, Homo sapiens
ctatatcccaaagaccagaagtatacatacctgcatagactcccagtccggcggactgccgcctctccagcctccccatacagcgtctggctagccttcctgctaggtaccattacgcaggtcgatagtcataagctagtcccctg

SEQ ID NO: 585190 - DNA, 141 bp, Homo sapiens
cgaggaagaaggtggggaggaagaggaggaggaagaatattgtgatagtgaggaataggatggtgatgaagatgaggaagctgagtcagctacgggcaagcgggcagctgaagatgatgatgatgactatgtctataccaa

SEQ ID NO: 585191 - DNA, 440 bp, Homo sapiens
aggaacacagtctctttaggagtacggttcagacggcctctaagtttctgcagggactggctatctttataggcattactaagctagtggtaggtgatgaggcattaatcatcaaacatcattgactttgtaattggcattgatggtttgtaattgtttttttaataccagccctttagcggatttaggaagggagtttagagaaatcctcttgaattttattgattaaggccagttcagatggtagactgggcatgagttgaaccctgctttttcattccgtggtgacaactttgtgctcccaagaagagggcctctctttgcagtgtccccggaggtcttgaagcctcttccctactgctcaccccttagtacagcaaaccttcctgctggcacccccagtcctcttaaagcctgctggcacagtgtcacttcttcca

SEQ ID NO: 585192 - DNA, 316 bp, Homo sapiens
  misc_feature (6)..(6): n is a, c, g, or t
  misc_feature (15)..(15): n is a, c, g, or t
  misc_feature (83)..(83): n is a, c, g, or t
  misc_feature (316)..(316): n is a, c, g, or t
gaaagnattcctccntcaggggccctgaaagcttgcgggatgaataactcctcctcctcaggcccagtcccaaggtacaaacnttgcaccgagcagcaagatagcagaggcaggaagagagctggctggaagacacgtaccccctgaagatcaagagggaggtcgccctggtactacatagcagtcacgttaggctgggacaattcctgtttacagaggactataaaacccctgccccatcctcacttgggctgatgccattttaggcctcagcctgtctgcatgcaggcgctcattaaaacagcatgttgctccn

SEQ ID NO: 585193 - DNA, 191 bp, Homo sapiens
agtataataattgaaacagactacttcatattcctgcttatgtgacatacttgtttttgttttgttttgtttttttgagacagcttcttgctctgtcacccaggctggagtgtagtggcatgatcatggctcactgcagcctctacctcctgggcttaagcagtcctcccatttcagcccctcgtcgacgc

SEQ ID NO: 585194 - DNA, 217 bp, Homo sapiens
tagtctaagtccgcctagtacagttttaggtgaccagtgactttgtcgatcaggtctagcgggtcctggtccattccctagagacagtacgagagcctgtgtgaatttgttattcctccagcatcttgaattaaacttacagtcagtcccagcatttttgcatgggccaataatgcaatcagggtttcttcatcaggagctttgaccaccaccttgg

SEQ ID NO: 585195 - DNA, 106 bp, Homo sapiens
actctagattgatcccctttgaatcactccttactgctgaatctgccttcttacttgctgaatctggcttcttaacatgcttgtccacccaccacgtgcccttgtg

SEQ ID NO: 585196 - DNA, 344 bp, Homo sapiens
  misc_feature (45)..(46): n is a, c, g, or t
  misc_feature (65)..(66): n is a, c, g, or t
  misc_feature (75)..(75): n is a, c, g, or t
  misc_feature (109)..(110): n is a, c, g, or t
  misc_feature (307)..(307): n is a, c, g, or t
tgattggtggacagtagggtggaccaaaggaggccactgagttanncagcaccagttctgtcacnnccgcgcctnccgtacctagtgggtgttcctgtttgctcctganncctgggtgggctagggcctgcattgcgggaagatgcctttgcagggaggggaggataagtgggatctaccaattgattctggcaaaacaatttctaagatttttttgcttatgtgggaaacagatctaaatctcatttatgctgtatttatatcttagttggtgtttgaaaacgtttgatttttggaaacacatcanaataaataatgggcgtttgttggtaaaaaaagggtgg

SEQ ID NO: 585197 - DNA, 360 bp, Homo sapiens
agcggatcccttatgtatgtatagaaataggtacaaaaccaaggaggttatctattacctttgaagggttactgatggcatagctcgtgtttcactaagtccaataaagggtattagtgtctaaaagaatggaagatagtggtgatacctttgaaccccctcccccttgcgtaatctcatagaatccctaatcacgggccctgtgggagataatagaaggtcgtagtgtatcaaccaaagtaaatgttgagatatctcttaccctcatcagttagtcaacccaagtaagagaagaccacattcaagagataagatcaactagccaccaaaggacgtatatgaatcctatgtgatggagat

SEQ ID NO: 585198 - DNA, 112 bp, Homo sapiens
tactttcacaggcgataataaacaagtataatgtcaaatatttttttaaaccgtatattggccaggtgctggctcacgcctataatcccagcactctaggagactgaggcag

SEQ ID NO: 585199 - DNA, 386 bp, Homo sapiens
ccttgggccccccagggtgcagcccccattgttggacatggacatggaggggcaaaaccaaaaaagcacagtgcccttttggggggccccgggttcccattaaggcctgcccccccccgcccgcttgggcagccatgaatgtagggccccaggccctgccccagccccccatgccacaaggtgggggaggccctgggcagaatgtttattttttttattggggaaggagggaggggggggacatttaattttttcttttgtaccccagggggtggagccctgtgccccccctgccttggggggagggtgggcagggatatttagggaaagggctttatgggggttttggcccaaaatggagcattaaaggtaacccctgcccccta

SEQ ID NO: 585200 - DNA, 643 bp, Homo sapiens
aaacataaaaaatcaccagtagcagtaccacattcctgtagtcccaggcactctgggggcagaggtgagaggattgcctgaacataggagtccaagcctgtggcaagctatgatctcgccactgcactcctgcatgggtgatagagacccatctcaaaaaaaaaaaaaaaattcggacggggggcagaacctcaggccggttattccagcaatttggggaggctgaggcaggcggatccactttggggccaaggagttggagaccagcctgggccaacttgggtgaaaccttggtttttagtaaaattggcaaaatattagccgggatgtgggtgggaaagtggcctggtaatcccaagctactggggaggctggaggcaggaaaatttcttggaccctggggaggtgggaggttggcagtggggctgaaatagtggccatggccctcccagctggggcagaacaggtgaaacctccggttttaaaaaaaaacaaaaaaaattctaaattaaagctggagaaaagtaacccggtagttcacaaggggggttattactctccaaggaccaagggcttaaatcccttaaaagcattcctggaattacccggagcattattggtccatctggtgtccactccttta

SEQ ID NO: 585201 - DNA, 156 bp, Homo sapiens
agtctagaggatcccaagcagttatacagactcacctcaacccctcataatctccagaagagtttctgccaaaactgtggcatagacgacttttgatatggttcttagccagttgttttatagtccctaaacctcattgtgaatcctataggggta

SEQ ID NO: 585202 - DNA, 325 bp, Homo sapiens
cacgaggcgctggccgattcgcggcgagtcggagaacctggccccggccaagttcgtcaacggcggctccgcgcaggagtcggtggtgggtgcgggcagcatcatctcggcggcctcggtgcgcaactcggtgctgtcgtccaacgtggtggtcgacgacggggcgatcgtggagggcagcgtgatcatgcccggcgcgcgggtggggcgcggcgcggtggtgcgccacgccatcctggacaagaacgtggtcgtcgggcccggcgagatggtcggggtggacctggaaagagaccgggagcgctttcgccatcagtgccggcgg

SEQ ID NO: 585203 - DNA, 763 bp, Homo sapiens
ccagggcctgcagtgccagcgtggccaccctcttggtagcctggccagtaagaggaggacagttgtgtgctgaattagcacacgcacgtgcagcgcgcacagacgcgcgcacacacacacacatacacgctctgctgcatttggacaaaccatgcctgccagagtgtagcagaggtgaggaagcaggtgggcagcttgcctgacccggcttttcaggagagcgtgtctccaacagagagtctccacactctagttcagggttatcgacctgcctcaatgagatgacagactcatttgggaggggtgttgcaaacaagttttcagtgagaatagttaagttccagagcttgtaaaggattcagtgactgacacttcagtaaattaggccaggcacattggcttatgcctgtaattccaacactttggaaggccgaggtgggcggatcatttgaggtctggagttcgagaccagcctgaccaacatggtgaaaccccgtctctactaaaaatacaaaaattagccaggtgtggtagtgcacatctgtaatcccagctacttgggaggtggaggcaggagaattgcttgaaccctggaggttgcaatgagctgagatcacactacttcactccagcctgggtgacagagcaagactcggtctcaaacaaacaaaaacttatggcgatgcaggttttcatgctcaaacgcttgcattcaggtatgctttcttttttgagagagacaaatgggtcacaactggcaccc

SEQ ID NO: 585204 - DNA, 504 bp, Homo sapiens
tggctgtagctaagcagaccacgcgctcggggcaggcaaagcagcgtgcggggaagtcacgaaacagtgtgcctaaggaagtggggaactacgtcccgtccagatagccttgaactaccaacattcgcttcgggaaagtaggtcagcagcacctaagatcaaggatgcgtaccatatacacacttcacagtcatgaaaactgagaagactgtcttcagcgtgaactaagagttcacaagcagatcactgatccagaacacttcaagaactcgtcaaacagctcgataagccttattgactgtgtacatctgtaccgggaataacattcctaggctgaaatttccacaaagaatagaacctgtacccagttcttcaggctgatttccctgacctcttgggcatttgtatttgtagtacagtattgcagagattcctaagtattttatagcagccatcaaaatgggactttgtatcgtatattcataaaagacacttggtaataga

SEQ ID NO: 585205 - DNA, 752 bp, Homo sapiens
ccagggcctgcagtgccagcgtggccaccctcttggtagcctggccagtaagaggaggacagttgtgtgctgaattagcacacgcacgtgcagcgcgcacagacgcgcgcacacacacacacatacacgctctgctgcatttggacaaaccatgcctgccagagtgtagcagaggtgaggaagcaggtgggcagcttgcctgacccggcttttcaggagagcgtgtctccaacagagagtctccacactctagttcagggttatcgacctgcctcaatgagatgacagactcatttgggaggggtgttgcaaacaagttttcagtgagaatagttaagttccagagcttgtaaaggattcagtgactgacacttcagtaaattaggccaggcacattggcttatgcctgtaattccaacactttggaaggccgaggtgggcggatcatttgaggtctggtctcgaactcctggcctcaagtgatatgcccacttcagcctcccaaaatacaggcatgagccaccgcgcctggacactacttctttaaagaaatatttaactgacaacctaggaatttggaatgtgttagtaaaatgtgacgtttgctatagcttgccagcaaaggttgtatcaggtagtatagagtttgggctgttctcagataaaaaggataattcaacgtcaaatagggttaatatctccacaatggcgaggtatcaaggtacagtccaggctcatcagaggatgtggca

SEQ ID NO: 585206 - DNA, 241 bp, Homo sapiens
  misc_feature (72)..(73): n is a, c, g, or t
atcccagcctttgggaggccattcgggcggatccttaggtcggagtctccccgcccaccctgaccccctttnnactaaaaatacaaaaaattagccaggcatggtggggcatgcctgtaatcccagctacttgggaggctgaggcagaagaatcgcttgaacctgggaggcggaggttgcggtgagctgagatggcgccattgcactccagcctgggcaacaagagcgaaactccgtttca

SEQ ID NO: 585207 - DNA, 1009 bp, Homo sapiens
gcacgcaagaagcttgcgtgatcgtttcaaggccgggagagatgtggccgagacagatggctgaatgtgctagagggcaacgagtggagtgctatcttaggaaaatcaaaggcccgcaagaggcaaataaatccttgtctttgtcttcagcccagataagtaagaacaccattgagtaagcatgggtgaagaagcaaaacaaggatgcagtaggcatagtgccctaaaacaaaaagctgacgagcaaaaatcacaaaaacaaaaaatcaagatacaagggggggagagatcaaacacgaatacgccacaagagaggacacaggctcggaacgagtcacggacaatgtcacacgggagagataaacagcgggaagcaaaaaaagaaaggcagaaaaaacaaacaactgaagacactccatgagtacacgacagataaagcaacaacatcaccatacacctcggcgaacacaacaaggggaaacactggcagagaaccattcacgataggatgagagacgcaaaacacatcacggacgtacacgaaagccaccaaaaagggggacgacaacaaaagcaacagaaaagaaaaagcagatacaaagaaaagccaaaggagacgagtgaacaaacctccctcgagcatggcacacaaacagagccaacatacagagacaaacaaaatcacaaaccacgaaatagaccacgaagtgacaacataagaagcaaatacgacaggaaacatagcagaaccagaacagcagcggtaactagcacacaataacagagtagcaaagaaagaaagcaatagaacataacacaagacgagaacagacaaatagacaagaagaaaaagacgaaagaaagcgacgaagcgaggacaagcagaacgaccacagcaccagaacacggagagaacagacagagacacacaacccgaacaagacaccacaaaacaagacagaaaacaagacagaaagctcaagaacagcaacagcaaaagaaacaaaag

SEQ ID NO: 585208 - DNA, 193 bp, Homo sapiens
tgcctggcttgattaggaataaaggattgtgataggcagctcagtctccaaaccccattgttagggtaaggcgaatgtatagcactgtataactgtcttttaatgtcagtgtcactgtaacaatggcttgtggtttagtttgttagttatttggttagtgcttagagaagaaaacgcgaggcttcagtgccgt

SEQ ID NO: 585209 - DNA, 195 bp, Homo sapiens
caatagaaatggcatgaggcaggcaggccaattagtgcccatgtcgagtgaggtgtaataatgtgactcaagtgttgctgcctgtgtgacaaagagcagtaagagaatccctgcaggtggtagtgaaactcaaaggtcactcatctcctgtgcacggagatcagcacagtaaaaccattttcagtgcaagagcta

SEQ ID NO: 585210 - DNA, 480 bp, Homo sapiens
ccagctgcatggacaagagttaaacggtggcttcccatctgcatcatctttctcttcagcccccggagccacgtaccgcggcgtctccagccacacgtcgcctgtcagcgggcccgacagcttcctgggctcccgagggaccacagctggcagctccggggatccctcggcaaagcactggcttcgatctactccccggatcactcaagcaataacttctcgtccagcccttctacccccgtgggctccccccagggcctggcaggaacgtcacagtggcctcgagcaggagcccccggtgccttatcgcccagctacgacgggggtctccacggcctgcagagtaagatagaagaccacctggacgaggccatccagcgttccgcagcacgccgtggcacagccggcgacatgcacacgctgctgcctggccacggggcgctggcctcagtttcaccagtcccatgtcgctgggtgggc

SEQ ID NO: 585211 - DNA, 318 bp, Homo sapiens
agttcagggagagacaccacagaaggagacccagacgtccgaggaagttcccagcagagcaaactggtttccagcctgaagcctgcttaactgtgtgatgtgcaataactgagcttcagagttaggaattgtgttcgagtgcttggatttccgtctgtagatttaacagctgaaattgtatctctcagtgcttttagatgtcttttaaaaaattgaaaaacatagtgttagactgtgtgcgtgtgcgttgatcggcactcgagagtcccgtgagtcatccagccctgcctttcccctgcgccctccctcctctcacgc

SEQ ID NO: 585212 - DNA, 166 bp, Homo sapiens
tgacatgggccaagcatctgagtcatgctgccggatgacgtgcgtgacttcatcgacaaggtggacagatctccaggttcctcctacttaccgctatgctgagtcttccatgaagaacagcttcggcctaaagtaccttcataagttcttcaatatcccatttttg

SEQ ID NO: 585213 - DNA, 176 bp, Homo sapiens
catcggggacactataaatttacccggaagaccaggcctaagggggagcggggcaccactggaaataccaggtctgaagggattctttggagagaagggaacagaaggtgacttcggcttccctgggattacaggcgtgactggagttcatggccctcctgggattgggctatcaa

SEQ ID NO: 585214 - DNA, 236 bp, Homo sapiens
atcccattatcatattcctacgtgtgacaaacccggtgcccactgtgatgaacagaccgaagggctcctgtgagcaacggaaggaggactggatgcggggaagggcaaagggcgcggaacggggtggggagtctagcgaggcgagctcgagatgacactagaaaccttgactgctattcctattcactgtactcagattacctccagtatccagacatggtgcccatcgacctgaa

SEQ ID NO: 585215 - DNA, 914 bp, Homo sapiens
tgtaatcccagcactttgggaggctgaggcgggtggatcatgaggtcaggagattgagaccatcctggctaacacggtgaaaccccgtctctactaaaaatacaaaaaaaaaaattagctgggcgtggtggtgggcacctgtagtcccagctactcgggaggctgaggcaggagaatggcgtgaaccccggaggcggagctggcagtgagctgagatcaggcccctttgaaccagcctggggcaatagagcaagactctgtctcaaaaaaaaaaaaaaaaaaaattcttccttaaaaaaattaaaaggaaaaagggtccccccttttcccacgggaatctgtagggggcgggaattttctataaaacatttaaagcttggacccaatttgttgttattcaggaaaggggagaaaaaaacggttttaaagaagggtccatattttaaattataaattttaaaccacggggtgatatccaacaccacttttgtggggagacattttatcttctcacaaaaaagggtaatggggcggaaaccgccatgtaagggcgggtaaacaactttttaacatgggcgctggggggaggtacgaattaaacagttggactagttggacaaaattgggatggttgggcaaataactcaggattattttacccccatttaaaaagtgggcccccaaattggcggagaacccaaaaaagcggcgctgagatccaacaaggttaaacaaacgttggccgtggtaaatggacacggccccttgacacgtgggtacttcttttccccccagaggataaaaccccggggcgtggggccataaaataaaaacgcctcaggggcccttgggaagaagaaaaaaacacaacaaacacgacacaaacagcacaccaacagacgcaacacaccgac

SEQ ID NO: 585216 - DNA, 107 bp, Homo sapiens
aggtggaggtgggctctaaggacggctgggcctttgcgtggcccgcgagagcgtgcgccgaaagggcctacgcccttcactcccgaggagggacggtcccttacctt

SEQ ID NO: 585217 - DNA, 119 bp, Homo sapiens
tctggtgtatggtagcacagcaaactggtaggaattagtatcaatagtaaatttggggtttttaaggatgtggcattccgttttttaaaaaaaaatttggtaataaaattatgtatatt

SEQ ID NO: 585218 - DNA, 211 bp, Homo sapiens
tttgaagattcccttgaactttcgggggaatggggtaatgaccttgagggggttttttggtgggaatgagggtttatggtggtaatggggggggtggaggaaccccattgtgttgtggtaaatatgtagagggagtatagggctgggactagtatggtgagtccttgaaggaggagagtgatatttgatcaggagaacggtggtactagca

SEQ ID NO: 585219 - DNA, 89 bp, Homo sapiens
tcgggggggccccgggggttgtttttttttttttttttttcgggggggggcccccgggggggggcacccccccggggggtcccccaata

SEQ ID NO: 585220 - DNA, 237 bp, Homo sapiens
cggtaccgcagcatcttttcttcaaactcacagagtgaattcagctcttctgtgatcaagacccagccagttctctttcattcagacgctgttggctaacaaatttatatttgccaaggatattacggcaaatgaggctacttgattggtggacaacctcgtgcccacattgcaaggtatctattacatagggtcttttataaagctatagtcggaggtagggtcagctctaattat

SEQ ID NO: 585221 - DNA, 399 bp, Homo sapiens
gtcattgtcagctctggttttatatatatattaaatatatacatattttgagacagggtctcgctgtcacccaggctggagtgcagtggcacaatctcagctcactgcaacctctgcctcccagcctaaagagatcctcccacctcatccttctgagtagctgggactacatgcgcatgccaccacacccagctattatttttatttctttttgaagagacaagggctcactatgtttttaggctggtcttgaactcctgggctaaattgatccttctgccttgggctgccaaagtgctggaattataggcatgagccacttggccttgcctgattattttgtttttgaatagtgaccttaatgtgcttttccaatttcaagagacttttgattaaatt

SEQ ID NO: 585222 - DNA, 650 bp, Homo sapiens
  misc_feature (351)..(351): n is a, c, g, or t
  misc_feature (397)..(397): n is a, c, g, or t
  misc_feature (400)..(400): n is a, c, g, or t
  misc_feature (412)..(412): n is a, c, g, or t
  misc_feature (420)..(420): n is a, c, g, or t
  misc_feature (480)..(480): n is a, c, g, or t
  misc_feature (509)..(509): n is a, c, g, or t
  misc_feature (558)..(558): n is a, c, g, or t
  misc_feature (583)..(583): n is a, c, g, or t
  misc_feature (615)..(615): n is a, c, g, or t
  misc_feature (617)..(617): n is a, c, g, or t
  misc_feature (645)..(645): n is a, c, g, or t
gtcgttaggggagcgagtcgtgaccggttgggccacactcaacgtgggacgaagcttcgcctactgtttgactacgtgcgtgcagcctcccctcgatgtcggccctcgaaaagagcatgcacctcggccgccttccctctcgcccacctctacccggcagcgggggcagtcagagcggagccaagatgcgaatgggccctggaagaaagcgggacttttcccctgttccttggagtcagtattttgagtccatggaagatgtagaagtagagaatgaaactggcaaggatacttttcgagtctacaagagtggttcagagggtccagtcctgctccttctgcatggaggangtcattctgccctttcttgggctgtgttcacggcagcgattattantanagttcagtgtangattgtanctttggatctgcgaaatcatggtgaaacaaaggtcaagaatcctgaagatctgtctgcanaaacaatggcaaaagacgttggcaatgtngttgaaccatgtttggggaccttcctcctccaattatgctgattggacnttagcatggggttgtgctattgcantccacacaagcatcatcccaacctggttaccnancctctttgggtctgttcatgaattgatnttgtt

SEQ ID NO: 585223 - DNA, 255 bp, Homo sapiens
taccgtggacacacgtttgtggtgggaggcctgcttcttcacctcccgaggtggtagtggtagcagatgccaattccagagttccagtgtaactgttctcttccatccagaggagggatttattactgtgccacccggactgaccctggcagctgcagaccttagtcttctggtcccactcacatcactgagactcttggttagtagatggtcccatagtgagaggttacctgttcgttaattgagaagtcctcg

SEQ ID NO: 585224 - DNA, 506 bp, Homo sapiens
agttcaacctgcattacagttgtcatctgctgcacctattaattagactctacattgtccttattctatgtgttcattgctcttccttcgtcacccctgtatgagaacatgtcatacttgtataaaccaagctcactgactcttccttattgctagtatataataataccatatatgcatttaacaattatgtgcaccagtacatgttgtgcacttttgaatcatagcccatacttactcctcctccttcccccagccctaatctgtggacacaattgtcttgctattacaagtggtgactgtggccaaaccctctgcgggactgctgatttaaatggttggagatattagtgcataaggtatgatagttttgttcccaactcagttacatcttcccacaccccttcgatcattgtccctttggcccttttttctttgtatgtgcgttctcagttaatatatagctaataactcttatttttcttatgttttagactgtttacgct

SEQ ID NO: 585225 - DNA, 202 bp, Homo sapiens
  misc_feature (10)..(10): n is a, c, g, or t
  misc_feature (12)..(12): n is a, c, g, or t
  misc_feature (187)..(187): n is a, c, g, or t
acacctactncnatttcaaatcttgtgccatcaatgacttcactcggttgcaaatgcaaacgataattcacgtcagctgccaccaatgccaacggttgttacttggcatgatgcgcaatatcagctaatagttgcaaatcctgtgcggtcatttcatgcaaagctgccagaatcgttaaacgtaacnattcgatatgcgtac

SEQ ID NO: 585226 - DNA, 219 bp, Homo sapiens
accaccacctgagtcagaacggaacctgaagggaatggaccaagtccaggaagaatacaccacttgcttgactaaagagccctatagaccctgaataatcaccagacagcaaacaagtaacacacactgtgggacctcagactaagactacagacatgcagacttcagagtgtgaccctggcatattacacacgctagcggctggctacgacggcaaag

SEQ ID NO: 585227 - DNA, 696 bp, Homo sapiens
  misc_feature (4)..(4): n is a, c, g, or t
  misc_feature (87)..(87): n is a, c, g, or t
  misc_feature (111)..(111): n is a, c, g, or t
  misc_feature (115)..(115): n is a, c, g, or t
  misc_feature (130)..(131): n is a, c, g, or t
  misc_feature (147)..(148): n is a, c, g, or t
  misc_feature (172)..(172): n is a, c, g, or t
  misc_feature (175)..(175): n is a, c, g, or t
  misc_feature (178)..(178): n is a, c, g, or t
  misc_feature (191)..(191): n is a, c, g, or t
  misc_feature (193)..(193): n is a, c, g, or t
  misc_feature (203)..(210): n is a, c, g, or t
  misc_feature (214)..(214): n is a, c, g, or t
  misc_feature (253)..(253): n is a, c, g, or t
  misc_feature (266)..(266): n is a, c, g, or t
  misc_feature (276)..(276): n is a, c, g, or t
  misc_feature (290)..(290): n is a, c, g, or t
  misc_feature (300)..(300): n is a, c, g, or t
  misc_feature (302)..(302): n is a, c, g, or t
  misc_feature (314)..(314): n is a, c, g, or t
  misc_feature (317)..(317): n is a, c, g, or t
  misc_feature (320)..(320): n is a, c, g, or t
  misc_feature (380)..(380): n is a, c, g, or t
  misc_feature (385)..(385): n is a, c, g, or t
  misc_feature (394)..(395): n is a, c, g, or t
  misc_feature (437)..(437): n is a, c, g, or t
  misc_feature (468)..(468): n is a, c, g, or t
  misc_feature (553)..(553): n is a, c, g, or t
  misc_feature (685)..(685): n is a, c, g, or t
aganccaggatgtttggctcttccgcgcaggcctccatctgtctccccgttttgctcttcctacgcgttccaggtcctccacctggntgagggggccgtggggctcccgcnagcnctcgattggctgggnntttttcgggccaatgnnctgaagactgcggagatttcgggntgngcnttcgttcagcagntncagtattttnnnnnnnncatnagccagttgctccgggctgatctgtagctcccagcagtnctcagccttctcntcaggctctngggcatccagggantccagctttntnttccggcctttnttnttnaggatgtggatctcggcatttggggatgctgcctgctcctgaattagctgtaggggcatnaccanagccttttnnaggggctttgccctgtgactgtgcgatgtgaaaggggccggngcattgtgggacaatggttctccttttcctnagccttctgggccaacatcttggcctccagttctttttgcttcgtcttaagcctctcaatctctaggtccttctcttctactgtnttcattagcaccatccgctctcgctttggggtactcaacagaggggccccctgtgctcccctgggaggcaagcagacggtccaagctgaggaggcgctccagcatggccgggtccatgctgcttagcttctnttgggggctga

SEQ ID NO: 585228 - DNA, 169 bp, Homo sapiens
aatgaacaggcaagccgggcccccacctctcccggggggtctcagggagaaccgtttcacggcaccctttccctacctttgccttcttgaatctccgggtttaccatggatgacttcgcctcggcatctacggacttgatttttcattctgccactccatcacaaacgg

SEQ ID NO: 585229 - DNA, 119 bp, Homo sapiens
gactctgcagatcctcaagtgccttagacaatggagctgggagattggtttggagaccagagatcagccaggatttctttcagtaagactctaggccttccatttttgaggcatcctat

SEQ ID NO: 585230 - DNA, 2016 bp, Homo sapiens
aaatggatttcagaatattagtaggtgcaaagaaaaagacttggatgatacctgcatgctgcataagaagtcagaaagcccatttagagaaacagaacctctggtgtcaccacaccaagataaactcatgtctatgccagttatgactgtggattattccaaaacagtagttaaagaaccagttgatacgagggtttcttgctgcaaaaccaaagattcagacatatactgtactttgaacgatagcaacccttctttgtgtaactctgaagctgaaaatattgagccttcagttatgaagatttcttcaaatagctttatgaatgtgcatttggaatcaaaaccagttatatgtgatagtagaaatttgacagatcactcaaaatttgcatgtgaagaatataagcagagcatcggtagcactagttcagcttctgttaatcattttgatgatttatatcaacctattgggagttcaggtattgcttcatctcttcagagtcttccaccaggaataaaggtggacagtctaactctcttgaaatgcggagagaacacatctccagttctggatgcagtgccaaagagtaaaaaaagttcagagtttttaaagcatgcagggaaagaaacaatagtagaagtaggtagtgaccttcctgattcaggaaagggatttgcttccagggagaacaggcgtaataatgggttatctgggaaatgtttgcaagaggctcaagaagaagggaattccatattgcctgaaagaagaggaagaccagaaatctctttagatgaaagaggagaaggaggacatgtgcatacttctgatgactcagaagttgtattttcttcttgtgatttgaatttaaccatggaagacagtgatggtgtaacttatgcattaaagtgtgacagtagtggtcatgccccagaaattgtgtctacagttcatgaagattattctggctcttctgaaagttcaaatgatgaaagtgattcagaagatacagattcggatgatagcagtattccaagaaaccgtctccagtctgttgtggttgtgccaaagaattctactttgcccatggaagaaacaagtccttgttcttctcggagcagtcaaagttatagacactattctgaccattgggaagatgagagattggagtcaaggagacatttgtatgaggaaaaatttgaaagtatagcaagtaaagcctgtcctcaaactgataagtttttccttcataaaggaacagagaagaatccggaaatttcttttacacagtccagtagaaaacaaatagataaccgcctgcctgaactttctcatcctcagagtgatggggttgatagtacaagtcatacagatgtgaaatctgaccctctgggtcacccaaattcagaggaaaccgtgaaagccaaaataccttctaggcagcaagaagagctgccaatttattcttctgattttgaagatgtcccaaataagtcttggcaacagaccactttccaaaacaggccagatagtagactgggaaaaacagaattgagtttttcttcctcttgtgagataccacatgtggatggcttgcactcatcagaagagctcagaaacttaggttgggacttctctcaagaaaagccttctaccacgtatcagcaacctgacagtagctatggagcttgtggtggacacaagtatcagcaaaatgcagaacagtatggtgggacacgtgattactggcaaggcaatggttactgggatccaagatcaggtagacctcctggaactggggttgtgtatgatcgaactcaaggacaagtaccagattccctaacagatgatcgtgaagaagaggagaattgggatcaacaggatggatcccatttttcagaccagtccgataaatttcttctatcccttcagaaagacaaggggtcagtgcaagcacctgaaataagcagcaattccattaaggacactttagctgtgaatgaaaagaaagatttttc

SEQ ID NO: 585231 - DNA, 5407 bp, Homo sapiens
  misc_feature (5314)..(5314): n is a, c, g, or t
  misc_feature (5319)..(5319): n is a, c, g, or t
  misc_feature (5324)..(5325): n is a, c, g, or t
  misc_feature (5327)..(5327): n is a, c, g, or t
  misc_feature (5331)..(5331): n is a, c, g, or t
aaatggatttcagaatattagtaggtgcaaagaaaaagacttggatgatacctgcatgctgcataagaagtcagaaagcccatttagagaaacagaacctctggtgtcaccacaccaagataaactcatgtctatgccagttatgactgtggattattccaaaacagtagttaaagaaccagttgatacgagggtttcttgctgcaaaaccaaagattcagacatatactgtactttgaacgatagcaacccttctttgtgtaactctgaagctgaaaatattgagccttcagttatgaagatttcttcaaatagctttatgaatgtgcatttggaatcaaaaccagttatatgtgatagtagaaatttgacagatcactcaaaatttgcatgtgaagaatataagcagagcatcggtagcactagttcagcttctgttaatcattttgatgatttatatcaacctattgggagttcaggtattgcttcatctcttcagagtcttccaccaggaataaaggtggacagtctaactctcttgaaatgcggagagaacacatctccagttctggatgcagtgccaaagagtaaaaaaagttcagagtttttaaagcatgcagggaaagaaacaatagtagaagtaggtagtgaccttcctgattcaggaaagggatttgcttccagggagaacaggcgtaataatgggttatctgggaaatgtttgcaagaggctcaagaagaagggaattccatattgcctgaaagaagaggaagaccagaaatctctttagatgaaagaggagaaggaggacatgtgcatacttctgatgactcagaagttgtattttcttcttgtgatttgaatttaaccatggaagacagtgatggtgtaacttatgcattaaagtgtgacagtagtggtcatgccccagaaattgtgtctacagttcatgaagattattctggctcttctgaaagttcaaatgatgaaagtgattcagaagatacagattcggatgatagcagtattccaagaaaccgtctccagtctgttgtggttgtgccaaagaattctactttgcccatggaagaaacaagtccttgttcttctcggagcagtcaaagttatagacactattctgaccattgggaagatgagagattggagtcaaggagacatttgtatgaggaaaaatttgaaagtatagcaagtaaagcctgtcctcaaactgataagtttttccttcataaaggaacagagaagaatccggaaatttcttttacacagtccagtagaaaacaaatagataaccgcctgcctgaactttctcatcctcagagtgatggggttgatagtacaagtcatacagatgtgaaatctgaccctctgggtcacccaaattcagaggaaaccgtgaaagccaaaataccttctaggcagcaagaagagctgccaatttattcttctgattttgaagatgtcccaaataagtcttggcaacagaccactttccaaaacaggccagatagtagactgggaaaaacagaattgagtttttcttcctcttgtgagataccacatgtggatggcttgcactcatcagaagagctcagaaacttaggttgggacttctctcaagaaaagccttctaccacgtatcagcaacctgacagtagctatggagcttgtggtggacacaagtatcagcaaaatgcagaacagtatggtgggacacgtgattactggcaaggcaatggttactgggatccaagatcaggtagacctcctggaactggggttgtgtatgatcgaactcaaggacaagtaccagattccctaacagatgatcgtgaagaagaggagaattgggatcaacaggatggatcccatttttcagaccagtccgataaatttcttctatcccttcagaaagacaaggggtcagtgcaagcacctgaaataagcagcaattccattaaggacactttagctgtgaatgaaaagaaagatttttcaaaaaacttagaaaaaaatgatatcaaagatagagggcctcttaaaaaaaggaggcaggaaatagagagtgattctgaaagtgatggtgagcttcaggacagaaagaaagttagagtggaggtagagcagggagagacatcagtgcccccaggttcagcactggttgggccctcctgtgtcatggatgacttcagggacccacagcgatggaaggaatgtgccaagcaagggaaaatgccatgttactttgatcttattgaagaaaatgtttatttaacagaaagaaagaagaataaatctcatcgagatattaagcgaatgcagtgtgagtgtacacctctttctaaagatgaaagagctcaagggtgaaatagcatgtggggaagattgtcttaatcgtcttctcatgattgaatgttcttctcggtgtccaaatggggattattgttccaatagacggtttcagagaaaacagcatgcagatgtggaagtcatactcacagaaaagaaaggctggggcttgagagctgccaaagaccttccttcgaacacctttgtcctagaatattgtggagaggtactcgatcataaagagtttaaagctcgagtgaaggagtatgcacgaaacaaaaacatccattactatttcatggccctgaagaatgatgagataatagatgccactcaaaaaggaaattgctctcgtttcatgaatcacagctgtgaaccaaattgtgaaacccaaaaatggactgtgaacggacaactgagggttgggttttttaccaccaaactggttccttcaggctcagagttaacgtttgactatcagttccagagatatggaaaagaagcccagaaatgtttctgcggatcagccaattgccggggttacctgggaggagaaaacagagtcagcatcagagcagcaggagggaaaatgaagaaggaacgatctcgtaagaaggattcaagtggatggagagctagaagctctgatggaaaatggtgagggtctctctgataaaaaccaggtgctcagcttatcccggctaatggttagaattgaaactttggagcagaaacttacctgtctggaactcatacagaacacacactcacagtcctgcctgaagtcctttctggaacgtcatgggctgtctttgttgtggatctggatggcagagctaggtgacggccgggaaagtaaccagaagcttcaggaagagattataaagactttggaacacttgcccattcctactaaaaatatgttggaggaaagcaaagtacttccaattattcaacgctggtctcagactaagactgctgtccctccgttgagtgaaggagatgggtattctagtgagaatacatcgcgtgctcatacaccactcaacacacctgatccttccaccaagctgagcacagaagctgacacagacactcccaagaaactaatgtttcgcagactgaaaattataagtgaaaatagcatggacagtgcaatctctgatgcaaccagtgagctagaaggcaaggatggcaaagaggatcttgatcaattagaaaatgtccctgtagaggaagaggaagaattgcagtcacaacagctactcccacaacagctgcctgaatgcaaagttgatagtgaaaccaacatagaagctagtaagctacctacatctgaaccagaagctgacgctgaaatagagcccaaagagagcaacggcacaaaactagaagaacctattaatgaagaaacaccatcccaagatgaagaggagggtgtgtctgatgtggagagtgaaaggagccaagaacagccagataaaacagtggatataagtgatttggccaccaaactcctggacagttggaaagacctaaaggaggtatatcgaattccaaagaaaagtcaaactgaaaaggaaaacacaagaaatcagcctgaataaatggaatgacttgtctgcctcacatattctaaggtgcagagtcagaatatgaactgttgcaactgaacgaggaagggatgctgttggcttcagagatcaaacacctgccccgaagactcctaataggtcaagagagagagacccagacaagcaaactcaaaataaagagaaaaggaaacgaagaagctccctctcaccaccctcttctgcctatgagcggggaacaaaaaggccagatgacagatatgatacaccaacttctaaaaagaaagtacgaattaaagaccgcaataaactttctacagaggaacgccggaagttgtttgagcaagaggtggctcaacgggaggctcagaaacaacagcaacagatgcagaacctgggaatgacatcaccactgccctatgactctcttggttataatgccccgcatcatccctttgctggttacccaccaggttatcccatgcaggcctatgtggatcccagcaaccctaatgctggaaaggtgctcctgcccacacccagcatggacccagtgtgttctcctgctccttatgatcatgctcagcccttggtgggacattctacagaacccctttctgcccctccaccagtaccagtggtgccacatgtggcagctcctgtggaagtttccagttcccagtatgtggcccagagtgatggtgtagtacaccaagactccagcgttgctgtcttgccagtgccggcccccggcccagttcagggacagaattatagtgtttgggattcaaaccaacagtctgtcagtgtacagcagcagtactctcctgcacagtctcaagcaaccatatattatcaaggacagacatgtccaacagtctatggtgtgacatcaccttattcacagacaactccaccaattgtacagagttatgcccagccaagtcttcagtatatccaggggcaacagattttcacagctcatccacaaggagtggtggtacagccagccgcagcagtgactacaatagttgcaccagggcagcctcagcccttgcagccatctgaaatggttgtgacaaataatctcttggatctgccgcccccctctcctcccaaaccaaaaaccattgtcttacctcccaactggaagacagctcgagatccagaagggaagatttattactaccatgtgatcacaaggcagactcagtgggatcctcctacttgggaaagcccaggagatgatgccagccttgagcattgaagctgagatggacctggggaactccaacatatggatgaaaaccccatgaaggcttcgaaaaagcccaagacagcagaagcagacacnccagngaacnncnaagnaaggccggcgtttccaaagaaagcccggtctcgcccgcgcgtgaactatggaactgctggatgtgggattcccggg

SEQ ID NO: 585232 - DNA, 548 bp, Homo sapiens
cctgccacatcctgcactactgcaaaggactgcgggcacttttacatgtgttctgctacggagccaggacaaacggccggtcagaagccggaccagcagtcggtggtgacgagagcctccctccagcaggcaccacgtcagagaggccccaggcccagtgagcccgggaggagacccagccgtccagccagacgtgtgcctgaatgccacagacttcaagcagttaacaaaggaaactcactgttaaaagctgttaaatctcattaaaacagcagaggagtgctttagattctctgaatatcaaataatatatacggatagacactgagacctgacagtctaatctaaggcatcttttacagatgcattgtgttgagaagttagtcttcttttaaactctgaatcagtgataaagttgttaattggcaaaaagagtacagttttaagcaagaatagagtgaaactacattttaaatatggggaattgggggagtactacctaaggtgcctatgtaaaggttccattcagatgcccaaaaggacaaaga

SEQ ID NO: 585233 - DNA, 4905 bp, Homo sapiens
  misc_feature (4812)..(4812): n is a, c, g, or t
  misc_feature (4817)..(4817): n is a, c, g, or t
  misc_feature (4822)..(4823): n is a, c, g, or t
  misc_feature (4825)..(4825): n is a, c, g, or t
  misc_feature (4829)..(4829): n is a, c, g, or t
aaatggatttcagaatattagtaggtgcaaagaaaaagacttggatgatacctgcatgctgcataagaagtcagaaagcccatttagagaaacagaacctctggtgtcaccacaccaagataaactcatgtctatgccagttatgactgtggattattccaaaacagtagttaaagaaccagttgatacgagggtttcttgctgcaaaaccaaagattcagacatatactgtactttgaacgatagcaacccttctttgtgtaactctgaagctgaaaatattgagccttcagttatgaagatttcttcaaatagctttatgaatgtgcatttggaatcaaaaccagttatatgtgatagtagaaatttgacagatcactcaaaatttgcatgtgaagaatataagcagagcatcggtagcactagttcagcttctgttaatcattttgatgatttatatcaacctattgggagttcaggtattgcttcatctcttcagagtcttccaccaggaataaaggtggacagtctaactctcttgaaatgcggagagaacacatctccagttctggatgcagtgccaaagagtaaaaaaagttcagagtttttaaagcatgcagggaaagaaacaatagtagaagtaggtagtgaccttcctgattcaggaaagggatttgcttccagggagaacaggcgtaataatgggttatctgggaaatgtttgcaagaggctcaagaagaagggaattccatattgcctgaaagaagaggaagaccagaaatctctttagatgaaagaggagaaggaggacatgtgcatacttctgatgactcagaagttgtattttcttcttgtgatttgaatttaaccatggaagacagtgatggtgtaacttatgcattaaagtgtgacagtagtggtcatgccccagaaattgtgtctacagttcatgaagattattctggctcttctgaaagttcaaatgatgaaagtgattcagaagatacagattcggatgatagcagtattccaagaaaccgtctccagtctgttgtggttgtgccaaagaattctactttgcccatggaagaaacaagtccttgttcttctcggagcagtcaaagttatagacactattctgaccattgggaagatgagagattggagtcaaggagacatttgtatgaggaaaaatttgaaagtatagcaagtaaagcctgtcctcaaactgataagtttttccttcataaaggaacagagaagaatccggaaatttcttttacacagtccagtagaaaacaaatagataaccgcctgcctgaactttctcatcctcagagtgatggggttgatagtacaagtcatacagatgtgaaatctgaccctctgggtcacccaaattcagaggaaaccgtgaaagccaaaataccttctaggcagcaagaagagctgccaatttattcttctgattttgaagatgtcccaaataagtcttggcaacagaccactttccaaaacaggccagatagtagactgggaaaaacagaattgagtttttcttcctcttgtgagataccacatgtggatggcttgcactcatcagaagagctcagaaacttaggttgggacttctctcaagaaaagccttctaccacgtatcagcaacctgacagtagctatggagcttgtggtggacacaagtatcagcaaaatgcagaacagtatggtgggacacgtgattactggcaaggcaatggttactgggatccaagatcaggtagacctcctggaactggggttgtgtatgatcgaactcaaggacaagtaccagattccctaacagatgatcgtgaagaagaggagaattgggatcaacaggatggatcccatttttcagaccagtccgataaatttcttctatcccttcagaaagacaaggggtcagtgcaagcacctgaaataagcagcaattccattaaggacactttagctgtgaatgaaaagaaagatttttcaaaaaacttagaaaaaaatgatatcaaagatagagggcctcttaaaaaaaggaggcaggaaatagagagtgattctgaaagtgatggtgagcttcaggacagaaagaaagttagagtggaggtagagcagggagagacatcagtgcccccaggttcagcactggttgggccctcctgtgtcatggatgacttcagggacccacagcgatggaaggaatgtgccaagcaagggaaaatgccatgttactttgatcttattgaagaaaatgtttatttaacagaaagaaagaagaataaatctcatcgagatattaagcgaatgcagtgtgagtgtacacctctttctaaagatgaaagagctcaagggtgaaatagcatgtggggaagattgtcttaatcgtcttctcatgattgaatgttcttctcggtgtccaaatggggattattgttccaatagacggtttcagagaaaacagcatgcagatgtggaagtcatactcacagaaaagaaaggctggggcttgagagctgccaaagaccttccttcgaacacctttgtcctagaatattgtggagaggtactcgatcataaagagtttaaagctcgagtgaaggagtatgcacgaaacaaaaacatccattactatttcatggccctgaagaatgatgagataatagatgccactcaaaaaggaaattgctctcgtttcatgaatcacagctgtgaaccaaattgtgaaacccaaaaatggactgtgaacggacaactgagggttgggttttttaccaccaaactggttccttcaggctcagagttaacgtttgactatcagttccagagatatggaaaagaagcccagaaatgtttctgcggatcagccaattgccggggttacctgggaggagaaaacagagtcagcatcagagcagcaggagggaaaatgaagaaggaacgatctcgtaagaaggattcaagtggatggagagctagaagctctgatggaaaatggtgagggtctctctgataaaaaccaggtgctcagcttatcccggctaatggttagaattgaaactttggagcagaaacttacctgtctggaactcatacagaacacacactcacagtcctgcctgaagtcctttctggaacgtcatgggctgtctttgttgtggatctggatggcagagctaggtgacggccgggaaagtaaccagaagcttcaggaagagattataaagactttggaacacttgcccattcctactaaaaatatgttggaggaaagcaaagtacttccaattattcaacgctggtctcagactaagactgctgtccctccgttgagtgaaggagatgggtattctagtgagaatacatcgcgtgctcatacaccactcaacacacctgatccttccaccaagctgagcacagaagctgacacagacactcccaagaaactaatgtttcgcagactgaaaattataagtgaaaatagcatggacagtgcaatctctgatgcaaccagtgagctagaaggcaaggatggcaaagaggatcttgatcaattagaaaatgtccctgtagaggaagaggaagaattgcagtcacaacagctactcccacaacagctgcctgaatgcaaagttgatagtgaaaccaacatagaagctagtaagctacctacatctgaaccagaagctgacgctgaaatagagcccaaagagagcaacggcacaaaactagaagaacctattaatgaagaaacaccatcccaagatgaagaggagggtgtgtctgatgtggagagtgaaaggagccaagaacagccagataaaacagtggatataagtgatttggccaccaaactcctggacagttggaaagacctaaaggaggtatatcgaattccaaagaaaagtcaaactgaaaaggaaaacacaagaaatcagcctgaataaatggaatgacttgtctgcctcacatattctaaggtgcagagtcagaatatgaactgttgcaactgaacgaggaagggatgctgttggcttcagagatcaaacacctgccccgaagactcctaataggtcaagagagagagacccagacaagcaaactcaaaataaagagaaaaggaaacgaagaagctccctctcaaagactccagcgttgctgtcttgccagtgccggcccccggcccagttcagggacagaattatagtgtttgggattcaaaccaacagtctgtcagtgtacagcagcagtactctcctgcacagtctcaagcaaccatatattatcaaggacagacatgtccaacagtctatggtgtgacatcaccttattcacagacaactccaccaattgtacagagttatgcccagccaagtcttcagtatatccaggggcaacagattttcacagctcatccacaaggagtggtggtacagccagccgcagcagtgactacaatagttgcaccagggcagcctcagcccttgcagccatctgaaatggttgtgacaaataatctcttggatctgccgcccccctctcctcccaaaccaaaaaccattgtcttacctcccaactggaagacagctcgagatccagaagggaagatttattactaccatgtgatcacaaggcagactcagtgggatcctcctacttgggaaagcccaggagatgatgccagccttgagcattgaagctgagatggacctggggaactccaacatatggatgaaaaccccatgaaggcttcgaaaaagcccaagacagcagaagcagacacnccagngaacnncnaagnaaggccggcgtttccaaagaaagcccggtctcgcccgcgcgtgaactatggaactgctggatgtgggattcccggg

SEQ ID NO: 585234 - DNA, 534 bp, Homo sapiens
  misc_feature (359)..(359): n is a, c, g, or t
ctcggctctaccttgtcggctgttctctgtgtttagatatcacatgctttcttcctaacttaattcctaacttttctgcttaaatgaccactcatcagaaaggtctccctctaaccaccacctcagagactctacctttaccctactattttttttttttggaaatagggtctcactcggttgcccaggcgggagtgcgggggtgtgatcacgactcactgcagcctagactacgggactcaggtgatcctcccacctcagcctccggggtagctgagactatagacgcataccaccacaccgggctaattttgggtatgttgggtagagagggggtttggccatgtggcccgggcggntcttgacctcgggggctcaagaattccaggtgcctcagcctcccaaggggtggagataacgggtatgagccagggtgcggggccccttaaccttatttctcttttaagtactctccaccatgggctatttaaaaattattgggtttaatggtatctgggagacagggtagagccg

SEQ ID NO: 585235 - DNA, 175 bp, Homo sapiens
ccacggacttacattctcattactattctgcctagcaaactcaaactacgaacgcactcacagttcgcatcataatcctctctcaaggcacttcaaacctctactcccactatatagctattttgatagacttctacccaagtcctcgtctaacctcggccttacccccacacta

SEQ ID NO: 585236 - DNA, 282 bp, Homo sapiens
  misc_feature (43)..(43): n is a, c, g, or t
  misc_feature (101)..(101): n is a, c, g, or t
  misc_feature (123)..(123): n is a, c, g, or t
  misc_feature (150)..(150): n is a, c, g, or t
  misc_feature (197)..(197): n is a, c, g, or t
  misc_feature (267)..(267): n is a, c, g, or t
ctcatcactgatacttagattctttcacttttattgtttgtcncagaatagttggtgctcatttctgtctgggaggtgctttctttttatctcttctcttngccttctatctgatgttagcanaataataggatttaagagcatcttaanattatataaatggctcaagactatgccttgggagcctagggtccagncttctttgccctcctgagtcctctgaaatagaataggagagaatttatgaccagtgttcccaaatcctancgtaagaatgctaga

SEQ ID NO: 585237 - DNA, 5331 bp, Homo sapiens
  misc_feature (5238)..(5238): n is a, c, g, or t
  misc_feature (5243)..(5243): n is a, c, g, or t
  misc_feature (5248)..(5249): n is a, c, g, or t
  misc_feature (5251)..(5251): n is a, c, g, or t
  misc_feature (5255)..(5255): n is a, c, g, or t
aaatggatttcagaatattagtaggtgcaaagaaaaagacttggatgatacctgcatgctgcataagaagtcagaaagcccatttagagaaacagaacctctggtgtcaccacaccaagataaactcatgtctatgccagttatgactgtggattattccaaaacagtagttaaagaaccagttgatacgagggtttcttgctgcaaaaccaaagattcagacatatactgtactttgaacgatagcaacccttctttgtgtaactctgaagctgaaaatattgagccttcagttatgaagatttcttcaaatagctttatgaatgtgcatttggaatcaaaaccagttatatgtgatagtagaaatttgacagatcactcaaaatttgcatgtgaagaatataagcagagcatcggtagcactagttcagcttctgttaatcattttgatgatttatatcaacctattgggagttcaggtattgcttcatctcttcagagtcttccaccaggaataaaggtggacagtctaactctcttgaaatgcggagagaacacatctccagttctggatgcagtgccaaagagtaaaaaaagttcagagtttttaaagcatgcagggaaagaaacaatagtagaagtaggtagtgaccttcctgattcaggaaagggatttgcttccagggagaacaggcgtaataatgggttatctgggaaatgtttgcaagaggctcaagaagaagggaattccatattgcctgaaagaagaggaagaccagaaatctctttagatgaaagaggagaaggaggacatgtgcatacttctgatgactcagaagttgtattttcttcttgtgatttgaatttaaccatggaagacagtgatggtgtaacttatgcattaaagtgtgacagtagtggtcatgccccagaaattgtgtctacagttcatgaagattattctggctcttctgaaagttcaaatgatgaaagtgattcagaagatacagattcggatgatagcagtattccaagaaaccgtctccagtctgttgtggttgtgccaaagaattctactttgcccatggaagaaacaagtccttgttcttctcggagcagtcaaagttatagacactattctgaccattgggaagatgagagattggagtcaaggagacatttgtatgaggaaaaatttgaaagtatagcaagtaaagcctgtcctcaaactgataagtttttccttcataaaggaacagagaagaatccggaaatttcttttacacagtccagtagaaaacaaatagataaccgcctgcctgaactttctcatcctcagagtgatggggttgatagtacaagtcatacagatgtgaaatctgaccctctgggtcacccaaattcagaggaaaccgtgaaagccaaaataccttctaggcagcaagaagagctgccaatttattcttctgattttgaagatgtcccaaataagtcttggcaacagaccactttccaaaacaggccagatagtagactgggaaaaacagaattgagtttttcttcctcttgtgagataccacatgtggatggcttgcactcatcagaagagctcagaaacttaggttgggacttctctcaagaaaagccttctaccacgtatcagcaacctgacagtagctatggagcttgtggtggacacaagtatcagcaaaatgcagaacagtatggtgggacacgtgattactggcaaggcaatggttactgggatccaagatcaggtagacctcctggaactggggttgtgtatgatcgaactcaaggacaagtaccagattccctaacagatgatcgtgaagaagaggagaattgggatcaacaggatggatcccatttttcagaccagtccgataaatttcttctatcccttcagaaagacaaggggtcagtgcaagcacctgaaataagcagcaattccattaaggacactttagctgtgaatgaaaagaaagatttttcaaaaaacttagaaaaaaatgatatcaaagatagagggcctcttaaaaaaaggaggcaggaaatagagagtgattctgaaagtgatggtgagcttcaggacagaaagaaagttagagtggaggtagagcagggagagacatcagtgcccccaggttcagcactggttgggccctcctgtgtcatggatgacttcagggacccacagcgatggaaggaatgtgccaagcaagggaaaatgccatgttactttgatcttattgaagaaaatgtttatttaacagaaagaaagaagaataaatctcatcgagatattaagcgaatgcagtgtgagtgtacacctctttctaaagatgaaagagctcaagggtgaaatagcatgtggggaagattgtcttaatcgtcttctcatgattgaatgttcttctcggtgtccaaatggggattattgttccaatagacggtttcagagaaaacagcatgcagatgtggaagtcatactcacagaaaagaaaggctggggcttgagagctgccaaagaccttccttcgaacacctttgtcctagaatattgtggagaggtactcgatcataaagagtttaaagctcgagtgaaggagtatgcacgaaacaaaaacatccattactatttcatggccctgaagaatgatgagataatagatgccactcaaaaaggaaattgctctcgtttcatgaatcacagctgtgaaccaaattgtgaaacccaaaaatggactgtgaacggacaactgagggttgggttttttaccaccaaactggttccttcaggctcagagttaacgtttgactatcagttccagagatatggaaaagaagcccagaaatgtttctgcggatcagccaattgccggggttacctgggaggagaaaacagagtcagcatcagagcagcaggagggaaaatgaagaaggaacgatctcgtaagaaggattcaagtggatggagagctagaagctctgatggaaaatggtgagggtctctctgataaaaaccaggtgctcagcttatcccggctaatggttagaattgaaactttggagcagaaacttacctgtctggaactcatacagaacacacactcacagtcctgcctgaagtcctttctggaacgtcatgggctgtctttgttgtggatctggatggcagagctaggtgacggccgggaaagtaaccagaagcttcaggaagagattataaagactttggaacacttgcccattcctactaaaaatatgttggaggaaagcaaagtacttccaattattcaacgctggtctcagactaagactgctgtccctccgttgagtgaaggagatgggtattctagtgagaatacatcgcgtgctcatacaccactcaacacacctgatccttccaccaagctgagcacagaagctgacacagacactcccaagaaactaatgtttcgcagactgaaaattataagtgaaaatagcatggacagtgcaatctctgatgcaaccagtgagctagaaggcaaggatggcaaagaggatcttgatcaattagaaaatgtccctgtagaggaagaggaagaattgcagtcacaacagctactcccacaacagctgcctgaatgcaaagttgatagtgaaaccaacatagaagctagtaagctacctacatctgaaccagaagctgacgctgaaatagagcccaaagagagcaacggcacaaaactagaagaacctattaatgaagaaacaccatcccaagatgaagaggagggtgtgtctgatgtggagagtgaaaggagccaagaacagccagataaaacagtggatataagtgatttggccaccaaactcctggacagttggaaagacctaaaggaggtatatcgaattccaaagaaaagtcaaactgaaaaggaaaacacaacaactgaacgaggaagggatgctgttggcttcagagatcaaacacctgccccgaagactcctaataggtcaagagagagagacccagacaagcaaactcaaaataaagagaaaaggaaacgaagaagctccctctcaccaccctcttctgcctatgagcggggaacaaaaaggccagatgacagatatgatacaccaacttctaaaaagaaagtacgaattaaagaccgcaataaactttctacagaggaacgccggaagttgtttgagcaagaggtggctcaacgggaggctcagaaacaacagcaacagatgcagaacctgggaatgacatcaccactgccctatgactctcttggttataatgccccgcatcatccctttgctggttacccaccaggttatcccatgcaggcctatgtggatcccagcaaccctaatgctggaaaggtgctcctgcccacacccagcatggacccagtgtgttctcctgctccttatgatcatgctcagcccttggtgggacattctacagaacccctttctgcccctccaccagtaccagtggtgccacatgtggcagctcctgtggaagtttccagttcccagtatgtggcccagagtgatggtgtagtacaccaagactccagcgttgctgtcttgccagtgccggcccccggcccagttcagggacagaattatagtgtttgggattcaaaccaacagtctgtcagtgtacagcagcagtactctcctgcacagtctcaagcaaccatatattatcaaggacagacatgtccaacagtctatggtgtgacatcaccttattcacagacaactccaccaattgtacagagttatgcccagccaagtcttcagtatatccaggggcaacagattttcacagctcatccacaaggagtggtggtacagccagccgcagcagtgactacaatagttgcaccagggcagcctcagcccttgcagccatctgaaatggttgtgacaaataatctcttggatctgccgcccccctctcctcccaaaccaaaaaccattgtcttacctcccaactggaagacagctcgagatccagaagggaagatttattactaccatgtgatcacaaggcagactcagtgggatcctcctacttgggaaagcccaggagatgatgccagccttgagcattgaagctgagatggacctggggaactccaacatatggatgaaaaccccatgaaggcttcgaaaaagcccaagacagcagaagcagacacnccagngaacnncnaagnaaggccggcgtttccaaagaaagcccggtctcgcccgcgcgtgaactatggaactgctggatgtgggattcccggg

SEQ ID NO: 585238 - DNA, 530 bp, Homo sapiens
  misc_feature (108)..(111): n is a, c, g, or t
ggtgttgtgaaaaccaccgctaattcaaagcaaaaatgggaaaggaaaagactcacatcaacatcgtcgtaatcggacacgtagattccggcaagtccaccacaaccnnnnacctgatctacaaatgtggtggaatcgacaagcgaaccatcgaaatgtttgagaaggaggctgctgagatgggaaagggctccttcaagtacgcctgggtcttagacaaactgaaagctgagcgtgagcgtggtatcactattgacatctccctgtggaaattcgagaccagcaaatactatgtgaccatcattgatgccccaggacacagagacttcattaaaaacatgattacaggcacattccaagcttgctgggctgtcctgattgttggtggtggtgttggtgaaatttgaaccttgtttttccaagaaccggcgaccccggagcctgctttttttggttaacccctggggggaaaacaattattgtttgggttcacaaaaggtttcccccgcccccctttctttcgtaataaa

SEQ ID NO: 585239 - DNA, 5498 bp, Homo sapiens
  misc_feature (5405)..(5405): n is a, c, g, or t
  misc_feature (5410)..(5410): n is a, c, g, or t
  misc_feature (5415)..(5416): n is a, c, g, or t
  misc_feature (5418)..(5418): n is a, c, g, or t
  misc_feature (5422)..(5422): n is a, c, g, or t
aaatggatttcagaatattagtaggtgcaaagaaaaagacttggatgatacctgcatgctgcataagaagtcagaaagcccatttagagaaacagaacctctggtgtcaccacaccaagataaactcatgtctatgccagttatgactgtggattattccaaaacagtagttaaagaaccagttgatacgagggtttcttgctgcaaaaccaaagattcagacatatactgtactttgaacgatagcaacccttctttgtgtaactctgaagctgaaaatattgagccttcagttatgaagatttcttcaaatagctttatgaatgtgcatttggaatcaaaaccagttatatgtgatagtagaaatttgacagatcactcaaaatttgcatgtgaagaatataagcagagcatcggtagcactagttcagcttctgttaatcattttgatgatttatatcaacctattgggagttcaggtattgcttcatctcttcagagtcttccaccaggaataaaggtggacagtctaactctcttgaaatgcggagagaacacatctccagttctggatgcagtgccaaagagtaaaaaaagttcagagtttttaaagcatgcagggaaagaaacaatagtagaagtaggtagtgaccttcctgattcaggaaagggatttgcttccagggagaacaggcgtaataatgggttatctgggaaatgtttgcaagaggctcaagaagaagggaattccatattgcctgaaagaagaggaagaccagaaatctctttagatgaaagaggagaaggaggacatgtgcatacttctgatgactcagaagttgtattttcttcttgtgatttgaatttaaccatggaagacagtgatggtgtaacttatgcattaaagtgtgacagtagtggtcatgccccagaaattgtgtctacagttcatgaagattattctggctcttctgaaagttcaaatgatgaaagtgattcagaagatacagattcggatgatagcagtattccaagaaaccgtctccagtctgttgtggttgtgccaaagaattctactttgcccatggaagaaacaagtccttgttcttctcggagcagtcaaagttatagacactattctgaccattgggaagatgagagattggagtcaaggagacatttgtatgaggaaaaatttgaaagtatagcaagtaaagcctgtcctcaaactgataagtttttccttcataaaggaacagagaagaatccggaaatttcttttacacagtccagtagaaaacaaatagataaccgcctgcctgaactttctcatcctcagagtgatggggttgatagtacaagtcatacagatgtgaaatctgaccctctgggtcacccaaattcagaggaaaccgtgaaagccaaaataccttctaggcagcaagaagagctgccaatttattcttctgattttgaagatgtcccaaataagtcttggcaacagaccactttccaaaacaggccagatagtagactgggaaaaacagaattgagtttttcttcctcttgtgagataccacatgtggatggcttgcactcatcagaagagctcagaaacttaggttgggacttctctcaagaaaagccttctaccacgtatcagcaacctgacagtagctatggagcttgtggtggacacaagtatcagcaaaatgcagaacagtatggtgggacacgtgattactggcaaggcaatggttactgggatccaagatcaggtagacctcctggaactggggttgtgtatgatcgaactcaaggacaagtaccagattccctaacagatgatcgtgaagaagaggagaattgggatcaacaggatggatcccatttttcagaccagtccgataaatttcttctatcccttcagaaagacaaggggtcagtgcaagcacctgaaataagcagcaattccattaaggacactttagctgtgaatgaaaagaaagatttttcaaaaaacttagaaaaaaatgatatcaaagatagagggcctcttaaaaaaaggaggcaggaaatagagagtgattctgaaagtgatggtgagcttcaggacagaaagaaagttagagtggaggtagagcagggagagacatcagtgcccccaggttcagcactggttgggccctcctgtgtcatggatgacttcagggacccacagcgatggaaggaatgtgccaagcaagggaaaatgccatgttactttgatcttattgaagaaaatgtttatttaacagaaagaaagaagaataaatctcatcgagatattaagcgaatgcagtgtgagtgtacacctctttctaaagatgaaagagctcaagggtgaaatagcatgtggggaagattgtcttaatcgtcttctcatgattgaatgttcttctcggtgtccaaatggggattattgttccaatagacggtttcagagaaaacagcatgcagatgtggaagtcatactcacagaaaagaaaggctggggcttgagagctgccaaagaccttccttcgaacacctttgtcctagaatattgtggagaggtactcgatcataaagagtttaaagctcgagtgaaggagtatgcacgaaacaaaaacatccattactatttcatggccctgaagaatgatgagataatagatgccactcaaaaaggaaattgctctcgtttcatgaatcacagctgtgaaccaaattgtgaaacccaaaaatggactgtgaacggacaactgagggttgggttttttaccaccaaactggttccttcaggctcagagttaacgtttgactatcagttccagagatatggaaaagaagcccagaaatgtttctgcggatcagccaattgccggggttacctgggaggagaaaacagagtcagcatcagagcagcaggagggaaaatgaagaaggaacgatctcgtaagaaggattcaagtggatggagagctagaagctctgatggaaaatggtgagggtctctctgataaaaaccaggtgctcagcttatcccggctaatggttagaattgaaactttggagcagaaacttacctgtctggaactcatacagaacacacactcacagtcctgcctgaagtcctttctggaacgtcatgggctgtctttgttgtggatctggatggcagagctaggtgacggccgggaaagtaaccagaagcttcaggaagagattataaagactttggaacacttgcccattcctactaaaaatatgttggaggaaagcaaagtacttccaattattcaacgctggtctcagactaagactgctgtccctccgttgagtgaaggagatgggtattctagtgagaatacatcgcgtgctcatacaccactcaacacacctgatccttccaccaagctgagcacagaagctgacacagacactcccaagaaactaatgtttcgcagactgaaaattataagtgaaaatagcatggacagtgcaatctctgatgcaaccagtgagctagaaggcaaggatggcaaagaggatcttgatcaattagaaaatgtccctgtagaggaagaggaagaattgcagtcacaacagctactcccacaacagctgcctgaatgcaaagttgatagtgaaaccaacatagaagctagtaagctacctacatctgaaccagaagctgacgctgaaatagagcccaaagagagcaacggcacaaaactagaagaacctattaatgaagaaacaccatcccaagatgaagaggagggtgtgtctgatgtggagagtgaaaggagccaagaacagccagataaaacagtggatataagtgatttggccaccaaactcctggacagttggaaagacctaaagcttctcagggcagcaaggagcttgttaacatcaccagctgaccatgtgtctccttttctcaactccatttccaacttcgtgctgaagaaaaacgagaacctagcgtgcattctgtgaagaaacaggaagatggttgggaagttggatgatgcatgaaaaatatataggaggtatatcgaattccaaagaaaagtcaaactgaaaaggaaaacacaacaactgaacgaggaagggatgctgttggcttcagagatcaaacacctgccccgaagactcctaataggtcaagagagagagacccagacaagcaaactcaaaataaagagaaaaggaaacgaagaagctccctctcaccaccctcttctgcctatgagcggggaacaaaaaggccagatgacagatatgatacaccaacttctaaaaagaaagtacgaattaaagaccgcaataaactttctacagaggaacgccggaagttgtttgagcaagaggtggctcaacgggaggctcagaaacaacagcaacagatgcagaacctgggaatgacatcaccactgccctatgactctcttggttataatgccccgcatcatccctttgctggttacccaccaggttatcccatgcaggcctatgtggatcccagcaaccctaatgctggaaaggtgctcctgcccacacccagcatggacccagtgtgttctcctgctccttatgatcatgctcagcccttggtgggacattctacagaacccctttctgcccctccaccagtaccagtggtgccacatgtggcagctcctgtggaagtttccagttcccagtatgtggcccagagtgatggtgtagtacaccaagactccagcgttgctgtcttgccagtgccggcccccggcccagttcagggacagaattatagtgtttgggattcaaaccaacagtctgtcagtgtacagcagcagtactctcctgcacagtctcaagcaaccatatattatcaaggacagacatgtccaacagtctatggtgtgacatcaccttattcacagacaactccaccaattgtacagagttatgcccagccaagtcttcagtatatccaggggcaacagattttcacagctcatccacaaggagtggtggtacagccagccgcagcagtgactacaatagttgcaccagggcagcctcagcccttgcagccatctgaaatggttgtgacaaataatctcttggatctgccgcccccctctcctcccaaaccaaaaaccattgtcttacctcccaactggaagacagctcgagatccagaagggaagatttattactaccatgtgatcacaaggcagactcagtgggatcctcctacttgggaaagcccaggagatgatgccagccttgagcattgaagctgagatggacctggggaactccaacatatggatgaaaaccccatgaaggcttcgaaaaagcccaagacagcagaagcagacacnccagngaacnncnaagnaaggccggcgtttccaaagaaagcccggtctcgcccgcgcgtgaactatggaactgctggatgtgggattcccggg

SEQ ID NO: 585240 - DNA, 334 bp, Homo sapiens
ttggtcagaagccaggaactggtgtcttccttaaaagatacgtgcggggccaggtgtggtggctcacgccctgtaatcccagcactttgggaggccgaggcgggcggatcacaaagtcaggacgagaccatcctggctaacacggtgaaaccctgtctctactaaaaatacaaaaaaaaattagctaggcgtagtggttggcacctatagtcccagctactcggaaggctgaagcaggagaatggtatgaatccaggaggtggagcttgcagtgagccgagaccgtgccactgcactccagcctgggcaacacagcgagactccgtctcgagga

SEQ ID NO: 585241 - DNA, 2607 bp, Homo sapiens
  misc_feature (2514)..(2514): n is a, c, g, or t
  misc_feature (2519)..(2519): n is a, c, g, or t
  misc_feature (2524)..(2525): n is a, c, g, or t
  misc_feature (2527)..(2527): n is a, c, g, or t
  misc_feature (2531)..(2531): n is a, c, g, or t
gatgggatctcttcaaggttatggttttatgtttgtattgattattgtttagactggtatgacttttgtgtgtatagccaacagttttgtatggttatacttccacatagctgacttctttcctatgctctttgaacagaaaagaagcccagaaatgtttctgcggatcagccaattgccggggttacctgggaggagaaaacagagtcagcatcagagcagcaggagggaaaatgaagaaggaacgatctcgtaagaaggattcaagtggatggagagctagaagctctgatggaaaatggtgagggtctctctgataaaaaccaggtgctcagcttatcccggctaatggttagaattgaaactttggagcagaaacttacctgtctggaactcatacagaacacacactcacagtcctgcctgaagtcctttctggaacgtcatgggctgtctttgttgtggatctggatggcagagctaggtgacggccgggaaagtaaccagaagcttcaggaagagattataaagactttggaacacttgcccattcctactaaaaatatgttggaggaaagcaaagtacttccaattattcaacgctggtctcagactaagactgctgtccctccgttgagtgaaggagatgggtattctagtgagaatacatcgcgtgctcatacaccactcaacacacctgatccttccaccaagctgagcacagaagctgacacagacactcccaagaaactaatgtttcgcagactgaaaattataagtgaaaatagcatggacagtgcaatctctgatgcaaccagtgagctagaaggcaaggatggcaaagaggatcttgatcaattagaaaatgtccctgtagaggaagaggaagaattgcagtcacaacagctactcccacaacagctgcctgaatgcaaagttgatagtgaaaccaacatagaagctagtaagctacctacatctgaaccagaagctgacgctgaaatagagcccaaagagagcaacggcacaaaactagaagaacctattaatgaagaaacaccatcccaagatgaagaggagggtgtgtctgatgtggagagtgaaaggagccaagaacagccagataaaacagtggatataagtgatttggccaccaaactcctggacagttggaaagacctaaaggaggtatatcgaattccaaagaaaagtcaaactgaaaaggaaaacacaacaactgaacgaggaagggatgctgttggcttcagagatcaaacacctgccccgaagactcctaataggtcaagagagagagacccagacaagcaaactcaaaataaagagaaaaggaaacgaagaagctccctctcaccaccctcttctgcctatgagcggggaacaaaaaggccagatgacagatatgatacaccaacttctaaaaagaaagtacgaattaaagaccgcaataaactttctacagaggaacgccggaagttgtttgagcaagaggtggctcaacgggaggctcagaaacaacagcaacagatgcagaacctgggaatgacatcaccactgccctatgactctcttggttataatgccccgcatcatccctttgctggttacccaccaggttatcccatgcaggcctatgtggatcccagcaaccctaatgctggaaaggtgctcctgcccacacccagcatggacccagtgtgttctcctgctccttatgatcatgctcagcccttggtgggacattctacagaacccctttctgcccctccaccagtaccagtggtgccacatgtggcagctcctgtggaagtttccagttcccagtatgtggcccagagtgatggtgtagtacaccaagactccagcgttgctgtcttgccagtgccggcccccggcccagttcagggacagaattatagtgtttgggattcaaaccaacagtctgtcagtgtacagcagcagtactctcctgcacagtctcaagcaaccatatattatcaaggacagacatgtccaacagtctatggtgtgacatcaccttattcacagacaactccaccaattgtacagagttatgcccagccaagtcttcagtatatccaggggcaacagattttcacagctcatccacaaggagtggtggtacagccagccgcagcagtgactacaatagttgcaccagggcagcctcagcccttgcagccatctgaaatggttgtgacaaataatctcttggatctgccgcccccctctcctcccaaaccaaaaaccattgtcttacctcccaactggaagacagctcgagatccagaagggaagatttattactaccatgtgatcacaaggcagactcagtgggatcctcctacttgggaaagcccaggagatgatgccagccttgagcattgaagctgagatggacctggggaactccaacatatggatgaaaaccccatgaaggcttcgaaaaagcccaagacagcagaagcagacacnccagngaacnncnaagnaaggccggcgtttccaaagaaagcccggtctcgcccgcgcgtgaactatggaactgctggatgtgggattcccggg

SEQ ID NO: 585242 - DNA, 346 bp, Homo sapiens
cttactaacctaatcgctcatacgtaccagtgtcaaggtctacttccccaccatcatccagcacaaaaacctcacctgcagtgaacagagaaaccatttacgttaagtgaaaaatacctataccatggcacaactgcaatcctgaaataaaacactcattaacaaggtgtgcaattacgtaataggaagcacagaaattcacttctagaagactaaatatgacacacaaaaagaaaaattaccagctattctctaaaaggtaacctcatacttctagcctgtcaacaaactcattcttaagaagagttataaaatagcatgggatgggaaggcgattagggttagt

SEQ ID NO: 585243 - DNA, 1585 bp, Homo sapiens
atgctcgcgtcggtcgcctccctactccgccgcgttgttgtcgcccgcccgcagttaggggagctcccccggggcggagttatctcgtcgttccgcaggggtttgtgtctgcttgggtcccgcggggggcgggagagaacaacaagtggtgttcacgcaccgaggggtccgactgtctggtgtggcggccccgtgtgtggccgcccatgttttttgggaggccacccccttttgtgtgacgccccggttgtgtgtggtgcccacgaaatacacacgggcgttgtggtgtgtcccgccggtgtccggggtgatgttttcctcccccggggggttatttctggtgtgcggggccccacagaggtggtggtctcggaagtgatcggtctgtggtggtaagccacgtgggaggtgttgggtgtgctcgtgcccgttccccacccgtgaggagggtgttcgtcgtagtttgtgtgcccccccacgcgccccgctgttttctccggggcgataagagtagtggtgttgtcttctgccgggccgccccctctataaaggcgccgcccgaggagtgtttgtggagaggggggtgagcgaccccccctctggtgatgatgggggagatagagaggagagggatatttttgggaaaaatccgcgggaatattttagtagggggaaagagaaagtgtgtgcccacagaggcgctcatcggcgggctttactagtatatattgttttgtgtggtgagggtttttttattatgtatgaaacagctatgacccttttgtagagagaaaaaattttggggaatataagggtgttctgcagatgttgaatgtgggtggagtatagagtagaataggggtagcacacatcacccaccgctctctcgagagagacgctcgcatagaaatttttataaagatgctggagatgtttccccacatggtagacaccgcgcagcccttctcacagatggtctgtcgcgttgtatagagactgcatctcgtcgaggagagatatctcgtctgtgtgtatagcaccctcggcgtgtcccctcgcgagatattctatacactctctcgcgatatataggagagaatattgtgttccacacagatatacacatctataatatatagggtgtgtagagatatctcgcgagttaaatttggtgtgaaagtgtgttctgtgggcacctcacaagagagagggtgtgttataaactcccgccgcgtgagaagggtgtggagagagagtttatgagtgtgttttctcgcgcccgccgagtgtgagatctcacactctcgagacacacacacaggcgtgaagaatatacttgagagggtcacatttttttttctctttgttgttacacacacgagatgagatgagaatatattatatattttctttcttttgtagatttgtttcacacaagtttgtcccacaaagaaaaacccccacaccccctccaccttctttctggatgataaatatgttagatggccgttaatatttttttttaagagcggaaattaatagctttcaccacattattaaactgggatattaattattggaggga

SEQ ID NO: 585244 - DNA, 241 bp, Homo sapiens
aaaaagtcacaccatttccccaatttaaatcaaagactagacataattaagcttagtgaggaaggcatgttgcaagttgacataggctgaaagctaagcctcttgtaccagttagccaagttgtgaatgcaaatgtaaagttcttaaaggaaattaaagttctactccagtgaatccatgaatgataagaaagcaaaacaccagcatggcacatgtatacatatgtaactaacctgcacaa

SEQ ID NO: 585245 - DNA, 400 bp, Homo sapiens
atctcgaggatcccgtgattcctttgtatctacaatggatcaatactcccttgaacaaacaggatgccaacgaggcactgtttggtgcccagctctcagtatatagaaactaaacttcttggccgggcgtggtggctcatgcctgtaatctcagcactttgggaggccgaagcaggcagatcacctgaggtcaggagttcaagaccagcctggccaacagggtgaaaccccaactctactaaaaatacaaaaaaattagctgggcgtggtggcccacgcctgtaatcccagctactcaggaggctgaggaaggagaatcacttgaacccgggaggcggaggttgcggtgagccgagatcacgccactgcactccagcctgggcgacagtgagactgtctc

SEQ ID NO: 585246 - DNA, 1588 bp, Homo sapiens
  misc_feature (1495)..(1495): n is a, c, g, or t
  misc_feature (1500)..(1500): n is a, c, g, or t
  misc_feature (1505)..(1506): n is a, c, g, or t
  misc_feature (1508)..(1508): n is a, c, g, or t
  misc_feature (1512)..(1512): n is a, c, g, or t
actggaacctcaaacctcctgggctcaagagctccacctgcctcaacctcctgagtggctgggactataggcatgggctgccatgcccaggaggtatatcgaattccaaagaaaagtcaaactgaaaaggaaaacacaagaaatcagcctgaataaatggaatgacttgtctgcctcacatattctaaggtgcagagtcagaatatgaactgttgcaactgaacgaggaagggatgctgttggcttcagagatcaaacacctgccccgaagactcctaataggtcaagagagagagacccagacaagcaaactcaaaataaagagaaaaggaaacgaagaagctccctctcaccaccctcttctgcctatgagcggggaacaaaaaggccagatgacagatatgatacaccaacttctaaaaagaaagtacgaattaaagaccgcaataaactttctacagaggaacgccggaagttgtttgagcaagaggtggctcaacgggaggctcagaaacaacagcaacagatgcagaacctgggaatgacatcaccactgccctatgactctcttggttataatgccccgcatcatccctttgctggttacccaccaggttatcccatgcaggcctatgtggatcccagcaaccctaatgctggaaaggtgctcctgcccacacccagcatggacccagtgtgttctcctgctccttatgatcatgctcagcccttggtgggacattctacagaacccctttctgcccctccaccagtaccagtggtgccacatgtggcagctcctgtggaagtttccagttcccagtatgtggcccagagtgatggtgtagtacaccaagactccagcgttgctgtcttgccagtgccggcccccggcccagttcagggacagaattatagtgtttgggattcaaaccaacagtctgtcagtgtacagcagcagtactctcctgcacagtctcaagcaaccatatattatcaaggacagacatgtccaacagtctatggtgtgacatcaccttattcacagacaactccaccaattgtacagagttatgcccagccaagtcttcagtatatccaggggcaacagattttcacagctcatccacaaggagtggtggtacagccagccgcagcagtgactacaatagttgcaccagggcagcctcagcccttgcagccatctgaaatggttgtgacaaataatctcttggatctgccgcccccctctcctcccaaaccaaaaaccattgtcttacctcccaactggaagacagctcgagatccagaagggaagatttattactaccatgtgatcacaaggcagactcagtgggatcctcctacttgggaaagcccaggagatgatgccagccttgagcattgaagctgagatggacctggggaactccaacatatggatgaaaaccccatgaaggcttcgaaaaagcccaagacagcagaagcagacacnccagngaacnncnaagnaaggccggcgtttccaaagaaagcccggtctcgcccgcgcgtgaactatggaactgctggatgtgggattcccggg

SEQ ID NO: 585247 - DNA, 819 bp, Homo sapiens
aggagagaaaaaaaaaaaaaagaaaaaaaaaaaaagtgttccagcccttttaagggatgtgtttggggcaaggatgatttgccccgggttaaatttgggaaagcttattgtattctttaaatagattgtgggagcattgactctcgaagggatccttttcccctttctccttatttctcctacccaattgggatttctatcctgcaaaaaaagagagacctgtcattagaagcaaaccagggttctcctgattacaagagaagaattgctgtgatgacaatatgggttggctgtatctgctccccactagctttggccattgggaaacaacccaaggggggaacgtttcctcttaaagcaggagacttccattacacaggggacacacttcggcggggcaacaacaagggttcctcacacccaccttggtgtaacatctcagattaaggagtatccagattttttattgcgttaccaattacgggaaaagggggacccttccaagtgggggattcacgtggtcaggagggtttgtaccaaggtgctttcctgggggagaatagatcttggttcgggctaaccaacggggtttgtcccaattgaacagtagtaagcggttgggcggcagttcctcggaaacaatcagcaaaattttaggatggccacaaatccataattcccagcggggtgcattaggatcacctttctctacacactggtcaacaattggagggcaaaaaacgggctgtcacccaagaaacgtggtgttcaggggacccagagtttttaccggataaaaattcccatttagagagagat

SEQ ID NO: 585248 - DNA, 564 bp, Homo sapiens
acagcccaagccaaaagcagtgagcagcagttttacctgaagacaaagcaggtgtttcaaaaaaattgaactgaaccctggaagctagctccatgtcatgagctggtaaattattcatcagcgatgaaggaagagtaattgtgccaatactgttctcaggagcttgggtttccagagaaacctgaaaatcaagtggaagataagaataaatgtctggagctagtataatgagatggaaaacacatctattaagttggtgcaaaagtaattgcagtatgtgccattttttttttaaaaaaagataaaaaccacaattacttttggcaccagcctaataattaaaacgcagggttctgtaaggacctgacctgcggcatctctatgcaaaatagcttctacttctattcctctgggtggctactaaattaaagaaaggaagtataggctgggcacggcggctcacgcctgtaatcccaacacttggggaggccgagtcgggaggatcacctgaggtcaggagtttaagaccagcctggccagcatggcagcagccctgtctctact

SEQ ID NO: 585249 - DNA, 202 bp, Homo sapiens
tgagatactaacagtcctctatagtctgcccacctagtgcagctgcaggactagtgaagagcagtggatatggcccctccccactgccccgacccatggtgagttcgtgctgggtaaggaagaggaagtcagcaaaggacagaggtcaaggaaagaaggaggaaacagagccgctggggagacaggattgcttgttccgctg

SEQ ID NO: 585250 - DNA, 189 bp, Homo sapiens
tcattagcattttattgaatagaatttcccaggcaatagtatcttttaaaaagctttcaaaaatatgtaatttcaaaataataggaggatttctgtaagaaataaactaactaggtttgatagtaaagtacaattttataataaaatcagcactaacaaggtttaaattgaacaaaagatgaaaaataa

SEQ ID NO: 585251 - DNA, 583 bp, Homo sapiens
aattttgacgcgttctcctgcctcagcctcccaagtagctggggctataggcacctgccaccatgctcagctatattttttgtatttttagtaaagacggggttcaccgtgttagccaggatggtcttgatctcctgacctcgtgatccatccgcctcagcttcccaaagtgctgggactacaggcgtgagccactgcgcccgactgaatactttttatttttaggaagcagttaaagttagtctatgtctcagtgttttttataaatgcattgagagacgtcttgaataatgttcaccaaatgctaatggtagttatttttggggaaatgggtattaaggtggcaattaaaaattttttttttggcctggtgctgtggcttatgcctgtaatcctcctcctgccttggccttccaaagtgttgtaattacaggtgtgagccactgtacctggctcaaagcaacagatttggataatagataggagagtgtgtacatcaaagatactggcaggatttctagttaacgtgactgggtgtgatgatgggaactctactacctacagaaggaaacatgggaatggg

SEQ ID NO: 585252 - DNA, 97 bp, Homo sapiens
  misc_feature (23)..(23): n is a, c, g, or t
acatgcgaactggactgatcaancactggtgcttgtctgtggcttgcaccacacattgtaccctggtggcatttgcctgacatgtgattgcagaatg

SEQ ID NO: 585253 - DNA, 594 bp, Homo sapiens
ctggttgtcaatgaggatatttattggggtttcatgagtgcggtgagaggctggagggtgctaggcccgtgtgtagtagtgcatagaattctagcttttttcctcctttctctgtatattgggctcagagagtacactgtgtctctatgtgaatatggacagttagcatttaccaacatgtatctgtctactttctcttgtttaaaaaaagaaaaaaaaacttaaaaaaatggggttatagaaggtcagcaaagggtgggtttgagatgtttgggtgggttaagtgggcattttgacaacatggcttctcctttggcatgtttaattgtgatatttgacagacatccttgcagtttaagatgacacttttaaaataaattctctcctaatgatgacttgagccctgccactcaatgggagaatcagcagaacctgtaggatcttatttggaattgacattctctattgtaattttgttcctgtttatttttaaattttctttttgtttcactggaaaggaaagatgatgctcagttttaaacgttaaaagtgtacaagttgctttgttacaataaaactaaatgtgtacacaaa

SEQ ID NO: 585254 - DNA, 155 bp, Homo sapiens
attatactaacgtgtagtgttgtgctcgtgtgtgtgctgtgtcatgcgtgtgctgtgtgttgtgtgtgtgtagctgcggggatgcataaagtgtgagtgctttttaggatgggaattgaggtggaagagtttgtggaggggttaggtctacctgg

SEQ ID NO: 585255 - DNA, 676 bp, Homo sapiens
tctaccccgtttgctgtgtcgaagtgtcattgtttattccctgtcgctgtcgtgaacaaaaactgtatggaatcaacaccaccgagctctgtgggaaaaaagaaaaacctgctcccttcgctctgctggaagctggagggtgctaggcccgtgtgtagtagtgcatagaattctagcttttttcctcctttctctgtatattgggctcagagagtacactgtgtctctatgtgaatatggacagttagcatttaccaacatgtatctgtctactttctcttgtttaaaaaaagaaaaaaaaacttaaaaaaatggggttatagaaggtcagcaaagggtgggtttgagatgtttgggtgggttaagtgggcattttgacaacatggcttctcctttggcatgtttaattgtgatatttgacagacatccttgcagtttaagatgacacttttaaaataaattctctcctaatgatgacttgagccctgccactcaatgggagaatcagcagaacctgtaggatcttatttggaattgacattctctattgtaattttgttcctgtttatttttaaattttctttttgtttcactggaaaggaaagatgatgctcagttttaaacgttaaaagtgtacaagttgctttgttacaataaaactaaatgtgtacacaaa

SEQ ID NO: 585256 - DNA, 233 bp, Homo sapiens
gcaggatggatcactgagtcaggagtttgagaccagcctgggcaacatacagatgtctacaaaaataaaaattgcaaggtgtggtggcatgcacctgtagtcccaactgctagggaggctgaggtgggcagattgcttgagctcaggagtttgagaccagtctgggcaacctggcaaaaccaaaaatacaaaaaattggctgggtgtggtggctcatgcctgtgatcacggca

SEQ ID NO: 585257 - DNA, 934 bp, Homo sapiens
  misc_feature (8)..(8): n is a, c, g, or t
  misc_feature (12)..(12): n is a, c, g, or t
  misc_feature (16)..(16): n is a, c, g, or t
  misc_feature (76)..(76): n is a, c, g, or t
  misc_feature (105)..(105): n is a, c, g, or t
  misc_feature (110)..(110): n is a, c, g, or t
  misc_feature (126)..(126): n is a, c, g, or t
  misc_feature (139)..(139): n is a, c, g, or t
  misc_feature (141)..(141): n is a, c, g, or t
  misc_feature (145)..(145): n is a, c, g, or t
  misc_feature (157)..(157): n is a, c, g, or t
  misc_feature (159)..(159): n is a, c, g, or t
  misc_feature (190)..(190): n is a, c, g, or t
  misc_feature (195)..(195): n is a, c, g, or t
  misc_feature (201)..(201): n is a, c, g, or t
  misc_feature (219)..(219): n is a, c, g, or t
  misc_feature (245)..(245): n is a, c, g, or t
  misc_feature (253)..(253): n is a, c, g, or t
  misc_feature (258)..(258): n is a, c, g, or t
  misc_feature (260)..(260): n is a, c, g, or t
  misc_feature (283)..(283): n is a, c, g, or t
  misc_feature (295)..(295): n is a, c, g, or t
  misc_feature (318)..(318): n is a, c, g, or t
  misc_feature (344)..(344): n is a, c, g, or t
  misc_feature (351)..(351): n is a, c, g, or t
  misc_feature (498)..(498): n is a, c, g, or t
  misc_feature (613)..(613): n is a, c, g, or t
  misc_feature (742)..(742): n is a, c, g, or t
  misc_feature (794)..(794): n is a, c, g, or t
  misc_feature (931)..(931): n is a, c, g, or t
aattcaantganacanaagctttggtcctggctctcggcccgtagttgtagaaggagccctgctggtgcaggttanaggtgccgcatcccccggagcactcgaantggangcggaaagaaaagganggcttgcggctancnggangaagctttggancnggccaaggcaaaaaaacccaaaaagctgaanaccanaaaaanaaaatcaagggttggcangcccttgttggaacgaaaaaagcacnaacaaaantaaananaaaagtgagtgaaaacaaaaagntgttccaacganaatcaaaaccaaaatggaaaatntgtgtagaaagaaagggaagaagaanaaaaaangtatgtagctaaaaagcatgaatagttcgaagatgactctgatcctcctcctaagaaacgtgctcgagtacagtggtttgtccgattctgtgaagtccctgcctgtaaacggcatttgttgggccggaagcctggtgcacaggaaanattctggtatgattacccggcctgtgacagcaacattaatgcggagaccatcattggccttgttcgggtgatacctttagccccaaaggatgtggtaccgacgaatctgaaaaangagaagacactctttgtgaaactatcctggaatgagaagaaattcaggccactttcctcagaactatttgcggagttgaataaaccacaagagagtgcagccaagtgccagaaacccgtgagagccaanagtaagagtgcagagagcccttcttggacccagcagaacatgtggccaaaangattgaatcaaggcactccgcctccaaatctcgccaaactcctacccatcctcttacccaagagccagaaagaggctggagcttggcaacttaggtaacctcagatgtccaacagacttcatgtgcctcttggattntca

SEQ ID NO: 585258 - DNA, 1092 bp, Homo sapiens
  misc_feature (699)..(699): n is a, c, g, or t
ctggttgtcaatgaggatatttattggggtttcatgagtgcggtgagaggctggagggtgctaggcccgtgtgtagtagtgcatagaattctagcttttttcctcctttctctgtatattgggctcagagagtacactgtgtctctatgtgaatatggacagttagcatttaccaacatgtatctgtctactttctcttgtttaaaaaaagaaaaaaaaacttaaaaaaatggggttatagaaggtcagcaaagggtgggtttgagatgtttgggtgggttaagtgggcattttgacaacatggcttctcctttggcatgtttaattgtgatatttgacagacatccttgcagtttaagatgacacttttaaaataaattctctcctaatgatgacttgagccctgccactcaatgggagaatcagcagaacctgtaggatcttatttggaattgacattctctattgtaattttgttcctgtttatttttaaattttctttttgtttcactggaaaggaaagatgatgctcagttttaaacgttaaaagtgtacaagttgctttgttacaataaaactaaatgtgtacacaaaaaaaaaaaaaaaaaaaaaaaaaaaaaaaaaaaaaaaaaaaaaaaaaaaaaaaaaaaaaaaaaaaaaaaaaaaaaatttaaaaaaaaaaaaaaaaaaaaaaaaaanattttttggggcccccttggccccatttttttttaatttgggcaaatttttggctggggcccaaatttggggttacttggccaatttcccctttaggggggggaattaaaaataacgggccggggttttaaaaggcgggaagggaaaaaccccggggtacccaaattaaacgcgttggggaaattccccttttcgcagggggggaaaaaaaaaaaggggcccgcacgagtgcccctttaaaagatttgccacccctgagggggaaagggaattgaacggcttaatttttgtgaaaatctccggttaaatttttttaaaaaaccttttttttaaacccaagggcggaaatggggaaattctttttaaataaaaaaaagcggggccccaccgaaa

SEQ ID NO: 585259 - DNA, 1174 bp, Homo sapiens
  misc_feature (781)..(781): n is a, c, g, or t
tctaccccgtttgctgtgtcgaagtgtcattgtttattccctgtcgctgtcgtgaacaaaaactgtatggaatcaacaccaccgagctctgtgggaaaaaagaaaaacctgctcccttcgctctgctggaagctggagggtgctaggcccgtgtgtagtagtgcatagaattctagcttttttcctcctttctctgtatattgggctcagagagtacactgtgtctctatgtgaatatggacagttagcatttaccaacatgtatctgtctactttctcttgtttaaaaaaagaaaaaaaaacttaaaaaaatggggttatagaaggtcagcaaagggtgggtttgagatgtttgggtgggttaagtgggcattttgacaacatggcttctcctttggcatgtttaattgtgatatttgacagacatccttgcagtttaagatgacacttttaaaataaattctctcctaatgatgacttgagccctgccactcaatgggagaatcagcagaacctgtaggatcttatttggaattgacattctctattgtaattttgttcctgtttatttttaaattttctttttgtttcactggaaaggaaagatgatgctcagttttaaacgttaaaagtgtacaagttgctttgttacaataaaactaaatgtgtacacaaaaaaaaaaaaaaaaaaaaaaaaaaaaaaaaaaaaaaaaaaaaaaaaaaaaaaaaaaaaaaaaaaaaaaaaaaaaaatttaaaaaaaaaaaaaaaaaaaaaaaaaanattttttggggcccccttggccccatttttttttaatttgggcaaatttttggctggggcccaaatttggggttacttggccaatttcccctttaggggggggaattaaaaataacgggccggggttttaaaaggcgggaagggaaaaaccccggggtacccaaattaaacgcgttggggaaattccccttttcgcagggggggaaaaaaaaaaaggggcccgcacgagtgcccctttaaaagatttgccacccctgagggggaaagggaattgaacggcttaatttttgtgaaaatctccggttaaatttttttaaaaaaccttttttttaaacccaagggcggaaatggggaaattctttttaaataaaaaaaagcggggccccaccgaaa

SEQ ID NO: 585260 - DNA, 914 bp, Homo sapiens
  misc_feature (599)..(600): n is a, c, g, or t
ctggttgtcaatgaggatatttattggggtttcatgagtgcggtgagaggctggagggtgctaggcccgtgtgtagtagtgcatagaattctagcttttttcctcctttctctgtatattgggctcagagagtacactgtgtctctatgtgaatatggacagttagcatttaccaacatgtatctgtctactttctcttgtttaaaaaaagaaaaaaaaacttaaaaaaatggggttatagaaggtcagcaaagggtgggtttgagatgtttgggtgggttaagtgggcattttgacaacatggcttctcctttggcatgtttaattgtgatatttgacagacatccttgcagtttaagatgacacttttaaaataaattctctcctaatgatgacttgagccctgccactcaatgggagaatcagcagaacctgtaggatcttatttggaattgacattctctattgtaattttgttcctgtttatttttaaattttctttttgtttcactggaaaggaaagatgatgctcagttttaaacgttaaaagtgtacaagttgctttgttacaataaaactaaatgtgtacacaaaggatnngatgctttcctctcacgcataggctatgcttactatgaccttccaagttcgactctgtataacatcactgctcaaacttctgtcaccctaacttcgtactcttttccgatacgcactctcgccggcatgacctcagggctcatgtggcattgacgtaatgggcatctgcaatcgacatgtattaatcatctcccatagctgggcacacgtggcgttcaatcttgccattggttccctgcacagtcattcaccatcgatcccggcgatcacccagcatagctccatactctctgcagtaccattgtgccgcttga

SEQ ID NO: 585261 - DNA, 163 bp, Homo sapiens
  misc_feature (43)..(43): n is a, c, g, or t
ccttatggctttacagagcaagaatctgatgcagactttcaanataatgaaaatttgtacagtttaaacaacagctgaaagaactaaagaagcaatgtggtcttcaagctgacagagaagctgacggaacagaaggagtggatgaagatataattgtgaccca

SEQ ID NO: 585262 - DNA, 991 bp, Homo sapiens
ctggttgtcaatgaggatatttattggggtttcatgagtgcggtgagaggctggagggtgctaggcccgtgtgtagtagtgcatagaattctagcttttttcctcctttctctgtatattgggctcagagagtacactgtgtctctatgtgaatatggacagttagcatttaccaacatgtatctgtctactttctcttgtttaaaaaaagaaaaaaaaacttaaaaaaatggggttatagaaggtcagcaaagggtgggtttgagatgtttgggtgggttaagtgggcattttgacaacatggcttctcctttggcatgtttaattgtgatatttgacagacatccttgcagtttaagatgacacttttaaaataaattctctcctaatgatgacttgagccctgccactcaatgggagaatcagcagaacctgtaggatcttatttggaattgacattctctattgtaattttgttcctgtttatttttaaattttctttttgtttcactggaaaggaaagatgatgctcagttttaaacgttaaaagtgagcatcatctttcctttccagtgaaaaaaaaaaaaaaaaaaaaaaaaaaaaaaaaaaaaaaggggggggggtaaaaatccccggggggccccttcggccccttttttggaagggggcccccataagaggagaccgcaaaataataacgcacgagagcgagggcccggccgttttaaaccaccggcccggatggggggaaacagcggctccccgggacaccctttgggagaagggacccccaacactccggggcggggcgacacataatttggggacagaacacaccctacaagagatttaaacgcccacaggggaacaacataaacactttccaaagtgtccaaccgggggttacccacacgcgccaatagcccgccgctgcaaacactgggccacaagggtatcatcacgaccatttactctgagccgtacataaaga

SEQ ID NO: 585263 - DNA, 290 bp, Homo sapiens
catagcatctctccccgccatacacgcaatgcctctttgatgacaggtagcctagagttatgtgcccttaggacaccaacgcacatacctctctgtccatctcgctcctttcttcaattgagacagggtctttcacgtcattccagaatatggaattgcggtctccactctcaaaaatcacactgtactgatctctgcatcctgcctcttgcatccagtcacgtacgttcccctggtctttgaaaggctgtttctctggaatatcccactcgtcactgttcgtcatatac

SEQ ID NO: 585264 - DNA, 135 bp, Homo sapiens
  misc_feature (79)..(79): n is a, c, g, or t
atctcggtttacggatgatataacgtgaggcacagagagaggttacagaacttgaacaaagttatacaaacagtaagtngtagagataagagtagagcatacatcactaaactcaacattacacacacttaaatg

SEQ ID NO: 585265 - DNA, 977 bp, Homo sapiens
ggttagtgctttgaaaaaatgttgaaccggctgggcgcggtggctcacgtctgtaatcccagcactttgggaggccgaggcgggtggatcatgaggtcaggagttcgagaccagcctggccaacatagtgaaaccccatctctgctaaagatataaaaaattagcctggcgtggtggtgcacgcctgtaatcccagctactcgggaggctgaggcaggagaattgcttcaacctgggaggtggaggctgcagtgagccgagatcgcaccactgcgttccagcctgagcgacagggcaagactcagtctcaaaaaaaaaaaaacgggaaaaacaaaagacacaaaaaatggtgcgaaccaatgggtgacattacgtcatagtgtctataatccatttctcatgtggggcacgagctaagcgcgtgctcgcacgaaaccttaaccattgtgctaacacgtgcctctcaatttccgggccctcttggtccaaagtgttcacagcgtttcacctgttcacaaaaccccattttcagagttacgcggaacagtgcaattctactagtgcgggctccaggtgtgcctcccacacaaacatctagacccttgatgtgaagcacaccccaaacgaaagttcaccccctctaaggggcatcattgactacgacaccgcgaactacgcctctagtgcaacagagcctctccccacggtttcacaggatactcgtacaggctcccataataaaaagcggcgccactcatgtgacccgccgggcattcaccccgtgagaatgccttgcggccaccttagaaacccccccaagcttacgaaacacaacagctcgctttgtcacataggctcctgaccgacccattgcgggacggaaccgccctccaccctatctcggcgcggacacgcaccctcttttatcttcctccgcgaacccccttatcgcgcacaacaccctgctcgcgctcccg

SEQ ID NO: 585266 - DNA, 366 bp, Homo sapiens
  misc_feature (21)..(21): n is a, c, g, or t
  misc_feature (50)..(50): n is a, c, g, or t
  misc_feature (74)..(74): n is a, c, g, or t
  misc_feature (128)..(128): n is a, c, g, or t
  misc_feature (213)..(213): n is a, c, g, or t
  misc_feature (244)..(244): n is a, c, g, or t
  misc_feature (275)..(275): n is a, c, g, or t
  misc_feature (298)..(298): n is a, c, g, or t
  misc_feature (306)..(306): n is a, c, g, or t
  misc_feature (359)..(359): n is a, c, g, or t
ggaggagctggtggtgggggnttcgagttcgcagccaagtacagtgtttnggccctggagacacagccgcaganacccccttttcatgcatggacctcaccctacggtcagccttgctactccagganttcggtttttccaggagcaaagtgctgaagctcactcggaaaattgacaatgttgagaccagctgggctctgggggccatttttnattacatcgactccctgaacagacagaagantccagcctcatagtggccgagcatccctgtncccgtcagcagtgtctgtttgtntgcataanccctcctgtcctggacgtgacttcatcctgaggagccacagcacaggccgtgntgggcac

SEQ ID NO: 585267 - DNA, 129 bp, Homo sapiens
ggtatgtgttgatgttgagcatctggccactgggaagcatatggcccctagggcactgcctttgttggaaaacggcgtccagattgttgtaatgttttgaggaattaaactgttttgtttagaagcaga

SEQ ID NO: 585268 - DNA, 458 bp, Homo sapiens
agcggggtttcctgacatggtgtagtgcaggcagggtggggaaaggacggggaaggactcgtgtgctgcgagctggcggccgggccggagtgctggggctattgaactccgagaggaggtggaccagaacttatggaactagtgccggcggctcatccactcccccagtataaaagaacgtgtggatcactgttgctgagttacatccaagtatttgagagggaagctttgggacaccaggtagaaattcaaggggctatttatagagccgtggcattttataaaagatatctggtgttggaatattgccgcctgacaagagtaatagaagatgatgagtgatgcaagtgacatgtaggctgcagcgttggagcacgatggatggtatcatgagcaggttctaaggctctggaatattccagatgggcatttcagattgccaatctcccagcctctcc

SEQ ID NO: 585269 - DNA, 713 bp, Homo sapiens
ctcagccccatagcagctatgatcccgctgctgctggcaggcgctgctgtgcgtccccgccgtgggccctgacctgctacggggactccgggcagcctgtagactggttcgtggtctacaacgctgccatgctcttagagggtccgggggagggcggcgcagagatgggctgcatgtacaagtatctgtgacgagatgctccggaggctggcgggacggcatggtggcactcatcaacagcccgtgatgttggggcctgtgggccgaagcctgcatgccgcttgtacctggagcaaacaccaggccatgactcgccatatccttgcctcgtaacaaattgaccaaaacgacacataccaaacccaagcaatggctcaggactcttaccattgcgtgggcacacgaagggtgtcctgctccttgaccaccgatgggtggcttctggctggtccacagtgtacctaacttccctccaccggccctcctcttgcttgcactacacagctgtgcctcaatagacgcctgtaccctacggtgctagacccttgattctgtgttgtctatttcccattcagaatcaagtctcgaaagatgggcaaagcagtttgaactaaaacttaaccctggggtcatataaactaccaagcttgcaacggcatctattgccccaggcaattccccgacttgcaaacatgtgctccaaaggcgcacca

SEQ ID NO: 585270 - DNA, 430 bp, Homo sapiens
atttttcccctaaattgtgactctcaccattcggcttcttatgcacggaaaggaagtagaagcatcattgggaagaaaggggagtcaggttaagacagatccgcgatggagagtggcgcgcggtatcaagcatctcgcgaggggccattgtccaggatgagaatcatcactactgaccaggccccacctaatgccttactttaagcgctttcgctcatgatcattcgacaacgctggagagaagatatcaacagtctccagtgaccaatcagtacacgctggccagcatggcccccaggtcaccctgtaggcttggtggttgccggccacccatgtgcggctcccgtgattgggacaaggcgggtgtaagatcaaacgagatccgcgagaggtacgggggcgcaggtccaggtggcgggggatatgctgc

SEQ ID NO: 585271 - DNA, 323 bp, Homo sapiens
tatgcacaacctagggtcagtcttgcaggtggtaagccatttaccaagatagttgtaggtaaagaagggcagatttattagagaaatgtgaaaatatgttgcagtgggcagctcagcagagaaggggctacctgcaaagaggcaagggctggaggaaagttttatagggtcctgctgaagggtgctacgtgtggaatgaggtcattgtgcccgcaggttgtttgtgattagctgtctctaacaattgttcatacaataattgttcattattgttctcaacttggggctctccccaacctggggacccttccttattgttgcta

SEQ ID NO: 585272 - DNA, 183 bp, Homo sapiens
ataactggtcctggttctttactagacagtaattcgcaggacaagggtccgtctcaaaggcctcagtaagaatcagtgtattagatatctagtcaaatttggtcctcctatgacctctgagctggctgtaatggctcatgcctgtaatcccagcactttgggagaccgcgcggccaggcagaa

SEQ ID NO: 585273 - DNA, 184 bp, Homo sapiens
tacgcacacgcgctttcttccagatcgtgaaacactttttagctcccgcgacttccattgctccggagggaccttttttggtacagtcatagttttgtttaggcttactttttcttgtcttacatgtgtggcagtatttttaaagaacttccacatcaagtatttttcctgtatctatacttga

SEQ ID NO: 585274 - DNA, 733 bp, Homo sapiens
gcttgctggtgtacttcttgtcttcagttaagtattcatttagcaaatatccgagtacccactgtgtgtctgtcagtttgcttacgcttttacagaccctagttttggagtttcatatgtgtcacgtgaagttgttttttgaatcttttagcttttatattataacgctactgcaatgaaatccgtaccagaaggagtttggtggtatgaaacttgtgtatttgttcaggattcttgtgacatttagacgccatttgaaaataagtatagttgaaatgtcaagattttctagcgctgtggtgataaatcatgtggggtaataccttgagatttataaatggacaatgtgatgtggcatttgtttgaaaatacttgattctgtgctggactggcttggtgaaaagaatggaattgggacttttctgtgcaacgttatgtaagaagttggggaactgtgtggtttcttagactaggcttttaaattcactcacccttgaaggggtctcttttgaatttgtattgctaggtagtattgcctatgcttacaaaacagggaatttgtgtctttgctgccctcatttagtagatattatactagcattgaccatctcacttctaggaatactagttatatcgctacacacctcatatcctccgtactatgcctaggaaggaataatactatcgggtgttcagttataggtaatcttccataaaccctcagacccgatcc

SEQ ID NO: 585275 - DNA, 704 bp, Homo sapiens
  misc_feature (366)..(366): n is a, c, g, or t
ccagatttatgaactagtcttatgctcttaactagattagttccttttccattaactgcttaaagtaggacagctgtccgagctgttggttgtaaatttgccaatgtctacttccttaatctcagatacaaaaagcagcagataacaggatcaaagtttcaggaccttcgtttttcacagcctgaaatgagcatggaggggctcatgaatgagagattgaaaagatgtgaggaagtgttacattggagaaaaagggatgacttctgtcattaatcttaattaattgctaagagttttaaatctgagttattaatactgatgttaagctcttaatacacttttcatgctctggcatcagatactctnttatgagataagaagtttaggaaggagagaatgtgtgtgtgtgataaaatattttcatttacatatttcaaatatttccttgggttaatattcagaacttcaccttttgacagttactgtagggcagttaggaatgatagacaagtaccaatacattcaaattccctaaggatagcaacagcagtcaatctgaatataatacctttatgtttaccagcctatagatcatcacgttgatagagacagactatcactccccacctctccacatccctgctgcccgcttggcccttcgcctttgactcaccaagcttatcatccgcgcccttggctccttt

SEQ ID NO: 585276 - DNA, 259 bp, Homo sapiens
  misc_feature (42)..(42): n is a, c, g, or t
actcttaggatccaatcgcacgacatgagcactgcgcttggnttggatcacacaggactgtgtgtctgagtggtggactgagatgcccgtactgttcttgggatacagcacacgggctcaagaatgagtctaatggcgaagccctgaagatccacttgtcttctgagaccaaggctgtcctggaggagttaggtggttcggagctggagcttcgaggcgatgtagagatgaaggggaaaggcacggttcggacctactc

SEQ ID NO: 585277 - DNA, 101 bp, Homo sapiens
ctttgagcaggacttcttctgtggttcagaacaaggcctatatcatattgtcaaagtaagaggtctgctgcttaaaaagaaaaaaattttcttccaacaca

SEQ ID NO: 585278 - DNA, 359 bp, Homo sapiens
acaaagagaactggtctggagtgctgtaggctttgtttcaatattttttacaaaaaaaacgattgtgtacacgcattgtctatatggatttcaatgatcattcgatgtgatccagaataaatatgctatggttggtttgttatgaacagatggccaccagtcacggccgtgctgtgtaactcctaatatctgcagtccctgggtgtcgcgggtggccagtgcgcagactgagtacgttgccatccttgggaacccttactagaactcagacctgtatggctaagaaaacatggtcctaccttaggaagaggtctacatgctggggcatattaagagcataatatatcattctggcccgg

SEQ ID NO: 585279 - DNA, 482 bp, Homo sapiens
gacctttgctggtgtatcgtgtgcggccgtccagaagcatgatgacagaggatatactgtcgcttgcagaatgatgggctgatactggcttttgatccaaggactccagtatggctaagcagtacaaagtgtactgagttggggtagtagataaacttggtgtcgttgtaaattagcaaggataggacattgttaaagacaaatccaaactcatctgggctgttccacagtgtccagtgccagggtgtgtagtcctgtggtcagagagggtgccatggtcgatgtcagggtggttgtgttcacaactttacacacattgacagattctttgccattgaattagactcggctcttgcctcctccggagggaggcaagagccgaggaggagagcaactcggacgaagatgacgtcatccccgacatcggtggggtcacctctcatgccctcgctcactgcagaccctggactcgaatctgtgtt

SEQ ID NO: 585280 - DNA, 336 bp, Homo sapiens
actgtcgtcgtagcaagtctttggagctccttagtgtctaggatagttcaaatgcacatttaaagatactctcatgattcagttagtttaattttaaaaacataatagtattcatcactgtacaaagtacagaaagtatagagaagaaaatgagaagcacccatagtcagccatgtaaggatcaaacctgatactccgggtttctgtggattcctccattcgtgtgccgtgcgccccagagctggcgtcttgctgtaggacactgtttggaggtttaactgactctgtgctcatgcttgtttgactacctggtttcatttctctcttgccatctca

SEQ ID NO: 585281 - DNA, 150 bp, Homo sapiens
catcatcattccccagctacgctgcttggtttgactacaatagtgttcatgccattgagcggagggtctccccgagttcttcaacggcaagcaaaagtccacgcatccagagatctacccgtggctagtcctcctggcctaccggagtac

SEQ ID NO: 585282 - DNA, 219 bp, Homo sapiens
cgggggagttattcatctctaagatagagaggctgatggctactgtggacacagaaagcaagtttctgaagtgggtggccgccatcaaagccgccttggtcagggttaatgtgccctgagggcagagtctaggaaccttgacccagcccgtctcagcagacgcttcatgataggaaggactgaaaagtcttgtggacacctggtctttccctgatgttc

SEQ ID NO: 585283 - DNA, 185 bp, Homo sapiens
catttagtactggactatagggttaaggtgacagagacagtccatcaatcatggggttgggacacggcgactgaagtacagggtgctgggctggatggtgatgggagcaggtaatgtggcatatacctaaaaagaaggagcctctgtagcctcctagaagggctgtggccaaaaggtcagagggg

SEQ ID NO: 585284 - DNA, 244 bp, Homo sapiens
cctatctaggagggggattccaccagtacggtggctgctcctctcatatggtgaggtgttcttctgcataagcagcatgctctacagaatagcctcaattcaggccaaatataatcttaaccaaaagtggtagttaaacttccagcttcttttaataggacctttggcttgaaaaccatttcatgcacaacataagatttttcttctccagacagcagtatgtatctggcactatgtgctcagc

SEQ ID NO: 585285 - DNA, 296 bp, Homo sapiens
tcacggggaaatcaatctctttcctaagggcaattgttgcgggttaatttgaactactttggtccatcccttacggaatccatgggtgacggttaggagacccccaaaaaacattcatttgtgccccttggctaaaacgtttgtgacagactcccctcatggggccaaaggcgggccccgttttttatgggaaggcctgggtcctgactatcaatcaatgttggccattcttcccagatttgtaagcacatcattggtaatgcccttaattgggccactaaaacctgcccgatact

SEQ ID NO: 585286 - DNA, 1249 bp, Homo sapiens
  misc_feature (122)..(122): n is a, c, g, or t
tctttgggagagtggggaaatgggcttacagtttcaaatggtttatgtggaagtgggaaagtgtgactaagctcgaagaagggaagagagggacaaagaaggggaggaggtcacccctaagngggaacctaccaggacattcaaagcaagagcagtaagttctgaatgttctgggacaacctgggtgatatgcatggatatgggctgtggaggctgagcattttaatgataacttagggaaacgaggcatggccatggtgtaaaactctcaaatcccaagccctaatccaaccttaaaatccgagtcttctaaagggctgttttaaccatgaaaggaccataagaaaggcaattcacagaaaatgaagccatgtggccaagaaatataagaaaaacagtaaaagcccttaatctcaatagcaatagagtggatgcaaatgaatataatgagttgccatgtcgttcttactggattggaaaagaaattagaatgtctaaataacatgtatcatccaggatgtggggaaatgggagctcttgtaccctgcaggcaggcatttaaattggtgcaaccgctttggattgctgctttgtagtatctggtgcaactgaagatgaacatgccctgtgacacagcaaccgcacttctaggtcaataccctaattatattcttactgtggttcacaagaaggtatgtaagaggtcattgcctgagcactgtttagaataggggcaaactggaaatcctctaaatgtctgtcaatgaaggaatagataaattgtaatatgttcatataaaatactgcataaataagtgaaatttataaatgtactaacgaatgaatcttgaaaacagagttgggagataaaagcaagctgttgaagaacatggtcagtatcctctcacttatgtaagttaaaaactccaaagaacattatctatattggtaatggcatagacatgtgtggtaaaatcataaaaatattaactaaaagttctatacgcttcagggatattggttagtataataagggcaggaagctggatagcattgggggtgagacaggtgggttggtgggttaatgtttggttactttagtttatgttaagtaacattttttttttaaaggaaggatctgggaataaatttttggttaaaatacatagttatttggctagacttgattgttgggggtctggggttcatccactatttctaaggttggttgacggttaaaattttgttg

SEQ ID NO: 585287 - DNA, 417 bp, Homo sapiens
catacccttagtcgttttcgttatagcactgagttaggcacctggccagaggcggacatgcaccacatcgatcgagataatacccatggccgctatgtcttgtgtcattgatgagatcctgctcaagtatgtcaagctggatgcctggattcgggattggaaaaaccgggtacggcgtggagtatggtgtgggcatcattggctttttccgagcccacgagcacagcctactgagcgcccagctcaagggctttcccctttttttacactcaaacttggggctccgggactaccaagtgaatccttctgccccgctactgcatctcacacgccccagccgcctagaaccagggccactgcctggtgatgactggaccatcttccaatccaatcatagtacgtatgaacaacagtgca

SEQ ID NO: 585288 - DNA, 591 bp, Homo sapiens
taggtgaaagctgagtcacgggagctgggtgggaggaggcgtgtacagcaagcagtgaaggggcaggaggtaggcacaccatgcaggcaggggcagggctgcagccagaaggccacagagggggcgggaggccagagggcgaggtgtgcttggtgcatggaggtcaggcccctgctgggagtgcaggtgcagagggcagctgatgaagcaggtccccccgccagatgccaaagacacagtgacgccaggggaagaggagctggcacaaggtcaaggtcgagatcttgccgaggtggctctgacaacccagtctccatctcagccttttttttgtttgttttggagacggagtcttgctctgtcacccaaagctagagtgccgtggtaccatcacagttcaccgcaatctccaagtcccagggtcgagcaatcctcctgctttgggctcctgagcagctgggactacaggcagcacgcgaccaggcccaggcatatatatatatttgggtaagtaggtctgtcccggtcgttagtagagtcaatgtcgtgactatgtgtgccaggctgctcttaagctcctgtgttggagca

SEQ ID NO: 585289 - DNA, 827 bp, Homo sapiens
ccacgcgtcgcggacgcgtgggtcgacccacgcgtcggagggaatcactggtgctatagaaattgagatgcccccccaggccagcaaatgttccttttgttcaaagtctatttttattccttgatatttttctttttttttttttttttttgggggatggggactggtggattttttactaaagggtggcttatttaaccttggggagggagagctgtggtggcgggctccagcccaggcccgtggtttcatctttccacccttctctccacctggcctcgggcttctacagggcctctggtctccgacctctctcctctcgaaaccctcctccacatgttggcacgcccatcctccgggtcccatcctagtctggtcctggctgtcctctggtcccggggtttcaagagacaaatttcccaaagcacaaacgcaggttttcccccctagggtgtggggaggaacgcaacaaagacctctggtactctattattgggatggttcgtatacaatatattccggacagatggttttccgacaatccatttatggaactggccgggaaacattaaccggcccagtggtggccaaaatgtggacccaaggaaaagcaaaccaacgcaccacaaaccaaacaaacaccaaaagacacaaaacgaggggcggcggcgccccgctaccatacgaagtaacccaccgcgcgagggggcgccccacaggctctaggagggacaacacccagcagacgttcttgtgactcagaccagcggggggcaccccacagaagacacaccgagcacacaagacaacgccacagcacgacggcc

SEQ ID NO: 585290 - DNA, 169 bp, Homo sapiens
ttgggttttttaaaaaaaaaggatgggattggatttcccgagggggggaaaatttttttggccccgcccaagggccccccagggaggggcccggtttgggttttgctttgtagggtgttttgcagggattggccggggcctttgttttaaaaaaaaaccctttttccta

SEQ ID NO: 585291 - DNA, 1580 bp, Homo sapiens
  misc_feature (171)..(171): n is a, c, g, or t
  misc_feature (404)..(404): n is a, c, g, or t
  misc_feature (571)..(571): n is a, c, g, or t
  misc_feature (832)..(832): n is a, c, g, or t
  misc_feature (1114)..(1114): n is a, c, g, or t
tgcctcatccgcatcatatatttcgtttgctgtgtgcgtgttggttagtctgtattagttccacctgtttcttcggcccttctgtttttggggttgtcaccacgagtttgggtgtgtgttcttgccatcttttgttgggtgtcgctttttcgcccccagatgatccttctnctccactctatatggaggggcgcccacagacccctggcggggcaagtacctcttaaagtgtcgttttaatcccttctttggcggtgtgtgttaaccaaccccctagaagggaataacttcatttttcggtggggtctacacactctgggtcggtgagaccaccccacatctcgctgacccacgcttgatgtcggcccctgggagattgtcttttcccccgcccttgtttattngtgtccgccccgccctcctttgtatagccaccaatatcatactgccccccctttttccagagcgtgtggcgccgtcttcgtgttgcggcgacgcttgtttgccaagagccgagcaaattttagtggggagaaagtagtattgaagaagatgggcgccactatgttgngggggccgccttctcgtacagaatttcacacaagaagagttggtggttttgttatgaaaaattgtcaactttcaaccgcgccccccttggggggccgtttatattaaccccccctcgggtttcggacggccctcaactggtgagaacacccgcggcgggtgtgtcctcttctcacagctatgtggggttgttttctgttgtcaaagcacgcccttcgtcttggtctttcgctcctctgagaaggcccaccatctggttgtngctcgtttgtgaagatttgttagatggttaaacctcttcttttaggacttcgtcgtctcacgacccgcctcgggctcgtcttctcggtgaaccccacacacacagggggccacaccactctctcaaaaagagccccccaacagggtgaacacacagaggtgtgagataaaaacttcttgtggggtgtcccacagacactcccacggtgtgtggtgtctgcgcacactgtgtctctgtttctgtccccacagtttcacagcctctcccgccacaaggtggccntgtggggaagaacctgtgagagcacagagatgttttcacatatttggcccctgggccacacatgggctgagaaaggccacaggccctctcacaagtgcaccctgttgaaccctcttggcgattctcccacagcacgctttttcccacagagagagaggcacagataggggcctctccaccacacccccgggtttcttcctcgctcgccttccttgcctctgcttgcacagctgccacaggcactttctctgagaggggcacaaccttggaggaaagggccacgggaagcactgggaattttaaattgtttcactcacaccctttccccgctggcacaagaaaccacgtcacgtccttctttcacggtcgttctttctggagttttctggtgaatggaccacagaagaaatctttttacagatttccaattatgttccaccaataaaaattgccttttttattttga

SEQ ID NO: 585292 - DNA, 824 bp, Homo sapiens
cacagtggctcacgtctgtaaccccagcaatttggaaggccaaggtgggtgggtcacttgaggccaggagttccagaccagcctgggcaacatggtaaaacccgtctctactaaaaatataaaaattagccaggcatggtgacatgcacctgtagtcccagctactcgggaggctgagacaggaggatcacctgaggccaggaggttgagactgcagtaagctacgatggcaccactgcactcgagcctgagcgacagaatgagaccctatctcttttttgtttttaaaacagagtcccaccctttcgcccaggctggagtgcagtgtcacaatctcggctcactgcaacctctgcttcccaggtccaagtgattcttgtgcctcagtctcccaagtagctgggatgacaagtgcattgccacggtgcctggcctgagaccctgtctcaaagtaaacccaagggctctgcgggatttaaggagggtgtaaagtaaagggtgcctggagggacggctggggtgccacctgattgcccggacttttacggaaggcaaatcacagttggacgtacacgctcgggatccgacaacgagctctgtccacatcggtgacaaccgattttttcactacaaatccaaacctcagcccggacacatccggtatgccctgtaaccacactatctagaggggaacaaggaaaatccttcacccccagaatgcattgtatacccgatttcggcctgccaccatccggtaaccaatggatctttctcaaaacaaacatcacatgtctgcgcgcccaaagagttacctatttgggcgc

SEQ ID NO: 585293 - DNA, 247 bp, Homo sapiens
atttttaatttttttttttgggcctaggctgggtggggcctctacaggttcattctttcccccttaaataggggcccttttcaggattttccctcttcccccttataaattatgctaaagcccccaagcccctttttgggggtcataaaagggtgggggtcccaaaaggcctttgtgtgatgggtccctttatgtggggtttccccccctgctggattttccgttttttattaaaagaacccaatga

SEQ ID NO: 585294 - DNA, 135 bp, Homo sapiens
atgtggctacagaggcgcgatctctgatatgctggatgactcttgaaatgaagcctttgcctttgttacacatttggctttacaatcttcattgacaaatagttcggcaaagagtagaggagcacggccacgaag

SEQ ID NO: 585295 - DNA, 111 bp, Homo sapiens
atcaaagctaaaatttatttggtgcatactcctcttgatatcaggtatgttcgcatatacctttccctcctatgcggattattatccatgtgaggtattttacaggccttt

SEQ ID NO: 585296 - DNA, 127 bp, Homo sapiens
tcccgatggcattccatgcagtagttcatggacggcttccattgctgtatgaccgaagcaggtgatgtgcaatgatcctgtacagccagtgtggggatgtgatgagtggccctgggccagacaaccc

SEQ ID NO: 585297 - DNA, 513 bp, Homo sapiens
caattggcggtgagcatcgcacttatctgctttattttttgcaaggctgcataatttttgtatgtaactatttttcagaacaagtcatcgaggttctctaaataaataaaattatgacgattcatttggaaaaaataaatattttaaaaatctgttgtagatagactataatacagatgaagagaccaaaatgaatttgtcccagatcaaactaaacaagaaggcacatgtttatctggaactaagtatttgttcctgttgatgtttttgtacactagatctgagtgtctgatagacaggtggatggatagatgggcggacggacagatgggtggatggacagacaggcggagggatggatgaatgcacagataggcagacagaaagataattggttaactacaagacatcttgttgttatatatattttgttgtatatatttacatgtaacaataatagctctatttcaaaattctagtgtaaaggataagaattaaaaggtggctgggcac

SEQ ID NO: 585298 - DNA, 155 bp, Homo sapiens
tgggaaattgaagcggagcaggcggagtgcagacaggcccatcttgcctagtccaagtacagaagctcattactttatcagtgcaacgatgcacccacaaagtaaagagtttgttatataaccccaaacgggtaaatctcgaggtctgctatcct

SEQ ID NO: 585299 - DNA, 297 bp, Homo sapiens
gaggacttccgaatagctacaaaatgagggaatgtcacagagaaggcaggtggacacatggttgacaaagcgatagttgtgtgatggaagttgtcacagtgaccatcttaactaacccaccaaggtagcatcctgctaccaagaaaaagataatggcctcttagacatggtcaatgtggtagaacgggtgggtgcacagatggcagtaacaggggtctataggccagtgcgagtttaaacaaattgcattcagccagaggcaaagattacaaacaagctcatttggtagctattcgg

SEQ ID NO: 585300 - DNA, 265 bp, Homo sapiens
cgctgacatcttccttatagacttagaaagagaagacccacgagatatttagtcccctatctcccaaccatgccataataaaaaaataaaaatatttgctggcttggtggcaagcacctgtatcccagctactttagaggctgaggcaggagaatcacttgaactgggaggcggaggtttcagtgagccaagattgcacccctgcacttcagcctgggcaacagaatgagactctgtctcaaaaaagggaaaaaaaagaaagaag

SEQ ID NO: 585301 - DNA, 681 bp, Homo sapiens
agcggagggggtggtggcgagcgtgcgggagggcggctcggagcggaccatgcagtcctgtgagcgatgcagccagctcgctgagcaggtcagagctatggcgtgcccctcatccagccagaccggcggcgagaggaggccgcacgagcagatggcggaatgacctgcagtacctgcgagaaggtctcgtggagacatcttcagctagggtagagctagagccggagcgaggtgcgggccatcggagagaaggtctccttggcccaggccaacgatggagaagatcaagggcagcgacggaaggccatcaagggtgtcgtccagagacaagtaccctgatccagggagcctgcaggaatagtggctccagcttcacgggcgcccaggaacctgggctgctgaagacgcccccgacactgggatccgagagcaagcaccgtcccctggacgagctgggccgcgtgctaggagaagctgaaggactatccatgtgtgcgtgagcaccaagccggagcccgaggacggatgcgagaagagggacgttgggggctcttcccagacgatgtcagttctgtcagctccttgctgctcttcaataacaccgagaacctgtagaagaagtatgtcttcctggaccccctggctaggtgcttgtagccacagagccatgtgatgctgggg

SEQ ID NO: 585302 - DNA, 413 bp, Homo sapiens
gtatctagcggatcccttgctctgaacttagggatcgaagagataaagacagaagacaaagagataggaagaaagacagctgggcccgggggacactgccaccaaagcgcggagacagacaggtagtggccccgagtgcctggaggcgctgctatttattgtagtcaaggcaagggggcagggtaaggagtgccagtcatctccaatgatcgataggtcacgcgagtcacgtgtccactggacagggggcctttccctttgtggtagccgaggtggagagggaggacagcaaacgtcagcgtttcttctatgcacttatcagaaagatcgaagactgtggtactcctactagttctgctactgctgtcttctaagaacctaagttcggagccaggcctaagttcagagccagg

SEQ ID NO: 585303 - DNA, 365 bp, Homo sapiens
atgatagggcgtgagtgtgtgcatctgtaacaccttctcttaacatgttgagactctaggtactcacagttctaacctgtgagcagttgatggacatggagaaagcgtgcttgctatgaacaatatcataagtaagaccagacagcccagaggtgtatatgaataagttgaatacttgactgtaaggaagggcaggcttggacttcttgtggactctctggagggaggggcatggagcactcggcagtggtggtgtctgggttacttgatggccagagcatgtcgtgctctcgctagagccatcctcctgatgcatggcatttcagcaggacattaatcctaagcacagggcttccaatggaatg

SEQ ID NO: 585304 - DNA, 338 bp, Homo sapiens
tgggaatcacaagggtttatcccctaaaaaaagatatgtaaaaaagatcctttccggcccataaataaaggctgggattttccaacctgatgtatatattagccagttttaggaggttagtccccttcattccagagcaaggcttgtgaaacagcccctttttttataaagtcagttagaaggacttccttaccaatgactattaaaatgttttacttaaaaaccagttttgtattctgtcaaggcaaaaataagacaggttgacccttaatcaggtaacaaaatattttgtagattacatattgatttttcaaaaattaaaaatgtttttcaaccta

SEQ ID NO: 585305 - DNA, 311 bp, Homo sapiens
aagggatttttagcccttgatcccctttgcttgcgaaaggtggggaactgctccctgacagcttctctgtaacctgcagtaccagtgggtcgttcttgattttgttttcaataggggcaattttttggcattgaggacttttccccctacaacagtaacccccttttttgaaaagcaaaacttataatacctcctgggattgtgagctagtcattcagcctgtgtaaccatgtggaaataaaaattggcgccccatgtattatatgggccacttttgcttttagtaataaacttgattgtaggaatgtgga

SEQ ID NO: 585306 - DNA, 267 bp, Homo sapiens
aggggcccccgggggccccggttttttattggggggtcccccccccccccccttttgggtttttttagcccccccccccgggggggggggggttttttttttttaaccccccccccccccccccttttttgggggttttttcgggggggggggggggccccccccccgggggttttttccccccccctttgggggggggggtttggtcctggttgggttttttcccccccccttttttttttttagggggttttttttttttttgga

SEQ ID NO: 585307 - DNA, 431 bp, Homo sapiens
  misc_feature (13)..(13): n is a, c, g, or t
  misc_feature (90)..(90): n is a, c, g, or t
  misc_feature (160)..(160): n is a, c, g, or t
  misc_feature (185)..(185): n is a, c, g, or t
  misc_feature (194)..(194): n is a, c, g, or t
  misc_feature (215)..(215): n is a, c, g, or t
  misc_feature (238)..(238): n is a, c, g, or t
  misc_feature (288)..(288): n is a, c, g, or t
  misc_feature (290)..(290): n is a, c, g, or t
  misc_feature (301)..(301): n is a, c, g, or t
aaagccaaagccnggccccacccacatagccattaggccgggttttgcccctaatccagggtgcctactgtaagaccgtggcatttgccnttgtggataggtaaatttactatgtttttctggcaaatgaccctgaatgtatccgaggaagggaagcccnacttttcaaattccacctaaaggcnccctaaggntcagtgccaaaaatccctganccactgcccatgtagaaaagagnctgtgtgttattgcccaactttacatttatccagagaatgagtcaaaatnanaatgatatttnaagtctgactgaaaatagcaattatattagagaagaaataatgaaccaaatccccaaaaatgaacataaaacttaaagtataataataataaaatttaaaaaaaaaatcacagtttaacaaaaaaaaaaa

SEQ ID NO: 585308 - DNA, 145 bp, Homo sapiens
gcgctagcggcatatgaacgagaagccctgtgtgcactggctctagcaacccccccagagccagctcgggagggccccacctagggcctagctccgaaaccgcacaaaacgcgctgctaggacgttcacttaatgccgctagcgc

SEQ ID NO: 585309 - DNA, 335 bp, Homo sapiens
accctgggcacttctttggctcagaagtctacgagtcggcatggatgagatgacctttcacatctgtgagtttctttcaagagaacacgatcctgctgaatgacctgtttctactctccaagctgctctcattttacaagactgacctaataatggaaccatctagtagtgttcaaggaaggacctttgtctcaaacagctccccagctatgtttgacttctcgccacatggacacgcagttctatacggaaaagcgaatgctttgcttttacccaggtgtcacctggttcccaccctcccttccccaatcctgtcccagggctaaggtctcccg

SEQ ID NO: 585310 - DNA, 255 bp, Homo sapiens
catacttgggggagtctgtcatcggtcgtgggtttgcctggagtgtttcacgtacccccatgtcctgtagacttctttctccagtcaagcattagggcactgccttaggaggaccgccggagagtgggtcagcaggggggccccgcatgctcatgacatccaatagccccatggtggggatagggtggggctcacccccctccccagtttgattatgtctgcaattaaatttggtgaaatgaagtcattttcgga

SEQ ID NO: 585311 - DNA, 120 bp, Homo sapiens
ctagttttagaacgtttcaagtagcattaacactttttccccaatgaagcaaataaatccacattgtacttaccatttactgggcactacagtgccaaaacactatgctatttaaacagg

SEQ ID NO: 585312 - DNA, 877 bp, Homo sapiens
aatagttgtcaacgtcctatttcattccctgcttcagaggacctctttaatctgttgatttaggtccctgttcgtaagaaaagcaagactgaaaaggtcgtgaataccgcccctgcatgaacaacaccaggagcacgcgctaaataatccgaggaaagtgcctcctctgtgaaaccggagtatagagatggaaacaggatataagaaggattgagaatcatataatactagggagcttgaaacacctatgcgcgagtgatacaactgagggtactattagacgcgcgtggaaaataccaggaggttgagagagttaacaagaagggcgcacgctggattgtgccacaaaatctgaatgtactgaagtaagtgcagaagacaaattgtcacaggatagagagaagaggggaggaccgaaacttaaagaggagaaacatgagaggatctagagggccggtccaggagatacaatctatgcataataggaatagctgaagacctgaggagagagcaagtggagctgaactccaatataggatctacttgaaaaaatccttcccggattgcagaacgaatctagatctatggatggcaaggctcattaggatacctttaagtgcactgacagaaagcggtctctaaacgtatccgggcgaagtattgaatctcacaggacgacacgtgtacaaggggtcccgtcagagaacgcggttacttacacagggcaaaggcggctggctcagaattttgcggcattctaatgccagaaagaggggacaaatctcaggggtcggcactcttggaccaataatgctcgcacttatcttagggagcggcacttcattcacggccaatacgcaaccccctgggagtccga

SEQ ID NO: 585313 - DNA, 651 bp, Homo sapiens
gggaccacccagaccctggtagaattgtttctctctcctgcattgtaccaaccttttcagtctgggcttctcccaaaacccatcactggcatgagctgtaactccaggtggtggattggtgccaaagcctcaatccctagcccttctccaaggtggcaggtttccagtccatgctcagagatcaggctctgggacccctgactggggggtggccttcatgcactagccacttccgcaggtgctgactcccgcactccctggcattgtttgcagacaagggcttggtgatgtgaccctcatccccatggtgcgcgctgtgccagtgttccagtggccctgtccacttgaagcctaggtagcccctcaccccatcagtgccgagtccttgtgcctacctccagtttcctccaggctcaatgcgactctggatctagctgtgcttctccgagtggcacgcgtgcacgcgcgaggatgcctgggacaagcgttaagcaggctcaaatggcaataggggcccgtagtgggcccagcgcggtcatgggctcgtctaagcacaagcgggaggacgcgcggtgttgatccagcctgccaggacgctccactgtagggatctagcaggcacagagatgtctcgatgcagggagccctaca

SEQ ID NO: 585314 - DNA, 1060 bp, Homo sapiens
actccaccaccggccagcccaccaggtctcaacacgatcaccatcaccaccagcaagcagcaacagcagcagcagcagcgaccagcagcatcacggaaactctgggtcccccatccttcctggagacatttcccacacgccatctggaggtgcggatagacatccgcaacacggcaacacccttagctgccactgatcatgccacgtccgcatggaggtcatctgagggcccatacccagacagggcccagacaacacgcgtgccgcccacactcagcagaccacggtgatccatacagacacaacgcaaggcacccaaatgggcccgttccagtgtcatcatattcacatcatatacaaacgtcgtatccttctgtccgacattctccaaggggtccataacaccagtgtatcacaaccaccgttccacctttttccacagaggacccatcaaaggagtgcagacccaatagcccatattcaccaagcggttgaccataccgagatcagccgaccatcattcgagactagcccatgtaatccaacgaggtcaataggcccaaccacgatagaagccttaccgcatccggccaacggccaagggcattacaaaaacacgaggcggacaatcacaccaccacatgggaacacgcaacgaacccgaggaaacggacaacgcgaagacgcccccacgaacacaccaggacggacacccaacaaaggaaaaagcgaccaacaacaaaaaccacgagaaaatagagaaaaacaccaagcgagaaaacggaaccaaacgaacctgccaatccacgaaagaacggagggagacaccgacgcagcacggacgaccaaaacaagcaacgaaaaccaagcgaaccagacattggcaacgggcacccaagtgggaaaacagaaccaacacacacagggcgaccgaacccacacgcagacagcgacgacaaaagtggagccaaccgagacacaaggcctcgcaagcaaaacacaagaaggaccggaggcaacacggatggacacccaccaaccaacaaatgcagaggacgca

SEQ ID NO: 585315 - DNA, 315 bp, Homo sapiens
  misc_feature (299)..(299): n is a, c, g, or t
cacgagcgccaagtagactgaatggccttaagaatttagcctcccattccccactgagcagtaggtggatttgaactagaacagtattaggagaaaatgatttgctggaaattcttattgaagtaacacccagaacattctctaatattctggctgcagaaattggtactagtattcgttgcaagataaagccttcctcagggctggtaactatttgtgaagaagcacgaataaggcttgcttatatacaagcacaacgtaacattaagcagcaatgatttttatacgtctggcacacncgtaaactgtggtttt

SEQ ID NO: 585316 - DNA, 437 bp, Homo sapiens
acaccaaaatcgtgaattctcaaaagcaccatacaatatgtatagtatatagttctttgaaaagaagttagaatcacaaccaataccccatgaatagctttgtggctaatgcagcaccataatttgtaatggaactaagatgatgatgacgatatttcatgaaaacagagagatgttttgagcatatttatgtggtgaggtaagaaagaaaattaatcctatagcatctgaaagacctcactgggaagttggtatggatttttgtttgatttgtgcatacaaataggtatcacaacttgatctggaaaaaataagctgtgaaaattctcaaggaataagatgaaaataaatcaattattatcatttagctctgcaaagctttccatggctaacacagtaaatttaaataaagctctctttgtctccttcaaaaaaaa

SEQ ID NO: 585317 - DNA, 359 bp, Homo sapiens
ccggaactctggttggatgcgctggctcacgcatgcatcctagcactttgggaggacgagtcaggcggatcacaaggtcaggagttcgagaccagcctggcaacatggtgcaatcctgtctctactaaaaatacaaaaatcagccaagcacggtggcacacaccatattatctgagctactcaagaggctgaggcaggagactcgcttgaacccgagaggcagaggttgcactgagccaagatcacgccactgcactccagcctgggtgaaagagcgagactctacctcagaagaaaaagaaagaaagaaattcctctcccagagtaacacatacccctgtatccgaccaagagtgtcg

SEQ ID NO: 585318 - DNA, 531 bp, Homo sapiens
agcttgaaaggatagctcgagaggattaaatgctgtgctcaatctaagactatggcgcatctctcacctgtggtatactgtacgagtctcgtatcacgtagacttgggccgtcgtataaaaccactcccacacccaatccattcggcattctgcacaggagagatgtgttgaatatgcagacctaattgtataggtttaatgtcttaactgtctttccctttcttttaggatgaaaagcaaaagcctagacttggcccaagggtgctgcctagttttcccatctgtgctgcttcaacttcagctcatgccacccattcctgccacttatggtttccagccacactgccttctcccgggtcctccctcttcagtgtcttgcccaggattcccactacctggaatccatcccacctcctaccacacagcttatctgcttcttatccttcagatgtcaactccttttctgtgaccccagagaagctctttgtgtcctccatggtgggccagctcccgctacacaccctctcaag

SEQ ID NO: 585319 - DNA, 1548 bp, Homo sapiens
gccaagccagaacatctctggccccaagactcatcctcaaagtggccaatctctgattgtcatacgatgatgcaactatcttaaatcctcgtcgggtctgtgcgtagcgtcccggttgctcctcttcatctgagtgtttggttgtttgctcagtgccttctgtgctccttggtgccttgcagtcgcactcacggtgtagatatcactgaatgagcactgagggcacccccggatctgtgctttgccatccagccttgccgaggctggtgaccgttgctgttgcctgttcgttcagtctctcggactccatagctgggacggatgccccagtgtcatatcgcctcgtattctgatggcgtctacgttcgcagtcaatccctacatcagcatgtcgctgacttctcttcgcatgccgtctttcggcatctcctgccttgggtctcggcgagaggatttaggcctggctttcggtccattggtcctcccctatgttaaattgtaaaccccacttgcgaactagaaagggcctcccactgtgataggctttcacagccggcagcgctgcgttgccagggaataccaacctttgtatgtcaagccacaatgagggggcttccgacaccagtgggtcatccaaccgtacactattttccgagggggctatccccacgggtgggatagaaggcgcggacggcgcccttttattccccccggccgatggaacccaaggcattggtggacccgggaaacaggaggcggttcattcccggtttagattctgcctgtcgattatcttgtaggcttgggggtgcacaggtcttctcggtccgttctcccccggggacaggctccgtcttctggcagccatttggatttgcgtgcttcgagggcgtcccctatcccatttcgtgtggcaaccccatgtggtgcgcccttggctaaacctgaatgggaggcctccaactctaattttcgttccccctaagaggggtgatacccggttccaccaaatttgacctttttgggcgcgttctgcgcatttgacatcaacatgcggcaccttacagccaggaaccactcctttggtgagcaagcgagacacagttaggtgggcgcaaactcgatcctattatcgaatcgatcgtctagaagaggtgtgagccccccttccgcgctggaaatctcgcaaaagggcgggcgaacctgtccaaacagcttaaatcgccccataggaaaccttccacgcgccaatcagaaggaactctcctattgtgaatggccagctttttacgggggcaacctgcgcgcgatgttcatcggaacttttctctgcacaacatttcgaggatcgcatattccttggcgaaatcacaccccccgtgaagtgtaaagccaaggcgataagcgacttcaaatatgcacccaggttggggcaactctgcggcgcacatctggagctgagcccgacactctagggcgtgaagccaagatccttcgagagcactgtgtcacagagtctgctacttcgaccagcaacgacgctctacc

SEQ ID NO: 585320 - DNA, 804 bp, Homo sapiens
ctaaacatgactttgaaaaccaggctaatttacttttgttatactgacaagaaccaagcatggtctcaataatacaaataattacagatgtcctttattaatgaaaattgtgtacaaccttctttgggattaataacgtagaaaaatgtatacccacttgtggaagttatagagaaggaacaaaacttaactcctggtctgcccaagattctgctttcctagtggactggaatgtgttagtactcagaaaagtatgcatggggattaggcgtatgcaacaaaggggttgtaggaagtgagagaatgatagctagggtatcctctttttgtttctcctgccttatattaaatagaaagaaagtgtttttagcagtaaaaagcaccttgtgcttttgctagaggggcaaataataacggcatttctaccaaaagatttttctggttaaggctaatatctttttgttaacatttttcttttttaacttgtcttgtgtggggaataaatgaacgggtggtgaaacggtatcctgggaattcctggtgacgacaattaaatgccagtgttttataaccgctcagtgattaagatatacattagttaatggacgacgccggcctgtttcaaaacttcagagcagtggaccttagaggtaggcatccaggttaaaggcctaaaactgatgatcctcttaaacttcggctattaaatatgcttgcaaccagaacaggatactcttaaaggttattttcgacaggaacctggtttcttcagtcggctttccaaaacttttggggattatcaaa

SEQ ID NO: 585321 - DNA, 236 bp, Homo sapiens
ccagaaccctggatcctggcgagctgaagtacgtgcacagggttcctaccaccaaggaggagctgtgaggcgtgttagggtctacgatgcgatcagatctgcagatacatatcaagtgcttcaagagacacctgcagggaggcaggatgttgacagttcatttcatcctatttgatgcgctcctttctttccccattgttctcttacattagacagcagggatgcaccgctggtgg

SEQ ID NO: 585322 - DNA, 907 bp, Homo sapiens
  misc_feature (329)..(329): n is a, c, g, or t
gctggcttctgactgaactggattcgagatatcagatgtgtgaagctgaatgatggtcagttcgatgcattgtcctgtgatttgggcagtctatgcgcctgtagaggttcctagacaggtatagctttaggagcgccatccaaagttgggacaagtgtgagaagctggtcttccgctcgatagttgatgccctgtcgtcaattctatacgtcgtaactgatggtatgcagcgttggcactggcctatcctgtaagtcgtagtagttgcagtatggcagctgtgacacagatgacgtaacgagactagttcgtagcagcgttcaagacgncctgttgggtgcaagtgtcccacttcgatgcaatgaggtacgggtccgacccaggccttgggaaacgagtcacttgacaagaaatctttcagattggagttagtgtgagacccgtcgtaaccgtctgagtttccactatttcccacggtggtgcatcgctcatagacgacaccaggggtagagggggacaccggttgattcccgacaaaagagaggaataggcataggaattggggacaacgatacatatcgtcaatatttagaacaaccaaaggtagaggaacttcttactagggtgaccaaccaagagtaagcgcagagatggaggccacaggaaagggaagccgaaaagcggttaggctaaagagagaagacattggcacaacagcggaaacgttgggcgacacacacaaaaaggtgacactagaagaccacgggagaagatccgatccgccgaaacactaggcacccacaaaggagacacggagaaaacaagggcgcaaagaggaccactagctgaacggaaaatacgaacaggcaggagatcaataaagcgaacaacgaagccgatacacagg

SEQ ID NO: 585323 - DNA, 146 bp, Homo sapiens
ccgtaacactgcctgtactacggtcatcacagtactacgcagggtccttcattgccaagagaagcctgggaagacgtgacaactaaatgcagtgtggaggtcctggtgggatcctggcacagagggatgtctggaacacactatgg

SEQ ID NO: 585324 - DNA, 685 bp, Homo sapiens
  misc_feature (325)..(325): n is a, c, g, or t
  misc_feature (456)..(456): n is a, c, g, or t
  misc_feature (515)..(516): n is a, c, g, or t
  misc_feature (549)..(549): n is a, c, g, or t
cattaggctaggtacgaggcatgggtgttgctcggttcttcgacagcatgtgtctggatgtcttcacacagtggctgccactgtccaatttcgtgccaccccgaccctcgcccgccccatctgactcgccagcgtccccggatgaggacctgcaggcctggaacgtctccctgccgcccaccgctgggccagaaatgtggactgtcggcaccctccctgccgcgcctggtacgggagcccgtccgctgcacctgctctgcgcagggcaccggcttctcctgccccagcagtgtgggcgggcacccgccccagatgcgggtggtcncaggcgacatctgaccgacatcaccggcacaatgtctctgagtacctgctcttcacctccgaccgcttccgactgcaccggtatggggccatcacctttggaaacgtcctgaagtccatcccagcctcatntggcaccagggccccacccatggtgcggaagatcgcggtgcgcagggctgcccaggttnnctacaacaacaagggctatcacagcatgcccanctacctcaacagcctcaacaacgccatcctgcgtgccaacctgcccaagagcaagggcaacccggcggcttacggcatcaccgtcaccaaccaccccatgatgtagcgcgagccgactcctcggtacaggtgggcg

SEQ ID NO: 585325 - DNA, 320 bp, Homo sapiens
aggacgaagccgccacatacagttcgcacgcgctgtgattcggagcttcagcgggaaggagtgtcccatatacaggctcattcccaaagccctggggcaagcctgatctccaagtatactctacgggagctgcacctgtcattctgccacaagggcttttaggagggaccccgattactagggggacccaccccttaccttgcagggcccccataccccggctataaactacgggataccgaggctccgaatatcgtaatacataggtcataagctagtattcctagtgtagaaaattgttatacccgctaaacccaagt

SEQ ID NO: 585326 - DNA, 241 bp, Homo sapiens
catcgccaaatcaggcgctggccagggcagatccaagaagtaagcagtcgagtgctcaagctgctggtgtacgaacaaaggccccaagagagctacctccccctcagactccagcgatcgacgctgtgctgggctctcaagagcccagcgatcgagccttctccacccgcagaggtgaaaggctggtaattcgcgtaccgtccttatcgtcgcgggccttcatacccgccgcgcaaagttt

SEQ ID NO: 585327 - DNA, 886 bp, Homo sapiens
cttgactatatttagaggtcttttgcctcttttccccttaacaaggatttcttatggtggtttcagtttcattgcataaaggtatgagagggaacaaaaaacataaagctgagaatcttgagagagctcatctaccctgtctgtggtcagactcaaatgagagttaaaaaacaaagaacacaaaactctgtatgccggagtaccatccgggagtgaatctcaagaaggtagggggtagagctggacagggtcccggtgtacccacggggtatccgtcagaggtaagggagaggagcaggatggacacgagtggtcgcacaacagtcatcgagtatccactggagatacacaggatagggttcccggccacgagatacttaaacacaattacagttcgccccaagctggcatctcggaccaaattcacataaaacaatgggacaggagtgcttggagtgcgggggcaccaggctggtaatcccagcacacggggcacgctaaggcggggggatcactgaggttcacggacgtccgaaaccagccgggccccacagggtgaaacccgtctccacgcaacacagatcacacaatacagcgggccgtgggggcagggcgcctaattaaatacccagctataacactgtaaggcttgtgtgcacggaagataataccttatcccccgggaagggcgtcgtattaacagtgaaactaggaaaatcgtgccaacggtattcaagcttggttgtattgattgactaccttaattcaataattattcttgggttaagtagttctacgcttcaattttaacatgccaactaatcgtgccgaactccataggcaaccagagtttacgcctttcgaaattctttatggtggcaaacca

SEQ ID NO: 585328 - DNA, 342 bp, Homo sapiens
cttttgcctgttgctgctggcagaagacaaacttaccatgtccctgtgacacgtaacccatcagcactaacattataaacacgagaattttcacacggagtctctctctcttccaaagaccacaatccccacgctccgacctgtgttgggaaagcggtggatggattgaaataggtagcgccaattcactgaaacctttctaaagcctgagcaagagaaaccagccagatcagtgtctcagtgcacctcccaaccctaacactaaatcaagtccatctatacagaaaaactaatcaaaatgggtcctaaataaacctacttctggctacatgtgaaaaaaaa

SEQ ID NO: 585329 - DNA, 193 bp, Homo sapiens
tcatagacaaggcgtcatcacgtgtcaacagtgctcctctgcgattggtgcttctgtggtgtctatctgccacaaatccaagaatctacacacccagatctggtttgttacagtcttcagtaattacagtctacacgatgtatttgacatggtcagctatgaccaatgaaccagaaacaaaatgaaccatgtg

SEQ ID NO: 585330 - DNA, 935 bp, Homo sapiens
tgcaacaaatacctcctttgatcctaatcatagttttttgtgtgattttgcttttttggattgtcctctcccatgagattgtaggctccaggagagagaactgtaaatatgtgtgtgaatatgtatatgtacatctgtttgtatccatggctatcagtataaccatttgcacatagttgtctctcaataaaagtttgttgaataaatggatgaaggaagtggtgttttactttgggaatattttcataactctccaggaggaggcattgcttttattcagtggttccatctatctattgcttcacacccatcacacaaagaatatgccagtttgaaaaatacagcctagttttgtgtgtttggctactttgggccactcccagattttccaaaggtacacttgcattcacctttatggttagaggcactttcttagaatctgagtttaagaaacggtatgctattttaattacagtaagtactttatcaaggtcagttgtcttagaatgtggatttatatgacatagtctctaatacattctgtttggcatgtattacagggaaaaaccaaacagtcctgtttgcagccaaagattgcaagatggtggtaggtgtgtagttagagcacgagactttctttgctcacatgcataggtcagttctcttctttcctgtcttgtcagttctcttggatgagcaactgtgtttggtcatgggggcaaggcactgaccttggagctcatgtgcaggtcactgtgggccatagcaagtctgcctgaacttttttttccccgtctgttgatctgtgcattcttgcttatgcttgagctttttttcagtttgtttttaatctttgcttcctcaagttaacataagtagcagggtagaatgatctgccacatgaaagtcatttctgtctcagtggtcttgggcct

SEQ ID NO: 585331 - DNA, 174 bp, Homo sapiens
  misc_feature (128)..(128): n is a, c, g, or t
ctcatgtgagatcatcagattgaggctggatgagcagtccgatatttggtggtagcattcagatctggtccgaacaaaagctttcatggctgtgatatgagtgtccgacatcgtcggtctttaagggnccagtgcacatcattcccgctgcatccttcggtcagagcattgtga

SEQ ID NO: 585332 - DNA, 1215 bp, Homo sapiens
  misc_feature (144)..(144): n is a, c, g, or t
  misc_feature (558)..(558): n is a, c, g, or t
  misc_feature (825)..(825): n is a, c, g, or t
ggcttacacagtatggccggcgacattagctagcgctcgctctactctctctaacgggaaagcagcgggaactacaagagactgaactgtatctgcctctatttccaaaagactcacgttcaactttcgctcacacaaagccgnggaaaactccttgatctaggtcctcttattttaaaaaacagttagtataaaactgatagcaataaaaaacaaaggaagcctgaagcttgagttaacactagcttggtaaccaactccgcagtcgcgcgggggacatgacgggtgggcacgtaagaggtttaactttaagatggcatctatgctggtgcgctgtggtgaggatatgctaacgctgtatgtcttcaacgtgatgagataggagaaagtctagctcgatccatatctaatcacgaaagggagctacccggcagaagaacctgtcgtgagctaggggtttaggggtatagcccgcgcggcaaaactttagactctcggaggacaataacccgatgaggagatactaggggagatcgtgtcgcgaaagtaatagcgcanaagatatcgtagcagatggcggcacgatcacgtttatatcgccacatggcatacgcttgccaaggggtatctagttcatatggacagctggtggaaaccaaaagagagcctggcacgacacgccaagtcgcacatgccttgtatggttcacttctccaagattgcaagaacgttaagaaccactggggtatagaggtacccttacacgaatgcaatgaagtcggtattcgcacagtaatcccgagaaaggagcactcactatgtcgngggatcaaccacgaacccactcccttgtgacttctgagaaactggacaactctgagggttttcccccaccttggtttcggaaaaggacttatgggacgtaaacggggggactttaaaccatgtcgggggcggttttataggaaacgcttcccaacatttttgccaagcagaagggcgtttgccctcttgaaagttctgccgtcggtcaaagagaacaactgtggccagactgacaacacggccgcgttttcattccaacacagagagagggcgttacacccccgaacacccagggggaaagttcttcccccaggcggacaacgcgcacacactcagggaacggttctcacgcttcacacgttgggcgacaacgtgtgaattcgccccgca

SEQ ID NO: 585333 - DNA, 388 bp, Homo sapiens
  misc_feature (34)..(34): n is a, c, g, or t
  misc_feature (38)..(38): n is a, c, g, or t
  misc_feature (40)..(40): n is a, c, g, or t
  misc_feature (60)..(60): n is a, c, g, or t
  misc_feature (66)..(66): n is a, c, g, or t
  misc_feature (70)..(70): n is a, c, g, or t
  misc_feature (73)..(73): n is a, c, g, or t
  misc_feature (82)..(82): n is a, c, g, or t
  misc_feature (87)..(87): n is a, c, g, or t
  misc_feature (91)..(91): n is a, c, g, or t
  misc_feature (102)..(102): n is a, c, g, or t
  misc_feature (105)..(105): n is a, c, g, or t
  misc_feature (110)..(110): n is a, c, g, or t
  misc_feature (128)..(128): n is a, c, g, or t
  misc_feature (131)..(132): n is a, c, g, or t
  misc_feature (154)..(155): n is a, c, g, or t
  misc_feature (169)..(169): n is a, c, g, or t
  misc_feature (194)..(195): n is a, c, g, or t
  misc_feature (252)..(252): n is a, c, g, or t
  misc_feature (294)..(294): n is a, c, g, or t
  misc_feature (297)..(297): n is a, c, g, or t
  misc_feature (321)..(321): n is a, c, g, or t
  misc_feature (368)..(368): n is a, c, g, or t
  misc_feature (374)..(374): n is a, c, g, or t
  misc_feature (385)..(385): n is a, c, g, or t
ggaaacccttttctcttggttctcattctctctnaccngnccaccacataagatgtcctntttgancttncgntatcattgntgagncctntccagtcacgnggnactgntgcagtccattaaacctnttnnttcttcataaattcacccagtnntgcaggtatgtctntatcagcagcgtgaaaatggactanntacagcgttcaactggttggatgaggttcagccacattatggagggtaatttgcctntactcaaagtctactgatttaaattttaatcacatctaaaanatncctttatagcaacatctagactgnctgtttgaacaaatgactgggtaccatagcccagccaaggatcatanaaattnaccatcaccantat

SEQ ID NO: 585334 - DNA, 765 bp, Homo sapiens
  misc_feature (144)..(144): n is a, c, g, or t
ggcttacacagtatggccggcgacattagctagcgctcgctctactctctctaacgggaaagcagcgggaactacaagagactgaactgtatctgcctctatttccaaaagactcacgttcaactttcgctcacacaaagccgnggaaaattttagttagtccttctcttctaaacacaaagttaactatacacaattatagcgaaatagaaaggaaaggatcctgaatttatagttagcccagtctggaacagtccgcagaggtgggggagatagcggggggcgacgaacaagggtgtaaactcttacgtatagatgtcttcttggtgggtagtgatgggtatggtccagcataagatctcgagcggagtagatgggcgaacgctgggacaattttattgttctgaacgggagtcgtagtaattcctggcagggagggggtttgggtttcatcaccgagcatggcaggccggggtaagcaataccaagggattgctgggggaatcggttcgatctaatcgcgaagaatactgaggtggggacatcacttgtggtaagggatgtggacaaggggttcaatgtctatgaaggtgtggagagaaaagatggagaagtcagaaaggtttatggatacgccatgtgagagttaccatgtttgtgtcgtcaagggaaacgttgtcattttggaaagaatgtgtgttaaccacccttctgggttggaaaagtttggttttccctggtggaagcgtgctagggcatacgggg

SEQ ID NO: 585335 - DNA, 251 bp, Homo sapiens
cggcgcagctcttggacctgagcctccttggacctgcgctctcttcttccacggccttcttcagtcaccgtcacctcctgtctccctcttggtcccttagctcctgctgagtggctgtgctgtccagtggcggccgcagctcctggagagaactccagcagcacagccttgtgtttccactgtatgtccggaaaaaggttgggacaagccagtggagtgccagttctaggaagctgtttctaggggggata

SEQ ID NO: 585336 - DNA, 435 bp, Homo sapiens
catctaacattaggatgagagactaatatattttcagatactttcagcggacggcgcactctgtatccatgctatgaaatgacctaatctcaagtgatcgacgaatttgaataaagattgagcacatacttatgaataatgagaaccgccatcacagatcatgatgtgattctatacgctagattggcacagtagggaagcagagcacacacagatgacatgcccgccagacggatactgaggaccctgattgagagtacagagaatcgcgtgatatagagatctgatgaatgagcctggtcctgcacagaggggagatcgctatgatactttctctgcgctggatgcactggacttagtctgctcaggctgttacatgaatgtaccaggctgtatggcccatatacatcggatatgtatctcatgcgtccttgg

SEQ ID NO: 585337 - DNA, 644 bp, Homo sapiens
ctctaaggactcccctttcttcgtcatattctctccacccataagggacagcaaacttagtcaataaatgtgtgttctgactactccactgacccaccattcccccatctttccccctctgttcaggcctccctattacgtgatacacaaccacttgaatttaggccaattaataaacctacaatggcctggtgtttaagtgaaaggaggagtcatatgcttcttacttgaaatcaaaagctagaaatgactaagcttagtgaggaaggcatatcaaaagcaaacataagccaaaagttagacttcttgctctaaacagccaaattgtgaatgcaaaggaaaagttattgaaggaaattgaaagtgctactctaatgaacacatgaatgataagaaagtggcagccttagtgctgagagaaagttttagtggtctgaatggaaggtcataccaaccacaacattcctttaagccaaagccgtcagaagaagaccctaactctcttcatttctctgaacactgtgagagaggtgaggaaactgcagaagaaaagtttgaagctagcagaggttggtttgtgaggttgaaggaaagaagtgtctccgtaatgtaaaagtgcaagctgaagcagcaagtgctaatgt

SEQ ID NO: 585338 - DNA, 199 bp, Homo sapiens
ctgctctgagattggtctctgcgagatgattactatatcccagagacattggaaactgctgacatttacataggtctggtcagcacatggtggatgcggatattctataattcccagaagtcacacagctcctctgtatgagacccagtggcgccatttaacagaacaggatgagaatctaagatatattattaataaa

SEQ ID NO: 585339 - DNA, 454 bp, Homo sapiens
  misc_feature (327)..(327): n is a, c, g, or t
acagtgaatttttaatgtatccacgagaccattatgcattgttttgtgctcaactagtgaatagtatttaaagcattttgaatgaagcgtattttataagcatttaatatttatgctctctagaatggaacacagaaaacaaaccttataagttctgattaaattaatctgaaccataataatatatatattatacctttattaattacactatagatatttatttatcttcaatttctctatattacgtttttatctattttcctactactataatatcttattttcacatactattttctctatcattattattttattaaattntaaatccctcttaatgtaattatacatcaataatactatctcacatataattaccctcttactttatatctcagcaattatgtatatttattactcatctttatatttattttataattattccccg

SEQ ID NO: 585340 - DNA, 239 bp, Homo sapiens
  misc_feature (28)..(28): n is a, c, g, or t
  misc_feature (47)..(47): n is a, c, g, or t
  misc_feature (56)..(56): n is a, c, g, or t
  misc_feature (206)..(206): n is a, c, g, or t
gttattttgagagcaaagtttgcctcanctgtccaatagagactgtnttgcatgtnaaaagttcatcatcaggagctgaaagaattgaaagtaaaatgaaactatcttgtgtgcctcgtaggaatacaacctggacgtagtgtccattactaattaaagccaatgtgtattgtactttcacagtgagacaggccctgctctttgtnctctatatttatttacatgcacttaatcctcac

SEQ ID NO: 585341 - DNA, 835 bp, Homo sapiens
gttcttgttccagaagggacaacaaaggggtccacagcggaggacactggcggagaggctggagcaaggtggggccactgtaaagaggaacgtgaagcgcggagttagagaagacagcaggaagccctccagtggagaagcggatctgctcgatgccactgtcaacaaggccctggcacgaaagaggtccacatgctcacgagtttcctaacggtgaaagaattgtaaagaagggaggaagaaataccgccagtgcctgtgctcaggacaaagaacgaagtttctcgagtggactagcaaaagcccatgaggccccaccacgcaccccagagcccaaagtgggaagagcagcagacaagcgtgttagcaccatggtgggggtacaacttaccgggagaccctgcaagaagaagaaacacactcttggtcatgttcatacagccccttggtagcccacactgtaagaaggtcattccgcactttactgctactgctgatgccttcaaagatgaccgaaagattgcctgtgccgctgttgactgtgtcaaagacaagaaccaagacctgtgccagcaggaggcggtcaagggctaccaccagctttccaactactagccagctatgggaagttcgcagaaaagtatgacagcgaccgcacagaattgggatctaccaataatattcgagccctcacgggagggagaccatgaaagactagggaaaaacgaaggaagagttataattcctgcctcagaaaaagcattctccattacactgtgaatgatacctgttttgttgtttctgaatttccacatactccgagggaattttaata

SEQ ID NO: 585342 - DNA, 125 bp, Homo sapiens
ggggctgctcccatgcagacaggatcacctaacagagatggaagccagggcatggatggggctttggccctcgaggttggacccagctttttgccacctcccctccggcagtagcttctcatcca

SEQ ID NO: 585343 - DNA, 245 bp, Homo sapiens
  misc_feature (22)..(22): n is a, c, g, or t
  misc_feature (45)..(45): n is a, c, g, or t
  misc_feature (67)..(67): n is a, c, g, or t
  misc_feature (78)..(78): n is a, c, g, or t
  misc_feature (87)..(87): n is a, c, g, or t
  misc_feature (104)..(104): n is a, c, g, or t
  misc_feature (119)..(119): n is a, c, g, or t
  misc_feature (127)..(127): n is a, c, g, or t
  misc_feature (133)..(133): n is a, c, g, or t
  misc_feature (169)..(169): n is a, c, g, or t
  misc_feature (195)..(195): n is a, c, g, or t
  misc_feature (218)..(218): n is a, c, g, or t
atctgagatcactctactgttntacattcactctgctacaaagcnatagacaggcacaaacactgcnagaatacattnacttcctgnataaaacaaaccttttnaatatcattgaaatnaatggttncatttngcattaaactacataccattgaacttctctaacatnaaaggactaaaaacaagcattagaanatatttacaaactatctttaaanttctacaggtctctcctcctcctcctg

SEQ ID NO: 585344 - DNA, 144 bp, Homo sapiens
aaagatgccagacactctcaccagtcgatacctacaagaagtggaaactcaccagaatggatgggaactggaggcggggctccagcgcggaggttgcaggaacatatccgaacacattctggatgaaccctcagtacctgatca

SEQ ID NO: 585345 - DNA, 943 bp, Homo sapiens
  misc_feature (241)..(241): n is a, c, g, or t
aagttatgtaaataacttcgtcttgtgtaactaaatactgcatcgcgcgtgtatcactatggttctccgaccggccatattggcgccccgcattcttacaccattaatgttctgcccgtgctgaatttcctgttttccctctcgcgcgctttgtgtattctggctgcccccccctgggccgacgaagccctcttaggtctgtaattaaaatccgctcccgcttctatagtactgcccccgncttcgttgatggtaccccccgccccaaatgggtttggcgacaagaggacctcgagagtgatggcgtatactaaaatttcagacccccaccgcggggggcggaaccttccgtggcactacctgggaaccgttggttttcttttgaccacgcgctgatgtgacctactatccgtagtagaaaattcaaggtacgcccatgtttaactgtttgcagttcccaagattcgcggtggatgagcgcgtagacacacgccgctcgggtcaccctccctcccccgcctccacaggttactgcgaccccgttttttgcacgcccggagcaaatgtttccctttgctcgcggtggtgggccactgcttttctttccccccgcctccaaggtccgagccgcaggcgtccccccctcgctgcagacagaaccagttaatctttcttctcccgagattctagtcatttctaatatgaatatactccgcaaagtacataactctcttaggtgtaatctttccacacttaacaggttcaagaaaattatcctttaagcccctggtttgatgcattttttggtttatcaatttggccgaatattattttccatataaaaaatacccccctatggtttatatatatgctcatgcaaaaaatctatggctaattcccgcccgggagtgcttataaaaaaacatggccccaacacatgaca

SEQ ID NO: 585346 - DNA, 341 bp, Homo sapiens
agctcaaatccatcacagtcgagagtctctgactggatattaccctgaattctactagttcctccaattccattttctcccatggaatcacgaagagcaagacccactctgttccagaagccctataagctggaggtggacaactcgatgtaaatttcatgggaaaacccttgtacctgacatgtgagccactcagaactcaccaaaatgttcgacaccataacaacagctactcaaactgtaaaccaggataacaagttgatgacttcacactgtggacagtttttccaaagatgtcagaacaagactccccatcatgataaggctcccacccctcttaa

SEQ ID NO: 585347 - DNA, 331 bp, Homo sapiens
gccgactactactactactactaaatccgcggccggtcgacaagaatagtaattttctatagaaattgctgtaatatgaaaaacccaagtatctaaatgagattattagttgacataagctccgataaaggtacagaaatgaaaatatgcaatgcctaattctactgatcagattagagcaatttctaatctgatcagtagaattaggcattgcatatttctactgatcagattagagcaatttctatagaaaattactattctttgctcacaacacagtttaaagcaatgtaaacacatccctattgctacgtcgacgcggccgcgaatt

SEQ ID NO: 585348 - DNA, 398 bp, Homo sapiens
cactcagtatagcagaacagagcagaaagccaccgccacacagcagcagcgggaggacgttttacagcagcagcaggcccagacccagcagtttcatggcagtacatccagcacaccagcaaccagcaatggctcagttccctgtggtgtcccaaggaggctctcaacagaagctaatgcagaatttctaccagcagcagcagcatgcatgcaacaacagcaacagcaacagcgggtcacagccctgcatcaacaacagctgatgactcagcaggctgccttgcagcacaagcccactatggcagaaggacagcagccccagccacagccagctgcagccccacagccagcccctgcccaggagccagcgcacgaatcaagccccaagtaagaccacc

SEQ ID NO: 585349 - DNA, 247 bp, Homo sapiens
accccgtggtatgggacacgctgaaacccacattccgctgtgcccctggagcagcctcttcaccacgctgctcttcccagctcccgaaagcccgctcagcaccacaggcctcgggcccgacatgcctcactgcctctctagccccgcctccacctgcgctggcctgtcgcgaccgcagggagcgttcagcacagtgccctcccagcccgtcttctcccgctgcgtcaccagcgccccgcagaacgcg

SEQ ID NO: 585350 - DNA, 347 bp, Homo sapiens
actggatgtggagagatactataagaacatccatgataatgaagtcatagagagcatgcattgactgaagagagtctccaccgaagaactataacacataataggacctacaacacttagatcaactcttgcctataggatgctcaggctctgtgatcctctaaccttactgatatactagtcgatccactgtgtggaactggggcaataacaaataaagggggccactgaatggtctgactgctatccatcttgctggtgataataatccaatggctgtgaatagagcagaaaataaaattgcatctttattgaccaagagccaaattaaagaaaggaaaacctcc

SEQ ID NO: 585351 - DNA, 1354 bp, Homo sapiens
tgggggggaacctgccccaatggggcacaccaggtttttggggcacccagtgggaaaaatcaggggtgtggactgtggccaacaggcccacagcagtcgtcactatcatcctaaagggagcattaagagagtcacagacgagacgcccttggcgacacgcacataggagagagcctacaatcatgcaccggcaacctcacgacaagggtcatacaagtgtccccggacacagcagaccttcagaaacgcgccgggtgaacaagaaaaacacacagagtcgacccgtggttcacccaacgcggtgccacagggggggcacaaaccatccgacgagacacgtgcatcgtacactaacaagcaccgcgagaagccgcccacaaaggggcgatggtgagagttccactccgggggagacacccatgtgtagcgaagagactgggcgatacacaccaggaaccgtgcacaggcagagggctcactctcgccacgtggtgcaaaacccaggaggctccagtcgacctccctcgaaacagcgcaccggccctatgcccacaatgggccacaaaatcccctgggagccttccctgcgccagacatagaagtgagggagccacggtgaacactcacaacagatgggaaccaccaacagtcgacgggggcagaccccacaaccaaaaagaggggaacacccatcgtgctcacaccactacgaggggagacaaccgcagtacgagggaccaggaaaatataccgcgacccccctgcacaacagtgacagccagcggcaaggagcaaacctgcgatggacgaactaacctactaaccacccataaacaaagaggaccacagatgaacaacaatccacgtgacaaggggaaaccaaacgtccacaatggaagaaccctggagacacaaactaccctacgaggcgggccaccccaacagttccaccacaaaaaaaagagtcgctgagacacaagacactcaaggaggagacatcccacattgaccaaccaccaagagcattgggagagagcgcaagcggtagaataacacacccaacacgtaggggagaacaagctccctgggcacaaacaacacgccacgacgcacacgaagagcgcgaattgactagtgtgacaacagatcgggtgaggagatagaacaaacgcctgcggcgcgccggcggagggattaacacgtcgagcaattagaccaacgagaaggcgacgatgcaacaggcgatacaaccgccggggggatctgacaatgtaccgccccaaccgctcggggtgacgcggacccgaccaaaatggaagacgaggcggccacccgggatagcagacacaacaca

SEQ ID NO: 585352 - DNA, 319 bp, Homo sapiens
  misc_feature (10)..(10): n is a, c, g, or t
aattctcccnctagagcccagtggggagtatggccccaccaacaacttgatttgggcccagtgaaacggattttttacttcttgactccataattggtgagaatgaatgtgctgttttaagccacccagcatgaggtcatttgcttctgcagctgcaggaatctcatgcagatttctgcgcacctctatgttctctcccctcagtccttcatctgccatgatggccatcctcactctggactccctcactcctcaccctggactccctcactcctcaccctggacaccctcactcctctgcaaggaaccgggtaccgag

SEQ ID NO: 585353 - DNA, 345 bp, Homo sapiens
  misc_feature (61)..(61): n is a, c, g, or t
ggaatcccttgctggctgggagtacatcatccgtgctcagaatcccaaactccccgcagtncactcctcattggggggtctggttaatctcacgcccaggattagtcatccagttgctcaggggacgtcgcctctgcttgtccgcttccggccttggacatcgtcgcctccagtacctgtgtggatcctcggcgacgttttcttggggcgtatgtgacctcttcgaccgcgggacatgaagacggcgcacgagtgggactggcgcgcgctcgcctgcggagcggacctgggaaggcgagaccgcaggcgcagtacccggtgccgcccaggtgatgcatgcgcacc

SEQ ID NO: 585354 - DNA, 145 bp, Homo sapiens
  misc_feature (9)..(9): n is a, c, g, or t
aaggatccnccgcactagcgaacgacaacaccagtatgggtgttcgacgagcattaacagccggagccacattacccaccccggagaataaggctgctgtgtgggagaaaatttttgcagtagatggcgatgttgctagtaactg

SEQ ID NO: 585355 - DNA, 842 bp, Homo sapiens
tgcctgatccacacactttttacttgtatagatagattatttggcttggacataaaagccaagccacccatttgctttccaatccaagaaagaacagtgtatagttttggtacccagagactatgatttagtacttcgacttgtcagcgttgccttgtccagtgaactttagatacatgatttttcttgcattgggtctttgtacttcgtattccataatgcgatccgtcgttttgataagtatcttctcaagccttgttccattgtgatattatcaagagtgtctttcatcttgttatagtttctcagtgggctcaggtactttcctaaattgtattaaattccttgccccctggtgtagcttcctaaggcatcataaagctaattcgcacgtatgggaacacattcaactatcggcacatgcaaatggatcatcgtagtaattaacctcgataactatacacaagttctcctttcccacctgttcaacatacatacaaacatagatacaagacggcctgccgcgaatttatcctcagagaaaagcctgttattatatgtatcaccaaaatattattaaccgtcccaagatgaggtggccccctacaaaaatgggctctgttgtgtaaagggtccccccccctatataatgaggggggcaatttacttatagtagagaagcccctcttttttgctgggctagtgaaagcgctcaccaattattatgaagcacttttctatttctatgagccccaagatgggatactgtcccctcccatttatataaatacgcccgcgtggacccaaaggatattgttgtaaccaaataattgtaacgccct

SEQ ID NO: 585356 - DNA, 1285 bp, Homo sapiens
  misc_feature (204)..(204): n is a, c, g, or t
  misc_feature (291)..(291): n is a, c, g, or t
cagagtttcactctgtcgcccaggcgggagtgctagcagggtatactattagcttctttcccggtgctaatgcagccaggctagcacagcaaagggagagaagcagaagcaactcaaaatttataaaactttctattgtggggtgtttcaaagaatcgggaataaatatgttaaggtggaaaattcagaatttcgctcagtggnctatgtgtaagagaaaacccataggaaaagtgggtgacacaacttgtgggcagaaaaaagaaaagtgaggaaactttaactcgaggncttaaaccacgagccagaagaaataccgagtgttccagaacacccaaatagagtgcataagaaagtctcagtgttctcgtgtgtgtcagtggagtttcacatctcgggataaaaaagatgtgacacatgtgtcctgtgcaccacacctctcttgtgacacacacatgtgtctcacagtatatatctcagagaatctcacaaagaggggctctgcggagacgtgtgtgatacccctgtggcaggggtctcatctctcaggttaccatgtagtaagaaaaaagtgtatatatacgaggaaagtgccccagaactctgtggtgtcccacaagtgggccagagaacttccacacggtgaaaatctctttaacacacacgtgcgtcgtgttacccccacgtcggtgtgggagagcggcgcgtggtgtattaaattaatcccattggtgaacgccggtgtgtatacatcacaagataccgcggtgtggtgagaagccccatgagaaaacaccagcccccccacgtagtgggctcttggggggagaagtcttcttcatgtggagcagaacaaacagatgcgggtattggcgcgcggacccccaaaagggtttctccagagttggacaatatacctcatatccaacgtagagaggggacccaacgagcgttgtttagtgccgttgtcacacctagtggcaactcgtaggttgctccgggggaaaagcactctcatgttgtgacagcactttctgtcgtttcccacaaagaaacttcccatgttccgccagttattaccccgttgttggaagaacacacccatgtttgtggaagttggcgtataatacgtcccttcccaaaaagcgtggcccatgtggcgacaccatatcagtgcgactttcttccacacgaggggtgaccccaagggggacaaagcaacggcggggtctcttaagcgcccaaacagatcttccctgtgtgtgggagaatgactacaacacac

SEQ ID NO: 585357 - DNA, 201 bp, Homo sapiens
gtctgctatcccttatggctggctgcacattcaatccgggggcattaattgattgtgcttgaattcctgagaatatctctatttgtaggaggggttttttcttttaacggtctgttgatgacaattactttatgggtgtgatgcacctgatggtagccaaggcaatctagtgggggaagttcgtgaaagaaacctatttct

SEQ ID NO: 585358 - DNA, 113 bp, Homo sapiens
tgcagattaggagataggctgtgatagttacctccatggtactcttcagaattcagttaattggattcaggcagccacaggcatcaagaacatgcctccttggttgcctctgg

SEQ ID NO: 585359 - DNA, 790 bp, Homo sapiens
aacttgactgataatcaatacacttggactgataagttggagggtgaggtacatctaatgctgggctgcgtgaatgagcgcgcaaatttgaaagtcggcagtgtgttttatctggattcttgatggctgagctggaagacagcagattggaatgaaagtttatagtttctcgtgtgacagatcagactgaaatccctgctactgaacgcccacactaagtgctctggctagatgcccggagtgagatcacacagcatggattcctttccatggtcactgttactatattgagtcctcatatacaagaaactggggccaagcttctctggaatgtcttcgaatgggttcctctctggtttccattgaaagtgctgcagaatccagttttctgtcatatcgggttgagccacttaaaagtaaaaccaatttctggataggattgttcagaaatgtcgaagggacgtggctgtggcatcaataacagtccggtctcctttgtcaactggaacacaggagatccctctggtgaacggcaatgattgtgtagctttacatgcgtcttctgggttcggagtaatattcactgttcttcctacaaaggctctacttgtacaccgaccaagacattcacttgatgctaaacctactcatgaattacttactaacaaaagcttgacacaaggcaagatggacccttctaaaccggtcttccaacgtggccggagtagtcatcatcgtgatcctcctggatttaaacggggtggctggctggacgccctattcttttata

SEQ ID NO: 585360 - DNA, 567 bp, Homo sapiens
ccagccaaagacagccttagctttgaggacttcctggatctcatcagtgtgttcagtgacacagccacgccagacatcaagtcccattatgccttccgcatctttgactttgatgatgacggaaccttgacagagaagacctgagccggctggtgaactgcctcacgggagagggcgaggacacacggcttagtgcgtctgagatgaagcagctcatcgacaacatcctggaggagtctgacattgacagggatggaaccatcaacctctctgagttccagcacgtcatctcccgttctccagactttgccagctcctttaagattgtcctgtgacagcagccccagcgtgtgtcctggcaccctgtccaagaacctttttactggtgagttgtggccaaggtcaagcctgtgttgccagtgtgggccaagttggtccagagtggagatggacctgttcagcctcacacagggcaggggcggccctgatggtcagggcctgtctttgtgtgtgttgtcattgctcggttcgtgttgtattaagcatgtaataaaggtttagggttgg

SEQ ID NO: 585361 - DNA, 252 bp, Homo sapiens
ctgtgatttctgtgccctctgcaggatctatatctacgcttctttggtcattttcgctgttccttcttctgcctctgtctccgcgcgtcagctgtggacactccctcatgttttcccgagtgtggcttcgtcatgttctgttttgcctccccagcaaccttacctcctcccatggcttcaactacctttcacaacatctatctccctatactttgaattaagcttttacctgctcaagaaattttagaaact

SEQ ID NO: 585362 - DNA, 331 bp, Homo sapiens
cacgaggagcttcattgaatgctactacattacagcatcgatattaaccttgcatggtaaatgtgagcttacagattgctattcatttcctttttcaaacttatctacggacaaagaagaaactcagggttgatactgaagaatggtttgctaccattgaagcaatgctttcacaaagttttgatgcttgtcagtggttacttgaatattttattaattctgaaggacgataaatgataccgcttttcttactggagtgcaatgtgacagaagtacgacttgctgtgggcaccattctggagaaaaccctaaacagtgccttgttttatca

SEQ ID NO: 585363 - DNA, 732 bp, Homo sapiens
gaaggtggaaggagcagacttgctgagtcttctggccttcgtcttcctttcgtgctggagcttcctgccctcgaacatcagactccaagttcttcaggttttgaactcttggacttacaccagcggcttgccacatggtctcaggccttcaactacagactgaaggataccctgttggcttccctacttttgcggttttgggactcagactggcttccttgctcctcagtttgcagttggcctatcgtgggacttcaccttgtgatcatgacatctccaagaacttcgttcactgaagtcttaaacccctcacagtgacccatgaggattggaatcagcttctttcaaactcttactattgttgatattttgatcgcttcctatgaatcgtgaatattttaatgacatctaaaatgtgactcctggccgggcacagtggttcacgcctataatcccagcaccttggtaggtcaaggcgagaggatcatttgaggttagaagtttgagaccaacctgaccaacatggtgaaaccctgtctctactaaaaatagtaaaaattagctgggcgtggtggagaatgcctgtaatttgacgctatatgggatactcagccaggagaatcgcttgaacctgggaggtggagattgcagtgagccgagatcgcgccactgcactccagcctgggtaacaaagtgagactccacctcaaaataaaatactccaatacaata

SEQ ID NO: 585364 - DNA, 131 bp, Homo sapiens
atttacaaaataccagttttttaaaattttggccaaattatgggtggttgatttaaaaacttttccaagaagaagaaaagcatggggtcgtaatttaaagaacccaataaaaacttcttttttttttttta

SEQ ID NO: 585365 - DNA, 619 bp, Homo sapiens
gttttaaaaggagctgtttaacgaaaatgtgatgtgcccgaaccggtcaaaaatttgtaaggttaccgttgaaccaattgaatgtctagattggtttttaaaaggtttcactttaaaataaagtgaagaatagtaggtttccagttgtaggttcaactccctataataagttcaacaaggtatggttgtgtaaataaaagacactggaattttgtggcgtccatgcttaaaaagttagaaacgagtgtttcatcatcatatacaaaaccatggcaggttgtaatgtagatttatggcaagtggttaaggataacccgtagtacagcaagtaaggacagattatggtctgttattagaataattgttgagagtaagagcacttgtgtatgtaaagatgagtagcacatatagtggtgtgcaatgtcagaatgaagtttcagatgatctccagcgaactatgttggaggcaggaagatgctcttgttgtattcttaacagtaagtaccaaaaggagtagacctctcacgtcattttcgtattaataagtcctgtctctatattagaattggattgtcttgcacccagctggttgaaggctggcagtataaatatatcctgg

SEQ ID NO: 585366 - DNA, 830 bp, Homo sapiens
gcgaccgacccgaacacttcttgcttgttgctctcgggagcggcttgtcctgtgtgctatcgctgggcctgtcctaatcgataacttattccggatcccgctgctgtacgtatctcgtcgacgcgtcagtgtcgcgttcatgtcagtgggctacgtggattaatctcagtgggtgaggttcggagagagacaggcctgcgatgtccgtatcgaagcgaggagcacgccggggcacgctcgctgaggtgaaggcaggccgacggggccgccgatgatttggaaccggaaggggacaggaatttccgaggcagccggagcacaggcgtttctcagaatgagcctgcggaaacttgagcgaagtaatacataccgagaagctagcgcagggttctaaaaccatcagacgaggatgttgtgtcttgagcacttcgggggcctagtagggggctgtcgctcgctgggggcctagtaggagcgaggtgcctcctacgacgggcattggccttggtatcggctctgaacggagggagtcttacgctccgtgcgtgcgccagggagactgcggctgcgctgagagactcgacggcaggagaaagggtgggatcagcaaggtcaccgctagggggcagagagtcgaggattgacgaggcctatgccttggagagaggcacggttgcgttggcctatggtgtccaggaggaatagctggtgttaggaaggtgggaaacggggaggaattcctcgtggacgaagcggaacaccggccaagatggacgtgatcgaacccccccttattattacttaaaggccacccttagttgatgcgccag

SEQ ID NO: 585367 - DNA, 517 bp, Homo sapiens
  misc_feature (242)..(242): n is a, c, g, or t
  misc_feature (249)..(249): n is a, c, g, or t
  misc_feature (258)..(258): n is a, c, g, or t
  misc_feature (267)..(267): n is a, c, g, or t
  misc_feature (280)..(280): n is a, c, g, or t
  misc_feature (282)..(282): n is a, c, g, or t
  misc_feature (284)..(284): n is a, c, g, or t
  misc_feature (335)..(337): n is a, c, g, or t
  misc_feature (339)..(339): n is a, c, g, or t
  misc_feature (343)..(343): n is a, c, g, or t
  misc_feature (349)..(349): n is a, c, g, or t
ggaaagattaattgggagtggtaggatgaaacaatttggagaagatagaagtttgaagtggaaaactggaagacagaagtacgggaaggcgaagaaaagaatagagaagatagggaaattagaagataaaaacatacttttagaagaaaaaagataaatttaaacctgaaaagtaggaagcagaagaaaaaagacaagctaggaaacaaaaagctaagggcaaaatgtacaaactctcaganaggcaanacaccaatnttgtcgganaacggtattaggnananaccaagatagaaaatgaaaatattgtcaagagtttcagatagaaaatgaannncnagcnaagacnagtattggagaagtatagaagatagaaaaatataaagccaaaaattggataaaatagcactgaacaaatgaggaaattacttggtaaccattttattttaagagacccatcaatttaatttctgatggtgcagaagttagaaggtaaagctgagaagactgacgggtg

SEQ ID NO: 585368 - DNA, 1031 bp, Homo sapiens
  misc_feature (12)..(12): n is a, c, g, or t
  misc_feature (104)..(104): n is a, c, g, or t
  misc_feature (137)..(137): n is a, c, g, or t
  misc_feature (144)..(144): n is a, c, g, or t
  misc_feature (152)..(152): n is a, c, g, or t
  misc_feature (185)..(185): n is a, c, g, or t
  misc_feature (187)..(187): n is a, c, g, or t
  misc_feature (196)..(196): n is a, c, g, or t
  misc_feature (199)..(199): n is a, c, g, or t
  misc_feature (211)..(212): n is a, c, g, or t
  misc_feature (214)..(214): n is a, c, g, or t
  misc_feature (219)..(220): n is a, c, g, or t
  misc_feature (222)..(222): n is a, c, g, or t
  misc_feature (225)..(225): n is a, c, g, or t
  misc_feature (233)..(233): n is a, c, g, or t
  misc_feature (244)..(245): n is a, c, g, or t
  misc_feature (250)..(250): n is a, c, g, or t
  misc_feature (256)..(256): n is a, c, g, or t
  misc_feature (274)..(274): n is a, c, g, or t
  misc_feature (283)..(283): n is a, c, g, or t
  misc_feature (286)..(286): n is a, c, g, or t
  misc_feature (289)..(289): n is a, c, g, or t
  misc_feature (292)..(292): n is a, c, g, or t
  misc_feature (323)..(323): n is a, c, g, or t
  misc_feature (330)..(330): n is a, c, g, or t
  misc_feature (344)..(344): n is a, c, g, or t
  misc_feature (368)..(368): n is a, c, g, or t
  misc_feature (370)..(373): n is a, c, g, or t
  misc_feature (392)..(392): n is a, c, g, or t
  misc_feature (398)..(398): n is a, c, g, or t
  misc_feature (404)..(404): n is a, c, g, or t
  misc_feature (416)..(416): n is a, c, g, or t
  misc_feature (419)..(419): n is a, c, g, or t
  misc_feature (423)..(423): n is a, c, g, or t
  misc_feature (426)..(426): n is a, c, g, or t
  misc_feature (435)..(436): n is a, c, g, or t
  misc_feature (460)..(460): n is a, c, g, or t
  misc_feature (591)..(591): n is a, c, g, or t
  misc_feature (667)..(667): n is a, c, g, or t
  misc_feature (777)..(777): n is a, c, g, or t
  misc_feature (975)..(975): n is a, c, g, or t
ctaatatcaacntattggtcaataaaacttgtgccttaaagtcttttacagtattttttgaaaattaacttttttttaactgcatatatgggtcttcacttcanttttcagtgaagacaacttatttggatatcagngtgtcancacttganaagaccagtggaggatttggatagtagcgagcngngtttgaatngcntgaagagaatgnngngaatnngnagngcagaggnaattgtgcganngcgtnaatacntggaattgcaatagtgcngtaagtgcngantcnctnacaagaccatgtataaaccaaggagtgttcngtatttnccagtgccaaaacngaatcaataaaaaaagagcgccantnnnnagatgaagtatttaaaggntttgcntttggnccctcagatttnccnttcntcnctagaggcnntgactccgcaggcctctgactccncgtgcctgcatcccctctgagtgcttccaggatgaggactgtgtcccaattacgatagtgacgagctgggaaaatatctgaatgcatgcgcgtgaccaaaataaacaaccttgggttcaggtttgccagtnattttcttcagaagttcatagaggtggacagcgttcccttgggagtaccagccaggtttatccagagatggcagtncctcctgctcctcatcattctcgagtgtacggaaaggtctctgacttggtaagtgggagaagaaaccaggcttcaatgcatttgtaatcacaatgtcaaaaaggtctgtnaaatcattcccaagaatatattcgcagagaagtctacagttatcactgtgagaactggtaattaacagaagaattttcccagcattctttagctgtggaagccattttttcacagattcaggacaactatgttaatatctgcctggatctctttttatttctgggaaatatattccacagttttccttaaaagctganattttataattgtgtgtatagcagcactatatacttccaaaatcaaatgtgttttg

SEQ ID NO: 585369 - DNA, 529 bp, Homo sapiens
cgggggggggtgcacactttcccccgataaccaccgaccaaaaaaagggactcttgaaccagaacaagctggggttctcaaaaggttcggggtccaaccgctcaccctgcatgcaaaaagacgcccgctctcccagacagagggtcaaaacacgggcccccgcgaccattgttaagctcttgtatcacacgcgcaaggggctaaaagggcagtgggagggttttacgccgtgttaagcagcttttgtaaaaaaggggtgccagccccccattaagaacccctggtccctaaggagggtaccactccgggtcaagaaagctgggccgccttatgcttatcacaccaccggtgaaggccgcgcaccctcccgtgagactaagagaaaggccctggggttcctccgcccattcctctgtttttgttagcccatgatggaagtcatacccgctgtgtaaggagcataaatttccttcatcgtctcgccccttttgtaggggcccccttttttaaaaaaaaaaaggattcttgg

SEQ ID NO: 585370 - DNA, 409 bp, Homo sapiens
  misc_feature (99)..(100): n is a, c, g, or t
  misc_feature (102)..(102): n is a, c, g, or t
  misc_feature (108)..(108): n is a, c, g, or t
  misc_feature (234)..(234): n is a, c, g, or t
  misc_feature (243)..(243): n is a, c, g, or t
  misc_feature (293)..(293): n is a, c, g, or t
  misc_feature (347)..(347): n is a, c, g, or t
  misc_feature (361)..(361): n is a, c, g, or t
  misc_feature (409)..(409): n is a, c, g, or t
ttttttgtctcatcagtctgcaactttattctttgtacagtttgggtgaagtaagagcaaaggctttcactcactcccaccctcattccaggaattttnngnaaaganctcccaagatttgcaaggattcccatggcacttgagcacaagctgcactacgtttgttttccaaaatgaagttagagacccggtaaaggatgaccttagaagtgactgggggtgaaaggcacctgncctggggantggggaaaggaaaggttcccccaccttgcccacaaggaaagcaagccganaagcttgaaaacttgaactggtttccatggcatgttctggtctggacatcagancttcctctgacttngctctgccccccaaactaagtttggctggtgactcataaagggctggn

SEQ ID NO: 585371 - DNA, 229 bp, Homo sapiens
  misc_feature (19)..(19): n is a, c, g, or t
  misc_feature (27)..(27): n is a, c, g, or t
  misc_feature (47)..(47): n is a, c, g, or t
  misc_feature (56)..(56): n is a, c, g, or t
  misc_feature (149)..(149): n is a, c, g, or t
  misc_feature (184)..(184): n is a, c, g, or t
  misc_feature (213)..(213): n is a, c, g, or t
gaaccacgcctttcgcctncggaggcngggggcttcctcacctactncaacctcanctccgggggggagctgatgaagtccaagtactcagacatcaccatcatgtttgaggagacgcaggtgcccgcgctgctggaggccggcttccngatggagaacatccgtacggaggtggatggcgctngtcccaccggccgactgccgctactacgncttcccacagatggat

SEQ ID NO: 585372 - DNA, 1373 bp, Homo sapiens
  misc_feature (1079)..(1079): n is a, c, g, or t
cactggctcagctgacaacagctgtacgtctctgggactgtgaaacagtgaaagcagctggaccttactcaagcaccaattcggctagtccggacctagcggctctatgactattgggggcaagcatcatcgatgttctccagcggaccaagccagactggcgctaccaaggtgcatttcgtgacgcttcacaagacactgcggcgatcccgatgccagcatatgaccaaacaagtggagaccctacatagcaagatccacatatggcaactagagctactaatacatccaccacgatgctagtcaagcggcgacgcccatgagaggagaagttgcagtcatacgcctgggcccatgcagacgtgcgcagcagcatcaaaacccagctattcagtggcccagaagctcataggcaggagcgctcgtaacgcgctgcacactcgctccaagcgcaatcatctcacgcgggaccatgactcaacccgaaccaatcccaggcttaatccgcaggggaacccagttgaccgcgcaatgggttacatgggtggacacctgctcggcttcacacacgtggtcgcgtccatcgagcgatgtcgcctaggccatactctcagggatgttccccacaataacacttctctattgtaagacatacttcctagtaaccaggacccatgtcacccacggtacagagaaaaagccgtatgccgtgagagcagacgccatcagccagcgccgtggcccccaccgccaatgcgcacctcgtcgaagccgtctaatgacacgcctacattgcgtgccggctcccccatgagacgcacgagtgctagggcacacccacgacgacacatgtccgcccatcacgaggaccactggttcaaccagccgcccgcagacacacactatacacaaactccacgcgcgaacgtcggccacccacacgcctctaactgacaagagctacgcctagccacttccctaatacttcccaccaccatctcagtaactcacatactagttaaattgacaatcgaactcaacactacttgactacacaatcctccatttcacgccatacngcagtcactacaccctcatacgacgcacaacaccacatatatttacaacaccccgtctatacctctcgcccctcatatcatacagtcctacaacactatacaactataagtccaccttcgcatcatgctacccaacataccactcgcatgacgctccaaccgctacacaacaactttagtcattaaccacactcttgacgtcatcttcaccatcagtacagtacatcgagcactgcctgatcacacatacttactcatcccacctcatagcttacagcagccatctataactga

SEQ ID NO: 585373 - DNA, 427 bp, Homo sapiens
tattacattagtatattacgttatttattatgatcctagttgatggcctaaataaacacctttttctttaaaaaaaaaaaaaaaaaaaaaaaaaaaaaaaaaaaagaaaaaaaaaaataaaaaaaaaaagggggggggacgtagatatccgggggggacagatcctaagttgcaccgcgcttctagggacaccaaactggggccccctagagtggggcggctcttataaatacgcgcaagggagatggggcgccggttgttaaaaaaaacgcccgggcggggggaaaacaccgcgccacagcggggacacacttttgggagaaaaggaccccaaacatctggggggggcggaacaaacagagggcgaacgaatcctccacgccaggagtcttttaaagcctctcccagagaaaatataaaattcttg

SEQ ID NO: 585374 - DNA, 199 bp, Homo sapiens
atacaagaaatatgtatgagctgatcaaaaagagttgggttggaggagaaggaaatgatggaagtggagtgatctcagagctccatgttagcaactcatgggagtgtggagccggtccatctgatctgtcagcccaccctggacaggacaatacaggcctacggaggtcatggaggagctacgccgagctcgggcgaag

SEQ ID NO: 585375 - DNA, 438 bp, Homo sapiens
gggtcacccagcgtcgataaaggacgcgcaaagatgctcacatctcccccttctccttgggcgggatcatccagcatgatgttcgacaatggcagcatctacaagcctgaagtgcttgatatcacagaggaaactctgcattctcgcgtcctggagggtgtccgcaatgttgccagtgtctgtctgcagatgggttacccaactgtggcatcagaaccccattctatcatcaacgggtacaaacgagtcctggcctagtgtgtggagacggatgacaccttcccacttgctgagaaggtcaaggccttcttggctgatccatctgcctttgtggctgctgcccctgtggctgctgccaccacagctgctcctgctgctagtgcagccccagctaaggttgaagccaaggaagagtcggaggagtcggacgaggatatg

SEQ ID NO: 585376 - DNA, 200 bp, Homo sapiens
acagctcccccgagggacgcgagcgcctgttcttaatgtaggggcccatcgcgtggcaaatagcgcgggtgacaaagccccacacacctggtgcccctgcgcgggctgtagataggatgtaagaatagaggggacacacgctgaaccggcgctacaaaagtggggtaacgcgcccccaacgccccatcaatgaacacaaa

SEQ ID NO: 585377 - DNA, 833 bp, Homo sapiens
  misc_feature (124)..(124): n is a, c, g, or t
gtgataatcaacaatatgcaatattgatggtaccagagtatcttgtatgttgggtcatgatctccaataagtgctgctatacatgtcgcttgacatgtagatacttaatccatcgcctcgatangcagaaatatgctatctcttctgtagacaccattgtaaccctcaaccactctgctatagacgccaagtatagtagctcttagtgtctccattgtaagactaaagagcagtgttgtgattttagacccagacagagaggagttagcttctgaattcgtaaatatgtgttccccattcctcatattcgagcctctcctctccgggttgcctcctgccagcagcatccatggtttcatttgacaccgtttttgaaattatccaggacaagtctgtaaaatcagagatacgtacaaaatgtcatactcaactctctacctgtttgatcattcttctcccccttatctaaatttgtagctaatctctgataatgtaagattgcttgattctgcattctctagctgtaggctgtgagggacttccagggattacatggaacaaaactggtgttcttaggtacactgggtgtagagtacctgaagtctgccttttccatttagtgacccttctcgaggaaaatttgctttccctcataacttattgtagtctctcttaaccatcttactatattggcaacgacattgctctggcctggacatttgaaggacccgatacggaaatggaaagtcaacccaattggctgaattgtcaccttcacttctggaactccgatgaagtgtgccactacgaatctaagcttggtcctggcatag

SEQ ID NO: 585378 - DNA, 267 bp, Homo sapiens
gggggggggtttttgcccccccccccagcgcttggggaatccccttggggggggtggttgacatccccccgtttgggcgttgcatggaggggggggccggcctttcccatccccggggggcaggggtttctgccccaggagctgctcccggagcctgggcgggttgcctgggaacgggcccgggccctgttctgggggcccgccccacgggggcccacggttttttttaaaaaaggccccggttttggtttgggttggggcccggga

SEQ ID NO: 585379 - DNA, 834 bp, Homo sapiens
aaacataaattattttgccggcagacatctctctatacaatattattattttctttttccatcgatttttttcgagaacgcccgctgaaatgtgcacacttaaaactaataaagaggttccgggattagttcatcaactttagagcaaacatgcacatctctgaaagccaacaagaattcttcagaatgctggatgaaaaaattgaaaagtatttatttatgaatctctaagctatgatggatatcactcaacagaagataatgaagaaggcgttaaattcattactattatttatcagcagatcccactttgacatggaccctctgagagaataattgtgtcatgttctaagccaccattaaaagactatctgaggccaccaatgctaaaaatatatatggataatgaattaaaatgagagctgaatttatcgcgtcccctgtacgctcaagaacgtgtactcgttcgaggtgaaaaataaacactcggtcctctcttggtctaacggcggatttctgctgtcggcttcatttcccgtggatcattctttgcatctcattcattgcctcgtccgtcgctcatctctttgctcccatatccctgctcccaatctccctttggccgctacccccaccccctccatccttgtcgcaccctacatctaatcgcccctctgcattccacggatcccaaatcagcctgcatcctaccaaaagtcatatgtgcaacttgcgtaccccgctttctttttttgaccgcgacaattttccctaattcatgtctttgcactatgaattactcccttttccatcatctcttgcccactctccctg

SEQ ID NO: 585380 - DNA, 1041 bp, Homo sapiens
aaactcccccgggcagcaggaatgacacccttgtatgcaggcagcgtctgcaccaacatgggtatctgggcctccccaggcccagcactgccccgacagcggggtcaagagaacctactctgaggtgtatccaggcagcagtatctgcaaggaggccagtatgaaaccagaacgccagtttggcccagccctgggaggcacctgccctccccttctaacctgtggcacaggcatgaccattgaggcatgtggcatgcaccagtccctgctccgagacatggacccacgggacttgcattataagactacccgataccattaccgagctaccgccaattccccacatgcagggaaacccacggaaacacatgaaaccaaggcaagtagcgaccactcaaaagtgtcaccaaaacaagacggtgcaagttccactattatagccgtgatctcaagccaaaactcaactcactagacaactcagaatcgcgcctcatgcgacgacgggccatgagaagaagtagcaggcaggacgcatacccgagcggcaagcgacagggggagtaggcacactgaaaaacccaaacagacaagcagaacaacatgagactggacacgaccacatgataaacccggaagagaacaccagcgagaaggaacactgcagaaacaaaggcaggaacaggagaagaagacaaaagagataccaccaaaaagacagaagaataacgagcaacaggcacaccagagaagagaagaactgcaacgaccgcaacgaaagagagggaacacgagaacaaaacgcacacgaagcctgtgtgagccgacaaacacacaaacacgaaacatgcaagacaacacaagctgagaaagacagccacgacagggcaaagagcagacacagacacgcagagagaggacaagagacgaacacggccaccagaccgccccagagcaggacacgagggagcagcacggaaccgcacgacaaagcagcagagaaacagaacagacacagacgaacgaacacaaagtgacgaagaa

SEQ ID NO: 585381 - DNA, 182 bp, Homo sapiens
caataggaaatgcatgcccacttcttggtctcgggaatgtgttatggtcaacaggtccatggagatcagagcgctgctgcttcctgggctgctccagagcatgcaaacctgctcgtggggccacttcagcctctcttctggggtccgggtctggggtggcatcgataaacaccgggtagcgg

SEQ ID NO: 585382 - DNA, 855 bp, Homo sapiens
tggtgttttcgagcttgaattctcacctgtgatttttttttttaaatgttgttctcatgacttgattttcctcataagccaatgtattggtaggttaacgggatttattttaagggagtgggtaattcctctccctttttggattaagtgggtctcagctatggtgctatccagtaggtatctctcaggtgtcaaggtcccgtagctaaatgccatggttcattataattattatttggtaatcacatttgtaagcttgaattggggcttgtacctgcatctttggtattctggtacatctgggttacttaaacttggggaggtccaattgggttcagtcatgttatgtctacttggtagttaagtagacttcatcaactatggtctattggggtatgagaagtttcacttccaaacatggtgtaacaatcggatgtttggctttgggacttcatttggacattaagttggaaagtaacatttattccaaatttctcggaatcctggtatttggaccatttccactcgtaaattggtaatatacctggctgtgaacatccttgaataaagatgacaagaaaccaacaacacacaaaacaaaacaaaaaaacaaaaacaacaaacaaaaaaaaacagggggccacagtaaataaacaacccagcaagcacccaccacggaggcacccacgcatagagagaaagaagccacaaaaagatgagaataacagaaaacatacacaaaaaaacgagcaacaaaaacaggcaacatcaaatggcgagaaaaacaacgtgagtagaaaatgacaccacaacaacccagagcaaaaaacataagccaaagcaaaaggacaacaa

SEQ ID NO: 585383 - DNA, 112 bp, Homo sapiens
ccaggaattcgagactagcctgggcacatagtgaaaccctcgtctctacaaaaaatacggaaaatactgacatgggctgcttcagtgtgattggggcttaagggacccttgg

SEQ ID NO: 585384 - DNA, 406 bp, Homo sapiens
agcactgccagcctcatagacatcatccttagtatagtactgagacaggaacagacggaccagattagaatgcatagaaagagaagcgacacagcaccatcatcctctgacttacttagaggagcagcagtcgcccctatatactcccgacgatactctcagtgcagagggcacaaatcgagtaatctctgccttggacttagagatctgtggctatggcactgatggttgctgtgactttcttctcaatggtggctgcacttgtatcatccgccttggatcgctgaatcaagttgggtggggcacttaaaaccccagggtatgacaagggaactggtgagaacagcccagggggggcagatccacggggaggcaccaaaggtgggcgcatcatgccaggacgagg

SEQ ID NO: 585385 - DNA, 181 bp, Homo sapiens
taaaaaggttttttttgggcccccccccccccccccccccccgggggtttttttttcccccccctaagccccggggggggggttttttttttgggggggccccggggggggttttttcccccgggggggttttccccctttttggttttttttttttatttttttttttttccccccccca

SEQ ID NO: 585386 - DNA, 1636 bp, Homo sapiens
gggacgtgttcgtgaactgcacgggcagtcctggggggtcagtgtcaagatctagcacagggatcgtctggtgcgaatgcgggtgacccggggcaccctacgaacgtttcggcgtcgaccatgtcttgccccacttgtgcgggtagtatggtacctttcgtatggttgtttcccgcactttcttcgtgcaatcactgtgcctgcgttgtttgttctgttttattcggtttagtttctgtgaaacccatgatcgtggtttcctgtgtcccaagtgactgtgtggcaggcgtgcccggctctggcagggactgtgtggtgtacgcggggaccggtcccaggccccgtgccccgccgggctcagcctcccaagtgcgctcgcgcttgcctgtgtcccgggcttgtctgtgaagtgctgcctgaagatcgttgccaccttccgaccgtacctcatcaggggtgttctggggacaccatgatctcgtggattgttcatagtcgttgtagctgcagccgggaacacaccgccgctccggagacagggccagctcccctacgaccctagcgcaccatccagccctgccgcggcccctctcctctcattccgtgcatctgtcccgccttcgtccatcagggagcagcgtgacttcagcgagtcccgcgagcacctggctagacagttaacaagcacgtccttccagcctgagccagcgcaggtttgggagggggcttcctggccccccccacggtgtccagcccctcctctcttccgcgcctatctcccaccttccctccgtagaacattctcttccctctccgcaggctcaatgaatcgaatgaatgtgaacttcttcatctgtgaaaaatcttgtattggttttccatttggagcgtgttagggggcttctgttcgagttgggcgagagagcgatggcatgccgtggggagtactggaggagccctcgcggcaagcagggtggggggggactttgggggcgtgccgggcccatcatctctacgcctgtactagtggtctcagatgctgttgtcttatcaaaaatggggatccttccagtgtggagccgagccagagaagatagcgagagtctaaatctctggccaaacaaagaaaaagacagaatatacgaacatgtggaaaaggaagaagggacaaggcagcggaactttagtaaaggtgatattgtataatattaaaagggggaagatggggaacccgcaaaaggatcgagaagcggggctgagcagaaggaataaagaaaaggggtgtatataccacaaaccagggcaccaagagattaacaaacaacactgcacaaacaggaaagacacaaaacgaaccacagggaacgagaaaaaggaaggaagagagggacaagcacaagacaccaagcgtagtatggaggacccgtgccaagggaaaggaaacagtcagagcagggaacgggaccaacagggagagagaggccaaagcacagacacaagacgaggacccagcacagaggaagagatacgcagaacacgacgacagaaacagaggagcacacacagaacaaagacaaaaacaaaaaccgagaaaggaggggagcacggaaaggcaaggagagcaccaacattagac

SEQ ID NO: 585387 - DNA, 80 bp, Homo sapiens
gcccccgattgggttgtgactgccggcaacagatttcgagctcctggacctacaaggtggtgttgggcaagtacgaccgt

SEQ ID NO: 585388 - DNA, 97 bp, Homo sapiens
  misc_feature (14)..(14): n is a, c, g, or t
  misc_feature (20)..(20): n is a, c, g, or t
  misc_feature (33)..(34): n is a, c, g, or t
  misc_feature (47)..(47): n is a, c, g, or t
acgctagtcgagcnggtgtnaatcggccgaggnnagatggcggggangaagaatgttctgtcgtctctcgcagtttacgcggaagattcagagcccg

SEQ ID NO: 585389 - DNA, 158 bp, Homo sapiens
agagcggctcctacaaatttgccactccaggagggatcacggagcaagcgctgcatttgtcagcgctcattagcaacccacagacagcaggtcagcgctcactagcaacccacagacagcaggtaaaaagatgggcctgagctttcatatactcgggc

SEQ ID NO: 585390 - DNA, 355 bp, Homo sapiens
tagcgatctagaggatccttaaaagccatttctaccaaagatacataaattagccaggcctgggggcatgcacctgtagtcccagctacttgggaggctgaggtgggaggatctgggagaattgcttgagcccaggaggtggaggttgcagtgagccaagatagtaccactgcactccaccctgggtgacagagtcagagccctatctccaaaaaaaaaaagaaaaagacaaagatgctaaagcagtttcaattggagctggagctaaaaagcagataccagtgaaaattaggcaacccttacaatatttgaagaaaaaaagataggaccaattgagaaatggcgctatgggggt

SEQ ID NO: 585391 - DNA, 100 bp, Homo sapiens
atcgtcggtaaatacgggaacgctatggggcctcactccggaaaatggtcaagaaaattgagatcagccagcacgccaagtacacttgctctttctgtgg

SEQ ID NO: 585392 - DNA, 428 bp, Homo sapiens
actgcgatatcttactaagctcagataatttgaaacataacatctatcttctcctgaacagaaaagaaaaaaagaaaagcaaactagattatttagagttttggaaaactagaacttaagaattgtccagagttagaaataacaggaattacgagtgtgtgtgtgcagatggttcatgtacttagcctctcaaagtaaaaaacagctgtgaaatgatctagtaataaaatttaaattttcgcattaataactcacttccaaaaacatctgcaaagggcattaagggacaggggataaatgtgatcgacaaatacaaattcatatagttaatgctgagctaccattcacttagtgacctggcagattttaaatctctgcagaaacgactatccggccagacgtggtagctcatgcttgtaatcccagca

SEQ ID NO: 585393 - DNA, 184 bp, Homo sapiens
  misc_feature (176)..(176): n is a, c, g, or t
ctccgcttccaggtccaccattctcctgcctcagcctcccgagtagctgggactacaggtgcccaccaccacacccgcctaattttttgtagttttggtggagacggggtttcacttgtgtttggccagtgatggcctcaaatctccttgacctctgtgatccacctctcctcggncctcccaa

SEQ ID NO: 585394 - DNA, 1462 bp, Homo sapiens
tggaagcttctcacatctttatgggaaaggcacagctaagcccacccttgatacagcattttccatttctctctgtagagactcagacgattgtgaacacgagaataagcgtgacttatattacagacacagggtggtggggtgtgtgcttttttttaaaaacactttgtgtctttttttttttttaattatctccccttttctataaaagacaagcattgttattacgtggaaaaaagaaaaaaattatttatattaaaatataaaacccaaagacaccatttttagatcccctctcattcttttaattgggagaagggggaggggagaactccggggtgtcggcccacccttacaccctgggtctcaccatcccagacctacagacatagaacacgcgagcaccagcggaagccaccccccattatgggtgggacaaagaggagaagaagggcacccagggaggacacaataagaaaaggaggatagtgggaacaaaagcacaaaaggagggacaagaatgaggcggagcaaggggtgggacgaggtggggcagccaatataccccggggggacacccccgcgggaacacaaaggaagagaaaaaaaaccagcggagcgtgcccccaagcgaaccggtgcaaaaccagggggcgacaaaaataacacataaagactactacacatagcgaaggaaacccacggaggtagaaacaaagggcggcaagaggagcgccacaaagcagaaaaacaagagggaacagagtaatacacaaaatcgtacgtcacacaaaaaccagtgggaggaaaaaaaggaggaccccaaaaggagagaaaacgaaaaagcaaccaacacgacaaaaaagggaactaagagagccaacccaatgagggaaacccacgggggactcaccccaaactcttacgacacccacaacaagcgacgacttaacaccatgagaccactcacacagtgtatcaagggcacgagaggaaaacaccaacacaaaaacccaaggaccatgcacgaggcgacagctcacgaatagaacagcaagaacgcgaggaaaaatggaagagaacagcaagaagacaagcaccaaaagaggagacactaaaaaagaatagaaagcgaggccaccacccgcaacagacgacgacccaccaaaaaaaaacaaagagggggcagaatgacagcgagcactccaccacgaaagcccccgagcgtgtgcagcagacgaaaaaaaaaagacccacagaaacaaggaaacacggcccacgagagagaggaggcgcgagagcagcgcaccgacagaagaggaggagagagaagcgccggcgagcgaacacacacgaacagccacccagcaaagcagcacacagaaaacagacagaacaagggcaaacaacgagcaagcccacagaaagcagaccgccgtaaccacgagacatcaccaagcac

SEQ ID NO: 585395 - DNA, 233 bp, Homo sapiens
cgagataatggagagatgccagcccggtatgagtggggcaagggctcacatgggccaggtgcatgccgatgctcgcaggcctgctgctgccgatgctcactgctcctgcccacctcgttcccgctgccacacccctccctgggtcaccgtgagacaagcatctctaaatcagttgggtcacagccttctggatagtttggagtaggccatgggtacagctggtgtcaggacag

SEQ ID NO: 585396 - DNA, 166 bp, Homo sapiens
actctagacgatccctcagcaccttgaggatggaagagggagacggagaaggacgaagggttgggagacggacagacgaggacgtggggagggaaagaaaaatgctaaagggcaggaaaagggacagtctcattttcttgtcttatttcatatgacataggtaact

SEQ ID NO: 585397 - DNA, 1531 bp, Homo sapiens
  misc_feature (1)..(1): n is a, c, g, or t
nttttagttattggggggggccgcccctctttttgttagtatgggcggcctccttgtgtgttttcctctcgtgggatactatttgcctggtgtccttggttcacacacacagatgccgcccctctctgtgtggttaaagagtccgctcccttagaagatgactcctacctaggcgcctggtgtctcgccccgtaagacacacatttgtggtttttttcattcttagtcccccacttatgtggtaatatccttctcggctcctcttctggggtataaccctcctcattatgctgccagacgaaagttttattggtgtccccataaagagccgtttgtcgttttccccaccagaggggagcacaccaagagtgactattttatatgcctcttgtggagatattccttctctctctgtgttggggggggccacaatacctggggggcgccatccaacgaggagaaggactcttcctcctccacaagacctctctgtgtggtatagataagcccccccccatgaggggaacacctcttgtgaagtcctcctggtggttggtgaacaccagaaagattcctctccgttggtgacctcccctctaaacggaccctactattcctcaagagtatgatgtctcctcgcgcaaattacttcgctcacagatacttcggtgtagaggtcccccctcttccccacagagataatataatagtgggaaaagaactttgtgtgagaacccggcgggaatagatgaacacccctccagcatgtttatataatatctcacagcgtctctcagagccccggcagcgctcgggagagacacagtcccacgcagattccctctggcgggtgccgcgcttgtgcacacacctcgttgcttgcccatcatttctctttccgcgggcaacatctcttgtgagagaggttctctgtacacagagagctcttatagggcgtggttgttggagacttcgcccctctccccctctgggcctctctcacaggtctctctctctgtcacactcggtctgtgtgtggctcagagaggtggggcgctcttgtgtgtcacactgtgtccctcttgcttgcactctgtccacacaccctctcaccactcttctccccgcgcctctcggctccccactcttgggcgccacaccctctctaaagtttgagagacacaggagaaattctctccacacaccacacggcttttccacagagaacttccacagaccacgcacacccacagagagtgtagagctcggagagtgggtgtccccacatagccttctccacgcacagccctcttccctcttgcacaggagagggtggaagttccctcgggtcaatgcccttcccctgccacagcttctgggctttcaagaagataaaggcacttttcctctgggcacagcctttaacctggccatcctaatttggttttaagactccctgtgagaaagctttcccgcacccttaacccccgtgaggccgtgaaaaagaaagttaataaaactataaaacctg

SEQ ID NO: 585398 - DNA, 114 bp, Homo sapiens
cggaggttgagagggacactctggcacagtgacctggggagctgtgaggcaaggaagctccagtgatgaaagcaacctgtaggctggaagccgagaacaaacttgcttgccttt

SEQ ID NO: 585399 - DNA, 538 bp, Homo sapiens
  misc_feature (244)..(244): n is a, c, g, or t
  misc_feature (253)..(253): n is a, c, g, or t
  misc_feature (521)..(521): n is a, c, g, or t
  misc_feature (535)..(535): n is a, c, g, or t
tggactcactcagttcaccaataaatgtcatatcgcttttgctgcactagaagctgtttgtttccaaacccgagagattttggatgccatgaatcgcgactgtggaattccactcagtcatttacaggtagatggaggaatgaccagcaataaaattcttatgcagctacaagcagacattctgtatattccagtagtgaaaccctccatgcctgaaacaactgcactaggcgctgcatggcantgggggctnaagagggggttggtgtgtggagtcttgaacctgaggatttgtcagcatgtcacaatggagcggtttgaacctcagatcaatgctgaagaaagcgaaatccgttactccacatggaagaaagctgtgatgaagtcaattggttgggttacaactcagtctccagaaagtggtatcccataaataataccacctcacggatttccaagatgcaagctttttaatgtggatatgaaaatcctgacctattccggtctcatagtataatgangctattcctagacnccg

SEQ ID NO: 585400 - DNA, 261 bp, Homo sapiens
  misc_feature (113)..(113): n is a, c, g, or t
  misc_feature (136)..(136): n is a, c, g, or t
caacgatggtcctcagctgtgtctcgaagcagccctggtctgtacgttgaaggatctaacaatgattataatttctgtaactataacaatgattacaatttggcaggtaaagnactcctttgttctgtcctcctgntgatgagattacctctgcttttgatggttgtgttaccggagatttggacagtcatggattctttctgggccctggaaagaatccatgactgtccaaatctccggtaacacaacgggtaccgagct

SEQ ID NO: 585401 - DNA, 208 bp, Homo sapiens
ccctatggtctatgagtgctgagtggtggcttcctcccatcctcccatctcagcggttccatggctgctcccttcggcactgtgctggtttccagccctcccttcctgggtgtgtggaaattgtagacagacctctattttacagaagtttgatggttccctagatagaagtacttgagacagagcaccataccctgatccccttggc

SEQ ID NO: 585402 - DNA, 120 bp, Homo sapiens
tacactctcgctactgtatcctagggttcgtaggtagggttcgtaggtagggttcaaaggtaggactagtaggtaggactagtaggtaggggtcgtcgttaggagacgtaggtaggatta

SEQ ID NO: 585403 - DNA, 389 bp, Homo sapiens
  misc_feature (13)..(13): n is a, c, g, or t
  misc_feature (143)..(143): n is a, c, g, or t
  misc_feature (152)..(152): n is a, c, g, or t
  misc_feature (183)..(183): n is a, c, g, or t
  misc_feature (215)..(215): n is a, c, g, or t
  misc_feature (277)..(277): n is a, c, g, or t
  misc_feature (330)..(330): n is a, c, g, or t
  misc_feature (357)..(357): n is a, c, g, or t
taaaaatgcggcnacagccttaacactttctgcccccattacttcccaatacaaattggtttaaaaacaggtggttaaacatggtgggttgatatgtgggacagtttttaaaaaatcagaatgggctgggtgtggtggctcanacctgtaancccagcactttgggaggcctagaggcagatnacgaggtcaggagttcaagaccagcctcctgnccaatatggtggaaccctgtctctactaaaaatacaaaaattagctgactgtggtggcgtanacctgtagtcccagctacttgggaggctgaagcaggagaatcgcttgagcccnggaggttgaagttgcagtgagccaagnatctgccactgcactccagcctgggcgacaga

SEQ ID NO: 585404 - DNA, 1761 bp, Homo sapiens
  misc_feature (1743)..(1743): n is a, c, g, or t
tgggaggggaaaaacaaaaggtatttatccacaggccaggtctaaaaaggcacacggcagggtccccgggtggtaactcagcaccagatagggaaaaaagggtgcctaaagggcagccccacccaaagccgtgcgtgcggggcgtgcgggtgaggctccccagtgaattccagcgcagtcttctctcctcagcgggggacagctggggtagaggtttctcatacccttcaacagaacaagcgggattcctataaccatattaacattctcagcggatagtgacagaagaaagagaggaccagaaatcgtgatttaagcgtgattgggtcccttcatttctaacaccacagtgtactcttacagtcctcatattcctagaggaattttaacaccatatctctctatactttccgcgtgggttctcacacatcttctttaacaacacacaccgtgtggcggccacggacgcggtgtgcacaacgtctcgccatcagggggggccacaactagcacaactataggacgaaatctataccccacggcggtgggggggcgtggcaccaccgacgagagacacccataacaaactcacgataggacattcaagagacgtgtgagaaacagagcacccccccatatacatataaaacaggaggggccgcgagcaacgaggccaggggggctacaacacgcggggacacggactacacccatcacgcgggggggaagcaccacaaaaatcgcgagaggacaacaaccatcccgaccgacacgtttaaccacactctccctacacttcatacataaagcccgccatcacagcagacacgtggcgtcagcagcaaaacaaccaccaacttgactcctccaccaccaaaaaaacgagggggagacgctccccaaacagaccgcctggggtacacacgagcatctagtgggcctcgctacgcccatcctacagggggccacacgggcgggtcatcagcgcgactcaaacaaccagctcgcgggggcacagaacaaaagggtgcgggactacagcatccacaccagaatggaccgccacaacaggggaacccactcaggaccaaacgagcacagcgggccacacaataacggcataggaacagacggataagaccaaacaagcacggtgttccccccacactatgggccgcgtcgagcacgggggaaacacccagcgaagaggcctccacacacaggccggcgagtcgtcaactagcacgagtgggcacacctcgcgaccgtggtcaccaacatcctgggaggaacaactaacccaggacccacgcaaccaacaagagtcgtggcccacgcgtccactaacatccccgagcaccacgtgagataccagaacagatacaggaaccgtagggcatatgagcacacacgcacccgccaccaacacacgaccacacccacacacacagcagagagcaacaccacagcaaagcggaacccaaaaaacagagagggcaacccaggacaccgcaaccagacacaaaaccacgacacacacgagcacaccggaacaccacacagaccaagagcaagcagactcagaaaccacagcaggcccacagagcaacctcatgaagcaacgaggacacacagatcaaatgcagcacacacaaccatcacttgagccaccacaatcagcgatcacgcaagccaacacacaaagacacaacacagatgaagcatgaaccgcacatcgagcantcgacagcaaacacaacg

SEQ ID NO: 585405 - DNA, 126 bp, Homo sapiens
acatagagtacacatcttagtaatatattaagtgaatgtaaatggtggttaaaattacattacgtgaaattcatcttccaactctaagttaagcttgggagatacatgttagtggttaactgttaa

SEQ ID NO: 585406 - DNA, 196 bp, Homo sapiens
  misc_feature (34)..(34): n is a, c, g, or t
  misc_feature (55)..(55): n is a, c, g, or t
gtttatctgataatctaacaatctaaaattagtnctaagaccctttaggttgtgnagcataaacacatacccaaaagagaatgaaacagacatttattcatgtgtcgtctgccctcttccatccccacacacacacacatgcatacacacacacacacagccacacacacagagaatatactgtaaagagagagag

SEQ ID NO: 585407 - DNA, 522 bp, Homo sapiens
  misc_feature (21)..(21): n is a, c, g, or t
agttaagtcgggaacgcatgnacagagtggcaaaagttgcattgcccaatgtacatattctaagccgaggtcaaacaaggcaatgctttgccttcttgtttcaactctcatactataaacaagcatcgttttcacagtctgttcagtgctacgtttttcacatttttctgcttttttgttggtgatttggctgtttaaaatggcccgcaagcatagtgttaaaatgctatctagtgttcccaagcacaagaaggctgtgatgtgccttggggaaaaaaatacctgtgtatataaacttccttcagttatgagttacagtgttcttgactgtgagttccgtgttaatagaccaacagtgtatattaaaaataaagttgcccttaagccggatgcggtggctcacacctgcaatcccttcactttgggaggccgaggcaggtggatcacttgaggttaggagtttgagaccagcctgggcaacatggtgaaaccctgtctcgacaaaaaatacaaaaaactagc

SEQ ID NO: 585408 - DNA, 800 bp, Homo sapiens
gcttgtccagagtgtggtgtcttgtgctgagggtcacattgagctgcaggttgaatccgggtgctttaggatcagcaccatggggaagacttgcgaccaaatcaggaattaaagacctgccccttgggacagcctgtttccccaaaccaagaaccagaataagaaactggtggcagaaactaacctggatttccacccgtctgtcagaaggcaaagtgcagcggctaaagaggagggcgatatctctgttgtggcgaattgggccaccagcgttgtgtacccacgtcccttgggcccaaaaaatcgtggggtccaccaagatcttggtgattgacgcaaagctgggggcttggaaagcgccacttgtcccccgggggaacagattcttggaaagtgggggtggcatatcctccccttttttcctttctttgtccctccaatccttttcctccccccaggggatgtgtacaaaagcgggggggggcccctttgtgtaccccaggttggattccccaaaaccccccgaaggggtactctcctttaataatgttcagttggactttaacccttgtgctattaaccaaaaataggatagcaagcatactgcagtatcattaaacaaacaaacaaaacttattttgtgggggggccgccgtcgtacagcccctcctgaaaaaagaggttttttctagcaaccccaaacttttgtgtggggccgccgcggcgccccccactgtgaatgatatattgtacacacgtttgaacaaaactcgtgtccccagagaaagcaccctcggggc

SEQ ID NO: 585409 - DNA, 328 bp, Homo sapiens
  misc_feature (134)..(134): n is a, c, g, or t
atccaaagggggttgttctatggcaaggcagggggcgggggttcaccaaaggtgctcagtggggaagctttctgagccaggagaaggaagttcacaggttaatcgctcagttaaggtggggcaggaacaaatcnacaatggtggaatgtcatcagttaaggcaggaaccggcccttttcacttcttttgtgattcttcacttgcttcaggccatctggatgtatacatgcaggtcacaggggatatgatggctttgcttgggctcagaggtctgacacacatcactaagcttactctatggattcgcctcaaattctttcgtcgacgc

SEQ ID NO: 585410 - DNA, 157 bp, Homo sapiens
ttattgctaggatgaggatggatagtataggcagacctcctattgtaggacggatcggagaattgtggtaggcgaatagcgaaaatatcattcgggcttgatgtggggaggggtgtataaggggtgctagggtataatgtctggtcgctagagtctg

SEQ ID NO: 585411 - DNA, 275 bp, Homo sapiens
gactggtatgagatggtatctcattgtaacctctatctgcatttctctaatcctcagtgatactgagtttttcacatgcttgctggccacatgtcttcttttgtaaagtatctgttcatgtcctatgcccactatttaatggagttgtttttgtcttataaatttaagtaccttgtagatgctggatactagacctttgtcagatacatagatagcaaatattatctcacaatactataggtcgtatggttaaaacagaaagtttctactgctaa

SEQ ID NO: 585412 - DNA, 728 bp, Homo sapiens
  misc_feature (624)..(624): n is a, c, g, or t
aaaaaggggggttttttgtttttttccaggaatcccgcccttttaaagattaaaaaaaccaggttcttccccctgcttttaaaattcttttccgccaaaaaattttgggggaaggctttttttttgcaagggcctgttttaaactaaaaaacgggttaacataaaggttccaaatttaaagcccttttaagggttcattttcaaaataatttttccttcctggggcccccaaaaaaaaaaagattcccccccccttggaaattaagtttttaaatttccaaaaaccctcttttaaaacaggggggaataatttccacccgggcttttttcaaggctttctttttttcaaaacttccgggaatttttggagatttcttggtggaagggggccttattggaaaaaaacccttgtcttcccagggaagtttcccttggaaaatttttttccggggaataaaaaacggggggggttccccctttttttcccaaaaagttaaatgcccgggcccgggggggttttttttggaggggggggggttgccccggatcccgcctcttttgattttttgaggagggcttttttgggggcccttaatttttctttaatgtccccccgggaattgntttggggggggtgaacttttcttttttttcccgaaaagctctcccgccggaaaattttcgggggggggcccttccatataggggtttttcccccaggtttttta

SEQ ID NO: 585413 - DNA, 161 bp, Homo sapiens
tctagagcttaatgacctttgtactcttctgctctcactcactgggttggggtctagcgtcaaagacatacgatgccacatgagaccgacgcaaccaactatggcatatgtcccatcccacatccaaccccaactctcacttggatcccttcctatccctg

SEQ ID NO: 585414 - DNA, 130 bp, Homo sapiens
tcaccgtcttcattctctaccagttgactttgctggttaatttcttcatccttgtccatcaagctgtttgtataattatagcaatttcttcttcacactttcttccttcagcatcagtaaaatttcttat

SEQ ID NO: 585415 - DNA, 601 bp, Homo sapiens
  misc_feature (169)..(169): n is a, c, g, or t
  misc_feature (219)..(219): n is a, c, g, or t
  misc_feature (235)..(235): n is a, c, g, or t
ggtcatcatcctcaggaagacaagattagatgcaccccggttggaaacaaagtccctgagcagctccgtgttaccacccagctatgcttcagatcgcctgtcaggaaacaacagggaccctgctctgaaacccaagcggtcccaccgcaaggcagaccctgatgctgcncacagccacggatcctggagatgacaaggaagagaaccggcgctcgggcngctgcccacacaccgncggaggggtagcttcagctctgagaactactggcgcaagtcatacgagtcctcagaggactgctctgaggcagcaggcagccctgcccgaaaggtgaagatgcggcggcactgagtctacccgacgcctcctgggaactctggctcatccttacgtagttgcccctcctttagtaccgagggtgatagtaaacagttcattggggggttacagtaaaaaggtaaataatagattctatatattttaccttggtattgttgccatgttaaggctgaagaatagaataggccaggacctaggttctcatattcttggtattcctcctggatggaaaggctgtgggaatcaataggggacagaggctga

SEQ ID NO: 585416 - DNA, 204 bp, Homo sapiens
gagcaagcaggccttcggactcaggctccaggcgagaaattgtggctgcgtgagatcacccttcccggttttccaatgcgtcccgtagtcttcgctcattccgtcgaaacacattttttcgttccgcgttccaccagacggcatgagcttaaaagtcaaacccgctagcggaactgcgattgtccttgcttgaaaactctgcgt

SEQ ID NO: 585417 - DNA, 790 bp, Homo sapiens
  misc_feature (378)..(378): n is a, c, g, or t
  misc_feature (457)..(458): n is a, c, g, or t
  misc_feature (474)..(474): n is a, c, g, or t
  misc_feature (499)..(499): n is a, c, g, or t
  misc_feature (504)..(504): n is a, c, g, or t
  misc_feature (528)..(528): n is a, c, g, or t
  misc_feature (540)..(540): n is a, c, g, or t
gccaggtattgaaagtgccgagatccgtgcagtctgtgccgtccggtgaggggcatgcatttgagctgactgtttcgtgccaggtgtgctgcccaaaggaatcctgaatggagatctcatcagccaggatgcctagcccccgtgtcccagcggttgtgccgagcacgtgtgctacccaagaccgagtcactgtgcagtctggttcatgtatcagatagctgaagggtgtgctcggtggacgatactgactcgaatgtgtcgtctggctgataccaatcagcctggtcagtgagtacagtcacccagacttatcattgcctggtcaagaagcaggccttgggcagtgttcctgctgatcgtgggcatcttgctggtgtngatggctgtggtccttgcatctctgatatataggcgcagacttatgaagcaagacttctccgtaccccagttgccacannagcagcagtcactggntgcgtctaccccgcatcttctgctnctgtnccattggtgagaatagccccctcntcagtgggcagnaggtctgagtactctcatatgatgctgtgattttcctggagttgacagaaacacctatatttcccccagtcttccctgggagactactattaactgacatacaattactccaggagtcctgaaagagaccaggacatacagaaacgcacaggaaacaaagacgagaaacacggggtgacatatcagagagggtacagggacgtaagaattgaggaacgggggagaaagcacgccgagcgggctgaaagag

SEQ ID NO: 585418 - DNA, 1278 bp, Homo sapiens
ctccttcaggccgcacacctcccaactgaagcaagagtcatacactgtcgagaacatcaagcaggatcagatgaaatctcaaaaggaaatagaaagaccgacgaggcagcaaaacaggactccctttctcctctccctgcccccatcctccttgtcaccccagcagtcccgcccagataccctcccactgaaaagtcttcactactacagcaaggagcctcccttcaaggggactggataatcaaaaatcaaaagcctgttcttccccaagagcaaagcaaggaaattctaacacctcttcaccaacccttccatatcagtgcatgcccccatacctactccttcgcccttgtttctcctccccccatctattcatctcactaaaggacataacctcaaactgtcgtatatgctctgttacttcctcccaaggggccctctgccctctcctcatccttacataccagctcagaggaacactcccaggggagcactggcaagtaaacttcacccacatgcctcccgtcaaaaaatctaaatatcttcttaccctcgtagacactttttcaggttgagtagaagcatttcctaccccttcagaaaaagctgcagaagtctctcaaattctcatatcagaaattatccctagatttggtctcccgagccccatacaatcagacaatgggcctagcttcatctcccaaattacccaacaggtctccccatcccttggcgttcagtggcgcctccatatcccatatcagccccagtcatctggagaagtcgagagggcaaacggaattctcacaactcagttaaccaaactcacacttgagatcaaaaaaccatgggacctcccttttgcccataggcactgggagagcattaggaggccagtccaaaagcaccctccttcctcagtccatttgagttaatatacggacgccctttcctcttacaaaacaggcccccttctaactctcagctagggagaatacctcccaacagtctccctcatgaggctatctcctctgccaacaagccgacccaggccctcccaaaaccccacgaaggggttctccaatcccaaataggacttgctctccaattccaaaagactctttaagcagcagtgacacttcaaaaccatcgaggtttagatctcctcactgccgagaaaggcggcctgtgtatctttttagaagaggagtgctgtttctatactaaccagtcaggactagtacaagatgctgctggacgaataaatgaaaaagcttc

SEQ ID NO: 585419 - DNA, 478 bp, Homo sapiens
tatccaaacaccaggaaaggtcctccctcaaaaaagcatatctccatcttctctctatgctgtagtctaaacccacgcgtgttgaatcgaactggggacgacgcgggcactgctccctcgagcgtggtgtagttagtcagtggacctttgctcaatacgaaatccttagctaccgattggtccgagaacacggttttccccccaatttccaacgcaccttcccttagctcctgctctcagagctaggcacagtgggcacaggtcccctcccgtctgtcctctcccagcaactgtgccctggagggctccacaatggcccccgtgtctctcgggcaccacccatatagcagtcccagagggcccatctgtaaaggatcgagcttgtgtgtggtgtcgtggtcacatctcccgcttccccccatcctgtgtctgggcacagttcacatcaggacagcgtccattgtgctctcagtctgcc

SEQ ID NO: 585420 - DNA, 146 bp, Homo sapiens
tccacgtatatgtacactatagaatgtagaggtgaggtgcaggagcaggtcatggtgataaaagaaaaacctcagccggattaaatttaaaggagtttcattgagcaatgaactatttgtgaatcgggcagcccccagaatcacag

SEQ ID NO: 585421 - DNA, 467 bp, Homo sapiens
  misc_feature (419)..(419): n is a, c, g, or t
aattgataaaacactcactgacattgcctgccgtagtccttggaattccaggttttctgccatttactatcaaggccacacttaatcaagggtcaagccttgacaaaatggcattgagagacatgattcgtaaccctttgtattccccaaactgctttttctttcgtggaaagactagatcgtaaggaaactcatttgcagggcaccctcgggcagccagtccctgtgctaagagctaacattctgaatctcactttgtctgcacattgatgggaggccttcttagtcctgtttgatatgggagggagttgaggtcaaagagcaagtaagaacagaggcagaatttgaaccccagcattccagcaggcaatgtgtctttattcattttctgatgcttataacagaatacctgaaactgngtaatttataaagataaggaatgtatttcttatggttatagaggctga

SEQ ID NO: 585422 - DNA, 598 bp, Homo sapiens
  misc_feature (242)..(242): n is a, c, g, or t
  misc_feature (276)..(276): n is a, c, g, or t
  misc_feature (318)..(318): n is a, c, g, or t
  misc_feature (323)..(323): n is a, c, g, or t
  misc_feature (340)..(340): n is a, c, g, or t
  misc_feature (390)..(391): n is a, c, g, or t
  misc_feature (403)..(403): n is a, c, g, or t
  misc_feature (410)..(411): n is a, c, g, or t
  misc_feature (422)..(422): n is a, c, g, or t
  misc_feature (458)..(458): n is a, c, g, or t
  misc_feature (525)..(525): n is a, c, g, or t
  misc_feature (552)..(552): n is a, c, g, or t
  misc_feature (574)..(574): n is a, c, g, or t
  misc_feature (586)..(586): n is a, c, g, or t
gagagagagagaggggcggggggtaacctctttacttcccctaggtgaagacagaaagaaggggagaagcaagccgggggtgactgggtgggcagcgtgccttacgcaacggcggggggggggggaaacgggggaaacaaagaacgaataaagttaactggttttgggaacccaataaaaaaagggaaaaacacagcagtctctttcctttggcccttgttagcgggaagggcacgacctcnttccttagagagggggggttgttacgaacggccntagacgcggacgcatttccaccttgggcccatttgcccatgnttagntttaccccagcgttganttgccttagatgtcatgaagaccaggggtatttccccaagatattccctnntttcccaggtgnagccctnnccctccgaganaaaaccgatggggagggcaacattagcagccaacanctaattgcgccccctagcaaggtccctcggtagctgagacccccctgagaacttggctaacccctgncccccccaagttttgggcctggattgnaagacccaagctgagcccaggntggttcaagccnaccccccgagtt

SEQ ID NO: 585423 - DNA, 431 bp, Homo sapiens
  misc_feature (51)..(51): n is a, c, g, or t
  misc_feature (74)..(74): n is a, c, g, or t
aggaaattcggcaacgaagagaacaacaacaccacccatgcccggctaaanttttttccttatttttggtgganatggggttttaacatgttggccgggctggtcctcagactcctgacttcggatgattctccctgccttggcctccccagggtgctgggattgcaggtgggagccactgtgtccggcccatttttgttcactttaaaacttatacccaggcttggtggctcctgcctgtagtcccggcattttggggggccgagccgggtggatcacttgaggtcgggagtttcagaccagtctggccggcatggtgaggccctgtctttaccaaaaaatacaacaattagccgggtgtggtggtgcgcgcctgtggtcccagctgcttgggaggctgacacagggggatcgctttaaaatctgtctca

SEQ ID NO: 585424 - DNA, 503 bp, Homo sapiens
  misc_feature (9)..(9): n is a, c, g, or t
  misc_feature (40)..(40): n is a, c, g, or t
cccgttttncctaaattccaaaaaaaatagctgggcccgntgccgggcgcctgtggtcccagctacttggaggctgaagcaggagcatggcgtgaacctgggaggcagagcttgcagtgagctgagatcgcaccactgtactccagcctgggtgactgagcgagactccatctcaaacaaaaaaagaaagaaattgccttatgtcaaaaattagcaattttatgctgggcatggtggctcacgcctgtaatcccagcactttgggaggctgaggtaggtggatcatgaggtcaggagatcgagaccatcctggctaacatggtgaaaccctgtctttactaaaaatgcaaaaaattagttgggcatggtggcgggcgcctgtggtcccggctgctcgggaggctgaggcaggagaatggcgtggacccgggaggcagagcttgcagtgagctgagatcacgccactgcactccaacctgggtgacagagcgagactccatctc

SEQ ID NO: 585425 - DNA, 377 bp, Homo sapiens
ccattccagtaaggagttgcaggaaggggaggatgccattcttttctcccccgttctttcccccaggactggcaggccacgctgatgggtatgggggtgagcagagaacaggtgggctgtgggctgcttctcctggaaaaacagtagtatctgcaggatagggtacagtcttgggacgttagagctgagacaaccactgtgccactatctgcactccatggtcttaccccagatcggagtagcactgtggtgatgtgctagaggtctcaacaccgacatctcagaaaattttgtctgctgacagagcttggggagcagagagctcaccctttttcagttttagagaattaatccctctctctctctcttcattgttc

SEQ ID NO: 585426 - DNA, 386 bp, Homo sapiens
gccatctccgggactccaaacgccccaggtctcttgtgctgtatagctgcctgggcctgcaggatgttccacgggatcccagctactcctggtgttggagcccctgggaacaagccggagctgtattgaggaagtaaagctctacaagaatgctcgggagcgggagaagtatgacaacatggcagagctctttgccgtggtgaagacgatgcaggccctggagaaggcgtacatcaaggactgtgtcacccccaatgagtacactgcagcctgctccaggctccttggtccagttacaaagctgccttccgacagttccaaggcttcagagattcagctccatttgattgaattttgccgaaagttcagactgggactgcccactt

SEQ ID NO: 585427 - DNA, 466 bp, Homo sapiens
  misc_feature (447)..(447): n is a, c, g, or t
ggaaaataaatgcccaactccaacccactctagccattcagtccacctgtgcagggtgggaactgagacacatctgtgaagttcacagtccagaggcacaggctacctaaagaacagatacctaattgtgaaattatagaacacttccccaccccaacaccataccaccacattactaaaggctaatcaacagcagttccttttaaccagtgcctcatgtccagctataaagaaaaaattacaagacatattgaaaggcaaaaatgtagtttgaagagacagagaaagcctgagaaccagcctaaaatatgtcagggatggtggaattattaggctggaaatttaaaacaactattattaacatgcttagggctgtaatggataaagtagacagcatgcaagaacagatgggcaatgtaagcagaggggatggaaaatcccaagganagaaccaaaaattaaatgc

SEQ ID NO: 585428 - DNA, 202 bp, Homo sapiens
  misc_feature (96)..(96): n is a, c, g, or t
  misc_feature (101)..(101): n is a, c, g, or t
  misc_feature (136)..(136): n is a, c, g, or t
  misc_feature (139)..(139): n is a, c, g, or t
gtcaaaagacatttacccttaatatcagacaacatttatattttagcgaagaaacaagttctcgggtggggaatctatgtttcactcagatttatntgtgngggggaaaaaagcctttctgtgtaaaatatctaanttnatataagaaaatgttagaaaaaaatatggggagtgtatataaaactcgcttcatcgcatgggg

SEQ ID NO: 585429 - DNA, 191 bp, Homo sapiens
actgtgtaagcggctctccacctgtgatgtgcgccaagagggcaaacctatagcaccaagggtgcgctcaccgcgcgccgtgagggccctcctcctcagcagcaagccccgcctccgcctcccgcggtccaggctccgggccggaacacctgcatcttcagcagctcctcctccaccaggcgcttcgcagt

SEQ ID NO: 585430 - DNA, 1017 bp, Homo sapiens
  misc_feature (105)..(105): n is a, c, g, or t
gagccggcagcagcagtaacagcagcggcagtagggggagcaggtgctggaccagagccctcctccagaaacccctgcgtccgccacggcccaggtaggacacanccccgcgatcctcccaggtccgccagcgcgtacaacctccggctcgctcgcgccgtcttgatccactcccgtccctcgccatcccgaacgataagtacctcgacacacacagctcgcccacccatccgccatcctacaacccccaccacatcatacaacccccccccccacccccctcacccctcccacccacacaccctacccctcccacaccaaccccacccaccccccacccccctcccccaccaccatccaccacccacccccaacatactacaccacgacccccatccatcccaatcattacaccacccccccactcccccacacactcccctaccctactcatgatccatcactatctctcacatcaccaatatctcaccaccccacccgcaaccacatactcaccacctaccaccacccccctccaccccttaccctccccccctctcctccactcatccacactcaataccatcaaacaaacctacaccctctcccacctccacccccctgccccacacctccccccccacacccccctttccccctccccctctcctcccccaccacctccacacaaccaactaccccaacccaccccccatccctacaacatcatacctacaacctcaaccccaccaaccacctctcacctcactctcccccccctactcaccctccccccaccaaccaaacacccccccccacataccaccccagcccccacaccaccccacaacacacccacaacccactcctcccactttagcacctacctcaccccacacaccaacgcgactctcctcaccctgcataactcaatcaactcccccccatttctacctacttcatttcccactcactaactcccaccatcccccacccattccacctcacacaccatct

SEQ ID NO: 585431 - DNA, 221 bp, Homo sapiens
gaaggaaaatacatgtacatgtacagccaacttccttgagggttcgttcttttgcatcagggtgtctcaaactgatgcccttaaaacacctgtaagagaatcatccaggcggcttgcttgctctgcatgcaggccctttagaatcagactcagaatccctggggctggagctcaaaatgaaatgacatttcaacgagtttgtcatcatgtgagagagatag

SEQ ID NO: 585432 - DNA, 280 bp, Homo sapiens
  misc_feature (33)..(33): n is a, c, g, or t
  misc_feature (115)..(115): n is a, c, g, or t
  misc_feature (159)..(159): n is a, c, g, or t
  misc_feature (164)..(164): n is a, c, g, or t
  misc_feature (236)..(236): n is a, c, g, or t
  misc_feature (251)..(251): n is a, c, g, or t
  misc_feature (267)..(267): n is a, c, g, or t
  misc_feature (278)..(278): n is a, c, g, or t
cggcacgagcacaccccctcagcccccattctncaggaagaaaacagtatgataatcaggaaattatttctctttggctctgaatcgatttgcctacaaacagattcatcttccntactttgtctcattagtctaaaggtaaattaatttttcattccntgagnacattaaaggcaggggtctagactaggggttaggagccctgaactgcatccagcctttgataatagctgctngtgggaagtcccctnccttctctgggtcctnagtctccactnct

SEQ ID NO: 585433 - DNA, 217 bp, Homo sapiens
  misc_feature (38)..(38): n is a, c, g, or t
  misc_feature (201)..(201): n is a, c, g, or t
accctctcactggtgcgctgatgcttctatggggtgtnaggctactatgggtgtaattatactctctctacaggttttctagtgtcaagagcgtcctcttggactacagttaattacaagggattagagggtctgtgggcaattaaagtgaactaagatctatcttggacaaccagctatcaccaggctcggtaggtttgnggtaccgagtctcgaa

SEQ ID NO: 585434 - DNA, 989 bp, Homo sapiens
agaggatcacgtaacgaagctgaacacccactaaacggatatgagcctgaatacatatatcagccaatgctgtggagggagatcttcaattatgcccgccaatcaccggaacagggcttatgatctatagaagccaggcgtgggcagagacactatgctctacgtttacccgaacatggcgcgtctggacggcgcatccttatactaggcactcgagtggggtaagagagtataggatccgacgttgggtaaagtacgttccccggcgttcagtcgcccaatgactttctatactcgcatgctgtaaatagtgctagtgctcagcctgtccgtctgcttatgtcccataaatcgcttgctgacggatgagagggagcaactatgactggtaccttctgccacagggctggcttaggcggaggaggggccaaggtctttgtcgtagccagctgtccgaaatgcccaagtgcttccggggctccgcgggccatgtctactctggtgcgaccggtggcccccttcttgttcttcctccaagtgccctcgggttggggagactcgctacccgcctggacgtccgttctaccaaccgtgtgtgggactgatagtgccgctcgttcctgcttgcgttccagtgggacatttcctgctaggaatccgtttggtcatgcggcttgcggcgggttgtcatggggctttcccaaaacacacaacgggacacaccagcgggacagcagaggacccatacgaaagagcacggcgagggggggcctggtaaggaggcagcccaggggcaggtggcaccatgcatcgaaagctacagaagaaatttcgccggaaaaagcgcgagtgactcagaaagcagggctagaaagaaaaaaaagaggcgtggggcagttcaaaagatcggagcggtaggcaacacaatggtagggaagaagcagaagaagaccacaaacgggaggggcaaagaagaagagaaacaacaa

SEQ ID NO: 585435 - DNA, 384 bp, Homo sapiens
gccttgctgcgcgagcacttgcggcgccgagcaccagatcgacgtgtatcttcgacttcgctttccgttggccggatcgaccaggatgtacttgttcatccgctgagccggtcagcgtgccgtcgtagtgcgcacccgacctcctgcagcccttgcgtctcgtccgccttggggttttgcatcatctggcaggagaaggtataggggcccatgtcgcgacgcttctgcgccagcgcttcacgggcgagcagaaccggtttgccatcgatctggccgttgtcagtcgcggtatagattcgtgggatcgcagtcccgcgcctcagcaccacgcgatacgtgtcattgaagtgatagcgcgtgccagcgaaccgccggacgccacct

SEQ ID NO: 585436 - DNA, 117 bp, Homo sapiens
cctgttggttgacgtagggtataatgactctgtcaggtatgattgttaagatatagggctgttaattgtcagttcagtgttttaatctgacgcaggcttatgcggaggagaactgtt

SEQ ID NO: 585437 - DNA, 913 bp, Homo sapiens
  misc_feature (9)..(9): n is a, c, g, or t
attctccantgtgaaggataagagaaaggaagtagcggcggggagaagtggaagtgtacgtggtcgttcgggttcccgctgtcgtcaccccgtggcttatttgcagccacactgggttgtttccacatgtggtgcacacccaggggctgtcatatgtgccgtatctttctggggcgacttttgttctgtatcccgctgcttttgggacgttccacacgattttttaagtgatatggtgttccaattggactagctagtcctggttttcaattgtactggtctacggtgggtcaaaattaggctgtgcgctcagcccatgggtatctctgccatttgaatctctttaagttcttcccccctccgattttaaaacgaactttccacccttcttcctataaccacccccgtttttactcgtcctttactccccctagtcctttttaagaaacttccaagacacacccctatatacttgcaacaccaatcccccacattcttggtcgcgcccccccttttttacaaaatatactagatgtgggccaatactgcccacaaggttttttgacccgcgacagataaattttccgtgtgaacgcaagtattcagcaggtacccacatcttcacaaaggtgctgctccctattgttctagaatggcataatgctgcaatgcgcgttctttccctgttctggcaatccatcccgcgtcgatctttcttataagtccgtcaagaatctttttattatgcatgcacattgtctcatcatatacagacaaacctattggagacagtattcaacgcttgtgccccacgtatgcaatcactcatccttgtatctacaccctttgttacagtaataatcttagcaatatagttttacaataaaacacaacaaaaaaacgtcccacatgc

SEQ ID NO: 585438 - DNA, 1240 bp, Homo sapiens
  misc_feature (901)..(901): n is a, c, g, or t
  misc_feature (993)..(993): n is a, c, g, or t
catgttcgtgggtcgttgatgactctatcttgcttgtagtatcttcctgcagtgtgcgtgctgctccgctgtctggtggttggtataccactgctatatggtgctagaggacggctggtgctctctctcaccggtatcaacaaagggggggaatagggaccttcctctgtgcgcagatgggacatcgggttcttccccagccccggataagggggaccaccctgtggccccaccgtacatcgtttacccccgggagagtttaatatttgtgtcgcgaatgcccccccgagacctttggacgtgaagctcttttcccggggacaatattggcctcaaaggtcaggaagggttcgtcaaaggagtgttcgtgcggggccacgttgctgggggacacgcgaagagggccgcccccacgagaagcacttggcttcaccagctcaggggatgtatcctggacccatcccaggcccaataagccccggctatgcccctgtattggattgccacacggctcacagttgcaagcacagtttgctgagctgataggtaaagattgatcccccttctggtaaaaagctggaagatggcccctaaaattcttgaaagtctggtgaatgctgcccattggttgaataatggttccctggcaaagcccacatgtgtgcttgaagaggccttcttcacgagctatatccacccctcttgggtccctttgcctgttcgtgataataggagaaccagaaccagattgcccgtgggtgtccatccaaagccagtggcaccaagaaagagctcgccgtggagacctggcacaagagtctcacaccgacagatctctgcgcccacgaataaagacctctcagaaaagagcgctgatagatagtagataatattatactcncgctgtagataacacctgtcgcctacacaccgcacagtctcttgaatactcagatgtgtgtggaagaacacaggtgcttccagaactgtttngtttccaattggcccatttaagatttagtagtaaaagactgggtaatgatacaccaatagccatcgtaaaaccttccagaaggaaaggagaatagttttgtggaccacttttggttttcttttttgccgtggtggccagttttaagttattagtttttaaaatccagtactttttaatggaaaccaaccttgacccaaaatcttgtccaccagaattttgagaccccatttaaaaagttaaatgaga

SEQ ID NO: 585439 - DNA, 170 bp, Homo sapiens
actacctagtgcgtgcgtcacccgatggaagattcgatggaatggacatgagccccctgatggcccatgcactatctttatcggtatgtgaactaaaggccgacaaagattatcactttaaggtggataatgatgaagatgagcaccagttatctttaaggacggtcagt

SEQ ID NO: 585440 - DNA, 1154 bp, Homo sapiens
gctctttcccatcttgcaagatggcgggtgacacacaacgttgacgaacgccacgactactacaacgacgacacgacaaccccgacacgtcaacgacacggttgactgctggtggcaatggtgacaaacacgggtaaccctcaacacgactacaacaccgcccaagacacggggaagccccattgcggccgcaaccctgtaccttgtcagacggacattggcaggtattcccgatctgccatgtacttccagacaacggaccatgtaccaacgacggaagtacctacagccgcataacatccaacggttgacacacacgacacacacgacaggacgacacggttctcgacaaatgttacaaaacccacgttggtgagtgaccaagaacggcgtgaacccgaggtggctataaacttcgaacacaatgcctcagcatcattatccttacatcgacagcatgtagcctcgaaacagcttgtatagcagccacaggaccaaacaaaacccatatcagatcagaacagtgacgaaaacactgcgagccaagaccattaacccccggagtaacaaccacaatatactgaatcacatccatcaacttggaaactgcaccaacaaggaagcaaacaaaggtgtgagataaaaccatgaacagacagacataggcataagtgagcaatcactatacattgatgacattggaacctactggatacctcaaatacggaattcaactcatacagcacgcacacgacaacacagaaaccatatggaacaatagaccacatatccaaccgaaacgatcggaaatccggacaatggtaaacaacaccagaaaaacagatctaactgacagactacatcacagtcacgacacacactgaggaagaccatgactcaaccacgacagctcacaccatcgaaacagaaaaaaacaaaaacgacctaccacaaaacaccaaattacaaacaaaatataaactccaaaataccaacaaatataaatatcataacaaacatgtaacttaaaccccaatacactaaaaatgaacattaaccaaaaaataacacaaatatatcaaatataatacacaataaatacaacaaccaacactctacaccctcacaaaaacaaaataaatagcacccaaaac

SEQ ID NO: 585441 - DNA, 202 bp, Homo sapiens
agagacagatacgaatcgagccggtaccgaatgaagcagtggaatcctttgggtatttcagatgaaaataatagtatgaaagttatgggctacatttggaatacactagaaaacactaacatcagaaaaagggctggacctttttctatttgaaaaccgggtggatcaacaatccacaaccctgtaacaaaaatcaaccccg

SEQ ID NO: 585442 - DNA, 464 bp, Homo sapiens
gagaaaactaattatgtactcagcacatacagtgtgtaagacctgaacaaggtgcttttcacaaacactatcttattaaatcctggcacaaactgtagtgtaggtattactaagttcaatttggagaaacagaaggagaggttcagagaggttaagtaatttgtccaagggcacacagctagcctagcagaatgatattttaaacctaggtagttgcatccagcctggttttattaaaccatgtggctacctcgaatatctttcatcaaaaagacacataaaagacagggagagaacagcaggcctcagaagttcccaggattgaaatctgtttattactacgaagtggccaatcacctctgcggggcaggccagcaaccctggcaccagctgggttctaaaaggccaaagctgccaggccatgccaagatgccacaatgaaaatgagcattgtttgggtcagc

SEQ ID NO: 585443 - DNA, 720 bp, Homo sapiens
tcggtcataataacacagggcgcttttttgtagccctccagtcttccctcgggaaacaccaccacctcccgtttggtggtccctctcctaatagaaaacaccccgcggctagtatgcacctcctctccgtcgtttttcttccattcgtgcccgcggggggcgagtggataaacatcattcttccacacccacgtaacaccatttcgttagcccacatctaccagctctcttcttattcggaaccccacctaatatagcagacgactgttggtgtccccacacacccgtggtggttgtctcgtcggcgcggagttcttctcgcgcgcgttcgtattctctcgtgcagcaccggcgtgtctcgctctctccgtccgtgtgccgcactcctccccctccaccctgcggtggcggtcttttaccacaactggttggggggcggcacatcctccccttcttccccgagcggggtggtgtgtttgttccgtcgaacatcacgacggtctcgttgtcggttggctccgtccggaggtacccagggagctgtcaccccccgcccagaggatgaccgccacagggtgcgctgagctgctgtgggtggtgccgggtgtactcctgtgtgatgacctcactgatgtgctggcccaggctgaccacccgacatggtgacctttgaccctgggacgtctggagcacgaactggacgaaggactggctatcaga

SEQ ID NO: 585444 - DNA, 198 bp, Homo sapiens
gaattccccccccccccccccccccgggagcctgaatcatatttttcatgtttggattgtgaaattgggataataaaatgtttcctctgttcccagattataaatttccccagtatacaggttgtgtgttattttgcatgtatagggaactacattattagggggaatgtatgtacatagaattgctgtattgcccgg

SEQ ID NO: 585445 - DNA, 149 bp, Homo sapiens
ctgctcgtgagtcggcatacacggtgttttggtgaagttggtgggcttgtcagtgatccatgtggcaaagtcagcgtccagtaggcctcccacatcatcaggctctccgccttcgtacatcttgtagagtggggttaccaaatctccac

SEQ ID NO: 585446 - DNA, 208 bp, Homo sapiens
  misc_feature (40)..(40): n is a, c, g, or t
  misc_feature (164)..(164): n is a, c, g, or t
  misc_feature (186)..(186): n is a, c, g, or t
tcgcttattgaatccacttgtgtccaacctccaggattgntttatcctaatgcacctgtatattcatttgggacttggcctgtcttgggcttccgtacctgcccctggtggaagttctctttctaacttcacgagaggaagagtgtcagcattcacatgctgtngaggctgggaggacttggttgncttttttgtttggatatccctc

SEQ ID NO: 585447 - DNA, 136 bp, Homo sapiens
  misc_feature (77)..(77): n is a, c, g, or t
tacctagaggatccaggcaaagctctaccatcagaattcgtgagaccattcctattacaagactccaggaagaccgncccatgattcagtcatctctaccaggtccttccacaacacatggactaacggagctaca

SEQ ID NO: 585448 - DNA, 239 bp, Homo sapiens
ggtccggtgatcgtgcagagtctgaaggccgactacagagcgaccaggttccggtgtgctggcgctggaagtctatctaggactgtagtcagtgggtggcaggggggcattgatcgtatgagtcgagggacagggatctcactgtatggtcatggtctgcgggccacaccttctaccagattacactcgtctttggctccctcggtgaggcagagcatggttagtgccaccggccacaa

SEQ ID NO: 585449 - DNA, 1077 bp, Homo sapiens
tatgagtctgaagactacgaggcgattataagactacatagatagtgatacacattagtgtctagacacattgatctcctatttcactatcatctacattggcatactcacttaacatactagtggagtctatgcctcttccctgaatgaacgaagtgttacgtcatgagtgacacttggggcattctgcataaactatatgtcaagttgatagcttcaatgaccagcactggtagttagaagcgttttcccatccttggcactaaacggaattacaacccttcttggtacctacatctccattctgtagtcatattttacacaaagacattactctgttgccactgtaacttgggtgcatcgccactacagtattggctatactctattcatgcgttctacgagctaatactaacacacgagctctaagtaacacaggtaaatagacatactagcattgttacatagcattggccaataggcgatcgcaaggtgcaaacatacttttacttcttttctcctaagcgattactcacgggcccattaactttggagacattacatactggtattattccccagggttaatttgaacagctataaattcatcatgtaaccattcgcatcattttctacaatattctatctggattcatatattttcctagatagaacaataagaataaacaaggggtcaattacatgatacggatgagcaacttcaaggcctaacttatcaaatcatattgctatatgcattgatactatcacataaagtaggaaccgcataccaccacagtaactaaacaggaaacatacttcgtggcacaccagagacgatagtcagcagcgacccaactgagacaccatgagctagccactagccacacattacacacacccgtagagggcaacgcacagggggaaaacaacgaccagacaagaccaaacgagcaccagtgagcaccaacaaacgatggtaccgtacagcactatagaatcaatgggatgatacaaaacgacacagacaaaacgcgcaacgcacagttcacacaactcaaccaccaccaccgagag

SEQ ID NO: 585450 - DNA, 222 bp, Homo sapiens
gccgtcatgttcggcagtgcactgcaggaggtcatgggcatcagagagagcgctaccccgagcgcagactgccctgggtgcagacactggctctctgagtgagtgtgctgagcgctcaacggtagaccagacagaagggcatcttcagtggtccctgtgtgacattgaagacggtgaattgccctgaatgctgcagagtggaccacgtggacaggtgcccac

SEQ ID NO: 585451 - DNA, 281 bp, Homo sapiens
atccggtggtcttcaagacacgagcgggggtgagaatgacgggcgaacagtctgtgagaaagaccagtcctgaggaaggagaaatttgctgcacgatcagtgccacagaagacctctcggaagaggagcaggaagagctaagaagagaacttgccaaggtagaagaagaaatccagactctgtctcaagtgttagcagcaaaagagaagcatctagcagagatcaagcggaaacttggaatccattctctgcaaggaacccacctctgcaaggaacccacg

SEQ ID NO: 585452 - DNA, 387 bp, Homo sapiens
catatgggccagcgggtctcaaactccggacctcaagtgatccacccgcctcagcctaccaaagggctggggattacaggtgtgaaccacggcgccgggccggcttcccttttaaatttaagctccagtttcagataaggtcttggctcatgaataagagcatatgcgggtagaagccaggtcacatctggaatgcttcgcggcttagaaatttcttcggccagataccctaaatcatctctctcaagttcaaagttctgcagatccccagagaaggggcacaaggcggccagtctcttggctaaagcgtagcaagagtgacctttactccagtgcccaatgaattcctaatctccatcggagacccggtctccacagggtaccgag

SEQ ID NO: 585453 - DNA, 383 bp, Homo sapiens
  misc_feature (3)..(3): n is a, c, g, or t
  misc_feature (16)..(16): n is a, c, g, or t
  misc_feature (47)..(47): n is a, c, g, or t
  misc_feature (67)..(68): n is a, c, g, or t
  misc_feature (95)..(95): n is a, c, g, or t
  misc_feature (119)..(119): n is a, c, g, or t
  misc_feature (228)..(228): n is a, c, g, or t
  misc_feature (325)..(325): n is a, c, g, or t
  misc_feature (328)..(328): n is a, c, g, or t
ttncctgttttatggnctggtcctggtttgttccctggagtccgcancgtggtctgtatagtgaagnngtcagattgaggaggctcagtctgtgnctgtaggatcctggtctgtagtcnaaaccggtccccatggcagtatgcctgggggtaggaggtcccaggaaggccctgcaggatcctggagaatacctgtccctctccctgcaacatcctccttttcctttgnttccctcctcaactaccgcaacatctggaaaaatctgcttatcctgggcttcaccaacttcattgcccatgccattcgccactgctaccagcctgtnganggatgagggagcccatcggacttctacctgtgctctctgctggccagcggaccga

SEQ ID NO: 585454 - DNA, 297 bp, Homo sapiens
ccgcctggtcgtatatggtcgagacagcctgactaccgtgtagaaaccctgtctctactaaaaaaaaaaaaaaaaaaaaaaaaatacaaattttagccaggcattggaggcacttgcgtgtaatcccggtattcaggaggctgagggcgaaacaatctcttgaactcaggaggtggtggttgccccattgcactccagcttgggcaacaggagcgaaccccgtctcaaaaacagagacaaaggtgttttaattattttccctgagaaactccaaaacgaacccggggggaccctcct

SEQ ID NO: 585455 - DNA, 107 bp, Homo sapiens
tacgtccggtcgcggcccttacgtgctacctcggtcttcctcgcacctgggctactacggcggtgcacacgactcagtctccaccactctacgtagcctgggttccc

SEQ ID NO: 585456 - DNA, 772 bp, Homo sapiens
ggaagatcagctccgacattggacagggcacccggatcccgaaacaagctttcaccgacgtggccacatggctccactgggccagggcctcgagggccgctatgtgagatggcctacaccgcgcaaactactatcgacacaggccagctaccgagatctattgccttgcatgggagatggcggagctgtcagaagggcatctgatatggcgagagccactggaccttcagccagacactctactaacgctgggacaagccttgatggaccattcctacgaacattcaaatcgacttgggccaagacgtgaccccggaacccacctgcacagcaccaggactggaccatctaccagcaagcaggaggcgcaggccatacggagagagcaacatgaccatcaatcgatagaatggacaacagcagcgcgacagacacatgcgccacagcgccactaatgcgccaatgccaagacaccaagcaacaaccacaatgccaagcacctccaagggcccgaggcatcaccgagagaacaagcatcacggacgtaggcatgtgaaaaccaacatccaccaacaaccatggctaacgacccacaccaggcgcatacacgccaaaccccacgccaccaacagcaacctgtggaacccacaaagagcagaaaccacctaagggccaagcacaagcccgcagtcccacagccacaccacaaagggcacaaacacacacagcatccgaggcaccccacgggacaacagacccaccgagtcgccaa

SEQ ID NO: 585457 - DNA, 656 bp, Homo sapiens
taggtcactcgcctacctgaagaaagtggcttatttggaggttgtaggtgctgttcggtattattgccatagctgttatcctagatatgcaatagattaaactcagtcaaatatccttcctaaaaacatgtcattccacttgtgaaagaaaacacaatgtgcatgtttcaatgatactgtgcggaaacacacctcatgatcatcttgtgggtttcttttgcccttactggatgactctcagaggacatgacttgacatagtaacattagtaaactgtctttatctttgattattcttttaatttttatttgagctgtttcaatagcataatgaaataaaattttgaattggccaataacatgctttataatcttccagtgaagagtctgatacaaatttactcttggcactgttgtagttccactaacaaatagcacttcagaccttatagaaccatatagatatggccaaggaatagcaggattcactattataatactaattgttaactcattatttaattgaacatttccaaagctctggaaaggcatgcatttgtaggtgcacatgctttaagatttctatccatctttcagagttgaatgtcataatgtttggtatttaattcttgataattcttaaccaacttttcctgt

SEQ ID NO: 585458 - DNA, 274 bp, Homo sapiens
gcacgagcacagcagagagcagccagacggagcattaaatctctcctctcaaagacacgagttgaccaagggggcctaaggccgaagagactgcggcagtattagagcaggagtgaaagcttatagaaacgcgctagagcagaactgacaggcagtacagtacacttggaagcagggccctgaggcattccctactacaccagggcagatatcatataggccctgcatgttccacagctgtaccagccgaacactacctaactactaagtacta

SEQ ID NO: 585459 - DNA, 420 bp, Homo sapiens
ataagcaattgctaagaggaaagtttatagcaagtaaagctcctacatcaaaaaagaagaaagggctctggcgtggtggcttaggcctgtagccccagcattgtgggagaccaaggtgggcggatcaactgaggtcaggagttccagaccagcctggccaacatggcaaaaccccgtcgtctactaaaaaaattagtccgggcatgtttcagggcgacggtaatcccgggcatacgtcaggaggctgaggtgggagaatcgttgggaacccaggaggcagaggctgcagggagctgagagtcgcagtcattgcactccagcctcggtgacagagcaagatggggtctccaaaaagaaaacgactcacaaacaagtaacctaatcttatacctcaaggttacatattacgggggggtaccg

SEQ ID NO: 585460 - DNA, 134 bp, Homo sapiens
cgcaagaaaaaaatcaaatttaaaagtcttatattgccgtttacgtaatttttgaaatttttaaaaaataagaaaagaccccctcttatttttcgacgaaaaatacgtgtgcaaaatttccatttgatccgatg

SEQ ID NO: 585461 - DNA, 910 bp, Homo sapiens
ttttgcgactatttgtgatttcattgtgtcgatgttctcgggtgcacagcgctcttttgttgttccgatgttggtgtttttctttgtttgggaaacgtttgttccgaggtccctctctatccgtggggggctccccccctgcgactttttttagtccccaagttgcacacctctgacattgggtacgcttcccgagcgctgttcaagtgacctggcaaacatttccgtcacgccggtgtttcgctcttccagacgagccccctcatttttccttggtacgctcttttatctccctcagggttcctcgaggtgctctctgaatcaggttccttatcaaaaaagaagtgtctccccccgcctgcaacagcgaccaattggtggaaaactagtgtggcggccattcgacgatgattattttcgccagcagttgtccttgcgggttttgtacattcacccccaaatcttctcaaggggggccatatcacaggaagacgcttccagtgacaccaccttcttgttgaaatttcgcttacatatgcctcctgactcccgccctcgtaggcctaccaccaaagtggggtgtccaccacacaggcttcgcacggaaccacggttgttgacaaacccgcgtcgttgaatacacagcggttcccggctggtcattccctgtgatgggtgctctaagcattagccccccacccatcctgttgtttttggtagtacgtaaccgtccacgaggccacaccgcattttagaggttttttaggagtagactcaaccatgaaaaggacatgatcccaggagacaggtggggttacgtgaactgtagtacggtggaaacaacctatgctcgccccgggcggccgcgtccctacacagcaaacaaaaggagatggaccgcaaacaaaac

SEQ ID NO: 585462 - DNA, 599 bp, Homo sapiens
agcggggaaaatcacttctatttaatacaatacaatcatgttcccaaattgcctaggctcataacaatacagtctcaatacaaatagacgtaagtacatctattgtttcttcattttaatgtcaaagagaccattccatctcctaacaaacaggtaagttacagaagtcgtccattgtactttgcatcagtctttccctgtattgaacaagtcttttggagaattcttagtttgagtttgggtatagcttacacactgaacattttgcgaagcatctaaaaaaatccacaattagtgcaaaaagaggggacactacttcaagtcattccttctataagaagactgagggttactaaatgccaattattaagcaaatatctagtttcctattggccttctgaaagacagcagatatcaaaatagtacactatgaggtttaacaaggttagaacaccacatgtactatcagctttattttacctgcaaaaatattttagctacactgtggaaaacaatacacttgagaatatcctccacatttctaagggcagatgcaagaatacttattcttttccttttaaatagaagacatgccataa

SEQ ID NO: 585463 - DNA, 155 bp, Homo sapiens
gactgtacttatcccggcgtgcgtcgataggtatgtacggaccggcgaggtacggcacctttacgaggaggaggacgccagcgagggtgtacggctaggaggaccaggtgggactaagagcggacgtgttacaggcgacggagagataggagaag

SEQ ID NO: 585464 - DNA, 231 bp, Homo sapiens
gcaatggacaggagagggaaaaaaacacgagacaccagcaggtgcgagccaggtgggacaggcgcacacgaggctgcagtgggagcccatggtcgacactatacaatgggcacagatgttttccaacgtatgagactcctaaggctaagtcgacgttctctccaatgcagaagacgcactcctcgatcgcgcctcggagacggggggtatctcaatcaggcaactcgcagt

SEQ ID NO: 585465 - DNA, 128 bp, Homo sapiens
aaaaaaaacaaccatcatattacctaatcggattagaaaaataaaattctcttttgtaccatattatcaaagagcaaggccaggccaatggctcacgcctgtaatcccagcacttagatgctggacga

SEQ ID NO: 585466 - DNA, 472 bp, Homo sapiens
caaacagttgtaaatatcagcttgagatggagtgctggtacagaatgtaagattacatttacatgtagaaaatggcagtttcagtgtacacaggtttggctctgctgccatcctaagtcatacctgtgttaatgaaatggtcttctcaactcagcattaggcaagacttaagtttttaccatagaaacattattcctactgctgtagttcagcgaaccgtccactgagatttatagcgaagttctaaggtatattttggctgtgtttgtttttaggactcatgttattttgaaataaatttatcatattagttggaagtgtgtctcttctagatctattttctttactacttatcagcataatcatttcaaatctcgggtagagattgaaaattgagcatttgatttcaatatactatatgaaaggccattacacagaatttactgcactgtttttgcaccattagcacaaa

SEQ ID NO: 585467 - DNA, 644 bp, Homo sapiens
gcatgctgtatctactggacaaactgaggcatcttcattatgcacccacgtatcggtatggcctcaggctacataggctatgtcctcaagtacggtcgactattaacttgccgggccttatacattacattctctctatgcggtcaactttactttgtgtcaggcacagtccgctgcttcactgatagtgctactcatgtcgacaaatctctccgtagcacgattttatggctctgaatcgatagttactctcgaatatcagtgtcctatacgtactgcacctgctagaactgcgctaatcggtatatctcagctcctgtaggaaagactctgccattgcgatcgaacctgacagtcttactactcacactgacacaatctatccatgatactcggactgatgtgagttctgacagtaatgcttgactcaccagacctcctaggctatcgagactattggacactagccagacgctatatagcacatctaacatcaaggcgaatgaactgcctatacaccacacactgctcagatccgcactgctttaggaggtgtacgtgcgctattgtataccatctagcctagatatactccatcatcacactgatgctgatcactcaccatatagtgttgcccatggccc

SEQ ID NO: 585468 - DNA, 964 bp, Homo sapiens
  misc_feature (83)..(83): n is a, c, g, or t
  misc_feature (492)..(492): n is a, c, g, or t
  misc_feature (964)..(964): n is a, c, g, or t
acacctctatcagctgtgcggtagaagcatggagcttggtcggcttggtgaagtttatctggcattgttgggtgtagtcactntgtgtctgtgagaagctgctagtcagacgaaatcgcgattaaatacaggcccctgatagaccagacctgagccgtggcatcagacagccctgcactatcggcgcagctggagagtcccttcgttagtgcaaccttgccagtaatcagatcgtatgcggaaccacagtatttccaaagtgggcgtccgcgaccgctgcttatatccgaattacctatctcatcaatccatatgcatcctccatcatcctatcgggctctccaatgatctcttgtcgccaaacccaagtgtccttcttccgctctgggaaagccaccccttctgtcatatatacgggctcacctatcccggcgtaatggtctcaatcgatcctcaaaaactcggtgctgggaagataccacaacctaaganagcgataaagtccgttattacctcatcctattacggctcggtttaattcacccgagtagggtagcacctacgagaaatcctcgactattttcactcctttgcaccaagatagacttctcctaacaatgagtccctgacgaacgcatcttccatcagtgggctcgaattcctgatcatacttgtttttcacacagttttcggctacagacctgtgtatctgtaacaaaaaacattgcatctaggaaaatcaaaacgttggaacagtatctcccaggatcaggatcgaaggaatcattgcgagggacacgtggcaaattctgcgtttaaaagagatttacctttttagattggtgcggaaaatgtcctaatgcctctttgcaagagccacaacaacaaatgtcagatacccagttttctggcacgtaggattaatctctctaaatggtttatctcacctttgcgggtacagaan

SEQ ID NO: 585469 - DNA, 438 bp, Homo sapiens
caggcagtgataaaggaggagaaaaatgtcaactgaccgtggggctgaggaggacatggatgaatgtgagcaggcgctggctgctgagcccaaggacaaggaccccttcgctcacctgcccaagagtacctttgtgtaggatggatttaagcgcaagtactccaatgaggacacactctctgtggcactgccatatttctgggagcactttgataaggacggctggtccctgtggtactcagagtatcgcttccctgaagaactcactcagaccttcatgagctgcaatctcatcactggaatgttccagcgactggacaagctgaggaagaatgccttcgccagtgtcatcctttttggaaccaacaatagcagctccatttctggagtctgggtcttccgaggccaggagcttgcctttccgctgagtccagattg

SEQ ID NO: 585470 - DNA, 104 bp, Homo sapiens
ggtcaactctagaggacccttaccggcccaccagaccctccaatcctaataggtatttcggcttgaggttcactccctcctcagctgcacacgcagcgcggtat

SEQ ID NO: 585471 - DNA, 363 bp, Homo sapiens
cactctgtatacatacaggggtcctggcagacagccgttatacagagttctgacaacagcatatctagtctatgctctgtggcaattgtgataagctacatgttgcaggcactgggggaactcatgtcgtagctttcatcatgttactacaacagctggactttcctgcgtctgtgtcttgctggctaactatgcatgtatcgcgttgtggactacagtcagtgctggcagcggtggctcatatgacctgtttgcacatgtattcacaggctggtatgtaggcagaacttggttcccttgtaatacaggttggatgtctgagtcatagagtctgtgagacacagtgttcaacatgtattattg

SEQ ID NO: 585472 - DNA, 359 bp, Homo sapiens
  misc_feature (62)..(62): n is a, c, g, or t
  misc_feature (77)..(77): n is a, c, g, or t
  misc_feature (98)..(98): n is a, c, g, or t
  misc_feature (114)..(114): n is a, c, g, or t
  misc_feature (260)..(260): n is a, c, g, or t
  misc_feature (266)..(267): n is a, c, g, or t
  misc_feature (279)..(279): n is a, c, g, or t
  misc_feature (288)..(289): n is a, c, g, or t
  misc_feature (297)..(297): n is a, c, g, or t
caccatggtctgtctcctgccgacaagaccaacgtcaaggccgcctggggtaaggtcggcgngacacgctggcgagntatggtgtcggaggccctggnagaggtatgttcctgntccttccccaccaccaaggacctacttcccacacttcgtacctgagccacggctctgcccaggttaagggccacggcaaggaaggtggccgacgcgctgaccaacgccgtggccaacgtggacgacatgcccaacgcgctgtccgncctagnnacctgcacgggnacaagcttnngggtgganccggtaacttcaaggctcctaagccacctgcctctggtgaaccctggccgccaacctcccgc

SEQ ID NO: 585473 - DNA, 1148 bp, Homo sapiens
  misc_feature (85)..(85): n is a, c, g, or t
  misc_feature (244)..(244): n is a, c, g, or t
  misc_feature (361)..(361): n is a, c, g, or t
acgccggtgcagcgggggggcccgggggccctggtggccctgggatggggaaccgcggtggcttccgcggaggtttctggcagtnggcatcctggggcctggggtctgctggccttggactggggcctggggcctgatggcctgcggaggctcgctggagtgcaatggccgatggataagtgagtggatgccctggcaccaatgtttgggcctgcttgtgtcaatggacattgaagatcaagtnccttggaggagatctatctacttctcccttgccacattaaggaatacagaagatcgattgatttcttccttgggggcctctatcaagggatgacgttttggaagattatgccagtgnagaaagcagaccctgtgccgggccagcgcaccaggttcggggcattttgttggctatcgggggactacaatgggccacgtacggtcgtgggtgtaaagtgctccaaggaggtggcaacggccatccgtggggccaatcatcctggacaagctctccatcgtccccgtgcgcagaaggctactggggggaacaagatcggcaaagccccacattgtcccttgcaatggtgacagtgccgttgcggggctcttgtgctggtacggcctcatcccttgccacccggggcactgggcatcgtctccgaatcttgtgcctaaagaagcttgctcatgagtggtaggtatcgatcgactgggtacaacatcaggcccggggcttgaattgccagcttgggcaatttctggcaaggccacctttgattggcatttctaagaactaaaggtacttgacccagactctgggaaggagactggtttccacaagtttcctatcaggaggttcatgaccaactcgtaagaccaacagagttcgtgcagggactcaggtccagtgttgtacacaataggtgtttaattaagaaaacctagtgtgtatagggtgtagagaaagtagaaatgaagagaaaaaaatcgtagaggattattggtggaggaaaaaagaaagcagagagaaaaagttttacgccactttagagtgagatgcgcgtatgtttgatggagataggcagtgttgagttgtgaagcatggaagtgaaatgatgtagataagtgagtgaagtagaagtgtg

SEQ ID NO: 585474 - DNA, 479 bp, Homo sapiens
  misc_feature (5)..(5): n is a, c, g, or t
  misc_feature (14)..(14): n is a, c, g, or t
  misc_feature (29)..(29): n is a, c, g, or t
  misc_feature (44)..(44): n is a, c, g, or t
cttgnatttagcangccctgtcagagganttggaggcccatccnagcaggtcatgaacccacagggaagaggcactgttgcagctgctgctgttgctgctactgctagcattgcaggagccccaacccagtaacccgccaggacggggaactccacctccacctgtaggcagagcaaccccacctccaggcattatggctcctccacctggtatgagaccacccatgggcccacccattgggcttccccctgctcgtgggacacctataggcatgcctcctccaggaatgagaccccctccaccaggaattagaggcccacctcccccaggaatgcgcccaccaagaccctaagatacagttgataaatctcagcccttctcttcccctacaatgcttcttgtgaaattgtgtacctgcaagctttttgacccctcttactgcattaactatagataataaatacatagagcaattcaa

SEQ ID NO: 585475 - DNA, 881 bp, Homo sapiens
tggtacggccggaatcgtaggatcaagggcgggcagaagttggaaacatgcggctgtcggtcgctgcagcgatctcccatggggcgcgtattatcgaccagtatgggcctcgtgtcccgagtcccgcgatccactctgtatgcggaacattgctcacagggactggtgctggcacgaacgcatcgaggcacacatggtgcgctgtgtggacgaaattgaggggctacgcggtagaatgcatctatcgagcgtattgggaatgcatggtgagacactaacagaagcgagccatgctgcatggactgactatctggctcacagagaaggattggatcccaaagctgtttcaagtactgggccctcggtacaaagatcatagagctgggggctacatcacagaatgcgtgcatgatccctacaatcggcagtttggactcgtggccaatgatggcagtgactcgagtataacgggacattgccttccacccctgcctctgcctcgcagagaccagactatcttacactcctaaaacaggtgcttgcagggtttgcggcagggacctctaggcgaagctcgagtgaatgcaagcaaccgacagttcccacacaggtcaaacaccagggatttaactggatctgacgagtctgcaggccttaatcagtacgcatgatcacaggcctttggagcacttttactctctgagaagaactggagctacgagatgtaaaatggacagtcttgatggggttgagaaccttctgggggagccagatgaccctctcttgtgcacaatagatacaagtctccatactgaatatctattaactttattgagttttttccttcctgtggcgatttctggcagaatgcggacttattc

SEQ ID NO: 585476 - DNA, 116 bp, Homo sapiens
aagtcgctgcgctgttcctgttgatcggtggcgtgagctggtgagctctggtccctgcccggggctctctcgcgtcgcctgacggactgaccgcttggacctgggcgtcgtttacc

SEQ ID NO: 585477 - DNA, 638 bp, Homo sapiens
tacacaaagacaattatttaagacctttattaacaggtgcttgcgttggtggactttttggaaaaaatcaagtggtaaaccttttattacaaattaaaaatgaagttcttaaaaatctcaactggaccagatatgaaacaatttaaaaacctttaagggcgtatggagaaaaaccaggcttttttaaaaacacacgttggttattcaccaaaaagagacgtctttaggtaaaaataataaaaaccccatgctgcatagataatgcagatagtctctatttatcgttggtcaaggggcaaaaagcaagcacttaaggtcttcagcctccaatctttggtccattctcttatggcgtggaattctcatatttcttctggtgggatgactaacccggatgagtggtagagatggtaagccggcatttactcagccccgcccgtggttcagcctcggggagcggacgaaattctcagactgggtgagatcggcagtgctttgggtctcttgtgccactctagggggtataagggctatatcggggcgatctgcgtcggataatgtgaagtttgcggacggttaccgacgattaaggttggctgcgtgacctggggatctcatctccgtgaatattccttaac

SEQ ID NO: 585478 - DNA, 928 bp, Homo sapiens
gacccccagtcgagtccgtcgatccagctgccagcgcgtgcgccagcgccggacatcccggtctgggctgttaaacgtgagccctcggctcgcatcgccctgtcctgtgaaaaatgtgtggtgcttcggtgtggctttctatcatctgccttcccagtatcatgctctgccagtcttgtggttcatggccgaccgtcgacaatgcctggtggggtaggaggatgagtaattgaggcagatgtctgtcatgaatatgtgaccagacaaagaagagattgccacagtcatcaatggacaggtgttcacagagtactccggcgctgcagggcggtccgggccaccatgtatccgtctccagcaattctctctgcgtgtgatcgccttcgtctcatcgttccgagcgtccatctcgtatccggctgtaagctggggaggagaagtctcctgtcctaacctgtactatcagtccaagcgtacatgtcatgtctgctgatgtcatgactaggggggacttccataatatgacagaaggcgtgcaagaccattcacgaccatagaacgcgagaattctatcccgtgtacccgagagaaggcggctacgggttatttcctacatgctggcgttggggtggcatttcggactgcacctttcgatcagcggcatgactgttaccctagatagctgaaggaaagggcgcaagctagacgtcgccgggaggcccgggttggtatcctggcgtggcaggatatgaaatccacaattcagaataacccgtttgggcatattaactcattaatctctgagggtttcttctaagcaaaaacggtacgtggttgcctctaacaagggcgaaccataagagaaagaaacccaccaccccaaaaactagtccgcccacccccgagtttgtaaaatatctccccacca

SEQ ID NO: 585479 - DNA, 179 bp, Homo sapiens
tttggggaaaattttaaaaaaccgggggggttttttttccttttttaccccccggggggttttttgggaccggttgggaaaaaggggaaattttaaagggggggtttttttccccaaggggaaaatccccccgggtttaaaagggccaaaaggtttggttaaaaaattttaaaaaggtt

SEQ ID NO: 585480 - DNA, 695 bp, Homo sapiens
agagagagagagagagagagagagagagagagagagagagagatagagagagtgagagatagagagagagtccttgatctcccgacactcagacctctagttttgtgctctgctctctctgtcttcaactttcttctcatatgctgtttcctgtgtctattgctcattgtgagatgatggagttccagatcttgtcctctacctgaggtattgctgatcctctgtctgcttctctacctgtgtagtcgcagatctactgtctgcttatcacctcttacatcacgctgatctacagtcttcggatgtcatcctgcttgtagttgcactccaactctcttatgaccctcgtgtgtcatcagcaccccatctgattgacgctgctgcttagcattccaaccaaatgtgatacgcactgtgacttgtgaggcctcgatattgtcacatgacttcatgattccatatccgtcggttatatctcatgtctctagtcttcgaattgttcacgctgtatataattgcctcccctcttgggattgcttcgccaggatcctatcgaagaccaccttgctactccttgtctcactcgttacgattcccagttcttttccatgatgtggctgttccctcttaatcgtctggaattgttggtcttctgtctcaagcttgtcggcatgtttatcttatgttacgattct

SEQ ID NO: 585481 - DNA, 207 bp, Homo sapiens
  misc_feature (180)..(180): n is a, c, g, or t
gaatgaaaaaaaggggtacacttttactgtcaggtgggccacgaggaccctgccgttggccttccacacaaaaaaccatcgaccgcttggcgggtaaacccacccatgtcaatgtgtctgttgtcatggcggaggtggacggcacctgctatgaagccgcccgcctgttccccaccctgnaaaaaaccccagtttcccccaagcaaa

SEQ ID NO: 585482 - DNA, 326 bp, Homo sapiens
agacagttcattaaagcaattaactcggccaataccacccttgactcctaggctagaatgtgctagctgctggtcactcagagcctgctattatacctggggagacagacacaccaagaaacatagctagctgaggacattgtgtacacactacagctggaggacagaaacaagaggtttataacaatctacagaggacccagccaaacctacaaggtccagagaaagacggaatacacatgctactccaacagaatccaggcagcaagcgaggatggagaagggaccgacacagaaaactatacctacagaaaaactctgtctca

SEQ ID NO: 585483 - DNA, 215 bp, Homo sapiens
gaacgtccatagtgtcagatgatcacgtaacaccggcatgataagtgtagagtccttatagcattctccactcggcgtatgctgttcggccacttgcatcatcaatagagctgctttagccaacctgcaggcacggtcgggggaataaatactttcgtagtacaatacggggcactagaaagcaagacctaggcgaatagaacgcgtaggtggaa

SEQ ID NO: 585484 - DNA, 765 bp, Homo sapiens
  misc_feature (38)..(38): n is a, c, g, or t
  misc_feature (108)..(108): n is a, c, g, or t
  misc_feature (183)..(183): n is a, c, g, or t
  misc_feature (233)..(233): n is a, c, g, or t
  misc_feature (243)..(243): n is a, c, g, or t
  misc_feature (249)..(249): n is a, c, g, or t
  misc_feature (261)..(261): n is a, c, g, or t
  misc_feature (269)..(269): n is a, c, g, or t
  misc_feature (274)..(274): n is a, c, g, or t
  misc_feature (279)..(279): n is a, c, g, or t
  misc_feature (293)..(293): n is a, c, g, or t
  misc_feature (355)..(355): n is a, c, g, or t
  misc_feature (392)..(392): n is a, c, g, or t
  misc_feature (412)..(412): n is a, c, g, or t
  misc_feature (414)..(414): n is a, c, g, or t
  misc_feature (434)..(434): n is a, c, g, or t
  misc_feature (448)..(448): n is a, c, g, or t
  misc_feature (456)..(456): n is a, c, g, or t
  misc_feature (458)..(458): n is a, c, g, or t
  misc_feature (476)..(476): n is a, c, g, or t
  misc_feature (483)..(483): n is a, c, g, or t
  misc_feature (496)..(496): n is a, c, g, or t
  misc_feature (506)..(506): n is a, c, g, or t
  misc_feature (508)..(508): n is a, c, g, or t
  misc_feature (510)..(510): n is a, c, g, or t
  misc_feature (627)..(627): n is a, c, g, or t
  misc_feature (667)..(667): n is a, c, g, or t
  misc_feature (674)..(674): n is a, c, g, or t
  misc_feature (761)..(761): n is a, c, g, or t
tgaaaagaaaaataaatatctgaagaataagaatacanggcctgggtgcagtggctcatgcctgcaatcccagcactttgggaggcggaggcaggtggaccgcttgancccaggagttcgagaccagcctgggcaacacagtgagacccccctctttacaaaaaatacaaaaattagccaggngtggtggtgcacctgtagtcccagctacttgagaggctgaggtgggaggnccaccttgangcccanggaggtcggganggttacangtgangcccntgaatggcgccacntgcaccaccaaccgtgggcaacgggggcaaaacccgctgcgaaaaaaaaaaaaaaaaaaaanaagaagtggggtggggaagtggggcgtgagaccttanggtgccttggcatttggtangnctttgagtgggggccgccanaggccttggaacgncagcggtncncttcccaggccaggcccntccccgnccccacctggganggcctggggncncnccagtctcgcctgcccgcggctcccaggcggggcgctgcgtcacggaacccgcgccgggattagcgccctggcgcccgcctgcgccccgggctctgtcgggcgaggctggggtcacngcccattggggcctcttccgccggcccttagctggatccnagccggnacccgcgtggtgccgccacctcagtgatgtaccaagtcctcccatgccaagcggccccagacgcccagcacgaagctctcagatgtngcac

SEQ ID NO: 585485 - DNA, 102 bp, Homo sapiens
  misc_feature (79)..(79): n is a, c, g, or t
  misc_feature (95)..(95): n is a, c, g, or t
gagcggccgcctactactactactgctcgaattcaagcttctaacgatgtacggggacatggaaataaagcacccgatnctgccctgggcccctncaaaaaa

SEQ ID NO: 585486 - DNA, 387 bp, Homo sapiens
ctgtatttgtggtattcgataagaaaagttgaattgaaatttacaacgaacaatgggaaaaaattatcatgagttttgcatgtgcacttttcagagtacataagataatttatcaccttacgagaaaaattgaatcattaattatcaacgttaaaccggtcaatgagacaagagcatagtctaggatccagaaaatagtttgatgatgcaacagatgaaagacaattagaggagatatagagaatattcccgaaacgattcggtaatcgcagtggcctgattctgacggcccttgaaatatttagttagcagctgatgaaatttcaaaggcgcagatgagtatttgggcagcagatgacaggcctgaaatgtttaaacttagaacga

SEQ ID NO: 585487 - DNA, 164 bp, Homo sapiens
  misc_feature (73)..(73): n is a, c, g, or t
ctcagagagtctcctccagattgtgaaaaaaatgaaaacaaaatttgagcaaagctgactggagccctcaggnagcaaaacatcatctccaactgaatcctagccactggtttctcctcctggggcaatcaattcccaacaacaggttgttttggcctgaggag

SEQ ID NO: 585488 - DNA, 1020 bp, Homo sapiens
  misc_feature (51)..(51): n is a, c, g, or t
  misc_feature (61)..(61): n is a, c, g, or t
  misc_feature (74)..(74): n is a, c, g, or t
  misc_feature (94)..(95): n is a, c, g, or t
  misc_feature (103)..(103): n is a, c, g, or t
  misc_feature (105)..(105): n is a, c, g, or t
  misc_feature (107)..(107): n is a, c, g, or t
  misc_feature (109)..(109): n is a, c, g, or t
  misc_feature (111)..(111): n is a, c, g, or t
  misc_feature (120)..(120): n is a, c, g, or t
  misc_feature (126)..(126): n is a, c, g, or t
  misc_feature (132)..(132): n is a, c, g, or t
  misc_feature (134)..(134): n is a, c, g, or t
  misc_feature (140)..(140): n is a, c, g, or t
  misc_feature (144)..(144): n is a, c, g, or t
  misc_feature (148)..(148): n is a, c, g, or t
  misc_feature (150)..(150): n is a, c, g, or t
  misc_feature (152)..(152): n is a, c, g, or t
  misc_feature (154)..(154): n is a, c, g, or t
  misc_feature (156)..(156): n is a, c, g, or t
  misc_feature (241)..(241): n is a, c, g, or t
  misc_feature (296)..(296): n is a, c, g, or t
  misc_feature (299)..(299): n is a, c, g, or t
  misc_feature (310)..(310): n is a, c, g, or t
  misc_feature (335)..(335): n is a, c, g, or t
  misc_feature (457)..(457): n is a, c, g, or t
  misc_feature (508)..(508): n is a, c, g, or t
  misc_feature (530)..(530): n is a, c, g, or t
  misc_feature (553)..(553): n is a, c, g, or t
  misc_feature (555)..(555): n is a, c, g, or t
  misc_feature (557)..(557): n is a, c, g, or t
  misc_feature (717)..(717): n is a, c, g, or t
  misc_feature (724)..(724): n is a, c, g, or t
  misc_feature (780)..(780): n is a, c, g, or t
  misc_feature (864)..(864): n is a, c, g, or t
  misc_feature (871)..(871): n is a, c, g, or t
  misc_feature (891)..(892): n is a, c, g, or t
  misc_feature (908)..(908): n is a, c, g, or t
  misc_feature (916)..(917): n is a, c, g, or t
  misc_feature (921)..(922): n is a, c, g, or t
  misc_feature (924)..(927): n is a, c, g, or t
  misc_feature (943)..(945): n is a, c, g, or t
  misc_feature (954)..(954): n is a, c, g, or t
  misc_feature (960)..(960): n is a, c, g, or t
  misc_feature (981)..(981): n is a, c, g, or t
agcttactcagaaagtgagatgggaggatcctgagctcaggaggtgaaggntgcagtgaancgagatttgccantgcactgcagctggggtganntgcaagancntntntnaagcgaaancaaacnagacananacaaanacanatanananananacacacgaggtccaaatggtagcagggatccaaagggaacacagtatgtaggtcaaactggcagtaacagtgtacagcctttganaaactagaaatattagagtaggccaaacacacctccaaactgtaaggctgtgcanaancataaaaaatngcagccttccatctcctgcactggntgagtccatttacttgtgtacttgttctagtgagtggtgggactgtacatttttgaatagacctcaaaaatacttcatcctcccgctcttcacttggctttttaaacctctctgcagtaggncactgaaaacagcaagaacttcggggtgaacacccgtttatcctttaacanttttttctggcatggattctcncaaaaaggtgaactgaaaatttngncntacagttggccattgtaaaaaacatcagtttcctctcatacattccaagtaaaccaagtaaaataagtacacttgcataaaagaatttaaggagtgatagctctttctgttctgccattcccaacattcctgggggaaaggaaaaaaaatgagttaatantatttcnctgagcccaagatggaaacttggtttgacctaaaacatctgattaatataggctanctgatttcttaaaaattcgttgcattgaaggatattttgcatgtctgtaacacctgtcaatacttgtttgtattgatttctganattcttncagctgactacgtgtaattnncagatcagctttgcantagatccnngcgnncnnnnggcaaattctgtattnnnagtgatgtnacaaanccctttattgctgtctgaganagtgaaagattgtgtatttctattaaaacatttacaatc

SEQ ID NO: 585489 - DNA, 160 bp, Homo sapiens
cacaggagctgagccgaatctgtgacctacaccacagctcacggcaacgcgggatccttaacccactgagcaagggcaggcatcgaacccgcaacctcatgctccctagttggatccgttaacccatcgcgccacgacaggaactcctgcttactcttaa

SEQ ID NO: 585490 - DNA, 341 bp, Homo sapiens
  misc_feature (271)..(271): n is a, c, g, or t
  misc_feature (301)..(301): n is a, c, g, or t
gctcctcaacctcgggtggtctgcccgccttgacctcccggggtgctgggattgcaggcgtggggcaccatgcccagccccactgttaagattctaatgtaggccgggcacagtgactcatgcctgtaactcaagcactttgggagttcaaggcggccagattgcttgagcttttagaagtttgagaccagcctgggcaacgtggcaaaagcttgtttctataaaaaatataaaaacttagccagccttggtggcaccactgcagtcccanctattcaggaggctgaggcgagaggatggntgagctcaggaagtcaaggctgcagtgagctgtggtagtg

SEQ ID NO: 585491 - DNA, 475 bp, Homo sapiens
ggttcacaagtgggcttaaatattcggtgaacaacactatcaagggatgtgctgtcatccaggctttattagttctatcaactagagggcgggcagagcagatttagtgtaactcttcaggaccccaggattttcagaatggtaaatgaacatggcttcaaagtaaccagcggcgttaacccctcacaaggaattcagcttgtcctttgaagcttcgaagccaggaatgaacttctcgcgtagctagcaaagtcctagagagtatcttccaatataaggctgttttgtctacgttgaaaatcgggttttgtgagtgtagccatcttcatgaattacctcagctagatcttctaaagaactcgctgcagtttctacatcaaacacttgctgctttaccttgcacttttatgttatagagactctgtctttcctttttttttctttggagacagatctcaagagtccaggctggagt

SEQ ID NO: 585492 - DNA, 972 bp, Homo sapiens
ctggcggcgcccagcggagtaggggctgcgctatgcgggtttgctgaagctggctgcctctcccactccccttatatgggttgcaaatgctgcctgctagctgggaagacggtgggccgtggcggggacatggggcacctgcgtagctggactgagagcctgcgcccagcttacatctgaccccacccggccccggccctgacccgacgcgacccgatccgatccgatcccattccatcctgttcctcgtctcctccacgtctgacccgttgcccgggccgtggttctgccacaccaggccatccaaagctgaggtacgcatcctacggcctgggactcgccttcgctttagagatgtatggcctcttccctcccaaacatgccatcttcaaaagctggactcttggactgggcacctggccagcttgacactactaccaagactccacttccgtacttacccagcattcttcctcagagtactatggtagcgccgctgggttggagacctgctcattgtccgttgcaaattaatcccaggagccctaaacatatcgacaacgcttgagcaaacccacaagccgaggagccagaccgtagacacggactaacataccatagccctatccatggcacaggccagtgcaccctgggcagcgaccctgccgcgctgcggctggtgctcggcaacggccatgaaccaggagacaggacgcacaaagaacgtgctggtgacacccaacagggctcccatggagcgagcacaaggcagacgctacaagcgggcgaacacgggaaggcagagagcgcagaacctgggcacacggacgcagagcccaccgcagcctcgaacggaagccggggacggggcacacgagcggcacacacacggccacaggacccgacgaccacccgccaggccgccacacaccggagccaggggccacggcgcacaggcgcaggcgccggcaa

SEQ ID NO: 585493 - DNA, 412 bp, Homo sapiens
cgacgtggctttatgtgacacacatacccagaaataattgatggtggggtgtcagttgttggatctaaattattttatgagcgggtcagttgaagttgaggcgatctcctgttaagtgtgtgtatgtatgttcatggtactgaagcagatgacacaggcgtgactcctttcccctcccttgtgtgtgtgttttgtggctgatgtatatttatgtggctgtgaggccatctggtcctcgaggctgtttgttttaccactggaggacaccagagggggaatcctggtcctgtttgtgtgactccatgtcccccttctccaggccctgacccagttgggcctgtctgtctctcattcttgttctctctggccttttctctcactcatcctcccactttttctgtccctctggtcg

SEQ ID NO: 585494 - DNA, 107 bp, Homo sapiens
cgctgatgcgtaatcagaactcgaccaagaggaaagtaagatggcaggactgtagacatggcagtcctgatcctttcctgagacggtaatataccttaccgggagct

SEQ ID NO: 585495 - DNA, 316 bp, Homo sapiens
  misc_feature (96)..(96): n is a, c, g, or t
  misc_feature (102)..(103): n is a, c, g, or t
  misc_feature (108)..(108): n is a, c, g, or t
  misc_feature (113)..(113): n is a, c, g, or t
  misc_feature (196)..(196): n is a, c, g, or t
  misc_feature (200)..(200): n is a, c, g, or t
  misc_feature (215)..(215): n is a, c, g, or t
attggcaactcagaagcagttcaatatacacagacatctgtgctggcgcatctgccttcaggaaagaaccttttgcccaagagtatcagccaaacntgaggnngcccngattnctgacatcattgcaatcaagtcacctgacacatttgtgagaactatttatgcaggaaatgctctatgtacagtgaagtgtgangagnaagtgaaagtgtatnctgtccgtggaacatcctttgatgctgcagcaacaagtggcggtcatgccagttcagaaaaggcatcaagtacttcaccagtggaaattaagcctttgcaa

SEQ ID NO: 585496 - DNA, 303 bp, Homo sapiens
tcgagagcgtttcttctctcgtcacctaggccgagtgcagggctgatcacggctcactgctgctcgacctctcaggctcaagtgatcttcccacctcagcctcccaagtagctgggaccgcaggtgcacaccatcatgcctggctaatttttaaatttttggtagagttgaggtctatgttgcctaggctggtctcaaactcttgaactcaaacaatccttccatctcagcctcccaaagtgctgagattacagatgtgagccaccacaccatgattgcattcctggataacacgttcgcgag

SEQ ID NO: 585497 - DNA, 620 bp, Homo sapiens
gtctaagatccgtcttatatactactcttaggcccatccacagaggtcacaagtctccctgctggcagtgcagatttcaccctattcgcaaactggacagcatcttcatctgcctctctagtcatgggaggcaggttacaacaggctgcagacaatggcccagctggtcatcattcgcagcaggtacgtcaccatcccgtatttgctgctgttccagaaggcatcgccaaattgagggtcatacttgatagcaacagggtaaactgtggctccaatttcaaaacttccctttttgaacatcatcaccgatgtattattgatgcaggttccttctgggaagatgaggataggcagcttgcttttatcttgcacatgttcagtcagtctcttagccaccaggtggcgatccttcacttccgagcgctcaaaccagacgtgtgggcaggccttcaccatggctctctgaatcacacccatgagtcccccgtgcacttgaaccaccattggataatagccatcgctggccaagatgatcacatcgatcggtgaggtatgattggccacacagattgccacatttcttgcgctgttttccctgtcatggtaggtatgatgaagga

SEQ ID NO: 585498 - DNA, 445 bp, Homo sapiens
ttcttcacagccagaggggtcctggctgccttactcagagctggaacaacagccacctgtatggtgcttctggcaggactgcctgatgctggaagagcagctgacgtgggttcttgtctgccggcgtgtcatttcatcctccgaatatttattgagtgctgagtatgttagcactcttctagggctggggacacagaagagatgattgaggaggcagtattttgtggtgattaagagagtgtgacctggaatattctgcccgggctagagtcacaggtttgctgcttcctgtgtaaacctgggcaatggactgaagttccctgatctgcactgtcttcatatataagatggcaaagatgataaaaacactgtctcaggattattctgagggttaaataaattaatacaaataaagtgccttcaacacttcctgtcatatgttaaa

SEQ ID NO: 585499 - DNA, 737 bp, Homo sapiens
atggcgtcaggtctaatgcggtggtgccgtgtgaacgtggggcttccgtagccgccgtgatccccgcatatccacgcgcgtacggcagggatgagagaatgatagaagtcgagtatgaggagtgaagacgatgatcacagtgactaggacagctgtgatgaacgagagatcgagcgttcatctgacgacgtagagtgaatgagtggaattctgacgcttatgccctagtcagtactaatgattatgacgtgaattagagcaaattacatgcgagcagcgttttttctagaccggctccgtgtgaactctgcagagactatcagatcctcttaagttcgacagtaaccatattgggagtgtgagttaagcaaacggatgtttcagtaagacatgctaatgatagatactgcgactgaactgatgacggtattaggcctctcataagccttttaaatttaactgaaagacacgggtacccagtgtgttgaatcaaattcaatgatgttggttctacgcttctgtgagaagaactgtgaacaagagcatggttgaacagctggacaagtttttaaatgacaccaccaagcctgtgggccttctcctaagtgaaagattcattaatgtccctccacagatcgctctgcccatgtaccagcagcttcagaaagaactggcgggggcacacagaaccaataagccatgtgggaagtgctacttttaccttctgattagtaaga

SEQ ID NO: 585500 - DNA, 330 bp, Homo sapiens
gaggactcatttcagacattcatgtgtgtagacctgagaaatatcggcaattcttttacacagcatgtccacaggaatctcatagaccatacttgtattatccagtatcgctgcctcatagctgtgccctactgtaccatgggatctcgctgtcagcatgtcattaccggtcatcacacacaccaagtgttttcacgttatcttgacataagatgagtcacgtgtgcatggaatcccaatacatttgtcatggtactcttcttcgtgtgtgacacattacatgcacagtcatttccactctgaccagctacctgatgtacaggccaccac

SEQ ID NO: 585501 - DNA, 150 bp, Homo sapiens
actctagggaggtttgagctgaggcctgactaatgagaaggagccagccagaggaaggcattggaactagcaagagtcacaaatacagaggcctggagtagccattgctaatgtaccgccaccctcggccaaagtcatcctctaccgcat

SEQ ID NO: 585502 - DNA, 159 bp, Homo sapiens
gagctggtaccgttgatcgtgaacgaaaccgacattgcgctggacgcgcgctggattgcatggcctggctattgcctggagcgctgcgccgagccgcacctgcgcgccggacgcctgcggcgcgtgctggacgagtggtcgccggcgggcgcgccactg

SEQ ID NO: 585503 - DNA, 143 bp, Homo sapiens
tctattaaatgatccaaaggggtgtataatccatccttaagaaacaatttatggcagacaatggtccagaacctaggtaacaagtaaaatatggaagtaacagaacataatagagactataattcatcccaatcaacataggg

SEQ ID NO: 585504 - DNA, 217 bp, Homo sapiens
tggtctcagactcctgagctcaagtgttctgtccttctcggcttccaaagtactgggattacaggctgtttttcgtacttttttgatataagtcacagtaaaaaagtgttttacattatgtgtgtgtatgcgtgagatacaaatgtttgatgggatagttttcactattttttcacccttacaatagataatagattcttaaatttcctttcttcat

SEQ ID NO: 585505 - DNA, 120 bp, Homo sapiens
catttgtcatgatcttcttcatagtactacccatcataatcggacgcttaggcaactaactagttcccctaataatcggtgccccaatatggggtttccccgcataacgacatcagcttc

SEQ ID NO: 585506 - DNA, 793 bp, Homo sapiens
gcaggtcgcccgggcaactagccggctccctcgcgtcgcccactcccgctctggctctccaaggaaaactaggcccctgctgcggcctaaggcccaggatcgcgcgaagctgcgcgcccgaagagtttcagcacccatgtggactttcacaatcagagatggcagcggtaaaggcatcaacatctgaagagctaccaggccgcttggtattctcatccggtatatgcaagatagtggcaacatgatcatcagagcaataggcttggatgctagagccaatcacgatgcctacaggcaaggccgtggaatccatggtgtcaatcttccatggtacttaccttctgcgcttattccccaaagctcgtacgataatgaggctgcgtatcctcagtgcttctatgaccatcatgtggccgtggcaggacgtaccccatgcgaggatcgtgtcacatttcagaagatctgggcagacatccacgttagagcagtaggagtccaggcatgcatgaaagaagacagggcttggtccaaagaggaagagatggagactgagtgagatgcagaggtagaatgtgacctgagcgatgtggaaatcagtgaagagctccgtcagtacttcgcagagacggagaggcataggagaagaacgacggctggcagcgagcagctggatgcagagcgctggacagctatgtgaacgctgacgacgactgtacgtgacagaccggcggtcggtagaagcccaaactgagaggctggtgagcggcgccaggcgagatgagcgttggacggg

SEQ ID NO: 585507 - DNA, 150 bp, Homo sapiens
aggagtattggtaccggggaaatagaagaaggtagtaggggggtaggtaggtacgaaggagggactctagggaggatacgtacgtagctagccgagcagttagcgctcatatagggccggggctaccgactagcaggtagacccgccagg

SEQ ID NO: 585508 - DNA, 358 bp, Homo sapiens
tttatagtcgactccgtttacatttttgccttcttaatttcaagattgcaatttcgcttcaaaacagatcatttttttaaattgtaaaaagtattcaacatatgcagaaataaaaagcatttggatggctgggcgcgggggctcaagcctgtaatcccagcacttggggaggccgaggcgggtggatcacctgaggtcgagagttccagaccagcctgaccaacatgaagaaatcccgtctctactaaaaatacaaaattagccgggcgtgatggcgcatgcctgtaatcccagctacttggaggctgaggcaggagaatggcttgaacctgggaagcggagacaaggtagagccgag

SEQ ID NO: 585509 - DNA, 212 bp, Homo sapiens
  misc_feature (174)..(174): n is a, c, g, or t
aaccgtacattttcattccctcatccattacccgcgcagttaagcgggaaaactatttcgcaacgtcgcgcttgtggctaaaatagccgccatttttcagctactggataagaatgtgaccgtatcttctcatcgacttgaactgttaagcccggcacggatgccgccattgcncgcgaactattttgcacggtgccgatgctgtttatatc

SEQ ID NO: 585510 - DNA, 510 bp, Homo sapiens
tccccaaagaaaaaaatccttcgggggaaaaattttcctttttttaaattaagggttaaaattcccttgcccaaaaaaaaaaaaaaaaaaaaaaggggggggcccaaaaaaatccccccgggggcccccaatctatacgacgacccccgcttttttgttaacaaaagggggcgcccaatattggagcgagccgcagatattaataagacgaccaagcggcacgggcgcccgcttttaaaacaaccggccgtgggcctggaaacaacacctttcagcccgcggtgacgactctctttgtgaggaaagacacacccacttacctctttgtgggcgcggcgcgagccaaccaatcatgatggcgccaccacacccccaccccaacgagaggagaaattattatcacacccggccctcagaggggaaaaatatataacaccttctcgcagcggggcttgcctactcggtgggtcgtcactcccacgaaacggccgccttatttatgactctgac

SEQ ID NO: 585511 - DNA, 464 bp, Homo sapiens
  misc_feature (364)..(364): n is a, c, g, or t
actccccgtgtttggtgtcttaactgtgtgtgcgtgtgcgtgtgcatgtgtgtaaaccccgtgggcagggactacagggaaggctccttcatcccaggtttgagatgaagctgtactccccatttcccactgcccttgactttgcacaagaaaaggctgagccccattcttctcccccttgtagagagggggcccttgcttcctgttccaaggggtacaaaataggctttcttgccttcccaataatcccctttgctaggccccggggaaaccacagggatgcaaatatgcttagggctgggcctctggtgttaccatgggccaaaaaactttttaaagctaaagaggggcctcgggtgccttncaaattctcgtgggtgctggggggaaacaataaacctaacccttggcttccatttccttaatatggctgcaaaattaaaccggattttttaaatagcttt

SEQ ID NO: 585512 - DNA, 162 bp, Homo sapiens
ggcagctaatcagataggaatgttatgagctattttaaaggttcttttggagaaatatattaatcctttttaaatatgtaacctgagaatttgtttccaataaattaaccttgcctttgaatttatacacattctttaaagggtatttaactttaaatgtga

SEQ ID NO: 585513 - DNA, 906 bp, Homo sapiens
  misc_feature (509)..(509): n is a, c, g, or t
  misc_feature (906)..(906): n is a, c, g, or t
tccagccccggtcaccggaccctgaagccgcaaaaatgtggatgcctaaaaaaaaccggtttgcctatttttgaactctctttttaaggagggatgtcagtgggtggccacaaaaggtgtgcccacatgtgcctataagacacccgtgagcgtggcaagacaagaattgttgcccaacctttcagtgctcattgaaggccagtgacagtctcttcaatgttcccgaggctacgttaaaggacacacgtttgtgccgtggacgacattttcataacgtgggatcaccttttaaccaaagtggagaggctatctcacgagattatcttccacggagtgaatatcacctatatcaaatctgtgcccccgcggaaatatgtggttcgccagtgccaaacccaattaagcacggtaaacacggctcacaagaaagaaacgtggcaaaagggcactatcagagaccataaaagagggctctgagggagagagagtgagtgaaagcaagcacccgnggcaagaaaaaactctccaccaaagagaggcgggagacacgccgagaacagagagagatatcaccataacaacagaacagcagagggaggcatggtggccccccacttggtagtcgcactagaactaatagacatcaatgcccagaatgagctcatgggagcgcatgtggggcgatcaaagcgcaaaaaccgcctcagaaaatttacacccaatagtttataaagaaatcgcgcggagaaatattggtgcggctaccgtataggcgaccgatgttgggcacaagagcacaaaactcactaacagtgataaaaaatcactttgggagacagaccgaggattacacaattgacggcacgtctagaatattcaaagacattaaacgaagcacaaaataan

SEQ ID NO: 585514 - DNA, 1840 bp, Homo sapiens
ctttgcatggctacctctacatactgctattgctggctattggaagaccttagtgtcagaatcttcttgtgtacaagccctgaatggtgtgaccaacccaagttcctacagcatctttgcagctgttgatctcactctttcgttcctattggagaaactaccggcccagcaatgtctttgctgtgtttggcagactttaaggcacaagcacaaaagcagctgtctaagacctcctgggattttattgaaggagaagctgatgatggcataacctacaatgacaacttggcagcatttagaagaatccgcctccgccccagatacctgagagatgtgtcaaagatagacaccaggaccacaatccaagggcaggagatcaatgcccccatttgcatctcacccacagcctttcattcaattgcctgggcagatggagaaaagagcacagctaaagctgctcagaaggccaacatctgctatgtcatcagcagttatgccagctatactgtggaagacattgttgctgctgcccctggaggcctccattggttccaactttatgtgcagccagactgggacatcaacaagcagatggttcagaggatagaagccttgggtttcaaagctttggtggtcactgtagatgcacctgtacttggcaataggcgagggaacaagagaagcctgctggatttggaggcaaacataaagctgaaggatctccgatcccctggagagagcaagtctggacttcctactcccctgtctatgccaagttcatcttcctgctggaatgatctccccttgcttcagagtatgactcggttgcccattatcctcaaagggattttgacaaaagaggatgcagaattagcagtgaagcacaacatccgaggcatcattgtttccaaccatggcgggaggcagcttgatgaggttcctgcatctattgatgctctgagagaagtggtggctgccgtcaatgggaaaattgaagtgtacatggatggtggggttcgaaccggcaatgatgtgttgaaggcactagcccttggagctaggtgcatttttcttgggagaccaatcatttggggccttgcctgcaagggtgaagatggtgttaaggaagttttagatattctaaaagaagaactccacacttgtatggccctttcaggctgccggtcagttgctgagatcagtccagacctgattcagttctccagattataaaggacctactgagattgcctacaagagaaagacaagcttttcaacatagtgtgtgatgctgttcttcttgggtcccattcataatagaagtttaagccctctaccctcaaaaattgagacagatggagaaaagataggctaaagctaccagagggtgcatttggatgaagaaataacatctaatgttctacaggaaactagagttaacaattaattgactatatcaaaaagccatgttctagcaagaaaggaaatagttagatctgatgtgacataccagttaccttcatttgatcagtagtgcattatacataattgaaatgtcatactgtgccataattatgtgtaattactatgtatcaattaaaatatcaatatatgttcaaaaagaaatggggacagggttatcctgattttattcattccctcctgcaagaaatatttttaaaacatcaatatatgtagtcaaattctgaagcatagtacagcatgtgaattattcaagtttctgtcacagcatgttacagaaatattatgatctattgcctaatgtccattgttaacagaagctgacctcaataaaaaaacaagaggaagattttgaaaa

SEQ ID NO: 585515 - DNA, 150 bp, Homo sapiens
tccagaagctctggcacagtgaggtgcgtagagttactgcaggtggtccttcccaggaaatttcaccacatcacccagttctcaggcgtcgcgtcccttgtgttgattgctccagggccaattctaggcgcctggaggtgggtggtggga

SEQ ID NO: 585516 - DNA, 609 bp, Homo sapiens
gttgaaaaaaaaaaaaaaaaaaaaaaaaaaaaaaaaaaaaaaaaaaaaaaaaaaccaaaaaaaaaaaaaaaaaaaaaaaaaaaaaatcaaaaaaaaaaaaaaaaaaaaaaaaaaaaaaaaaaaaaaaaaatgaaaaataaaataaaaaaaaaaaaagaaaaatataattaaaagtagtacataatgacaaaattaaagtgatgaaaatgataacataaaaaacatgatgtgataaatattacaaggcgcaggatataaaataaataacattatataaatgagatattcatggggaggaccaaaataactacatgaggtcatattcatgaatttaaaaataataatattattgaaaaaacaatttaatatatgataaatacaaaggattcccttaccaaaaaggttattaggaaaaagatgttataaataattgtgaaaaaaaaaattgactataattataaccattttaaatattatccccataattatgaagataaaaaacctttagaattataataatcacaatatatgtgaaaaatttttgaaaaaatggataattattaacattattaagatatggtgatcatttatgaaggaggaaaaaacatg

SEQ ID NO: 585517 - DNA, 375 bp, Homo sapiens
tgttatcaccagtgtgagcatccgagtcagatgactgcaagtcatgggtgactcctggcatggccagatatgcttccaatcgaccaactgtggtatccgcacagccatagcctgttgccatagaccttggatgcttctcaatctgagagggcctgtcatcagtgatgtcagcaaagggcaggtcgccatctgccttcacatcgcactcttgttctgtaagtttgtcaagcaggtcagcctctctcaatacggtaggaccttcatccacgcctcctcgagtctgtccctttgacaaagaagctgcaataatccctatggttctgcacttggcgtacatgctacgacagttctgtttgctgcacttgatctgttcag

SEQ ID NO: 585518 - DNA, 214 bp, Homo sapiens
ccgcctcattgtagttaagcaaatatacaacactgctgtcgacggttaagagaggagaaatcccaagtaccaaacaatgtccatccacatgcacagagtacaaattcctttgcctcaacaaaacgtagaaagaatcaaaaatactcccaaatggggtactggatgggcactagagagttagcacattgtcagatgtggtcaaaacgtagtgcca

SEQ ID NO: 585519 - DNA, 238 bp, Homo sapiens
  misc_feature (36)..(37): n is a, c, g, or t
ctcctatcgcatctcaaacaccgcaatctcaatctnntgccttgaacctttcaacttgctgttctcttccagatacctgtgcatagatagattgcggtgtttgagattgcggagtttgagattgcggtgtttgagattgcggtgtttgagattgcggtgtttgtgattgcggtgtttgagattgcggtgtttgagattgcggtgtttgtgattgcggtgtttgagattgcggtgtttg

SEQ ID NO: 585520 - DNA, 330 bp, Homo sapiens
ctgcttagcaacgagcctatagttagttggcacatctgcgttttggcatctgaggctcccatctgagtggaggagaaagtgttgtgtttattagcaggaagtcttgtgaaaacagctcgctgctgtgtatgtttatggatttttctgatatacagccagcatggttaccgagtggtagagattctcgagcattctcaactctctttgtgggtaatgattgtgctaaaataacttaattaatacagaggggaaaaggtgtacctctacctactaatgtactctaatatatatatctctctactaatcaggaaaccaggagtatgatctcca

SEQ ID NO: 585521 - DNA, 139 bp, Homo sapiens
gaaggggtgcatacatccagaagtgggtcagacctataaagtcctaagatcaaagttaaatgccacacttgaacttcttggtgcccacctgggtctcttccaagtgtactttcctttctttcctgctcatcacgcggat

SEQ ID NO: 585522 - DNA, 413 bp, Homo sapiens
  misc_feature (390)..(390): n is a, c, g, or t
  misc_feature (405)..(405): n is a, c, g, or t
ggcacgagctcactctgtatatacacacatatatatttttgagagacagggtcttgctctgttgcccagactggagtgcagtggccagtcacagctgactgcagcctcaacctcctgggctcaaacaatcatccgacctcagcctcccgagtaacaaggactacaggtacacaccactacactcggctaattttttaaacgttttgtagagatgggggtctcacgccacgttgcccagggtggggactttgtattttaaatttaatctttggtttttaataggatgacttttgtgtatattatgacttgatctacatgtattatggacttgatattatttggaacttcttttagggttggaaccattatggaaattggatattcaaccanttttggacccacggnaaatggac

SEQ ID NO: 585523 - DNA, 247 bp, Homo sapiens
acgagctcgagcacttcatatcagagcttcatgcccatcgtgggctcattgctggcctggttctctttggagctgtgatcactggagctgtggtcgctgctgtgatgtggaggaggaagagctcagaaaaggagggagctactctcaggctgcaagcagtgacagtgcccagggctctgatgtgtctctcacagcttgtaaagtgtgagacagctgccttgtgtggcatgaaaggactcgacatgaa

SEQ ID NO: 585524 - DNA, 218 bp, Homo sapiens
ccagtgttttaaaatgagagttattgtcatacattccaatgaatcaaaacaataccaaaacaaaaaaccacacaaagaactatattcaaccatatgtgatcacaatttccctcattacagtgaggggaagggtctggtggtggtttggtttggcttttaaattgtatctcttttattatctccacactgccacacatacacaaaaagtagagggatag

SEQ ID NO: 585525 - DNA, 174 bp, Homo sapiens
gtcgccacacggacgccgatagcgtctcaactggcatcagatccatctggcttgggatgattggattgcgcatccggaggggcgatgggacgccgtcgtgaggtgccaaagcctcacattgtccaaatctctcagcgactggtgcagctggtccgcatcttcgttcaactccgg

SEQ ID NO: 585526 - DNA, 1030 bp, Homo sapiens
gcactacatgaacttaactagaaataacttggcaaggagagccaaagctaagacccccgaaaccagacgagctacctaagaacagctacaaacgagcacacccgtctactgtacgcaaaactacgtgggaccgacttctatacggtacgacggcgaccaaaactctatccgatgcctgggtgactacgcctgggtttgtccaaggactacgaactcttacgttcaactattcaaattttgcccacaagaacccatctcaaatcccctgtgtaaaatttcaactggttaagtccaaaagcaggacacagctctttgggcacactcaggcaacaaaaccttgtgtcagcagacgcagtacaaaccatgttaacaacccattagtagggccctaacacagcaggccaccaaagttaagacaacgcgtttcaagcctcaaaaacccaagtaccctaacacaaagtcccaaaaagcattataacgtgaaactccttcaataccacattgggaccaagtctatcaccctatagacagaacctaatggtcagtatacagtaacatgaacacacaattctcctccggtcatacagccctgggttcaggattacaagacacttgaacctggagcaagttacacaggccccaagtattctaccaatcaaaccaaaccacaggtccattacttacgcctcaactggtgcaaccacaacaccaggcattggtccaatataagggaacaacgcgttacaaaacacatgttaataatgggaacttcggggacaaactctttacacccccgagcagtgttaacccaaagacatcatgttcaacctttcgtaggccatccacaccaggatctaagaagggataccggatgtgccacaggggacaacttgtgttcaacgggacagacgaaaccactacacacgtggcaaaggcgagaaaaacactgtggctcaaagtgagacgacctggctggacaggccccacaaggatacaaacaagagcacaacaataaacacacagaggaagc

SEQ ID NO: 585527 - DNA, 266 bp, Homo sapiens
ccaattcctgcactttgccgatttggacttcattctattgcagagtatgatgaaggaactccttgatagaaatacaatacttgcacaaagaaagaagtccaaatccatcctagtttttttttctttttcttttttgagatggagtctcgctctgtcgcccaggctggagtgcagtgacacgatcacggctcactgcaagctccgcctcccgcgttcacgccattctcttgcctcagcctcccaaatcggcaaagtgcaggaattgg

SEQ ID NO: 585528 - DNA, 132 bp, Homo sapiens
  misc_feature (19)..(19): n is a, c, g, or t
agagatggggtttaccatngttgctcaggctggtctcaaattttcgagctcaagtgatccgcccgccttggctcccaaaaggcatgagcactgcgcctgacctacgatttctttctttatatatcagtatga

SEQ ID NO: 585529 - DNA, 492 bp, Homo sapiens
  misc_feature (423)..(423): n is a, c, g, or t
  misc_feature (436)..(436): n is a, c, g, or t
  misc_feature (464)..(464): n is a, c, g, or t
  misc_feature (473)..(473): n is a, c, g, or t
gagatagggtttcactcccatcacccaggctggaatgcagtggcaggctcttggctcactacaacctctgcctcaagcaatcctcatacctcggcctctagagtagctgggactacaggcaccagccaccacacctggctaatttttgtatttttattagagactgagtctcaccatgttggccaggctggtctcgaactcctgacctcaagtgatccacccgcctcagcctcccaaaggctgggattacaagcaagagccacagtgctgagcctcagaatcttatccctgtactcacccttcctcaagaacccccagaaggtgagcttttcccatgacagcaagcccttgtttgggaggtagagtctttaaggaataatcttaatttcatcaaaatcatcaaatgaatttgatgcattgacnggggaagatagtntgaaagaagttttatagttctgaggagngtttagggnaattagtgccaggtggttg

SEQ ID NO: 585530 - DNA, 776 bp, Homo sapiens
taatcccctggccaacccgtcatctactctaccatcttggcaggcacactcatcacagcgctaagctcgcactgattttttacctgagtaggcctagaatataaacatgctagcttttattccagttctaaccaaaaaaataaaccctcgttccacagaagctgccatcaagtattctcctcacggcaagcaaccgattccataatccttctaatagctatcctcttcaacaatatactctccggacaatgaaccatacccaatactaccaatcaatactcactcattactactcataagggctatagcaataaaactaggaatagccccctttcatcttctgagtccagaggttaccccaagggcaccccttctgacatacggcctgcttctttctcacatgacaaaaaattagccccaatctcaatacatatacccatattctctccctcaataaacgtaaggcttctcctcatctaccaatcttatccatccatagcaggcagtgaggtgataaaaccaaaaccagttacgcaaatcttagcatactcctcaaattaccaataggatgataatagcaagttctacgaaaacctaatataacattttattaatattatataatcctaataataagcgatcctaatatcaatttaatccagaacaagagctatatatctggactggaacacgtaatggttaaacttaattcatagcctttttctagagctgcccgaacggttttgcaaggaattgggatcaaaaaaaagataaca

SEQ ID NO: 585531 - DNA, 985 bp, Homo sapiens
acaattcagaggctgctgcctgcttaggaggttgtagaaagctctgtaggttctctctgtgtgtcctacaggagtcttcaggccagcctccctgtcgggatgggcttcttaatgaaaacacatttttcctccccattctgggggctctatcatgcgcctactaactactattctgcaaacgaggaattcagaccagagatgctccaaggaaacgcaaacgtgattgtcacaggggcccagccaaaagcggatcgggaagagacgatgcgcctctctcactctgggcgaaccgcacttggcgcacgccccattgttgcgctgcgttgcacaggcggacgggctccaagaatcgacatacacctcgtaccacggacaccgggtgggtcaatccccaacatggccactgtgaacgccctattgggcacgcgcacggccacttgcatgcccacccacccttaaccactaacggcccctgcgcacacccccacctggcgcaaagcggagccactggcacccccatatcacggccagcaaacggccaaacctctctcgggcctgggcccccccaacaccgaccaagtgcggaaacacaggacctccacaattgtgggcgacaagcggaaccctttacgcgacaccctacttggccactcccgaagtttgcccgttacagacacatacccccaacgccacaaatttccgaagaccgccgtgcaaagtccatgcccacttatgttccacgctctagtcggccaagaccattatccccttctcgctctcaattagcccactaccatgttgcccaaaatgcggcaacttattaagcattcgaccccaccgcccgccaaaaatggccttatctcgccccgacccaccatcatagacgagacaaccgccacaccctttgtcgcccacaccaaggggcttttacaacaagacgaactgatatgagaccgaatattactcacaggagcttagtgcacac

SEQ ID NO: 585532 - DNA, 238 bp, Homo sapiens
tggggccccccccccgggcccccccttttaaatttttttttccccccaagaaaaaggaaaccctttttttggccttttttaaaaccttcccggttttagggttttggttcccttggggatggggttccccccctttttaaaggttggggttgggaaatttcccctggggccccccaacccccaatttttttttaaaaagggggttttttttttttttttaaaggggccgggaagccca

SEQ ID NO: 585533 - DNA, 1147 bp, Homo sapiens
acaaagaaggtaagggcagtgagaatgatgcatctatgacattccttgatgctgttgtgtcatgccagtctgctctgcctatcctctgagtggggcagcaaaagagcgaggactccaacaaaggatcttgcccagcaatacctagaaaagtactacaacctcgaaaaggatgtgaaacagtctagaaacaaaggacagtaatctcattgttaaaaaatatccaaggaatgcagaagttccttgcggtaggaggtgacagggacgctagacactgacactctgagaggtgatgcgcaagcccaggtgtggagataccatgacgctaggacacattcagctccatttccatggcatgccgaagctggaggaaagacccaccttacatacaggattgtgaatcatccaccagatttgccaagagatgctgtagatcctgccattgagaaagctctgaaagtctgggaaagaggctgactccactcacattctccaggctgtatgaaggagaggctgctctactgatctctttagcagatcaaagaacatggagacattgactctttcgcatggccaagacacagattggctcactgactaccacctggacctgggcattatcatgcgagcatatcccttagatgatgatgaaacatggacagaagatgaatcaaggaacaccagcaactccatacgcagactgcatcagcaaactcggaccaaatcacacggaggaacaacacaacacaaacaagaacgaagcacagaaataacccaaccaacagctcagtcaaaaggctccacaagaacagctacagcaagccgacgcagaacgaaacaaacaccaaaaacaaacgcacccaggaacacagacggagacacaccggaggacacaacaagagccgacaagcagaagaaagcacgcgcacgagacaaccggacgaaaaccgagcacaaccaccagaaagaagagaaagaagcagaacaaaaacaaggagaaaccaaagacacacacggcccccaaaacagccgccaccgacgacacaagggaagaaaacacaagaccacacgacggacggccgaacacaagacggaccagctactcaccagcgagagacaccgcgagagaagtagcgtcgacacggcacag

SEQ ID NO: 585534 - DNA, 822 bp, Homo sapiens
tggagacggctctctctctgttgcccaggcggagtgcagtgagccgagatcgcaccatggcactccagtctggggcaacagagtgagatcccgtctcaaaaaaaaaaggaaagggaaaaaaaatatagcattatacctctttcttggtctcaaccgccatgaaatttctgaacattcccaattccggtggattattccaaaacaaattttataccgtttaaaataatttccttcttataggttaataggtatacttaaaaaggcctcaggggtatataatcttctaaacaggctacaattctcaggtggcaggctactttacccacttattgtcctcttagtttgagaacaactagggccatatttcacgtgctggtgtacgcctcagggcctaactgggcgtgccaaataaatatccgtagactttaccctgatttggttaaaccccattcgttttggttccacaactggccaaaattctcaaagggctcggtatttatgtaatctctctggaacatatttatctcattggattccacagtaatgggacgggcggcgtgtgactataagaacataaggtcctcattatttattaaaaaccctcaaatattgccttggttttacccaacattccttcccttttctacaagttattttttaccaatcattggggttctcccaaaaggtgatattttgttgctctgaaaccacgtgcaatatttttgctttctcgggacactttgtgtatatttcccccacactttttcttttcagacaattctggcgggaattgtggggacggaccacatctggtttaccatg

SEQ ID NO: 585535 - DNA, 344 bp, Homo sapiens
atccgcttagtagttttccggtcaaaaatgctactgcttttagttaagagggaacatcaaggctcgggtgaggtggctcatgcctgtaatcccagcactttgggatgctgaggtgggcagatcacctgaggttgggagttcgagaccagcctgaccaacgtggagaaaccccgtgtctactaaaaatacaaaaaaaattagccaggtatagtggcacatacctgtagtccttgctacttgggaggataggtcaggaggattacttaagtccaggaattggaggttgcagtgagtcatgatcatgccactgcactccagcctgggtgacacagcaagaccctctc

SEQ ID NO: 585536 - DNA, 166 bp, Homo sapiens
agtgttcatgtctacagtagaaaatctgatcatacctagcaaacaacagattgtcttctaatgggaatgtaacagaatctggatgcaaagaatgtgaggcactggaggcaaaacatattaaagaattttagcagagttttgtacatattgtcccaatgttcatcaa

SEQ ID NO: 585537 - DNA, 487 bp, Homo sapiens
gctaaatagagtacggaatggaaataaatggaaggtggtcagaagatggacatttgtagtaggctcctacgcgatctctcaatgatggccgaagattattagaatcagcgggtcaataggacgaaatgtagcctgggactctgtgcgtcgtgggtatgtttttcatgagagtttagtgtctcttcgtacgggacggcagcacacaaaggtcatgagtaggatcttactgctttacagaggggactccttaatttttaaatgaaaacaatattggcatgatggtgaagttcccaaccagtccatacaagcccactgagttcataacgtactggaagaccaatgcagctctgcccaccaccggcaaacaacgtcttctcgtgacatctcccaggttccaactggggggtcacttcagttggcagctcccaagacctaggcaaggcctctgtgggacaggaatcaggatcgggtagaagaggcaggaccg

SEQ ID NO: 585538 - DNA, 579 bp, Homo sapiens
  misc_feature (150)..(150): n is a, c, g, or t
  misc_feature (262)..(262): n is a, c, g, or t
  misc_feature (265)..(265): n is a, c, g, or t
  misc_feature (268)..(270): n is a, c, g, or t
  misc_feature (274)..(274): n is a, c, g, or t
  misc_feature (340)..(340): n is a, c, g, or t
tggacaggtcccagtcatatacctcaacgcctgggccagattgaatgtgattactatatgaaaagaggagaatgtaaatttggagaaaggtgcaagttccatcaccctattgacagatctgcacccgcaagaaaccagaccctagaacanaatgttaaatttactctcgcaggtcttccaaggagagagggtgttcaacactgccccttctatatgaagactggtacagtagctatgccgtaattgcaagtttgaccacccnccnccnnnagangtcagccgcagcaggaaaggaaacattaacaaaggctgaagaggaagggaaagagagtgaagaggntgctgcaacagctgaaaagtagcagcaggcttttgttaattctagaattcttttagtatataccagatcctttgttgttggaaacaattttctgtttgtttcgatacgtcatgcgtctattttgtttccctttcccccctttgaaaggtattaatctctagaaatggctttggtctacaagcgtttgtttgacttggaagtgcttgaagaagaacttaaatggtattttcttcgttctc

SEQ ID NO: 585539 - DNA, 263 bp, Homo sapiens
catcccccttgcgtgtccatagtaggggtgtgggccaacgatgcttgatccaggtctagttacccgtggcagctgtactgtatcaacgtataatacagaaaaaccatctctttaaggtcctcctacacaaagacatagagtgatactccctttacatgtcagtatttgtacaacactttagtgcaacttgactgtcagggttacaatggactacaggcaattggaataatctgaccaattctgccaccttgtgactttcatat

SEQ ID NO: 585540 - DNA, 125 bp, Homo sapiens
tctcgaagtcgacttaataacgtgtaagtcatagagaacattcaagaaatacaatagtgatttatccacagcgcagttcacatccgatagagaagaagggagaaagggtcaaggtactttaaatc

SEQ ID NO: 585541 - DNA, 1086 bp, Homo sapiens
gcggaggtcggcaggtcgggtccgtcgtctgcccgcggctgtgtgctggcgccggcggatccatgccttatgctggtttcatctctgtgtgctgtgctgtgctgtgctgtgctggcctctgtgtttgactgcctcctcctgccatgctgatgccctgcatgggagcccaggacgcctgcttcccctggccatccccgctccccgatggctggcctgcctggtcatggcgcagccgggcccggcttcccagcctgacgtttctcttcagcaacgggtagcagaatttggaaacacaattaatgcagaatttattacgtgcacaacagcacgctctgaaccaagacatttacatcaaaacgagagcccaccacttcaccgggagctcactacttcggcctaacacgacggacggactctgacacgacggcaaacactgccacacttcacacacgcctgcacatagactgacttaggggaccagcctatcgcaaccccagactgtgcggcaaacgctcacaatgccaccagcatgcgcagcacatcatcaccaggccggactttgtcctaacaggctcctcctggaggaaaccacacaacagcccaacgcaacgcctactacgcatacgcaaccgtcgacaacaagaacccggctgggcaagacagacacgcacacggtcgacactaccacacccatccacgacgcctcgcacaatgaccacaggaacaaccaggacaccggcgaaccacaatgccacgcaccccagagataccaacaccgtaacagcgcactgggcaagccacaccaagcacgaacaccacacacgaagaatcacaaactacgcttattaagacctcaacctcccggcccactaatcagtggggacacaattaggctgtgacttgcaatgccaagaaccaggcatggcccacgaccatcggacccccacaccagtccatcacaccaactcacaaaccactagaaaccatgtcacacccctcgcccaccacccacgccactgcagacccaacaccccccccgcctccctacatgccattcacttccccaatggtcaacaaacgcacaca

SEQ ID NO: 585542 - DNA, 101 bp, Homo sapiens
aatcagtgtcgatcgagataacgtcgaaatcccacaagacagcgtgcgaaaaaacggtcgtcggtcgctgtgtgcagatctcacggtggcatatgaaatag

SEQ ID NO: 585543 - DNA, 220 bp, Homo sapiens
ctctaaagaaaagaaaactggaggctgggcgcagctgtcacgcctataatcccagaggctgaggcaggcggatcacctgaggtcaggagttcaggatcagcctgaccaacatggagaaaccctgctgaaaatacaaagttagccaggcatggtggtgcatgcctgtaatcccagctgctcaggagcctggcaacaagagcaaaactccagctcaaaaaaa

SEQ ID NO: 585544 - DNA, 550 bp, Homo sapiens
tttacttagctcgagtctgatccatatacaagaagcacacgtagacagtgaagaacagaagaaaactaaatgcattgctataaaaaattaccagtttctagaatgtataaggcaaaacaggtaatagagtcaaaatattgtttggagtacttttctgctaaaatttgctcattaaacttctccaagtagatggtagcacaagatattaatactggagtgtgcatttttgtctaaaatgtatatacatttcaaagtgtataggcataggatactatggatcagatcactatttggtctccattatacattgggtgccttggggaaaaaaatccaaatattgtagtttatgaacctgtatcataagaaactagaaaaatttagttatgttgcctactcaaagtagtctttaggagtgttaagtagtgtgtctagaaacaaatagtaaaataattcagatttgattgcactttccctcttattttgataaattattattggtaaaaagaacaagacacattatgttaagactaatactttttataactattct

SEQ ID NO: 585545 - DNA, 313 bp, Homo sapiens
aagatcttatgatgcaaagtgaggatgagttccccactcttcaggatcacggaagccattcatgaggtgcctccaaaaagtacaacccaagcccaggttgtggaagatcttcagttgcccgtccatgctggagcgggacatggtgaccccacgttggagggaagcccttcagctgcgggatctgcaacaaggcctaccagcaattgtctggtatgtggtaccacaatcgaaaccaacaacctgacgtatttgctgctcagaaaccaccgatcttccaagttctcatcactccagtgcagctcctgtgacaaaa

SEQ ID NO: 585546 - DNA, 673 bp, Homo sapiens
  misc_feature (55)..(55): n is a, c, g, or t
  misc_feature (80)..(80): n is a, c, g, or t
  misc_feature (117)..(117): n is a, c, g, or t
  misc_feature (120)..(120): n is a, c, g, or t
  misc_feature (126)..(126): n is a, c, g, or t
  misc_feature (134)..(135): n is a, c, g, or t
  misc_feature (158)..(158): n is a, c, g, or t
  misc_feature (164)..(164): n is a, c, g, or t
  misc_feature (169)..(169): n is a, c, g, or t
  misc_feature (172)..(172): n is a, c, g, or t
  misc_feature (189)..(189): n is a, c, g, or t
  misc_feature (196)..(196): n is a, c, g, or t
  misc_feature (211)..(211): n is a, c, g, or t
  misc_feature (216)..(216): n is a, c, g, or t
  misc_feature (220)..(220): n is a, c, g, or t
  misc_feature (223)..(223): n is a, c, g, or t
  misc_feature (227)..(227): n is a, c, g, or t
  misc_feature (242)..(242): n is a, c, g, or t
  misc_feature (283)..(283): n is a, c, g, or t
  misc_feature (337)..(337): n is a, c, g, or t
  misc_feature (339)..(339): n is a, c, g, or t
  misc_feature (388)..(388): n is a, c, g, or t
  misc_feature (391)..(391): n is a, c, g, or t
  misc_feature (394)..(394): n is a, c, g, or t
  misc_feature (396)..(396): n is a, c, g, or t
  misc_feature (408)..(408): n is a, c, g, or t
  misc_feature (411)..(411): n is a, c, g, or t
  misc_feature (471)..(471): n is a, c, g, or t
  misc_feature (477)..(477): n is a, c, g, or t
  misc_feature (480)..(480): n is a, c, g, or t
  misc_feature (483)..(483): n is a, c, g, or t
  misc_feature (485)..(485): n is a, c, g, or t
  misc_feature (522)..(522): n is a, c, g, or t
  misc_feature (527)..(527): n is a, c, g, or t
  misc_feature (566)..(566): n is a, c, g, or t
  misc_feature (603)..(603): n is a, c, g, or t
  misc_feature (607)..(607): n is a, c, g, or t
  misc_feature (649)..(649): n is a, c, g, or t
tcatagctgtgggtcacccagttctagccaaccaggaataaattatagttttgcnacctcagcagatggcaaaaggagcnttccagaactttggcctggtctgcaccaggtaccaanatnaaagcngcaaaaannaccagaagggattttggaaccgnggtacnagggngcnttcattcgaggggatgnccagggntcaccccaaagaggnttcantaangcntctnctccggggtgcgggngaaccaagagtataggagcttcttgcggtagtacaactgcnaggcatgcacttgcactgccaaaaccaaaaacaggaacatgaaggaaacggcananaaaccaaagaggaaacggtaggccttgccatggcggtagagctgctgtncanagncnaacatctccatnctnccataaatgagtggagcgatggaaaagagttccatgctgatcatggagagcaccaggtanctaatnttnttncngggaaaggagagaaggcccaagagagagggcaaaatnctcancaaatacgggtattcccactgatagggcatggccacctnatcatgttacaagagcctcaggtgttccacgctcatnttancaaccagcagcagccatattaccagatgtacgtagatcagcntcttgatttcatacttgagggtga

SEQ ID NO: 585547 - DNA, 126 bp, Homo sapiens
tgctgctcaggtctagaatgtaatatggaccagatttgaaaataaacactttcttttcaagtaaagaagaaaatctaaattaaaaaaaagcaatccttttaaaagtacaaagacctgagcaagcca

SEQ ID NO: 585548 - DNA, 340 bp, Homo sapiens
gtgtagcagtgaatgtcagagtatatgctcgactttattaagtctcaataaattcggcagggtgtggtggcttacgccgataatcctagcactttgggaagccaaggcgggtggatcacgaggtcaggagatcgagaccatcctggctaacacagtgaaaccccgtctctactaaaaatacaaaaaaattagccgggtgtgtggtggcagttgcctgtagtctcagctactcgggaggctgaggcaggagaatggcgtgaacctaggaggcggagttagcagtgagccgagatcgcaccattgcactccagcctgggaaaaattgcaaaacggtctctaa

SEQ ID NO: 585549 - DNA, 537 bp, Homo sapiens
cggcacatgatcaccacgcctggctaatttttgtatttttaagtagagactgggtttcaccgatgttggccatgctggtcttgaacttctggcctcaagtgatctgcccacctcagccttccaagagtgctggagattacagtcctagaaccactgcatttgcggccgtacagcaattgtttgcgtttgtggggcagttcagaagtctgacataaagaattagcttgacgactttgatgttcattcgtttttatcttccatttttcttgtccttccttgctttaagaaatatccttggacttattttcatgcccgtcgattttatttacttcgtttagtgcattctagataccaagaacctcgttcctctatcctatgcttgcgagattgagtcacagcttgtggtttaccttatttccccaagtccatgctccgttgatgtgatgatatagcgctccctcagctttcccctctttccccagtgctcatttatgacccgtctgtgtgttcatttccccttccccataactggcatca

SEQ ID NO: 585550 - DNA, 149 bp, Homo sapiens
tttttttttgaagatatttccctttctactgttggcatcaaatggctagaaatctccacttgcaaattccgcaaaaagagtgtttcaaatctgctctgtctaaagggacgttccactctgtgagttgaatgcacacaacacaaagaatt

SEQ ID NO: 585551 - DNA, 329 bp, Homo sapiens
tccactagtgtaggcatgagggatgcataacattgtaaatatactgcatgctatactttcaaatggataatttcatatgaatttcaattgtaaaacgattaaagcacagcagaacatacaacataaaaagtctaaccaaaagtaaaaaatcaaaccaaaacccacaaacaccatggcagcccaaaaagccttgtattccagagctgaacgtgccaggaatctccttttaaacccagataatcccagtaaggaaagaaacctaagggaaggactgctagcgcccatgcactgagcagaatcacctgctccccagtggacacactccttcc

SEQ ID NO: 585552 - DNA, 165 bp, Homo sapiens
gtcggtcccgtgttcgtctgatgtctgctcgaggctctacttcagcttcctgctcagtgtgtggctttttgctttgagacatagtctcactctgtcgcccaggctggagcgcagtgttgcaatctctgtctcactgcaacctctgcctcccggcttccacttcca

SEQ ID NO: 585553 - DNA, 108 bp, Homo sapiens
gttctctccttttttttgttttcaaccgtaaaagcaaaaatgaacgatgataatctttactggtggaaaggatggagaaataaatcatcaaatgcacccagtttgtga

SEQ ID NO: 585554 - DNA, 210 bp, Homo sapiens
atctatacaatataatgttaggtagccaattaaaaatcaagttttaggctgggcatggtggctcacctgtaatcccagtactttgggaggctgaggtaagaggatcgcttgggcctgagaggtcaaggctgcagtgagctgtgatcatgccattggactccagcctcggtgacagagtgagaccctgtctcaaaaaagtaaaataataaa

SEQ ID NO: 585555 - DNA, 287 bp, Homo sapiens
  misc_feature (204)..(204): n is a, c, g, or t
  misc_feature (275)..(275): n is a, c, g, or t
ggggaggccccggggttgggaaagcttgtgccttcttgggccgaagccaaagccccctttgtccttccctggccctgatgccgaacaggagatgcccagcttgtggggggtgggccttccctccttaggtccttttttatattagtgattttaaaggggacttttcagggacttgtgtactggttatgggggtgccaaaggcantaggcttggggtggggaggtcccgtgttccatataaaggaaccccaaataataaaaggccccacatctgtntgtgaaaaaaaa

SEQ ID NO: 585556 - DNA, 185 bp, Homo sapiens
  misc_feature (8)..(8): n is a, c, g, or t
  misc_feature (75)..(75): n is a, c, g, or t
tcacaaantcatgtcttttgcctcttttgttacccaggttctgtataccaacgcgcgagaaccttggtggaaatnggcccaccaagtgtattttctctaataatcgggttgggacttaactttaaggtgttttcaatgtgattttagtatttccagtaataaataaaatttatacaaagtttcag

SEQ ID NO: 585557 - DNA, 141 bp, Homo sapiens
tgagtctagaggatcccagacctccattcttacattagcacgtctcttgcgatagagtccattcttgcatagactggcattcttgcgatgccggcgacggccgggtatgggcccgactgctccagcgccatccattggcag

SEQ ID NO: 585558 - DNA, 232 bp, Homo sapiens
  misc_feature (1)..(1): n is a, c, g, or t
  misc_feature (13)..(13): n is a, c, g, or t
  misc_feature (18)..(18): n is a, c, g, or t
  misc_feature (24)..(25): n is a, c, g, or t
  misc_feature (27)..(28): n is a, c, g, or t
  misc_feature (40)..(40): n is a, c, g, or t
  misc_feature (93)..(93): n is a, c, g, or t
  misc_feature (137)..(137): n is a, c, g, or t
  misc_feature (155)..(155): n is a, c, g, or t
  misc_feature (168)..(168): n is a, c, g, or t
  misc_feature (170)..(170): n is a, c, g, or t
  misc_feature (178)..(179): n is a, c, g, or t
  misc_feature (181)..(181): n is a, c, g, or t
  misc_feature (188)..(188): n is a, c, g, or t
  misc_feature (193)..(193): n is a, c, g, or t
  misc_feature (221)..(221): n is a, c, g, or t
  misc_feature (223)..(223): n is a, c, g, or t
  misc_feature (229)..(229): n is a, c, g, or t
ntctggagcctanttagnaccttnntnnttagtaatccgnctcccacacagacttcagtgagagtaacatcgtcagaacccccaaaccctgcntcactctagcaaatcagaaaaaagggaaccactgagaaaaagantgctggaaaaacgctggngacgcccttaaanangagggganncnttatagnttaangactcaagatgatggtgaagatgaaaanancacttngga

SEQ ID NO: 585559 - DNA, 129 bp, Homo sapiens
ctagaggattcctttttgccacgattggaggcagatggtcggcatggagactgaagacggctgcgctgaccctaaaagttgctggccaactgattccctggttcttattttatctttttggactaatcg

SEQ ID NO: 585560 - DNA, 138 bp, Homo sapiens
agttcgacggagactctcctctgattagcgatatgctcccccagtggactccatgtaccagtctgtgtgcttgatatcagaggagaggaatgaatgtgtcattgccacggcaggtataatggcagtgagccatacctg

SEQ ID NO: 585561 - DNA, 131 bp, Homo sapiens
accctacgcacaaaccccctctcacccacaaaccccctcccaaagtgctttgattataggtgtgaaccaccatatctggcacccattatctcttgaactgcatcttcagtttcttcctctgggtaccgagc

SEQ ID NO: 585562 - DNA, 626 bp, Homo sapiens
gttgaatgcatagcttagaaaggtcacacgtggaaaattccacgaggatcatgctcagtatctcatcaactcattgcatgattccagttgcattagacacctggcgtgacaagacctgacatcgtaccctagatctgggtctgcagggaggctttgtagccatgctgcacggccctaactagagttctagagtttgtgaatatgattctaagtactccttttatacgcttgctatacaaaatccgctacagggtagtcgatcttagaatgtatgaagaatgatatgcaccagctgtcaagacctaagactgatgtcagccagctgatccggacttgctgtgcacgactatggcagatgctgatgccagtagtctgtgactgatgctgcacgtgtgactaagcagcattatctgcatatgcaatcagcacatacaggcctgtgtgagactgatcagtgtttgcccgttgacccatcagctgcttcccatagttaccactttgaatccaacactctttcaccatcttgcatacgcaacgggatcaggatacttggacgtaactggaagtagagatcgatccaacacgcccacgtaacaagctgtctgatgcattttgggcacgtattt

SEQ ID NO: 585563 - DNA, 208 bp, Homo sapiens
ggtatctagagatccccaaggtaaggagtttgtacttaatgaacacaaaaagatatgatgctattagtcatcacgcgttaaaaatggttttctaaattattcaagaagagcatataggtatgtatatggaaatttccctcaactctatttctagaatggctatgtacaaatccagcaaaacggaacagaacagggtaagaaagcacat

SEQ ID NO: 585564 - DNA, 778 bp, Homo sapiens
gacccacgcgtccgatcaagtagtgaatgtgatctactttgcagagctatagatagaaacagctggaaaactaaaggaaaaatacaagtgtttgcggggcatacattttttttctggggtgtgcatctgttgcaaatgctcaagacttaattattgtgcgcttgttgaaatcactgtaaatgcccccatccggttcctcttcttcccaggtgtgccaaggaattaatcttggtttcactacaattacaattcactcctttccgaatcatggtcattgcataagtgcctttaacgcaaagcaatatggtcactgtaatgggtaattctcttaagaaaccctgcagcattagataagagaatgacgtgattatggataacgttagtaggaagagccttagaagcgctccgcagtgagagtagggagattattgttctctatcttgcccttgtactcttataggagcaatagttaaattagcgagtattagttatgagtttggttgcagggttctatatcgttgtgggctgatttccaaaaaccacatgctgctgaatttaccagggatcctcatacctcacaagtgctaaaccacttactaccaggccttttgctgtgtccactggagagcttgaggctcacactcaaagatcagaggacctacagagcagggctctaagggctgaggaccatggcttacctttgcctgctttgataccatcacaacggcatttacttccttcttgccctgctgccccgttgtcgataaacggaaaaaag

SEQ ID NO: 585565 - DNA, 139 bp, Homo sapiens
tagaggatcccccttgtcagtacactttagatgtatctaattctcctgactgtcttcccagtggagtgtggaggtcttggccgtgtgcccgtgtcctaccaataactgtagaataaaaacataacccactgacaacggc

SEQ ID NO: 585566 - DNA, 206 bp, Homo sapiens
gactattgaacacagctgcggagggggttctgcggcgtgggctcctgtggtatagctccctgggtgtggggtcttgcggcagcagtgccggaaatgttaggcactccaactcaagtcccaagccccaggcatctttcctgccctgccttgcttgcgccatccagtccaggcgcctggagcaagtgctcaataggccgcatccaaag

SEQ ID NO: 585567 - DNA, 198 bp, Homo sapiens
ctcttccggacctcaggatccaaccgcctgggcctcccaaagggcggggattataggcgtgagccaccgtgccggtgtcgatttaagttttcaacggactggataatctaggtggtacatgcacatactttctaatacagaatatgactagggctattagggcactatagtctggcagaagtgaggaagagacccgca

SEQ ID NO: 585568 - DNA, 117 bp, Homo sapiens
ttattgagctgtacctgcttcttctcatcccggtcactgtcaccctcattacttggaggagcctggcagaggctgttgctgtcaaactcctctgccacatcttcctcctcttcacct

SEQ ID NO: 585569 - DNA, 695 bp, Homo sapiens
  misc_feature (373)..(373): n is a, c, g, or t
  misc_feature (432)..(432): n is a, c, g, or t
  misc_feature (560)..(561): n is a, c, g, or t
ggaattgcacgagctttttttctttattagtcctgctagcagtgtatcaattttgttgatcctttcataaaaccagctcctggattcattaattttttgaagcgtttttttgttgctatttccttcagttctgctctgattttagttatttcttgccttctgctagcttttgaatgtgtttgctcttgcttttctagttcttttaattgtgatgttagggtgtcaattttggatctttcctgctttcccttgtgggcatttaatgctataaatttccctgtacacactgctttgaatgtgtcccagagattccggtatgttgtgtctttgttctcgttggtttcaaagaacatctttatttctgccttcattntattatgtacccagtagtcattcaggagcaggttgttcagtttccatgtagttgagcangtttgagtgagtttcttaatgcccgagtctagtttgattgcactgtggtctgagagaccagttaatttctggtcctttacaattgctgaagagggcttactttcaagtatgtggtcatttttgaatanngtgtgtgtggtgttgaatgtatatctggtgaatggtgttgagagtctgttagatgctattaggtccacttgtgcaaggttaagttaaattcctgggattcttgtgaaccttctggctttgaccggctgttgcag

SEQ ID NO: 585570 - DNA, 561 bp, Homo sapiens
  misc_feature (397)..(397): n is a, c, g, or t
ggaaggagtggcctgtactagaggcaactcctgcacgagccctatccaattatgcgataaagagaccaatcctgctaggagagctggggtacgctagagtaccagcgaaacccttcacactttgcgaacatacagtatacacactgttcattctggaccaagcacttggacagcaagtgcctgcgcatgactttatccacataccgagttgtgtagaggctctggaagactcactcagtccagtggaggtggacataggacatgcgcgtaaactgatgtggtcagctttagatggatacttcatacaacagatagaagcattctgcagcattctggattcaggacaacgtgtctactcgatgagttagcagcactgatcggccagctgatgattagnaagagtaagcttagatacacatagtagggcacacacgtagttgagtgttacatcgaacctcattaacagttctactatgcttcagatgactcttccgtctgtacctgtcccatgacgaatatacgttatccacggccaggttaccccctttagaacactgctgg

SEQ ID NO: 585571 - DNA, 336 bp, Homo sapiens
tgcaggatcctgtgtgacttctgctctcggggcctggcctgaccgagacctgggcggctcccactccatgaggtatttctacacctccgtgtcccgtgccggcggcgggagccccgtttcatctcagtgggctacgtggacgacacccagttcgtgaggttcgacagcgacgccgcgagtccgagagaggagccgctgggcccccgtgggataagagcaggaggggcccggagtattgggaccggaaacacacaggatctacaagggcccagggcacaagacttgaccgaagagagcgctgcggaaacccttgcgcggggtacataaaaaccaaga

SEQ ID NO: 585572 - DNA, 156 bp, Homo sapiens
tcaaggtcagttgaatggtcatcgccgacagagcttggcacggctggattgctccggcggcacgtcggcatgaggtcaacgccccgagggtgctgaattgcagcgagcgaatgatcccgctgccaaataacaccagtattacaagccagtaaggtg

SEQ ID NO: 585573 - DNA, 231 bp, Homo sapiens
aggtagactgcattcagaacatactatgcacaaatatctgtacatgtctcccatcatgaaagattcattggcagtgccacaggggattgtcctccttcagtcctgtaaaggtcgaactagtaaaaaccaaattatggggctgctgttgtcacactagcatagagaatgtgttgaaatttaactgtgtaagcttgtatgtggttgtagatcttttttttccttacagaacga

SEQ ID NO: 585574 - DNA, 158 bp, Homo sapiens
  misc_feature (134)..(134): n is a, c, g, or t
ttggtctcctgctctctgtgacatgcatcatgagagcactgtttctcattcccagaaaccctcctcccctgtgctgaatgtcaaaaaaatggtctgaagaagttttttatgttttatatgaatgtgtgtgatcnctctagatgtctgaccttgcatgt

SEQ ID NO: 585575 - DNA, 318 bp, Homo sapiens
ccctatccgtatctcaagatcaaggtacaggtcgagtccagagattaactcagaactcctagtagcacattatgatggaacactttcctacttaggcagttactcttccatgctatatacggtggcctcttctgcaagaggaatctcttggaaaacaggggcacacagaaatttgatgtgtggccaaatgggatgaaaaagatgaggctctaaggaaatgggggcatgaagaccctctcccttcttggtagaattaagataactttgattttatagctttagagctaacgtaacttttgtaaagattaagggatagag

SEQ ID NO: 585576 - DNA, 416 bp, Homo sapiens
  misc_feature (30)..(30): n is a, c, g, or t
  misc_feature (79)..(79): n is a, c, g, or t
  misc_feature (83)..(83): n is a, c, g, or t
  misc_feature (91)..(91): n is a, c, g, or t
  misc_feature (104)..(104): n is a, c, g, or t
  misc_feature (115)..(115): n is a, c, g, or t
  misc_feature (135)..(135): n is a, c, g, or t
  misc_feature (141)..(141): n is a, c, g, or t
  misc_feature (160)..(160): n is a, c, g, or t
  misc_feature (167)..(167): n is a, c, g, or t
  misc_feature (170)..(170): n is a, c, g, or t
  misc_feature (178)..(178): n is a, c, g, or t
  misc_feature (182)..(182): n is a, c, g, or t
  misc_feature (196)..(196): n is a, c, g, or t
  misc_feature (274)..(274): n is a, c, g, or t
  misc_feature (278)..(278): n is a, c, g, or t
  misc_feature (282)..(282): n is a, c, g, or t
  misc_feature (316)..(316): n is a, c, g, or t
  misc_feature (323)..(323): n is a, c, g, or t
  misc_feature (328)..(328): n is a, c, g, or t
  misc_feature (338)..(338): n is a, c, g, or t
  misc_feature (407)..(407): n is a, c, g, or t
ggagatgggaaggggggatcctaatggagntgacccctagagtggggagatccaggccagcagaacgggtggttatagntacntcttgggntagaaggtttgtngttcatagttngattagtgtgtccttagganataggnccagccctagagattagcngggtggnganggtaagtntctngacaggggttagtntccaccctcgaggcatggaaccattcaggggaagcctgggatgtgtggcacaggttgactcaggctgatataaaattnttanaatnagtaataaaaaaattataaaatctgttgcttgtntgaatanatttntgcaacagtnttgcttttgttaaaatcctggagccgttaagtcctgaatattattatgggaataattgttggaatgaanaaaagcaac

SEQ ID NO: 585577 - DNA, 125 bp, Homo sapiens
ttttttccctttgcccccaaaagggggggcccaagggacgagttttttttatttgggaggagcagggtgagggtgggggccccaggtttccccctccccttcccaaataaaaatgggggttttta

SEQ ID NO: 585578 - DNA, 402 bp, Homo sapiens
  misc_feature (1)..(1): n is a, c, g, or t
  misc_feature (77)..(77): n is a, c, g, or t
  misc_feature (82)..(82): n is a, c, g, or t
  misc_feature (84)..(86): n is a, c, g, or t
  misc_feature (95)..(95): n is a, c, g, or t
  misc_feature (98)..(98): n is a, c, g, or t
  misc_feature (102)..(102): n is a, c, g, or t
  misc_feature (150)..(150): n is a, c, g, or t
  misc_feature (192)..(192): n is a, c, g, or t
  misc_feature (194)..(194): n is a, c, g, or t
  misc_feature (201)..(201): n is a, c, g, or t
  misc_feature (235)..(235): n is a, c, g, or t
  misc_feature (250)..(250): n is a, c, g, or t
  misc_feature (256)..(256): n is a, c, g, or t
  misc_feature (271)..(271): n is a, c, g, or t
  misc_feature (306)..(306): n is a, c, g, or t
  misc_feature (313)..(313): n is a, c, g, or t
nactcgccccctttctgcattaaaaggcttcattcctctttaacccaacagatcttgccattttctccaagctgtanatacnannnggggggggntgnaggnctgcaggaaatattttatgttctgctaattttactctttcagaaaganttgcgacagtatcacccctcttcacgggaacagcttcttgcnanataatcngtccagcatccacatcttcagctacaaagtgtanagtgcacccagtaantgtgantccggtttccagggnttgctcatgggcatttgagcccttaaaagaagggngcaaggntgggtggatattgagcatttttccattccacttttggacaaaggggccagaaagaattctcatgaatcctgcaagacagactatgtcta

SEQ ID NO: 585579 - DNA, 102 bp, Homo sapiens
  misc_feature (6)..(6): n is a, c, g, or t
cagagntcctggacgagccataccctggaccccagcagccttcatatccccttccctcagcccccacagcagtcttactatccacagcagttgatatgtctg

SEQ ID NO: 585580 - DNA, 553 bp, Homo sapiens
cagagttagagttcgtactggtcaaagagctcagtatagaacttcttgaagaaatccttcttggagctctgcatcacattatgacacagcgcgcctcatcgtcctgcaacgggcgggtggcgtggcccactatctgaagcacgtcatagctggggcctgccagataggcgtgggtctagcgaatgtagtactgggtctccatgtagtgattagcaggtgagcagacacgttgatgccccagcagagagtccgagaagtccaccaccaagctggatagcccctgagctgaagagctgctccagcaggcgtcgttccatggggctgagcccctcatgcaggtagcccaacccatttagcagcgtatccttgagcgtgctgtcacttagcttctccaggtacggaatcagatccttctcggtgcagtgcaagaacctctgccgttggatgtctgctgcacaggtggtgaggatgtcaatggcagtgaggcgggtctgcttgcgagacggcacaaagacaatgacaggcttcttgggcgagtgcttggtgatagcat

SEQ ID NO: 585581 - DNA, 458 bp, Homo sapiens
  misc_feature (449)..(449): n is a, c, g, or t
tagaggatcccctggcgaggctctctacctccccctaaatataaaaatattgtatgggttggttatttttatttttagccctttctcctacgcttattatcctccacccggtacagtagggttgtctggtacaggactcaaacggggaaggcagattttcttcaaccactttacacccacttcttagttgagacagatggccagagtcctatgtaatctaacagattcggggggtgtcaagggatgtggcttctttatactgtgctaaggaagccctggtgtggtgtgtctgtgatgtgtgtctgggatgacagcagcaataataccatctattttctaggcagaagagaggcaaagagaggcgcagcgggtctcattggacagccaggaggagtggaaccagatgcagagccgggaggatgagggggccatcacggagcaggatcggnaacttatga

SEQ ID NO: 585582 - DNA, 604 bp, Homo sapiens
gcgaaaggaaagaaggccagggaaagaaggtggctccggccccagcgtgtcgtgaagaagcaggaggctaacacagtggtgaatcccctgtgtgagaaaaggcctaagaattttggcagtgggagaggacatcctagcccaatagagagaccttcaccgcgcttgtgataagtgggacgccgctatagtcgatggttgctagcgggagagagcacatcctctataagcgggctgaaagtgctctctctgcagattaacctacgttcatcccaggcgcctggaccgccaaacagctactcagctgcttaagctgtgcccgacacagtaccgaccaggagacagaggacaagagaacgaagcagagactggtaggcccgggccgacgaagaaggcgggctggcgaaggggacgtcccaatggacggagacccaccatggtccctatctgacgcgaggtagctgtaaacagcgcgttgcactcgacctgtggctggagaaccaggaaatgctctagcgtggtggtgtatcgcgacacgacgtggatcccatcgaggctggttgtcctgcttgcctggccctgtgtcgtacacctgggggtcccttac

SEQ ID NO: 585583 - DNA, 167 bp, Homo sapiens
ctaggtagactaacccagctagaccaacatggtgaaaccccatctgtactaaacataaaaaattacctggcatggtggtgtacgcctgtaatcccagtgacttgggaggctgatgcaggagaatcgcttgaacccggaacaattcactacacgttatgtctacctgg

SEQ ID NO: 585584 - DNA, 385 bp, Homo sapiens
  misc_feature (21)..(21): n is a, c, g, or t
  misc_feature (105)..(105): n is a, c, g, or t
  misc_feature (249)..(249): n is a, c, g, or t
tgtttccctgccacattagtnccctttaatggcagggaaggcccatctggttaacctgtattcacaaactctcaagagtttcctacttatttcaggagcttaagnatttagataactcagccgggcgtggtgactcatgcctataatcccagcactttgggaggctgaggcgggtagatcgctagaggcaaggagttcaaaaccagcctgggcaacatggtgaaaccctgtctctactaaaaatacagnaaattatccaggcgtggtggccggcatctgtaattccagctactcagaaggctgaggcataagaattgcttgaacctgggaggtggaggttgcagtgagccaagattgcaccactgcactccagcctgggtgacag

SEQ ID NO: 585585 - DNA, 106 bp, Homo sapiens
tgttatcgaggctctgtacatgtacgtggtcgcaaggtacgcgtatcgatggcgcagtggaaggcggcgcaatatgatccaaggcctataaatattcgggagtata

SEQ ID NO: 585586 - DNA, 699 bp, Homo sapiens
gcgactgtctccgccgagcccccggggccaggtgtcccgggcgcgccacgatgcggccgcggctgtggctcctcctggccgcgcagctgacagttctccatggcaactcagtcctccagcagacccctgcatacataaaggtgcaaaccaacaagatggtgatgctgtcctgcgaggctaaaatctccctcagtaacatgcgcatctactggctgagacagcgccaggcaccgagcagtgacagtcaccacgagttcctttccctgaactgggacctttagtggtggccatttagccaccatctttgcaggttgctttgccctggtagggcagtaacattgggtcctgggtctttcatggggtgatgctgggctggctccctcttggtcttcccaggctggggctgaccttcctcgcagagaggccaggtgcaggttgggaatgaggcttgctgagaggggctgtccagttcccagaaggcatatcagtctctgagggcttcctttggggccgggaacttgcgggtttgaggataggagttcacttcatcttctcagctcccatttctactcttaagtttctcagctcccatttctactctcccatggcttcatgcttctttcattttctgtttgttttatacaaatgtcttagttgtacaaataaagtcccaggttaaagataaaaaaaccggaattc

SEQ ID NO: 585587 - DNA, 326 bp, Homo sapiens
accctgaccatgatctgtgttacgtgaacggatccgcaaggggctacagctctatacatctgcacccactgagccttatttgtcttatcagaactatggtgagctcttcatccaacacagattcatctggttagtggatgacaccaacgtctacaacgtgcactattcacaagcacctttgaagggaacttgacaccaaagcccaatcaacgggagccatcttcatctacaaacccacgcacaggtacagatgttcctcaagataatccacacgtccagtgtgtgagcgggcaagacccgtatggagctgaagacaaaggtgcatt

SEQ ID NO: 585588 - DNA, 816 bp, Homo sapiens
  misc_feature (420)..(420): n is a, c, g, or t
  misc_feature (447)..(447): n is a, c, g, or t
tggaggcccccgccccggccccccccgtgggccaatggcccacacccgcccaggatggaccacagcggcctttttccccaccccacctcccttatccccaaccccatgggagggaataattggcgcaaacacgagggggagggggaagaaatagggacgccccgagacaggttccccaggcgccccgcgcttgtttgttctcttgaagaagataacactctctgtataaaagaggaaatatatggtgttgggaatatatttgttcatattccaccacattgtataatatttctggggacaaaaaaatgttttagaggtcccacacccctctttatgaagaggatactccggggataggacaccccaaccccagacctcttcgcggagacgcttgttttctgtgtccccaacatcttctgngaccattttacatttggtgtggtgtgngacacccaatgagggccaagatataaaatactctctaagaggaggataaaaaaacccttgggttataaaaaagacccaaagatggacccaccaggaaacacccagtctttattcttcggagccaattcccagagcaacactttttttgttggtaaggtacacttagacctggtacctataagatagagttgggttgttgatgagaatgggtataaaaggcccaagattaaagggttcctttttttttccctttttgtttaatgaaattgcctggtttaatttttttggcccgttttgaagtaatgtggtgaaaccaaggttgtcccaccataaaccgggattttaattttgctgaggtggtttttacca

SEQ ID NO: 585589 - DNA, 101 bp, Homo sapiens
ctggggtaagaagaagtgaggctcacggatggggcaggctgagagggcaggtagtggtaggtatcctggggctcgcgtgctgaagaatctggtcctgaaaa

SEQ ID NO: 585590 - DNA, 503 bp, Homo sapiens
acgcttttaatcaagcacatgcacgaaactaatggctctaaattatcattcattactcactttgcggtgggttacagtgccttcatatcaaaatgtcagaattcgaaacgaatgagcatatgcatgaattagtacaagagttacaccgtatgaataatggcagacatatttgagccgaggcctgaccaactttacttaccggagctggtatgcttatgggatattgggtgtatggcaagatttgttgataggtcagagaagacctagtccacggtatgtgcatgatcaaaattgaggcgtacgatatagtggttccgctgaccaaggggatatggttattcaaacacgtttgatccagctttgcgaggacggcgccagaaaaacaatcccttccgtagctgcctgaatatggttgttctttaaagcatcaacagattccagggtagagctcttgcagatttgtgcctggaataacactagctacctgcgggcaagctctactt

SEQ ID NO: 585591 - DNA, 377 bp, Homo sapiens
  misc_feature (176)..(176): n is a, c, g, or t
tgcgggtgatcagaggatccccgtcgaggaccaacaagaatgagtgtttgatggtcataggattagattttcacacagtcaattatagtagcatttttgatctttcatctgagataatttttatcctggctaaataacatactttaacattttctttaagctaaagtctggtggtnggtatcagaattttccagttcggctaaaaatgtcttgatttcactctcatacttgaagaatatggtagtagggtatagaactccaggtagacaactatttactttctagatattaaagatgtcgttccattgccttctgctggctaactgtttcttctaagaagtcagctaactaactactggttataattataccgtcct

SEQ ID NO: 585592 - DNA, 560 bp, Homo sapiens
cactgatcaccggagacagagatacgggacctggtcaccaggacgagaacagacgaacagagaggacatccgagaaatcagcatcaatatactcagtcccagagagcagcattataataaagaggagaaggaaaagcaacaagaacgaatagacacgaaaacaaaacagaaggatcaaatgacacccacgaacacgagagaaaaaacaaaacgagaagaaaaaaagaacacgagacaacagaacaaacaaacacacagaacacctacaacaacagaaacatagacaagaagcacacagaagacaagacagacaacaaaaaacacgatgaaacacaacaaaaccacaccacgaaaagaacaagccccaagagacacgaaaaaaagagagggaccagaatgagagacggcaacccgaaacaagaaggaaacacacaaaacagaaggacgcaccggagacaacacagaaagcaaagcacagcaaaagaaaacaaacaagaccaggacagaaccacaggaccgaagacaaaaacaaacagcagaaacaaccacaacaaagaaga

SEQ ID NO: 585593 - DNA, 276 bp, Homo sapiens
  misc_feature (79)..(79): n is a, c, g, or t
  misc_feature (93)..(93): n is a, c, g, or t
  misc_feature (98)..(98): n is a, c, g, or t
  misc_feature (100)..(101): n is a, c, g, or t
  misc_feature (103)..(103): n is a, c, g, or t
  misc_feature (113)..(113): n is a, c, g, or t
  misc_feature (164)..(164): n is a, c, g, or t
  misc_feature (186)..(186): n is a, c, g, or t
  misc_feature (195)..(195): n is a, c, g, or t
aagcaggaatgaaagtggggctttttccgccccaggggtccaggacaatgtttgaggccagatggaggggatgaggggncttcaactcacttnatccntnntnccataaacanacaaagcaactacacctggatttttcaaacaacttttatttcctcagagtnttccttaatcctatggaacaanaagctgccnctgaatagggcccagtatagggggttggttttttactccctccccccaatataaaaaaatagacttttttttgtggtccca

SEQ ID NO: 585594 - DNA, 356 bp, Homo sapiens
tatcagctacaagctttcctgccattggcctgtggttgcagcctgtcttcctttgaaatggtctgactctctgagttatatatgctggaatccaatgcggagttggttgggactgtgatcaagacacctttcattaataaagaagagacacaggtgtagatatgtatatacaaaaagatgtacggtctggccaaaccaccttcccgagccttgatgcgtacaaaaaggggagaagtcaagagcgttgtcactcttccagaacatggttgctgtggaaaagctatctgtaatgaaagtttcggaagtagattggaaccctatggttctagatcagacaacacaaaagacatgaagat

SEQ ID NO: 585595 - DNA, 176 bp, Homo sapiens
gatatagaggatacccgcggaatacctactactagctataagtagcgctccgggtactacctacaggcggggacgcagagtcctagcagcctatacagtagcctaccatagccccctagacggcctagctagcctaggcagacaacggaagccactagctaggtagtatagcacta

SEQ ID NO: 585596 - DNA, 365 bp, Homo sapiens
cgacatttgagcccccatccaatctcagacatcaaagtgggaaatttacatgctctgaaagactgaactaagataaatgaaaatctctccagatatgtgttttaaaattccttcgagactacattgagtttggatcatgaaaacagagttcaatttgttcttttgatttttcccagtttcgcatttttttttaatatcctttcaccacttctcagcgcagaaggctctgcatgtatctgtggcctggtctcaactctcaagccttcatctcctcatcctcttagtcctgcctgatgcctgggctgagtcccaactctcaatagatggccagtgtgtgtgtgtttcccacaggatgccgtcgacgc

SEQ ID NO: 585597 - DNA, 153 bp, Homo sapiens
  misc_feature (7)..(7): n is a, c, g, or t
gatcgantgcagagggtgctctgggaggtgccttcccgccgccccctcccccgtatcgaggaatcatttccccctgacgcctctagtaggaggagatcttcccttccccgccgcctcctccggtcggaggcgggagggcctgagagcccccat

SEQ ID NO: 585598 - DNA, 148 bp, Homo sapiens
acgactcgggcgactccggagaacaacagctgcgttcccctctatcacctgagtaacttgaggactgaaagttctcataagctgaatggtagtcgggaagcccatgggagcccaggtggaaggccatgaccggagggacgctgccctg

SEQ ID NO: 585599 - DNA, 179 bp, Homo sapiens
ggtcgacatcctacttatctggtcacccgaagtctgggcattttgccttttgtagggggctccttgctggacaatatctccagacgttctagacggctgaatatcctggtctattcgcttgccttgtaatttcggttgtctacttatgtgcacagacgtgccttgctctagccgtcatc

SEQ ID NO: 585600 - DNA, 114 bp, Homo sapiens
gctgcgcgggctgactactgtgccagcagacctccactggcccgaacatgaagatcaaggtcttcaattcgccgcagaaggacttggtgaaggatttcaagtcggccatcgact

SEQ ID NO: 585601 - DNA, 159 bp, Homo sapiens
acttaacggagttagtggtctgtactctattgtctggtcttcacattccaaggggtctggagacttgcaggaacaggaacagcaccttagccaagagggttccaggcctcctgcctagtgctgggtctcctcgttaggtcccaggaataaattgagttc

SEQ ID NO: 585602 - DNA, 248 bp, Homo sapiens
cgtcgaccggcatttggagcagcgtaagcatgtaggtgagatcgcttggttcaagtttgaggggcttaagttacggcttgcggacaacactttctacacacctgacttcgtgctgatgttgtccgacggcgtcatggaagcgcatgaggtcaaagggttctggatggacgatgcacgcgcaaagatcaagatcgcggcagatatgtatccattccgatttattgccgtgaaggctcaaacgtcgacgc

SEQ ID NO: 585603 - DNA, 374 bp, Homo sapiens
attaataattatagaggatgcaccggcacggtgactcaggcctgtaatccctgcactttggggagccgaggcgaggcaggtggatcaccgaggtcaggagttcaagactcagccaggccaacatggtgaaaccgcgtctctactaaaaatacaaaaaattagccaggcgaggtggtggatgcctgtaatcccagctacttgggaggctgaagcaggaatacaggattgacaggaagattaattttaaagtcagacagaattctactcctgccacttactaattagctgtgcaatcctggtcaagcgaacacttgtgttttcttctgacaaatactgccttaaagggtttttgtgtccattaaatgggatcaatt

SEQ ID NO: 585604 - DNA, 378 bp, Homo sapiens
tcctgctggacgacgaggccagccctgcgcgactgctggcttatgtcacagggccagaggacatggacgcacgcgccatccgccaaggcctgcgtgcagacctgcccgagttcatgctgctcgccagcgtgaccatgctgagtgccctgccactgacccccaacggcaaactcaaccgggcccgtttgccggccgtgcacggtgcgccacgccatgacgccggcgcgccccaaggcccgatggagaccgcattggcagcgatctgggccgatctgttgcacacaccgcacgttcgccgccacgacaacttcttcgacctgggcggacactccttcctggtggtgcagatgatggaccgcctgcgcgcgatgcagctgg

SEQ ID NO: 585605 - DNA, 261 bp, Homo sapiens
aagcaagccaccgaggggatgctggcttccagatgcgagtgggttgttcctggggccccgttggccaggctgtggtaagctggggcccgatgggggatttgggtgttgggaagatactggatgtggtggtttctcccccgccttggatttgcgcacgccactcttttttaggcagggcgagggggataggggttacagcgtcgtttggcacccccttttaaaaacgcatctttcgtttataaggccctgaaaaaacaaaaa

SEQ ID NO: 585606 - DNA, 1528 bp, Homo sapiens
  misc_feature (310)..(310): n is a, c, g, or t
  misc_feature (518)..(518): n is a, c, g, or t
  misc_feature (521)..(521): n is a, c, g, or t
  misc_feature (584)..(584): n is a, c, g, or t
  misc_feature (1044)..(1044): n is a, c, g, or t
ggagagagagaactagtctcgagttttgttttcttgtttttttggagacggggttctagctgtcaccgcagggcgtggaggtgcaggggtgtgtgtgacgtgaaagctcacgtgctaacgctgtccggccttccgtgggactcaagggtgatccgtaccttgtagtcctccccgagaatagttgtgagaacgatacgagggtggtgcagccaccagaagcccgaggcgtaatctgtgtgtgtggtattctgtgtgtggcgataaagagagcagagaggttctgcacctatgtgtgtgtgctcacatgggngcgtggtctcctcaagagcactcgcgtggagatctcacacgtgtgatctcacggcacacagcactgtgtggggcccttccacaaaagtgtgctgggagaattatagcagggagacgtgtgagagccgcacccccagcggcccggtgggcggctctctatctgtctcgcacagggtgtctatagacacgccgtctctctgtacacaggnagnggacaccgctctgtgagaaggggccctgtgtgtctgtggccacaagtgtgagaggagaggggncttctccgggggtggaggtgtgtctcaatagagggggggagacatctctgtgtggggggacatgtgtgacacctctcagcggtgtggggggggagcccaaactctctctcttctctgtggtgagagagatagtgacgcccctgtgggttacaaaggccgggggcgacagaggcgagagacacacagcggtctcctctctatctcccgagtggaggggtgtgtgattacacagatggttgtgttaccacagtggggggttaaccaccagggggggcggtcacacctcttgagagaagaccccagggggcgtgtggggggcgccctgagggcgaggggacgatttaaagagccactctctcacacaaaggcgccccccatttaggagagaatgggtacccctgcagaacaaatgcctcccaaagggggtctccccccccggggtgtgggctcttccaacaancccctggggaggggggaggactgtggtggggccacacacatctgtgcacagcggagcagacaccccccatggggatatctccccagcgggggaatataccctgagaggaattctgcgccccccgcgggggtgcaacacacgccggggctaagagtgcgcgcgggacaaccaccaaaacacaaagacacatcccagggaggggccaacacgggggggccccattagcagaccagactgcaataaaccccccgctgatcggatgggcgcgcgcaacacaacaaacatcgggtgctccccccaaggaaggccttcctacccggttcgcccaaaaaagggcccaccacatggcacaactgcgggtgggagacactccatcacccacagatgtggggcgaccgacgcagcaatacccccacaacacagaacttctattatacacccagcagccagacaaacacggatgttactcacgagagatacaccc

SEQ ID NO: 585607 - DNA, 204 bp, Homo sapiens
ctagaggatccctcgcagcagacaacagcataaaagcatttctgtttttcagtggcttcgccagcatctgttgtttcctgactttttaataattgccattctaactggtgtgagatggtatctcattgtgtttttgatttgcctttctctaatcgccagtgatgatgagctttttttctgttgtttgctgcaggggtaccgagc

SEQ ID NO: 585608 - DNA, 286 bp, Homo sapiens
cagtcctacacttgcttgcagaaagctaagatcaaaaaaaaacaaaaggtcagacactatggctgaggcctacaagtccctagcacttttggaggctgaggcaggaggaccgcccgaggtcagtagttcaagaccaccctgggcaacacaggtagaccccatttctacaaaaaataagttagccatgtatagtggtacgcttctgtggtcccagctacttgggaggctgaggcaggaggattgcctgagcccgggtatggtcaaagctgcagcaagttgtcgactg

SEQ ID NO: 585609 - DNA, 158 bp, Homo sapiens
atctagaggacccttgaggcaggacactggagaggcctgcacgaactccatcccccgctggtgctgagcttcctgaccaggtacacccggtgccagtcgttctccacccggatacagaactgcttgacttgctgcaggtagcactgcttctcctggcc

SEQ ID NO: 585610 - DNA, 556 bp, Homo sapiens
  misc_feature (9)..(9): n is a, c, g, or t
  misc_feature (28)..(28): n is a, c, g, or t
  misc_feature (47)..(47): n is a, c, g, or t
  misc_feature (92)..(92): n is a, c, g, or t
  misc_feature (453)..(453): n is a, c, g, or t
  misc_feature (455)..(455): n is a, c, g, or t
  misc_feature (492)..(492): n is a, c, g, or t
  misc_feature (506)..(506): n is a, c, g, or t
  misc_feature (508)..(508): n is a, c, g, or t
tacccaaanggaagaaaaaataccctanggtgtgatatatttagganttatatattacctacctatttgcctgtgaagaaagtcctccctgnctaaagatggctttcagataaattttaatttcccctatgagtcttttgcctattccctataattcatgcctttttgttagaaactaatataggttttgtatgattttttttttcaatgagcaaaaataagttaaataagtaagtaagtgaacaaataaacaggtagtttaaagcaaaggaagggccccaacgtgatgactcacgcctgtaatcccagcactttaggagactgaggcggcagatcgcctgaggtgaggagttcgagaccagcctggccaacatggtgaaaccccgtctctactaaacatgcaagaaattggccgggtgtggtggtggcgcctgagcccagctacttgggagntnagcacaagaatcgcttgaacctgggagcggatgttgnggtgagctgaagantnccattgcacgccacctggggcaacaagagtgaaactccatctcaaaag

SEQ ID NO: 585611 - DNA, 396 bp, Homo sapiens
tcagcagtatggctctgacatctcttagatgtcccaacttcagctgttgggagatggtgatattttcaaccctacttcctaaacatctgtctggggttcctttagtcttgaatgtcttatgctcaattatttggtgttgagcctctcttccacaagagctcctccacgtttgcatagcagttgaataggttgtgtgggtgggctgttgggagtgaggatggagtgttcagcgcccatctttcctggtccggttacaggtcgtccgtccgacatagtgagtattggtataagaggggggggttccattccaaagcgtgctcaaataatggacatgttgtcccccgtgtggcttaaatagttttttctatcaaattaagtcgaatatatgtttttcac

SEQ ID NO: 585612 - DNA, 992 bp, Homo sapiens
agtttctgtggctcattacaggggcatctgacctcctgccgcccagcatagacacacctcacagactggtcctgcccatgcatgagccctggaacggtgtgagcactcttaaaaccccccacaggccgctccaggtcctccagcttcgtgtcagatggagggctctcgtggcctgagatcgccactggtaggcctacgtggttggaacgagtgctctgggaataaacagctagccctaggctcctcagagggatccctggcaacccaggaggcctcctgacaccagcctaaaatcctgaacaggcagggtctgccctcttgcagtgtggtgcgatgcccctagtcctttaatgggttcgggtgctaaggggctgtgctccaaagcaatgggctggggcagcctgcagctgccaccaactggtcttcacaccagattgcacaggatactgggtcttgtctatcttgatggagaagaggggttcctgcccaggatcttacaacacagcaagtagcatagagctctttccttcctctttttggggaggttggggtcaggcgttgttctttgagatttaagttttcattttgaggggtaatcaccttcaagtaaaacagtaatagcaagagtgaaggtactttggaaaccactaacacctctgcacagggcagtttagccagctcaagttcttcttcagagacaggggacttggccagtggtttaagtaactgccccttcaactctcagacgagcagctgacgaggcagtgggccagtctggagtctgttcaggaaagtgttggagctggtcttgaaccgcagttggccctcaaacatcaggatggttttttgtttcaaagcggacttcttgtgccatggggctggcagactggtcataaccccgcgggcaacgcctcgtagcccccacgggaagatcaacccgcgttttattaagaaacactacggagaacacccgctagcccaagctaagcgac

SEQ ID NO: 585613 - DNA, 275 bp, Homo sapiens
  misc_feature (2)..(2): n is a, c, g, or t
  misc_feature (164)..(164): n is a, c, g, or t
angttgtgcggtgatctagaggatccctggagttgtgataaatgacctagttctctcttttcaaggagttacaccctagtgacagagactaaagaagtactaatatatggaaaaatatggtaatgaaagtgttataagagaaattagaactcagatgaacacangaagtggatgtatatacatctatgcctatgagaccagtaggtgtcacgaaaaacgcttttattgaagaggtaaccttttattctcttaagaatttcaagtggtatccgagc

SEQ ID NO: 585614 - DNA, 473 bp, Homo sapiens
ggtcttgctttatcgaggtggagttttgctctggtggccaaggctgcagtacaatggcgcaacctaagctcaccgcagcctccgactcccaggttcaagcaattctactgcctcagcctaccaagtagctgggactacaggcatgcgccaccaagcccagctaattttgtatttttagtagagacagggtttctccatgttggtcaggctggtctcgaactcctgacctcaggtgatccgcctgcctcgacctcccaaagtgttgggattacaggcgtgagccagcacgcctggccacaaactacttttcaatggcttcagagtattccaatgtatggatataccagaatacacttaaacctttctgtttacaaggggattcagactattttcagtattttaccattatgcacaatgctgtagtaacatttgaacttctaacctctaatttcggattcaagtgaagcaagtga

SEQ ID NO: 585615 - DNA, 405 bp, Homo sapiens
ttttttctctgtctcattgcggtagccatcgattgtactatgcattgatgtagtctctcccggggacgccatcgatagaggttatgatgactcgagagtggtcgtaagcgatgatcattcgcattgcgtttcttgggcttgttcacctccatgtttgacttctccctcgttaactgctgtccagggtcgatatactcatactcctgggagaacttgaggccatcgttggctttgaggcgctcgatgttgtccgccagtgctcgagcatatgagaatccctctacgtggtctcgcatacctggggtctggtagttgagcctccgcatctccacagggtcagaggagtgggccagcaaggagtccttcagtccgatcgactgctcatccttagaggacggagagtgg

SEQ ID NO: 585616 - DNA, 703 bp, Homo sapiens
ccacccgcccagcgccccccacggtgtgagcagatcctggatggatgtgctggggtgctgccggcagaggatccatgtgttcaccatcctggcccctggaagatcccccagttcccttcagtgatgatggacgtgatgctgtgatgggcccctggtgagatgcagctctaccatgcaaatgcctggtgcctactgtggcttgccaaccatgtggcttgcagcagtgctggtgcaactgttgctgagtgcaggaggttgtgatgctccctgcagctgacgcctgtgcgagtgaccctgtgatgctggcgacgcgtgtgccccagcatgaacgcatgtgccagccattacctggcacgcctgatggcttgcctccctcaggctgaccatctcgtgtggccttgcaggctttggggcaccgctgccaccaatggtgggcctggcacccagggctttccctgcggtggtcctgtctgagcccatgactggcattcactggggtccccatgccactgtgggtgtttgacacaaggctgcaccatcctgattgcttgggaggctagctggttcatcctgtcgtctcattcatgccgagttggttggggaccacacccagcttggctccgtcctgctgtgaactgagggccccactggggttctggaagaggataggggaccattattgctagtaaattgttgattctga

SEQ ID NO: 585617 - DNA, 552 bp, Homo sapiens
caagcagatgcagcagatccgcatgtccctatcgcgggaaggctgtgtatgctgatgggcaagaacaccatgatgcgcaaggccatccgcagggcacctggaaaacaacccagactctggagaaactgctgcctcatatcctggtggtgaactgtgggcctttgtgttcaccacaggatgtgacctcactgatgatcatgggcacatgtttgctgtgccaataatggttgccagctgactgcccgtgcttggtgccattagcacccatgtgaagtcacttgtgccatgcccatgaatcacttgtgtctcagggcccagagacagaccctaccttattatccatggctattacggtactcaccagctacaaatctcacaggggcaaccacttgacacatccctgacgtggactgtagcacgcttgactcacatgaccttgtgacgaccacaactgtggtgacgcccagactgacagaccaccagctgactgcacacactgctacacacatcatccccacatatctacctatatggggactgggtcaatccgac

SEQ ID NO: 585618 - DNA, 256 bp, Homo sapiens
accctccctaaggagacctggcaaggagattgagcagaagtacgacatgtggagaagagatcctggtatggagcctccctccctgctttggagctcagctttgttctgtacgcttctcttcctgaggctcagacatctcttgcgctatccctcattgcttctccagtttcacggatgctagtctgccatgcacagagtgaggcagctgtatgcaatcaagggacatggacaaaataactaggctacccaggtaagt

SEQ ID NO: 585619 - DNA, 603 bp, Homo sapiens
  misc_feature (420)..(420): n is a, c, g, or t
  misc_feature (433)..(433): n is a, c, g, or t
  misc_feature (439)..(439): n is a, c, g, or t
  misc_feature (441)..(442): n is a, c, g, or t
  misc_feature (453)..(455): n is a, c, g, or t
  misc_feature (462)..(462): n is a, c, g, or t
  misc_feature (465)..(465): n is a, c, g, or t
  misc_feature (467)..(467): n is a, c, g, or t
cccacgcgtcggcccagcccctctcagagcgctgtctatgtcctgctccatggctattccttgtcactccagctccaatgtggtggtggagcccagtgggcttctagagttgaacaacttcaccagtcagcagctagatgacgacgagacagccatggagcaggacatagacagcagcacggaggacgggactgagcccagcccctctcagagcgctgtagaacggtcctagtgtgcagacgccggagtgcactttagagcctgcgtggttaccaaatgtccaggaaacttaaaatttgttatagtaaaaaagaaaaaaaaaaaaaggaaagaaagaaaaaagagcacttggcccaatattaggcgggggacctaaaagcttttaaacaaaattaaactcacagaggaaggtactttaanaaaagaaaaactnagaaanannaacaaaaaacnnncagaggnaancngaggcaccccatgggagccgggccccttggtggggggaaacgcaggggagaagagagactacccgggggaggggcccaccgacggggttcccatggagccatataccaccatagtatattaacacaaacacaaaag

SEQ ID NO: 585620 - DNA, 650 bp, Homo sapiens
cgggatggaggcggcggccggagtgtggggctggggctgcctatatatccgcgtacccctggaggagacctacaggcagcctactgtaggtactagaggacccgcctagcatagccaggtatctccgggaggctataggactatgggagcctatatgaacgtagccctatgagaaggcggatacagaagggggcaggtattatacgcatacatagtagttagagcccctacacatagcaccctaccaaggtacctagtacgtgggataggagcagctatgctggagacaaggggcataggcctacagcggtaggcgccgggagcctaggaaacctaggccggcgtacaggcacatacatacctaggtacctactacaggaaaggggggcgtagggaaaagcaccatactaccacggagctaggccctaggcactagcgccatagcaggcaagaaggtagggaatactaggatagtaggacctagtagtaggcccccagtaataccccgcatagctacggggcgcagggcagggctagtagcaccagttgcgaccgaggctagggcaacccgtactatcctaggacctgggagcagagcatattagctcatgtattgtgggctatcctgctggagaagccgggagaggccg

SEQ ID NO: 585621 - DNA, 642 bp, Homo sapiens
ggcaggaagggccccctgtccagtggacacatgacccatgtgaccttacctattattggagatggttcacattccttaccctgcccctttgtcttatatccaataaatatcagtgcagcctggcatttggggccactactggtctccgcgtcttggtggtagtggtcccccaggcccaggtgtcttttctttgaaaaaaaaaaaaaaaaaaaaaaaaaaaaaaaaaaaaaaaaaaaaaaaaaaaaaagggggggggccaaaaaattcccccggggggcccaatagacccgacagtttttgttggtcgaaccaagaggggcggcccccccaatagaggagagcggcgcgtatatgaagacggcagagagcacacacggggccgcgcggagttttacaaccacacacacgctggcggagacgagggggaaaaaacagcgcgcgctctaaccagcgagggaagacaccaccttgctggggggaaggaagagaacccccctataatacgcgcgggggggggggcgacaccaatatggtggggcacaaaaacctccccatccagagagagattttggagacaggccccccaggggggacaatattatataaacatttacgagcgagggtgttacaggggggggtgac

SEQ ID NO: 585622 - DNA, 110 bp, Homo sapiens
gggggtttttttttgggggggcccccccttgccccgcccccccggtaaaaaaaaattaaatgggtttttttttttgggcccaaattacccccccggggggtttcccccca

SEQ ID NO: 585623 - DNA, 984 bp, Homo sapiens
  misc_feature (6)..(6): n is a, c, g, or t
  misc_feature (71)..(71): n is a, c, g, or t
  misc_feature (76)..(76): n is a, c, g, or t
  misc_feature (79)..(79): n is a, c, g, or t
  misc_feature (116)..(116): n is a, c, g, or t
  misc_feature (123)..(123): n is a, c, g, or t
  misc_feature (131)..(131): n is a, c, g, or t
  misc_feature (136)..(136): n is a, c, g, or t
  misc_feature (168)..(168): n is a, c, g, or t
  misc_feature (172)..(172): n is a, c, g, or t
  misc_feature (179)..(180): n is a, c, g, or t
gccctnccccccccccggccccgcctcctcgttctcctgtctcgtggctgcttctgcctgtgctgtggggnggggnggncgccgcccggcctctgctgccctttctgtgccccccnggttctntctccccntcacncccgtggcctggcttcaggtgggtgcggagcngccnttctccnnggccccgtggttgcccctggacgtgtgcgtctgctgctccggggtggtgctggggtgtgggatgcacggcctcgtgggggccgggccgtcctccagccccgctgctccctggccagcccccttgtcgctgtcggtccctgtctaaccatgatgccttaacattgtggagtgtaccgtggtggcctcactagcctctaactccctgtgtctgcatgagcatgtggcctccccgtcccttccccggtggcgaacccagtgacccagggacacgtggggtgtgctgctgctgctccccagcccaccagtgcctggccagcctgcccccttccctggacagggctgtggagatggctccggcggcttggggaaagccaaattgccaaaactcaagtcacctcagtaccatccaggaggctgggtattgtcctgcctctgccttttctgtctcagcgggcagtgcccagagcccacacccccccaagagccctcgatggacagcctcacccaccccacctgggcccagccaggagccccgcctggccatcagtatttattgcctccgtccgtgccgtccctgggccactggcctggcgcctgttcccccaggctctcagtgccaccacccccggcaggccttccctgacccagccaggaacaaacaagggaccaagtgcacacattgttgagagccgtttcctgtgcctcccccgccccatccccggtttttgtgttgtgtttgccaggctcaggcaaaggggcctgtccctgctttttttttgaccgggaaataaatgcccctgaagg

SEQ ID NO: 585624 - DNA, 1190 bp, Homo sapiens
ggagagagagagagagaactagtcctgagtttttttctttgtttttttacaagaccctcttcaatggatggactacatactgaaatgctccgaaaccccattaacaaacactgccagtcatccagggcgggcgggtttcgaacctccaagagcttgatcgttagggtcttgtaaagcgtggaaaattgagatggcgcgtgcgtctagaacgcaagatatggtgagcgacaggttgacccgaaaaatgagagctgtggacaagtccgagtggagcatgcctgtgggtggtaccaacaaatgagtggagagcgccggaacaatgtcgccgctcgagaagttgggggcgagaagggacagactccgagaggtgattccgagagggcgttcatcatgagtagggcaaaatctcacagtaagccccgaggtaaacatgttgttgcataacagacttgcggtcgttggaacttttgcattggggtaatcaccgcctgggtgtctcctgtattaaaccatattgagggggggcctggcccaagcttgggcctggaatgcaccgcctggaaggacgaagtaaaccaagcggggagtgggggctcacacggaacgggggccacctctcgcaaggggcaaaactaatgaccgggggggaaaggaaagcccgtgaagagcgggagcgccccaaggagaccccactccacacaaataggggcgagggagcacaggcggacatacggcccggagacgagtgatcacaacaagagcgggcaccgagaaaaagaaacacccccgaacgataaaagaacaaaacacagaacaacacgagaagaggtaatacacaaaacgaaagacctaaaccacgagacaacacgagaaaaacgcacccaagtcagcaacaccgcagaggatagatgacgcgaaggacccatgggctaatacatagcccaccccgcaaggaaaaccaacacgcgcacacaaccaacaaggacaaatcgagggaacacaacgaggagaaggaaaagcaacagcgcaccaaaaatgaacaggcccaccacaccgacaaaggtagaactcaacaaaccacaaaagcggataatggctcacgagcgcccaaaccgaggcaacagcacgaacgaaaagaaccctcgcggaaaagccggccacaccgaccacagcaaacgcgaaccaaaaag

SEQ ID NO: 585625 - DNA, 1025 bp, Homo sapiens
  misc_feature (6)..(6): n is a, c, g, or t
  misc_feature (71)..(71): n is a, c, g, or t
  misc_feature (76)..(76): n is a, c, g, or t
  misc_feature (79)..(79): n is a, c, g, or t
  misc_feature (116)..(116): n is a, c, g, or t
  misc_feature (123)..(123): n is a, c, g, or t
  misc_feature (131)..(131): n is a, c, g, or t
  misc_feature (136)..(136): n is a, c, g, or t
  misc_feature (168)..(168): n is a, c, g, or t
  misc_feature (172)..(172): n is a, c, g, or t
  misc_feature (179)..(180): n is a, c, g, or t
  misc_feature (996)..(996): n is a, c, g, or t
  misc_feature (999)..(1002): n is a, c, g, or t
  misc_feature (1004)..(1004): n is a, c, g, or t
  misc_feature (1008)..(1008): n is a, c, g, or t
gccctnccccccccccggccccgcctcctcgttctcctgtctcgtggctgcttctgcctgtgctgtggggnggggnggncgccgcccggcctctgctgccctttctgtgccccccnggttctntctccccntcacncccgtggcctggcttcaggtgggtgcggagcngccnttctccnnggccccgtggttgcccctggacgtgtgcgtctgctgctccggggtggtgctggggtgtgggatgcacggcctcgtgggggccgggccgtcctccagccccgctgctccctggccagcccccttgtcgctgtcggtccctgtctaaccatgatgccttaacattgtggagtgtaccgtggtggcctcactagcctctaactccctgtgtctgcatgagcatgtggcctccccgtcccttccccggtggcgaacccagtgacccagggacacgtggggtgtgctgctgctgctccccagcccaccagtgcctggccagcctgcccccttccctggacagggctgtggagatggctccggcggcttggggaaagccaaattgccaaaactcaagtcacctcagtaccatccaggaggctgggtattgtcctgcctctgccttttctgtctcagcgggcagtgcccagagcccacacccccccaagagccctcgatggacagcctcacccaccccacctgggcccagccaggagccccgcctggccatcagtatttattgcctccgtccgtgccgtccctgggccactggcctggcgcctgttcccccaggctctcagtgccaccacccccggcaggccttccctgacccagccaggaacaaacaagggaccaagtgcacacattgttgagagccgtttcctgtgcctcccccgccccatccccggtttttgtgttgtgtttgccaggctcaggcaaaggggcctgtccctgctttttttttgaccgggaaataaatgcccctgaagggaaaaaaaaaanaannnncnaccnatactagttctggtctc

SEQ ID NO: 585626 - DNA, 464 bp, Homo sapiens
  misc_feature (14)..(14): n is a, c, g, or t
  misc_feature (50)..(50): n is a, c, g, or t
  misc_feature (57)..(57): n is a, c, g, or t
  misc_feature (264)..(264): n is a, c, g, or t
  misc_feature (464)..(464): n is a, c, g, or t
ttgcccccggcctnctgctgctggtgaccagtgtaaccccggactcccanccccggntttccctgactcagaaagactgagcttttcccccggatgttattaatagcctaattgtgtcccaagcaacccaagggcccttgagtcctgccttggttcctgccttatggcctcacatcaagaaatggagcctagtcccatgtctgtagtcccaatgctttgggaagcccatgatgggaaggttgtcggaggccaaaagttcaaganccaggctgggcaatatcacaagactccatctctacggaaaagtaaaaaattagccagtcatggtggtgtacacttatggtcctagttactcaggagacttaggcaggaggattgcttgatcctaggaattcgaggctgcagtgagctatgattgcacctctgcacccaagcctgggcgacacagcgagaccctctctctn

SEQ ID NO: 585627 - DNA, 790 bp, Homo sapiens
  misc_feature (23)..(23): n is a, c, g, or t
  misc_feature (26)..(26): n is a, c, g, or t
  misc_feature (49)..(49): n is a, c, g, or t
gtgcctacttattcgcttgaccntanttgaacaccgctttggttctttnataaaacagtgtacggcgatccggatgctctgggcggcgctcagccgtgtcctgcagccctgtgctgtcggtccctgtctaaccatgatgccttaacattgtggagtgtaccgtggtggcctcactagcctctaactccctgtgtctgcatgagcatgtggcctccccgtcccttccccggtggcgaacccagtgacccagggacacgtggggtgtgctgctgctgctccccagcccaccagtgcctggccagcctgcccccttccctggacagggctgtggagatggctccggcggcttggggaaagccaaattgccaaaactcaagtcacctcagtaccatccaggaggctgggtattgtcctgcctctgccttttctgtctcagcgggcagtgcccagagcccacacccccccaagagccctcgatggacagcctcacccaccccacctgggcccagccaggagccccgcctggccatcagtatttattgcctccgtccgtgccgtccctgggccactggcctggcgcctgttcccccaggctctcagtgccaccacccccggcaggccttccctgacccagccaggaacaaacaagggaccaagtgcacacattgttgagagccgtttcctgtgcctcccccgccccatccccggtttttgtgttgtgtttgccaggctcaggcaaaggggcctgtccctgctttttttttgaccgggaaataaatgcccctgaagg

SEQ ID NO: 585628 - DNA, 228 bp, Homo sapiens
tggggggtgaagcgttgttcagatttctatgtccagggccatcaacctaacccagaaactctgcacaacagtgatcgcagcagaaatcatgtacgactggtcacaatcccaagaggaattacaagagtactgcaaacatcatgaaatcacctatgtggcccttgtctcggataaagaaggaagccatgtcaaggttaagtctttcgagaaggaagtgcagtaaacaag

SEQ ID NO: 585629 - DNA, 1103 bp, Homo sapiens
  misc_feature (1103)..(1103): n is a, c, g, or t
ctgggcggctgagcacgcggtggcggcggtctctgagcgcctctgctctctctcccgtgtttcagatccgcatttgctaccagcggctggccgcggtggagccatggccggtcctcagcgcccagcaccgccgctccctggcaacccgtgaggcgcgcaccggaaggccggtcgtgccggaagctcgcgcattcccagccaatcacttctttccaccttgctccttaggagacgggcaaagattgagttgagttcggaggctcgaaagttccaagccaggccctttggccctccaagtgcaagggaaaaaggggactgggcacttgaaaaggcgggtgcgccggtgtgcaagggtccgggccgccaaggccaaggcccttccctgaagaggtatggcccacaggcggaaaggtttgccccaaacagccttaagagaaggaaccctttcgtgtgcaccagaaccccaatactggggcagacgccagcaacaccgttggtgtgtgtcttggcccaaggaccccccgggtaaaaaacacccaacccaacaaatctccaggggcacggtgcacacacaagtgtgtgggcaggcccccccaaaaaaaatctcttgggtagacaggcggcgtgacacaaagggagcggggccacttctccgaccaaggaagagttcccttcgaagagaggagacgcggaggcatgttgacccccaattgcctgttgcccgactgtgctcccatccagcgtgggagggagcagcagggctttcccttttcttgtggggacctgttggaccagggtttttggttccctcgttcccccaaacagtgggcccgccgtaggcgctttttccccacagatgcgccagatgcatttcaagccacgtcggtcttttttggggcgggacccccccacgtattttttccatcgtgttgggccgctccacccacgcactagtttataggatgagaccacagcctccgtttagagatgcacacctcaaggggcggagaaggagcggacggatctcccacatgaggcaggttgacgtctccccgccgacgcaagatagttaatgatactcctcagcgagagaggagcatccn

SEQ ID NO: 585630 - DNA, 237 bp, Homo sapiens
  misc_feature (70)..(70): n is a, c, g, or t
aatggagtattgagattgcattcccgtccccaatacttatcttctgtgagctcacagaaactcagggggncccttagctcctatgactggaaccattggaaaggtgtttgtccaagctggagacgaagtggaagcgggaggttccctcatggttattatcggcctgaagatggagcataccataaagtctcccaaggatggcacagtaaagaaagtgttctacagggaagttgctag

SEQ ID NO: 585631 - DNA, 231 bp, Homo sapiens
  misc_feature (13)..(13): n is a, c, g, or t
  misc_feature (53)..(53): n is a, c, g, or t
  misc_feature (161)..(161): n is a, c, g, or t
  misc_feature (182)..(182): n is a, c, g, or t
  misc_feature (195)..(195): n is a, c, g, or t
  misc_feature (210)..(210): n is a, c, g, or t
ctcattctgtganttcggctccccggccaaccgcaagatcggcgtgtgcaccnccaaagatggtgctccctgcatcttcggtggtacggtgtacgcagcggagagtccttccagagcagctgcaagtaccacctgcacgtgccctggacggggcggtgggntgcatgcccctgtgcagcatngacgttcgtctgnccagccctgactgcnccttcccgaggagggtcaagc

SEQ ID NO: 585632 - DNA, 336 bp, Homo sapiens
cgtttctccagccacagtgaagacccgacttgcatatgggagtcttctttccaatatgctcaaatccctttgccttgaagtatttggtaatgtcatgtgtgcctctcaaagtagccaaaggcccttgctccatcagtgaaacccacttcttgaccaagaaggggcccacggggccctccggtaataccattaagtttgtctcctactgggttccagctccagtggtcaggacacacgctttctgcgcggccctgtgctccttccagtgctgcatctggtcgctggcgggatcgcgtctgtcagccatagcgtgcggttttctgtgcagcactgtgc

SEQ ID NO: 585633 - DNA, 1065 bp, Homo sapiens
tgcggtggctcacgcctgtaatcccagcactttgggaggctgaggtgggcagatcacctgaggttaggagttagagaccagcctggccaacatggtgaaaccccatctctactaaaaatacaaaatttagccaggcgtggttggcgcaccatcttgtatgtcccagctactcggagagcgctgaagcaccgagaatgggcttgaaccccgggaaggcgagaggttgcatgttggcgccttgggagttgagcggaaacttagggacttccgaggtactggggcaaacggaacagcgagaaggcactggtccttctaggactaatatgcctgggtggacagtgcatttccggtaacaagggatcttcctcaggcacctattgacaggtcacagagagaaaggacagagtttcctcggacgggcccgcggtggaatccttcacaagagattcgctggaaaaaccctattgggttgggagcgaccagtcttgcaccttgcttgttgtagataccatggacaacactatctcacggtcaaggttgggataagtagagagcaccttggcgagaacgcacgtatacgtccaggggagctctcaacacttaacacaaagcggcgccggtagaagtcccgggtactgcaatggactctcgcaactacccagtaagtatggtcgccaggacatacgtagtgtgtgcagaacgataaaggggaggatccagtggacgtcagatggaatactataattgacggccgccagccgttggcgaagatgacaattcggatcgtcaacgtatactaggggcctacagagcacgcgtgcagaaacgcccagccatcggtccgcccgcgggacccggggcaactaggacgaggctcacgcctatatgacacgcaatcttccaggccacaccagacgtccaccagcttgttgatcagcatccaccgccgccgtctacgaaggcgtccaccacaacaggccgcatacacacgtggcagagacgggcgcagtgagggtcaccacactagagaagataccagaggggccacttcgcgcagagagtacc

SEQ ID NO: 585634 - DNA, 1488 bp, Homo sapiens
tggacaagacaaacgagttttaatttattcaaaagtaaattcccaggtgtaaaaagaggccacaagtaaaggtggttaaaaaaaaaataaacacactcgtgctacacccaaggtgcggcattaaagtgaaacacccacctaagaacaagaaaaaagaagacacagtgaaaacacacccacgtggaaacaccagcccacccggaagcctcagttccgtggcacacagaacccacctctcctctctttcaacgaaaactccagcgtggaaatcaccatgtggaagaagccagagtctccacgtggtgggtgtgaaagcaagaagaaccgtgggaggtgtgcgtgtctcaagaagttcttcaaccaaagaccttcatgtgtggccacaagtgtcacccgaacctctcaaaggagggcaccttatcataagatgtacaaaaaccagactctctgtgtgtagcgtgggagaattctccacagcagcaaaaagaagacctctgtgggatattgtggggctcattctccgtgaaagttgtgcgccacctctcacaccccaacacagattttttatatacgaagggggatatatattgcgcgcttattcacacgcgtgggatagtgatttaatctaccagggaatagccatatataggggctctgtgtggtcctatataatgtcgagaggcaacaagcgagagacaaagataacatatcttgccacctctctatataacacacgcacactactcagagggccctcacagagaaactgtggggagaacaaagggggagaacccggtgggagaacggccccacaatctcagggaggatggtgcccaccaaggtggtacccccccacaacgcggaggccactatgtggcacgcgtcgcagccatctactaaaagacaacagccgtgggaacaaataagatggcggccgtaggaggcgttgaacaaccggcgcggtcccaacacacccttgctggacagccgcgccccctggtcataaacacacccaccgcggtggggctcactccattttagtagggcccccccacaacagcgcgagggcgccacgaaggggggctgactgtggcagcgtgactgccggaggtgcaccaatggtgggggtagggccactccacaacagaatctacccaacagccagatcccgccgctagtagaaagaaaaaaacgccgcccaccaactatcgccacaggagagataacagccgcgcgcgagagatccccccttgtggagacacagtaggggtgcccccaccgcgggtgatgacgagggaaccactcgaggtgcgccacaacccgcgggagcgtgtcaacaattacacagacggcccctcaagagagagaagccaccacgacggactcagtaggctaacacgacggcgggcccacttgtagtccgacacaagcagtggggacagacagtagtgttcgtccctagcgtagtgactgccccccccgggaagc

SEQ ID NO: 585635 - DNA, 263 bp, Homo sapiens
gacagagcgctgaatgcatggagtgtgcattacatttggaacaaaaatgtgaactcagatcactactggaagctgcacaaacatgaccactgacgaaaaatgacccccaatttgtgatgacttcaattgagacacattaccatgaatgagcaggtgaaagccatcaaagaattgggtgaccacgtgaccaacttgcgcaagatgggagcgcccgaatctggctatggcggaatatctctttgacaatttctcatccttggaag

SEQ ID NO: 585636 - DNA, 174 bp, Homo sapiens
acgatcgagtcggtaccctatttctcgatcgttactcttgtgttaacaataagtagaagtgggatcaaaaggtctgatataaacagctaggacgttctgacttcttttggcgtcttttttatagacggagtctcgctctgtcacccaggctggagtgcagtggcatgatctcgg

SEQ ID NO: 585637 - DNA, 176 bp, Homo sapiens
tcgtaggagttttacaaaaataagccgggtgtggtgcgggtgcacagaaatcccagtactttgggaggccgaggcgggtggatcacctgaggttgagagtacgagaccagcctgaccaacatagtgaaaccctgtctctactacaaatacaaaaattactgggcatggtggtgcag

SEQ ID NO: 585638 - DNA, 120 bp, Homo sapiens
ggtcggtactactctcgtgcctgggggaaacaggaatagcttcaagggtctccctggttggaaatagtcacacatgctccctcgactgtcttgtcccagaaccttttcactccaaaacag

SEQ ID NO: 585639 - DNA, 325 bp, Homo sapiens
tcacattcacaggtgccaggggttagggctttaactcatcttttaggggtacataactgaacctacattagcttccaccactgctcataaatagattgaggctggatgctcactctgtgatcccagcactttgggaggccacaaggtggtggttggattgcttcagcccagaagtttaagaccagcctgggcaacatggtgaaaccctgcctctacaaaaagaaaaaataaattagctgggtgtggtgccacatgcctgtagtcccagctactccagaggctgggaggtgcgagggttgcttgagcctatgttgtcaaggctgca

SEQ ID NO: 585640 - DNA, 1124 bp, Homo sapiens
caaggggtcattttacaattgtcttcgtgaaaatttgttcctcaaatgagcgaggtgcttcttatgcccaatctctgctgcaatgtgactctcgcatacctcggccaaagttttctgcctcatttattggtaccatggaatttctactaaccgagtgtactacactgtgcggcgatctgatagtagccctacttctcttggtctcacattttggtgggccctcttaatggaagccttgctacacatggtaatcttcactatttcttgtggcgatactgggagccatgcgaaatacgatctccatttcctctaccctaccactcttactattgtgttcctgtgtaccctatggtcgtcgaaaatctctttcttgccaacaagtttcccccacattcgactagcaaggatcctacattcttccaattacaggttgtctgttgcgactcgctggtaatgaacgatccttgcccatttctcagcaatgaatgcggtgaacacatctcttgtgcacgacatggctacacgtcggctgccattctggccctgttgttgtagagctcatcgttcgccccatgaggctctattagccctcttttatcctgcacaacgattcgggtcgaggaatagcaccgttctcttgactatcttacgcggcgcttgattgaagtggaacttctgacgcatgcctcgatcgattcattgttttcaagacctgttccatcacggtgtcgctaaggcaggaatctgacttacggcatgaatacatgcatatcgtacagaaggatgatcttagtacgctgtttgtctagcctagaacgcaacactccctttggcatagtcttgggtgcaagctgacacacgtgatgatcgcacctcattagacgcatttaacgcaaattaccttgatagctgttgacctgccttgttgtagtacaaccccgttacaagggcacacatccagcatctcgtgtcttgcctttcagatcttaacagaagcaagcagggcttaacattgttgattttaggagcctcttagtgacctaggttgcgtcctgtgttcagggaacttaaactttctggttcagtagtgtgtattaaacataacactggaataccttactgga

SEQ ID NO: 585641 - DNA, 971 bp, Homo sapiens
tgggggtggaatgcgtgtgtcatgtaggtaaaaaaagtgcacagaacagtgagggtgcagggagcaaggacgtccgtggccgggcctccgatttcgttttgaaatgtgcaaggaccctcccccagataaggggggctcccatcaaggggtgggaaatagagtgtggaggctcttcacgggaagaccatggtcgtttgatgcaactccacttgggtggcccgagttggcgtataaggctcgtggctgggaccgttttctggagacttgaacacctctgaaggaacctccataagataactcttaagagtggcgtggtgtcttctcctcagtgtggtgatgggggacctccccggattctgaaagagaacaaaggctctcgaggagtaacgaggaagggaaccccggtcgtattttccctctggtgaggatgtgggcctcgcgggggcctttctctgtcgtgtgttgacttcacctgtgcggcaatgactctagaatacgtgtgtgcttgtgttacccgcccgtgatatacaatgcttctccctcgcagaacatcccacggtgggactattgacgcaatgctactggggcgtttatgcgccgtgggcaccagcacagcctaccccacgtgaagacaaggggaacccccccattagtggcgagagacaccgtcggcgacagccaacggcgcacaacaaacagtgctgcgcactgtgatcaacacatcgcgcggcgccccacagaggaaagtcggaacaaaaggccggcgagaaaaaacacaccaaggggggagccaccgacacaaagacagcaacaagagtgagcacgcggcaccacaccccacgagggcacacgagccacaacaacgtgcattgcggacgcaccaaacaagccagcacaacgcccccgccaactcagaagcacacccgctttgacgcacaggcgtgtcggtatcaactatcggaacaaacaca

SEQ ID NO: 585642 - DNA, 1108 bp, Homo sapiens
gctttgtggggggggaccgacgacggtgttttcttacaccccacaacaatatgaggaggcggccgcaccatcaactattgggggggaaggatggtcccacatctcgtggtgaggatatgacgcttccccggctacgcgcgtagagtggtttgttgttcatctactcctacggcttctatcactgtcgctaatgcgcggcgacactatttatgacgccgcgggggcgccgcgcgctgttgggcgccccacctgcgagagaagaagaagaggggtgggggacgatagaagaagaagagaggggggacaacaagaagtgtggtgtgtggccacgcggggcgtgggtcgcgcgacacaaccacaagagtgccgccacaccatgtggagagggacgccactacagtgcgccccacatgggggcggcacaacatagtgggcgcgacgacgagttctcacaagaggcgcgcccccacgcagacatgtgggagaagagatagaatatttccctcttcttggtgtgtatgagcactgtattcacacggcgttgttcccccacacccacacagtggtttttcacccccccctcgtatagagagtctcggggcacacagcgtgggggtggtagacagcactctctcgtggtgtgctctcacaacgagagagatctggggggggcacacacacacacacagggcccccccgcgctatggcgcgcacacctcggggttttgggaaaaaggcgcacacacggagaacacacctcgggggggctcgtgcgcggggtacacacacgctcgtcggcgctaacgcggctttttattgcacaactctcccccgtgtgggagaaaaagagggcccatagcgcacagacgtggggcggctctaggatggactgtgtgcgttgtaggcacgcacggaggtatagtagagatgggagaatgcacctgcgtcccatctcacccacccacggtggagagtgggtaacccccgcctggaggccggaagaccatgtccactggggccaccccagcccacggcctgggggcaacctttccccagccttccccgggcccaaaattttttcattataaaaaagttttgggactttata

SEQ ID NO: 585643 - DNA, 498 bp, Homo sapiens
  misc_feature (12)..(12): n is a, c, g, or t
  misc_feature (26)..(26): n is a, c, g, or t
  misc_feature (392)..(392): n is a, c, g, or t
cctaggattganaaatactaaaagtnaaaatcatggactggaggccacgccatctgactcggtggaataggtattgtacctctactctgcgtcacttcttgcctctgttagaaaaaagtcaaggagaagatgtagaagatgaccacagagcagaactgctaaaacagctgggagactacaggttctctggatttcctcttcacatgccttattctgaagtgaagcctttaattgacgctgtgtatagtactggagtacataatattgatgttcctaatgttgaatttgctttagctgtatacatacacccataccccaaaaatgttttgtctgtttggatctatgttgcctctcttatacgcaacaggtaatttttttcactgtactttctntatcatgtaaaaactacacttaggatatgagaaaattttaaattatatgcatcacatcagaagaacatattattggcaaataataaaattatcaactgttttcaaa

SEQ ID NO: 585644 - DNA, 266 bp, Homo sapiens
aatgttcacggcagctttattggctgactttccatttataaattggaaatacccgaaatctcgggcaacaggtaaataaataaactgtggtttatccatgcaatacaaaatgtgtattattgatgtccacaaaatgggggaatgccaaaataatgatgctgagaaaaagcacctgctgccacagtacttgctctgcgatgccacttagataacattcttaaatctgtacattaacctttagtgagagggagcagaccactggtcgc

SEQ ID NO: 585645 - DNA, 255 bp, Homo sapiens
cgcacgcttaccgttgtcgcgtgcgctgtctgctcggagtgctgccgggaaggcgtctgtctctcgctcaaatgtagggctcagtgctctgctctgtagtcctcccttggcgccaccgcgggaccctctagcgtcgagcggtgtgcactgctggcttggccctgggctgtcggtctctacacaatggatgctcagtgacaaacgcctggcgcctctgcagcctggccacacacccttcgcgtatgactccactcc

SEQ ID NO: 585646 - DNA, 670 bp, Homo sapiens
  misc_feature (139)..(140): n is a, c, g, or t
  misc_feature (157)..(158): n is a, c, g, or t
ggggagctggttatccaacagaagcttctggtgcccaaagaacttatgtgaaactcctgattggccgaagggccacgtgatctcccagatagcacaggaggcaggccatgacctcatggacatcttcctctgcgatgtnnacatccgcctctctgtnnagctcctcaagtgaccaccctctactgaccctcccagggcattccagctcaagctgctggcaggaactgaccagttctttccttggctggggaccctccaggcactggtgagagacatgaacactgactggccactagctggcctggccctgttgagtctgcacagtccctgcccagctgtgtcttctcgttggaacgaacggaaccctgccttagctcagtttccacgagctcggttcttctcgcctcggcacacacagcatacaaaggtgtacgtctaagaacgagtcggccctacttggtggagagacaagtctcagccctagccctccagctgagggtactcgggacctcagagctattcctacccatcgagtcgcatgtctgtgtagccaggagagatttctcttccggccttcacttctatcacagagaacgttggataagaagtcgtgtgctcctgagtgaggtagcgcgtccatagctcacgcaaatcgtgggtctatacactc

SEQ ID NO: 585647 - DNA, 271 bp, Homo sapiens
ggaaatttaaggtgagagcgaacaacagtatttgaaataggaaagaggttgtccacaggtcagggggagacttttgaattaaacccgagaggtgtcaaaggcttgtcggccttggagcctagaggaaactccaaacaatcaacttagggcactaactgcggaaaaacaaggaactttaaatttctcaggatcgccaatatttccatatcgagggccaattttacagagacacacagggagagaaattgagagagctggagaaagaggagca

SEQ ID NO: 585648 - DNA, 678 bp, Homo sapiens
cccacgtcgtccggtcgcgatgtggaatttgctgtctgactgggcttgcgaggaaaccgcctcgcgagctgcagtcgaaggccatggaatcactgaacatcggcgatggaggacagggggttccatacatgggtggctttttctcaagtatattttccagtctgttatggaactcgagacatgagaacttgttaatctttgggattagatggagcaggaacatatagccgacaacttgttgtacagataacaagtgggagaagtcgttactacatatacctaccattggcatgtaatgctagagacggtgacgtacaaagaccgttgaaattccaagtctgggattaaggaggacagacaagtatcaggccatactggagatgtgtatctatctcaatacacagatgcatgtcattgtatgtagtaaggacagctttgtgagccgtagaccgagatttggcattttccaaactcagagttcagttgccatgtgtggaggaagaagagctgagaaaaacgcccatttcatgtggtgtagtgcaaagtaaaccacgggcataggaaccacggtgcactgaacttgcctcagagattgggtaaattacactctgggttacctgcctttgaagggaccgaaaatggcccgatattcaaaaacgtcagcaacaaaggcacccg

SEQ ID NO: 585649 - DNA, 357 bp, Homo sapiens
cacaattaaaaaattgtgtattgagggatactataaagagaaccacagaatgggagaaaaatattggcaaattatgtatctggataagggattaatggccacaatatatgaagaactcctaaaactcagcaacaaactgattcaaaaagtggggaaaggactttaatagacttttctccaaagaggcacaaatgaccaacagacacataaaaagatgctcaacatcacaattactagggaaatgcaaatcaaaaccatagtgagatactacttcacagtaactaggatggctgtcatttaaaagacaaaaacaaaagcagaaaataacgtgtaagctagcaagtggagaaacttaaa

SEQ ID NO: 585650 - DNA, 253 bp, Homo sapiens
tacagcagtgcaagaatggaccaatacacttccccattatctgcaggataaattcagtttcctggttcagggtccaatctgatatgcttcaacttctatttcagatatatcttcctgtgatcagccaaatggatcttgtgatcactgtgtgcctcattgtgacttcacgtccagaagcttgagatattcttcctccacctgtccaccttcttgcattccgcctgtccttagagacacagtcaaaggcaatctt

SEQ ID NO: 585651 - DNA, 798 bp, Homo sapiens
gtattcgtgattctatcatatatacacaattggagaatcctctgtcgtgtagattatgaatacttatatagatgcgtaagattttacaattgctggaatagataataaatccgcaagtattgattttgaaagtgacttaccttttgtcccctactgtgtcaggaaccttatacggcaggagtttcaaggttggtgggtctctataactgctttgcttgctttaccctgaaaggggtctgtctatttcacgggagtatctctaacgtgctttgcagagtgatgcttgccttactgcaggccgcgtgattgtattgctaatgctatttaatcttctgctttgggaatactgcagatctgaagctgtcttatttatgggcaacttctgttgtgatggccctaatgcttactgttggtgtggaacatcaagagaatgcttcttaacccatttgtcaagccccagaaatagttgatattgcactagaccttagcttgtcagctgtgtggagaagtatgcgtttttccagaaccatgtccattcacttcagtgctactcaaaagagctgcgtcccagaaagctctggaggataaacacagggcttccttatctggggatttgctgtaaggctgacagtgaccagctggtgacaagtgtgacgccgggcacagcagtcctgtgaggctggtctggtgtcttgctggttccgtctggtcagaattaaagcagacccccgggaaagttggcctagaatgtagaactttacaatggcaggtcctctttttctcgaggttcacatatac

SEQ ID NO: 585652 - DNA, 916 bp, Homo sapiens
  misc_feature (80)..(80): n is a, c, g, or t
  misc_feature (85)..(85): n is a, c, g, or t
  misc_feature (886)..(886): n is a, c, g, or t
  misc_feature (915)..(915): n is a, c, g, or t
ctatacacaccaatacaccaaccccccaacaaacacaacacacccttaaacaaaaacaaaaaaaaaacctcgggcgtganaacgnaattggcctgggagttgctgcactgcacgcttctcttgtggtaacaaaccccagctgcttctttattccgcaatgcgggttgctgatgtgcatcactacgagaatgtgcggaaagacaagcggctccagtggcaaaagtaaagaactccaagaaggaaaagctgcctacctgaaagatggaccactttttccatagcggagatgagaaccgacgatgaaagacctactacccacgacgatggcagcccagcaaccgcccccaacgaaaccccaccactgacccgacctgacacaccgcctcccaaggacgaagatggggaacaaccctctacctccccaaactctcacaatcccagctccctacccgacaccactccatccaccacaacaccaccacccaaccccccccaacctacccccggggccctgaccaacactctcacaacagcacccggcaatgcccgacccctatcgactcacgcaacaccctagacacttaaaccatttgcgacccgctccccttcgcgaaggtaatcgacacaacaccaccaagaccaaaacccccccgccaacactatacctataccctctgccaactcgcgcacccccacacccaaatccacccaatacgcctcgcgccccacccagccgtcgcaccccaccggcaacccccgcagcacccccgcccacacccacaacccctacacccccacctatcccctctctacccccccaacacacaccctctacatcaaccttcctaatcattaaccctctaataccgactcctagcaactgctnagacgacaccctatatacacaacgacaana

SEQ ID NO: 585653 - DNA, 218 bp, Homo sapiens
cgcttatgacacgcactacagaaatgcacgggagtgactgaaaagagctatgatgtgaactcatccctcagtcatgatgtcagcactgatcatcagtctgccctatgtttcaatggattcttctggaccctggcattagaatatgaaattgacccgagctcaatttgaggggattgtcaaagatctaatcggaaggagtatcgctccatgccagaaag

SEQ ID NO: 585654 - DNA, 1464 bp, Homo sapiens
gcaagaatcttctcatgatgctagtacacagattctgaacctatttcttaaacgacttgcaatcctaccatagtccgagtcgatacacacggaatgtagatgcaggaaatcaactctgtagtaatcccatgttcctaaagtatttatagagcatagactgagagtatgcgagaagcaatacccctagaagcctctctacacttcattgcgataatagcgcgtgtacatatgggagcccatagtgatcatcaaacggatccttaaatgatgtacttacaatgcgccattgacggagagaataaccacacacaagtatctccatgaataaacggtgaaacccattggcgctagtagcactgaccatcatgatgcatctcctggaaactcggctttttccatccattttacatcagacagattgacaacacaaggccaactgtatactatcatctacttgcaaggtagttcacacactagaaagaaagaagcccttttccctatttagggggcgtggttccacaaccaaggatctttcggccctatttggctcttcgaaaaacccggacaacagcaatactcgtaatccagaggaatattcatgcgggcatatgtgtcctttacccaggaaaaaaatctcaaagacaacggtaggccataatttatccaatagtgttttcccccgaggctggttccccccaccaacatgatcattcattaggggcccaacaacaattttagacctacattctcaattggaactcgtagatgcgggatatagaagaccgttaattcacccaaccggttgtaacacctgaatataaagcgaacgaaaaaccaggaaagaagcgggggtaatacccccaaagacgctcctttcaattaatcccaatgtaccccaaaccattccggtcaatatgcgcaattgcctaattcaatggtttcgaagatgaccttaaattacgcaatttcactttcaacgcgcctatcgatgtgcacagacaacctggattcaaaacgactccggagttgccgtgggcggtaacaccacattacacccttaggcttggcccttggaacgcattgtaaccattacccggggagatttccaacgttggtcgaacatgggagtatatagcgaccgtgtaggggttaacaattgtcgcttggactttcatgtatgggcccaaaagactccaagttagtttacgttaataaccagtaaagtttctcacaccacaacgggggtttccccaacggaagaaattcattactttcgagcagggaccggcccccaatacccacaacgcacaacccgctgcgctacctcaagtggaaacacacatatgtctgtatgccacgcacgagcacgttgtgacctcagcgcgcgcgacgaacaaacacgtgtgtgcgacgcacgacaaccctagtcacgtgttggacacaccgccgtatacgccctactat

SEQ ID NO: 585655 - DNA, 398 bp, Homo sapiens
accctaagcgggtttggagctggacctggtccagctgcatgtccagccacttaatgcttcctgggtggccctttgtcaagtttcttaaaccctccttgacgtgcgaggtgctcatgcttgtaagtcccgtcattttgggaggtcgtgactggtagatcccttgcggtcaggagttcgagatcagactggccaacatggttgaaaccccattttgccggaggctccccgtgcaaaaatacaaaaattagctgggcatggtggctcatgcctgtgatctcagctactctggaggctgaggcaggagagtcgcttgaacccagaggtggaggttccagtgagggaaaatcccgccattgcactccagcctgggcaacaagagcaaaaactcccaggcgcta

SEQ ID NO: 585656 - DNA, 377 bp, Homo sapiens
tctagaggatcccgctccaccgatggggtggggtgaagacaggtttcaagatgaagtgccactgacacagaaaatgagtgtaattcatggaaatcaggtttaacaaaaatgtccaacttgaaggttgaggatattgaggaaaacagtaacagttaagaaaaagagtctaggccgaggcgggcggatcatgaggtcagaaggttgagacagcagtgaaaccccatctctactaaaaatacaaaagattagccgggcgtggtggtgggcgcctatagtcccagctattactatacttaggaagctgaggcaggagaattgcttgaacctagaaggggaggttgcagtgagctgagattgtgccaccccgtcgggtggag

SEQ ID NO: 585657 - DNA, 368 bp, Homo sapiens
atcattctctctacaaggttaacccctattgtccatagagatgctgttcctctcttggactaacagtgcaatgtacaacgggatttagagggtcctgtgggcaaattcaaagttgaactaggattctatcttggcacaccagctatcaccaggctcgggtagatttgtcgcctctacctataaatcttcccaccatgttgctacctagacggctgtgctctattagctgttcttaggtagcttcgtctggttacgggggtctttgctttggttctccttgctgtgtttcttctaattaattcatttatgcaaaacgtataggggttcagtcctagctattttatgcttgcatagattgttacaggggt

SEQ ID NO: 585658 - DNA, 140 bp, Homo sapiens
ctttctgtatgaaacgtatctgcacatcaaaccctcacccctgggctatcccctaatttccatgacttcgaggacaacgaagtcccacatatttctataaacacccagctagtactatgtaggagtcgcccttgatcgta

SEQ ID NO: 585659 - DNA, 215 bp, Homo sapiens
gcattttccatcatgtccggaacatcatggacacatatactggaggaatcaggcctgccgtagcccaaggaaaggccggaaacaaagacgacgctcagagacaggaagcaacttgcctgaagatacacagcacaaatgagaaaattggtgcccaatagtttctgaagaccagcaactgctaagacagagacttcgaggtaacctaaccttgcctg

SEQ ID NO: 585660 - DNA, 310 bp, Homo sapiens
aaacatttccccgggcccggaaaccgtggttttttctttggttttttccaaactgggggttttaaaaaaaaaacaaattttattttggtgttttttcaaaaacaggggcccacaagaactgttggccggggcatttttccctttttttttttttaaggggggggggccccccatttaaaacccgtcaattttttccaatgtgggatttcccaatttaaaaagaatattttgaagggttttattttttttttttttttaattaacaattttacataaattccaatttaaataaaagtggtttgccccgtta

SEQ ID NO: 585661 - DNA, 429 bp, Homo sapiens
  misc_feature (342)..(342): n is a, c, g, or t
  misc_feature (416)..(416): n is a, c, g, or t
atcatgccactgcactccagcatggattcttgctctgtcgcccaggctagagtgcagtggcgctatcttggcccactgcaacctccatctttgggggtaaagcgattctcctgcctcagcctcccgagtggctgggactgcaggcgcacactgccgtgcctggctaattttttgtgttttagtagagatggggtttcaccgtgttgcccaggctagtgttgaactcctgagctcagacaatccgcttgcctcggcctcccaaagtgctaggattacaggcatgagccaccgcacccggccccggaatctgcatttcaacaagctcttctgatggttcctctngcatctggggagtcgagaagttcttgctgctatgggcctcttgaagtttgctttcgaaccccaatttcagaatnttcaacccactcc

SEQ ID NO: 585662 - DNA, 126 bp, Homo sapiens
ttccagttcgctttcgaggcaggggcctagtgactccaccagcagcttggatgaagactgctggtggagtcactagggccacatgagatgctcaaagtaggcagagagatcacccttacaagtcat

SEQ ID NO: 585663 - DNA, 960 bp, Homo sapiens
  misc_feature (365)..(365): n is a, c, g, or t
  misc_feature (368)..(368): n is a, c, g, or t
  misc_feature (404)..(404): n is a, c, g, or t
  misc_feature (440)..(440): n is a, c, g, or t
  misc_feature (599)..(599): n is a, c, g, or t
  misc_feature (691)..(692): n is a, c, g, or t
  misc_feature (701)..(702): n is a, c, g, or t
  misc_feature (861)..(863): n is a, c, g, or t
ggtggcttcagctgcgcctggttctgcagtggccacacgtatcagcgcctgcgaggtgcaccacgggggccgagtccccgaggctcagcgtcccatctgtaacttcggaggaaccgatacaacacccagtttcatcatcgggtacagatgtcttagttgagcatcaagggtcaggatagacaccgtttccctccttgttcctcgctgaccgatgaccctggaactccacggtgcctctctgaatctctgttaatggatcccgcacttagtatttgatgggaacccagtgatccaggggccagtctttgacagggtagcagtcacgccctcactagacttacactcctctccaagtgctacctccnacntgaggatgtggttattgatcatctactgtggagtgntgggcttccttgtggtcctcacactcactcactttngggcttctagcctcaccttttctttctggtttgaacttgctcggaaagcgtaagacaagatgaagagcaggcgccattataaatatcaaagcccaagaaatggaactttgggcagagatcatgttagaatcaagtggatgatgagaccaattacaggcngtctctctagcacagcacagaaattctcaatcactgaaatgagtaactgcaaaataaatagttgattgtactgttctcatgctataaaagtnnacaggtacnntacaacaaatctgttttctcatttttatcaaatatatgtatcatcaaagagttgcatcttgtacaagtatgtaaatgtctattagatgtctgtcacttcacaatgcgacgaacagatcacttagttccccccgaaggaaaggtgctctgggtggccccnnnagcacaccacattgtggacttcatggtgtattacaataatatatatatttgggacatagtaatcctctcacaaaataaaaataaataaaataaaacc

SEQ ID NO: 585664 - DNA, 1107 bp, Homo sapiens
  misc_feature (365)..(365): n is a, c, g, or t
  misc_feature (368)..(368): n is a, c, g, or t
  misc_feature (404)..(404): n is a, c, g, or t
  misc_feature (440)..(440): n is a, c, g, or t
  misc_feature (599)..(599): n is a, c, g, or t
ggtggcttcagctgcgcctggttctgcagtggccacacgtatcagcgcctgcgaggtgcaccacgggggccgagtccccgaggctcagcgtcccatctgtaacttcggaggaaccgatacaacacccagtttcatcatcgggtacagatgtcttagttgagcatcaagggtcaggatagacaccgtttccctccttgttcctcgctgaccgatgaccctggaactccacggtgcctctctgaatctctgttaatggatcccgcacttagtatttgatgggaacccagtgatccaggggccagtctttgacagggtagcagtcacgccctcactagacttacactcctctccaagtgctacctccnacntgaggatgtggttattgatcatctactgtggagtgntgggcttccttgtggtcctcacactcactcactttngggcttctagcctcaccttttctttctggtttgaacttgctcggaaagcgtaagacaagatgaagagcaggcgccattataaatatcaaagcccaagaaatggaactttgggcagagatcatgttagaatcaagtggatgatgagaccaattacaggcngtctctctagcacagcacagaaattctcaatcactgaaatgagtaactgcaaaataataagtgaatggacccgtcttatggcattaaaaggggcacaggcctttacaacaaatgtggttcttaatttttattaatatatttggttcaattaaaggttggatttggccacgtttgaaaagctttaaatggcggcacttacatgccacaacgagcttgtttcccccagaatgcccctgggggccccaagaaaacttgggattttgtggttacaaaataaaattgggcgggttaaaaaaaaaaaaaaaaacctcggggggccccgtccccatttcccatagggggggcttaaaatactgggccgggtttataaagggggatggggaaaaccggggttcccaatttaagccttttgaaaaaaccccttttcctgtggaaaaagaaaaagcccccccactgggttttaaaattgccccccttagggaaaggggaaattgccggctattttttt

SEQ ID NO: 585665 - DNA, 246 bp, Homo sapiens
ttgtgaagctggtgcagatgctcctgggtcagcaccagccggtgtcgctgtcaaaaccagccgcacaagagaaggtcactttgcccatgtagactgtgtcatcctgctgctcctccttggacctgaggaaggctgatgaatggaaggtggcaaagtcagtgggtactgtgagtccagggcgctgaaatactgtctccttgaggacctcatccttgagcttctcgacggtgtcactcagggacttaa

SEQ ID NO: 585666 - DNA, 862 bp, Homo sapiens
  misc_feature (365)..(365): n is a, c, g, or t
  misc_feature (368)..(368): n is a, c, g, or t
  misc_feature (404)..(404): n is a, c, g, or t
  misc_feature (440)..(440): n is a, c, g, or t
  misc_feature (599)..(599): n is a, c, g, or t
ggtggcttcagctgcgcctggttctgcagtggccacacgtatcagcgcctgcgaggtgcaccacgggggccgagtccccgaggctcagcgtcccatctgtaacttcggaggaaccgatacaacacccagtttcatcatcgggtacagatgtcttagttgagcatcaagggtcaggatagacaccgtttccctccttgttcctcgctgaccgatgaccctggaactccacggtgcctctctgaatctctgttaatggatcccgcacttagtatttgatgggaacccagtgatccaggggccagtctttgacagggtagcagtcacgccctcactagacttacactcctctccaagtgctacctccnacntgaggatgtggttattgatcatctactgtggagtgntgggcttccttgtggtcctcacactcactcactttngggcttctagcctcaccttttctttctggtttgaacttgctcggaaagcgtaagacaagatgaagagcaggcgccattataaatatcaaagcccaagaaatggaactttgggcagagatcatgttagaatcaagtggatgatgagaccaattacaggcngtctctctagcacagcacagaaattctcaatcactgaaatgagtaactgcaaaataatagtgagcttggatggtaggtcatctggttcatcactcgcgtactaggaagtccggaccatggtagctctagcgaacaaatgctgtgtcttctcgatttttactcaaagtatctgtatcagtcaaaggtgtgcactctgtagcagtatgtaaactgctacgtaatgtcgtcactcacatgcacgacagtccttgttcccccaggta

SEQ ID NO: 585667 - DNA, 167 bp, Homo sapiens
gccggggaccgctctgacgttgtgactgggaagtgcctgtgcgttgccgtcctccgacggtcgacatctcgacgatcttacatggacggcctttgagcaccacaaagccattcttacgtcatgctgagcacgtgattgggaaggtggctgaggcccctgcatctcct

SEQ ID NO: 585668 - DNA, 290 bp, Homo sapiens
gtcgacccaaatcacagtatcagcggtcataattctcataacatgtataaaagtgacacataaaacattgtaaatgataaaatcctgtccttttactgtcagggttatcaaataaagtaacaaatactaactttctctgtgtagggtatccattaataaagagtaataggagggactcagatgggtgtgtgttgagctaatgttatgttcgtttctaggcgttctaagcctctttcccctcgatgagtgaactgttctcttattcagaagccatgggttctcatgtcgac

SEQ ID NO: 585669 - DNA, 455 bp, Homo sapiens
ccccccaccatcttctccggccgccacatcttctcccggccgccacagtcttctcagatcatccgcctgacggcactcgccggttcagcggtcagtcctgctgccaccagcgttatatcttatgtaacattcatggatctcactgcttgtccatgcacaggcccccaggagatgagtgccagagccttccctgcttcacattaggagattagtgtccaggagccttacccgcttcagatgaggaagctggggcagaaggcagttgggcctatcgcagcagcatgtcggtggtccaggctagattcaatcagcctgtgtcttatttgtcacttagctgttctcctgcccacccgaccgtctccaagaacgctgggtgcgccgcgtgtacccctagctgcgcgtctgaagaccgggagggtgaggccatcagatgtgtggatgccacatgctgagac

SEQ ID NO: 585670 - DNA, 505 bp, Homo sapiens
  misc_feature (152)..(152): n is a, c, g, or t
caaagaccgacgtgaccaattcccggggagcgcacatatattcccccagcttttatgctaaaaccaaaatcgctattagttaatccagcactctttttaaacccctgaagactataacccatctaatgggttatgacaaaccgttcactttngatatggaagaagtcgatgaaaagaaactgcatgagggtgaaaaatgaacctgttctttcatttgtgcttaaatgtcatgtattttcagggtataataagattgcctttattttgttattgttagttaatgattgtagaaacaaaacaaaacaaacaaaaaagtgtaagggctgaggacacagcaattggcactgtgtttgctgatgtgaggccctagaattggccttcatagaagcaggatgcttttgtacacttagaatcccagcacatgggacagcgaggtaggaagattagaaatctgaggtcatccttggtaatgtagtaggtttgaggttagcctggaccttgtctt

SEQ ID NO: 585671 - DNA, 1643 bp, Homo sapiens
  misc_feature (267)..(267): n is a, c, g, or t
tgctcccgcatctgccacccccgccaacctgccgcatcgtggcctccgttacgctgcctgcgtcagctttctcgctccttgtgatctgcacatcctcccagatgcagcgcctgtgtgactgacccctgcctgctgctgcatgagcctgtgtcttctgggcctgtagctgtgctccatggtgacccctcctgtgttgcccacccctcgtgtgctgtcatgactgcctgtctctgtgcatgcctgcctgcttgccatcacctgtgtccnctgtgtgtgcagtgctgtgatgtggtgtgatccctgctggtggtgctgccctgtgtgccttctgaccctgaccactgcaaggcctgcccgacctgctttgcattgcctggccctctgtgaccactggtgtgtcctctgactgctgacaagtgtgagctgtgtgcccatgcggacactgacccaccgacttggctttgcgccaccccttacggtagccagacatgacactacagggatacaatgcatcgtgatgccgagaaggaaacagagatacccttgacccgctggaaactaccaattgagcaccggaaggaatgtggcactccgacctactgaatccctggacgcctttccaacatacacctgcccaagttgacaagacgttgcactagaccctgtggccacggaacacatttgaccgcaaacgacattccacggcaccatgtggctgacacctcaaaaagaacactgctgcattgcattgcatgttgacggaaccatttacctttggagaatttattacattaatatcctacaataactggcagaccatgttgaacacacctttggcacataagccaagcctgaaagtgtgttgctgttgacattaacccatttggttcacacgggccgaagagtaaattccccccgaaattggtttacaacgattctacatatggttggggtctgggacacgcgcatctcctgtttgaggacccccagaccagactggtggggcatcatacgcccgaagtccaacgaagacatgctcatttggccatgtgaccatggacacagcacttgtgttttggcgacaaagtgaatatctatctggataatttgtgtggcatcaaggtgaggcatccacaatgagcggcggcaccaacataggcccaaaattgaaggagacaggaggcttggaggcaaaatttgtgttgggcagacacccctcaaaataattgccccacatttggaaatattttgagtacatgcgaattggtcattccgttttgaaagtcctattggagacccaccaattatatagggcttacatgcgtcctatttgggcccattttccatgttagatgcaggtcgaggtaaatttcaatgaacccgataataatatagagggatgacaaaattgttcagacgaagaaaaattcatcaaagccaagaccatcatgtgaaagtgtgagtactctgtacaccgcactcgtggacacagtgggggtgtcacagataacaggagagtgaaagattaacacacaccaccaaccggatatatccttggtgcagtgatgtgtgcaccctgagtggatgataattagtaccaacctggtacctacacgatcgcgtgctaacgagttcgcccaaat

SEQ ID NO: 585672 - DNA, 100 bp, Homo sapiens
ccccaagtgctgaatacctatgtgagtatacatttttccatctttttttcttttggtaaacgaaactcactgagaaatttgacttctgataatgggaaac

SEQ ID NO: 585673 - DNA, 185 bp, Homo sapiens
  misc_feature (81)..(82): n is a, c, g, or t
ggggggggccccgggggcccccccccggggttttttttcccccggcccccggggggggggtttgggggggggggccccccnnctcccccccccctttcccgggggccgggggttcctttttggggcccccctccccccccccccggccccaaaaaaaaaaggggggggtttttttttttttttta

SEQ ID NO: 585674 - DNA, 329 bp, Homo sapiens
tctaaggaccctgctgtctgctctggtgtacgtaggtattgtgagacagagacgcctcatgcagatataacagtgtgggaatagaagaagggaatatgaagagttgaggctgtagtttggaaagtgaactgtgatggtctcaatagcggaaataaaataaaaaggttttaagtagccaaggctcattaaaactctcaggtctacaaaggccttaatcctgcagcaaggatcaaacgaagtgggtggtcttgccccactaactgttgagatgttctcaaggtcagtgtcagtacacagacagacagagacagcagaggcaggacaagcag

SEQ ID NO: 585675 - DNA, 406 bp, Homo sapiens
gccagtatacctttgttattgtcttgtctacttcctgtctcaaaatttttcttctaaaaaggtacctcataaaagtaaattataacatatatgcccttccgtgtctggcttattcactaagcataaagtttttttttatttttctctgagacggagtttcgctcttgtccacccaggctggagtgcaatggcgtggtcttggttcaccgcaacctctgcctcccgggttcgtgcgattctcctgcctcggcctcctgagtggctgggactacgggcatgtgccagtatgtccggctaatttatgtgtttttggtggagataggatttcaccatgttgaccaggatggtctcgatctcctgaccttgttatctgcccacctcggcctcccagggtggtgggattgta

SEQ ID NO: 585676 - DNA, 441 bp, Homo sapiens
  misc_feature (39)..(39): n is a, c, g, or t
  misc_feature (174)..(174): n is a, c, g, or t
  misc_feature (236)..(236): n is a, c, g, or t
aagtagacctcaagccctcccatgttttggaggaaacantttccgcctaggggactttgcccaagtgggttaaataaaagtgcttcccagtgtctttccgtgtacaaaggcattttgcctatagagttcctcatgcaggcattcccatcaaaagatgggtgaagtcctgagtgnactggctcattcctgtaatcccccatactttgggatgctgaatggggagggatcacttgagncccaggagtttgagaccagcctcagccacatagggagaccctgtctctacaaaaaataataagttagtcatacatggtgcgtgcgcctgtgatcccagcttgaaaagtttaggtgagaggatcacttgagccagggaggtcaaagctgcaatgaactatgatcgtgccactgctctccagcctgggtgacagagcgggtcttgtc

SEQ ID NO: 585677 - DNA, 817 bp, Homo sapiens
agcggggggcgctgcctcgagcctcatggctgcccctgcttccgtcatgggcccactcgggccctctgccctgggccttctgctgctgctcctggtggtggcccctccccgggtcgcagcattggtccacagacagccagagaaccagggaatctccctaactggcagcgtggcctgtggtcggcccagcatggaggggaaaatcctgggcggcgtccctgcgcccgagaggaagtggccgtggcaggtcagcgtgcactacgcaggcctccacgtctgcggcggctccatcctcaatgagtactgggtgctgtcagctgcgcactgctttcacagggacaagaatatcaaaatctatgacatgtacgtaggcctcgtaaacctcagggtggccggcaaccacacccagtggtatgaggtgaacagggtgatcctgcaccccacatatgagatgtaccaccccatcggaggtgacgtggccctggtgcagctgaagacccgcattgtgttttctgagtccgtgctcccggtttgccttgcaactccagaagtgaaccttaccagtgccaattgctgggctacgggatggggactagtctcaaaacaaggtgagacctcagacgagctgcaggaggagcagctcccgctgatcctggagccctggtgccactgctctacggacacatgtcctacaacatgcccgaaatgctgtgtgctggggacatcctgaatgtaagcacgtgtgtgaggggcgatccggggggccacttgtctgtgaattcaacgcattggttgcagattggaattgtgagctggg

SEQ ID NO: 585678 - DNA, 138 bp, Homo sapiens
aagatgaggaattgacttgtgtccatttaatcgtatccagaagcttgctggaattttttatcagttctaggagcttttggaggagtctttagggttttccaggtatataatcatatcatcagcaaacagccacagttt

SEQ ID NO: 585679 - DNA, 158 bp, Homo sapiens
  misc_feature (102)..(102): n is a, c, g, or t
  misc_feature (138)..(138): n is a, c, g, or t
  misc_feature (148)..(148): n is a, c, g, or t
cgggaagcaggcctgcattctcatgatcaaagccctggaacttgaccccaacttatacaggatagggcagagcaaaatcttctgccgaacttgcgtcctggnccacctagaggaggagcgaggtttacagatcacccntggttatcanggccatacag

SEQ ID NO: 585680 - DNA, 676 bp, Homo sapiens
  misc_feature (43)..(43): n is a, c, g, or t
  misc_feature (64)..(64): n is a, c, g, or t
  misc_feature (79)..(79): n is a, c, g, or t
  misc_feature (123)..(123): n is a, c, g, or t
  misc_feature (256)..(258): n is a, c, g, or t
  misc_feature (267)..(267): n is a, c, g, or t
  misc_feature (295)..(295): n is a, c, g, or t
  misc_feature (310)..(310): n is a, c, g, or t
  misc_feature (313)..(313): n is a, c, g, or t
  misc_feature (347)..(347): n is a, c, g, or t
  misc_feature (353)..(353): n is a, c, g, or t
  misc_feature (359)..(359): n is a, c, g, or t
  misc_feature (368)..(368): n is a, c, g, or t
  misc_feature (416)..(416): n is a, c, g, or t
  misc_feature (507)..(507): n is a, c, g, or t
  misc_feature (516)..(516): n is a, c, g, or t
  misc_feature (525)..(525): n is a, c, g, or t
  misc_feature (531)..(531): n is a, c, g, or t
  misc_feature (541)..(541): n is a, c, g, or t
  misc_feature (555)..(555): n is a, c, g, or t
  misc_feature (574)..(574): n is a, c, g, or t
  misc_feature (576)..(576): n is a, c, g, or t
  misc_feature (580)..(580): n is a, c, g, or t
  misc_feature (594)..(594): n is a, c, g, or t
  misc_feature (612)..(612): n is a, c, g, or t
  misc_feature (664)..(664): n is a, c, g, or t
gccccctatgattcccagttgtcctcgtactcctctgcctgtngctgctgcggtggcggcagangagggatggagtctnaaacgcgggcaaaggatcctccggaaacctcaccagccccaggncctttcccagaaatgcctaaagggaaaaggctgagtgaaggtggttggagggaaaacctggataaaccagcccccggagaattaaatacaggaagaaaaaggcaggacagaattaaaatgtgccggcccaggnnngacagcagncctgcctcctacccttgcacctcatgancagcttgttgaaganatncgacatcaagtacccaccttggctcgtggctctnacttgntcctgntccttctgnttcttcttctccagctttcgctccttcatgctgcgcagttggtcttgncgatgcccccagtttggtggatggactctagcagagtggcccagccaccggagggggtcgaccacttccctgggagctccctggactgganccgggaggnggggaacanggcaangaggaaaggntgctcaggcagggntggggaagcttactgtgtncnagancctgctgggagggnagtcaactcccctcaaangaggagcccgcgctggggaggcggacctttggagatgtgtggggccgggcangacttcggcaac

SEQ ID NO: 585681 - DNA, 167 bp, Homo sapiens
tccctgcctcagctctgagtagctggtattacaggcacgtgcaccacagcctggttaatctttgtatttttaggagagatgagttatcaatatgttggccaggttggtctcgaaactcctggcctcaagtgatccagctgccttggcctcccaaagttctgggattg

SEQ ID NO: 585682 - DNA, 760 bp, Homo sapiens
  misc_feature (464)..(464): n is a, c, g, or t
gaaaaggtgtggttgatatagacagcagcacggtggctcacgcctgtaatcccagcacttgggaggccggggtgggcggatcatttgaggtcaggagttgagaccagcctggccagcatggtgaaaccctgtgtctactaaaaatacaaaaaaaaatgggctgggtgtggtggtgtgcgcctgtaatcccagctactaaggcaggagaatggcttgaacccgggaggtggaggtcgcagtgagctgagatcgcgccagtgcgctccagcctggcaacagagtgagactctgtctaaaaaaaaaaaaaaaaaggaaaggcaacaacggaaacattggggaggaactataacttttctacttttggagataagataattctttcaaaagtttgtgaacctcccgtggagattaggtggattttaattacggcagttgggggagataccttttcagaggaaaccagnggggtaaattccgtgttgagggcaaagagtatttttttcttaacaattgggcaaaatttcttctttggggccgagggtataatctccataaacctcttctaaatttttttgaaggggaaggcgcttatggggtttcgtgtattccccttatggagtgatatcccttttattccaagtaggcgtggtgatctccgcgcgagggtgtgtgcggtggccgctctcaagggtgtgcgtccgtgtgcggtccccccgttgcttggaccatcctgggggcccttcttaaatgccccccgggt

SEQ ID NO: 585683 - DNA, 146 bp, Homo sapiens
caggagaattgttgaacccgggaggcggaggttgcaatgagccaagatagcaccactgcactgcagcctgggtgacagagcgagactccatctcaaaagaagggctcctgtgtctacgtcatggtggggctagagagaggtccccg

SEQ ID NO: 585684 - DNA, 201 bp, Homo sapiens
gcgcctcggaggcgtttcaagcttgctttcaaaggatgaagcttgaccatcttcctttcccagccacttgctgtcccagaaaactctattgtaagtggacgagtacgcaaacttcgtactttctagttgaagcgtattgccacagaaggttctgctgacgctctggtgtaagaatggaagggtatatgtggtccgaactga

SEQ ID NO: 585685 - DNA, 243 bp, Homo sapiens
tttcatcttgcagcccggacatcacctcttagctcagacccatggagcggtgaatgggaaggggtcactcaagggacagcccggggaatttaacaccagagctggccagatacttagtgaagttcctgggatgctatgctgagcacaagttacagttctgggcagtgacagctgaaaatgagccttctgctgggctgatgagtggataccccttacagtgcctgggcttcacccctgaacatc

SEQ ID NO: 585686 - DNA, 282 bp, Homo sapiens
aggtccgctaagacctactaggggtcatgtggactcagtgaggtccgttttcacggggtgaatgcgaggtgacaagtagcaacaatgcgagtacttgtccttcagctcgagcggtggggtcactagtcctctgcatggatactcagggcatcatgacatctggacggtcagcggtgtgtgccgggtgtaccgagccgtgctagttgccccagctggaacagtcgccgtggagcggagtggaggacccggtcggtgacgcgcgatagtaaagtcaggcggggt

SEQ ID NO: 585687 - DNA, 129 bp, Homo sapiens
gggtgtagcaggtgcagtgcgattaggcaggtgcagtgcggttctgaaaagccgctctcagccaatattgacagcctctgcacacccattccttggagagggtcagtaggtgccaattccacagtgggg

SEQ ID NO: 585688 - DNA, 344 bp, Homo sapiens
agcctttttactgtttggctgttgcgaatacagaacaccaggacgctatggacgattcgattatggatgatcgaatgtctaaaatttatcatgaacgctgtctcgactacaccgaggaactgtctcaggtgaatcttgttccgaatttcctgtgacaacgctgaatgccctgtgtcaaccggtaacatcatgaggtctaccgataattgatgctgaagtgaaattaccttcatgctgtgatcgcatgagatcaggctcgactatggattggatggtacagctggtatatttggccatgacctagatgacctgtcacttcgtactcgggcatttggccattggcg

SEQ ID NO: 585689 - DNA, 715 bp, Homo sapiens
cgtgacatcggctgtttttaaactgtactggattacacgtgtaagcatatgccaagctttccttctcagtttcacaatttgtagtatgtttctgactataaataaactgttctactggactctctgggtgttacctatgatattgtataatgttagctaatgtcagcacttgggaagactaaaatactaactctgtgtttattaaatgaaggaatttactgagtacactctagcataatcaggtactttagtaagctgttaatattgctttctgccagttcctgaatccgtgttatgttctttactcctcatgagaagttgatgcattgtgaaatctgttttcttaagcttgtctgtcagctagccctagattagtattctagttacaggctaagaatagtgtctttcaccactgtggaagacactgatacttgtctactgtttggccattgctcttcttattattcttagttcttattcacccatattctgctctgttgacagttttagaccacacttcttatgtgtgaaatagacaaatattttccagcatattggatagttttagctgtcatctattaaatgctggtggtggaccgcagtctccagtgacaaccaaaaatatcaccgtgcatttcagaaaacttctggcatgttaatagctactattaatctgatcatagtcatttccttcttaccaaatttttaatttata

SEQ ID NO: 585690 - DNA, 102 bp, Homo sapiens
taatgcggggaaaggctccattcgaactttgtgcccaagaatgaacggctcattatctcaggatgatggggctggaggtatagggagaaaagaagaaggaag

SEQ ID NO: 585691 - DNA, 123 bp, Homo sapiens
atcttctacctcagactactgagtagctgggactacaggtacacatcaccatgaccaggtatgtattgggtattgacaaagtatgccacgtaacccagtgctgtactaatttcttttcttttc

SEQ ID NO: 585692 - DNA, 1416 bp, Homo sapiens
gctgttggtttattgtacgctaggttggttgtgttagtttttgggttggcgtcgtggttggtttcgtcctcgttttggtgttgttgatttcgcgccgggtggtgtcgcatctatttgttttgaggcgtcggtagtgcttctgcagcacttggttgttgctgctcctcacgtgtgtttctcttggactatggtttctcttgtgtggccttgtgacagggggcgctctgttctaccaggtggcgcgacctgtggctctcggtgtgaactggtggtagctccctccccgggggtgtgtcgccttggggcccccgtggtgtggttggcgcggtggctccctacgggtggttctttccagtgtaaggggcagcacgttgggtgtcacctggtgtgtgtggtttcccgggttttgtgctgcccccttgtgcgctgcaggggtgtttgcgcctctatctccgccccatgtgtggttcccttggtgtgccctcgctagacccttgtgactgggggtgccccccctgatgtggcgccgcttgcgcgtgatcaggcgccccctggtgcggccgagcccccgcgccgtgttccccccgcctgtgtgccagggccccccttagtggggcccccgccaaatcggcctgtggtaggggcagctgccagactttcttggtggggatgggtccatccgttgggggcaaccctcgtgcttacggcaatttggggagcccccccacgcgggaatgacagtagttccttaacgggccgtttccgcgtgaaaaaccactggggcctcgtggatcttgtccacgcccgtgggactctctatggtttggggagccacgggccccacgatggcctctcggggcttgtccccagttcacaggcggggcgcccccacccccccatttcaaaagggagaagaatggggggcgaattagcctggggacactggggggggcccccctgggagagaccacgactcggcgagggacggcgtgatcaaccctgtccgttttcccgtgtggtggcaactgtcggtttccacgtgtcctttagcgcacaaattgggaatgccccacagagggagctctccaatcccctgggctctggggtgtcacagacaacacgtccacgcatatgaaggttacggcggccccttatgggcaccctcgggcctgatatgtttccacttgaatcccgaccttcttggccctggcccttaacttggttgccccaagcttctttaagagccttctccacagtttgcaacctgtgccccacgccctccacctcactctgtccctgcagcaccaccacctcgcacccctcgcaccttccattttctccccagtgcttcagcacacttccaggcccttttgcttatagagcctacctgtatccccctaaccaacacctgaaaca

SEQ ID NO: 585693 - DNA, 230 bp, Homo sapiens
cagtgggcactctgcccacgagctgccgaccatcaggatgcctgcagacatctgcccagcctttgttgatgtcgtgactggaaaatactctccgcgcaaatccatcctgaagtctcgaagtacagagaatagtgtgtgtagcgacactagtgaaagcagcgctgctgaatttgatgataggcggggagttttgaggagtatcagctgcgaagaagccactcgcagtgaca

SEQ ID NO: 585694 - DNA, 417 bp, Homo sapiens
  misc_feature (118)..(118): n is a, c, g, or t
  misc_feature (294)..(294): n is a, c, g, or t
  misc_feature (378)..(378): n is a, c, g, or t
gagtatcattcctgtcacccaggctggggtgcaatggcacgatctctgcccactgcagcctccgcctcccaggcccaaatgatgctcccgccccagcctcacgagcagctaggaccanaggcgcccgcaccacgcccggctaattcttgtatctttagtagagacggggtttcaccatgccggccaagtctcgaactcctgacctcaggcgatccgccgccccggccccccaaagtgccgagattacaggcgtgagtcaccgcgccaagtaatcacttactgaacacccaccantgggccagacattgtgcgacgtgttagggctacaaacctgattacacatggccctgaacttgagctcagcctacctggaaagcnaaacacgtaaacacatgacttacaaaatgtgttacatga

SEQ ID NO: 585695 - DNA, 535 bp, Homo sapiens
gggagcggcggtttgcatgagcaagtagaacagtgagctgcagagtgagtatgtgcccggagagcagaggtggtcagagaaggaggtcaagatgcgggagaaacaattttcccaggcacgacccctgacccgctacctgccaatccggaaggaggactttgacctgaagacacatattgagtcatcgggccatggtgttgatacctgcctgcacgtggtgctcagcagcaaggtctgccgtggctacttggtcaagatgggcggcaagattaaatcatggaagaagcgctggtttgtcttcgaccggctcaagcgcaccctttcctattatgtggacaagcatgagacgaagctgaagggagtcatctatttccaggccattgaggaagtgtactacatggtggccccatctgcagaggccatgcgtatctggatggatgtcattgtcacaggggctgagggctacactcagttcatgaactaactgccgtgggcctcctggcagagcacaactggcgcttttgtataagacgac

SEQ ID NO: 585696 - DNA, 1009 bp, Homo sapiens
gaaacaggcgactccaaaggtgtatccagttggtaatacagccacacagtaagttacaattctaagtatatggccattataattccatgtaaatttaaaattgtaatgggactataatgtacctagtgggatttactctaaggacacaactgcaaaaaatcttgggttgttttcttttatcatatcgtcggtacagatgtttattctgagactatgggtgtacggataaagtaaatgagtaattatgtcagtgtcatgtgagaacagattttgggcttgagatacagatgtcacctctccgaagattcagctaaaagctacagtcttagacttaactggacaaatactcagtaggaaatcatgatgaacgttctatatttccaaaatacaaaatggctgacttggtccacaaacacagggtctcagagcaatgaccataaactgcagctccaatagagtcatgtgacaacggactcaggagctttcactgtgtccaggtttcctccattgttcaaatatgggatagttaacgaatcacacgactaataacctgagtgactggaaacaaacaaattatatcttaaactaaagggctctttaatacttacatgaaaaatctcagcaattaccttggcagaggatatcagaaaaccagtcacggtgtgggaaacgtaccgtcgcaggggacaagtcacgcctttactccggccccattcgaaagacgcgacataagaaaacaagataacaggggggacacccaaacacggagcgaaatagcacacggaacaccacgcgacgcccccataccagaagcgcgcaccaacacggccacacacagtgccgcgcagcgcagcatcaccaccgggacaaatccccaggagctagaccatgaaccccgcaacaagcatgactgcgatcacgcgggcaaaccaaacgcccgcgccgtcacatgggcaacagaaaaagacacacaaaacacaacactcacacaccaacacagaccagacat

SEQ ID NO: 585697 - DNA, 229 bp, Homo sapiens
tgtcagtattctgtccccacattagtgcttacgagacagatgcgattccctggacgtctaaaccaaagcacgtttcacctgctacacgaccggggtgtctactacgtgtcaagtgctctgaaatcttgtggagcaaaccagagtttcatggccatcgtactagaattaattcccctaaaaatctttgaaataggggccgtatttagcctataggaccctcctcttttgg

SEQ ID NO: 585698 - DNA, 108 bp, Homo sapiens
actgctcggtctctccacgccgaacgtctgtggacctgccggtctttgagatgcttctggctcccatcccgttgcttgggttgacgtcagggggtaccgcgctcgact

SEQ ID NO: 585699 - DNA, 861 bp, Homo sapiens
tgcagtggctcagacctgcaatcccagccactttggaaggccaaggcaggcggatcacgaggtcaacgagattgagagcttccagatacttgggaggccaaggtagtacggatcaagaggtcaaccagaccgcgagaccagaccgggcgtggtggctcatgcctgtaatcccagcgactttgggaggccgaggcgggtggaacaagctgaggcatggaggataagctcttattcagagcattgagaggaaattgtgaagcttgcagtgagccgagattgtgccactgcactccaggctgggtgacagagcaaggactctgtctcagaagagtggcccgaaaacattgtgccataggctgtggagttccggaggacagtgtagtccccgctccatatgacgggacggtgccaagaccaaagcaatagctccgtgtgtagaacccgaggtaggcggaaaggtttagtcgattgactccgacaactggaaccactgtcgtgccacccatgggggagaagacagaactgctgctcgaaacagaaacagaggcagcgcagggtggaaccggtccggaaccgcggcctgtcacggaacacgtcccataacgatcgcgacggagaggcgtcagacgtgcaggtatcgccgtgggaggcacccaagacatatctagaggagccgcgccggagagacgacaagatatgggccagaaaccccgggagacgcgggagatggtaacaaggaatgaccgcgacaggcatgaggaccccaagggaactcccagactaagggagtagcatcggatggacaagcgccacactctacaagacaccaaccataggcgaacccatcgagaactactaacg

SEQ ID NO: 585700 - DNA, 168 bp, Homo sapiens
gtgtctcattgaagctatgagtattcttggcatcactgcagctagtaattgcttctggagcctggcactgtgttgctctgtttgtaccatttgactgctccataccaagagtccaagtggcacaaattctgggtcgttgtccatcacaaacccgaaggtaccgagctc

SEQ ID NO: 585701 - DNA, 288 bp, Homo sapiens
tggcatataaaagggggattttttaattttaggccccatagattgtggtaagtgtgccctgaaggctagcctttggtatttaaggaaattggcccttccccctttcaatgcttgtgttcccagttagggggactcggctccccctttaaatttcctataggaaagctttttataaaaatttttcccatgtggctaccctttctccccttgtttagatggggattaaaaccgaaggaacataacctttgtcccccccttttgttggtttttaaactggaaaaccaaaag

SEQ ID NO: 585702 - DNA, 157 bp, Homo sapiens
  misc_feature (27)..(27): n is a, c, g, or t
  misc_feature (36)..(36): n is a, c, g, or t
atcagctctgtaccgtctatagggcantagggatantttcgtctaattggttctgggaagcttcattcaagtcctcaatggtcatctgatcaaatggaattaagttcttcatcttctccatctctttctcatattctacaatcttggccttatcgag

SEQ ID NO: 585703 - DNA, 118 bp, Homo sapiens
tctctattatcgaccttccatctcgttgtgtgtgagtcgagaagggatcgtagctccatgctgtgcgagtagatgcgtgggctagcaacacatttaacaacatcatgtataaccagtc

SEQ ID NO: 585704 - DNA, 189 bp, Homo sapiens
cccaggcacaggattaattgccttgaagtcttattatgtaggaatacacttggtaaggctatagcttgccatagataattattcttctgatgaatctgggcaaagtaaatcgacaaccttctgaaaggattcagcagttctagagtgtcatataagaatatttggtggttcactgggagcaagatcaaa

SEQ ID NO: 585705 - DNA, 715 bp, Homo sapiens
  misc_feature (247)..(247): n is a, c, g, or t
gctctgtcagtcgcgagcgaacgaccaagagggtgttcgacatgctagagccgagggacgcgatgtcctaaagtcaaaggaactgggtgttcgttacaagacttcttctgggcagtgagtctctgacatgtgatgggttgaccaaagagaggttaacaggaggaaaatatgcaacgtggctcgcagaaaaacgcgtgtaagaggaatagtaaaaggacagggtgagaacttgcgagaagccctggtncaatctttctagatcaggaagtagtagccagtcagaggatgagtaacaattggtttctaggagttgggaaggatggaggtacgttagatgtgcgagattttaaaggcgaagtgtctaaattgaatatcagagaatatggcatggggatcctgaatggtgatagtgaatagcaggaagaaagggtatcttgttgaaatccagaagaattggagccagttgaaggaacagattgcgtgagcattgaggatgcagtaagaagaactgtagtaattcgagccagtagttaattaaatactctgtactgttactagtggtggaaactcgtgtctgttttacatgtggttgtggtagatctagagatgtgctccaagctatgggtatgtcaggatggcagaagaattctgtacgatgaatactttttcaagtgtgccttattaacaatatggaggtgaagtaaatgtgtgtacc

SEQ ID NO: 585706 - DNA, 256 bp, Homo sapiens
  misc_feature (122)..(122): n is a, c, g, or t
tcccagcaagggcctttttgtttaagatgtcccccttttttgagggttggacccacccatttttgtccctggggcctggtcccagccaattaggcccgctttggccaggggagagagagctnccgggggttttccctgggccccgtctccctggttggttctcccctcccttccctggccgggtgccatggccaggaggtaagggcctttttgtgggcaaccccttaccctttttttgaaaaacctgttttcagga

SEQ ID NO: 585707 - DNA, 815 bp, Homo sapiens
tacgtgatcccctctttagcacccctacgccccccatatccctaaattcgcgtgttcaatcccctgtgagcactctttaatagaatcttaacggctcctttcgctgtccctgaaacccgacagctgttttataaattatcgcgtcaaaatttcctccggcttctttgatgcagagctcgcacaggaatatcttccactcaactggggaaattctgcggggttctcccacctccacgttcaccctcgcgagttattacaacaacctgcggtacctcctccccccattcttttattatcccgcgggcgttttctcccccccgctccgagaaaacttattacgccccctggttttccccccatcatggaatagaacaatatctccccactattctctccacgcacggcgtaggtagtaaaatactaacctcttcgcgtttgctactatttgtatagacgcactcgactcgacacacacgttgtaatgtaataaaaataatatactgccatattatacttcctaaaaaatatctccatttataacataacatctttgaaaataagtagggtattttattgtgtgagacacactcctctcatctcgtcaatcaaagtgtggagtaaatatggcatcctgtctgtatatatatgtgtgggctaacaggcatttttcaaacagctgtccacggagtgtacccacgattgttccaacacccacggaggggcgagccaatagagctgggggaagcacgacgcggcggttgcccccttatgtcgaccaccacgtaggaaacgtcggcaaaaaaacccaacataac

SEQ ID NO: 585708 - DNA, 118 bp, Homo sapiens
ggggacctaaacccacaaacacgtagctaacagcatagcacccaaatctaacttgcatcaactatcgttctccgccgccggaaaaaaaggcgggagaagccccgcaggcttaaagcac

SEQ ID NO: 585709 - DNA, 308 bp, Homo sapiens
  misc_feature (105)..(105): n is a, c, g, or t
  misc_feature (145)..(145): n is a, c, g, or t
  misc_feature (157)..(157): n is a, c, g, or t
tgactctacaggatcttcttcttaacgccccaaactcactccagtgaatgttgttctctatgaacagccataacacactccagtgaagggttctctctgaacagncctaacacactccagtgaagggttctctctgaaacagccntacacactccantgaaggttccctctgaacaggccttaacacactcccgtgaaaggttctctcttcatccaggcctaacagactcccgtgacgcgttctctctgaacagacctaaaacactccagtgcaagttttttctctgaacaaggctaacagactccag

SEQ ID NO: 585710 - DNA, 830 bp, Homo sapiens
ttaatttcagtacgctggccgggcttacttgtacctccactgtgccgtggccgttccatttacaatcacctcgcctctaccccactaacatcccagacttaaaattcagtacatcacatgtacaccgaaaaaaaaaaaaataaaaaaaaaaaaaaaaagaaaaaaaaaaaaaaaaaaaaaaaaaaaaagcagtaggaagcgataagtatcttcacaggtacagaaacgaaacagagttactcagcagggacagtacagaagtatgtagaggtatattagtcacaagccccaataagttatagtaatacgaacaggtagtatgatattctaccacagcaagcagaaataaaacagaaggaagatacaataaaaacagcagacacacagcagatagtataaaaatagaattatatattaatgattatatgttgaataataaatgaaataaagaagaaataagaaaaagagatagaatagaaaaaagaagaagatatgaatatgagaaaaaaataataaaagagaagaataagaggataggaaagaaagaaaaaggaaaaaaaaagaaaaaaaaagaaaaagaaaaagaagaacgatcacgaacaaacaaagagaaaaagaaacagcgagaaaaagacgacgaaaaaagaggacagagaagcaaaacaaaagaaacaaaaagacaacgacaaaaaaaaaagcgaagagagaaaagataacacgaaacgcagagacaaaaaaaaaaccaaagccagaaaagaccagaggaagacaaaaacaaaacgaacaaaccaagaaaagacgacaacgagagaacaacaacaggaagaaga

SEQ ID NO: 585711 - DNA, 260 bp, Homo sapiens
cccccccccccttttttttcccccctattagaccccggggccgttcccccccccgggcttttaccttggccccggggggggttaccattttccccccggaacccctttttccctttggccttttttgggggcccttttaacccagttttttccaaaaaaccggcttggtcccggcccggttttcccgggtttttttccccccccggtccccgggcgggtgggggggcccgtgggcgggccggtggggggcccggttggga

SEQ ID NO: 585712 - DNA, 475 bp, Homo sapiens
  misc_feature (10)..(10): n is a, c, g, or t
  misc_feature (16)..(16): n is a, c, g, or t
  misc_feature (36)..(36): n is a, c, g, or t
  misc_feature (80)..(80): n is a, c, g, or t
  misc_feature (117)..(117): n is a, c, g, or t
  misc_feature (463)..(463): n is a, c, g, or t
cacctcctangctganggccttcccctcaatgtggncccctaacccttgaaaaaaccctacttggtcgtcaaaatacccnatatccccatctgtgtttaagaacttttttcaacccnagatgtccccacctacagtgtctccttcccagcttgagaaccctgtaattctttaggtgtaaagaaggtcccaccgggtgctgtggcctcatgccctgtaatccccagcactttggtaggccgaggcaggcggatcacgaggtcaggggatcaagacccatccctggctaacatagtgaaaccccgtctctgctaaaaatacaaaagattagctgggcgtggtggcaggcacctgtagtcccagctactcaggaggctgaggcaggagaatggcgtgaacctgggaggcggagcttgcagtgagccgagattgcgccactgcactccagcgtgggcgacagagaanaaactccatctc

SEQ ID NO: 585713 - DNA, 524 bp, Homo sapiens
  misc_feature (42)..(42): n is a, c, g, or t
  misc_feature (59)..(59): n is a, c, g, or t
  misc_feature (103)..(103): n is a, c, g, or t
  misc_feature (115)..(115): n is a, c, g, or t
  misc_feature (143)..(143): n is a, c, g, or t
  misc_feature (174)..(174): n is a, c, g, or t
  misc_feature (177)..(177): n is a, c, g, or t
  misc_feature (184)..(184): n is a, c, g, or t
  misc_feature (201)..(201): n is a, c, g, or t
  misc_feature (207)..(207): n is a, c, g, or t
  misc_feature (267)..(267): n is a, c, g, or t
ggccgtccgccagtcgattaccctcctagggaacaagctggnctcccgcgtgcggccgnttagaattgtggtccccgggtgcaggattccggccgcgtcgatncggctgcggaancgacagagggactccgttgacacaaatngactcgaagtggctttaactatctgaacacncantgctagncccaactgggattagtnccccanttgcttagccctaacctcacagttaatcaacaaactgctcgccagaacatacgagccacncttaaaactcaaggactggcggtgcttcatatccctctagggagcctgttctgtaatcgataaccccgatcaacctcaccacctcttgctcagcctatataccgccatcttcagcaaaccctgatgaaggctacaaagtaagcgcaagtacccacgtaaagacgttaggtcaaggtgtagcccatgaggtggcaagaaatgggctacactaccccagaaaactacgataacccttatgaaacttaagggtcgaaggc

SEQ ID NO: 585714 - DNA, 154 bp, Homo sapiens
ttcgattgtcgggcacttatcaaggacggcaagctgatcaagaacaatgcctccactgactatacctatcttgacaagagcatcaaccctctgggtgctttgtccactatggtgaacgtgacccactgactttagtctggctgaaagggctgat

SEQ ID NO: 585715 - DNA, 962 bp, Homo sapiens
  misc_feature (279)..(279): n is a, c, g, or t
  misc_feature (514)..(514): n is a, c, g, or t
gccgaatcaagcgagtggaaccggagaagctcaatgctgggcgtcgatgtcagcagggtaatttcgcagagtggagtagggtgctctggggcctgatgacgaacgtgtgctttccttttgaacggaagatccgtggactgttccccagggaagaagcgtgcgcgtgctgcagcaccggatgaccgaccatggcttcgcccttggccagcttgcattcctgggaggcggaggcgcgaggactgcgcggagcacatgaacgaacagcagaggttctcgcancaagatctgtcctactactggcatcggtacctgtcgggccaagcgaatgcaatggtgaactttcgcgtctcaccaatagacttgcttttaagcacaatcagaaaaggaacatcgtgtacgatgccactcataggtgttaacgcccacggagcataagagctgagcactaggcaagcatgtgcgtgacctattaactcttatcaacccactagcgggtccaagcaccagcgtgacntttggagcgactagaccgctatctcacgtgtgctctagcgcgaacgaacactcgagcgcaacgggcttctctgtcgattcgcactttcattacaaggtttcgccaactccttagttcctaggatagggttggcgcacgtagacgtaagagacatccacttttaccctcgttggttgaatgggccccatgtatcttgcggcctataagaaccacgggagattattagagccaacgaggcagagggagagacttccacatttgacttaggaacttgtctaatagtcacacttccttggcttggttagctcctcttactggatagttaaagcggaagcccgttcggctttgaaaatgccatagtggctattaccctaacggaaaaacaccacattggagagttccacactagatttcggctttatttgcaacgcaatgggcctgtgtattc

SEQ ID NO: 585716 - DNA, 174 bp, Homo sapiens
cacatggattgaagctgtcctctggtgctgagtcagttcctgggtgggggccacaagaccagatgaaccacatttatcaatctggttagggacagctgatccatcgagtgcagggtctccataaatacctgttatctcggaggagcaatttgggaggggtttagatatcttgcc

SEQ ID NO: 585717 - DNA, 1781 bp, Homo sapiens
aaatggcgcgttcgtccttgtaagtgatcgagattgccagctgagtcgcgagaccattagtgagtgtcgctgactcgtgagtagcgttcataacatcctaggtggtctagaccgtgctcagagtaatattacatgccatgtactggcgagggaacacgaaccttcattcctcaaggacatagggtagttaggtaattagccaagaggcattaagacctcttgtataacccgtatatgacctaatgcgaggtccttccaaaggactagtgatcatctgccaacgtgaggacgctacgcagcagaacagggctctcgctcacagcagatacctaggcgagcccagtcgttgagctcgtagctggtatactaggggtttagacatatgaatggtcaggaaactccctgtttttggtaagtcgttgcgcggacattgcgcccatccaagtaggcgccactgtggatgtcgctcgtcacagggttccggtaaagaagcttgcataaaaaaagtcgcgttgatcacccgtaggggtgtgcgtcgcgtttgtgcgttactcacatagcaatgtagttgataactcattcaggcactacttaatgtaggatgtcccaacatagcggtgatggaattggcctccatatatgggcagggagacaagacggtccattggaccgaaaagaggacccatggcgtaacaatattaacccggcgggtaatggtattataccacttcgacattgagttacaaggtaacagattgtgcgcctatgaggtggactgtggatgaggcgattagatttgtcttccattaaggtgaaataccatagaggaagtagattagaggaggcactttctgttgagcagaaagagatcgtggggttacaggcccaaaatagggtcttaggttggaagcacaacaggatttacttttgaaagggattattaaataaagagagcctatattaaagtagaacgtatatttggaagagggaaaaaattgggcgattaggtatagtacgactccattacagtatagctgcgccaatctatagaccgtaatcgaggatcaaattgcgccaaagattaaattagctttcaccctcgcagttacaatcggtgtccaggcaagacgtaaaaacaattgagagaaagactagatgccacatataggggagatggcagtaacataggcgcaatgcacagtatccaaccactagtacagggcgcactaaacgcacatcacacttttggcacacagacaaactattaataccgatctctattagaccaagtgaagaacgccaagggacgatctggcacgacaagggagacgacgaccagacctagttcaccaaggggctcggatgcacacacaccggtgccgaacgacaaatatcaatcactggcgaagagacacgacacacaggcgcgatggcattataccacaccaccaagatgatttccgatactacaaggaccgtacgggcgcgtgttcaacaacacgacggcatgcggagtacagatcaacggcacaggcgccgagcccggcaaagaataataaacaccccagacagaaagcaacaaccagcgaaaataacagagacgaaccacagataaagcagaacgggcacccagcacacacgcaatgaagaaaaaccgacaaccacagagacccactgcaccacagcaagaacaacgggcgaagcactctcaacaagctagtacaacaccacacagagctcaacaagcgaatagcacacgaaggtgagaacgcacagaccag

SEQ ID NO: 585718 - DNA, 195 bp, Homo sapiens
ctgttctagaggataccttcttgtgctggcgtgtggtccttggtgtggcttcggtggtggcttgggtgctggcttggtggtggtttgctggtggtgatggcttctggtgggcagagggtagtaattctctcaacacagagaaaacattagtgtgataacaatgaatcaaagacagggccagacaagaaccacacg

SEQ ID NO: 585719 - DNA, 278 bp, Homo sapiens
ttcattacaggcgtgagcgacatgcccggcgtggcctatcatgtcttgttttgttttgaaacacagtttcattcgtggcccaggttgaattgcattggccaaatctcggttcactgcaacttctgcctcctaggtccaagcagtcctcctggttcagcctcccaagcagtaggcataacggccatgcaccaccatgccgggataatacacccattctttgcagtagagaccgtatttcttcatgtgggccaccttggttccgaactcctaaccacttt

SEQ ID NO: 585720 - DNA, 742 bp, Homo sapiens
  misc_feature (159)..(159): n is a, c, g, or t
ttcaacgttatacaagagttcacagtcttcatgtaccggaacaaaatcttctgatgatctgcctttagagcatctgtgaagctccaggagagtatcagtgattaagtaagactatttcaatgtggtccacaggtgtccgccatctcgcaggagctgganacatctcaaatgtgtcaccagtagtgctccttatgaacgacgagtgtatcacacagtatggtgtcagtcaccttgcatccaggacagcaggaagagactcgtggatcacatgcagaggtgtggttaatccttgcaagttatcatcgagaggggggtatcttttgcacagagtcgcacatgctctgtgtctgtctaggatattacacagacctatcaggcagaaactggggatcgccaggcatatacagtgtggggtgtgtgccattccatatgtctgtgccagatcagagagtcagttgtcaaatgtatgtccagcaaattttatattcaaggacgcaggagagtacttcccgtgtgtcatactccatgcagggcttatattttttttagtcatatagacagagtagctacatgtctgatagaccacagagagattggtcacgcatttgcgtgatcgtcattaatactcatttgtaggttattaccagtcgctcgtaggaatagccgatcaataggaagttttcttctcccacagctatgtgcgcagagtagaatgataatgcaacctaccacacgttagcac

SEQ ID NO: 585721 - DNA, 244 bp, Homo sapiens
tgtattaacgaagaactgcacgccacctctgagacggagaaccacgtgcacggtgcactcttttcgcggggcgtcgtcagacaggcagcgaccatcttcactgtgcttcccgatacagatcaacctctgctgcacaagaaaaacgccttccttatcttgcatctttgccttgacattctctatggtgtcactggcctccacctcgagggtgatggtctcaccagtcagggtcttcacgaagatc

SEQ ID NO: 585722 - DNA, 173 bp, Homo sapiens
cgtcctgaatagggtacgatcgtcgatggtgtaaaatcgctccttcctcaggagtcagctgggctcccttctggcggcccaggggcagcgcatagggggcatcggtaccaccggtcggtagggggtgctggtcaatgagcacgaggcaatccttcaccagggtctgggaaggg

SEQ ID NO: 585723 - DNA, 965 bp, Homo sapiens
  misc_feature (779)..(779): n is a, c, g, or t
acttagccagtggtccataataatgaaccaattctgaactctgctattatctaatcgcctctatcacaatcttccttagatattatcatcgttcgcagccacagaatgaatcagatagttataaatgctatcttggaggtacacatttagtcacctctacctttgcgttgagtcatcatcccggattggcgattcagtcctagactagtaatcgccatgaagcgtcggtcccattacttcgtatgcatagactcacttagtagagcttcccattctccctgactcaattgcgtcgaaataagttgcatgctggagaaacatcccttagggcccggtaaagattactgacatactctattgctttaactgtccaagagggtatataatactctctggaagtagacatagttaggtgatgcattaggttacaaaatagttgttatagataatagggtggctactttcacggacttactcatttcatgagtcctaataagatcatgatcagaattgtccctgaatagagagggttcataagtactatgactgagggtaattcttgaaacatagggggtgatgttcataatttacgtcctctactcattcttaatacgcttgtgaatatacacgtacgtcattaaccccttgccttgtaacttagccctatgagggctgatgctaacgaggtgtcgatttgcttcgagactggacaaaggctggtgatggatcccttgcatcaggcagttagcccttgtcgttgcggatgttgataccaagcncctaaaattcatcgggacaatttgtcatagtggccaggttggtccactattatgggcgcgactaaaaatatgcccaagcggataacctccaaggtaccttttcccatgcttgtggtccaccccaaacagtactcccaaaaagagcacggacaatcttgagtatataacagaaaacactctttacag

SEQ ID NO: 585724 - DNA, 134 bp, Homo sapiens
tccagatcagagactgagatcactgaaccatgaacctggacatcagcatcgctctcctgctaacagatcttgcaggtctcccgtagggcagcaggtgaccagcactaacggacatgcctagtaggaccagagcc

SEQ ID NO: 585725 - DNA, 774 bp, Homo sapiens
ccacagcgtactgggcctgtctgacatgcctgcctgaccgtggattctgagaactggattgaagtgaagaagaggcctcgtgtctatcccctagatacggcccaagaagtcagaggaggtccatgattttcccacctgatcctctctgcctcagcagctgccttcccagcagctgtatgtccaaggatcaggatgagcacgaggagctggattttctgtttgacgaggagatggagcacgctggatgggcggaagagcaccttcagctgcctggtctgatgaggaatctgactatgagattgatgacagggatgtcaacaagatcctcattgtcacccagacagccacattacatgtcgcctgggcacgccagggggggacctgctacaggcaaccacaacctcgacgtgccatagtatgagcgccgaactggccacaggctcgattacatgatggcctcattctactatgagcatggacctgtgggctgaaacagtttgaaacctgtagtatacccatgatcaagctaatgaagtcgtagaacttcatgaccatggtcaatctgatcagccgggagcgaggtttgacgcactgacccctgagccccctgtggatcccaaccaggaagttcctacctgggccacctcggttccagcatagttcctacggatgccctggacaacaagttgtatggtgctcctgagccctccaccatcgcccgctctctaccaaccactgtcccagagtcaccaaactaccgaacaccaggaccct

SEQ ID NO: 585726 - DNA, 304 bp, Homo sapiens
  misc_feature (1)..(1): n is a, c, g, or t
nggtcagtgaattgtgatctcgagagatacttaaggataaggaaactgatgcctcagtagcaatacagactagctctccagagtcagaccagaaaatatgtttgggctgaatttcaattcttcgtatgagttctgtatagtcccagtcatagaaggctaagccatttacagatctgactcccaataagaagccgccgtagatactttctgctccaaaatctggtttaaatgattttttttccctcccttggtttttaaatagagacagtgtctcacttggttgcccaggctggtctcaaacacc

SEQ ID NO: 585727 - DNA, 320 bp, Homo sapiens
gctgtatccctgaagctgtaccgggagctcagttgggtaaagggtgtcagaagaatcaagctatgattttctttgttaaaactttattgtagagcagttttagatttacagaaaagctgcaaaggatgcaatagacagttcccatgtccctcaccccgtttccccattgttaacatcttccattactacggtacatttgtcacaacaaagaaaccaacactggttactcactaataactgaactccaacctttatttggatttcaccagtttttccattagtaacctctccccgggatacagctgtatcccgcgatacag

SEQ ID NO: 585728 - DNA, 3060 bp, Homo sapiens
agagtcttccctcagcatattttacgatagagaagatcttgttccaatggaagaaagtgaggactcacagagtgattcccagacaaggatttctgagtcccaacactccctcaagccaaattatctttcccaggccaagactgacttctcagaacagttccagttgctagaagatctgcagctaaaaatagcagcaaaactcttaaggagtcaaataccccccgatgtgcctccacctctagcttcaggtctagtcctaaaataccctatctgcctacagtgtggccgatgttcaggacttaattgccatcataaattacagaccacttcggggccttatcttcttatctatccacagctccaccttgtacgcactcctgaaggccatggtgaggttcggttgcatcttggctttaggctgagaattgggaaaagatcccaaatctcaaagtatcgtgaaagagatagacccgtcatacggagaagccctatatcaccatcacaaaggaaagctaaaatctatactcaagcttccaagagtcctacttccacaatagatttgcagtctgggccttcccagtcccctgctcctgtacaagtctacatcaggcgaggacaacgcagcaggcctgacttagtagaaaagacaaaaactagagcacctgggcactatgaattcactcaagttcacaacctaccagagagtgactctgaaagcactcagaatgaaaaacgggctaaagtgagaaccaaaaagacctctgattcaaaatatccaatgaagagaatcaccaagcgacttagaaaacacagaaagttctacacaaacagtagaaccacaatagagagtccttctagggaattagcagcccatttaagaaggaagaggattggagcaactcagacaagtactgcctctttaaaaagacaacctaagaaaccttcccaacccaagttcatgcaactgctttttcagagcctaaagcgggcattccaaacagcacacagagttatagcttctgttgggcggaagcctgtggacgggacaaggccagacaatttgtgggcaagcaaaaactattatccaaaacaaaatgccagggactattgcttaccaagcagtatcaaaagagacaagaggtcagctgacaagctaacgccagcaggctcaaccattaagcaggaggacatattgtggggaggaacggtccagtgcagatcagctcaacagccaagaagagcttactctttccaacccagacctcttcgactgcccaagcccacagattcccaaagtggtattgctttccaaactgcctcagtggggcagcctctgagaactgttcaaaaggacagtagtagcagatcaaagaaaaacttctatagaaatgaaacctccagccaggagtctaagaacttgtccacaccaggaaccagagttcaggcccgaggaagaatcctacctggttcccctgtgaagagaacctggcaccgacatcttaaagacaaactcacacacaaggagcataaccaccccagcttctatagggagagaaccccacgcggtccttctgagagaacccgtcataacccctcttggagaaaccatcgcagtccctctgagagaagccaacgcagttccttggagagaagacatcacagtccctctcagaggagccactgcagtccctctaggaaaaaccattccagtccttctgagagaagctggcgcagtccgtctcagagaaatcactgcagtccccccgagaggagctgtcacagtctctctgaaaggggccttcacagtccctctcagaggagccatcgcggtccctctcagagaagacatcacagtccctcagagagaagccatcgcagtccctcagagagaagccatcgcagtccctctgagagaagacatcgcagtccctcccagaggagccatcgcggtccctcagagagaagccattgcagtccctctgagagaagacatcgcagtccctctcagaggagccatcgtggtccctctgagagaagacatcacagtccctctaagagaagccatcgcagtcccgctcggaggagccatcgcagtccctcagagagaagccatcacagtccctctgagagaagccatcacagtccctctgagagaagacatcacagtccctctgagagaagccattgcagtccctctgagagaagccattgcagtccctctgagagaagacatcgcagtccctctgagagaagacatcacagtccctcagagaaaagccatcacagtccctctgagagaagccatcacagtccctctgagagaagacgtcacagtcccttggagaggagccgtcacagtctcttggagaggagccatcgcagtccctctgagaggagatctcacaggtcctttgagaggagccatcgtaggatttctgagagaagtcacagtccctcagagaagagccacctcagtcccttggaaagaagccgttgcagtccctctgagaggagaggacacagttcctctgggaaaacctgtcacagtccctctgagagaagccatcgcagtccctccgggatgaggcaagggaggacctctgagaggagccatcgcagttcctgtgagagaacccgtcacagtccctctgagatgaggccagggaggccctctgggaggaaccattgcagtccctctgagaggagccgacgcagtccccttaaggagggactcaagtacagtttccctggagagaggcccagccatagtttgtctagagatttcaagaatcaaacaactctcctcgggaccacacataaaaatcccaaagcagggcaagtgtggaggcctgaagctactcgatgaggcgaggtccgcccctattattcattgtcctaagtcttcatcgtgctgccctttccaggcttctttcctgctcagccactgcctccaattcctgcgcccccagcgtggaaaggcttccatttctctctaccgggggggaggcgggtgagaatgggtctgtaatttctctaagatgaataaaggggcagttaatt

SEQ ID NO: 585729 - DNA, 124 bp, Homo sapiens
cagatgcggtgcgccttgaccgcctacgggcgcgggcccggggtggcgccgccgcagggtgccgttctcgttggctttttggctcctccccccgggacggtcgcgcgccgggacggggtcccgc

SEQ ID NO: 585730 - DNA, 501 bp, Homo sapiens
ggactgttaaatcaagcttaccaagttttgcgaacactatttactgtgctgtgttgctaaatggttaaccgaagtctagtatctacgtgataaatataccagtttattttaaaagatgctgttgtgcctatatcatgaagaacattaatttctcatgtaaaaaaaatagctctaaaatttgtttacaacctaaattggtaacctgagatttatatctaggcatgaattcattatggtaatacacatatgtgaataacagtacatattgtgacagtattctaccattcagtaattttggttaatgattttaacacttctcagtgtatttaatatcaacttgttatattaattggtataaatagctgattagttaggacagatgtgtcttgaatgtaccattataagaagaattctatgtatcttaacctatgatcttctaaaataatataaccgtaagtacttctgtggcctagagtataaatacaaggtcaactgtagcct

SEQ ID NO: 585731 - DNA, 812 bp, Homo sapiens
aacaaaaatgaagatacaaaagtgaagttaggaaatccttgtaaagaaaatcatgaatgaacaaaggtaatatgtctagcactgcactgaaaaaggacttctgcatttctgacatagaacactggaatcccagtgaggaattctaaggtgaacattccttatagaaacctttcacatgaatgagctataaactgagagctttaaatgagctgtgaagtgtgttaaaatgtgttttgatacagtaatatataaatatgtctatatagtatgaggaacttgtgttttttaaatggtggtcaggtagaggaactagaaaagagattttgttgcgctgttttctgaccatcatgtgttattgtctagctgagaaactaaggatatagtaaatttaactaaaactacactgtcaccatgttaggtaataaacagatctgccttgaaagagaaagaagatctgagaaagaaatattgtggtcagtgttgttaatatagctcaagaattgagtttatatgtgcagtatgctataaatgatagcgctcctatcataagccagcgatcacacagtgtgtcgtctaatcgaaaaatgttggctgtgactattttatcatttggtagtatttcttccagaagaagctaagataagactggacttacctgaagtgcattaattaaagccaccactaaaataaaaaaacacacacacatccaaactttttggggcgctttggcccgtaaaaagtttcttaaccctgggggggccgggggccccaggtaaggaaacggccaggggtcccagaaactcggcaacaag

SEQ ID NO: 585732 - DNA, 341 bp, Homo sapiens
ggtcgacctccatctcaaaacaaaaagcagctaggtgaggggccgggcatggtggctcatgcctgtaattccaacacttcaggaggctgaggcaggtggatcatctgaggtcaggagttcaagaccatcctggccagcatggtgaaatcctgtctctgcgtaagatacaaaaatcagctgggcgtgttggcaagcacctgtaatcgcagctacttggaaggctgaggcaggagaatcgcttgaacccaggaggcagaggttgcagttagccaaaattgctccactgcactccaggctgggtggcaggagtgaaacttcatctcagaaaaagaaagtcgacg

SEQ ID NO: 585733 - DNA, 191 bp, Homo sapiens
ggtatgttgaatggcctagcatgtctgggagtatggcctgggacagattgagaatctgcagtcatgggggatggactagaaacttcccaaatgttacaacacaggccagggctcaacccagtcagcagcgcagcagcaacaacccccgatcccagagaactccaaccctaacaaagcccatgagggagaac

SEQ ID NO: 585734 - DNA, 232 bp, Homo sapiens
cagcttcggagagggattttggcaaagccacttggagagaattaggctgcagttttcacttggggccaggttagttagttacgcacaagagccctacttacttaaattagtagagagtgtaagtgtgggaaactttaaaattaaaaagagagcacatgctagagcccctcacattcacaggtacaggattagaagagatctacccacatttagagaaagagacacgctttct

SEQ ID NO: 585735 - DNA, 125 bp, Homo sapiens
  misc_feature (88)..(88): n is a, c, g, or t
cctcgcggtttcatgagcatgttccgtggcctcgcccaggccgacggcaccctcatcacatgtgtggattctgggattctcagagtcntgcatgacaaggacaaggacacatcctctgacccact

SEQ ID NO: 585736 - DNA, 398 bp, Homo sapiens
gattctgttggcactcgtaacgacaactggtagcaagattgctctcgcaagagttcgaccggacatcgcggagacggaggctcgcctacctcaagatcctggagagctcccagactttgctcagcgttctcaagagggaagctgggaacctgaccaaggctacagccccagaccagaaaagtagcggcggcagggacagctgaccagaccacgggcaggccctgccctccgtgtgcccctcagctcagccccagcaagtgtgtgctcagagcatctttgttcttcacggcagcagataccttccctcactgtctcaggtgccgagaggggcagggtgccaagcctccactggcatcagtgacgagtgcccagcgggttaccgagctccgaatcgtaca

SEQ ID NO: 585737 - DNA, 579 bp, Homo sapiens
taatatctttttttttatttaaaaaaaaagaaataataataaaaaaaaaaaaaaaaaataaaaaatgaaaaaaaaaacaaaaatataaagaaaaaaagaggacagggcaatgaaggatgggatgggggtagccaaagggtaaaggggggtaaaggaagagacaatggggacaaaaaggcaaagaagaagttacaaggaccaagttaaagggataaaaaaaatttttcaaaaatttgacaaaaaaggaaaaaatcttgacctaaacaaaaaagaaccaagaattagaggaagagaataaaaaatatatggagaaattaaaagtaataacgaaaaaagtacaaaatatataaaaatataaggcaaaacaatatggaaattaaatagtgggaatgaaaattaaaaagggaaacccaatgaaaaaaaaaaaaaggcaatgggaaacaaatttaaaattattgaaaaccggcataggaaatttccaaggatgaaaaaggtattccgacaaaagttaaaacgtaatacgagaccagaacaaataaaaagtaaaaactggggtgacaaaaggggaacctcaattaa

SEQ ID NO: 585738 - DNA, 1564 bp, Homo sapiens
tccctgtctgcctgcggagggggcggggtgcaggaacgcgcaactcctggccggaacttgtccggggtcgtgagcctggtccctgcacatttggtggcgcggctgccaccacattcgcgggtccaagagcgcaagaccgcaattcgaggttgggcgcatcgcgagtcatccaagggcaccggagccggggaaaggaacgggcgaccgggggatcataggccggacagcggaacacaccttccggagggcacaacggagcgcaggagacgaccagacaaaaacaccgcacaggagacagacaggcatagtagccccaccgcggagacatggcgaggggacacaccatacgtggacgaccggattattaaaaccagaggtgcatccacccaagaaggcctgaacagggccaccgcaaacccacagtgggccaaagcgagaccccggacacaccaacgcagacaaacccccccggagagggataggcacccagacaggataacgcgaaaggataggagcacccacagacgcccacggtcgggaaacaaaccgacacgcggaaacttaagaaaagaggtcccccccgcggcagaagcaaaacggcgcggcgccccccccaaagaacccgcaggaaaaaacactacacggaaacaaacaccaggaaacaacatgtagggaaacccacgcgcccacagggtgggcgacaaacgaacacaccgcaccctggagcgaacagccccaaagacggcgcaacaggcgaggatacaacaaggacacacagccaagaagaacggaaggaataaaacgcagcaaccacggcagcacacgaggacgcaagcgactacaaaagcggcaaacagacgcggccacaacacagcaccttgacaaagcaaacacaaaaagcacacggaccaccaagggaaagaccaaagggcatacgaggggaggaacacaggggcacaacagggaccacccataaaaggacggagatctcaacaccaagagtacaacacagaaacacccgggggaaaaaaatcccccacgacgagagcaccacgaagtaggtgtgaactcaccaaacgagaggcgcaaatacgagaaggccagaagatgatcaacccagggacaacacagaccgggcaaaaatgcaactagcatcaagagacacgccaccccatccgagagacgctcaaacaaaggcgccaaaaaaagaacaagccaagacacaacatattgaacataagacacacaatataacaacgcacacgagcgagaccagattccacaaaacaaaggtaacaaacagcgcgagacacaacacgccccgtgcccggggcaaaacaaaccaaacagcgggcggggtaacacacaaatcagagacgaccgccaagagagacgcgaaacaaagaagaagaccaaaacacaatgtgtggagccacgccgagagaaccaccatcgggcccgcgacaacaaaacgaactagcacgacaggacagagctgcaacaaaccgcggacggagatagtgtgtaaccaacaccgaacggcgcaaggcgagcaacagaacaa

SEQ ID NO: 585739 - DNA, 333 bp, Homo sapiens
gcttatcgagatcatctccaatgcagcagagtatgagaacatttccattccgcacatgagacatctctgaggcagttggctcagaaggtcccccacaagctgaaataaccctaagttcaatgatccgcacgtaaagaccaaccttctcctgcaggctcacattgtctcgcatgcagctagtcctgagttgcagtcagatacgaggggaatccctggtaaggcaatccgcctctccacggctccgtggagttctctcaccactagggggctcacccccctctgcagctattggacttgccccatggtaccacgcatgttgtcaagactatactg

SEQ ID NO: 585740 - DNA, 1055 bp, Homo sapiens
ggtgggcggccggtgagtcatggacggcgagtggacccttcagctgccccatctgcctagagccactccgggagccggtgacgctgccctgcggcacaacttctgtctcgcctgcctggtgcgcgctctggccgcatctgtggcgcgagtggagcctggcggaccctgtgaggcgcggcctgctgccctgctgtgccagtgagcccttccccgacgtgcttcagctccgcgaagaaccgacacgctgtccgagctgctgcagctcctgccagggctctgggccccgggtccctggcccggcccggccctggcccctggccccggagccctcggcacccagcgcgctgcccaggtgtcccggagccgtcggcgcccctgaggctcccgagccgtggcccgcgggcgaaggagccagtgcgctgcgacgcgttgccccgagggcgcgggcctgcccggcggagcttgtcccttgccgtcatccatggacgtcgaccattcattataggcccccaggagaagacttggggccccgaaacgaaagcggcagcacccggcacccatccgcgagaacaaacggacttggtgcccggacggattgggcctgggctaagagggaagaagccatgtgacacgggggcgcagcataaccgggccggcaccgaaggcggcctacaatagccggcagcgggaaaccggcagatgtttgtcgttgtggccgaagcgcgcttgcggccgacaaccatggaaagcacacggggagaccaccgaaggctaggatgcaccggattgcgaagccaggggaagccgccgcagccatacaaggagaagtgttggggcactcggggggtgaacgagtttggtggcttgaggaagtgccaaaaggttccttgaaggcggcggaggggagggaacggaaatgttgagcgaagcatgggttagattggggattgggacaggtgcgagggaagacagcaggaaggcgcataatagagaagttgaaggccggtaatcaagaggtggaaaaggaggataggcgagggagttattgaagaatg

SEQ ID NO: 585741 - DNA, 1068 bp, Homo sapiens
agcggggaaatggcgtatggtcaggtacgcagcttacaacaagctacgttagacttttctttctaaatatttgcaatattttccagttatcgtttaactactagcctttttttctcttgtctgtctcgtttcttctgtcttgacgacgagagtcgtcgacctccgtctgctcagtgctggaggtgcaactggttggtgacactcgggtcactggcatgctcctgccgtcgcggttccgggcgagtcttcctgccatcggactcctgggtcaagcgtgggacttaccatgagtgacaatgtgcacaccattgcgactgtgttaaatgtcgtatggtactacatcaagtaccgaagaaccggaaagtcttcgtcaacacgttaagagtaaacacgcctttcgaacatctttgcccaagattgaagtcataagaaagaagcctaggaaaaagccttacagtaacttttggtaaattagctgaataataatccaccaaatacataccgccagttagattcttcggacgtgggtgaaataaatacaagtcaaaattctgaagccgccttatatgcatgtgggaagaaaaaacaacgaagaaagaaacacaggttggaggacaacccaggtacacggacaaagattgcgtttacatattcaaccccggtgactccaattcgagacccaatcctttacatcgccaggataattcaattaccttgtgacatggatccaataacacgaaaggggacgtggatggtccattcagagattggtacaaaaagcaatgacaaggagaaaagcatgagcgcgaaaaggcacaagcaaagggaaaatcaacacacaccaagaataggaacacataaaggaacaaatgaccagtagagcagcaaagaagcaaacacgagccaggaagcaaaccgaagaatgaaggaccggagaacacaatgagatgataaggggaacaatggaataagatagaccaacaacgagaacacaacgaaaaaccacagagcggacacacatgcgtgaagatccacctcaggaagagcaaaaaaaagaaccaaggcaac

SEQ ID NO: 585742 - DNA, 819 bp, Homo sapiens
gtgaatagaaggatgaatcctaaggtgctcagaagcactgcagacagatcattatcatatttgcttccgtggcagtgtggcgagtcagctaaataactttggacgccggtggggaatagcgatgattactgtgtatgcggaagtcgagaatactgctcgctgctgtctacgtctattcctagctgtatagatactatggtgtgctcactagcgatagaaccccaagtgaagccaagttgatatcatagattcataacatacctatgtatccaaatggttctttgtgtacaccgggagtaattctagtaataagtatgtggagattattccgacatgccctggtatgggattagagacattatcaaagcttcgagcgtgtgagccgactagacatccggaactaaggttgtgagaggcatctgaacttgggtgcactgaactccttctcggttggacgcttcgagatgacgaaggcccagttgcatacgacgtgatctggcgcttgccaggttcctgtatcgcactgaactgatcggcactggactatcttcagatacttggggagtatcattgggtccccacagggtacaggagttgctgggagaaaatttcgggatcctgtggcccttcgcacgacatcagaagcgccacgtgcaaagctagttatgcgattggcccaggcgcgagggtgtgaacccctaactgccagctgttggaatgcagcattgaccccattaggttggcgcgccccaacacgtcactgggggaaacccctagtttgctgtggtcactgggaccagcagcgcagcaatggcgcca

SEQ ID NO: 585743 - DNA, 103 bp, Homo sapiens
ctagtatgcgtggctgtagtgcagtcctgggggcgagatgggggtagaaatgcattttattctttacgttcacgtaacgatacaagtcctggctacatcccag

SEQ ID NO: 585744 - DNA, 167 bp, Homo sapiens
tccggagtgtgcatttaagatgcaagcttcagagcctgaaaatgtctaaaattagaccccatgactgacaactggcctaggctcaatgtctatggaatgtgctctactaaatttgctaccatttgactgtgttccctccaaaattcaggtgtagggcgataacatca

SEQ ID NO: 585745 - DNA, 142 bp, Homo sapiens
ccccaaatatcttgttacagttagtgggcactggtctttgagaatcttctctggagacagctctctttggttccacaactctatccatccatcttgttgtgagccttgcattcatagctgcatccacccccccagcaaagaa

SEQ ID NO: 585746 - DNA, 314 bp, Homo sapiens
ctaaaatcagaattctgaaatatcactagcctcaagggtttcagataagggactgtggactgaaaatttggaggaaaaaataattgattttagctggcatctaatttatttttgttaaatttttgtgctttaaaataaaagtgacatacttaggtttttaaagtgagtttgaaataataggcattaactatggaagcatatataagtctaaattgaaacattcttcagaccaataactaatatatgatactttacattgttacaatttgggtcagaaacggagagatctgtgttaatttttgcagaacttactg

SEQ ID NO: 585747 - DNA, 194 bp, Homo sapiens
cactaccacgcccagctaatttttgtatgtgtagtagagacggggttttgcaatgttgaccaggctggtctcgaactcctgaactcaagtgatgcacctgcctcaacctcccaaagtgctgggattatgggcatgagcaccgtgcctggccttgctcccaaatttcaaagtccaagaactcctttgaacaattg

SEQ ID NO: 585748 - DNA, 107 bp, Homo sapiens
  misc_feature (11)..(11): n is a, c, g, or t
  misc_feature (70)..(70): n is a, c, g, or t
agcagatccgngccaccattgagcgggacggctatgcacagatcttgagggatctgggtggcattgtcgnggccaatgcttgtggcccctacattggccagtgggac

SEQ ID NO: 585749 - DNA, 1879 bp, Homo sapiens
  misc_feature (740)..(740): n is a, c, g, or t
  misc_feature (1525)..(1525): n is a, c, g, or t
cctattgttgactgttgctgctaggatggttagctgatgcagctcgtgactatgtgttggtgagtctagtatgtcgctgtcttgtgcatgttcgttcgctgctggtgcttgtgcctgcttgtctgtttctgctcgtccgtcgtagtggtgtggatggacgctatcgatcacatcctgttgtgtgctgtacaccactcgtgttggggtccaccatatgttgctcgttgggaggccccacacgggtggtgcaccgagaaacgccggcgttgtgtttaactgtcgccgcctctcgttttcttttatcacccggttcgtcttagaggtagtccgaaggctcctttggggggtcgcaattttccctgcatcacgaatggtgttgtgctcgcaccaccactgggccgcggtgtggggcccacgaacctccgcgccccccttgtcctgaaaaaggtccgggccatcaataaggggggagcgccccccacagaaaagaaaaaatgtggtgtgtgtaaacacccacaacgtttttctttaatagacaaggattttggtgttaaatcgagagatgtgggtgaagacgcgaaccccgtgcgctatatgtgttccccaaaatatataaaagagaaagatttattgttggggggaaatagaacccgcgctgttcgtgtggtctacacacaccgggggactcctccgatacgggggaaccgccgaacagaagttgttggcgactatctctcganatgtgggtgttttaccacaaaaggggttctcacttgtgttgtgtttgtagaaatgttgaagattttctcttcgccctcggaaatgttgtgccccacagagaatgttgaaattggaaacaagttggcaacatgtttttatagaaagtaaattttctcgcacagccttctgagtatttatcccgtcggggaagaaatgagttttctccaacagggcggtgttatataatctctcggcccccttcggagatcttataagacttggttcccacttcggccaccatggagagatttcttttattacccccgccgggagcacaccacaaaaattgggggggtttcccccacctcggggttacacaacaaaaaaatattggcgccacacaggcacacacatggaggagtttgagatgggcctcccacacgcgtttggaggagaggtgcccaaagagagctatacccgcagattgggttgtaaacatctggtgcgttttgcgtcctctgttgtctctgttgttttgggggtgtttatccctatataaaacacgcgccaccacaatctcacgagtatccgcgagaagacacctcttttatatgggctctcacgcgcaccccaccatggggtctccgcgcccagaatctccgcgagaagagaagaatgagatgggagaatctcatagtgacaccgctgagagagaggtggcgcagacgaccacaatagtgacacttgtgaaagagaagatggggtctcacatataaaagtatgtgatatctccagagaccagacncacttgtggatataagagacacatatagagaaatagagcgttttgtcccacatactttgatatgtgtatctggcttctcccatggatagtctttctcgttgagagaaaagatatataaatagctgtaagaaagccccacagatgttgtaattggggaagactctcatgggagcgcttctcatggtgtaagagccacgatagattctctgggaaagaccccctggggacagtagcacaccggtggcttaaattgtgtacgagctgatggatatggaccccccgtctccaggatctgtgtttaagattccagaaccttccaattagtggccacaattaaaagtgctatttgtgtgt

SEQ ID NO: 585750 - DNA, 120 bp, Homo sapiens
tgaagctgcatcatagggacatacattcattaggtattagctatctattatacattacgctatcaacatttatttatactagtgctcgggtagtagcaggtaaccacaaggatacttaat

SEQ ID NO: 585751 - DNA, 210 bp, Homo sapiens
ccttatttgagcatgctgaacagttgctgcctatgatgcgttgaaactctatgactggtacaatagtaggttacagtctatttatacctccagttaggttacagttcaccatgtacagagaaaccttcaggacaaacttaaaatatgtaaggaggcagttttcggctagaaggcagttttaacaaatctccccaatctgtcaatcataat

SEQ ID NO: 585752 - DNA, 391 bp, Homo sapiens
  misc_feature (6)..(6): n is a, c, g, or t
  misc_feature (18)..(18): n is a, c, g, or t
  misc_feature (41)..(41): n is a, c, g, or t
  misc_feature (81)..(81): n is a, c, g, or t
  misc_feature (85)..(85): n is a, c, g, or t
  misc_feature (95)..(95): n is a, c, g, or t
  misc_feature (155)..(155): n is a, c, g, or t
  misc_feature (159)..(160): n is a, c, g, or t
  misc_feature (165)..(165): n is a, c, g, or t
  misc_feature (170)..(170): n is a, c, g, or t
  misc_feature (175)..(175): n is a, c, g, or t
  misc_feature (177)..(177): n is a, c, g, or t
  misc_feature (182)..(182): n is a, c, g, or t
  misc_feature (184)..(184): n is a, c, g, or t
  misc_feature (190)..(190): n is a, c, g, or t
  misc_feature (193)..(193): n is a, c, g, or t
  misc_feature (200)..(200): n is a, c, g, or t
  misc_feature (205)..(205): n is a, c, g, or t
  misc_feature (213)..(213): n is a, c, g, or t
  misc_feature (215)..(215): n is a, c, g, or t
  misc_feature (240)..(240): n is a, c, g, or t
  misc_feature (254)..(254): n is a, c, g, or t
  misc_feature (264)..(264): n is a, c, g, or t
  misc_feature (275)..(275): n is a, c, g, or t
  misc_feature (286)..(286): n is a, c, g, or t
  misc_feature (292)..(292): n is a, c, g, or t
  misc_feature (305)..(305): n is a, c, g, or t
  misc_feature (311)..(311): n is a, c, g, or t
  misc_feature (318)..(318): n is a, c, g, or t
  misc_feature (321)..(321): n is a, c, g, or t
  misc_feature (339)..(339): n is a, c, g, or t
  misc_feature (350)..(350): n is a, c, g, or t
gagaancacgagctgtcnggaagatcacaagccagtcatgngtgaccagcgcgaccttatatccaacacatgagcaactgnccangctgggccgncgccctggggccccggagaggaagtgcagccgcggagccctgtacacaagcttttccatnctgnngactntggtnctcgntnggcangncaccancgnctacttnctgtnccagaagnanggcccgtggacctgacacggacctnccagaacctggagntggagaaccngcgcatgaagnttccaaggctnccaagnctgtgagcaagangcgcangggcacnccnctgttgatgcaagcgctntccattggagncctgtcccaagggcccatgcgctggcaccaagtatgtgctg

SEQ ID NO: 585753 - DNA, 855 bp, Homo sapiens
gcccggtgcgtgtgatgttgtccgctcggagcgggggactgcctctcgatggtgcgagtgtctggctgtggactgggcaaggaacgaacccggagagatcccaagccacgaggcaccggttccggcgcattgtgaggtcccacctttcccgccgactgaggtcgcggcggctgctctttccctggagcagcgtccctggaggcgctgtccagggggtgaggcagcccattgcgtgcaccgtatgtaccccccagagcggcgcttagaacgactcgcatgagtcgctgccttgggttggaaccggttactccgccgcattcgtactggactgcaaagtaagcacagtacttcgccgggcatgcggttgccgagcccgtgtgctacggcgagagtgtgcttagcctagagccgacgaaggacgatgtccccaggactccctttccctcccagattgcgtcccagcagatggagctttccgtctgtattaaccagcagtgtattcctgatgcctgaccaggcgctgaactattgtgtgaacgaatcaatgtgtagcgtaggactgacgacagtccgttgaattctggaagacgggctgatttagtatagtgaagcaaattgatgcacttggaacttcctgaccatgagctgaccttttataggaacatcaatggcaagtcaccggctggcatcttagcaaagcgtagacttggtcataactttccccttggactgtgctgccaagacccttagtcctatatcggggtgggaccttgaaagtcttaacgttctcgaccacccgtcggcgggaaggttctgagaaagggtcgaggccgagcctcttctctgatatgcccc

SEQ ID NO: 585754 - DNA, 153 bp, Homo sapiens
ggagagcacaaggtgctgtgtgctctcaccatgtggttggggagtctgaggccaatgtcagagaaatctttgacaaggacccgccaagctgccccctgtgtgctattcttgatgagctggattcgactgccaaggctcgtggaggtaacattc

SEQ ID NO: 585755 - DNA, 241 bp, Homo sapiens
  misc_feature (190)..(190): n is a, c, g, or t
  misc_feature (193)..(193): n is a, c, g, or t
  misc_feature (225)..(225): n is a, c, g, or t
  misc_feature (227)..(227): n is a, c, g, or t
  misc_feature (232)..(232): n is a, c, g, or t
acgctccctctcggcaaatccctgccagcaggatcggcaccgcgccgcgcagcacctgccagagcgggaagttccacggcatcaccgccagaatcggccccagcgggcgatattcgatgcgcgcacgctgcgcttcaacctgggtggcttcgctgccgagcatcagcgggccatattcggcgcatgtttnacnagatagctgttgcctgcccaggatttgccgangngggtnccgagctcg

SEQ ID NO: 585756 - DNA, 666 bp, Homo sapiens
aagcacaggcttacgagaaccgaataggaatgaccctcaaatcaaaatttctttgggggacaaatatcactccacattgaagttttacgatcctgaccaaccaaacaatgatccaatagaggaaaagtataggagattggaaagagcatctaaaaatgcaaacttggacaagcaagtgaagccggacattaaaaagagggactacttgaataaaatcatcaactacccccctggcactaaattaacagcacatgaaaagggttcaatatggaaatataggtattatttgatgaacaataaaaaagctcttacaaagttattacagagtacaaatttgagagaagaatcggaaagagtagaggttttagaactaatggactcatgggcagaaattgatatagacgacgcattagaactattaggctcaacttttaaaaacctttcagtgagatcgtacgccgtaaataggctgaagaaggcatcagacaaggagctggaattgtacttattacagttggtagaagctgtctgttttgagaacctgtccactttttccgacaaatctaacagtgaattcactattgtggatgccgtatcttcgcaaaagctttcgggtgattctatgttactatctacatcgcatgccaaccaaaaattattaaagtc

SEQ ID NO: 585757 - DNA, 116 bp, Homo sapiens
tgtgagctccttgatgatcactgaggatacgtcttcttttctttaatgattttttccatctggttgaaatactgacccattcggggcttggctttttcaaagctccaggtctttgc

SEQ ID NO: 585758 - DNA, 159 bp, Homo sapiens
  misc_feature (10)..(10): n is a, c, g, or t
cccccccacnccccttttcccctttaccttcccccgcctcctccttcttattctcccccccctcgcctcttccctctttattcccccccaatgcctctttccccttgatctccccccaccacacgctcttctccttgatctccccccaatgcctcttcc

SEQ ID NO: 585759 - DNA, 176 bp, Homo sapiens
  misc_feature (24)..(24): n is a, c, g, or t
ccttcttaagcgcggcgtccttanatctcaatattaggttagaaataaatttttagattagacggtcaaatcgcaaaaggtggttgacccctcgactttgaaagtgtccgaagtgttagaaaacgaatccactgacggtaaacattccgcggaatcgtcgtcggtaacgtcagaaa

SEQ ID NO: 585760 - DNA, 372 bp, Homo sapiens
  misc_feature (21)..(21): n is a, c, g, or t
ctgaataggtcaaaatccaanagtagtgaggttaggactttgacatgtgagttttggggagatgcagttcagcccatagcaactcccagagcccagcacaaagtgctgtttggagaaatccttcttctcccacctttggcctctgtccacagcatggaagtctgtgggctctgcacatgggttggaagaagaatttctggactcagatagggtgaaaagaaagaacagtttattgagaatagaaatgctgcaagtatagcaggatgacttcctgtcaatcagggagaaccaacgccaagcatgtggtcatgtctgtttgtataacccagggagaggagaggtctgacacacccactgacctgctgactggtt

SEQ ID NO: 585761 - DNA, 347 bp, Homo sapiens
  misc_feature (20)..(20): n is a, c, g, or t
atagtattgccttagttccnggactggattactgctgaagtcccctaggtcccatttgttcaaaccactgtttgtcaaactatgcccatggacccaaatcaggccaagcacctgtccttgtaagtaaagtttaattggaggcccaagtgcaggcgcggtggctcacacctataatcccagcactttgggaggcgaaggcagagaccagcctcaccatggtgaaaccctgtctctactacaaatacaaaaattagctgggcgtggtggcacatgcctgtgatcccagctactcgggagactgaggaaggagaatcgcttgaatccggaaggcgaaggttgcagtgagc

SEQ ID NO: 585762 - DNA, 682 bp, Homo sapiens
tggggtagaggctgggccggcacccccttctgacctccagtgccgccggcctcaagatcagacatggcccagaacttgaagtgacttgtgcgtgtgactggctgccctgccgtgtgccccgtgggctatggtgcactggccctgacagctgtatgctggtggtgcctggctgcctgtggctctactgtcgtgtgctgctgaactcttgttgttcacctgtgtgaagtgctgggcacatgagccaatcttacttcaatctggatctggttggagatgcatgcatggacaactatcctgtgcctgagtggccttcaacttcagtgatcccttgtgttccagtacccccattatctatgacattcgtggccagacctcgaaaaatctccatcccactacagtgctccagaagacactaccagatgtgtggaattatcatcccctgcagaggtgtatgtcatcgacgccaatgctcatggagcttccgtagcaatgtaccagcgcctagtgtgctggactacgagtgaacgagttgttgcctgtccatctgtcaacgagtgtgctcaaggagtgttggtggcacaaggtttcaaattgcctacgacaggcttggattcaaaacccccaaggctgggggggccccaaggggtaattccccttggtttgaatcccagccgggaagctg

SEQ ID NO: 585763 - DNA, 928 bp, Homo sapiens
aaaagctagtagaggctgggctagaatcggccgaggtgtgtgcttcatcgaggtgccacccctgagggcatattcctgcgtgtgcctactgccagctatgatcttgacctcttcaccatgacctggggccccactatgctgctctctcttatgtcttgacaaaagccttgaggagacaatcatccagaaagccatctcaggcttcaggaagtgcgccatgatctccgcccactatggcctcagcgatgtgttgacaatctcatcatctctctatgcaaattcacagctctcagcagtgagtctattgagaacctggcccaggtggatttgggagcgcaccctcatagcgcatatagtcggccaacgagaagtagttccaccagtgggccccgatcgttcatggtgacatcctgcgggagggctggaagaatatcctgggaggccatgctggcaggctccttccgaaggccccaaattaatggcccagggctatgatagaggtagaagatttcggggatcccaatgtggcaagatctctctacagcgggaagagacaccatcaaaccgaggagagtcaacagtgctgagctttgtgagctggctaacactgagtggtcctgagcagtctagtgttcggggccatccactgaaaaccaagaggccaagagagtggccttagagtgtataaagcaaatgtgacccagacaaaaatgatcacaggaaagcaagtttcctcccagctggagtccactacagggagctcatgaaggctctggtcttcagtgacaccagatgaagagactttgatgaggaagatgctgcttcctgcctaagagatgctggtaagcgtttgggtggggacccggatcgtgtggctgggtttggaattgtcgaacatttaaccacttggtttcggccagatttgtcc

SEQ ID NO: 585764 - DNA, 1438 bp, Homo sapiens
cccacggcgtacgcggacgcgtgggtcgagccacgcgtccggagatgtgatataggaacatgtctttaatagtaaagttagagatgtcattcataggcagctatggcgtatcattcggccacagagagacgataacgtgacaaatgtgagcacgctgtctgttactccatgcaggtcgaaagagtatagattgtatgtccctcaggtcactgggtttcctagaagtatcctgtagctccaacagtgaccacttgtgtaatctcgagtatgacggcgtgtcagaaggttacctatctctaagtgggatggagtcactactcaagcctggacgcagacttatgaccaatagacacttcacagcagcgcaaggccactgtgtcagccagagcctagtctcgacctgtgcgcaagtgctgagtctcgtgtgctcaatagaatttgcccgacctctgccagagagcgcccagtgacagcgactgacaagacttaaacactaagctctagcaattgtctgcagtgcaactcagtaagagcgccgagtacgagcgagcgagacgtgtctcgagccagtttatagaaggacagactgacctagcggtccagggcccaaattgcccgcctgggatggggcatccaaccgccccttgctgacacatcctccacggccagcttccctgggggcaagggccggactggctcgggcgccagcggaactccgaaccctgcgcgacgggctcccacgcggcagatctcccgaacgaaccgccgaagccccctgtggcgcacaaacacaatcacggtcgaaaacaacccccctggactcgtgcctaccttaactgcacgcaggacacacgacagacaccaaaaccgaagcgcgcgcagctgaccaccccgcagacgagcaaacccccccattcgcgatggggtcccccaccagacaccggttaacccgcgccgttcgacaccaagagagcaccctgcctgcggtccacacagccccactcgaggttccccctaaaatcaccggcgagaccatcgcgcagctgcaaaaggccaatagcgcccacaccgacacccgcccagctgccaccacaccacacgacaacggccggaccggcgcggcagacaagctgggcactcagcacccggcgcgcacccacacccagcgtgcagagcgagccacaccccaaactccctgcggagaacacctcacagacgacagcctacgggacaaccccccaacccctacgcacaccacaaacaccccacgccccacaacccccaccaccaataacaccacccccccacgccgcgcacacacacctccggcggcagcccccccccgcctcgccccaccgcgaccccagcccgccccgccaccacccgcccccccccacccgcggacgacacacctccgcacccacgatccacgccacgg

SEQ ID NO: 585765 - DNA, 839 bp, Homo sapiens
  misc_feature (261)..(261): n is a, c, g, or t
tgtcgcaagattttcctcgacgaaggggatgccaccggcactatggagagccctctccaaacctattccgcggtgcccgacattggtggtgcccaccaacagaccccttgtggcgggcccccccgtcttggcggacaatacgtcggttttgtatgcgtagacgccccccgacaggcggatagagtatcgttggccccaccacggggcgtacaatatcttctcgtggcggcgccacatctcttcattagcgtcggtctcacnttcagagatacacccggtgcgcttgaaccactctgggtcgcccccctgtcttgttggaatcagacgcaacaaatatccacgcttggggaaaggatattgttcgaaacagagtggttctccctcagtttcttatatgaagctgatttgaccaagtccggagagcaaagaaatgggagtatatatgtcctccacacttagtgggcatggccccaaggagtagatatcaagcgcagtgccgcggtatcagcaacaattcatttctcgcgcgcctgacacctcgacatatcagcgccaacagatagatatttctactaagaacgtgatctcacaaccgtaagaacagactacacagtgtgctctatgcgtgtaccagggcaccgcacataatgacagaataatgagtacaaactgctaacaagattctgcggtggacatctgaccccgcttcttgagcagtgaacgccgcgctcttctggcgggccaccgagtttgcgagcagccgcgcttatgacgccactccagaagttgttcaggtccatccttcaaaagaagaaaaaaccccaacacaacaaaacaca

SEQ ID NO: 585766 - DNA, 230 bp, Homo sapiens
cccttgagcagcatgggattgaagtgtgcaggcccactaatatgtggattttcttccacctctgacaaccctgagacagcaagaccaattgtcctcttctggttcctcatcctctacatgaagacaatgaggatgaagatctttatgatgatccggaaatgatggattacattcattctgtattttctttccggttacttggaatgtgactccagaggcaggacaagcag

SEQ ID NO: 585767 - DNA, 128 bp, Homo sapiens
caaagaacaaatgcgagaagataaagagaaagaacggcacagaagaaaaggcagaagaaattacaaagaggttagaagaacccgaagaactaaagtgctacaccagaagaacaattagcagatatact

SEQ ID NO: 585768 - DNA, 396 bp, Homo sapiens
taaaaaaaaaaaaaagagccaggcgcagtggctcacacctgtaatcccagcactttgggaggctgaggcaggaggattgcatgagattgggagtttgagacgagcctggaaaacagcaagacctcatttctactaaaaattttaaaaattagccgagcatggtgggggagggtgaagaaggaggatagcttgagcccaggagttagaggctatagtgagctatgatggcgccacttcagtctgagtaacagcaagacactattaaaaaaaaaaaaagagccaggcgcagtggctcacacctgtaatcccagcactttggtaggccagggtgggcagatcgcctgaggtcaggagtttgagaccagcctgacgaacatggagaaaccctgtctctac

SEQ ID NO: 585769 - DNA, 308 bp, Homo sapiens
atatttcagtcaactggactaacacacagaccacggtgtattccttacagaatgtttaaggttgcattatgcgtttctctgcatttacactgttgagattataagcaaaagtcccataatgatctgatgtgtctttagattcccccctccccaatccattctatatgtcaggttaattatttgatcattgcagtatcttagaatacatagcagatgcctctctgtcttttactgcataaagcccaagctatctgtaagactccaatctctccataattgttccggctattgaaacttctaaaactagg

SEQ ID NO: 585770 - DNA, 1061 bp, Homo sapiens
gctcgcagcagccggccggaccggggatggatgtagggcgccgggcccgccatcgccgtgtctcgtgggagcccagggtaaatggcagcagtaatgctaagcgctagcaagtaaactgacacgcgtgacgactggtctcaaagggtcccggacggcagccacacgggtccgaactcgaccctcggacagggtttctgtgacgcgaccaaacttgcatatgttaaacgacggttgccagcacacttgcaagcatcacatttcaccatgtgtcaccatgtcacacagtgccattattcctgcatcccaaaccacagcttccattgttgtacccagctcacaccagtcaaccccagcatgcagaggattacgatgagcaaggggttggcaacacatattccaggtgatggaacacttgaaagttgaccagatgcagtacaaacatggtggccatcccccaaaagatgaaaattgccgtgagcaaaagcatctgggggaagcacacaaaacatccacaagcagacacaggggagcaacatcatgtcctggcaggttgtatctggagcagcaaccaattcccaatatgcattgggagacttgagccttgggggctaccaccacaaagaacacaatttaacagggaatggtacagatatagagaggaattataaaaccataccaatgagaatttaccttgaactcctacaaggacaatacagggactggaatcacagcatgacagtattggaaaggctggaagaaagaactcaatatggagcgggaccaagcgacgggaacttacacggcaactacaacagggggcatgaacttacagttcaaaaccgtttactggccaagcacaggacgtccaccagggggacagacaagggcaggcgccccccgcgaaccagggagaaaagacagggaatgaacaccaacaccctgtacaccacacaacgcacacgtaaacacccaccacaaacccggaaacctcaaagcgatcgcgtgccacagcccacggagagatggcgccccgcgacggcacacagaatgaccgaacagcg

SEQ ID NO: 585771 - DNA, 151 bp, Homo sapiens
ctaacactcagcacttgggaactccctggcaatgcttttcaggcactggaaaacacattaacttctcgggtggttaaccattccttctgcagtctgaccatgcagttaaattgcttatgtatctttgtaatagagtgtgtccaactccaga

SEQ ID NO: 585772 - DNA, 386 bp, Homo sapiens
  misc_feature (90)..(90): n is a, c, g, or t
  misc_feature (109)..(109): n is a, c, g, or t
  misc_feature (113)..(115): n is a, c, g, or t
  misc_feature (301)..(302): n is a, c, g, or t
tcttttgcacatgtggcaggttctgaagttagacacacttggttcaaaccttagctctgccatttactaggtaggtgaccctgaggaagntacttatttatttttttancggnnntgtagtgccacaataatattgcttaacaaacaacttcagcacctcagtggcatacagcaataaacatttatttttgctcaagagtctaggggttggctgggtggttctgctgaacctggctgggctcccttatacttctgtggtcagctggggagtcagctgggggctggctggttgaagatgatnncagatagaatgattaatatatgatacgtgagcgtttatatatattaggatagtaaagtgtttttaattgagggaaagaggaatt

SEQ ID NO: 585773 - DNA, 161 bp, Homo sapiens
gaccactgcagagtaaagatgattctgaagaatggcatgagatggatcctatcgaactgcacttgagcagcggtcatccacccacagggccaatgagctgaagcctggatctaccatgaaagatctctgaatccaggaagagagactgaactgagcaacat

SEQ ID NO: 585774 - DNA, 110 bp, Homo sapiens
gatcgagctggtacccagcatccctaacagccaggcgatatagtgagacaccatctctacgaactgtaagaagtaagggaaggaggagaatacctggttggggatgctgt

SEQ ID NO: 585775 - DNA, 982 bp, Homo sapiens
  misc_feature (809)..(809): n is a, c, g, or t
aggcagcaagcaatgcggtctcccacaggcagttaaacagttcctcgtcaattttctgcttagtaggaacagcaacttgcaagcaaggcacaaacacaggcagtcaggcgcacggtacaagttcagctgtgggccattgcaagcatgcatgcacagcatctttgctactttcacacatggttggcaccaggccatgcatatcatttgggcacaccaaagtgcaccatacattatttgcatacacaccaagcacatcataatcagacctagcaaaagatcagccacattgtagtgtaccttctaaaaatcacccacaggcacagcatcccaatcacagtccgagatatcatgcattctttgctacaaccacacaacacatatccacaattcatagcaaacctgtgcaaatcaaaacataaaattacacaagatgggtgcattgggtttgggcatagctctctgtgccagacgatcaaccacaagacgtctcagctaacacactttgtgcacactacatcatatcatttatgcatgcccatttacacaacatgtataagttaacgtatgcgaacaagtcaggcctacaaaagacactgggtcttcgatttgcatttggtccccaaatagagcaaaaacaatcattagcacaaggcatattcactcaactaaggtcctaaatctcttagatagtgtggaactataagaagcgatatttaacataacaacgcacaacactagtaaacaagatttaataacacggactggcgcacgatcgatcgcatatcaaacatatgggatatgttttatancattttcagctaccatacgacccatattcatatagccattccaagtggatataaactgggatcaccttagcactgtacactaaattatttccagttcaatatggtcatcataataagttaaccatccaatctttaccaggtatacacagagaaggcaaccatttacccatcag

SEQ ID NO: 585776 - DNA, 146 bp, Homo sapiens
gccatcatgaacgcaccgtaactatacgcactagaagttaatgaacaaacgactacttcagaggagacaaatggtcattgatgtactacccccggggaggcgcaagtaactaagcacggaattagggcaaaacgtgccccatgtcc

SEQ ID NO: 585777 - DNA, 168 bp, Homo sapiens
cgacgaagggagtactcgcgctttgtctccctatccacacttgagcaaatgctcgctggtctactgccaaaacccatttcaccaaccatatgtccctcgcccataccccctctccctctcaaaccctggggacaaattcaaggacccaggggtgcccttttaaaaaaa

SEQ ID NO: 585778 - DNA, 160 bp, Homo sapiens
  misc_feature (2)..(2): n is a, c, g, or t
tncttacgcacacggtggatatgaggtcagagttggtaggctggggagggtacacgctgagcccgtacaaagggtgatggacatggcaccacatgtgccaggcaagggcctgcgccacagggcgcaggggagggcattcaggtgggagtcatgagctgtc

SEQ ID NO: 585779 - DNA, 979 bp, Homo sapiens
aattttcatatctgttatttatttctatcagcatgccctatgatttccgtcccgatttctgtcagtgtgatagtgttttgaactccgacactagcctgggtccattgctaacgccttagtcctagtactttgggaaccacttaagcaggtgatcacctgggccaggacttcgtagatcctgcctggccaacatggcgaatccctgtctacttacaattctatgattggctgggcatgctagcttgttgcctgtagtcccagctgtcctggggggtttgtaagcagtgaggatcatttgagcctgggagccagcatggttgcagtgagctgagatctcaccatctgcactccagccctgggtcaacagtatgtcgagactctgtctcggacacttactacctagagtcctgaacatgattgtggaagtgtgcttgctctttcaagttctatcactttttgtttgcaaagttcaaagctgtaattgtttggtacatataccatgtaggtttgccaagtctttgtggtgaattgactcttctgtcattatcgtgactgtcatttttttgccttttaatagtcttgctcaatactttacctgatgttctcatagtgactcctgcatattttgaattaatgtattgcatggttaatatttcttcattttattttaaagcttacctgtatcattacttatgaagtcagtttctttgaacagcatatacctcaggccatgctttttttaattcattccgcatatgtctctcttaaattggtaatgttgaaatgatttacattaaaataattaattgatattttagggaattaagtgtgcccttaaatgatttttgtgttcttttttaattgttcatctgtataatttggggttgtttactagtcttcctaataaggattacttcacctttttttttttaataatttgatttgataatatatagtgtctttgttagtatagatcctt

SEQ ID NO: 585780 - DNA, 292 bp, Homo sapiens
  misc_feature (237)..(237): n is a, c, g, or t
acgtgtaaggatctgtgggcagtgtctcgtgtacctgccagggtcttttccctcaaccccctggggcaggtccgaggcagcctctcatcagagaaggatacacggggggggaagctaccgcccagctaccactcccttcttaacacagcaagttccccatacatgctgccaggaggtcatgaaaataaatccatagcattaagaccagcttgctgaccatggacggaggctgtctcncctgccacaccggtgtttggggtctatggctctgccaggggtgtgtacagggacc

SEQ ID NO: 585781 - DNA, 1072 bp, Homo sapiens
gatttgttggagtaaccggatgtcctagcgatgtactccaaaaatagtgatgttcatcgattgatattgggggaggctccgaaaggactgaggatatgtgactacagaagactcagccacgaaacagagctcataagcaagaatgactcgaatgtgagctatgcagatggacgactgactagtcggtacaatgcacagatagcgaggaactactatggcacaagtccgtggcagagcaagtacacagagccatcaatgaccagacaaatcagcagcagtggacctttggttcgcttctttgaagcatcttggactagttgccatgaacattgggacgagatctagtacctggagagagattttcttgaagtccggcagagttgtttcaaaaagcctcttccgtgatgagtcccgaaggtcaagcatattgcgactggtttaccaaacaccgttgggtcatagataatgtcagttagtttctccagtttgttattgttctgaactgtacattcacgaacgttatgtttctttgagattcaatagatagtggggggaaaaaaggccgttgatcaggaaaattatatgtgaaagtgagacagttgattggcatagatttcgttgtgtagaagtgctgccatccacttactataggtccttccaggaactcaaacactgtaagtgaaatatgggagtatagttcttattatttcttcttttccgtttgtcctcagtaagtatactgcagttgttcaggaaatcacgcacaaagcctgatagtactttactaaaatgactgcatactttggattccttcagtctatggttcaaagtcacgtaacagattcgttgaggttgagtccttatgagaaacagcagtatgactctgacggttctgccgtcctaatggcagagctctctgactggggtgtattgctggcaggctgggtacttcataccttgatgtcttgtgtggtttaaactatgaatcaggataatttttccccatacatttttcacattgttcccttaggaccctatcactccccttaaatggtgcaccagcggtaataac

SEQ ID NO: 585782 - DNA, 611 bp, Homo sapiens
agcgggcggccgtggtctccggcgtcggcgggggcagcagacagctgaggcagcagctgaggcagccgcgacggccgcgcgcacacacgcggagaacctgggatgtaggcgcagaggacacacgatggacgaacgacgcaccagaggccgggagcagacgaaggagagaagatgacaccgaaaacagcagagacgagaaagccagcacacaagccacacaaaagcacacaaagtagcaacaaccgaacacacagacacagacgagaaaaacccacaacggaacaaacaccgaccgagacggcgcgggcgccggaacggagacacggccgacgacgaggcgacgaaagacgaccacagcaaggcggagccaacgagagaacagacggacacggaaaacagaccacacaaccagaaccggcgtgcgaccacagcgccacacggccgacaggcacaacacgaccaacagacgaaccacaaaagaccaaaaacccggacacaaccccacgacgccgcccggacccacacgcaaccaccgaacaccagccaccacgaagccccgcacaacacgccacatccgagcatcgcgccacaaacagaaaccaggacgccaa

SEQ ID NO: 585783 - DNA, 735 bp, Homo sapiens
ggatgtgtctgatatcttgtcatatgacattgttccatattatgctgcggtagcatggcatcgacactggtagtattcgctgttgtaacgcacgtgtgtctcaggtgaaatacaggcgactggatggtaccaatgtccaaatttcctgctctgctgcttaactaatcgaaaagcaacagtggggatcaacatcaacttggattcgtccttttacaagtccacctctcacgagaagaaataatggcaaataactttttccttggatgagtcataagcatatcactgactgaacattcttagtatgccatgtagaaatatcattttcactttaggaaaggccttctagatgtaaatctcatcagtgccagttcacaacatctggggatttgaatgctgtaacatgtgacttggaagaaagatggtgaacaacttgagaataacttatcttgtcagtgctacaggaagcaccttggtatacccaatacaggttcaccatcattaatagcaaacaaatgggaagtctattcttggtttctttcgagaggaaaaggaaccccggggaacatttaatttcaaagtccctgaacttcatgggaaaaacaagccattgatctcttacgtaggggattctactgtcttgacatgttacatgttccacattgttttcctttaaaattggacctggtacagtagtaatgggagttgtaaaggttctggtgggtgttcaaatgaata

SEQ ID NO: 585784 - DNA, 100 bp, Homo sapiens
atgtcgtatctgttcatatattgaaagtttgtggcaaccctgtctctactaaaaatacaaaaaaattagcctgggcaacatggggagattttgcctcaaa

SEQ ID NO: 585785 - DNA, 1011 bp, Homo sapiens
  misc_feature (68)..(69): n is a, c, g, or t
  misc_feature (76)..(76): n is a, c, g, or t
gcaatgctggtggactacgcgcgcagcgtgcacgaggagttttgagcgcccggccgcgccccgggccnncccccangcaccaccggggcggcctcgcgggtgactccgggctccgtggctgtcccgggaccccacctcttccctgccggcccggccaccgggccgaccggaccggcggttgccccaagttgatgagccggcgtgtccccttctgcagcgcgcaccccgggcgggggctttgcgctgtgacgcgggtcgggggctgcggggctggggcttgtggccccgggggcgccggcttcctcccctggtcccttcgaaatcggtggcatctcacttcgtgagaaccgaaatctcgcttcagtcactctgccgaagggcgctgagggcatcgcggccggaacctctgggccgggcccctcccagggccgccggctccggtggggacaaaaacaggctcctccaatttccttggaaaaactggaccgattattagcaattaggattaaccttcggctgggaattgcgagtagccagggaagctccaggggcgaggggtgccgggggtcctttcccggggcctgggctgtgtcgggagccacccaggtcccggcagcttgccggttgcagaactttgcaattatttggtggtgaccagggaattcactttacattttacgtttaacatttatggttggcctttttttgggggctcaaaaactaacaaaacaaaacactaaaacacaaaacagaaaccaaaaaaaacactggggagccaaataaaagggagggggtgggtacaaaacagagcgggttaataaaaatagaggggcacaagagtgtggcaaaaatagagatgatgtgcagagagagagcacagtttttttgtgtgaacaaaggggggtgaaaaactcaggggggggggacccacaaaaagagggagagggggagaaaaatgtaaaaaagaggggtacgataggaagagagaaataaaagagaaaaagcagagga

SEQ ID NO: 585786 - DNA, 662 bp, Homo sapiens
  misc_feature (112)..(112): n is a, c, g, or t
ttcatcgtcttccatcacagcacagatcacagagcatcgctgctgcgcacattcagtctcatcggcttcgagattgtgagatcaggtcatcccctcgtcccaaccatgcccngaggctttcttcatggcttacagaatcgaaagagactccgatggtgacgaataagactcctcaatcgcatcttgcttcttataactatgctgtttctcacccaacatggtcaccattaaaagaaacatagtatgaatgtcaaattgaccttttttcctgttatttactacattgtagttcttgtaagggttgtgctgtatttttcagttgtatttgcactagtgtataccaaattttcacagtgaccattagtttttaagccatcggccttgggcttactttccaatgtaattggattctttgctgattcccattccctcactcaccaattttagagcataatatttatggttggaatcccttaagcaacaatgtatgtagaattatggttttcattgctgatatgttgattctttttactgttgtcttcaagttgttttgtttctaaatctgtgcatgagttttggagtttttagttattacttcaataggatcggtctgcatgtttgctacagtgtgcagaataaaaatgctccccctacactaaaga

SEQ ID NO: 585787 - DNA, 437 bp, Homo sapiens
tgaaacctgggaaatgaaaccaaaacaaaacccaaaatccttgatgctctaccctctgggacccctcttcctgcctcccttccctattttataatttcctctggggcacttttcaccatctaatatatgtcttaacacacctaatatttctctaatcagtcgggcttatcgcctgttacctcaactacaaggtctgtggcttggagccagtactttacctgtgtcttccatgttctacaccctaggaatgtgcctgggaaatagtgttgcttgatacctccttgttgaatggggaacatgaacacatgcatggactcagacaagcaatggcagacggtgggaggacatgtgcccagggaatatgggcagggagtcgatggggaacagtgctgataaccacggccccttcagtgtctgtgtccttgtctcactgctgt

SEQ ID NO: 585788 - DNA, 290 bp, Homo sapiens
gtatgttatcgcccaacacagaatgatcttggcttgggtaagttttcctgcttgtgtaatttttgataaataagacgttaatactgttttaatgaaaacagttaaatattgaattatttagtaaaataaccatatatttaatcttaaggtttctactcacctaaatatctgaaattcacaggctataaaatggttgacagggaaataactttacatgatgactcacagttttcataaataatgcaggtaaactattagtataaaataattaggtgttggggataacatca

SEQ ID NO: 585789 - DNA, 235 bp, Homo sapiens
  misc_feature (12)..(12): n is a, c, g, or t
  misc_feature (36)..(36): n is a, c, g, or t
  misc_feature (75)..(75): n is a, c, g, or t
  misc_feature (144)..(144): n is a, c, g, or t
  misc_feature (156)..(156): n is a, c, g, or t
  misc_feature (224)..(224): n is a, c, g, or t
cctcgtgcaggnagggtgctgggaacggcaaggcgntctgggggatggggaggggcaaaggtgagagatcacctnccctatcctccaccttcccgcaggagtgccgaagccaggtgccagggctggggtcgggacacccatgtnctgggcggcttnaccccaaatcccagaccccggaagctccaggatcgggatgtgtcctgagcacctgtcccggccccctnctctccagcct

SEQ ID NO: 585790 - DNA, 666 bp, Homo sapiens
  misc_feature (487)..(487): n is a, c, g, or t
agcagtgtctcacacctctaattccagcactttgggaggccgaggtggacagataacctgaggtcaggagttcaagaccagcatggccaacatggtgaaaccccgtctctactaaaaatataaaaattagctacgcatgggccgggtgcggtggctcatgcctgtaatcccagcactttgggaggctgaggcgggcagatcatgaggtcaggagatcgagaccatcctggttaacatggtgaaaccccatctctactaaaaatataaaaaattagccaggcatggtggtgggcgcctgtagtcccagctactcgggaggctgaggtaggagaatggcatgaacccgggaggtagagcttgcagtgagctgagatagcaccactgcactccagcctgggtgacagagcgaaactccgtctcaaaaagaggcagcagaatcactagaagctgcgaggcaaaggttgcagtgagctgagattgtcccagngccctcctgcgcaacatgagcgaaactctgtctcacaaaacataaacacgaccaagccaattttcccattaaacatgtcattaaggacaatacgtagcaccatattataaactaagcgctcctttgtttgctgcatcgaattctgttcagcgccccctttattatacgctttcaccccc

SEQ ID NO: 585791 - DNA, 123 bp, Homo sapiens
ggaacagcactttacctttgccaacaattttgtgtggccttcaaacgtaattggtactttattttggtcatttttactagtggcttctcgttcccaatgggacatttttgcttgttcccgctg

SEQ ID NO: 585792 - DNA, 962 bp, Homo sapiens
  misc_feature (7)..(7): n is a, c, g, or t
  misc_feature (109)..(109): n is a, c, g, or t
  misc_feature (205)..(205): n is a, c, g, or t
  misc_feature (275)..(275): n is a, c, g, or t
  misc_feature (316)..(316): n is a, c, g, or t
  misc_feature (341)..(341): n is a, c, g, or t
  misc_feature (356)..(356): n is a, c, g, or t
  misc_feature (380)..(380): n is a, c, g, or t
  misc_feature (391)..(391): n is a, c, g, or t
  misc_feature (463)..(464): n is a, c, g, or t
  misc_feature (468)..(468): n is a, c, g, or t
  misc_feature (478)..(478): n is a, c, g, or t
  misc_feature (480)..(480): n is a, c, g, or t
  misc_feature (536)..(536): n is a, c, g, or t
  misc_feature (549)..(549): n is a, c, g, or t
  misc_feature (582)..(582): n is a, c, g, or t
  misc_feature (594)..(594): n is a, c, g, or t
  misc_feature (623)..(623): n is a, c, g, or t
  misc_feature (691)..(691): n is a, c, g, or t
  misc_feature (694)..(694): n is a, c, g, or t
  misc_feature (696)..(696): n is a, c, g, or t
  misc_feature (699)..(699): n is a, c, g, or t
  misc_feature (701)..(701): n is a, c, g, or t
  misc_feature (708)..(708): n is a, c, g, or t
  misc_feature (720)..(720): n is a, c, g, or t
  misc_feature (723)..(723): n is a, c, g, or t
  misc_feature (726)..(726): n is a, c, g, or t
  misc_feature (728)..(730): n is a, c, g, or t
  misc_feature (739)..(739): n is a, c, g, or t
  misc_feature (741)..(742): n is a, c, g, or t
  misc_feature (744)..(744): n is a, c, g, or t
  misc_feature (760)..(760): n is a, c, g, or t
  misc_feature (765)..(765): n is a, c, g, or t
  misc_feature (769)..(769): n is a, c, g, or t
  misc_feature (781)..(781): n is a, c, g, or t
  misc_feature (790)..(790): n is a, c, g, or t
  misc_feature (799)..(800): n is a, c, g, or t
  misc_feature (807)..(807): n is a, c, g, or t
  misc_feature (813)..(813): n is a, c, g, or t
  misc_feature (837)..(837): n is a, c, g, or t
  misc_feature (873)..(873): n is a, c, g, or t
  misc_feature (894)..(894): n is a, c, g, or t
aagtctngggcctgactataggagccagagagagccagggccaggggccaaagaggaagctgctgggatctctggccctgcaggaagaggaagaggaggcgagcatggnccccagtgcccctgagccagcctccagaggatgagctggataggctgacgaagaagctggttcacgacatgaacccacccgcccagcggggagtantttggccagtgtggtggctgcggagaagatgtggttggggatggggctggggttgtggcccttgatcgcntctttcacgtgggctgctttgtgtgttctacatgccgggcnccagttcgcggccagaatttttacnccgtggagaggaggncatattgcgagggctgctacgtgnccaccctgganaaatgtgccacgtgctcccagcccatcctggaccggatctgcgggctatggggaaggcctaccaccctggcnncatnacctgcgtgntntgtcaccgcggcttcgacggcatccccttcacagtggatgctacgagccagatccnctgcattgagaantttcacaggaagtttgccccaagatgctcagtntgcggtgggcanataatgcctgagccaggtcaggaggagantgtgagaattgttgctctggatcgaagttttcacattggctgttacaagtgcgaggagtgtgggctgntgntntcntntgagggngagtgtcagggntgntancnnntggatgggnanntnttgtgcaaggcctgcngcgcntggngcatccaggagntttcagccnccgtcaccnntgactgntgagtnttcctagaagtacctgctgggttntcagttccagttcccatcctttgattgatcactctncctgacatccacctgtatgantttgtcacccaatgctgtcttttctttttcccatcaagaaattataatccctcgagtttaccaaacca

SEQ ID NO: 585793 - DNA, 195 bp, Homo sapiens
  misc_feature (195)..(195): n is a, c, g, or t
ggtcactctagaggatctcatcccggttctgggtagatacaacctgcaaaggattgaaccataagaaatgcaaaacctgagcagaacgatgagaagtaatgagactgaagatatatttaaaagtatcccagcaaagaaaagccagagacctgatggtttcactgctgaatatttttttaaggagatggagtctcn

SEQ ID NO: 585794 - DNA, 482 bp, Homo sapiens
cagcagagctttgtcgtcaccaggggtccaggccaggagagtgggcttggcaggtggtcatcataaggaaaagtctcagtttggactaattctctctctccctgtaaaaagtaggccaatgacaccaaaaaagctccaacaaaatatctggagacaaagcaacacatcagtggtgtaggcacttcaaacagtaccagtgattatagctggtcagtaatgtaattggcaacgatccttggaagggtcaatggatgcaagcacagctgtgcttaggtgcacctgtgtttcaggtcctaagagcttgggcatgctgaggcctgctctggctcaggtgagcagcagcagtccgtaatggagcacttgcgtgccagagcattgtgggcaaaatcttggacattcaagatcggagcaaaacttgcttgcgggctctgggggccaacagcttggagcttaggtgctggggccccaatggaaaaagctgt

SEQ ID NO: 585795 - DNA, 635 bp, Homo sapiens
gccgccgccgcctctcctcctccggcagccgcggcagcaggagcggcagcgccgtggccccacccacctctgtcggctccggctgcggctccagcctcgactattattttatttattatgggtcgtgcacaagcctcagtgcctgcagtccggcctcctcgggccgggggcctcctcccttggctccggagccccagaaccggtcatcctcgattcgagaaccccagacccctgcagctgccgcgagtctccgctgctggaatcttgttagcggctgtcttttaggagggttctggtttccgcgacatttttgttatccagcccaggagaggatactcgtgattttcccacccttgagcccaggctcgtgctctctggggaggggtgcgggggcgctccaagccggggaagcccgtgccagacgagtcgtgcgggctgtggaagcggaaggggccaccatgggatgtactctgagcgcagaggagagagccgacctcgagcggagcaaggcgattgacacaaaacctcaaagaggatggcatcagcgccgccaaaagacgtgaaatatactccattgctcggggcctggagaactcaggaacacaagcaccatgtgtgaagcagcatgaacgatc

SEQ ID NO: 585796 - DNA, 934 bp, Homo sapiens
tgtcgcgacatgatggtggatgtcgatacaatcctgggttgtccgagtcctgtgaatgtcactttctggcataaatgtaatatccacactttagtgatgtccacaggaaacgcaaactcatgttacttactacgctttgctattcaaattgactcacgtctaatgtcccttcaatgggcacatacgagtgagaccgattccctctacgttcagcgaggtatttgtggccctactggtgctattgggtagctacttaggactgtcctgggggacgaatatggttggtcacacacaccctttggaaggcattggagtgcttcacaaggataattactagtgacctcatatctggtgttgattaaaatattgaccattattgccacactttctgatccccattgtgttggtacctgggggccaccagactttcttgttacctgggattgtggacgcttgaggagataaaaaggatttaaatcgcgacgagtagtacacacacacagcagatgtggtcatcaagcctcaatctgcgaccgagacttgggaaaccaaaaaatacatttgataacgaggatagtcttggtgtcgaaaagattccccaatgccaaattgcttcaaaatagtccaagggtaaagcatggagttgaaacacttttcatttcatgtttcacatctgaaagtgcagaactattagaagttcttctagaatattgaagaaaataagggctgttggagagaacgtagtgaggaaatgcctaacgaggaaagcatttatctgtaaaatggcgggggacatcttttggaaggaaaggattagattccttaatactttggaagtatgagtctgggtggtcctatcacgcctttggttacttggggtggaacaagttaacaaaccagtttttttgtgacatggtttcaaaggcctgccacg

SEQ ID NO: 585797 - DNA, 281 bp, Homo sapiens
tgtctctgcactaggtggcaccttgcaaaccagatggtgagagttagttagtttgacatagagtctggagggcagtaccagtagccaaggtgtttcttccagccttccttggtctttcttcttacccacctggaggactttaacacaagtaccctttccaaccaaagagaagcaagctttagagtccaagccgtgccactaacacttaaatgtgagtgcttagaactgtaatcctttgggtcagacttctccttgcctcaaataaaaacttgcttttgtga

SEQ ID NO: 585798 - DNA, 898 bp, Homo sapiens
ggatggtcttgatctcttgacctcgtgatccgcccacctcagcttcccaaagtgctgggaggattacaggcatgagccaccacgcctggccagtagtatttcatttttagatatgtgataatttaaccagtaccctactgatgaaaatttacagaatagaaacactccaacctggaaagattttactaaaatactgtaataactatccttacaaatctttgcttcctagaagcaagtcttctagaaatctttgcttcctagaagcaagtcttctagaaatctttgcttcctagaagcaagtcttctagaaatctttgcttcctagaagcaagtcttctagaaatctttgctttaaatatacatgtttacaatttagatattgtcaaattgctgcttccaaaaagatataggaatgaacatccactattgggaagagtagatttctcctacccttgccaaaactgattatcatcaatccttacaacatttgccagaggaatcctattttcgtgtttttcttttaggtgttttagaccatatcagaacttttggttgttttgagacagggtctcacactgtcactcaggctggagtacagtggcatggtcacagctcattgcaggctgtcaacctcccaggctcaaacgatcctcccacttgagcctccttagtagcggagaccacagatgtatgcgcaccacgtgtggctaattttcgtatttttcttgtagagatgggatttcagcatgttgcctgggctggtctcaaactcctgggctcaagaatccgcccgccttgcctcccaaagtgtggggattacaggcgtgaccacaaaccaagctcttcaagttttatgccgggcaaatcttagcttccacgttatggctcacttatgtac

SEQ ID NO: 585799 - DNA, 1034 bp, Homo sapiens
tcctccctgtcgcccaccgaggtcgcacgcttgaaatttctccgccgaaaacgccgccgcgaattgcgctacgttcgccttccttacctgtgctgtggctgtgcccttagggggcaacttccttcccccagcgccagaggacttcaagaagatcttggacagcggtgggttactcgaggcggacgacagaccggctctaaacagggttactcagtggcagtctggatatggggcacaaaaaactattggacagcactgtctattggcccgagggttattgcggcaatgtctttgccatgttgtcaccttgctgggtgggggttttgtacgccgttcttctggtctggccccgggtcttctggaagccccttgctgttgctgtggttctctgtgcccccgtgtctgtgccaccaaagagagtgccagacaaaacacagagatatgccagaacacaaagagtggagagagagtatcttggaagagaagtttcgagatagtgaagtggcacctgttgggaacttctgggcgccatatatggaggcaatatcaacattccccgtgggtcccccccctgtggacaaaatttataaagggcccttttttttaacacacacactttctaaagcgaaaaaacaaaaaaacaaaaagataaaaaaagagagatcagactaatcgagagaagagagatctaaaatatatctagacgtagggggtgacgctgtgaacaaaaaacaagacgcggcgggtaaacctgaaaaaagatgtagtcaaacattgtggggtcataaaaaaaaagtatgatatattcactaatcaaagcacccccaagcagatcatattaatttggttgaacaaaacacaacgagggttgctacaacagatacttattgcgagcgcgatattcttccccacactaatatagtaggagcagggagagagcgctaatatatataaaaatctttcattaacagaaaaagcaaacgcccacaagggtgttaatcaaccacccacagaatgactatatacaaagaggg

SEQ ID NO: 585800 - DNA, 121 bp, Homo sapiens
cagtacacttgggacaggtaggtgagggtcggcgggccgcagtgtgccgggaagagcattgctggggtgcaacactgagaggcaggaaccacacggcgaggctaggacgggtaccgagctc

SEQ ID NO: 585801 - DNA, 532 bp, Homo sapiens
ttagcccagagaattatatgctagcactttttaaatatatactacttctatgaaactgaagagctcagcaagtttggttcaagtctagctgctagcggtgggcaccatatgcagtgttttatgacttctcatgagtctggtctccttacaaaccctaagtgtgtggtcctgagctgatttacatatcctacttcaaccagagaaacttcttgctaatgagaactagcctaggtagctttagtcctgaatctaatcacatggaaatatattcttgatccatgactgtattgtcaacatatccccatttgcatagtatgatccacttgagagctgagttgtcggcaatatttttaaaatcgccctgaatcatgtgttaattcacactcactaacagcatatgcttgcattaatagcacccgtctgttcaacatcataatcttctaatggtgtctgtaatataaaacttctcttccaaatataagtttcgacttaaagtcagctccttagtatatcccttaccgatggaaagacg

SEQ ID NO: 585802 - DNA, 149 bp, Homo sapiens
tatctatatctagtccataatactaccttgccagagcactgctagtaccagagaatgcccagtcaatattcactgctatacactgataacgattattctgcgttatctagtgactcctaatgtgcacacataaaaatctaataactacc

SEQ ID NO: 585803 - DNA, 632 bp, Homo sapiens
  misc_feature (29)..(29): n is a, c, g, or t
gctggccccctgcatgttagtaacaacangagtcggatctccttcaactaatgcacaggaaacgtcacccatttctgcccatgactgcactctaggtctagagggcactgcaagacataccgattcgtctgtcaatgtagagacacaatatctgatcatgctgggacttgtaaacgacatcaatccgtggatagactgggttgcatacaactccgaaagacatgtcgttgagacagcaaagtaccggacttactctcgagcatcatgcaactctcatgacacgcaaagcagggggtggaaggctgatctgctgtaatggcgaacgcgagtcacacagagctgcatctggaccaacattatcttctctgataaccagcgctgtactacaccagcggatttcatatgggcagcaatatatgcctttatagagtctcagtgtctggagagagttcacaccacaggaagacactaaagtgtatgtagctggtcaaagacttcgcattgtgcatgcacaatggcaagtagcatttcctggtactgctgggcacatattagatatgaatccattggtacaagaactaacagatcttggctactctcaaattgagggaatgattgaacctgcatccagg

SEQ ID NO: 585804 - DNA, 380 bp, Homo sapiens
gccatactggctcacacttcttttgtacagacacaggtcctttttgccaaaccaaaataggtttagacgtcaaaccctattttcaacacacttctcccaagaggaggacacattctatacaaccatgataccattcccacattaagaaaattcttcctttaagggttcaaatatttgcctggttagtatagccatggtttacatgtcttcagacttaagtgtaggcatacaggctatattcacatttccctgtgtctcaaaaacgtgcattatgccttctacactctcacctccaatcacaaagtccaacaaaagatcacatggaatacagctaataggtctatagtcttcccatagtctggcacagtctcactgtttcc

SEQ ID NO: 585805 - DNA, 1896 bp, Homo sapiens
gcacgaattcgcggccgcagaaaatgtccctttttattccatacgcaaataagtagattcatttaaaaaaacaacaacccggaggctgcaacgtctgcagagagccccagcctgcctgctcctggaacggacgatgggacccacaggtccagggtcctttctccaccagcacccgcgagaggggtagcacagccctccgggccggcctgctgtctgggtcccaggaaagggacgtttagtgttgggggcagtctgtggggacagtcaccgctcagccttggacagccggttcgtagttttcctttgttgcgctgggcttggcctgagggcagctgccccgggtggccatggccgaccgctcctcgctgaggccggggggtggccgtggcgccgggggctgcgcagcccagagtctctgcatggccccctgttcgagtggggatccagcctggcaaatgggtggggcgtcccattacattctagaggcgctccccacaggagctgaggcccgcccggccgcggcctgcgctcccgaggtatctaggaggccgcaggagcgaccatcccttccctaacgccccctgagccctgcgcctgccgctgaatcgcgcgtccacacaggtccacagggtcgtggggagagggcccggcaggcggggctcacaccaggccaggcatctgcgcccgcagaaagggcacggaggcggcggccgggaaggcggccagcgggtaggcgagggccccggagaagccgagcagcggtgggggcggcgcgggcgcggcgggcgccagcgggaagggcagggtggccgggggcccagcggcggccgcggccggggggctttcgtggtagagcaccggcacgcggaccaggcgtgcgctcccggcggggacaggctggccgcctccagctcggctgccacgtgccgcttccacttgttgcggcggttctggaaccagatcttaacctgcgtctcggtgagctgcagggaggcggccaggccggcgcgctcggccgtgctcaggtagcgcttcaggtcgaaggtggattccagctggaagacctggctgcgggagaagactgtgcgcgtcttcttctttcggccgccgcccacgccaacgccgccgcgtgtctccccagccgccgcagggacctcggccagctccgagcctcctccgtgccggccgccgggccacgcgccgccagctccgctgcctcccgctgcaccgctccggcccgggcctcgcggccaggcgccctccgcacggcccatctcctcgcccgtctccggtgagtcccggtcgctggtgtcaggactgaggccgcctccatagccaccgtgcgcccgtgggtaccagcggcctgcgcctccgcagcccagagcgaagggcggcccgggaccggggggcggccgaggaccgaggcccagcgcgcccgcccgagcaggcacggcccgcgcctccccgccgggcccggtgcccgcgagcaactgtcgccgccgctgtagccgtcgccgccggcctgctcggcgtcctcgtcttcggggtcgtcgtcgtcctcctcctcgtcctcccggctgccgtcgccctgggtcgcgccctgcgcccttggcctcggccgccagcaggttctcgatgaggaaggaggaggcgcgggccggcgtggcgcgcccgggctccgtcagctcgtcaggcatcgcggccgcgggcttctcgggctcggccgggctcctcggtccgctggggatggtgggcgcggctcccggcgcacgcgcgggccggccctggagctgctacccggaccgctggcgtcggcgcccgcagggcaggcggcggcctccgcgccgggctgggctgggccgggccgggagcgagtgcgcgccgacagctgatcgg

SEQ ID NO: 585806 - DNA, 437 bp, Homo sapiens
tgtccactagccgggctacggagacgggtaacggtttccgagcatttggcttcagcacacactcgctgtgaaaccaccgatccccaacctcccttccgaggcgtgcccctcccagccttggggcggggtatccaggtccgtccccgcacctcagtcttggttctgtaagacttagaatctggacctttctgttcctcagtttccccataatgagggcctacactatgcggtctgcgagtgttcccatgccgtatcactccccctactttgtatccagtgatagccacctgctaacagacccttatcaccgccgccactagggcggggctaagggcgcgaccaagagggcgccgagcatcctctgcttcctccccctcctgtgtcctgccctctactgcgcggatcctccgtggtccgggaacccccccgctctgggt

SEQ ID NO: 585807 - DNA, 400 bp, Homo sapiens
  misc_feature (348)..(348): n is a, c, g, or t
  misc_feature (385)..(385): n is a, c, g, or t
  misc_feature (391)..(391): n is a, c, g, or t
gccacgaggtgagatggaaaggatcacctggaactccaggagtttcgagttcccagtcttgcccaatattagttgagaccctgttctctaaaaattgaaaaaaaaatggaaccaggctgggcgcaagtggctccatgcctgtaatcccagcactttgggaggctgaggcaggcggatcagatgaagccgggagttcgagaccagcctgggcaacatggcaaaaccccatctctactaaaaaatacaaaaattagcaggcacgatggcgggcccctgtaatcccagctacttgggaggctgaggcaggagaatcgcttgaacccgggaggcggagtttgcagtgagccnagagtcgcgccactgcactctagcttgggcaacacangcgaantccgtctca

SEQ ID NO: 585808 - DNA, 795 bp, Homo sapiens
gcacgaattcgcggccgcagaaaatgtccctttttattccatacgcaaataagtagattcatttaaaaaaacaacaacccggaggctgcaacgtctgcagagagccccagcctgcctgctcctggaacggacgatgggacccacaggtccagggtcctttctccaccagcacccgcgagaggggtagcacagccctccgggccggcctgctgtctgggtcccaggaaagggacgtttagtgttgggggcagtctgtggggacagtcaccgctcagccttggacagccggttcgtagttttcctttgttgcgctgggcttggcctgagggcagctgccccgggtggccatggccgaccgctcctcgctgaggccggggggtggccgtggcgccgggggctgcgcagcccagagtctctgcatggccccctgttcgagtggggatccagcctggcaaatgggtggggcgtcccattacattctagaggcgctccccacaggagctgaggcccgcccggccgcggcctgcgctcccgaggtatctaggaggccgcaggagcgaccatcccttccctaacgccccctgagccctgcgcctgccgctgaatcgcgcgtccacacaggtccacagggtcgtggggagagggcccggcaggcggggctcacaccaggccaggcatctgcgcccgcagaaagggcacggaggcggcggcctcactgggggcggggagggggaggggccagcaggggcggggggtcgcgggctgggccgggagggcggcccgctgagccccgag

SEQ ID NO: 585809 - DNA, 707 bp, Homo sapiens
ctgcggcctcctccgccatccagaggctcccactgtcacttctgttaactttgtatttatcagctttggtcacctgcccctctccacactgcacaggctgaggtgtaatcttctgtgtgctgtcaggactgaggccgcctccatagccaccgtgcgcccgtgggtaccagcggcctgcgcctccgcagcccagagcgaagggcggcccgggaccggggggcggccgaggaccgaggcccagcgcgcccgcccgagcaggcacggcccgcgcctccccgccgggcccggtgcccgcgagcaactgtcgccgccgctgtagccgtcgccgccggcctgctcggcgtcctcgtcttcggggtcgtcgtcgtcctcctcctcgtcctcccggctgccgtcgccctgggtcgcgccctgcgcccttggcctcggccgccagcaggttctcgatgaggaaggaggaggcgcgggccggcgtggcgcgcccgggctccgtcagctcgtcaggcatcgcggccgcgggcttctcgggctcggccgggctcctcggtccgctggggatggtgggcgcggctcccggcgcacgcgcgggccggccctggagctgctacccggaccgctggcgtcggcgcccgcagggcaggcggcggcctccgcgccgggctgggctgggccgggccgggagcgagtgcgcgccgacagctgatcgg

SEQ ID NO: 585810 - DNA, 1548 bp, Homo sapiens
gcacgaattcgcggccgcagaaaatgtccctttttattccatacgcaaataagtagattcatttaaaaaaacaacaacccggaggctgcaacgtctgcagagagccccagcctgcctgctcctggaacggacgatgggacccacaggtccagggtcctttctccaccagcacccgcgagaggggtagcacagccctccgggccggcctgctgtctgggtcccaggaaagggacgtttagtgttgggggcagtctgtggggacagtcaccgctcagccttggacagccggttcgtagttttcctttgttgcgctgggcttggcctgagggcagctgccccgggtggccatggccgaccgctcctcgctgaggccggggggtggccgtggcgccgggggctgcgcagcccagagtctctgcatggcgcgggcgcggcgggcgccagcgggaagggcagggtggccgggggcccagcggcggccgcggccggggggctttcgtggtagagcaccggcacgcggaccaggcgtgcgctcccggcggggacaggctggccgcctccagctcggctgccacgtgccgcttccacttgttgcggcggttctggaaccagatcttaacctgcgtctcggtgagctgcagggaggcggccaggccggcgcgctcggccgtgctcaggtagcgcttcaggtcgaaggtggattccagctggaagacctggctgcgggagaagactgtgcgcgtcttcttctttcggccgccgcccacgccaacgccgccgcgtgtctccccagccgccgcagggacctcggccagctccgagcctcctccgtgccggccgccgggccacgcgccgccagctccgctgcctcccgctgcaccgctccggcccgggcctcgcggccaggcgccctccgcacggcccatctcctcgcccgtctccggtgagtcccggtcgctggtgtcaggactgaggccgcctccatagccaccgtgcgcccgtgggtaccagcggcctgcgcctccgcagcccagagcgaagggcggcccgggaccggggggcggccgaggaccgaggcccagcgcgcccgcccgagcaggcacggcccgcgcctccccgccgggcccggtgcccgcgagcaactgtcgccgccgctgtagccgtcgccgccggcctgctcggcgtcctcgtcttcggggtcgtcgtcgtcctcctcctcgtcctcccggctgccgtcgccctgggtcgcgccctgcgcccttggcctcggccgccagcaggttctcgatgaggaaggaggaggcgcgggccggcgtggcgcgcccgggctccgtcagctcgtcaggcatcgcggccgcgggcttctcgggctcggccgggctcctcggtccgctggggatggtgggcgcggctcccggcgcacgcgcgggccggccctggagctgctacccggaccgctggcgtcggcgcccgcagggcaggcggcggcctccgcgccgggctgggctgggccgggccgggagcgagtgcgcgccgacagctgatcgg

SEQ ID NO: 585811 - DNA, 199 bp, Homo sapiens
ctagaggatccctcgcgcacccgactgtcaaccaccaccccaactcgcggaggtcgatgagagctgacaacatcctgcaaacgattggcaacacgccccatgtgcgcatcaaccgcctgttcggcgccggtgccaatgtgtggatcaagtccgagcgtggcaaccccggcggggttaccgagtctctacattcgttaat

SEQ ID NO: 585812 - DNA, 425 bp, Homo sapiens
agagactgttatttcttaggagtggccctgggcgacagagcgagactgtcttaaaaaaacaaacaacaacaacaaaaaaaccccaaaaacttctttactcagaagtaccctcctttgcattggagatacatgtaaagagttgcttagcagttgaataactcaaaattgcattttggaagcttgctaagtgacaagaccttcttgtatccttttgtgaacccccaaaatatgagacaggcctcagttaatttagaaagttaattttgccaaagttgaggacacgcgtccatgacatagcctcaggaggtcttgtagacatgtgcccaaggtgatcagggcactgttggactctgggcactgtttggactctgggcactgtttggactctgggcactgtttggactctgggcactgtttggactctg

SEQ ID NO: 585813 - DNA, 197 bp, Homo sapiens
acaatgaggtaaaattatgacgctgcttccacatgtttacttcgtaagatgatgcataggagtgaaaaatcatgagatgctggaatgatggacaatagtaagcactatacactccttcccttacctgacagccagtgtgggccaggctccactctacacatacttcacaccctgcccttgctcccagtatttccatt

SEQ ID NO: 585814 - DNA, 183 bp, Homo sapiens
agtgaggacaaagcatagttgatgacgtagtgtctaagcggtcgaaatcaaccatgagcagcatggtgaaaccccagtctcgtactaaaaatacaaagattggctgatcatgggggcgggatcctgtggtcccagctacttgggaggcttaggcacttgaatgagaatcacttggacccagga

SEQ ID NO: 585815 - DNA, 1046 bp, Homo sapiens
  misc_feature (1)..(1): n is a, c, g, or t
  misc_feature (33)..(33): n is a, c, g, or t
naccagtacaaatagataagagacacgtgtcanccaaaacataccgattatcctcgcccgtcgcccagctgcgtgcgctgcctgcacgccccgcgtcgtatgtgggaaggtgtctccgctggcgcataagctgccggcgcgcgtcgaggtggtggcccgcgccggggaggtattcacaaaccggcggttccgcaaacagaagcctttctcggagggcgacaccccctttttcgggcagggtgccccacgccgtggcaatattccaatggcgccccgtccccccatcggggtgaaaagagcgcgcccgcgtgaaaaacagtgagggccaaaatcgcctgtgtgttagacatgtcgtctcgttggggtggcacgacaatttatatattacccgccgtgtcttcagtgagcacaaagaccttcccgagggcaccacggtctggtgcagtatggggactcaccggctttgtgggggcggagcaccccctgttactggcccaaacccacgagtctggtgtttctattaagcatgggtgagacaatcgtcggctgagaacccccgttggtgccagcgtgtacaccgctggtccaagaacctgctccttttactggtgccttcatggcgctcactagcctcctacttcttcgccacgcccctgataaactgttccgcccaagctatcgccaccctggtgatgcccatgagggttcccgcgtgatgtacgcgcctgacgtctactgccctcgtcccccagaacatgttctggataactctataatcacacgtggaaaactccgtgtgttccctgaagataagttccaagaaaattttcgagaggcagggcgtgaatcacacagcgtgcgaccaccaaaaatgtctagggttacaaaaatctttaagaccaagaaagtcaccacggcactttattttacagtggctcacaattccttaatatccccctatgttgctgggtgggacaactggccaggcgtgggtcggctcccccggctaaaaaattcaccccaccccttttgcggcaacaaaaaca

SEQ ID NO: 585816 - DNA, 700 bp, Homo sapiens
  misc_feature (435)..(435): n is a, c, g, or t
  misc_feature (439)..(439): n is a, c, g, or t
  misc_feature (471)..(471): n is a, c, g, or t
  misc_feature (607)..(607): n is a, c, g, or t
  misc_feature (630)..(630): n is a, c, g, or t
tcccccggactgcatttattcggcacgagctttgaagccttctttggaaacgggagtatcgtcacataaaaatagacagaagtattcccagaaacttctttgtgatttgtgcattcaactcacagagttgaagcttctttttgatagagcagttttgaaacaccctttttgcacaatctgcaggaggatatttggagctctttgagtgctacattggaaacgggaatatcgtcacctgaaaactagaaagaagcattctctgaaaccactttgtgatgtgtgcattcatctcacagagttgaaccttccttttgatagagcagttttgaaaccctctttttgtacaatctgcaagtggataattggagcaaattgaagccttctttggaaatgggaatatcttaaatctattaggcagaagcattctcagctacnttgngatgtgtgcattcaactcacagaattgccttncttttgatacagcagtttgaaacactctttgtttagaatctgcaagtggatatttggagcacatttacgcctgtggtagaaaaggaaatatcttcacataaaaactagacgggagcattcttagaaacgaatttgngtgtgtgcattctactcccatangtgaaaattttttttgatagagcagtcttggcactcttgttctacttgctgacattttgagcgctttggg

SEQ ID NO: 585817 - DNA, 950 bp, Homo sapiens
  misc_feature (423)..(423): n is a, c, g, or t
  misc_feature (629)..(629): n is a, c, g, or t
  misc_feature (660)..(660): n is a, c, g, or t
  misc_feature (687)..(687): n is a, c, g, or t
  misc_feature (715)..(715): n is a, c, g, or t
gcgagcggggcgtacgaggctgacggcggtcagcaggaggatgattctggagaaggagaggatgatgcggagggttcagcaaggaatgcactgcgataaattgtaccaccgcggtgatgatatgcattggaacacctccagtcgttcagacagctctgacagcagcgtattaccatggcatgggagggatcgtccgaggagcacatgtatactccgagcgtcgtgtatctcgaaaagctagcacactgctgtgggccagcagacgtagtagaaggcctgcgtggaccgatgctggggtcgatgtacagcaccagtgtgattaggagacctagatgcaagatgcttcacgttgtagaaggctggtgagcgagagatcaacttgtgccaagggagctcgaggctcgcattcagagaaacattgtntgtagagaccacgcgccggcacatagtcgacgcacttgcgtaacattcttctgacgttgaatgaaaggcgacggaagaaccgcacggatgcggtggccatggcatgagcataggagtggagtctagcaaacactaagcaacacacgttcgggctgaggaaggcctgcgtctgtgttagatatatagacctaggggctaggaggagncggcgcattcaacacgaaccatggtagtgcntgactacgccgttgcaaccttatgcancactgactgtgagaggtgccttaatccntctctcgtacatgacgagatgaggattacactacgtgtgtgcgaacgactactacatcagagagtgggtcggtaccccaccgacgtgcaagtcgcggacgatgtcaagtctataaacacaagatggatctgcgtacagacaagagaacgattgcagttgaccagcggaacgcattcgctcgtcgaagacgttcagctaaactgttcactgaggaacgtggagcaggtgaacgcac

SEQ ID NO: 585818 - DNA, 90 bp, Homo sapiens
tggtaatggcttacaacgctgactcttccctcctggctcaagaattactccgaagttagtctgcagaaaataaatatttagtatgacatg

SEQ ID NO: 585819 - DNA, 1626 bp, Homo sapiens
  misc_feature (1626)..(1626): n is a, c, g, or t
ggctccttagtagcagtacaaccaacttcagggaagacaattttacgcaaaaatataatgtatagcgctgagtaggagagattgagaacctggcctgcagatagcatagtatgtagcgcgtcgacagggcatggacggatggatgaattatatagcactaccatgcagtcactatacgcatagggtaagcttgaaccgcgccttactacgcgttcgtgcaattaggagtgagagtgtgaagctgagaagagtaagcatgtgtgccacacgggagacgcctaaatgtcatgaggatcccttccgaaagacggctatcatctgaggactagcgcataagaggaacacgatgtcctcatgagacttgcacgataatcaatcccccagttacgtaagtcggtcaagccatatagagagtaaggtttggggggcaaagaagtgtctaaatatggggctaatgaagggggcccgaaagcgagagatccccatgaggcgcgcacgaccactagcgttggtactgacgcccttggggttcgcctctgcaaaaggcaaagtaccgttataggtcttgtcacgttttcccgaaaaatgatcttgtctaagaggaaatgtcttgtgcccctctaggcggacaggaaggatcccccagtgccattcatagactgcacctgcggcggtattggataacaaacctgttgtttaaaaggcttgggaatttcgaaggatgcgcaaagaaaattgcaaagggaaaaagccggatgcgttgcggtcctctagggaaacaccaacgtcaagggtggacacactggagatggcctattgggggttagggccaacgtcagggtggcgggttatatgaccaccacagttgtttttaggaaacgatgccccccgaaaatcacgggttaaggaggcctccggtctaaaagagcagggggccacatgtttcccacagccctggaactccttgtgtacaacggcaacaatgagatagggcgaggttatctaccgacagacagggcggctttcagagagagggccagtgggcctcctagaccgactaaagtcgcgggttaaagcggcaagacgcagcagctttcttgcgccgagtaaagacctacatttctaacataaaagtggtgcggcaccaccgctgttccccgtttcccaatcggaagcgcctgccagaaaccgtacgtgaggggaacccccaagtaccttcacttccacgttacgaagcaccccctttaatgtttagtgtggacagaacggaaaaaaccgtcacatatggtaggatggccacacggttccatgggtcacacaggtgtcgtaagaatgggaaccatctgggcacacaccacgagcaacagagattattcccccttgctgagattactccggcggtcacactttataaccgggccgccaattgaggggggagacatcggacggcacattttgtactaataggaatcgaccccactcggaggttgcacttggggtactccaagagtgtcagaagaccatataagcgcactccaagaaagatagggtaccgtggagacacagcgcaggtgccaaacatacccgtcaaaaacacgcctataggaggggatcgcacaccctcan

SEQ ID NO: 585820 - DNA, 197 bp, Homo sapiens
  misc_feature (196)..(196): n is a, c, g, or t
ttttcatctaaaggagagaggcaggctcagctcctgaaggtcgcagagcctcagtagtcctcctgagtgcgtctaactaactaccatcaaaaaacaaacaaaaaaaacatcacaaaactgaactgccgccatcaccactacaccaagtatgtgattgaattattcaatgatctgttttcgcggtagtgaccaacanc

SEQ ID NO: 585821 - DNA, 156 bp, Homo sapiens
ggcgcctagaggagcgttatacacctatacacctgatacaccgggaactacatactttagaaagagctctgtcacatggctagaacaacaacaacaacaaagaaaacccacaaaaaaccgggagaaaatatatctaaatctctgataggtctctta

SEQ ID NO: 585822 - DNA, 1108 bp, Homo sapiens
aaatttagctagtagaggccggtgtaatcggagaggtcaatcaactgttaatgtttatgtcaaatctttaagagatttttctacagaatcaatgtctttggttccagcaacaaattatatatatacacccctgaatcaacttaagggtggtacaattgtcaatgtctatggtgttgtgaagttctttaagcccccatatctaagcaaaggaactgattattgctcagttgtaactattgtggaccagacaaatgtaaaactaacttgcctgctctttagtggaaactatgaagcccttccaataatttataaaaatggagatattgttcgctttcacaggctgaagattcaagtatataaaaaggagactcagggtatcaccagctctggctttgcatctttgacgtttgagggaactttgggagcccctatcatacctcgcacttcaagcaagtattttaacttcactactgaggaccacaaaatggtagaagccttacgtgtttgggcatctactcatatgtcaccgtcttggacattactaaaattgtgtgatgttcagccaatgcagtattttgacctgacttgtcagctcttgggcaaagcagaagtggacggagcatcatttcttctaaaggtatgggatggcaccaggacaccatttccatcttggagagtcttaatacaagaccttgttcttgaaggtgatttaagtcacatccatcggctacaaaatctgacaatagacattttagtctacgataaccatgttcatgtggcaagatctctgaaggttggaagctttcttagaatctatagccttcataccaaacttcaatcaatgaattcagagaatcagacaatgttaagtttagagtttcatcttcatggaggtaccagttacggtcggggaatcagggtcttgccagaaagtaactctgatgtggatcaactgaaaaaggatttagaatctgcaaatttgacagccaatcagcattcagatgttatctgtcaatcagaacctgacgacagctttccaagtaaggataatctttaacattggcagtttagttcctggtaaattaaaaaggtttatccccattaaaaa

SEQ ID NO: 585823 - DNA, 973 bp, Homo sapiens
aaatttagctagtagaggccggtgtaatcggagaggtcaatcaactgttaatgtttatgtcaaatctttaagagatttttctacagaatcaatgtctttggttccagcaacaaattatatatatacacccctgaatcaacttaagggtggtacaattgtcaatgtctatggtgttgtgaagttctttaagcccccatatctaagcaaaggaactgattattgctcagttgtaactattgtggaccagacaaatgtaaaactaacttgcctgctctttagtggaaactatgaagcccttccaataatttataaaaatggagatattgttcgctttcacaggctgaagattcaagtatataaaaaggagactcagggtatcaccagctctggctttgcatctttgacgtttgagggaactttgggagcccctatcatacctcgcacttcaagcaagtattttaacttcactactgaggaccacaaaatggtagaagccttacgtgtttgggcatctactcatatgtcaccgtcttggacattactaaaattgtgtgatgttcagccaatgcagtattttgacctgacttgtcagctcttgggcaaagcagaagtggacggagcatcatttcttctaaaggtatgggatggcaccaggacaccatttccatcttggagagtcttaatacaagaccttgttcttgaaggtgatttaagtcacatccatcggctacaaaatctgacaatagacattttagtctacgataaccatgttcatgtggcaagatctctgaaggtgatgttgagtaggaaaaaatgttattttatgtttttataaattatagtgatttttgctcatgtaaattttttatatatggttacatgtataggtgatacagtctagaaattatatttatttctttgatttttaagttgtaaaatgtatgttacaataaattattaaaagataaaaaaa

SEQ ID NO: 585824 - DNA, 443 bp, Homo sapiens
cggacagagtggtatacccatcatgcgctgttgcaccggatcatgggcagcaacgtcaagatgggcatcctgtcctacatgatgcggcaggagctctgtgggtcaccgaggaagtaactgaaggccgtctcattccatgtccaccacgtatggccgggacttcgtgcaggaagaaatccgtgtctccaaccacactatctaaccatcacagacccctttgctatcacttcacggtcccagcctggtgcaaatgtgtgcatacggccctgtgtactgccaggcactgtgcctgtgggtgcctgtgggtgtttacacacatgcctacaggtatgcctgattgtgtgtgtgtgcatggcgtgtcccgccccctgtctcccctatgtgtcttcctggccctgtctcccactctgtgtgcctgcccctctgtacgtgctgccagtgac

SEQ ID NO: 585825 - DNA, 112 bp, Homo sapiens
gcagatcatttatattgctccgttgagatgtggcgagtcagttaaatactttgacgccggctggggatagcgatgattatggtcgtggatgtccaatctactcctgtggatc

SEQ ID NO: 585826 - DNA, 103 bp, Homo sapiens
cccctgtcctttggggggttttttttttctttgttgctttaaaattccatccaaaaaagttgttgcctgtaggggaaataaagttaattccattttgtgttta

SEQ ID NO: 585827 - DNA, 124 bp, Homo sapiens
cgtaccccgggcgggctgggagttgtttatggatagtcaagcaatagtcaagctgatgagatggacagaatgaagaaggaatacacagactgtgttgttaccctgtctgcttttgcaacggaag

SEQ ID NO: 585828 - DNA, 926 bp, Homo sapiens
  misc_feature (221)..(221): n is a, c, g, or t
gcatctgtcttgctattccccgagctccccggccatcccctgtgcgggtcgtggccgcggtgcagctctgggcttcgatggccgtcgatggttgtgcctggccgtacgcggagacgcctgagtgcgctggcgctgcgccgcgcgagaagctgtgggctgcggcttgtactgatcaacacgcccccgggagaccacagagaacgggcggaaactggtggctnggggtgcctgtccccggtgatgacaggctggccttccgagagggacttggagcaggccgtgcggtatgccaaagccctgtggctgtcccagggtaccccgttccagccattcccatcccttgtgaccccagttgaccctgactgcgcgtgtacccgggcagctcgaggagcgccgggactcgttgagcacgggctctagacagtttcgtgaaggccccacttggtattattcttcatggccatcgtggcgtgtcctggttcccgtatacaggctgcagaagtatagcgcggagacccgggaagttatgcgaagtcggttcgtatcggtaacattggcacaagcgtcaatcgtaagctagccgaagcatcctatataccactttgcgttcaatctccctcaattgccgtcgggaagttccccaacattggcttttagagaaaggccttccacgtccacgttgcccgataatggggcaccgcaagttcaagtggaagccagtcgttcgcgaccagattatatagccgaaggagtggctcagcccatgtctgtgatcggcgcagcgagggcgctcccttattatacgctaacgtggagctggcctttaggtagggcgaacgtcgaggcggggcttaggggaacccttgacaagccccccttgtgcctatcgcgaggtccatatcgacgccaccccggccatgccttta

SEQ ID NO: 585829 - DNA, 182 bp, Homo sapiens
ccggtcttctggcatacctggacttctggcatacctggacttctggcatacctggaccttctggcatacctggaccttctggaagacatggattttctgcataatgaattaactagaaatagctttggctctccttgcaaagttatttctagttaattcattatgcagaaggtccaggtatg

SEQ ID NO: 585830 - DNA, 118 bp, Homo sapiens
caccgtctgctattcatcggcacctcgtctattcatcggcacctcgctattcatctggcacctcgctattcatcggcccctcgctattcatctggcaccagacttgccctccaatgga

SEQ ID NO: 585831 - DNA, 566 bp, Homo sapiens
atatccaacacccctggcacagagtcaagtatgttttaagctctgatggcttaacaatatccccagtcatttgcttctacattcacgcatatgcaaaaatatgctggcctccaaggacttagattcaaccccaaagtatactaggctctcactacagttgaaaaaaatgacttaaaagtatctcctcttacagcgtatcaggcatgaagcatccaaaggcagttttcttgcaatacagacattcttaagaactcatggtgatctcacactaaatgggatacataagttcaccaggatgaaaaaaaaaataaaccctcctattagaagaaaaggactagtaaccattgaaaaaaatacctgggtatttacacaacataacttgcttcatccacatttggagggggggagctaaaccgaaaggtctagaattcagtccaagaaccccccttgggaaaaacacacccaaacacacagaccccctttcttttatattctcgggaaaaccttatggatctatttggagaataaagaggttaatttcccccagaaaatattaaaattccccc

SEQ ID NO: 585832 - DNA, 1269 bp, Homo sapiens
tcgcatgaggcgccctctcagactaaattgtttgtattcccccccccttgccttgtttgcctcctttatacaagggggggcccctttttcctcgtctctctctctttggtgtgactcttctccctcgtcgtctaagccaccacatgggtggtggttctgtattcacttttctccctctctccactctacattagcggtcgctctctctcttcgtactgtgaggggcggccctcttttgtttgtgctcccaaagcagcctaccctccttgtgtgtccccctatattgatgccccccacctcggttgtgggtggcgccgcccgagttgtgttttttcctccactcgcggtggtagttgtccgcacacaacattgtctgctccggtgggctcccctgtctactgatactgcacgcaccgatcgctgtgtggtctcccccattaggcgcgctttttgtagttacccgcggcgggaatattctctccctctgtgtgttttatctcccccccccacagaaagtgtttgttttttcttttcccccccgcgagtgtttttttttggaggccctctgttgtgtctcacgctcaccccgcgcgctagggcgccgctcgtgcccccccctctcatatagagggggccgctctgtggcgccctccaccacgcggtttttcttcccccccctctttttatattctcccctctcgagaggtgtccccacctctctctgttaacacactctctctgcttgttattctctctcctctctctcgcgcgtgtgtgttcccactctcacccgcgggggtgttcgccacctctctgttcttatatatgtataacacacccccccgcgcgtccccctccattatattttctacgcacacctctcgctctatattaccacacttctgtgttctcgcggtgttttctatttttctacctctctcctctccgaagcctctctccgcggtgtcttctgtggtttcccctcttccccctctttctccgcgcggcgtctctttcgcgcggcacacacactctcttttgttagaccccccgcggttttccccgcggttttccccgccctcttttggggcccacactcttttcccccattgggttcttccccccccaagatttccctctttcatcccccccactcccctcttgggtttcggagccccccccctggttttgggcctctttttgagagagatggggtgttgtggcttttttttgtgtttgtgttcccctcttttttggggggggttttta

SEQ ID NO: 585833 - DNA, 471 bp, Homo sapiens
  misc_feature (13)..(13): n is a, c, g, or t
  misc_feature (17)..(17): n is a, c, g, or t
  misc_feature (19)..(19): n is a, c, g, or t
  misc_feature (21)..(21): n is a, c, g, or t
  misc_feature (34)..(34): n is a, c, g, or t
  misc_feature (37)..(37): n is a, c, g, or t
  misc_feature (55)..(57): n is a, c, g, or t
  misc_feature (60)..(60): n is a, c, g, or t
  misc_feature (64)..(65): n is a, c, g, or t
  misc_feature (68)..(68): n is a, c, g, or t
  misc_feature (82)..(82): n is a, c, g, or t
  misc_feature (86)..(86): n is a, c, g, or t
  misc_feature (304)..(304): n is a, c, g, or t
  misc_feature (321)..(321): n is a, c, g, or t
  misc_feature (384)..(384): n is a, c, g, or t
gtagctgggattncagncncntgccaccacaccnggntaattttttagtagagannnggntttnnccntgttggccaggctngtcntgaactcctgatctcaagtgatctgcccacctcagcctctcaaagtgctgggattacaggcatgaaccaccacacctggcctcatgtgagcaccatgattttcagattatttgtccatcgcgtagagattctctgtgacattattgaaagacggtgattatgaggttttaaatatgtttattatgactatgtgatacctatgttgcataatgatttgnagaatgtttaatctggntctgtaaacaatgggtaacccggcattgtataagcaggactttagggcacactcggaaaacancttacttctttcccccactgtccgttctattaataatgcactcactgaagctccttgcttttggataaaatccagggcaagtctcac

SEQ ID NO: 585834 - DNA, 329 bp, Homo sapiens
atgaaaaactctaatgtttatatatttcataaaaatttctgtaaattcggccgggtgcggttgctcacgcctgtaatcccagcacttttggaggccgctgcgggcggattcacgaggtcaggagattcgagaccacggtgaaaccccgtctctactatataaatacataaataattagccgggcgcggtggcgggcgcctgtagtcccagctactcaggaggctgaggcaggagaattggcgtgaacccgggaggcggagcttgcagtgagctgagattcgcgccagtgcactgcagcctgggtgacagagcgagactccgtctcaaaa

SEQ ID NO: 585835 - DNA, 423 bp, Homo sapiens
aacgggtgatgcggttgccgcagcgagccgagatcacgccattgcactccagcctgggcgacaaagcgagacctgcgtcaactttttttttgaggcaggtctcgctctgtcacccaggctttacacacaggtctcgctctgtcactttgggaggctggaacaggaggattgcctgaggccaggaattcaagaccagcctgggcaacatgggaacacctgagcctccggagcagctaggaccacaggcatgtgccaccaaacccgactaatttttttgtatttaaaaaaaatttttgaggccgggtagggtggctcacgcctacaatcccagcactttgggaggtcgaggcgggcggatcacaaggtcaggagatcaagaccatcctggccaacacggtgaaaccccgtctccaccaaaaatac

SEQ ID NO: 585836 - DNA, 267 bp, Homo sapiens
tcgcgagcagattacaccatgctgaggctgaggaccagatacaccatgctgaggctgaggaccagatacaccatgctgaggctgaggaccagatacaccatgctgaggctgaggatcagatacaccatgctgaggctgaggaccagatacaccatgctgaggctgaggatcacatacaccatgctgaggctgaggaccagatacaccatgctgaggctgaggaccagatacaccatgctgaggctgaggaccagataccatgctcgt

SEQ ID NO: 585837 - DNA, 262 bp, Homo sapiens
gggagggaagattacaatggggcatgagcaaacttctgggagtaatgaatgaacatgttcacaatcttgattgttgtgatggtttcctgagtgtagatatgaaaacttagcaacctgtacatttcgaataaatacagtgtattgtatgtcaattatacctcaataacactgatttttttttttttttttttttggcaaacagagtttcatttttgttgcccaaactggggggcaacaacgtgagctcggttaattgaaacct

SEQ ID NO: 585838 - DNA, 734 bp, Homo sapiens
  misc_feature (1)..(1): n is a, c, g, or t
ncccagtccggaagtagtgctgttgtggcgccgtactcgagtgcctcatttgtgaggccgcgcggggttaaccgtggccccgcccgattaaacacttctcggtcttgcggcagccacccgcctattttcccgagacggttgctcccgtcgtgccgcggtgtcccgttgagcaaatatttgcgccgccgtggaatttcttgcgtccctatttctcggcctcgtggtctaatctctctgcgcgatcgccacctccccgcagtaacgtgttgcagaataagctgcctcccccagctgggatgagcttagatatgtccgccccaatgtagtttgcggcgcgcgagtaatagatgacgttaagacgagatatatatgggagcctgacctgctcgccgccctaatatatctacaacttctccgtgtgagattttgtgcttcccgctctctgtgaggatatctttcggtgaggagacggcgggcgccctccgtcggttttatagtcctcgggaataactaggcaacgctctcgtgacgaaccccttcccccgcgagctcgcggggacacaccacccacaagtcctgttgttcaaatttgcccgccacgactgcgcgccaatgcttctcttattatcgctttgttaaccaactttgtgggcccaatctccgtccgggcactcgtgtgcgcgcacaattcacccgctattgtattctcaaaaggaaacaaataacaaaaaaca

SEQ ID NO: 585839 - DNA, 1024 bp, Homo sapiens
aatcctcctactcctcattgtacccatgctaatcgcaatgggcattcctagagtgcttaccgaacgaggaaaattctagagtgtatatacgaacatacgacaaagggcaccgatacgttgtaggcccctacggggtacgtaacaacccgcttcgctgacgccgtagaactcttcaactcaaagagcccctagaactccgccgagatctacgatacacctctctacatcacctgcccgccgatcgtgtaagacatcatcaactcgataggcatctgcgtaacaaatgaaaccaccatcgtgccaccacaataggggctaaccccacgcaggggtttcctaatcttcccatacacattagggcgtgcctcatatcatttcgtatgcaacgcattaattttagtcagtaactatagatacgctacgtaggtggagggaggattcaggtcagaaattgagctagatgcgctcgctccggtgataaagagtagtcccaaagggtcgtatacgggtatcttggcccaccagacttcccccatatgacatggactttcatgagcaagaatcaggactcttagcaccctgtccaactttaaattctaactctcaaatgacaacggagaagatcgagaacgtcatagtacccagagtaacgctatgagatttgtatcgttagtatccccgatgccctcgataaacactaaaggttcctttgtcaagtggcgaagtccgaactagatcatcagggacacaacagtgggaggacgccgcaagccaaactacgccgaggcctaaatagcccgaagtacaccccgcgtttgtgtgcaaagcgaccccaacaaggagacaggtacataagaacaacgatatgacggacgctaacacagagtcatcacggcacaatgcacccggacctagtgaagccaccagctcctggcagggacagcgagccgcaaccgaagataaccgaccgcgagaagaatagcgctcctgaacctgcacgggcacgccaagtcaggccccaact

SEQ ID NO: 585840 - DNA, 168 bp, Homo sapiens
  misc_feature (46)..(46): n is a, c, g, or t
  misc_feature (54)..(54): n is a, c, g, or t
  misc_feature (87)..(87): n is a, c, g, or t
ctacctgcttaaccaagctcatactgcctgcctaccctcagatganccaggaanccagtgaaagctccctaccctttgcactagtgnctctgcaggttgctggttgtgttgtatgtgctgttccatggtgttgactgcactaataataaaccttttactcaactctct

SEQ ID NO: 585841 - DNA, 117 bp, Homo sapiens
acaagatggcggcgcgaaggggagcctcttggtgaggaccaactgggctccgcgctgctgctgctgaccatggccttgccgaggttcgggaacccttcggctgaagcatttactggt

SEQ ID NO: 585842 - DNA, 630 bp, Homo sapiens
  misc_feature (65)..(65): n is a, c, g, or t
  misc_feature (147)..(149): n is a, c, g, or t
  misc_feature (153)..(153): n is a, c, g, or t
  misc_feature (156)..(156): n is a, c, g, or t
  misc_feature (160)..(160): n is a, c, g, or t
  misc_feature (171)..(171): n is a, c, g, or t
  misc_feature (173)..(173): n is a, c, g, or t
  misc_feature (180)..(180): n is a, c, g, or t
cacgactgcagttatggcgggcaagtgggaggcagcatcctcagcctttcggtcttgcgggggcntaaagcccgggacgtaactgtgacacgggggcgccacgagttcacctatgcactgatgccgcacaagggctctttccaggannntggngtnatcnaagtgccacancntaaactnccccctgttggttttgccagcccccagcccagggcccgccacctcctggagtgcgttttccgtgtcttcacccgcggttgtattggagaccgtcaagcaggcggaaagcagcccccagcgccgctcgctggtccttaggctgtatgaggcccacggcagccacgtggaatgctggctgcacttgtcgctgccggttcaggaggccatcctttgcgattttttggagcgaccagaccctgctggccacttgaccctttgggacaaccgcctgaagctcaccttttttcccttccaagtgctgtccctgttggtcgtggttcagcctcccccccactgagtccctgggggtggggttttgtttgtaaaaggctttggggactcctaatttttgcttccccagcctaaagcagggatcagtctttttttgtggaataaatccttgggtcggga

SEQ ID NO: 585843 - DNA, 1476 bp, Homo sapiens
tgcggtggctcagcggccctgtaatccccacctttcagtgaggccaatgacaggaagatcacatgtatcgccccgcagagatgttcaacgcaccagtcctgggagaacttgcgtggaaccgcatcacgtctagcaaaacaactagcgcgaaactcagttcatcatgtagttgcatgcatcctgtggtcccagactactcgaaggagggctgatgcgacgaggatggcgttgaagccccacgaggatgctcggttgctcactgtagccagagatcatgaccccatgctgctccgacgcctggtgcaaaacagcactcggatgcgccctggtttccattgacacagaactaaatcaagactgaatgtccattggtgcgacatccccagtaccagaattcagacgaatagcatagttgcactcgtggaaagacgctcaggcaatggctggcgctttgtaaccgttctcaagtagtcgcaatctgcagccgggcttgggaaccagatggtatactgggaacaaaggcacataaacgcatgccattacacggtacctagacgcaggagcagggtccatgaggcctggcctatgaaacaacaggccccaatgtgagcattccccagcagaacttattagcatcgccagaggtcctcttaaatcagcgccttgccaagcattacctattcacttcacctcgtatctctgggtaccgtgggtggccctgcttgtctaggatcgggtactactaggaccgggcctcgcgagttttgtaagacaaccgtgggttaagaccctacagaacattatgggcctgacaacaaaacctcaaagtcaagctcctcacactcagatatctctcagagggtctacacataattcgctcactcactactttttactatttctcttatcctctcacccactcgacaccacaacacatacacacaacccacaaccccgacaaaacacaccacaccacccacacccacacccacaacccacacccaccacacacacaaccagacgagataaggtacacgtagaacgacacaacacaacacaagaggccacaacgaagccacgacgagcccagcagaagaaggagagacgcgagcacataaacagagcatagggcaacaagataagaggcacgaggcccagcagcagagacagggagggagagtaagaggagtaggaggcagggcgaggggcgaggtgaggggcagcagagcgagaggagcagcgagacggcagggggaggcgcgagtgaagagagaatgcgagaagcggggtgcgacccgccgcagacgacacgaaagaacgcagagacatagcacaggcggaattaaacaccaagacaccgaaacccacaacgcccccgccacagcacagcaccacccacaccgccacgaccccaacccccaccaacacaacaacaacgaccacacacaaaacacgacacgacagcgcgtgaccggg

SEQ ID NO: 585844 - DNA, 351 bp, Homo sapiens
gaaacggggtccctaattttaattttaatttttttgagccagtcttgctctgtcgcccaggctagagtgcagtggcacgatcttggctcaccgcaagctccgcctcccaagttcacgccattctcctgcctcagcctcccgagttgctgggactacaggtgcccaccaccacgcctggctaattttttatatttttagtagagacagggtttcaccatgttagccaagatggtctcgatctcctgacctcgtgatccgcccacctgggcctcccaaagtgctgggattacaggcgtgagcccccgcacccggccaaaggcaggattatttgttaagcgggttgcagtgttc

SEQ ID NO: 585845 - DNA, 1244 bp, Homo sapiens
  misc_feature (1225)..(1225): n is a, c, g, or t
gccgagatcgtgctactgcactccagtcctgggcaacagagcaagactccatctcaaaaaaaaaaaaaaaaaaagaataggaaaaaaatgaaaatttggttgggggatgatctaagtcgcatttgggtatggctattaaagtataagggaatatctgaggtgggataattgataatgaacaaaggggttattgggctcagcagtctaatggggcatctgcattgggcggagggccctcagggctggcttccacttcctagttggaaaggcataagggggagccctgtctgtgttgccagaagaatcacagtgggtggcgaggggaaatgcaatagaagaagtgtgttgggagaaggttgccagaggactctgttgtaagccgaaccaaggtctcttcttcaaagaaagctaattgaaagccaagaaagcgcccatttcaagccttcttgaagacgagagggcgtttgaagtcgtatttgcatggaggggattccacccttccagcacaaacaaacaacattttccccattgtgtggtcccccagttttccacacattgtggggggaattcaccatttttcattccaggcgagagcgatatgaggtgggggggaacaccaacagcggcggtttaacatataagaagattattccttttaaaattacgcccggtggacggcgatgttggcacctcaacagccccgtgttaaatgtatcccgagcgccactttatgtgtgtgaaagggccacagaagtgcccggagggccggcgacaattcaccgagagcgttccggcggcaacactcggaaggaaccaaattacgtgtggccattacacacgcgggtgtggacaaacccacgcagttcctctatactttaaaacaatttacccaggcaaacaaaaccaattttagtcccgggggtccatttggatgtgcaaattgtgcacccgcttattttgtgttccccaaaggagtataactccggaggaaggggccatgatagtgactgtggaaaaaaattcgggtgttgggacaaccacccaggggaatagcggcgggtagctgttttgccaaggtcaacaggcctggggtggcatttttagccacccccaaacttgcatcactaccaagacctttgggtgggcgagcacacaaaaccgtcaaagcactaggtcggtcttcaccaaccaacaacaatcagataaagtacaataacactactcngagcgcagatctatactcg

SEQ ID NO: 585846 - DNA, 731 bp, Homo sapiens
agttcccggtacccggtcgggggacccgtgcccccttctatcgggttgtccgcccgcgcgtgtttcgttatccggcctcctattggggggttatttcgcccacctggtgtagctcgggccccagatactcctatgtgccgaggtccgcccccccgaatcttcgtgtggttgcgccgccccttatacggagtttgccccctcttgccggttcccggagaatatagcgcccccggaattctccgcccctttctccgctccgggggtcgtccgcccccggttatctactcccttttgtgacgctcgccctatagtaggcggcgcacatgtgccccacgtgccccgaaaactctgtggggtctcgccggctaatatcggggcccccccctattggggccctcctccccccgcaaacttggcaaaaacaatttcttcatcttgctccacgcaccgcaacatacaacatttcgtgtattttctctgccgcaaaccccacaatatagagaccaaccttcttgggatgatcgcacacttcggttctcctctgcatagagaacacacaatcggcgttgtcggtcgctctagtgacatgcaccaataccacccttccactctgttccctcgtaggtaatctcccccacctcataaagactcaaagaggtactaaaaccccataacgccccttttttttttggaaaacccccggcccaaaaaaaaaggggtaaattaaccca

SEQ ID NO: 585847 - DNA, 188 bp, Homo sapiens
taagtttcttcttggtaaatatcctattgggggggtaagatttactatatcttaagttaaattctgcggtgtagactctggcagctgcctctatggtgacgaaacaagcttttttttttttttttttttttttttccataaacccgggagaaaatagggtgttccccagggcttcactctacgccata

SEQ ID NO: 585848 - DNA, 365 bp, Homo sapiens
  misc_feature (7)..(7): n is a, c, g, or t
  misc_feature (62)..(62): n is a, c, g, or t
  misc_feature (77)..(77): n is a, c, g, or t
  misc_feature (95)..(95): n is a, c, g, or t
  misc_feature (126)..(126): n is a, c, g, or t
  misc_feature (214)..(214): n is a, c, g, or t
  misc_feature (356)..(356): n is a, c, g, or t
gtttccnggttttttaattttggagaaaggagtcttgctctggtcaaccaaggctaggaagncaagtggcaacagtnctcggcttcacttgcaancctccgcctcctgggtttagagcaattctcntgtctcagcctcctgagtagctgggattaccagcatgcgccacccacgctcagctaatttttgtacttttagtagagacagggttttnccatgttggccaggctggtcttgaactcctgacctcaagtgatccacttgcctcagcctcccaaagtgctgggattccagacatgagccaccgcatccagcctagttttatttttctgcgtatagttatccagttttctcancaccattta

SEQ ID NO: 585849 - DNA, 792 bp, Homo sapiens
  misc_feature (484)..(484): n is a, c, g, or t
gagatctgaacctgattggtgtgtgcaccgggtctccagagagtcccggatcccagtgagcctgtccaggggcctgggggatgggtctcgtggtctgttgctctgcagacgagatccgttacgatttcggccactcgtagatgcgtggggttgtgtgcagtgtgtgtctagcttagtcggttctaggggggctgtgtaggctcccttcgctcgcgcctagtcatctctattggtctcgcttcatgcttccttccaatactgccaggccgagcgagtcgagacggctgcgcggctaagactggtgtccccgaagacgatggaatcagagacgtaagtgcatgagagccatcggagctctggagttgattgcgtgatccggggatctctgctagacagattctttgtgccgtgccgaatgacggtcgaactgataggacggaggttgcagtggccagtcactggtaaggcctgacagagagcagancctcatgcgtagtggggccagagtgtagcgacctaagttgcgacgcagtacaggttatacccagaagatgttgctggatcgaaggacatgtggaaaagtttatactctgagtgagtatctctgttggaggtgaagggaccatgggagcgagtattcattgatcgatatcaattccgcgaatggctttgctgagagatgctgacagggaagatcttaaaggagacattatgttgctgtgctggacaaaaaatccaatggagatggtgcaagaagtctggacagagtctttgagggaaaagcaggtgtgc

SEQ ID NO: 585850 - DNA, 86 bp, Homo sapiens
ccatctttatttgtaaaaatccagatataaaacgtaatctttcagtctttccaggttttccttttttacaaaaacaaaaaggcacg

SEQ ID NO: 585851 - DNA, 398 bp, Homo sapiens
tctactttttagctattgtgaataatgctactgtgaacttaagtgtacagatacctctttgagactctacttcctttcttttggttatgtacccaacagtggaattgcagtagtaatggcttatagaaaaattaggaaaatacagaaaaatatgagtaataaatttaagtcatccattaagctgccttccaaagagaacaattaccagtattttgttgtttgcaatatttagtgaatttttttctgtgtatagttggaattaagtactgtaaaaactattttatgctcttcttttaacttagctaccataatgtaagcatttccctctcttttaaaatttttccagagaatagtttatttgagatgtataaaataaatcagtgctatacaaaaataat

SEQ ID NO: 585852 - DNA, 278 bp, Homo sapiens
gagcgtatagctcagacctctgtgcactccaattatcagcccattgcctaaggcagcagtaagcttctcccagtaaacaaagatccaggatatacccagccccagtggccacagccactcctacccatacacaccatctactggcttgtgggtcaaactgcacaccccgatataaaacctgccgacagaagtgcataaggctctagaggcaaagccaaaagaccccacctagtactcacaacagtcacagccccctaccagggttgggtggagagcgg

SEQ ID NO: 585853 - DNA, 812 bp, Homo sapiens
gcacggatcgtcgcctcggtgagttcatgcgatgtgcaacggtgaggttcccgggcccgctccaggtcggaggcgcatgcgcagtgcctgtgacctgatgcgcctgaggtcgctcgcgacgattgctgccgggccaggatctggaaggacgcgtcctcgatcgcacaggtctttgtgctggacacggcttgcgtgtctgcggcactgtcgcctgcatcgatcgcctgtttcctctgttgccggagacagaggcccgtggtctgcgctgactctcgacgccgggtgcgtcgctcagccgagcccatgctcgtacagaagggcacgcggcggtgtcacgccctttgctccatgcttcctctgctctgaaagggtgcctatcggacatctgcgggctatcgccttcgtctggtcggccttgcggagccaccggtgtagcgaagcgctggagctcgagtcgacggcaagcgcgcccacttgctggacgccgacgcggctccttggactcgggcggctgcccgtgcacttgcttgcccgtgtgttagccggttgtctgcgttccctttcgcgtggccagatggtggcccagttcacgtgaaccgcgggagaggtgcagcgaaaatggtggggtccagacgccacgggacaacttccccggacagatccacatgttccaacgtccaatatgctaaccgaaagcgccagaaagaccttcttcccgcttcctaaggcggctatgcgcggggacccgggccgttgtactctgccaatccgggcaaacgctcacgcttttaaatccgccttcatcccacccg

SEQ ID NO: 585854 - DNA, 901 bp, Homo sapiens
ggtactttctatgagaagcgtttggccacagaagtagtggctgacgctctgggtgagagaatggaagggttatgtggtccgaaatcagtggtgtggaacgacgaatgaaggtttccccatgaagcagggtgtctggactccatggtcgtgtgcgcctgtctactgagtaaggggcattcctgtaacagaccagggacggacacatggagaaagagaagagaagatcagtgcgtggtttgcagttgttggatgcgaagatctgagcgttctctgatcttggttcttggtaaaacatgggagagagaggagtattcctggactgactgatactacggtgccttcgccgccttgggcgctccacaagagctagctgagatccgcaaagcgttttttcaagtgctctctcaggaacgatgatggtccgacagtaatgtcgtacaggacaaggccttaaataaaggaaggtaaagaacacgctagagaccaaagcactccacatgattcaggcgtgcttgttcagctccacgtgtcctgcaagacaacaaatcggcggcgtgaatggtctgaagaagcagcgtaccacagaacaaagtatcgaagaggctgagaactatgctgataactgtttggccaaagagacgtgaatggaagctcaggagaagcgccaggaccagattgcgaagagacgcggagtttactctctgagagcttctacttctaaaatctgaatccggtcaggaaataagactcgcggaggtaacacgataatacgatcagagttccgcacagaaaaccaaaagggggggcgggtgaaaacagttcccaccgaaggggccaggttaacggatcccacagtttcttgggccgggggcccaaaggaggggggttataaaagccgggg

SEQ ID NO: 585855 - DNA, 893 bp, Homo sapiens
  misc_feature (144)..(145): n is a, c, g, or t
  misc_feature (152)..(152): n is a, c, g, or t
agtgatctagaggattctcacgcccatgtcacaactggcggcagctattcctcctcagaatgatggaaccttcattggatacaaggagcggcgcaggatgtggaccaacgtgaggctcccctcaacaacttctctgtggcgcanntgccagntgatgaagacggagcgggcccggtccaagatcttcatcatcctgctggcctgcgagtggatccacatgtcgatcgaacgcaccttccatgtggagacgtcctgaggagcgggatggagtggacaatcgacatccagactgtggctgacggcctcaagaagcaggaggaggaggagatggacttccggtcgggctcacccagtgacaactcaggggctgacagagatggaggtgtccctgggcaagcccaagcaccgcgtgaccatgaacgaggttctgagatacctgtaacgtctgctgggctatggctactttcggcgaaggtgactcctggtgaaggagatatgggcacaggacgtgtactacgcccgtgaagatcctcaagaccggaagtcatcgttggccaaggcacgagggtgagcccacacagtcaccggagaaccgcgtcctggagacactccagggcacccgcgttcctcacatggcctgaaggtactcttggccagacaccacgagtcgcctcttgctattgtcatggacgtacgccaagggagggcgagctgtacttccatctgatccgggaacgtgtgttctccgagggacctgtgcccgattctatggcgctgagatagtgtcagccctggactacatgcactcggagaaagaacgttcgtgtaccgggaactcaaagctggagaacctcatgctgggacaaggacgggcacataaggatcacagacta

SEQ ID NO: 585856 - DNA, 435 bp, Homo sapiens
ctctaaacactctcatcctcagtgacctcttctacttccacatccacagtctcagttagcatcactagctgaaaatctctatgcaggacttcttactgacatatcaacctgcttatgaaaccaacccaatagtcacatagatatttttttttcttttcttttcttttcttttttttttgagatggagtctcgctctgtcgccaggctggggtgtggccaggttggagtgtagcggggcaatctcggcttactgcaacctccggctcccctcctgggttcaagttattctcctacctcagtctcctgagtagccctttaaaagggggggggaaaagcctttaaaagccccaaaaggggggaacgcaccacgcccggctaatatttttgtatttagtagagacgcagtttcaccaatgttggccaggatggtcttta

SEQ ID NO: 585857 - DNA, 684 bp, Homo sapiens
  misc_feature (5)..(6): n is a, c, g, or t
  misc_feature (508)..(508): n is a, c, g, or t
  misc_feature (582)..(582): n is a, c, g, or t
  misc_feature (601)..(601): n is a, c, g, or t
  misc_feature (604)..(604): n is a, c, g, or t
  misc_feature (611)..(611): n is a, c, g, or t
  misc_feature (623)..(623): n is a, c, g, or t
  misc_feature (634)..(635): n is a, c, g, or t
  misc_feature (643)..(644): n is a, c, g, or t
  misc_feature (650)..(650): n is a, c, g, or t
  misc_feature (655)..(655): n is a, c, g, or t
  misc_feature (660)..(660): n is a, c, g, or t
  misc_feature (664)..(664): n is a, c, g, or t
  misc_feature (667)..(668): n is a, c, g, or t
  misc_feature (672)..(673): n is a, c, g, or t
taaanntgttcattcataagcaaatgcatatatgttatgctctttctccatattttaatcccttatacagctgttgcctcactttcatattcctttgttgtaatgctgccagcattctccttcctccctcctcattaagaagaatgaattgaacaagctacatggagagatttacactgcaagggctgtcagagggaattccaacacaatgatttacttcggtatcaaattcaaaacgaggatcagaaatcctgcattatcatctataatgaatctatttcatcaactaatttaaaatcatgcataattcattacgtgcattattcatttatatttagcatgtatttccctagatgtggtctctatgctaactttgcctcactattttttctgcataaaatgattatacgtttctttattggtgaaaacagaatgactttttgtcaaattgggtcactaattttcctatataacacaataatacttcctgccttttatttcaaaaccntttccttacatttgcattttatccttctagtaatcatgtttttatcaatcttgtgtattttattttaaaagtangtaatccatcattccaaangantgagaangttgctcaaatnaaatgtatgtnngattgaanntagaantactnctggnttcnagnntccnntttgttggcct

SEQ ID NO: 585858 - DNA, 567 bp, Homo sapiens
gtaggttgattaaacaattgaaggcgatctttaaaaagagattaaaccgaaggtgtgattaaaagaccttgaaatccatgacgctagggagaattgcgtcttttaaagcctagttaacgcgttactaaacgcagacgaaattggaaagatcaatagggagtggtaggatgaaacaatgtggagaagatacgcaagtttgaagtggaaaacgggcaatacagaagtacgggaaggcgaagcaaaagaatagagaagatagggaaattagaagataaaaacatacttatagaagcaaaaaagataattttaaacccgtaaaagtaggacgcagaagaaaaaagacaagctaggaaacaaaaagctaagggcaaaattgtgcaaacttagaagaaaattggaagatagaaacaagatagaaattgaaactatcgtcacgagttccagatagcaaatgaaaaacaggctacgacaagtataggagaagtatagaagatagaataatataaagcctaaaatgggataaaatagcactgaaaaaatgaggaacttatgggttacagaccgtcg

SEQ ID NO: 585859 - DNA, 364 bp, Homo sapiens
  misc_feature (8)..(8): n is a, c, g, or t
  misc_feature (25)..(25): n is a, c, g, or t
  misc_feature (222)..(222): n is a, c, g, or t
ctgtaaancccagcactctgggagnccgagacgggatggatcatctgacgtcaggagtttgagaacaaccctggccaatatggtgaaaccctgtctactaaaaatacaaaacattagcccagcgtggtggtgcacgcctataatcccaactactcaggaggaggctgaggcaggagaatcgcttgaacccgggagggcacaggttgcagtgagccaagatgngccattgcactccaacctgggcgacagagcaagactcccatctcagaaaaaaaccaaaaagccattgaaacataaatatggctggaagagttttatataattcatgtggttttttttttttttttggaggcagagttttggc

SEQ ID NO: 585860 - DNA, 1666 bp, Homo sapiens
  misc_feature (96)..(96): n is a, c, g, or t
  misc_feature (159)..(160): n is a, c, g, or t
  misc_feature (163)..(163): n is a, c, g, or t
  misc_feature (165)..(165): n is a, c, g, or t
gacccggttgggctctgctgctcccttctgggttccgaggcccaagcccttggcagtgtttgtgagtggaagggaggtcacgctatcgtccgcggncccagcagccctgtgccctcgttggatcccgcgacgcggctcctttaagagcctcgcgggtcnnccngncgctaggtcgctccccggccatgcgggctgctgcgggcctggcctgaccctggcgtttgggctgctggggctgggtgcggtctgtcgaggtgctggcgtgctggctgtgctgggagtgactgctgctggtgctggctgcctgtggacttgcttgtgtgcctggctgccctgtgcttgccctgtgtgctgtgctgtgcagcctgagtttgccccctttgtgccctgtgggtgacccctgcggtcctgggcgagcttggccaatgtactgtggcttgcctgtgtggccttggctgcatgctcaatgagcccgctgagtctgtactgtgcttgtgctactgaccctgctgcaccctgctgtgtgctgctcttgggtgtgtggagcatgcttgctgaccctgagctgtctcctgctgtgctgactgtgcgacccgtgctgcgatgtgtgagttcctgttgaggagcgactcggtgcacagctgttccaccgtgccaccaaacggccgactacctgcggcagtggcttcgaccgcgggcaacctggctgcgactgcaaccaccgtggagccagaaggcatggacgaccacggttctacctgagcaagttgcgcccaggtgcccacctcacagaatgcctgacaactggggaatataagccgagttggacccgagtaccaacacgtcatgtttgagtgggcctctactgccagaaaaggtgtggaactaagaaatccaggctagtaacactgaggccaacctaaagggaaccggcacatggctatcacctttacacggtgcacgttgaaatgtgtgttctcttccgtcgtgggctcctcaacgatcaaaacaacaaagcaaagagacaaacacaaacaacagacacatcaaacaccagaaccggagggtgaggactagagcaggacaagagcgcgaagaagcaaggagcgaggataagagaagacgggatccgcatgaagaggtagaaatgagaagagagagaggagagagcagagaggaggagagagggcgcagagcaccaaaagtgaggcagagcggacgagagcgaacagcagaagcaaataggcgaagacggagacgcgggaagaaagaagagaagcaagagacccaagagggagcaaaaccagagaagagagctacgaaggagaagggaagccagagcagcaacgagagacgcagaggagagagagaagcagagcgaagaagcaagacgcggaggagcgaaggcggagaagacagggagagcagaaggggagaagagaagagaacaaggagagacgcagagacgaagaggggacagagcaagagagacggaagaagaagaggaaagaacgaaggaagaggcgcagcagcaatcagccaaaagagacagagcacaacgagaaagagtaggaaggaggagagcaggacaggagcaagagacgagcgcagagagacagaagaagacggagcacgacacgagagacagagaaggaacacgaacacg

SEQ ID NO: 585861 - DNA, 640 bp, Homo sapiens
cgttgcacggccacaggagggacacacatgtaactgtgtgagaggtgcatattagcagatggggccagacacagtatggcgtgtttttcgaacccgagggccaagataccgggctaataacgaggcgcgttacccaacagatacacttctgtgtccagacaagctgcgcaagcgggcttcccacacagtgcctggcaccaccacacccaagaatcttcattctttaacacgcaattatggtgaaccatgggtgacaaacaggtgtgaacttcttggaaagcaccagagtgctcagacttttccgtgccatttgcagagggaacgcccattccagggagcaagcttcgactttcacgatatttatcaaggaaagggtttcactctgtggaggacacgtggcttgagaacacactggagctgtcagagttcgaacacaggttgctgagttcaagaagacattcagacgagcaggaagtctagctctgagcaaagctgtgagcaaggccagcagacgccgaggcacagatgcattagactttgacatattagaaatacagaccgcgtgctcagatgtgtgctgtgtccccagacacacagacctataccccgagcaggttctcgggcattcacagaggccttt

SEQ ID NO: 585862 - DNA, 194 bp, Homo sapiens
ccgtcgagctgctgtgtgacccagatccggtgtccgtgggtcgtctcatcgaagctggcggttcggctctcaagatggtgactattgcgccagaacgtgcgcacggcttggaagcggtgaccaccttcaccacagccggagtgcacgctgctatcggccatactgagtgtgacaacaccacggctagtgccgca

SEQ ID NO: 585863 - DNA, 599 bp, Homo sapiens
  misc_feature (532)..(532): n is a, c, g, or t
taactgtaaacggacttcaacaaaatttaaaacttagcaatacaaaggacaccattaagaatatagagtgtgaattttctcctacacactaggagaaaatatgtgcaaaccatatatgcagtaagagacttgtatccagaatatgctcaacatcgttagtcattagcaaaatggaaattaaaaccacaatgagataccacttcataccaccctctagaatggctataaacaaaaatataagaacaagtgttgaggaggatacagagaaatattggcggcaggaatgtaaaatggtacagccactttgaagcagtttggtagtcttttatatataaacataaatttaccatatgacttggtaattccacacctaagtatgtacccaaaagaatgaaacagctgaggtgcttgctgagggcaaataaaatatgcaatgggcagtggaaaaaggtagctataagtaccagctacagacccattatagtactcagaagaaaatttatgatcttaaatatatgtattagaaattaanaataaactaagctttcaattaattaaaacaaaacagaactaaatagagttgaggtaatccgtgaggg

SEQ ID NO: 585864 - DNA, 350 bp, Homo sapiens
ccacagcgtatttcttcaaatataatgtgacagaatacgactcaattcaccggctacaacaattcatagaatatttcaatgtttacttggagatgccaaagttcactgttgctgtgtttttcacaatgaccacatcaaggtactacttacttgtgttaaacaggccactgtgtagagtcatctagagtgtagaagaatgtccctatcacttgctggtaaaaatccactgtgctcccaaggaaaagaaaatggtctgacagcctctgtttgtggctctcaccaactcatctttcacctaagtcatcaagctccacatacactgaggtcaatgtcatacctccaaggggaaa

SEQ ID NO: 585865 - DNA, 142 bp, Homo sapiens
tgtactctctaattcctggagcttcactctatgatcagcaaccttatcctttaccatgccgtaacaggcgtgacattcctggcagccaggccaaagaccgattgtagaaatagttttctctcacactggtacacatgcgatt

SEQ ID NO: 585866 - DNA, 1060 bp, Homo sapiens
cttccttctgctgtaccaagtgtattggtaaatctgttgtcatctcaacattgtttacactgtcttcaccacgagtagatttcatctcaagaaaccacttgcttgtgctcatccgtgggagcaactcatcctctcacgtttactccagaggctgctgcagtctcgccagatctgcaggctctttctcgtgattctagtgctctatgtatatttccaccagtatctgcagattactgtcctcgcacagaagatcgtgaacgccctgtgtcatctggtgagggttggaataatctttacccaacttctctctctttttgatcatttggggaaggaggtctgggaggcggggaggcccgtggtcagggtatgacaatgccggtttacatgcgtgacaccccaccatttatccggggtgtatccgatacagattagtctgtgccgctagagacgcatccacaagtttcgcgttgggggatttaccgcaacatcgccctcgtagcacaggccccacagtcggaatgttacaggcggggccctttaattgcacatgcactgaggattctcgccaatattgttggcgcccagggggcggggttcctccaaagaataactgggagacgcttggaagagtcacagagttgccatggggcacctccccaaacggcggctgcggacactaccacagggggttggggaagccccactacaatgccccagggcccccacaagttctccctccctaactgggcgaccaacaccaaggggacccatgctaaaacagaggctcccgttaacagtggctctcctctccaggggcctctcctcaacacacgtgtgtcgtgaaaacccagtttatgccagcacaaacacggttcccaacgatatttttgtggcccccaaagtagttactatcgaccgggggagcatccactttcccttaacaaacaaagctcttagtgctccgtgacggcaaactacttcttttaacggcgtcgcgtcacgcacttgccaacgtggcatatcattccttgaggcatccaaggggtcaccgacattgcgt

SEQ ID NO: 585867 - DNA, 225 bp, Homo sapiens
ttataattttataatatcataaatttataatattagcaatttataaaaatataactttataaaaatataactttataaaaaggtttggatacgtgaaaactttataaagttgttgacatggaaatattggtacggtatatttgagtcataaaaatgaataaagaaaaagcccaccaaggacaggacaccttggaagcatcatttatttaagttagatacatatta

SEQ ID NO: 585868 - DNA, 116 bp, Homo sapiens
cccccgagcgtcgagctgtttcaaagcttctgccatggcctgtctcctcccttcagtcttcgtaggcaaggggtttcatgcatgcactgttacctttaacatgtagagggttcttg

SEQ ID NO: 585869 - DNA, 1702 bp, Homo sapiens
  misc_feature (13)..(13): n is a, c, g, or t
  misc_feature (42)..(42): n is a, c, g, or t
gcgagaggcaggngagcgacacgcgggttaatgatgcttgtnaaactggtggtcacctgttgtgtaattagcatctcaccctcgtcggtggtttgttgtggattaactcctctgatagatctttctttgtgtgcttcctacactccacacactccgtggcgattttaatgcattcgttggttgggtgcgctcgccactcccttcgtgggtgattgacaagatttgggttgctgcactaacagagcacacccgcggattgtgtttccctcccgtaagagaatttccccccggtggtggttttcccacatggttgtctccctccttcctcccggagtgtgtgcgtctcccccgcgcatatatggtgtggaccctcctctctcgcccttgtttcactacccacgggcgggctccccggtcgcttctctttttatatagttgggagtgaattatttgggggattatctactcatagcgccgccctcttctggggctacactactctctcccctcggcggatgtatacccttcttggcgtcgctaagtaatgttgttgatgccgccccaccgactgggcaccccacatgttctgttggtaggccgccgttgtcgctcccacctctcccgtggggggcccactatatggggggaacgacctttttttcgccgccaacctcttgtgggggcgcgctcgggtaaaagagtgtgccttttttttctccccgcgcgtaagttgttttacccgtattcggagtagttgtgttttgccggcgcaccacactctgtgggcgcggttttagtataccccccgcttgtttctcccctccctgcacgaggaggtggtttacttgccggcacctagtctgtgtcccccacccggcgctccccccacgtgttggggttttttaaaacacacgggtgtcgttttgccccgcgattttctttgtggtataagcccctccccgggggtttcctcccatagaggggccctcctctttcggggggcctccacctcgccgcattgagagagagtgtctcactctcgcgcagcgagagtgtctctctactatagagagagggactccccccccctcgcgtaaacacactcttgtgagagaatatacatcgtgttgtagagacccatacaacccacactatatgtcgcacaagaaccactgtgcgcgccgcgggagacacaccacatctgtttttctccccacgcgcgccacgcgagatatttacacacacgctctccgcgcggggagatatataggccacacgcttgtgtcgcacacgacacagcgcggcgcgctcacacacacagcgccacatatcacagagtagtgagaagaaggcgcgggccggtgtgtcacagcgcacacaaaacgcctctctggggtgagggtgagaagagaaaggagaaagaaaagagcgctgctctgtgttggtgtgttaaagagacagcacacagagagaaagcctctcctggtgggggaaaataaggcacccacgctttcccacgaacccgccccctctgtaaaaaaagcctctccacagagagagatgagaaccctctcctaccacagagaggagagagaagaaagcctcgctgctacaaaaactctttaaattgggtattccctaaagggccaaacattttgggcacatttttttggaaaaaaacccggttataccgccccggtga

SEQ ID NO: 585870 - DNA, 236 bp, Homo sapiens
caacgttaggagctggcttatagtgatatgataacagcatgttcatataagagctgagagagcagcatctactatgatacacagttctgagaatctgagtgttactggatctagcggtaacaaagcaggaagtatgtctcttgctgtgtacacgcagggctttatcctccacggtatattgtgtactgtcaagtatcttgaaagatttctgttctccatctgctgctaggtacaac

SEQ ID NO: 585871 - DNA, 118 bp, Homo sapiens
catcatttcatcacaacacatttatcaattaaaccccctgccataacccaataccaaacgcccctcttcgtcaagatccgtcctaatcacagcagtcctacttctcctatctctccca

SEQ ID NO: 585872 - DNA, 141 bp, Homo sapiens
ttgccctcgcttctcagatccccgccggaagtgaagagagcaagcagatttgaacctatctgctttcaagctggtcatcatgatgaaacttagacacaaaaataaaaagccaggtgaaggttccaagggcccacaaggaag

SEQ ID NO: 585873 - DNA, 620 bp, Homo sapiens
  misc_feature (271)..(271): n is a, c, g, or t
aaaatgcatctgtccacatccctatgggtgtctccctcttctcagtggatctgcacaattcctgaagaattagacttggattgttctatgcaaactgtcatttccaggctgagcacaagtatcatagggacgttggatctatcttaataacgaccgaacgcaacaagtgataagcactggagatatgtttctccacaagagacctctgcacatggcagacagaaatcattacaaattcttattcagacatactgcaatatgtaacctgtanaatattcaaggtatgagacatgacattatagtggtttccatatttacagaacacatttacaattaagaatgttaattacaatgtgcagtcgaaataaatctccgtggcgtttggagtaagtaaacacgctgagtgaggttatcctataaatcatggggagagcacgtgttgcgtcaaagtttctggtcatgctcaatagctaaaacaccagtgacacattttattcacgcaaaaggaacccagtacctttaatcaggccagacatgtattagcctgttcagcacagcaattccatggatacgaaatagatcttcaatgccaatcattccaagattcagtattactgaag

SEQ ID NO: 585874 - DNA, 344 bp, Homo sapiens
tgtcggaggtaggccgaacttcgggctgagcgtgagccaagcaggaggccgagcgggccctgaaacaggctatgaaaaatgggaacaagggaggaccacctcctaaggccagccccagtcacagctggagaaaccccctcaggattgaagcgtctcccttagtaccctcaggttgatgacctacttctgataacgcttgttaaaagaccagagcgtttacaggttcctacaccaaaggattattgatccaaagtctgtctcttctctcacctaccccagtacagcatacaaaactctctgacccttttcctgagcctttcgtaccgagctctccttcttactct

SEQ ID NO: 585875 - DNA, 403 bp, Homo sapiens
atgattgggaaacacccttccctcagatccccctaagccaacaggtacatagcacgagtacaattagcagaattcacacactccgtcgggcgtcctccctctctgggacagcgcggtgcagtccagaaggtccatgcctttaataagaaggtccatgccaggcctccactccggcttggcctctgctgctctgcgcgcagtcagcactctccacactccagatgtctcactggctccccccagccccatctctcacaagctccagatcctataattaactgcatcctcaacgtctccccagctatcccacagacacctcgaatgcagctcgtctaaaactgaatgcattactgttgcagcatcccccacaaccctttctcctgtggtcttggctggtgggcag

SEQ ID NO: 585876 - DNA, 322 bp, Homo sapiens
ttcccaacatttcgttgtcgagcgacagcattttgccaagtactgtttacattactctgcgaagcgatacgtggaggttcgaagacgatagatccgtctctgagatctgacaacacctctcgcgcgaccggcgatgcggcggcgttattcccatgacccgccgggcagcttccgggaaaccaaagtctttgggttccggggggagtatggttgcaaagctgaaacttaaaggaattgacggaagggcaccaccaggagtggagcctgcggcttaatttgactcaacacgggaaacctcacccggcccggacacgaatgttca

SEQ ID NO: 585877 - DNA, 205 bp, Homo sapiens
caagagtagtccagagatctagttaagtctctcagtacacagtgctagtacaagccagcagtgagagaggagggcccagcccgcatgttatggagctagtatagagccagataggcattagtcagcgtctatccttagagagcagtccaggcttatatagtttgagagcatgcctagagagagtagcagagcttagtgagctagg

SEQ ID NO: 585878 - DNA, 155 bp, Homo sapiens
actgcagacagctgtgacaataagccaacactgaacccctgatgacggtctcactctgtgagccgacaacgcagagccgctgaagcagcagatgaatgggacgcgtgtgtgagagtgaatctcaccgatgtccagtatccaatgtgagtgtcgca

SEQ ID NO: 585879 - DNA, 361 bp, Homo sapiens
gaattcccccccccccccccccccccggggtaatgaaggggtccagtttcagtcttctacatagtgttaggtagttattcctgcaccatttattaaagagagaattctccccatattcctcttgtaagtttggtcaaaaatctgatgagtgtaggagggtgaaattatttctgggctctctatcctgtggggtgggtcttgtgaacttacggattccatatatctacctctctcctggcttaccccctgtaaaattatttcaagtgcatacagggtgctaattccagatgtccaagagttcaaactctccaaaaagtcccaaaaaaaaatttggtatcccctctttccctttttaaaactt

SEQ ID NO: 585880 - DNA, 304 bp, Homo sapiens
  misc_feature (258)..(258): n is a, c, g, or t
cccggaaatcgcacggagaatgtcatgaaagaaaggatgtatgtttatttacctatttttttctgtttgagacagggtctcactctgtcacccacactggagtgcagtggcatctctactaaaaatacaaaaaattagcccggcgtggtggtacgcgcctgtaggcccagctactcgggaggctgaggcaggataatcgcttgaacccggaaggcaggttgcagtgagctgagatcgcgccactgcactccagcctgngcgacagcacgagactccgtctcaacaaaacaaaacaaaacaaatc

SEQ ID NO: 585881 - DNA, 290 bp, Homo sapiens
ccacgccgatgtgatacgccgatgggtcatatggaggtccccaggctaggggtccaatcagagctgttgccgccagcctatgccagagccacagcaacacgggatccgagccgcatctgtgacctacaccacagctcacggcagcgctgggtcctgaacccactgtgcaaggccagggatcgaacccacaaccacatggttcctagtcagatttgttaaccactgcgccatgatgggaactccatgcagattttaaaaggcattctgaataggtgaattccgggagattc

SEQ ID NO: 585882 - DNA, 760 bp, Homo sapiens
  misc_feature (660)..(660): n is a, c, g, or t
actatcgcggttgaagcaacggtagagatccacgtagactgctgcctagatctgtattctagctgcagggcaccatcgagactgctaacatagctgtatatagtggatcacgagatctgatcctgatcgcagaacctcccctgatcacaggatctatgttggttgaaataaaaacaggacctgcatgagctcaataatgcagggatctaacctagtggacagcaatctgtagaagaagataacttcttactacctgctaaaatcaacatgcagagaagtgatctgagaggcccctgctcaggacagatgacagatggtccacagctgattagtcttgatccagttctaccagtaacatggggtggacgctctgcatagaaccccacttcaagatccgcgtggtggaccatagagagcaagcttgacacttctggtatcggaaagtggtgcattaccagcgaagcacgtcaagacactctggagaaaaggctccgtgcagaccgcactgctgaacagtgagatgcggtgaacactagaatggaaggtacagcgagagtcctgcctgactagaaccttgatttgttaggaccgagacttaccttccaagcttatcattcccgcaacgctccgccaaaaaaagcaggtgcaatttgtccgatnttgcaattggataaatctgggggaatgttccattcggtatttcgttaaggaagtgcgcacgaactaacaattttaataggatgtccggccccaatggctc

SEQ ID NO: 585883 - DNA, 190 bp, Homo sapiens
  misc_feature (78)..(78): n is a, c, g, or t
  misc_feature (106)..(106): n is a, c, g, or t
  misc_feature (140)..(140): n is a, c, g, or t
  misc_feature (158)..(158): n is a, c, g, or t
  misc_feature (185)..(185): n is a, c, g, or t
tggaggactgttgggcatgtagactggccccttgaagattccccattgtttaaataaaatcaagcaaatgcttttttnccaagagcccgagcctcgctctaaaggncgcagtcctagaggcgtccctttggggcttgaanagcacactgtgggacgcncgtgcttctgattaaaggaatctcagntctca

SEQ ID NO: 585884 - DNA, 255 bp, Homo sapiens
aatccggcagatcgaggccaggagaagccaagggatgtatcatctgttgaactcttaaggaataatcatcaaggcatcaaagttgaaattgatgcacgtaatgacagtttcacaagcctgcattgaacttgggaaatccctgttggcgagaaaacaggtatgcatctgaggagagtaaggaaaaagttactgcaggttgacggaagaagaggaaagaagatgagtcgacaaggtgggaaggacggagtgggaaag

SEQ ID NO: 585885 - DNA, 317 bp, Homo sapiens
  misc_feature (265)..(265): n is a, c, g, or t
cacagaagcagaaaaccaaacaccacatgttctcactcataagtgggagttgaacagtgagaacacatggacacaaggaggggaacatcacacaccgaggcctgtcagggagtgggggacaagaggcagagagagcattgggacaaataccaaatgcatgcacggcttaaaacctagatgacaggttgatgggtgcagcaaaccaccatggcacatgtatacctgtgtaacaaacctgcacgttctgcacatgtatcccagaacnttataataaaaaagaaaccagtaagtgctcaataaatgttactaacatctaa

SEQ ID NO: 585886 - DNA, 691 bp, Homo sapiens
gaaggatgcagtagtagcaggtgcagacgttccgacgaaagggggatgaaactagggatgtattaacacagctgcgttggtaacgtttttcatggaaccaagatttgacaacgggcatctcttatccttaggtttaaatattacctgctgggagcaaggcctggtatgaggcgccctgggtcttgtctgtgggtgtttcgcttatctgtaaggattacacgcagatagggagaagggaaactggggcctcactttgatcaatgaactgaggtcagcctgtgctgatattcttaaagttttctattcttgaataaacgctaatcaattttctacaaccttgtcacatgtagctgagtctgggatgactcagtggcatcagtggatgcgtggcaaggttctcggtcgttgataactcatgacccaaatccttccaagacacaaatgaagctaatcttcttcaccgtcccttacctctcccagcttcccctctgtgtctgtgtctgtgtgtgtgtgtgtgtgtgtgggtgtgtgcgcgcgcgcgcgtgggtgcacatgacggaaggtacggtaccctaaatacacacagtgagctgagctcacgtgtatctccggactcacacacactgtgcgctacgaccgtttagcatagacctcagcaagctcttccgatgtcacgtgtctacgccacacg

SEQ ID NO: 585887 - DNA, 1024 bp, Homo sapiens
  misc_feature (322)..(322): n is a, c, g, or t
ggctgcagtagcttgggaggctggaaagcctctctccatagagggagatagaggtggcacgcgcccaaaggctcatgaagttcgaatcaagatcattgccgactgcggtttggccacaccgtatgcctataccgctgtagtggagctgatcctgagggttgttttccatgtgatcttgggacatgaatggtgcatggaattgtggaaacgtgttggtgaggggatgttactaatgctgacagtgcgggtgagcacttgatcatgtcccatctttatcatcgccatcagttgtgtgagaactgcaaagtttgaggtcgtaaantcctaaacacctaaacctcttgtccagatagtatacaggagatcactctaaggcgcaagaggagtgacatgcactagactggctcaccagctgagtcatgttacattgtcgaacagcgataagacacatcattgcgagttcacagtgggaaccccagccacaatgttgctgtaggtacagcaggttggatggcatgactaatcgtcgtagcttcgcttaatcactagatcctatttagacaacacttgtttgggcattaaacgtcatgcccttctcagaggtagtaggcaatgttcgaagcgagttatggcgactcgctgtgaaacacgttggcaccaggtcggcgccgccgtggcgtttctcgttgtggtagccgggtcgtctggtcttgtgccagggaagtcagcgatttgggacaggttaattcatgtgccctgtactaggtggggtttggtcgtttttcccggatcgctccgggtcgtgggccatctctggaaccgttagcttgtgcgggggcgcacaggagttggggacgccgacaggatgtgtcatcaaccggcaaaggagttgaggacatgccaatccacggaaaggggggcagcgagaacgatctcgatggatgaagtgagagaatcaccttggcaaatcgaaacggtaacggggaaaaggtcaagaacaggcaacagcttgacgcattgtgaa

SEQ ID NO: 585888 - DNA, 992 bp, Homo sapiens
atgcgtatgtacttcgtggccgttttgtgtcatgtcacttgtggtttagttcacttgtgtgctcgagctgttcgcctgacgcctgtggatgccgtctgtgtgggtctttgtgtgtcgtgagtttcgtgtgtttggcggtgcgtgtgtaatagctgttcactcattgtgtgcaccgcatctgtccatataatcgtttgatgtcacgtctgtgcttggttgctatcccgcgtgggcgcatagtttttttgcgtgcgcgccgtagctcaactagtcgtgttcggccccgttatcccctcgttgtggggggtttaccccgctgttccaccccactaccgccggggtttaaccgccgctccctttgttgtctcggtgtttaccgccgaaccctctaatatgggccgcatattatttttttcctaatctgatccaccccgagagttaccaacctattactcttattttgtaagtgcatactccgcctcccactaaaattctctgttttagccacaaacaccttttccagaggtttatcccccctttttccgacgatacccggtcgaaaaaatacccccggtgcgaaactgactcatcgttttgcacgcaccgggagtttgtctacaaccaaaaaccactcatgtcaaccctcgtcacttgtgtctcccccccccgccttgaaccaaatctgggggcatttctcccacgtgtcgagcagcactgttttccacgcaacgcgcagtgtctctcgcgctttcctttcccgccctcccgtcgtgtgcgcgcccacagccgctgattggtcccccaccaccgcggtgtttgctagtcaaaaaccagggggcgcccccacctcgcgtccggtcgaagacggcacaacgtggcgtctgtgagagtttcgctgatccccaccagtggccacatggggtcaccaccctactcgcgccttttcccccccacgcctccaacccattccccacccgctctcccccatcaca

SEQ ID NO: 585889 - DNA, 236 bp, Homo sapiens
  misc_feature (1)..(1): n is a, c, g, or t
nttgtggctgttaccgtgggagaaagtgggcattaccacagctcttcggaccagggtcgaggcagcctgggacagttggtccactccgagtcagttcggacccaatactcagttggccgcgggaggttggtcgatttaatgtcagctcggacccggtaccgagtcgggcggggatagctcggggaccccaacagctccttcggacctggggtcccggaatagggccggaaaggtgt

SEQ ID NO: 585890 - DNA, 405 bp, Homo sapiens
  misc_feature (10)..(11): n is a, c, g, or t
  misc_feature (358)..(358): n is a, c, g, or t
  misc_feature (369)..(369): n is a, c, g, or t
  misc_feature (383)..(383): n is a, c, g, or t
  misc_feature (397)..(397): n is a, c, g, or t
gcgtggtggnntcatgcctgtaatcccagcacattgggaggccaaggcagcaggatcgctgaggccaagagtttgagaccagcctggggaacaaagcaagaccctgtctctaaagaaaaaaaaatttttttaattagccaagtgtggtggcacataactgtagtctgagctacacaggaggctgaggcaggaggattgcttaagcccagggaggtccaggctgtggtgagctatgattgcattactatacttcagcctggggtgcagagcaaggtcctatttcttaaaaaaaaattaaattttttttaaagaaggaaggtgggggaaaagggacacaaacaggtggaacaattagganaacaatgggtngagatggttaggantttaatttccacgntttaaatt

SEQ ID NO: 585891 - DNA, 747 bp, Homo sapiens
gcccggcggacgcttgttgttgtccggccgggggaggcggatggtcgctcgctcgctcgctcgtgctcgctgactcgccggagcgctctgtggcggtcggtggcaggtcggtcgcgagagcgggctctgtggaagggggcgaggctatgtcgcgtgtggcagcccgtgatgtgtgcctggcagggccgggagtaacgtggactgtcgcctgcaggagctttttcccccggatacagtgctgtgccctgagctggagtgccgctggctgcctgcccttcctgatcattgacagagccctgcgactgcgcaggatgcccgacccacgaactgcaggcaccagtaaaccagaacgcggagcagaccaagaaccagaccagaccctggacacggcagcgagctgatctaaacccagaccagagcaggcaaatactaacaccctcattggagcacaggagctcattccccaaaagacatgaagctattggagaactcgaagctttgaagccatcaactcacagctttgacattgtggagaccggagattgcccacatcattggcacggaatcgagagctaactcatgtaagatggcaggagacgacaaaccacatgttcaaagcagttctgccaggagggacagacaccacgttgctggaggcactattctacacacccagaacttcagggactgagcccacagacagacctcagcaaaaagccaaaggcaggtgaaagaggagggacccct

SEQ ID NO: 585892 - DNA, 287 bp, Homo sapiens
tacaccgtatatttccttaagatagaagagttgtcactttctacaaaaagaatacgtgtgactctagtattcgcagatagtactggttgcaaagaccagctatattgtatgttcatgtgattgctctcacaacttcgtcagcccgtaactgttctgttccaccttgctatgagatagtcatggagacggtctagaaaaatcacatgctgtgtactaataatgatgcattgtaaatcatttacaagctcaaagctaagctaaaatggaaaagtgcacaatttgtcgag

SEQ ID NO: 585893 - DNA, 333 bp, Homo sapiens
  misc_feature (245)..(245): n is a, c, g, or t
  misc_feature (289)..(289): n is a, c, g, or t
  misc_feature (296)..(296): n is a, c, g, or t
cacagttccaaaaagttgattccagtttttgccagcttaacagttgcttcagtggagggaccaattcttggagctccctagtctgccatttctgtggcatcacttcctctacttactgtttttagtctgctttttataatctaacattttgccttttagtggctacattattttcctaactacctgtatgctgtgatattgaacttttggttgttgcatactttggtggtgtccagtttttttgnctcttataaaaatattgatgcaaactccagttatttcttcaggntaatttnctagaagtcaaataaagtcacagagctcttattaaga

SEQ ID NO: 585894 - DNA, 960 bp, Homo sapiens
  misc_feature (41)..(41): n is a, c, g, or t
  misc_feature (77)..(77): n is a, c, g, or t
  misc_feature (148)..(148): n is a, c, g, or t
  misc_feature (178)..(178): n is a, c, g, or t
  misc_feature (222)..(222): n is a, c, g, or t
  misc_feature (232)..(232): n is a, c, g, or t
  misc_feature (239)..(239): n is a, c, g, or t
  misc_feature (249)..(249): n is a, c, g, or t
  misc_feature (352)..(352): n is a, c, g, or t
  misc_feature (357)..(357): n is a, c, g, or t
  misc_feature (387)..(387): n is a, c, g, or t
  misc_feature (455)..(455): n is a, c, g, or t
  misc_feature (457)..(457): n is a, c, g, or t
  misc_feature (459)..(459): n is a, c, g, or t
  misc_feature (649)..(649): n is a, c, g, or t
  misc_feature (668)..(668): n is a, c, g, or t
  misc_feature (677)..(677): n is a, c, g, or t
  misc_feature (713)..(713): n is a, c, g, or t
  misc_feature (716)..(716): n is a, c, g, or t
  misc_feature (745)..(745): n is a, c, g, or t
  misc_feature (756)..(756): n is a, c, g, or t
  misc_feature (766)..(767): n is a, c, g, or t
  misc_feature (822)..(822): n is a, c, g, or t
  misc_feature (856)..(856): n is a, c, g, or t
  misc_feature (864)..(864): n is a, c, g, or t
  misc_feature (891)..(891): n is a, c, g, or t
  misc_feature (895)..(895): n is a, c, g, or t
tttgtttgggtttcttgggggttttgggatccccttcttcntccctctctcgtcctcccgcctcccctcttccgggncgtttgctgcccggttgtccctccgtgcttgtggcggcttttccgcttcccctgtctctggggctgccccngttgcccgcccttcctttcctttccccccncggcccccccttttttctgctctcccccacgcgttccccttccncgtcttcccngtctccncttggttttngtcttttgccgcccttcgcctctctccttcttctgcttcctccccccttttctttgtttcccccttttcccttgcttgctggtgccgggttgccttgcgtggngtgcntgttttctctgtgctttgttttttgttttnttcctgcgggttcccgggcgggtccctcggtggttggctccgggcccggctggtgggtgtttcttctncncncgggcctgcccggggggcccctgggggtgggggggggccccctgggtctccctccctgggcgcttggtgctttcctttttttctgttgcccgggggccgtttttttctttttgtctggttccgctgcttctggggcccgccttccttcctcggttgcccactgcctactctgtgcccggtcgtgtgttgngtgctggtgccgggtgggncaaggcacntcctacgggggctcgcagtgtgggcaggtgctgtgnttncgcacacacacaagggctgggtactgccngatccgtatcnctccggagcnncgccctgtctctctgaatgatctctggcatggtaaaagagttaactgtatttcanaaggtgaacaaaactttttttgctttgttatgcntgtttcanattgatcagtggttcaggcctggagtntgcntcagaattatctgtgaagcttagtgaaagtgctgatgccagagcccacccaaagcttactgcttc

SEQ ID NO: 585895 - DNA, 244 bp, Homo sapiens
gtgcaatacctggaagaacagacatagagttggaatatattgtatggaaggtattccagaaaaagcaattggttgaaagacggcgacttctttgacagaaaacacaagaagtcaaaaaagagcacaagatgattcttatgaatattatgatgacgactcttcagcctcaacttcatttcagccacaagcctgttcaacctcagcaagggtatatttcctccactcgcacagccaggacttccac

SEQ ID NO: 585896 - DNA, 1098 bp, Homo sapiens
  misc_feature (1)..(1): n is a, c, g, or t
  misc_feature (3)..(5): n is a, c, g, or t
  misc_feature (7)..(7): n is a, c, g, or t
  misc_feature (9)..(9): n is a, c, g, or t
  misc_feature (338)..(338): n is a, c, g, or t
  misc_feature (492)..(492): n is a, c, g, or t
  misc_feature (605)..(605): n is a, c, g, or t
  misc_feature (638)..(638): n is a, c, g, or t
  misc_feature (825)..(825): n is a, c, g, or t
  misc_feature (864)..(864): n is a, c, g, or t
  misc_feature (866)..(866): n is a, c, g, or t
  misc_feature (954)..(954): n is a, c, g, or t
  misc_feature (992)..(992): n is a, c, g, or t
ngnnngngntcgcgcggttaaccctccatactactccgcagtgttgtctcagcctctatatttcacgtccactcgcccgctctctcttacttctatctgttccatatgtctatccacaccccgcaccacgattcgcactacggcgcgaatgagcgacccggcgacgccgtcgctccctcacatttaatactgatcactcacatcatacctattacttcttctccgattctacacatcgaggcacacatctcctgatcccgcaacctacaacgcttcaccggcgtgactgcgcgccgagtaatggatgagaccagggaacctgtgataccgccgaagcnctacgatttaagtctgagtctctactacctactatcggcgcgtaccaaatcctacacaatatagtgtggtgcgttacgacagatgagaacagacgctgcgtacgagacattaggctgtgctaggcgcgcgccctgcagcatgcggccgccaccngcgcgcccgagaaatgcagggggtcgatcagcgccgagaaagccgccaatacttgagtggcgtgagatgtaatgatggatgagcataagtactacggaagagtctcgaaacantcgcagtcaataatacaactcaatacgtaaganaacaatataacgaataacacacgcatatcctagaagacacagaagacagtatactgacacgacacagcacgtgtgtagatcgatgagtgcaaattagcacagcgtagtaatgcatacatcacgcgactctgcacactacaacaaacgacaccacactaccgtactttacgcgaagcgtcatagacgngagcgtacgagtcgtctgttacgcgtataactggatgtntnagtgttatcgcttatgcatcactagaacgacgaacagtcatccttagtccgatctaaatataagtcagacgtagatacacacaggatnagtatagtactacagcacactgtcactccacacctatngcatatcgtctcacggcacgcagtacgatacgctgacatcagtccagtcacgagtcgtactaacactctctacacgctacgtctgcacacactagcggcgcgtgtc

SEQ ID NO: 585897 - DNA, 1188 bp, Homo sapiens
gaacctatcctggggctgctgtggactatgcctgctgtggcggagacggacatccaggatctgaagatttggggtcgagcaggatgttgatatggtgctttgcagtcattcatccgcaaggcatctagatgtcctatgcaagttaggacggtcctgggcagagaagggaccagcaacatcaagattatcagcaaaatcgagaatcatgagggggttcggaggctctgatgataatcctggaggccagtgatgggatcatggctggctcgctggtgatctaggcattgagattcctagcagagaaggtctaccttgctcagaagcatgatgatacggacggtgcaaccgagcatgggaagcctgtcatctgtgctactcagatgctggagagcactgatcaagacgcccgacccactcgaggctgaaggcagagatgtggccaatgcagtcctggcatggagccgacagcatcatgctgactggagaaacagccaacggggactaacctctggaggctgtgcgcatgcagcacctgattgcccgtgaggcagaggctgccatctaccacatagcaaataataagaggaactccgccgcctggcgcccatcaccagagaacccacagaaagcaccgcgcggagatgcgcggagacgctcctacacagtgcatgcaaagggggacataacccgacaacaacaaagtctaggacagtctggatcaccaagaggccaaaaacagcaaacaagcaccaagcatagcggagacacgaaaaccacacacagacccgatacatgcaccacgaggtaccaggagaaataatcaccaggaccaagagaaggacaacaagaacacagaagtgcagcgaatgagcgaccatgaaaccacagcggatcacttgggacatgtaacatctttgatatgtctcactaggattattatacagaagagagcacattacgagaaagtacgcagtaccagagtgcctctatatcgtgcttactctcttatatctgaataaggaagtaacacacgcgtatatcaaatgacacaacgaatgtatgataagcttatacttagacttcatcatcacagaagatcaagtaagaagatacacagcagtctgtgtgtccatgtctagagatatcatactacatccgaacgaactgttagactctgttatcatcact

SEQ ID NO: 585898 - DNA, 333 bp, Homo sapiens
gaggcagagagattgcagtgagctgagatggctccactgcagtcaagcctaggcaacaagagctaaactccatcttaaggcggggcgggggaaaaaaaagagtcctgtgcctagggaaaaacaaaaagaaaaaaagaggccaggcatggtggcggaggcgggtggatcatctgaggttaggagttcgagaccagcctggtcaacatggaaaaaccctgtctctaacaaaaatacaaaatttagctggggatggtggcacgctgctgtagtcctagctacttgggaggccgaggtgggaggattacctgagcccaggaggtcaaggctgctgcg

SEQ ID NO: 585899 - DNA, 132 bp, Homo sapiens
ccttcagcaactgcctcaagataactgcgtcggtcgtgcaaatcatggcgataacggaacgggtcgaactcctccatataggtgctctggacaaactcgcagctgcacctgagttgaatatccatgcgccga

SEQ ID NO: 585900 - DNA, 544 bp, Homo sapiens
cgcccttttggcccctggggaagaaatgtgacaccaaggtaggaaactcaaaaaggctgggggcccggcggagggacaacttttttggggggaaaaaacccccccaaaccttctttttgttttgggatgaaacgcctttttttaataatttaaaaagcgggtggaacagcttagaaccgtgggggttttcttaattttaaaaaacattgtaaaaccctgacccgaggggatggacccctcgccctttgcgggtttgaaaaaaccaaaggggttttaaaaaacggggaggaaacccccttttttttttaagaaaaaggtttaaataataaagcaaggggttaacccttcggcttttttaaaagaaagttattaggtttttcgtaaaagaaaccttttttttaaaaaaaagagggcgctcttaaaaaaaagaagggggaaatagcccccccctaaagagagaaaaggggctgccccattctcccagaactaaaaccttgggcgcagcccaaaaaggggggaaaaataatttttcccccctgaaatg

SEQ ID NO: 585901 - DNA, 421 bp, Homo sapiens
tggaaggatcaccagcacatatgcggccagtcagcagctgtccccgtccaggcaaaaaaagtccacgtggctgaaagcgtgatggaaaaggtgaccgtgtgaggctccatcggcccccctgggaagtggggcccctcgccctcctgtaagggttttgcaggtcgaaggccccccttaggactttggggggacgtttaaaaaaggggtgtgggaaggtaaaaaaacttgttggccaagtctttaaccccctttaaaggaatggggccctgggaagggccctccccctgcccgggccccctgcccgctcggggacaaattttttatccctgggatcatgagggtccggttttgcccccagggcctgtgttgcgacgcccaaacatacgtgttgtgtttgtcaataaagtgtaaataaggtcca

SEQ ID NO: 585902 - DNA, 570 bp, Homo sapiens
cggaatgccaatccaaggttcccaaagtccgcccgcacatccagggagagtgcgcaagagggtatggaagaactcgggctagggtgccgggagggatgtatggaatggtgtggactaggacttttgttctagagcgtttggctttatttgccttgttgttatcgttttgttcgaaaacgggtctacgctgccttcgaatccgggaaacgtccttctgattaaggtatgggagtatgctacctaccgtactttatgtggggcctcttgtataggtttagggtctatttggaggtattgatttgttcttgatctttcgagggggtgtctttgtcttgctcctcgcccgttttggattttatttttagtggacgatctggatgggtctccgtgaggtataaggtctaatccctgtccgggggactcttatctttaggggtggtttccccgtcggcggctagttccattttctcttttgagaggatcgaactaatataccttagtacttgtagcttagttgttgtactataccttctaggggcgcgtgcgctgagcctggggattgattaatgg

SEQ ID NO: 585903 - DNA, 266 bp, Homo sapiens
  misc_feature (76)..(76): n is a, c, g, or t
  misc_feature (170)..(170): n is a, c, g, or t
  misc_feature (183)..(183): n is a, c, g, or t
ccccccttgggggttcccagtaggaccctggtttgtcccttccccttcaccgctccccaaagttttgcaccccctnttcctccccaaacacacccaaaccattttattttttgggccattcccccaaaccccttattgctgccaaaaccacatgggttgggggccagggntggatggacaaanccccttcccccacccaaatccctcccgtgtggggttggaaaacttttgttttttggggttttttttttttgaataaaaaagat

SEQ ID NO: 585904 - DNA, 268 bp, Homo sapiens
  misc_feature (40)..(40): n is a, c, g, or t
  misc_feature (51)..(51): n is a, c, g, or t
  misc_feature (53)..(53): n is a, c, g, or t
  misc_feature (60)..(61): n is a, c, g, or t
  misc_feature (77)..(77): n is a, c, g, or t
  misc_feature (80)..(80): n is a, c, g, or t
  misc_feature (85)..(85): n is a, c, g, or t
  misc_feature (121)..(121): n is a, c, g, or t
  misc_feature (156)..(156): n is a, c, g, or t
  misc_feature (161)..(161): n is a, c, g, or t
  misc_feature (205)..(205): n is a, c, g, or t
tggcccggcggttggtggcccgggccctgggactccaacncaaaaaaaaanancggcctnntgtccggggtccgctnccnccctnaggcctggagacccaactggcctggatttgggtccngacgtagctggggcccccaaccccataagccttcncagangccagagcagccccgcccccccctcgagtttccccatggggtgnggtgggctttagtttagtcccagaaatggagaaaaaataaaaactcccgttgttttaatgtga

SEQ ID NO: 585905 - DNA, 311 bp, Homo sapiens
ggggaaaaagtagatagttacgtaaaccaaaaataaaattctaagtcccccaaccatcagaatggaccccttctcctgaccaagggcattccaaagctaacctgaaaaactacttcaggccatgatgcgaagtgaggtttggatatgcctcattataccctcctctcttctggaattcagaaaaagctaaccaccattaacaacaacacagacgttaagtttcacaagaaacagttacaatctattctctctgaagcctgctatctgcaggcctcatctgcatcaagggtgtccactctttttgcttccgt

SEQ ID NO: 585906 - DNA, 279 bp, Homo sapiens
gggaaatttttttaaaattgatggaccttggggggcgggtttttccctccaaccggaggggatttattcctggataaaagccccctttatggtttcaccatctttgggaacctttggggtttttgggggttttatggttaatccccctccggcggggggtttttgccttttaaaaacctcccccccttttgggaatttaaaaaaaaggtttttttccggtcccgggggtggggaaaaaatggtgccggttttttaaaaaatggaaaaaaaaacttttta

SEQ ID NO: 585907 - DNA, 308 bp, Homo sapiens
gcttatttgttccacaaaagtacagttccattttttatataaatagattctacctaacttataacccctatgtcaaaatttgtttatcttaaaatagtttgtataaaaagtctttactgctttattatgaaataataatgtttattgtagaaaaatctaggaaaacacaaaaatgtcaaactcagttaacagtcatagtttcactatttgaagttaaccactgttaagattcttttttttttttttttttttttgatttgagattgtgccactgcactccagcttaggcaataaaacaagactgtctc

SEQ ID NO: 585908 - DNA, 213 bp, Homo sapiens
  misc_feature (139)..(139): n is a, c, g, or t
  misc_feature (143)..(143): n is a, c, g, or t
  misc_feature (150)..(150): n is a, c, g, or t
ccgtcacacaagaccctgttgagcttgactctagtctggcagaagcaggaagcggcagaagcaggaagcggcagaagcaggaagcagcagaagcaggaagcggcagaagcaggaagcggcagaagcaggaagcaggagnaggngcagaanagaaggggaaggatcaaaagcccaccatgccccaggcagaagcagaagcgggccgagctcata

SEQ ID NO: 585909 - DNA, 232 bp, Homo sapiens
  misc_feature (158)..(158): n is a, c, g, or t
  misc_feature (162)..(162): n is a, c, g, or t
  misc_feature (169)..(169): n is a, c, g, or t
actctagtgatccccctcaccaagaccttgagaatgcaggaagccacaccaagaccttggcctcatctagaaggcagaagcaggaagcggcagaagcaggaagcagcagaagcaggaagcggcagaagcaggaagcggcagaagcaggaagcaggagnaggngcagaanagaaggggaaggatcaaaagcccaccatgccccaggcagaagcagaagcgggccgagctcata

SEQ ID NO: 585910 - DNA, 396 bp, Homo sapiens
  misc_feature (204)..(204): n is a, c, g, or t
  misc_feature (322)..(322): n is a, c, g, or t
  misc_feature (326)..(326): n is a, c, g, or t
  misc_feature (333)..(333): n is a, c, g, or t
ttattggcagaagcaggaagcaggcagaagccttcctgcttctgcccacccgagattgagcaataacaggaagcggcagaagcaggaagcggcagaagcaggaagcaggcagaagcaggaagcaggcagaagcaggaagcagcagaagcaggaagcggcagaagcaggaagcggcagaagcaggaagcggcagaagcaggaagnagcagaagcaggaagcggcagaagcaggaagcggcagaagcaggaagcggcagaagcaggaagcagcagaagcaggaagcggcagaagcaggaagcggcagaagcaggaagcaggagnaggngcagaanagaaggggaaggatcaaaagcccaccatgccccaggcagaagcagaagcgggccgagctcata

SEQ ID NO: 585911 - DNA, 378 bp, Homo sapiens
  misc_feature (186)..(186): n is a, c, g, or t
  misc_feature (304)..(304): n is a, c, g, or t
  misc_feature (308)..(308): n is a, c, g, or t
  misc_feature (315)..(315): n is a, c, g, or t
cctcaccagaccctgccacgtttgacgcttacaaaaaaaatgatagaaaaatacagaagagaagcaggaagcggcagaagcaggaagcaggcagaagcaggaagcaggcagaagcaggaagcagcagaagcaggaagcggcagaagcaggaagcggcagaagcaggaagcggcagaagcaggaagnagcagaagcaggaagcggcagaagcaggaagcggcagaagcaggaagcggcagaagcaggaagcagcagaagcaggaagcggcagaagcaggaagcggcagaagcaggaagcaggagnaggngcagaanagaaggggaaggatcaaaagcccaccatgccccaggcagaagcagaagcgggccgagctcata

SEQ ID NO: 585912 - DNA, 403 bp, Homo sapiens
  misc_feature (211)..(211): n is a, c, g, or t
  misc_feature (329)..(329): n is a, c, g, or t
  misc_feature (333)..(333): n is a, c, g, or t
  misc_feature (340)..(340): n is a, c, g, or t
ccctacaagacctgcacagaggagggtaagaggaggggcaggaggaggaggaaggaggagaaaggcgagggggatgaggagggcagaagcaggaagcggcagaagcaggaagcaggcagaagcaggaagcaggcagaagcaggaagcagcagaagcaggaagcggcagaagcaggaagcggcagaagcaggaagcggcagaagcaggaagnagcagaagcaggaagcggcagaagcaggaagcggcagaagcaggaagcggcagaagcaggaagcagcagaagcaggaagcggcagaagcaggaagcggcagaagcaggaagcaggagnaggngcagaanagaaggggaaggatcaaaagcccaccatgccccaggcagaagcagaagcgggccgagctcata

SEQ ID NO: 585913 - DNA, 128 bp, Homo sapiens
  misc_feature (84)..(84): n is a, c, g, or t
tgtttgcccctgtggcattgtgtcttgttccatatggataaaaggaacaacaacaacaatgccatcactggaatttacccaccntttgtgagcgtgtcgtatgacctagtacacttatgtaccaattc

SEQ ID NO: 585914 - DNA, 201 bp, Homo sapiens
  misc_feature (47)..(47): n is a, c, g, or t
  misc_feature (51)..(51): n is a, c, g, or t
  misc_feature (64)..(64): n is a, c, g, or t
  misc_feature (143)..(143): n is a, c, g, or t
  misc_feature (172)..(172): n is a, c, g, or t
  misc_feature (180)..(180): n is a, c, g, or t
ggaccaacgttcaaggccgcctggggtaaggtcggcgcgcacgtggncagntatgggtgcggangccctgggagaggatgttcctgtccttccccaccaccaagacctacttcccgcacttcgacctgaggccacggctctgnccagggttaagggccacggcaagaaggtngcccacgngctgaccaacgccgtggccaa

SEQ ID NO: 585915 - DNA, 350 bp, Homo sapiens
  misc_feature (204)..(204): n is a, c, g, or t
ttattggcagaagcaggaagcaggcagaagccttcctgcttctgcccacccgagattgagcaataacaggaagcggcagaagcaggaagcggcagaagcaggaagcaggcagaagcaggaagcaggcagaagcaggaagcagcagaagcaggaagcggcagaagcaggaagcggcagaagcaggaagcggcagaagcaggaagnagcagaagcaggaagcggcagaagcaggaagcaacatttcttctggaagagcttgtattctactggaagggaaaaaaggaggtagtaaggacagaggcagaagcaggagcaccattgcagaagcagaagcgcaaacagaaggacgc

SEQ ID NO: 585916 - DNA, 282 bp, Homo sapiens
  misc_feature (21)..(21): n is a, c, g, or t
aaaggatacccctaaaaattnctctgtggcaagaaatgtttagataggaaaactgagctatggaaaattatacagggccagataagttgaactcctaatagcaacaggtctggcatccttccagccatgtctacacagacacccagagtagcctccaccctggagggatgaagggccaagctactgtcaggcatcttcttgccagtgaccattaaatacacatacacagacacccccccacacacacatacacacacacacacatacactccaaacagaagt

SEQ ID NO: 585917 - DNA, 448 bp, Homo sapiens
ttgggcgtttccggagagggggatgtggcaggacaataggataatagtggagagaagatcagcaggtaaacacgtgaacaaatgtctctgcatcataaacaaggtaaagaaaaaagtgctgtgcttttgatgtgcatatacataaacatctcaatgccttaaagagcagtattgctgccagcatgtcccacctccagtcctaaggcggttttctcctatctcagtagatggaatatacaatcgggctttacaccgagacattccattgcccagggatgagcaggagacagatgccctcctcttatctcaactgcaaagaggccttccttcctcttttactaatcctcctcagcacagaccctttacgggtgtcgggctgggggacagtcaggtctttcccttcccatgaggctgtatttcagactatgacatggggagaaaccttgga

SEQ ID NO: 585918 - DNA, 456 bp, Homo sapiens
ccaggactgcccggaagggagctctccatggcaagtcaggacaggtttcagtatgctaatataacatagaaacacattagtgcactgagcctctctgaggtcagcatattagtactcttggaatatatgtaattaactacagtaacaacagcaacaccccagtagggagtatcaccaataactgactaccactcactcatggatcattatctttccaattaaagcacaagcactgtgctgtgctcagctactactcagtttgtcagtaaaagtttatagttttcagtgttcaggttatagaatataacagaccataaaaattacctgcaggtatttactttttatgaccttgtttataaattcacaagtaattactggtgtcattaagtaatatagacagacacacgtatctcccaaacaaacaaaccgtgcccttctccatgggtcacaggactt

SEQ ID NO: 585919 - DNA, 406 bp, Homo sapiens
acccacttgagcttactaccgcacaaccttcaccacaccatttacccaaataaggattaagctatggaaatagaaacctggcgcaatataaatagcaccgcaagggatacacgaagaatcataaccaagcataatatagcaaggactaacccctatgccttctgcataatgaattcgctataactaacttcgtaaggagagccgctaagacccttgataccagactagctaccttcgaacagcgttgagagcacacccgtctatgatgctgaatagagggaagatttatacgtagaggcgacgaacactaccgagcctgatgagaactggatggccaagatagaatcttagttcaacgatctatatgaccacagaaccctctcgatgccattgtatgtccctgttg

SEQ ID NO: 585920 - DNA, 957 bp, Homo sapiens
gaactcggtggtggccactgcgcagacccagacttcgctcgtactcgtgcgcctcgcttggcttttcctccgcaaaccagtgtctgaccaaacccgactatggctgacgactcgacgaaacttcgactaacgtcgaacacctgaacgaacgaccacgagaccgcaacgagacaacaactcccacgtgccttccaaacgacaacgacttgcaacaggagcaagcaaagcagcgcgaactcgtcaatgacggcgttgcgccgtccaaatatgcactggtaccatttccacaacgcatggccattcttatctccaccttctttctagcaggtttcacacttggtaagcatgcacacagaggtcggcatcacagtttaacatgacgtgtgctgcccactttcacattcaccagacactactgacaacgcaaggccggcgcctgccttttccccatctgtctatctatctggctggcagggacaggacagaccttgcatgtcggtgacggacgacagtgccggtggccagacctggggtggccaccgacacgtgcacatctacgagttaaaaccatgctggcccaaggcggtcctgtcagggcttgtaactggcacttctaatcagagtggccattccccacttcaggtccaattgcattctacttcatgggcagtggcacacactttttcaaactactgcacatctcacgaggttttcaacactatcgaccccgaacatgccacacagaccgacagttatggagagatctggccctggccacccaccactcccggcacacccccggcgcgagaccaggccacacaagcgctaccacacaagggggccaccccgtccaaagacaccccggacacacagagacgcagatcccacacaaaacaccgccggggacaccagcgcctcgaaaaacaacacgagcccacgcgacacgtggcgcaaacg

SEQ ID NO: 585921 - DNA, 847 bp, Homo sapiens
ctgaaaaattttagagctaggtatagtgatgcatgtccaatgtcctattgaccagtagctctggtgcactaggacttggacatgctcggagttactatactctaggtaaagatcgatagctgtttatcttcacctcgtccgcatgatagtgtgaagctcaatcatggtagacaggattacttttaccccatatttgcgagatctctaggttatccctcgtgtgctgatttcattgaatgtaatgcttttcccaacgttattcctagtatgtagggatatactttatctagatgctgctcgtggcgtgctgaatgatagggcaaggtctgtccagggtaccgtcgagcacagatgcgtcggtcgactattagagaagcaatatgggtcgcaactcggtgtcatgcgtttgcaggtccaagttgtatgattgacagtgttttgggaaaatgtgagcatcttatggatgctgatgaacgaatagtaagggctatgacaagtgaatctgagatgatatcgttacatgtaactttagagggttcagttacttagttgctggtgtccgcggggatggaatggtatgaggctgggggtatagttgagccgtgagattttacgtatgctgatatcacataacttgtgaggagtggaggtgcaaatgccagacatggtgttgttgaaggtgcgtggtatagaaattttggagtcttgggtgcaatgtgttgaggtgcctagagattgtatcaagaagttttttgtggttcttaaatgttagggagcagtgcacagtgggggaccaaaagggcgggcaaatggtggtgggttcagtagacagtttgtgatgggtgga

SEQ ID NO: 585922 - DNA, 412 bp, Homo sapiens
  misc_feature (94)..(94): n is a, c, g, or t
  misc_feature (113)..(113): n is a, c, g, or t
  misc_feature (122)..(122): n is a, c, g, or t
  misc_feature (210)..(210): n is a, c, g, or t
  misc_feature (232)..(232): n is a, c, g, or t
  misc_feature (336)..(336): n is a, c, g, or t
tgttgtacaactgcataatgtatttttattacaacagtcaaaagtttatgaggtaaaaattacagtaaaggttaatttattattggagagaganaatttaagaaataaatttngcgtagatnaaatctacagtgtttttaaagtctacagtactgtacagtaatgtcctaggccctcctattacccagacatgttctagtcctgtaagcngcgttgatggtaagtgccctangcaggtatacccttttttatcttttatgctgtgttgttactgtaccttctctatgtttaggtattccaatgcttacccttatgttaaaactctctatagtattnccctatgggtaacatactgtacaggtttttcgtgtaggagcataggctataccctatagcctagtgtgtagtatgc

SEQ ID NO: 585923 - DNA, 1008 bp, Homo sapiens
  misc_feature (206)..(206): n is a, c, g, or t
cccatctcgaattagccaatgtcaaaagagtgacctgaatgagaatttagttgacttcatagactaaatcctaaagaccttttaggcttggacctatgaaaaatataagaagtttagttagcttgtgagaactttcacttttatgacaaagagaaatagttgaaggaagagggaaagtgagagcaggtttgggaaggcactaaggntggaggcaggaaaaaggctcatgggcttcttcctcccctcatgtctccctccacctgaatcccgtttgttccagactggagacaatggcaactgtcttctgagaagtttcacattatttctcagagcaggggtacagtcccacagaagctaccccagtttttatatggaattggcagtcaccagcactataaagattttctttactaatgtacttccctagacccaaaacagcacaggcctctttgaaactgcaatgcagagacttactgcccggctaccaggggtggggtgtatgaggaggacagagttgcctgggctttctccagatcaccggaacagtgtctgctcatgaccttaggcccttcacaagctccccaactcccagcactggtgtacccactggaggagaccagcagggaaagccacgacagagtgtgaacacctggtcagtggggcggtcctctgactttcctgcagaagtccctgttctgagacagttctgaaagttctggaagatgtggaagcagggatttaagctgtgctttatctggtgcaattataagggatccatttaggattcttgaaaggatccagaaaaactggagaaagaacaaaggtaggtagtctaagttgaaatgagaaacaacgttatttagggaggtttaggacctcctgggtagaagagatttcacagtgtttatacaagtgttcattatagtcaaactagtaggttataatattggcacaagtggtacacaatgtgttacaactgtgaattttgaagtggcaagacgaaataac

SEQ ID NO: 585924 - DNA, 699 bp, Homo sapiens
ctggtagcgtcagcctcctggcttttccttttcctggacgcttcatgggctccgcggctgcgctagactggagggtccgcgtcactctcgccctcctgctttccgcgctctcacccgctcccgcctcctgagggcacgacttgtggaggagcgcgggcggcggggcgtgagcgagctgcctctgccgccatcttagagaaggcgagcgtggggtgtgctgtgggcgcgagtcggcctcccgcggtgccgccgcagcgtggcgcggagagctttaaaaaaaaaagtctggggccgggcgtggtggctcacgcctttaatctcaacactttgggaggccgagcgggtggatcacctgacatcgggagttcgagaccagcctgaccaacatggagttaccccatctctactaaaaatacaaaattagctgggtgtggtggcacatacctgtaatcccagctacttgggaagctgaggcacggacgaatcgcttgaaccctgtggaggcagaggttgcggtgtggccgagaatctgcaccaattgcaactccacccttggggcaacaagacgctaaaactcgggtctcaaaaaaaaataacacattggctctggacaacatctccaacttgctctttcaaataggaggcggcggagccaccacttgggtggcccgcacaaatgacttaacccctgttaatcca

SEQ ID NO: 585925 - DNA, 307 bp, Homo sapiens
  misc_feature (69)..(69): n is a, c, g, or t
  misc_feature (145)..(145): n is a, c, g, or t
  misc_feature (196)..(196): n is a, c, g, or t
  misc_feature (231)..(231): n is a, c, g, or t
  misc_feature (303)..(303): n is a, c, g, or t
gtaccatggggctagagtgtatggcaagatcttggccaagtatcagtaaagttaataaattaacaaggnatgttgaggaatctggagattagtaacagtggaaagccattatcatccctgctatgtggaaaaatgggagggacanaaatttttgtaagggactcaagtgagagctgctggaagaaaaggatgcccngatcagatctgtgattgtagtggggcagcaactgnatccaaagccaagtagagagaagaagggaacaacattcacatctctgttccctttagccctccaattgtctngcca

SEQ ID NO: 585926 - DNA, 142 bp, Homo sapiens
  misc_feature (38)..(38): n is a, c, g, or t
gggtcgctctagaggccccccgctcacaacaggcacgngcaaaaggtattcactagatttctacgtagtgatcggcttttacttggtcattggtagtctcaaaagacttttttttaaaaaaataaagtccatacttacactt

SEQ ID NO: 585927 - DNA, 713 bp, Homo sapiens
  misc_feature (645)..(645): n is a, c, g, or t
gagaacagagtagaggcggcggcggcggggggcggacccagactggtagtgaggctctggaccccgagcccgctgcaatgccgcgtggaggctggagtctgtgtcccggagcgcatgggctgggctgggttaacaacccaggtgacttctatcgattgccagagtatcgggcgcaatgaaccactcgatggtgctgacgcatggactgtcagccataggcgacgatgataccgcatggcgcaaggagtgttggggctgtattgtgccaataggttcctagagaagagtgaggcataggaattcaatgttttgacattcggtgataacgctctcgtgatgtaggcctataactagctcggatatgcatgttccttggcgtggacatgacgatactggtggagacaactgagcgagatcgtggagttcagccatgcatcagtatcgagggaacgcttgctagggatggtatcgcctgaggtaaggttggtgactctactattcactgccgtctgggtctatggatgacgtatggtagatagtaattgctctgcatgagacatgaatgcttcctattctttacaaatgttgtgtagtctggtatgaccatttaattaattgttcctgtaatctggaaataggacaggnctaaatagaatgtcggcgcaatgggatgattctccagtgtggaatgcagttcgatgtgacaccagtga

SEQ ID NO: 585928 - DNA, 220 bp, Homo sapiens
tcagcggacccactgacgccagcctactcatcattttaatatgcattcctaatgacatatactgtacagcatcttttcatatccttacctgccatctgtgtatcttcttcggtgaggtgtctgtacaggtagtttagccttttttttttttttttttttttttttttttatttttttttttttttttttttttttttaccccccgaggggggggaggggg

SEQ ID NO: 585929 - DNA, 683 bp, Homo sapiens
  misc_feature (58)..(58): n is a, c, g, or t
  misc_feature (98)..(98): n is a, c, g, or t
  misc_feature (116)..(116): n is a, c, g, or t
  misc_feature (118)..(118): n is a, c, g, or t
  misc_feature (207)..(207): n is a, c, g, or t
  misc_feature (218)..(218): n is a, c, g, or t
  misc_feature (232)..(232): n is a, c, g, or t
  misc_feature (234)..(234): n is a, c, g, or t
  misc_feature (250)..(250): n is a, c, g, or t
  misc_feature (272)..(272): n is a, c, g, or t
  misc_feature (297)..(297): n is a, c, g, or t
  misc_feature (299)..(299): n is a, c, g, or t
  misc_feature (302)..(304): n is a, c, g, or t
  misc_feature (362)..(363): n is a, c, g, or t
  misc_feature (375)..(376): n is a, c, g, or t
  misc_feature (390)..(390): n is a, c, g, or t
  misc_feature (395)..(395): n is a, c, g, or t
  misc_feature (401)..(401): n is a, c, g, or t
  misc_feature (403)..(404): n is a, c, g, or t
  misc_feature (407)..(408): n is a, c, g, or t
  misc_feature (414)..(414): n is a, c, g, or t
  misc_feature (421)..(421): n is a, c, g, or t
  misc_feature (432)..(432): n is a, c, g, or t
  misc_feature (440)..(440): n is a, c, g, or t
  misc_feature (443)..(443): n is a, c, g, or t
  misc_feature (452)..(453): n is a, c, g, or t
  misc_feature (457)..(458): n is a, c, g, or t
  misc_feature (465)..(465): n is a, c, g, or t
  misc_feature (470)..(470): n is a, c, g, or t
  misc_feature (487)..(487): n is a, c, g, or t
  misc_feature (489)..(489): n is a, c, g, or t
  misc_feature (498)..(498): n is a, c, g, or t
  misc_feature (529)..(529): n is a, c, g, or t
  misc_feature (535)..(536): n is a, c, g, or t
  misc_feature (545)..(546): n is a, c, g, or t
  misc_feature (564)..(564): n is a, c, g, or t
  misc_feature (570)..(571): n is a, c, g, or t
  misc_feature (579)..(580): n is a, c, g, or t
  misc_feature (600)..(600): n is a, c, g, or t
  misc_feature (619)..(619): n is a, c, g, or t
  misc_feature (662)..(662): n is a, c, g, or t
ttttcataggcattatctatttgaaggcactttttacttattagactataagaaaaantgtacagaaagtttatactataaaattacatccctaagtnattagggtcctcagtaananagaaataagaaattgaaaagggtcattgctcggcaatccacataactacagagtagagcgcaagctattgttcgtgatcagaaagaganttcataaaaanatcttcacatattncntagcattatgccctantagtaaaaggaaggcctatganaatgccattgtttattttgtgttangnagnnnttctatttccctcaaaagtttttttttcctgctataagataaagaaaaggctgtatcnntaagatatatanntaatgaagattatntcaanagaagntnnaannttttcnatttttnaatgtttttcntgaagttnaantggatgttnnaaannaattttntaaanatttaattgttgattanantaataaaantagaattatttagaaaaaaaaaataaaaaanaaaaannataaaaaannaataaaaaataaaatttnaaatanntatatttnnatataaatataaatttaaanttaattattttttataatnaataaaatataaatttttaaaaatggaagttttaaaaaaaaanatgtgttaagaaaattataat

SEQ ID NO: 585930 - DNA, 361 bp, Homo sapiens
atctcttacccttgccccctccacccggtcttggtggtggtatattaaaaaaaggaagaattgaaagcacaaaaaaaagaattttggggtcaattggataaaggggggatattttgcaacccaattgtttaagtaccaattgggcgtgtatcacactccctgcccggtctctgggcactgaaatataggggaaaaaaacccctccctactgatataaatgacacagagtattagagtatctggttctctgtctcttttatcccctccctcttcagagccaatatatgtgtcacactcgacgcacagagcaacaaatgggttccccatggtataatcggcattgtggtgaattatctacaca

SEQ ID NO: 585931 - DNA, 468 bp, Homo sapiens
  misc_feature (391)..(391): n is a, c, g, or t
  misc_feature (452)..(452): n is a, c, g, or t
  misc_feature (466)..(466): n is a, c, g, or t
ccactgggagcattcctttggtagctgctgctgatttttgtccaccactattttcctcttctgtagttgatggaaaagccttctttttacaccagtctttggggctatttattaggctgcaggaccggcatatgccctggttgtattttagtctgccctcttgaggaaaacttaggtccaactttcctgggatcttcacgtaagacactggaatggtaccacctgtacccagttttacattcaaaatagcttttccccagatcctgaactaagattatgccatcctggttgtcaaggaaggatgtctctgccctgttcaagaggacttcaagtcaagaagcaaggcaattaaactggtgggttcccccccgataattgtgtaagagtcttnaatccagggtaatcaaaggggtctgaactgtaaaacttatcctatcaaatcaaatcaatcntaaacttgggcctnag

SEQ ID NO: 585932 - DNA, 633 bp, Homo sapiens
  misc_feature (26)..(26): n is a, c, g, or t
  misc_feature (45)..(45): n is a, c, g, or t
  misc_feature (62)..(63): n is a, c, g, or t
  misc_feature (71)..(71): n is a, c, g, or t
  misc_feature (87)..(87): n is a, c, g, or t
gatcccacgtccgtgggggccctagngtcgccaggttcacagagncagaaagcggaatggannaggcaggnctggggggcgtggggngtcagtgcttcctggggacggagcttcggcctgggaggatgagatgttctggagaggacggtgcggtggctgcacagcattggaaatgtgcttaacatcactgaactgtgcttaaaaacagtgaagacacagttaagctggaaaatcttaggttctgcattttattacaagttttaaaaagcttgggattgctccacttctgaagaaaggagaaaagcgcgtccaccgctgcctctggttcccacgtatgggcagcgaggctggcaccgggggaccatcccagcatgcacaccctgctggctggcctgctgcccgtagcctttgctggaacacggctgctccaacatctgagcttacgggaaatcctgggcaacaatgcatgaggctggagactctgcagagggtttttaaagttgcaaaggaacaaatggcctcattaatggggccgacacatgttgttaatttaccttctggaaaataagaagcacagatgttggtgactcacgcgcgtaatcccagcacccgggaggctgaggtgggaggatc

SEQ ID NO: 585933 - DNA, 352 bp, Homo sapiens
ggaaggggaaaagggccccaaaagcaaacccccttttcccggggggtgggggatttattaaagcaagtgggcccccaggttttccccctggaaaaggggcagtgggggcaacccaattaatttgggttaggtccctccttaggcccccccgggttttccctttttggtttcgggttgtatgttgtggggaattttgaaggggtaacaattttccccaggaaacaattttggccctgatttcgccaaggttggaatttaccccccctaaaggggaaaaaaaatgggggttccccccgggggggggcgctttaaaaaaaatgggtcccccggggggcaggaatttgggccggga

SEQ ID NO: 585934 - DNA, 220 bp, Homo sapiens
agtactaggcctctctctgtctccctatgcggaacactcatagtggacgttacctgaatatcatcagccaatttgttctgagtcctataagtctcctcattaagcgtacagacgaaaatcttactgctctaaagaaatgtgcttacatatccgagttcactccttgcacgtttccttttccttaaagccaatcattttgctttcaagaagcaggaactgg

SEQ ID NO: 585935 - DNA, 865 bp, Homo sapiens
agcgctctataccctgtttcgttttgtcgcgggtgtaccgtcactgggtggtttttatttcacctgtggcagcgtcttgttgcgccctaattgtttacaggctcttaccggttaaatttttccccgcgttaataaacaaaattcggggtgagtactccggtaatctgcaaatgagggctaaaacgcgagtttccttcacatacagagttgtggtgagcaaaagcgtggctttgatatcgcctcgcccacctgtatgtgactatggcccaaaatcatgggtagcaggtagcaaagaacccaatggtctgtcccaaaagaactctcccctgtatgattcaaaaaagggggagcccaatcagggcacgaccacattcgttgtgggcccgcggccgaaacattttcttcttgccaactcccgtccctgggctattctagattttaaaacagagcataatgacccttgttgttgaacagccctaataatccttggactttcgtgttacccgggtataccccttctatcaaggtacaatttatgagaatccaggggagtgcagcaatctgaataaattctgcccccctcgtggggcaagtcacccctctattagaattcacccccaatggcgggataaactccaggatcccgactatggttggatctctctgacagaggaccacgacgattcactttggagtgacgcccgcccgtgaatcttctagaaaccagggggatctcccggcccgcttttgaaacacgttaacttgggcgattttttgcaaaatcgtgccctttttgggaagacaaatatatgggcacaaacgaactcctttcttggaaacaaaaaaaacaccccttcaaaaaaca

SEQ ID NO: 585936 - DNA, 465 bp, Homo sapiens
  misc_feature (341)..(341): n is a, c, g, or t
  misc_feature (399)..(399): n is a, c, g, or t
  misc_feature (419)..(419): n is a, c, g, or t
  misc_feature (427)..(427): n is a, c, g, or t
  misc_feature (447)..(447): n is a, c, g, or t
agcaggggcttgggcaggagcaaggtccgagggctgccaggtccacgctgcttttatgagctgtaacactcaccgcgaagatctgcagcttcactcctgagcccagcgagaccacgagcccaccgggaggaaacaaacaactccagacacgctgccttaagagctgtaacacttgccgtgaaggtctgcagcttcactcctgagccagcgagaccacgaacccaccagaaggaagaaactccgaacacatctcaacattcagaacggacagattccagacggcaccacctttaaggagctgttaacattcaccgcgagttttccgcggctttcattttttngaagttcagttaaggacccaaggaacccaccattttccgggacacagttaggcttttnggggattatttaaggatttnttaggttngggcttggttggttacacgncttttagggacccttagg

SEQ ID NO: 585937 - DNA, 256 bp, Homo sapiens
taccttgagcccacctctcctccccatcctcaaccactggacgtaaatatatatataggcagggatagaaatgggcacctagtcagatcttctaagcttgctagccagaaatgactgtgattctagcatgggggctgctgagaaggtaatgtaggtcgcaaaggggctctaagttaatttataacgtaagcattgacactatccacacactccctgtagtccaggtagggcccagaactaggacaatggctaggat

SEQ ID NO: 585938 - DNA, 896 bp, Homo sapiens
gtttggaccatccccaaatggggtcggctgctgtcttcggcgggctgggtgtgatgtatatcgcgcggtcttctgggctcgcgtttgcccggccctctcggaccagaggccctctagcgctgcggtgccggcccattggcccgctacgggcgtttgctgcttcggagggtgaaagacccccccttttatccggctgtagccccagaccatgtcaggcgtgctgtggctccaccgccgctagagccgggttctcgcttcgccatgattgaggagcgcttgcttctctaggccgccagccatggcccggccagttgccttggggctaccagatgggggaactcctgcggagtgctcacaaaatacagggacgaagttcagggcaccacccagggtcctgtgtgcagacgccctcacacgcgcacagcagcattcaacagagctgggcaagggaaggggagagagatcaaggattgaaatgaagggacttcaagaagaaggtacagagctagagcccgacccacacacgatacgtgggtaactaagccagcgagctgtacacacacactccgtaaataataaagtgacaggtcgcgactggccgcgcaagagaaccgcaagagcgggtcccggccagcagagggggggcccacacggcgcgcccggccagaacaacgccaggcgtcaactcgtgacaccgactttcggggagaacaacaatgacgggtcccggcgccccacgagccctccctccggggttaaactcgcttgtaaaaaaaatgccccgccggaccccccgtcgtgacaggggcgaatcccttctccccgcgaccattaatttgaccacagattttaattggaaaaaataaaaacccccagttacccggccccacatgaca

SEQ ID NO: 585939 - DNA, 363 bp, Homo sapiens
tgcgacaccgtgctgagaatgtgttatggccaggtgatggatggctcacacctaatcccaggattttggtaggcccaggagaccagattgcttgagctcaggagttcaagaccagcctggtcaacttggtggaaaccctgtctctactaaaaatacaaaaattagccaagcttggtggcacatacctgtagtcccagctgctcgggaggctgaggcaggagaatcgcttgaacctgggagatggaggttgtagggggctgagattgtgccactgcattccagcctgggcagcagagcaagactccatctcaaaaaaaaaaaagacccaactttctaaaattatggcgtggggaacggcgctta

SEQ ID NO: 585940 - DNA, 399 bp, Homo sapiens
tggtagaggtcacttagagagaagctgctgggccatgcacacacaatcttggcccttagtgctcatcccattcctcatgtgaccctgacattccggggaactgggacacctgttccttaaaggcgacaacagtcctttctttcctctcacaacaaatgagcatgttctccgtgaatgcacttttcatttactgctctcaaaataatatgccttctctaggaatttttaatgcacttttcttgaatgtcatgctcccagcaacacaagcattggtcttgttagggcattcccgggctcgggggcggccgctcctacatgtggtaccagcggccattaggaagtacctgcccacgtaccgttcctactatgactcagtggacccacgcatcacctacgggt

SEQ ID NO: 585941 - DNA, 101 bp, Homo sapiens
tctatgcttgtctcgtggtccgtcatgttacacacagtctgtatctaggtgaccatgcaagagacccagtcattagagaatactctctacatccttcctca

SEQ ID NO: 585942 - DNA, 123 bp, Homo sapiens
cctgtttagatcagaaataggttgagcctgtgtcaagggtcctcattacggtatcacaaggtagcagctccatacttaccaagtatatcttctgtttacggggactgctacacaggttcaagt

SEQ ID NO: 585943 - DNA, 756 bp, Homo sapiens
  misc_feature (363)..(363): n is a, c, g, or t
  misc_feature (383)..(383): n is a, c, g, or t
agcggagcggtgggcagggctgaaaagacagaaggtgtgagtgaatgaccttcttcaggtggagaagcgtctggagctggtgaaactaggtgtcccacaggcacgcacaagaagctcaccgcatgtctgcggggccagcaaggggcagaggcgtgactagacgctccataaagttgcctttgacagacatcgtggctcagtgtctgatggaggggtcagctatcctgggcagatgacacacttcttgggaagatggctgaaagctctgtggagagacggcaggacaattcgtggcgtcaagagcatgagtacatgtctcttgagcttgcaaggtatgacgagagacgtgagtggagccccgtntctatatgcttggcggaggntggaaatcccaatgatatgtcaggaagcggaggagacacttagcgcaagttggtgctggacagtggattgcctcacgaaccagggtggcagcagacttccaaggtcttcaggtgtgtcgcagcagcttacaggcctgcgggtgccaaaggctgatgccctcagggaggaaactggaggatggcgtgccaacagagtggagatcttgcagggaccaagctctcagctgatatgtgcagatgatgtggccaaaggaaattgactatgcaagactactttgcaaagcgctaatagaagtgcaaagctgaatagcacaggaagttcctgacactatggcaggctgctattgcctcagatcaaagcacaacaggaggc

SEQ ID NO: 585944 - DNA, 546 bp, Homo sapiens
gctacccctttgcttcatctgttctggtcattggctgggagtgcacctccggaggacgtctcatgcagacttgcaccatatacagggagtgttgcattgaaggtccttgctggaccttctgtcagaaggtgatttcaaaagcgagcaatgctgccaatgcagcttgcttctcttgacagattgagaagtccagcttcaaaagttacctgccatttaagcaaggagtttgtcacgagatcatggttcattttattgaaaagactttaaggagtcgtaggatttattcatagattgctgagaacaatggcaatatttttatttttacagagtttgcacttctgatttcaggttaaacgctaacttgtgtttagtctgcttaggggattgtgacttggaaaatttttatattctgatgagctttttcgtagtgtccaccatgtataaaatatttcctaggtgagatctattttctccatttattgatgcattgcagaccactttgagtgatgtgtttcaggaaaattcttcctagtttaacaagtaagc

SEQ ID NO: 585945 - DNA, 250 bp, Homo sapiens
  misc_feature (18)..(18): n is a, c, g, or t
  misc_feature (235)..(235): n is a, c, g, or t
gggcaatacattggcaancggttcttgtcgtcttatcaactagtgctcatggacacgtaaaaaataataatgcaattgcggcacatagcaaaagagctctgggaagaagggctctggaacatagaggaggagcccctgctctcctgcctggggagctgagacagattccacaaagaccggtgcacctgaaaagcgagtgtctccagaagtggtggatgggctccctgaaaacagnttcacactgcttctt

SEQ ID NO: 585946 - DNA, 453 bp, Homo sapiens
agtgaattttttgtattttttagtagagatggggtttcaccgtgttagccaggatggtcttgatctcctgaccccgtgatccgcccacctcagcctcccagggtgctgggattacagacgtgagccaccgcgcctggctaccaaaaatttttaaaaagaaatttgccaggcggggtggcatgcacctatagtcccagctactaggcaattgaggcaggaggatcacatgagccaaggaggtggcggtgagccatggccacattactgcaatctagcctgggcaacagagcaagaccttgcctcaataaataaataaataaataagcagtcgcattactgcaatccagcctgggcagcagagcaagaccctgtctaaataaataagtaaataaataaataaataaataaataaataaataaataaaatgaaactattattctctaaaaaaaaaa

SEQ ID NO: 585947 - DNA, 316 bp, Homo sapiens
gagaagcgacagaagggcctaaaagagtgatacagggtttcaccacattggccaggctggtctcgaattctggcctcaagtgatccacctgcctcgggccaacatggcaaaaccccgtctccacttaaaaatagcaaaaaaattagccaggcatagtgtcacatgcccgtagtcccagctactcaggaggctgaggcacaagaatcatttgaatctgggaggtggaggttgcagtgagcggagaccacgctgttgcactccagactgggtgagagataccgcctcataataaaaaaaataaataaagtcgtatcga

SEQ ID NO: 585948 - DNA, 1066 bp, Homo sapiens
aagttcccaaatactttataagagtttatcagacatctctaatatggccatgtccagtttatacagctgttacaaacatcatagacagagtgctagagcattcatgggggcaaatcctcatattcagagtactctcataacatttaggtgtatgtgtgtatgtgcgtgtgcattaccgagagaactcactaacacaaaagcaactgctttttaaatccgtatggtgtcagttaaagtgtcatgcccttgaccaatctaatgaatgagattcaattaactagggcctttcatacttaactcaaataaaacaaactcaagacagcatcatgcaggtgcaacattctaaacagctacttcaaatctacatggcctcgagcggtcaccatggtgtcaaccatctcatatttctcacaccacaataggctctacacatatctagagcgtccaacggcatctcccaatggggactaagtatatcgtataccgaagtacaagcagctgtgcagcataaccacacaattcaattcggttcaattgtaacccactcctatctagagactcagttgacacacctccatctgcacctaaaaaagcaacagttgcaacctctgacaactcttgccttagtactacgaccactgggagtaaccttaaggggtggaacaccaggacaaacaatttacgcgtgggaagcttaccattacactgcagggtcataacaccagatcactacttattccaggaaagtttcataatggggctactaatgggaatggaaacagaacagactgcttattacacacgcttttcatactacaaccaccttgcaccactgaccgtcagcccaactaaccagacttacacccggaagggcatcacgatccagcacgcggggccacgcgcgcgatgcaacaccgccccacccctcacaacgacctggccgtacacaacgacctgggcacagtaaacatacaacttacacacgccgacaccacgcgcaccccccgaaacagggcgtcagacaacgccacgtaacagaccaaccggagccgacactaatgtcgaa

SEQ ID NO: 585949 - DNA, 221 bp, Homo sapiens
atgggacttagagaggatgaagatatagagaggggggtggtttgatagtggcaacgttgttggaacatgatagtgaaaagtcacgagatggagaaatatgctctcagaaaagactgtgaggatggctttcctcttgttgcacatgtaccatgcatttctcagcttggggtactacatttggtggaaagttaatctatctatctttccacatctgaattaat

SEQ ID NO: 585950 - DNA, 312 bp, Homo sapiens
  misc_feature (108)..(108): n is a, c, g, or t
  misc_feature (194)..(194): n is a, c, g, or t
tctttctttctttcctttctctctttctttttctttcctcccttccctttatctctctctctctctctctctttctctctttctttttgagatggagtttcactctcngctgcccaggctggagtacaatggtgcgatctcggcttattattattctccatgttggtcaggctggtcttgaactcccaacctcnggtgatccgcctgcgttggcctcccaaagtgctggtgtgagccactgcacccggcttaggatgcatttttcaatattttagtgtttgaataacgggctatcttgagaaaaaaataatt

SEQ ID NO: 585951 - DNA, 355 bp, Homo sapiens
cctcttgactatagctcctggtccaaggttagcccaccaccttgtcactggtgagaaaaaggaataaggacggactcatctctttccttttaggaaatttgccactagttccctgccttctaacctcagttcagtgacctgaacttagttatctaactcctccttgagaaaaatggtacttgtgggtaaccatgtgtccagctagtagcatggtgatcaaggggagactggatagcaatctacttgtgtttaagattgttactccgtgtgcgtgcgtgcgtgcatgcgtgcgtgtgtaaagtgtatgtgtattacaagcttgtgtatattcaggggagacacagtgagtcgacgc

SEQ ID NO: 585952 - DNA, 292 bp, Homo sapiens
ggagcaggagattgccacctaccgccgcctgctccagggagcacggatgcccacctcactcagtacacgaaagaaccggtgaccacccgtcaggtgcgtacccttgtgcaagacctccaggatggccaggtcatctcctcccgcgaccaggctccaccagcccacccgtgaggacccgctaccccggccggccacccagccggcagggcgcagccgccccatctgccccacagtctccggcccctccagcctcagccccctgcctcagtcccttccccatgcttccttgcct

SEQ ID NO: 585953 - DNA, 647 bp, Homo sapiens
ttccttgaatattaaagttttaaaaagcattgccattttgtcctactggtaaggacattaaaccaataacagggcatttggaaattttaatccttaaaacagtgagtactgaaactgattatatttttcaacaatgtccaccccaagtgggtcttcctacaattctcttaacttagttgcccctcacttgccatctaagcaattggcaagaatgtgccaggccaaggttaaacttggaaacatgcttacacattatattccctggtcctttaaaatcagattagctacaattttgactccttggaccctcaagcatagctggtaaatcaagttagaaatgtaactgccttaaaacatgccagcttaggctgggcacggtggctcacgcctgtaatctcaacacttcagaaggctgaggcaggcagatcacttaaggtcaggagttcgagaccagcctgaccaacatggagaaattctgtccctactgaaaatacaaattggccggatgtggtggtgctgcctgtaatcccagctacttgggaggctaaggcaagagaattgcttaaacccagggaggcggaggttacagtaagccgagatcacaccattgcactccaccttgggcaacaaaagcaaaactctgtctc

SEQ ID NO: 585954 - DNA, 1133 bp, Homo sapiens
ggcttttatttccctggtgtgattccgtcctgcgcggttgttctctggagcagcgttcttttatctccgtccgccttctctcctacctaagtgcgtgccgacacccgatggaacgacttcgactggacatggaccatgagccccctgaggccccagacacctatcttttcggttgtgaactaaacggccgacaaacgacttatcaccttttaacggtggataaatgatgaaacactgacgcaccagattactctattaacggacaccggtcagtttacgggactggtgcaacaggactgacgttgcacaataggttcgaagcagacggcaactgacacttaccgaacgggcagtccaattaaagtaacactggcaacatttgaaaatggtctgtacagacaaaaggatttcccattggaggagggctttgaaaataacaacacaacagatgggtctataaggttagaacgatgctgcgttccaggggccagtggccatcattacaatgagacaacagcactctagtcagctagtgggcgggacagcatgccaccagtccaggcacgactgcacagcacgcagcgacagcgcatgtgcaaacctccttcaggtcattcatcttgggaaccagccggatctggccaccctggaaaagcgtgagttaggcaacgagtatacccacaaggtaacacaaacgtttaacaagatttgtcttgcttgcatggcacagacattgcatggcaccgccatgacaatgacatgcaacgacagggactgtcattgacatgacacagcattgagttgcaatacaccagaacacggccacgtcatggcgccatgcactgtagacgggaacaagacctgttaaacgcacaacaaacatatcctgccacccgtgttgtgacgaggacaaacatctttttatctccgcagcgacaattcagtctcgaggacacaaacaatcttgtgacgcacaggacgcgttccactccatccagaaaagtgtggaaacgacagtcaccaaaaacgccaactttctataacaccatcagcaattagcacggtcgggcaagtagacaatcttgtatagaagcaagctcggggataaccacacccctgataacacacaaaaa

SEQ ID NO: 585955 - DNA, 528 bp, Homo sapiens
ccggagctggcagacaagagtgtgcccaacttcatgtcgatgaaaggccatgcacgttctctcaagtccctagggctacgtgaaggaacagcttggctggaaacatttctactggtaccttaccgatgagggtatccattatctccgagatataccttcatctagcccccggatgattgtagcctgccaaccctacgccgcgtagtccgtcctaggagactggacagtgcctcggtctagaaggtctggacgggtgagcgacctgtcgagactcagaaagaggggaagctgacagagatacctacagacggagctgctgtgcctacctggtgccgaccagagacagccgatggctggtggctggtgctcatgcacgccgaattaccagtattacgaggcggcatcttggttcgtggacgtggtcacggcacctcagtaagcacctggacgaggatccgtgatgcagttgacactagaaacttgtacaagggcaatggagacacccttaaaggacaacaagtaggagag

SEQ ID NO: 585956 - DNA, 457 bp, Homo sapiens
gatgcttatgggtcgagttcatggaaccgttgagtaacatgtatttgagatggaagttcacttgacataataaattaatgcagataaaaaaatattgggggaacttaaagggccaggcaccatggctcacgcctgtaatcccagcactttgggacgccaaggcgggtggatcatggggtcaggagaccgagaccattctggctaacacggtgaaaccccgtctctactacaaatacaaaaaaattagccgggcgtggtggcgggcgcctgtagtcacagctacctgggaggctgaggcaggagaatggcgtgaaacccgggaggcgcaggtcgccgctgagccgagatcgcgccaccgcactccagcctgccgcgaaagggccagactctgtctcaacacccaggctgcccgggagtgctgcccaggatggccagcccctctgtagccaaggtcgta

SEQ ID NO: 585957 - DNA, 104 bp, Homo sapiens
ccgtcgatgcggtacccggcacatctcgatatctttcgcatgctctcggcgttgcagctggaatagagaatatagtccggcgccatccggctcaaatagtcgca

SEQ ID NO: 585958 - DNA, 285 bp, Homo sapiens
tctgctgtactaaatgcaccgtgatctctttaggtacagcatttaggtacatacatttaggtaccagccatttaggtaacagccatttaggtaacagccatataggtacagtcattagataacagccatataggtaacagccattttgataccagccatttaggtaacagccatttaggtaacagccattaatgtaacagccatttacggtaacagtcatatatggtaaccagccaatataggtcagagccatttcggttacaggccattgacggtacagccact

SEQ ID NO: 585959 - DNA, 466 bp, Homo sapiens
ctaattttttgtgtttttagtggagacggggtttcaccgtgttagccaggatggtctcgatctcctgaccttgtgatccgcccgctttggcctcccaaagtgctgggattacaaggcgtgagccactgcgcctggccagaaaaaacttttactactttatttgataccttatgttctaattaaacttgaaaaaatttagttctgaaatacacgtggattttttaaactctgagaactttgtaaacacaactgtgttctacagacagcaaaagcttctctaaacttgtgttagtcacatggtcaaattagacataatgctccgtacatattgaagcacaaagaactaaagataagaggcaaataattctgactggaaaagaataggaggtacctcttctagcttctggatacagaagacgtccatttgcatagtttgcgcaagagagccttttctttcttgtgtatt

SEQ ID NO: 585960 - DNA, 956 bp, Homo sapiens
gcaggtgggcgggccgggaaatgctcttgccggcccaacgctcacagaagggacatacaccaccacagcatgaagtcagcccgtatgagcagcgatatccacgctgatgtgatccacacagccagagacgccatggggtcacacgagacacagtatagatcccctgagacctgtgtgcacaggtaggaccagtgcactcacacccatgctcggagagggagccccctgtataaccaaggagccactggtggttcagacacacacatcagcagcttgacctcagctccactgagggcctttccactagcgtcgcacagcttccgcggccgtcgctcgccgcaccaaacccggggttctagagttaagagaatgggggaggggtatttatagctgcggtcagtctgactcctcaacccagcagcaatttgaggggatgaggggcgaagaggagccgccttttggaggccgcccttcagcatgcagcgtagtgatgccgcgtgttctctcttctcggcggtgtcgctcaccatagtgcggtgatcacgccattctagcatcccccgtgcgtactgcaagtgcgcctgtggcgttgtccccaacacccacgtcgagggacaaagctcagcttggggatagcgagagtaattgtgatagaatgcgtcgaagtcagcgtcttccatttcagagagaaccgccagtcttcctttgggggtatgatgtggcaagctggtttcagcccaggacccaccactgaggagaggatctagacaggtgggcctaactccaaggggcccttcctggcctggagaaggccttttacacacacacaacacatacacacacacacacacacacacatatcacagttttcacacagcgcctgctgcatctctgtcatactccgttctatatagatttgtcggggtcggggggggggggagggggggggtgtgtgt

SEQ ID NO: 585961 - DNA, 740 bp, Homo sapiens
gtggtcaccgcggacgactttggttacatgcccgcgacgcggatgagggtatcgtggaggcctttctggccggggctgtgaccagcgtgtccctgctggtcaacggtgcggccacggtagagacgcggcggagtctggcccgctaggcgacagcatccccacggggcctccacgccaacctgtccgagggccgccccgtgtggggtccggcccgccgtggcgcctctcatcgcttgcgtcggtccccggaaggcttcttccttgggcaagatgggtattccgggaggtcggttggcggacggagactgtggatttgcctcaggtgcggatgccgcgagctacaggaggatggctcgcagaggacccgccatgagctccgcccggagggtgcgggaggagctcagaggaccaactaagctgcttccgggagcggctgggcaggggccccgaggcacgcggacgggcaccagcgagcgtgcacgtgctcccaggcgtgtgccaggtgttcgtcgaggcgctgcgaggccgtatggggtgcgcgtttacgcgacgtgccgggtggagcgcggtgtgggtggctgcatgttggctggagggcctccgcgcgtgcttcgtctgcgtgcgtggagctgcgatgcccgggccgacgtgggtcccttctccgccagggctgccggtggacagacgcctcgtgtcctggcacttgctgcgggacaggttccgttcccggtgttcggggc

SEQ ID NO: 585962 - DNA, 254 bp, Homo sapiens
caatatcttcctggtgattctgtagcactcgatactctacagactgacccttcttaaggatctagtataggtggtggtagccactcacgatcaaacctgctggccatcacagacgctgaggttgcatcgatcttggaaacaggaacgagaggctctttatcctttaatctgttggccattttatcatattccggagcaaactgcttgcagtgtccacatccatggagcataaaactccagcagcaccaccagga

SEQ ID NO: 585963 - DNA, 833 bp, Homo sapiens
  misc_feature (540)..(540): n is a, c, g, or t
gtcgactctgaagatttctggcttgtcctggggcttaatccttggacctattttattcaacattgattgtcaatgctctgaatcatgatgcccatcactatccccctgaagaactcaccagctctttccccaggtgtgtggggatccgaactgaagagcgctttccaggagacacacttcgctgtccacacagagaccaggacgcattcgtggactcacttgccctaacttctgtcatgctgcttgcaacgcacggcaatcccagcatgaatgaagccagcaagacttttcttggtgttgttgagtgggattctggtgcctcctgtgcagattcactttttacaaaattatgttgacatcttgcttataggcctcaaaaaactctgagtgagatgcgctggtttgcctttggaacataggataggcactgttatcagaatctgctgcaatctcataccaaattggaatgttttccctttatagcatttttaaaacttttcccacaaaataacagcattgcaccgtgtcacgttatatttnattgcataaatgtcagcctcccttaaaacgaaagttgaaaagattatactttgaaatagtaatcgtggggaaatgcctgacttgaggagttcagccagcttggtaaattattcctgcaaccatttaatttgctcactaaaatatattgcttgacctgaacaataccaccacccccatatgcccctacaacaaaaaagagggggggggggctaaagaaaatttcccccgggggggcccctgttttccgcccccgtttttttgtgttcacggggggcgcccaatggggggccata

SEQ ID NO: 585964 - DNA, 251 bp, Homo sapiens
ccgctccgtatggtcatttacgctgttgtcttaattgtcgtcatgattttccgaccaaagggattgctgggaacactgaattgtcgttaaaagcgttattgtttgatacagggggcgagcatgacaaccattctaaaaacgcatgatttaagtattgcctttcgtggtgtgacggccctcaatcagggtcaatattgaagcgcatgataatgaattgattggggttaattggcccaaacggtgcaggtaaa

SEQ ID NO: 585965 - DNA, 348 bp, Homo sapiens
ccggttatgataccacctctcatcgacaggtcacctggtgaagaaacaacagtgacatggtaatcattggagaatcaacatcgtcatgttcctcccactacccttgaagatattgtagccaaggaaacagaaaccgatattgatagagagtatttcaacgacttcaagtccttcctgcttacacagccgaactaagaccacctcactggtggaagaccaaagaggccatttgcacctcaggctgctttctgacgccacagacctccagcaagcacaaatatttcaccctgcacattaatagtgtatattattcgaggtcagcagaaaataagacaggtcgaatgagtg

SEQ ID NO: 585966 - DNA, 760 bp, Homo sapiens
  misc_feature (467)..(467): n is a, c, g, or t
gctgtccagatgaggaagctgagctcagagagattcactaacttacctgcagccacacaggtgtgtggggatccgaactgaagagcgctttccaggagacacacttcgctgtccacacagagaccaggacgcattcgtggactcacttgccctaacttctgtcatgctgcttgcaacgcacggcaatcccagcatgaatgaagccagcaagacttttcttggtgttgttgagtgggattctggtgcctcctgtgcagattcactttttacaaaattatgttgacatcttgcttataggcctcaaaaaactctgagtgagatgcgctggtttgcctttggaacataggataggcactgttatcagaatctgctgcaatctcataccaaattggaatgttttccctttatagcatttttaaaacttttcccacaaaataacagcattgcaccgtgtcacgttatatttnattgcataaatgtcagcctcccttaaaacgaaagttgaaaagattatactttgaaatagtaatcgtggggaaatgcctgacttgaggagttcagccagcttggtaaattattcctgcaaccatttaatttgctcactaaaatatattgcttgacctgaacaataccaccacccccatatgcccctacaacaaaaaagagggggggggggctaaagaaaatttcccccgggggggcccctgttttccgcccccgtttttttgtgttcacggggggcgcccaatggggggccata

SEQ ID NO: 585967 - DNA, 139 bp, Homo sapiens
gtcacgcaacagccccggtgattcctcactgacggcccaaggtggtggaagctggcagaaaagtgtgtgttggagtggagctcgggcggctgtggtagggtgtggatacttcaacaggggcggttgcggtgctaggagg

SEQ ID NO: 585968 - DNA, 596 bp, Homo sapiens
  misc_feature (131)..(131): n is a, c, g, or t
  misc_feature (155)..(155): n is a, c, g, or t
ctgaagtctcctgctcaattgtaagctctataatggctgtttggcccagggcagtgctcagcgagcactggggtgcctctaacctgctcaggcctcactggtcaccaggccgtggtggcccttggctgtgnttctcggtttctctttggggcccngagcaggtgccaggcccagggccagctcctgaccagaactggcacgtgacacgggggacctgacatgggcggtttatcctcaggatgacccattccagggcctgtagtctgcccactgcccaggagcctcctctctcagcatggaagtgcttgggtccgctcagaccccagaacatccattgtttgggggtttttcagtcacatacccagcagaggagagaggtctggtaagcacccttcctgccaaccagctttcatcatttccagctcgcgcctggctggtttccctcctgccccgggttgcctggaacttcatcacactgtttcagcccttgtctttggagggttcttgataggagcagagcagcaccagtgctgtggccggtggcagctctcacagctgttgggagagcccagcacagagtggagcaggagccttca

SEQ ID NO: 585969 - DNA, 120 bp, Homo sapiens
cataccatcgtccagcagtattatgtcgctcatcctcatcacgcagtaccaacaacacatctatcacagcatgacctctagcaccattgtccctgtcagcctctccgttgcccttacctc

SEQ ID NO: 585970 - DNA, 905 bp, Homo sapiens
gtcttgtctctgctctcctgaacctttaggcttgtttcggcccgatttgaagaccaggaatgttgatcaatccctgaggctgctgagagacggtggagcgattgggacagtcgccagtgtgatggcctgaagtcgtgtaataaattgcgatggtgggttgtccgggtcgtgcatcctcgcgtggtatcgctgtcgcagtagtgtccctgtggtgttcttcctggccatctcttgagaccggtgagtctggcctgacattatgcccgtggtccatggacatgaagagagcgtctaagaagggattgatgaattgggagttgaagaactatcccgggtagcccctataaacatagccctgatacttttagaacggaacgtggcaatgttgcgttcttcggtagcgtgtagtgtgacaatttcaggagataactgaagaaagcaatatctggttcatggatcaaggttcacggccaaccaatgtgacctcacttgcgtcttccggcggacctcgtaatttgggctgtagttcaaaggagtagaactacagtcgtatgtacaaccattgtaagagcgttaacaggtgggagtacactctaccatttctggaaggaaacccaactcatcacatgagaatgacaattctgtaaaggcggatcaatgagtaaagaacgagtggctgctgcattggacaaacgcacaattaacggcagattgtgggacagggtgtggtcccttagacctgcactggtggctgtataaggagccactggctgaaattgtttgagtatatttggttaaactcttgtataatgtcagagaccctgtttggcactaagtgcttgaccccaaagcttttaacgattctccaggggataaactaggaacccatggcctttacctccggt

SEQ ID NO: 585971 - DNA, 286 bp, Homo sapiens
cggggaggtagtccacaaagacaattggagagggaggacgctgatccgggagctagcagcccaagtcctagaagacaggggtgtgggctgcgggcgggtagactctgagaaggatgcacgctgtggccaagaaactaggcctaactgaagtggacagcatgtatgtatgcaaggggacgatgaccgtcatggacgtaccgacgggcgacgttttctggctgaccaccatcggggacgttccggctggactgtcctagacggaccccggtggacctggatggaaggg

SEQ ID NO: 585972 - DNA, 970 bp, Homo sapiens
  misc_feature (545)..(545): n is a, c, g, or t
  misc_feature (666)..(666): n is a, c, g, or t
gtccctggtgtgtattccgtcctgcgcggtgtgttctctggagctagtcgttcttatatatctctcgtccgaccgttctctcctacctacacgtgcgtgcctgtcaccacgattggtaagattcggatggtaggcatggacatgagtccccctgaggccccatgaactatcttttcggttgtgaactagaggccgacgaagcttattcacttaagggtggcttatttgatgaaaatagagcaccaggtataatcttgaacgtaaccgggtcagagtattagtgggcctgggtgcaataggaatgaggttgcatgagttgttgaaatgcatgaaggacaatggacattagagataagggcggtccactattaatacggtaatcacatgggaaatgatttgaaacaaattgctctgatatcagctcaactgggtatctccccttgggggtgcatattgaccatgtaatcaccatgcagtctggtctcgttacagggcttgaatgttgatgggtctcaaggtgtcgcagatgtcactagttacgtggnatgcaggctacctgtagtatagacatgtggcagcgaagtcatgcaggagtcaggacaggatcgaaggacgggaggcatgcgtagtgtgaaaattccttttaagctcattatcttgcgggancagcgcggtctggtcgcacgtgtgatagtgtgggtgatctaatgggttttcacacttgcataataagggtaagaaatttgggtagttggattgaatagaattgatttgacgaattggaattgagtgagggatcggattgatggattcgatactgatggacgcgagtcgatcgaatgaatctggtgggttgactgttacgtgcatcttgggggtggaaataacgccgcctgggtgaggtgataactttattgggtaagatagtactaggcattagaattgtggtacaattgtcaaagtcagaatg

SEQ ID NO: 585973 - DNA, 745 bp, Homo sapiens
gggggggggaagagaaaggggaagctggaaaagaagacaaagatgaaaaaggggaagaagatggaaacagaggattaaaatgggaaacgtgacgaacaggacgaagagtgcaaagagaacagaagattggaacaaaaggtgaacgacggaaaaggaactgtggacgaagatgtggaaacagagaacggagaagatttaacaaagaggaagacagaccgaaaagaacacggagatttggaacaacgacgacttgaccgatgtgtgacaacacgacagacttgacagggtggcaaatgacggaaagaagcctggaaaagagaaagaagatttaaacagaagaggaagaaggaaaagaggaagatgagatcaaagaagatgttgggaaaaaaagaggagacacagagtatggtttaaaactggcctatgtagttcataattgggtaacttggtaccttcaggtggtaaagttaatagagataaatatttttatcaaaaattttataaacacagcctttctttagcatggatttaatttcagaacatcttcatattgattattaggccataaagtttctaacgtgaaacatttatctactaaattgggcgattatagtagtggagctactttgaaaaaaattttgctttcaacttgggagtgaattccggtcgcgtaagttatttgtcaaattttggaattttaattatactctttatacatgtgatatttcataaaggggggatcccc

SEQ ID NO: 585974 - DNA, 247 bp, Homo sapiens
cgtcctattagtacatcacttctccacatctctatattcagaaagcactaggattactttcttctttagtcatcagaaaaaaaaaaaggaggtatattttgaatgatcgaagaagtgttgtctggggggaggggccacatagccaagcttttatgcacttacataggactctggctcaatacaggctcagttcctctgggtttagtttgtacagtgtaattcgagggtgacttaaagttaagaagat

SEQ ID NO: 585975 - DNA, 492 bp, Homo sapiens
acctattctgtccactacatccatttatcctctgtcatcctgaatatacgtagattgtggtctactgatgtagtggtttcttatgtagcataaataccccagtatacaattatttcactgaatgcttgttgtgtgaatgaatatcaagtcttcagacgtttccttttgctctgtatgatgatattattgaggaacctcaaacgtattggttaaggaccagcttcaagatacagtggattcttcattgacctctaggaggctatcgtattccaaataatctgatatgatgatgattttctttccattgaatttctccttcaagctggtgttaaaaaccttcacatggaagaactgtgtctgtgtagccactgtagcatgaaacattatttttttctccatttctggggtctcatattcaaattgggttgttgtactcagtaccttcactatcactgggcgtttttggagaacatttcttctgggagttacctg

SEQ ID NO: 585976 - DNA, 840 bp, Homo sapiens
agcggagggaggcggggcggagacggaggcgaggaggaggccgcggcgcgtgacgcatagagctgcggctcgggcggcgcctccctgcagaggcaccggacccggctccggacccccgcatggggcaagtgctccccaggggccgcagggatgagcacagctgagctctggcacggtccgggcatggcagatccaggggcagggcatagcgagttcggacggccaaagagcgtgcggaccattatcgctccaatgagagcctatggtggagcgccagtgaaaggacgagacctgggccgatgtgtgcatcaatgacctgtgtaatgggacctgggctctccacgcggttgcgtgggacgtattgcgcgtgtccctgatctaggggccttggtaccactggcgctagcgactccgtggtgcctagacagtgcacagactgactcgatgaacgcggatcggctgtcactcggatgtctatgtggcaagactcggccgcggccacaggcacgcggacggttggtggtccttgtcgcgagggctgcagcgatgatgtagctgccatggtcgtccgtgtcatggtcgcagcgatcgagacgtggctcaccttgtcatcggactggtggccgcgtggcagctggcgtgtgccgcgatggtgctcactgttgtgaggacgtgaggagcctggatgctgcagcagagaactgagaaagatgcgtggtgcgtgtgccttgctgtgacgtgtggtcgcggcagtggggcacgccgtgggcctgctggtgccccacagcctcgtgcaatttgacgcaggaagattgagcgggagctgtgtgtcctggaccc

SEQ ID NO: 585977 - DNA, 274 bp, Homo sapiens
cggtacctgtatgcagctgttgagtagctggaattacaggtacatgcacacgccggctcatttttgtatttttagtagagacaggtttcatcatatttggtcaggctggtcttgaactcctgacctcaggtaatccgcctgcctcggcctcccaaagtgttgggattacaggtgtgagccaccatgcctggcctctctggattctttttgctctggagaagttagctctcgtaattttgttacttaagctgtcttttttttttttttttttttt

SEQ ID NO: 585978 - DNA, 1845 bp, Homo sapiens
  misc_feature (1108)..(1108): n is a, c, g, or t
  misc_feature (1344)..(1344): n is a, c, g, or t
  misc_feature (1442)..(1442): n is a, c, g, or t
  misc_feature (1520)..(1520): n is a, c, g, or t
catatgcacgggtgtctctctactcgtgtagttttaccttctctcgcggcgataatcacatttttcccaaagaagcactctgatcgtcgccgatcttggcctctttttgggagccccccacatgaagaagcacaagggtgtcgcgcaccaaaaacgacgagaggtggtgtcacggctccgcagtattctccccgggggattattgttcgtgcgaccaccaagagcgcctcagttttgtttcggcgccagaatttctccatagaaacgcaagtgtggtgtgtaccgtcggggggtatataccacccgaacgaagagattgtttgtcgtcgcttagttcgacccagagcgcagatatagttcgtggtcgaccaatatatacagcccgcccgctggatggaaaagaagaagccgtctgtatttgcaaatacgaatggacagatctatcttttaatattagggggggctcgccttcactcaaaaaataaaaaaagacggtttcgtatattacggcccccccacgcgcgcccattttttctttttgaggaaagaaagaggtgttttttacacaccgcgtcgcgcggaaccccacaccctgcttgtggttggtgaagcacacacagctatagataggcccgcttcatcactgtgggaagtgtatttaataaataacgtgtattcttgatgaaagcaggagacagcttcgtcgaccaccagacgcggctaaattatataatataaatatttgggggggagaaggaagaccacagcagtgtttattagtagtcggcccctcgtgaaaccgtctgcttgtaaaagagaaaatgaattttgtggaaaaaaattattttccacgacggtggggggaaaacaaaaaaatataagatggtcgtgtttgcccacaccagaagaaggaacaacaacaagatgggggcgtctcttaataagagtgtttaaataacacccctcctctaataggaagactcttttgggggggtgccccccacacctgctacttcttctgctgaatatttgtggaggacaaaaaaccacactcttttttatatgtcttcgcgtcgattataaaaaaacacaaacataatttcttgtngggggaaacacaatagatatagtatagtaaatgaataagataaatatagtgttgtaatatcgcgctctacccacgcgacataagaggagctctctctcaatagaggagccactactttgtgagagagaaaaattatatattgtgggtgttcccccctctgtggtgtgaataaagtacgcactcccctctcttagagagatatttcttttaatatagagacagcacacaccatatgnggggtgtatatatctacatacacatagatattctacacagaggataaataatatatatagtgtctttgttgctcacaggtgtcgcacacatatatgtngtgtctccccccactgtttgttctcacactgtggtggtcgtcacacacacacctgtgggttgtgtgcccccacatttngttatgagtgtgtatataagagtgtgccagagacacctatattgagagagtctctgtcccagagtgttatagagtgtgtcccacagtcctgtgctgtgagaggaaaatagcgcgcctcttttctctttttagacggtggttaacacactacacttctcctggagaaaagagtatgtagcgtcttcttgtagccatataatggaggttctcaagtgggacaccaaaattttgtcgccacatttaaaacactggcgcaattattacatggacaatattacacaattgagaaatccaatccacaaattaaaatttttttcatttccca

SEQ ID NO: 585979 - DNA, 515 bp, Homo sapiens
  misc_feature (117)..(117): n is a, c, g, or t
  misc_feature (262)..(262): n is a, c, g, or t
agcatgaggacctcaaggacccccatgttggagtcccagcccaggaacttagaaaatacttcaagatgggggaccacgtgaaggtgattgctggcccgaattttccggtaaattgtnggtggccttggaatcacatgtgtcctttccattttgtgcgggtggaggagaatttcgttatcctgttctctgacctcaccatgcatgagctgaaggtgctcccccgggacctgcagctctgctcagagacagcatcaggtgctgnggatggtttgggggggggggcccaaggccaattgaaatggggggcgagctgggtgcagctggatccccagactgtgggtgtcatcgtgcgaactagaaacggggagaacctttccagggttggctggaccattgttaccggggaaagggttggtttgaccttgttcaggaacttcaggctgtgacccggaaaaaggacaaccgttttggtttgtgtggccttgtgggacccttcaagaaagccaggaaacaaa

SEQ ID NO: 585980 - DNA, 358 bp, Homo sapiens
gatccaaatgacgtatcctcccttgtcaatctgcactgttgcgatctaatcactgaccatctgttcaaagatgactgatgtgggctctaaatccagtaactggtggccttttaagagaaaaaaagacagagacaccgatacgcagggagaacgccacgggacacaggtgcccgaagctggagtgatgcgtctatgaaccacagaacagcaaggactgctggtaatcaccaaaggctaggacaggcatggaacacattctccttcaaggtttctggaaggaaccaactttgccaacaccttgatttcagattctagcctcaataactgggaggaaatacatttctgtggtttaagccac

SEQ ID NO: 585981 - DNA, 291 bp, Homo sapiens
  misc_feature (41)..(41): n is a, c, g, or t
ttggacgtggcttctaattccagcagtggcagagccattgngggtggctcagctctgttggaggggcagttcaccatcaagtacaccaccactactactccagcaggaagagctataagcacaaaagtgcgtctgttagctctcggtcccgaagacctcaggcccttctctggctgcagagccctctcctcaggttgcctttcctctccgtggactccaagtcttcccctgctgtccccaggtagagctgggtatggattgcttagttgcctcactccttctcgcatctct

SEQ ID NO: 585982 - DNA, 227 bp, Homo sapiens
  misc_feature (68)..(68): n is a, c, g, or t
  misc_feature (81)..(81): n is a, c, g, or t
  misc_feature (194)..(194): n is a, c, g, or t
cccccatctgaccagaaacatgccaatcctgagaataacctcccctccagccagagatattccaactntgcaataaaactntccttcacacagaaacattcgcagcctgcggtaggctcccccttcctaaacccttaaatgcccttagtctgtaagagaatgtccctgaccgaaatcggccagaagcccctctnaggtttattcccaaaataaacctgtctctgttg

SEQ ID NO: 585983 - DNA, 680 bp, Homo sapiens
ctcatgatctatcaagtgaagcacagacaaaagaggcaaaaagaacaaagaaagttaagtgtttataacgggctgttgactgtacaccaacggaaaaaaacaaccgctgactaagccgtaggacaacattttcttgctcttaataccaagcaaagctgatatgctgggaaatgcgatgttatcagcctaaggcgaggagacttgcatcaacaaggggatttaccctactaggcgaagcaggagctcttatcgtcagccttgcggcacttgtttacaaaagctgcaaaatcatccataacagcactcagttgatcttgtgttgccctgggcttgagattgacgagcttaacaagagcaacaggttacttgacaaggcgattcttatgagaaagtgcgcatatatctgcgttgaacgagaatgcatcatcgttaaactctctgtgaacagatggtgtatggacttccacagctgcaaagcatggtcccactgttcaccaacgatatacgggccggatttggtgactctgtcaattacaggcggttggtatgcaggacacaaacttggttatgaccaccgaaagaatagtctttgcacaggcaatctattgtgttgagggatgttacaacattaggtggccacgttttcaaaggttcttgagaccccttccagacatggagag

SEQ ID NO: 585984 - DNA, 132 bp, Homo sapiens
atacagccattttatacactatcttcttcatcttcttcttcatctgtagtatagtccaggactcaatgaactcctctgtggcatcgcccagcagcccccgaatacgataaacaatcctcctgtccctctcca

SEQ ID NO: 585985 - DNA, 332 bp, Homo sapiens
cttcggggttcacgccattctctggcctcagcctcccgagtagctgggactataggcgcccgcaaccaggcccggctaattttttggtattttaagtagagacggggttacacggtgtaagccaggagggttttgatctcctgacctcgtgatctctttgcctcggcctcccaaagtgtgggaattacaagcgtgagccaccgcacccggcctcttcctttctaattgggatgactggtctaatccttgatggtagggagagtctttaatcatgaagcatgatggtagctgtgggtaaaccacagatgcccttaatcaggtggagaacattc

SEQ ID NO: 585986 - DNA, 982 bp, Homo sapiens
aagatatctggtatcatgtggacaagactctacttgcggctcatgtataccttcgatgacataaagggagagaatatagaagacatcccagaggaagtgctgatggactgtgcccaccgttgctgaaggccaagtacgcatgtcaaggctgcaagatgaagcaacgtaaatgtggtatatacggaccgaggtctaaccctgaaggaaaacggatgctgacatggtatgtggggcatgatgaggcattgtaacacatggccagaatggattgtaatgatggtgacaggtggaagaatgaagagtaaatgaggatcctgaacgcagattaagagaaagagcatatggtcgagactggttccgcttagacacttaataggcaggaagaaggaagtgctatgaggatcgtggagaggatgaaggatatgagaacattggagcccaatatctgaggaaatgaaaagagagagaaaaagaagaaatgaagaagaaggagggaaatgttatgaacttaggagctattcatcactaatgaaagttgataatatatgtcgttcaacatcaggatggtatgattcaaatgaattcatgttgaaggagaaaaggagaaaaggacctttgaaagatgtgaatgtagagacaattgcggacctttggttgcatcatgtgttctgaagtatggaatagtaccaagattctaccgttcatccgtacggcggatgattatgaggtttcaaagtttgtacgtacacagagtgttccttgttttggctgacagaaagaagggtccgatgtgttaaagatcggttgagcttgacaggggtataacttgaaagtgcaaggtggtggccggacagggtctggggcgtggtgaagcagggggcccgtgctgaggatggaggttaaaggacaaggcgtgaagagaatggggaggagggaatctgaacgagggttgtgacacttggcaattaagaagggacgtggg

SEQ ID NO: 585987 - DNA, 232 bp, Homo sapiens
ctagctatacttgactgagcattaacaatagtacgcggaacaataagtaatctctgatttaaactagacagccaggatgtgcgtaggtcatgtgcaaatactgtgccatgttatatcaagtacttgagcacctgcaagttccggtatctaggcgagggtcctggaaccaataccccgaggataccatggaacaactggtagtacatgtgtcgtccatgtactgctcagcgct

SEQ ID NO: 585988 - DNA, 559 bp, Homo sapiens
  misc_feature (333)..(333): n is a, c, g, or t
  misc_feature (430)..(430): n is a, c, g, or t
  misc_feature (485)..(485): n is a, c, g, or t
  misc_feature (507)..(507): n is a, c, g, or t
  misc_feature (511)..(511): n is a, c, g, or t
  misc_feature (514)..(514): n is a, c, g, or t
  misc_feature (521)..(521): n is a, c, g, or t
  misc_feature (538)..(538): n is a, c, g, or t
  misc_feature (542)..(542): n is a, c, g, or t
  misc_feature (553)..(553): n is a, c, g, or t
  misc_feature (556)..(556): n is a, c, g, or t
aagtgtgtatcctgcaacgatcacgaacatgaacatcaaaggatcgccatgggaaagcaggctccctcctgtctgctgctggttgtctaaacctgtctcctgatgccagatgcgtggcccacctctgcccatctgctcccgggcggggtctgcccgaatgccagtgtgacccattcgatgacctgcttttgaccgtcgcgcgtcgatcctagtacccatctagcattccagtataccttctcgcttcagtaacagtgtttccacgcgacaattctgagtcaaacaggatattaccccagctggggcgagagggcttcgagttacacatagtgnccgattccaaacgagtcgtggagcaacagcatttcgttaccgcgtttgtctcacgctccgcgaataggaacacatgagaagtcagacgtgcgcgaancgaaggaattggaacttcagagagagaggatcctttttccgtgtaaggcccttgngagatatggatccaagagcganttanttntggcggncacatccacgtgttgcnaaanatggtcagtgnccnctc

SEQ ID NO: 585989 - DNA, 132 bp, Homo sapiens
ctagaggatccgtagtttagggctacctttctacaaaagtcatcaatgttcacttgtccaattgttgttcttcctttaagaaaaataccagggaaaatgttaccaacaaaaaaatgaatcattaatataata

SEQ ID NO: 585990 - DNA, 246 bp, Homo sapiens
tgcatggctgataggcttggtgtggggagatgacgcagggcgactttgtctgcaacaccctgcagcccggcgtgcacagcacgtgtgctacgctcactccttccccctctcccacatccggctctgggccctgcagctgctcttcgtgtccacgccagcgctcctagtggccatgcgcgtggcctcccggcgccctgagaagaagaggcagttcatccagggggaggtacagagtgaatttaagga

SEQ ID NO: 585991 - DNA, 272 bp, Homo sapiens
  misc_feature (124)..(124): n is a, c, g, or t
  misc_feature (133)..(133): n is a, c, g, or t
  misc_feature (181)..(181): n is a, c, g, or t
  misc_feature (249)..(249): n is a, c, g, or t
  misc_feature (262)..(262): n is a, c, g, or t
ccggcgcggcggtcgggattctgggctgggattctgggcggctgtctgctgccgtcgggcgggagctgagcgtcagggttcccgggcgcgggcgacagtggaaacgctggagggcagggagagngtgccaggngcaccgccggggcggcggcgggggaagggattaaggaggctggtctcngggattcccccgcgatcgttgtgcggcgggcgcgggcgcctcacgccacctcctgcttgccctggcangacgcccgcagcnatagagcgcc

SEQ ID NO: 585992 - DNA, 365 bp, Homo sapiens
ggcatatgactgtacataccacaagcatagccttcttatcttacttcttggagcatgtttaactttgtaagatgcaaataggtgggatcaagtttaaatgagtgtgctgcccctttcacatcacagaactactgacaacaaggccgcgcctgcctttcccatctgtctatctatctggctggcagggaaggaaagaacttgcatgttggtgaaggaagaagtggggtggaagaagtggggtgggacgacagtgaaatccagagtaaaaccaagctggcccaaggtgtcctgcaggctgtaatgcagtttaatcagagtgccatttttttttggttcaattgattttaattatgggctgcaccctg

SEQ ID NO: 585993 - DNA, 452 bp, Homo sapiens
gagggggcggggaatccttccgacccttcttagagaggggctgcattgcagggtggagcagtgaacttgacagactcagtcacatgaagcagtggacaaaggcagtgatgaatgactaaagcctgtcacaagcccacaactagacttttgtgatttcctcctagaccctgtgcgccagaccaccggaagacctccccgtaggacagactcccacagtcacaaatcgtgtgtggcaaaacaacgagcccagagtacactgtggagtcgtgcacctacaaacaagggaccaggccttactgcacgcggcgcaacaccgcgtgagttgcaagcattaagaacacaatgtgttaaacgaagtgtgtacccattgtatccattgttatctccattgggccaagcggacattgaccccacaaaattactcgccaagtaaacagctttgcggccacgtc

SEQ ID NO: 585994 - DNA, 234 bp, Homo sapiens
tctaggtgactctgaggatcccccccgactagccgacagggctgtgtttggaagcaagatacttccacggcttagccatcttcctggacacctaccccaagtgatgagaccactgagcgcgtgttcccgtacatctcggtgatggtgaacaatggctccctgtcctacgaccacagcaaggatgggcgctggaccgagctgtcgggctagtcggggctgtcgggctagtcgggg

SEQ ID NO: 585995 - DNA, 386 bp, Homo sapiens
ataggttcgcaggctgggggtgggggaaatggggagtcagtgtttaaagggcagagctgcagtacggagatgaaaatgttctggagatgcattgtggtgatggttgcacaactctgtgaatgtactgaaagccactgaacagcacacttaaaaatggtaaaaatggtgataggatttggctatgtccccacccaaatctcatcttgaattgtagctcccataattcccatgtgttgtgggaaggaccaggtggaaggtaatggaatcatggggacaggtctttcctgtgctgttctcatgatagtgaatgggtctcacaagatctgacggttttataaaggagagttcctctgcacatgccctttctcctgcctgcgaacctatga

SEQ ID NO: 585996 - DNA, 593 bp, Homo sapiens
  misc_feature (24)..(24): n is a, c, g, or t
tagcaggtggtaccccccgggtantggatatcgtcgacccacgcctcgcctcagagaccgagcccacctgccctttctgcaaccagcgagggatcctgtgatgtgaaaatggaccgtgcccgcaacaccggagatcatctcttgtaccgtgtgcctagaggaattccagacgcccataacgtatctgtcagaaccctgtggatgtgtacagtgatttggatagactgcctgcgtatgcgtgcaatcagtagcgacactagaggaccctgccactgagcagccccgatgtactgtggatccagctgttcggttctggtccagagacattccaggggatccaggatgtgggtacctgagactgtactcagaccagtgatgttatgtgatatggtgatgtagtgtagtgatgtgtagatagatgaatgtgagtgattactactgtatgctgatggagaagatgagaagatgatggtactgctacttttgaataattacaacgatgatcacaaaggggactaacacgaaaacaagtatatgactcacacacatacacagcaaatgataaaaaaccatgaacatgaagtgtaccatac

SEQ ID NO: 585997 - DNA, 318 bp, Homo sapiens
tagctctaacgcgcgcgagtatctaagatagctgggattataggtgcccagctaatttttgtagtttaattaaagactagggtttcaccatgtatggccaggctcgtctcgaactcctgaactcaggtgatactgcccgcttcggcctcccaaagtgctggcattacagccatgagtcaccatgcccaggcctttgacgagatacttttgatgaatttttcttgccttgtgaatggcattataatccctacgatgtaagctcttggtccggcagggtaatacgtttgagcaactaggagggctatccagcgcgtatgg

SEQ ID NO: 585998 - DNA, 192 bp, Homo sapiens
ttttgtcgcaagcacgcggcgaggctgccccggggcagcctttttcatggctgtggcattttggtgtgcgggggcttgctggcacggcggcttctttggaacatggcagcattccagaaccagacacagagagggaatgacatggacgctgcggtgaccgaggccgcccctgcacagtcgtgggcgccactg

SEQ ID NO: 585999 - DNA, 140 bp, Homo sapiens
  misc_feature (38)..(38): n is a, c, g, or t
  misc_feature (68)..(68): n is a, c, g, or t
acagctgcctcctagaatatagactgtctgtaattatncacctataattcgtcattatgatgcaaagntgtacttgcatttcaaagcttataagatataaatggagaaaagtagaaataaatatgtattccatgtttgtt

SEQ ID NO: 586000 - DNA, 345 bp, Homo sapiens
tgatcgggctcatgttagactagtagttctgatgactagttacaccaagaacacaatgatatgatctgaaatactatatgccttaaagctgcaaaaatatccccattctcaagtctccgatcctgccacacatcactgctgtgtagaacatagaagtcctcgtttttctcagcccaagagggggactgaacccagatattagacagcattaaagcaagcttgtaaggactctaaagtagtaccccaaaatgaatgttggaatcgtgggctctacttgtgcgcgtctccgtcttcgtcccgtagacacataccaaaagagttgacaaacgtcgtaccgctttctcc

SEQ ID NO: 586001 - DNA, 100 bp, Homo sapiens
ccccgctccggcctcccacacagatggctgtcaaaggtcggccataaaggaacccaagtccctatgggcgataaggtaaaaccgccaatattcaggatta

SEQ ID NO: 586002 - DNA, 126 bp, Homo sapiens
cgtgtcctgcaatctggctgtctggaccatttgcagtctgatgtgccccttatcagaaaagtgactccacaatgcacggattttctgacgtccctcatctcctcctgtcaacacaccaaggaaggg

SEQ ID NO: 586003 - DNA, 143 bp, Homo sapiens
gctcatgacatgcaactgcatttggatgaacaccaccttcttcagctataccatgcaacatgcatatgtgtgatgaacaccaccttcttcagtggtgatcctactagatgtctgaccctgcagtgcatgcaatgcttgtgcac

SEQ ID NO: 586004 - DNA, 280 bp, Homo sapiens
gcttcagccaagcaccattatgataccgaggacgctgttatccttcggcgggaagtcatacgtgttagggagcacctcacactttcctcaggagaagacactgtagcatgaccctcatcctggggaccccaactccaggccctccagccccaaaactgcccagccagccctgaaaaatgcaagtcttgtacgagtttgaagcttagcgaatcccacggagaactgactgttggtccacgggagaaaacgctggagtgttctggtaccactagctagagtc

SEQ ID NO: 586005 - DNA, 1199 bp, Homo sapiens
ttctttcttctctctcttttctcgtctgttgctctcgtctctcttcctgttcgtcttcgtggctggttgttgtcgtctcctctgtgtcgtcgtctttctctcttcgttcccctgttgctcttctctcttcttctccctgcctcttctcttgctctctttctgtttgtttctctcctctgttttcttttttcctcttctctcgtcttacctcttgcctcccttctcttttcctcttgcgtctttttcctgtgctcctttcgttatccctgatcttctctcgttgttgctcccttgtgccctctgttctttgtcctgtgtgatttgatgttgtttgttttctgtccttcctatttcctcggctctgcgtgctctctgctttatgtccctgtcctttagtgttttgtctctatggttctcggcttttcttactgtctttatttctcctcttcttgttctgtcttcttgcgatgttatgcttggggtcgcttttccatcctcttccttgagtgttctgtacttgtttcatagtgtttggccccgagtatgaggccattcactgagtctgcatcagagtttgcaattttgtagtgtcttcattgcctaagaaggcttagtggttgttgactgtagtataagtcagctttctgtagcataagatgtgagttttcccatactttagcttcacttgttatacatcatctgactatttgggttaaactggactcatttcaagctgtttgcttttgttcaacatcgtgatgagaaacctaattatctgtaatttgatttgtacgccataatacatcattttcaatagttagcgttgtattatacgttatttatagctctgcttttatgtgggacaagatagaatctatacgtataaatcctcaggctaacctcgtagatgtaggcccagtctcacggtgtatctttgtatccttagtaatggatcatatcgtacaaaactacgagataacgttgggcaagatatattcgatttactgcctgttcgtgttgagggacaacggtcatgtactttagaaattcaaacttttggttagttgtgttcacatcatagtattcaagcatcattgatagtttggttttgagaacctttctggtattacgtttatggcaaatgtataaaagaaacaagttttggttatatttttatatttgtaagatcgtctggttaa

SEQ ID NO: 586006 - DNA, 461 bp, Homo sapiens
attcggcaccaggagagcagaagccagggaaggccgcccgcgccgaagccctgggcgccccagccgaggaagagccgggaaagggcgtcgcgctcatgtagctcacttcgagtgcggaggtgacggagcccccgttcaacacactcagccactcgaagtggcacagttgaggcatcgtgaggggtgatgcttcgcagccctggcacctgggtcgtccactgcggccccgtggtccagcaggaagcggacaatttctgcagaccaggagacgtaacccagctcccgatgccccgccagactgactcttcgccccacgtgtccaccaagggtctcactccagcctgggtgacagagcgagactccatctcaagaaagaaaaacaacacaacatggatggtgcctggctcaaagtgagggctgacggctgccaacctccaatggtggtctctgccatcagcact

SEQ ID NO: 586007 - DNA, 152 bp, Homo sapiens
  misc_feature (67)..(67): n is a, c, g, or t
  misc_feature (73)..(73): n is a, c, g, or t
  misc_feature (78)..(78): n is a, c, g, or t
  misc_feature (92)..(92): n is a, c, g, or t
  misc_feature (95)..(95): n is a, c, g, or t
  misc_feature (97)..(97): n is a, c, g, or t
  misc_feature (99)..(99): n is a, c, g, or t
  misc_feature (101)..(101): n is a, c, g, or t
  misc_feature (110)..(110): n is a, c, g, or t
  misc_feature (115)..(115): n is a, c, g, or t
  misc_feature (123)..(123): n is a, c, g, or t
  misc_feature (126)..(126): n is a, c, g, or t
  misc_feature (131)..(131): n is a, c, g, or t
  misc_feature (136)..(136): n is a, c, g, or t
  misc_feature (141)..(141): n is a, c, g, or t
  misc_feature (143)..(143): n is a, c, g, or t
  misc_feature (145)..(145): n is a, c, g, or t
aaggctttttttttcctttggccggggaatttttcccctttttatgaaggggttttaaattgtttcnttttgngggcngggcttcaaacccntancngncnaatcttgcnttttnttgtttgnccnaaaanatacnggccnancngaggcca

SEQ ID NO: 586008 - DNA, 748 bp, Homo sapiens
aagtttgtcatccctgactttgaggagttcacaggccatgtggatcgtatatttgaggatgccaaagagctcactggaggcaaagtggcagcctacatccctcacctggccaagtcaaacccagatctttggggcgtctccccgtgcactgtggatgggcagcgacactctgtgggccacacgaagatccctttctgcctacagtcctgtgtcaagccactcacttacgccatctccgtgagcaccttaggcaccgactacgtgcacaagttcgtgggcaaggaacccagtggtctgcgctataacaaactctccctcaacgaggaaggaatccctcataaccccatggtcaatgctggtgctattgtggtcagctccctgatcaagatggactgtaacaaagcagagaagtttgactttgtgttacagtatctgaacaagatggctgggaatgaattcatggggttcagcaatgccacattccagtcagagaaggagactggggatcggaattacgccattggctattacctcaaggagaagaagtgcttccctaagggagtggacatgatggctacccttgatctctatttccagctgtgctctgtggaggttacctgtgagtcaggcagtgtcatggcggccactcttgccaatggcggcatctcgcccatcacgagggagagcgtgctgagtgcggaagccgtgcgcaacaccctcagcctcatgcactcctgtggcatgtatg

SEQ ID NO: 586009 - DNA, 267 bp, Homo sapiens
  misc_feature (20)..(20): n is a, c, g, or t
ccctaggatagactaagcantatttggaatcgaacttaaataagctaatagtttccaagcactaccaattattcttcttaaaagtactggagtctctctgagctcagagttctgaaatcgttgggagatggaatcttttgtgatactgttccacgttcagctggtaagtgcttttatagctaaagggggaagtgctctacgtccgggagaaggcattagtgcagatgacgtcttgactggaaacaccctagagtctcggttagtcta

SEQ ID NO: 586010 - DNA, 151 bp, Homo sapiens
ccttctacgtccatcactgagtgccagatccccacgcgtgagggtttgatgtggggctcagaactctcactcctgtaggtgagtctctgtgaaccaattagttttcagtctgtggagcttcccaccccagaggtatggggttgtttatatc

SEQ ID NO: 586011 - DNA, 279 bp, Homo sapiens
gactctcgacgatcccacatattgctcaccgctccagcctaggtcacagagtgagagctgtcttaaagaaaaaaaaaaaaacacaggcccctttgtgtttttttaaaaaacccccagctttcttgtgtggtcgaaaaaacttgagtgaaaggcaagggatagaaaatcaatccccggggggggggtgcccaggtcacataggcccctgaaggctcgaagagattttgggaataaatgatgtgacgatggggaattcacagaaggggtttaggagccagg

SEQ ID NO: 586012 - DNA, 119 bp, Homo sapiens
ggtgactctgaggttccgtcacagcttgggcctactttctactttcacacaaccactggccccacatcccatctctggccagtctcagaagacccacggctctcaaaaaccaggggagg

SEQ ID NO: 586013 - DNA, 568 bp, Homo sapiens
attcgcggccgcgtcgaccaaaataaccctatcaatcaccaagcccttgcaattctagaattctggtgccaggctcctacttccaaaggaattattcctcaaatggtctttagatgagcgagctgcattcaacctctgccctgcatcccaactaccatcttgattcttagctaatttttacttgcaaacagcagaagcaatgagccaactcactgaaaagacaagaataaagtgaggatttttttttagaccataataccctttgtcttcctagaagtaatccctggagcctgcctgccctgtgtccagcactaatctatgagcttgtgatatttctttctttaagctagtcatatttagcagtggggcttgtgatatttctggtttcctgatctctctcctcttcaaataaacgcaagatatctacgccatggtaacatgtcatttacttccccattctcacatacaaggatcctggaggctctctgctcctcccccataaatctgcgcagataagcaagtgtgtgtgtgagtgggggtggaggggtgtttcaagcccccactctgg

SEQ ID NO: 586014 - DNA, 312 bp, Homo sapiens
ttccccccccccttcccccccctcccccgcccccagcccacgtggcccccaggagcccaccaggggggggcccaccaaaaaaccatggcggccatgggcggccaaaaattaaattggacccccccgggccctgggctggaattgggggcaccccagggttgtggggacccaggagggccagggaggggggacccggggagggcagggggtttccccaagatccccctggaaaattttataaaaaaatttttttgggtcggggggccagtaaacttcctgggccccgtgggtccttcaggagtttttccggca

SEQ ID NO: 586015 - DNA, 255 bp, Homo sapiens
aaaatgcgaacactaacaactttgatgcttgcaaaaaaaagtataaaaaattcatcaataaaacaatttgtggccaggcgcggtggctcacgcctgtaatcccaacactttgggaggccaaggtgggcagatcatgaggtcaggagtttgagaccagcctggccaatgtggcgaaaccacatctctactaaaaatacaaaaattaactgggcgtggaggcacgcacctgtagtcccagctactcaggaggctgag

SEQ ID NO: 586016 - DNA, 177 bp, Homo sapiens
gggactacgttgtcctgttggggtcacgcctgtgtgcctggtgcgggtgcttaccgtgtgcccatgtgctgtgtgtggctgggtgggccgctggtggttgtcctgctcttccctgccgtgcttgacgcccatgggctgctcggccgcctccgggtgtgtggcccaccgtgggcctgg

SEQ ID NO: 586017 - DNA, 222 bp, Homo sapiens
gagaagaaggaggttcctgctgtgccagaaacccttaagaaaagcgaggaattcgcagagctgaaggatcaaggcgccttagaaaagaaggtttgcccaaaagatgctttcgaaaggcaaggaggaagctttatctattaaaaagcaaagcactatcacagggaatataggcagatgtacagccctctaattcgtatggcgaggatcgcaagaaaagctcgc

SEQ ID NO: 586018 - DNA, 509 bp, Homo sapiens
  misc_feature (7)..(7): n is a, c, g, or t
  misc_feature (111)..(111): n is a, c, g, or t
  misc_feature (181)..(181): n is a, c, g, or t
  misc_feature (184)..(184): n is a, c, g, or t
  misc_feature (199)..(199): n is a, c, g, or t
  misc_feature (226)..(226): n is a, c, g, or t
  misc_feature (234)..(234): n is a, c, g, or t
  misc_feature (284)..(284): n is a, c, g, or t
  misc_feature (373)..(373): n is a, c, g, or t
  misc_feature (381)..(381): n is a, c, g, or t
  misc_feature (387)..(387): n is a, c, g, or t
  misc_feature (398)..(398): n is a, c, g, or t
  misc_feature (437)..(437): n is a, c, g, or t
  misc_feature (491)..(491): n is a, c, g, or t
ccggtgnagaaccacaaagctctctggaggaaggacggggcctctgtcctcttctacctggcccatcagcagataactggctcctttcttcatgggggggctctgcttgcnaggctcgtttaacttcagggaggcaccagtgggtggagaaggcaggtccagtcctccagttttataagcnccnattagactgacagtnacggcaaggccctcccctggctcccgnaccatggncttcactgtcgcagtcaccacaaggctgctggcacagaagttgctctgcnaggtgcctgtccggcggcactgctttgggcaggtgggtgcctccgggcgctgcaggcgcttcctctgttttctccggtggttgggactnggggggcngcttgncttttggctcngttccccgtttggggccgggcccttgcccttctttggcngtgccccgcggcagggtcttgttggtggctgcgttgcttctgcggtggcactgnggtctgggggcgggctgg

SEQ ID NO: 586019 - DNA, 326 bp, Homo sapiens
  misc_feature (8)..(8): n is a, c, g, or t
ggttcaangcgatctcccacctcagcctccggaatagctgagactacaggtgtactctaccactctcagctaattttttgtgtttttagtagagacgaggtttcaccatgttggccaggctggtcttgaactcctgacctcaagtgatctgcccacctcggcctcccaaagtgctgggattaaaagcatgagccactgtgcctggtctgaggaacctgtttctaacttgcacagagatgctgtgtgggctggcaggatttcctgcctctttggatctccatcttcccatctgtacagtgaggagttggcccattaactcttgagtt

SEQ ID NO: 586020 - DNA, 358 bp, Homo sapiens
  misc_feature (1)..(1): n is a, c, g, or t
nagatccccatgcgcagttgtgatacaaaaggatggaactatgggttctattcgcaaagccacaggatagtgcctaacaggccagctggctgatcctggctctcagctggtaaaaaaaaacaaagaatgggcagaacccagatgcagccagaacgtcaagatcccacagacaatcccgctcttatccgttacaaggcataccccgagaaaaaccaaacaaactgctgaaaaggccagggatgtatgtggctggctaaaaagggtttctttcactaaaaaatgtttcttaaggggacaggacatgacctgactaattgggatccactacattgacagtttacataaatgagttgatgat

SEQ ID NO: 586021 - DNA, 621 bp, Homo sapiens
  misc_feature (86)..(86): n is a, c, g, or t
cgctgccaatgtttcaacaacaacctcccggacggcgcgccgagcgaacctgtcagccccgtttccgagagcgagaacagagcggncgagaaacaatgctgacgcgggcggaccccgagccgcggtggtcggaggacgagcccccaggcgactctgcctcggatgcaccgacgacccaaagtgacgaggaggagccccacgcccgtccaaagaaggccaagagctcggaccccagtgccacgaaagacaaggggcagaacgagaagaggatgctgcgtgcgaagaggggccccaccgccgtggaacaatccatgccgcagagggccaagaacagcacaacgatgaccagcctccctgttcagagtgctgaagagcagatgctattacacaacacaccaccatcactaagaagctggtgacccaacagaaaccggccaccagcaacgggtaaaaccctcgtatctcacagattattttaaataatatgcctttgcaaatttcgccaccaccaaacggcaattcggatccccaataactaaatcacaaacaaaaaaactgccacaacaatcgcccgacctcaatacgcacgtatatccaccaccgcccacctaccttccccct

SEQ ID NO: 586022 - DNA, 452 bp, Homo sapiens
  misc_feature (31)..(31): n is a, c, g, or t
  misc_feature (111)..(111): n is a, c, g, or t
  misc_feature (127)..(127): n is a, c, g, or t
  misc_feature (215)..(215): n is a, c, g, or t
  misc_feature (263)..(263): n is a, c, g, or t
  misc_feature (427)..(427): n is a, c, g, or t
  misc_feature (443)..(443): n is a, c, g, or t
cacctctgtttcactttgggactttcaaaantcaccttgcaagcttcactactgaaaataaaaattaaaaaaagaaaaagaaaaaacacctgaaccaaccaatcagagctnacctgccttggccagngagggctcagctgtattgaccaatcagaattcagctacaccaaccaagcagaactgtcaattcttcatttgcataaatggacctgatngggaacctggtgagaaattttgctataaaacctgagccttccctttgntctctggaacacaccttcattttgatgggaggctgcgtctcctcagtttgtaaacgtcactgaaataaagtccctttcatccaaattgtcttttcagacaacttttgttcacgtcccaaaagcaccatctaaaagcagcgtgtgtttcagccttacattgttgncgacttcactccatgnccttgccct

SEQ ID NO: 586023 - DNA, 206 bp, Homo sapiens
gtcgcctgtggtatacctcatctctgtttgcctgtcatccatccatccttcgttctttcaccttccatttttttttttcacatctgcccaccttggtttggagttcccgctgtgtccatgggctcacggacctggtgttgctgcagctgtggtgtcggtctcagctgcggctcggattcagttcctggccacggtcacaccaccgt

SEQ ID NO: 586024 - DNA, 232 bp, Homo sapiens
aacgatggtcctcagctaagtgttaaaaatttttttacagatggggtctctggctgggttcggtggctaatgcctgtaatcccaacacttgggaggctgaggcaggcggatcagtagaggtcaggagtttgagtccagcctggcccctgtctactaaaaatacaaaaattagccgggtgtgggggtgtgcgtctgtaatcccagctacttggaaagctgaggaccatcgttg

SEQ ID NO: 586025 - DNA, 218 bp, Homo sapiens
agttataacagatatcagaaaggctgtagatgaagtttattagggaaaatcacattcaaaaagaatagggattaaaaaaaaaaaatcagctgttatgtgattggtatcgattctgttcttggcaaacagcatgaattaaaaacgctagttacccagtcttagaaagcagccttatgctcagtgttctgttatgcctaaaggttacctcacaaccaaga

SEQ ID NO: 586026 - DNA, 362 bp, Homo sapiens
  misc_feature (4)..(4): n is a, c, g, or t
gcanagcctcaaggagtgtgtcaggtgcagtgtcagcagtgctcgatcctgtagactgatgtgtcccaaaagaaagtacccaggtatacgtatcagacagtcatgcgatgcttattaatgagatagctcatgtgagtaggtgactctgaccagtggacagcgtcttattagaagaggaatctgaccacacagagcagagacgcgtgtgagatggggcagagatgggagatgtggcaacgccacaatgctgggctccagaaactaaggagctccccagggcttcgcaggagatgctcggcgacactttgatcttggcttccagcctccagaacgtttccttaaattcccttttccactggtgt

SEQ ID NO: 586027 - DNA, 101 bp, Homo sapiens
taacagaaagagaagtttctggctctcctaggtactgatagatttcattggtgatggagacttaggcatgagcaaaagaactctatcagtacctaggagag

SEQ ID NO: 586028 - DNA, 284 bp, Homo sapiens
aataataatagtactgtactctaagaggaacaggggagtgtgagtttgttttttgtttgtttgttcattttcagagagacagggtcttgccgtcacccaggctggaattgcagtggtgcagtcagctcactgcagcctccaactcctgggctcaagtgatcctcccacttcagctactcgggaggctaacttgaggatcgcttgagccctggagataaaggctgccgtgagccgtgattgtgccactgcactccaacctgggcgacagagtgagactccatcac

SEQ ID NO: 586029 - DNA, 552 bp, Homo sapiens
cgcggtgtaatcgccctcgtgccgaccaggatgctgtattacaaggattggccagctaacgaggcgctgcaagcatcgtcccttagaagtcagccccattgtggatcctcagttgtatcacgtacctccctcatcagaattggctcataataatatttcggtgtatcataacagtcagatcctcagagaaccgtaatctgtcaaggttgggtactcataaaaaggctgcaggctctgacagcctaatcagaagccacagtctcagagacactggggacacatgcccgccactgatggaatagcccgctgaggtagatactttgaaggcagcaaaccttggaaaggatgtgtactcttggggatccattcaaaaaaataaagttcttaacatcacaggccatacgtaaggtaaaagtttccattggcttggccaaagctgtccttataaaattaacttcttcccatgtgtgcacagaactatgtagtgctactggactccacactccccagatcccagtatgactacatcttgcctcaagtttctttcaccga

SEQ ID NO: 586030 - DNA, 1572 bp, Homo sapiens
gacgcagcctacacctacttctacaagggcaccagcagtactggtaaattcgacatgtgaggcgccgtgcggagtgtgggcccgcgcgtaccccaaggtccaatcactggcgggacattcgatgaggcatggcgagcgagcgacgtggaagaccaagggcccgcgcatggatccgaacgtgggcccgtgccgagccgtctcaacgcgcccagcagggaggtgccaagagtcgccagaggggccggacctaagcgacaagagggccgatcgatgtgcggagactgcggcgatgggcgacctaccgggtgcccgcctgactcaaagacagcgaccgagcgtggtccacgcacagcgttggctagtagtgccatcgccttgcgacaggaagagcatgtgcactagagaacccgctatgcagctgagctgtcccttgtgttgcgtgaggagccgcaactagtctctgcactagcgtgcctccatgacacctcccttcggcgcgctttacacattaacggtcttaataagtggattccatagcactatcagtgcacgcaaaagctggcatcaccgcatcgaccacgtcgatcacagtcgcatgaacacatctctgcgcaaggtacgcaccccttcccggaagggagcaacctggcgtgctactccgaccccagacgccgacagatggggataaaccctgacccttacatacaggtgcttgacgaacgatgacacaagggaacagtgacgcggggcatacatatatcgaacacaacgaatgcgagactatctgcagcaagcagtgagtatcctcacacccatctcacacatcagaccacacaagttgaataaacagcgaacccacaccctaatagaccaaatccatcacagtagaacgaaaacacaccaaccattacataccgcatgacacaccccacgaacccacaaccacaccgaacacacgacacaagaggctacgcaaagcgaggaaagcagcacaaaaggcgacacaagagcgccccacaacaggcaaacaaaccaccggcaaaaaacacgcgacaacaagcttacgcgagcacacaacaacagaaaccccaatccgacaaccacacacgacccacacacacacaaagcagccaacacaacacagaagagcaaaaacaacaacagccgccacgaaccgaacgaaaagacaacccatgccaaagcacgatgcaaacacaagagccaacagacacgaacaatcaccaacatcaaaacaccaccacaggaacaactcacagcaaacacagcacacagagaagcgacaacacacacggcacaagaaaaagcatacaaaccatcggaacagaccagaacagactcaggtcactccagacagggaacacgccacacgccgatagggacacaggacaccagagagcccgaccaatgagagagccgacataggcagacagtacattaagccaccccgggagacagacaaaccgatgcccacaaatgagagacgaccacgacgactcactcagaaaataacccaacagcacacaagccaaacgtccacaccacacagctggc

SEQ ID NO: 586031 - DNA, 468 bp, Homo sapiens
  misc_feature (206)..(206): n is a, c, g, or t
caagacagacactctgggcggctcactgcagcctccacctcctgagtagctgagattataggcacgtgccacacacccagctaatttttgtatttttagtagagacagggtttcaccatgtcggccaggctggtcttgaactcctgacctcaggtgatctgcccgcctcggactcccaaagtgctgggattacaggcgtgagcaantttgccgtggccgtggagcacattttaaattgccacaacttgtgggaggtatgctagtggcagctcgtgagtggcgccctagggattgccgctcaatatcctccagtgcataggacgccacccacattaccacagtggagaattagttggccccatagttgtgaacgatgctgtggtcagaagaccttgccgtagcaatgatggacttatgccatcagttgagaccctgcataggtgtgtgtcttcccaggctgatcttgac

SEQ ID NO: 586032 - DNA, 928 bp, Homo sapiens
  misc_feature (50)..(50): n is a, c, g, or t
ggaccggacgtgcactcctccagtagcggctgcacgtcgtgccaatgggnccgctatgaggaggtgagcgtgtccggcttcgaggagttccaccgggccgtggaaacagcacaatgggcaagaccattttcgcctactttacgggttctaaggacgccgggggggaaaagctgtgccccgaatgcgtgcagggctgaaccagtcgtacgagaggggctgacagcacattagtgacgggatgtgtgtcatctactgccaaagtagggagaaaagccttatgggaaagatccaaataatgattcagacaacaacacattgacacggtacacagcagtgcctacactacttaaagtatggaacacctcaaaaactgctagaatctgggtgtcttcaggccaactctggtggacactttgtgtgttctctgaagattaacagatttaagggaatggccaatcatgtccttggatggtcctgattggttcttagatatcaataaacgttggtatactttgctttggacatttcctgttagccaaaaaacaagaaaaaacaaacaaaacaacaaaaactttttgcggcaagacttggacccctagaagaaaggttttaaagaccatttgtttgggcgccgcgccccaataaggatactgtagccgattgggcacaaacggtggtcccagaggagaacacctgggcatgggcacatgcgctgttgtggtttccaccaataaaaaaccgcgccgcggaacggagttgtttagcaccaccagtatgggttcagggcatagcgggtcttcaccagggccagagagcagataatcgcacgcgcaggtgggagaaagacgtagacaacaggcagaccaacgaaagaggagaacaaacgacagcagcacagagaagacagcagagaacacagaacaacaaa

SEQ ID NO: 586033 - DNA, 185 bp, Homo sapiens
tcttaatgctcaccatactttacaactcacagaagggttacattttgttgtttttgttgtagagatggagcttcactcttgttgcccaggctggagtgcaatggcacgatctcggctcaccgcaaactccgcctcctgggttcaagtgattctcccaccctcatagcctccttgggggtaccgag

SEQ ID NO: 586034 - DNA, 507 bp, Homo sapiens
gcaggatcagacctactatcaggctccgggcgtatatgactacaaccaatggtagccgcagctgtcattgtccaccaagatgacggatgggacatatcatggggaccacaacgcaggagaccatcacgcgtgcagctagcttgataccaagagatcagagccacgatctagtgcctccatgtcctgtagctgcaggaacaatcccctgcattatccctagtggtccatgacctcagcacagcccttctaccacagaccaggcggatacgatgtgagcttcacgttcgcccctggatcgccatctcgaggggtggccctccgattccttcagacaacatttgaccccgatcaccctagagcagtctgccagaagaggggagacctaaagccctgaccgagacagagctgcgatgcacttcgccatgatgagaaaactagactgtccagaagttggctgtgagagaatgcttatctcaattgctccagacacgaccgctaccacggtgc

SEQ ID NO: 586035 - DNA, 433 bp, Homo sapiens
ccgcttctattccatctttgtgggcttatctgcctttgatctttgagtttgcgccttggatggttttttgtttgttgttgctgttgtgtttatttgttttctttgaacgactagtctgggcactcttctgtagggctactgtggtttgctacgggtctaccccagaccctagtcacattggtttttccagtacctggaggtatcatcagtgaaggttgtgaaacagcaaatatggccacctgcctattcctctgaaagctctgtcccaggggggtactgacctgttgctggcctgaccgtgcctgtaggaggtggttggagattccagttggaagatctcacccagtcaagaggaatggaatcagggacctgcttaaagatgcagtctggctgcattttggtagagcaactgtgctatgttggagatctcttc

SEQ ID NO: 586036 - DNA, 1085 bp, Homo sapiens
ctaaatccaaaccagttgaggtacagagtacacctagctcataaatatttgttgaatgagtttatgaatgagaaagattagtactttcatttctcatttagtttaattcatgtttatatgaatgtatataaaatgtagttatttgttccagagcatgttatatgaagaaaggcctttcaatagaatgatatcttctaatagacttgatgctttgttggttataccagctgtaactggtatgtagagagaatgttagcattatttaaacttcgagttgcaccgctgctattcatgctgcctcctaaacagaaatgatctatttcagtgtgcctcattgcttggaattcagcggaatattgattagaaagaaactgctctaatatcagcaagtctctttatatggcctcaagatcaatgaaatgatgtcataagcgatcacttcctatatgcacttattctcaagaagaacatctttatggtaaagatgggagcccagtttcactgccatatactcttcaaggactttctgaagcctcacttatgagatgcctgaagccaggccatggctataaacaattacatggctctaaaaagttttgccctttttaaggaaggcactaaaaagagctgtcctggtatctagacccatcttctttttgaaatcagcatactcaatgttactatctgcttttggttataatgtgtttttaattatctaaagtatgaagcattttctggggttatgatggccttacctttattaggaagtatggttttattttgatagtagcttcctcctctggtggtgttaatcatttcatttttacccttacttggtttgagtttctctcacattactgtatatactttgcctttccataatcactcagtgattgcaatttgcacaagtttttttaaattatgggaatcaagatttaatcctagagatttggtgtacaattcaggctttggatgtttctttagcagttttgtgataagttctagttgcttgtaaaatttcacttaataatgtgtacattagtcattcaataaattgtaattgtaaagaaaacataaaaaaaaaa

SEQ ID NO: 586037 - DNA, 2039 bp, Homo sapiens
  misc_feature (660)..(660): n is a, c, g, or t
  misc_feature (1069)..(1069): n is a, c, g, or t
cacgaggggaagccccatatttctacaatgacactgtgacattcaagtgttatagtggatttactttgaagggcaatagtcagattcgttgcaaagctgataacacctgggatcctgaaataccagtttgtgaaaaagaaacatgccagcatgtgagacagagtcttcaagaacttccagctggttcacgtgtggagctagttaatacgtcctgccaagatgggtaccagttgactggacatgcttatcagatgtgtcaagatgctgaaaatggaatttggttcaaaaagattccactttgtaaagttattcactgtcaccctccaccagtgattgtcaatgggaagcacacaggcatgatggcagaaaactttctatatggaaatgaagtctcttatgaatgtgaccaaggattctatctcctgggagagaaaaaattgcagtgcagaagtgattctaaaggacatggatcttggagcgggccttccccacagtgcttacgatctcctcctgtgactcgctgccctaatccagaagtcaaacatgggtacaagctcaataaaacacattctgcatattcccacaatgacatagtgtatgttgactgcaatcctggcttcatcatgaatggtagtcgcgtgattaggtgtcatactgatnacacatgggtgccaggtgtgccaacttgtatcaaaaaagccttcatagggtgtccacctccgcctaagacccctaacgggaaccatactggtggaaacatagctcgattttctcctggaatgtcaatcctgtacagctgtgaccaaggctacctgctggtgggagaggcactccttctttgcacacatgagggaacctggagccaacctgcccctcattgtaaagaggtaaactgtagctcaccagcagatatggatggaatccagaaagggctggaaccaaggaaaatgtatcagtatggagctgttgtaactctggagtgtgaagatgggtatatgctggaaggcagtccccagagccagtgccaatcggatcaccaatggaaccctcccctggcggtttgcagatnccgttcacttgctcctgtcctttgtggtattgctgcaggtttgatacttcttaccttcttgattgtcattaccttatacgtgatatcaaaacacagagaacgcaattattatcagatacaagccagaaagaagcttttcatttagaagcacgagaagtatattctgttgatccatacaacccagccagctgatcagaagacaaactggtgtgtgcctcattgcttggaattcagcggaatattgattagaaagaaactgctctaatatcagcaagtctctttatatggcctcaagatcaatgaaatgatgtcataagcgatcacttcctatatgcacttattctcaagaagaacatctttatggtaaagatgggagcccagtttcactgccatatactcttcaaggactttctgaagcctcacttatgagatgcctgaagccaggccatggctataaacaattacatggctctaaaaagttttgccctttttaaggaaggcactaaaaagagctgtcctggtatctagacccatcttctttttgaaatcagcatactcaatgttactatctgcttttggttataatgtgtttttaattatctaaagtatgaagcattttctggggttatgatggccttacctttattaggaagtatggttttattttgatagtagcttcctcctctggtggtgttaatcatttcatttttacccttacttggtttgagtttctctcacattactgtatatactttgcctttccataatcactcagtgattgcaatttgcacaagtttttttaaattatgggaatcaagatttaatcctagagatttggtgtacaattcaggctttggatgtttctttagcagttttgtgataagttctagttgcttgtaaaatttcacttaataatgtgtacattagtcattcaataaattgtaattgtaaagaaaacataaaaaaaaaa

SEQ ID NO: 586038 - DNA, 125 bp, Homo sapiens
tatcagccggcccttttatgggcacagaaatgtcttcttcctgggatgaggccgttgtctgcggcagtgggtggcaaagtctgaaaccaagtcgcacaagccctggtgagacagaagagccttgg

SEQ ID NO: 586039 - DNA, 827 bp, Homo sapiens
gtgctgtagtgtgtctgggtaacattagtcgagtcacccattgccagaagcaggtcttcaggaacacttgtagccgatcaaaacatctcagagaattgcgagggtagacagcgcggaacttccgggctatgagagtagggaaccccgcctgactatccgagggcagagctgcatgaagaggcacggattcccatgatccacgtggcccggcctgattaccaaagaagatttcgccacatttgattatatactatgtatggatgaagagcaatctgcagagatttgaatagaaaaagtaatcgagttaagacctgcaaagctaaacttgaactacttgggagctatgatccagaaaaactaagttattattgaagatccctattatgggaatgactctgactttgatgacggtgtaccagccagggtgtcaggtgctgcagacgcgtcttggagaagggccactgaggcaggttgcgtgcctgctgctggacagcctgactagaccccagcctgaggtcctgcatttctcagtcggtgtgttatcacgtccagggcccaaagcccagctctttgtagcagttcgacttacctggtttccttagccttaagaaagctaatttgtacgaactggacctcaagctgtgttgggcagggagaactccataaagagtcttggcttcagacagcttatgggggtattgcaagcattctttagactaggtggacatctccacttggccccggctccacacaatgagaggagccactaaaacatgatgggaaccccttgaaggccggcaatcaagcggggcataaaagacaccaca

SEQ ID NO: 586040 - DNA, 1383 bp, Homo sapiens
ttggttatatctcttcattccagacctacatgcatctgttatccctgttctccgctaataatgcctttcggtattgactttttcgtttctcgacggtctgtaatcaaacctgtccgcaatttgactcgtgccaagttcgtgtggtggcaatctcactgacactgctcttatgcatactgttggcaacataaccccccatgacgtgtaatggagcaacgtttggatgctcgcgactcgtctgtttcccgggtcgcgcgacaacgtcgtgctaccaaatggcaagatgttgaacactttcagggttccctggttttactgcaggggttcgctggtgtacttcggcctatgccctcaataggagatcacgcggtcataatattcggcaggcgcttggtactccgggctagcaagaatcgatagtttcttcaacggtatgtacttaccctggtccacattccacaaccgggtccatttcttaaggattgctcgcgtgtatccctaatccttcggttctctatatcggcacacaggttcgtcgcacttcgctcccctcagcatcatctaagcatgagactaaagcgtagaacatcttcctcgtatggtgtggcgtactcagttgagtgcacagtgaagtagttgcgtagtgccgtgatccaatttgtagtccctctgagcctatcgaccttaatacttccccatggaggtctatctctctacaaagagcgtttttaatggccctttcatctccatgcttcgatgcacttctttgctcatctcaatgagctacatggcgtgattgtctatattgttgcgtctaccatcgaggctcggggctacacaagttcggtgcgttctagagatgtgaagcaatctccttttagagatgaagctagcggtgagatatctggtagccagggcgtcagctcccccatctgctgcacgttcccacgagccaggatatcgaagactagcatattcggacaagctgacatggactcgtgggtgcaagcacgctcatactacacgtatacggtcaagcccctcatatgatgctagtcacagtacgtctaggtgcctcttcagagcggtactagagacggtaaagctgcaagtagcagtctcaaggcatgccattcctcaagtcactagtagctaactctaggtcttacatagaagcaaaggcaaattgtacccgatcttgttttacaaccatgcgtgtggtgtgataaacgtgtttctagagagtcatcgttaagggtcaccagactttttcatgccattagggtagtacaagctgagcatttgttttatagaatcttgtcatgttggaaattggggggagggggggagtgtatacatcctgtggtatgttcttaggttgtt

SEQ ID NO: 586041 - DNA, 1029 bp, Homo sapiens
ccttacaagtatatgagtattatttatagcgtagctcgtttacactatgcagtcgggaccaaagagcaactggatccacgtgaagtcctgtgtgtggctggtccctacctgggcagctctcatttgcacccatagacccccatctatggacagcgctggcgacagaggcagcatgggttagatcacacataacacatagggctctatgctcatatcccaagctgaacttgagccctgtcttgggctcaggagatagaagacaaaatctgtctcccacgtctgccatggccactcaacggcgggacagagtagcatggctgctctgcacgcacactggtgtgaacatgcgcttgccatctcaggagctagactggcccggcctccacttctggtcactctgtcaccctgagacccatgacgctgccccttctcagcggtacagatcagcctactatgaggacctctggccagctctgctacagccatctgactccatctcagcacaatgtcaacttcactctaacccacctgatggccaacaaggaccctacaactggcctgaccgccattcaacggctcacactatcttgcatgtcctggttcctatcatcgctcttctacagacccctcagctcacaccaattaacaagcctcctcctccacgcaacccactttctccaatacgtatcacagctcatggaagcgatcatcaaatgccacggtagctcactcccacgtgagctacccggaaccttaccctcgcccctccagagggcgctcggagccgcacaccggtcacccggtgcaacccggcctctcgacccagtaagaacaaaccaacatgaagcaacatcgcccccagacaacgaaatcaacacacactccaccgcaaccaggacaaacgacaccagactgcgacgccacccacggcacaatgaaacggggatgaccgatcagcaggcaccgccaggcccctacccaaaccacccaaccacaccaaccatacctgcgcagtccgcacggcaacag

SEQ ID NO: 586042 - DNA, 962 bp, Homo sapiens
  misc_feature (575)..(575): n is a, c, g, or t
  misc_feature (592)..(592): n is a, c, g, or t
  misc_feature (602)..(602): n is a, c, g, or t
  misc_feature (629)..(629): n is a, c, g, or t
  misc_feature (634)..(634): n is a, c, g, or t
  misc_feature (749)..(749): n is a, c, g, or t
tgcaacagctctttggagaggaggcctaaaggacaggagaaaaggtcttcaatcgtggaaagaaaattaaatgttgtattaaatagatcaccagctagtttcagagttaccatgtacgtattccactagctgggttctgtatttcagttctttcgatacggcttagggtaatgtcagtacaggaaaaaaactgtgcaagtgagcacctgattccgttgccttgcttaactctaaagctccatgtcctgggcctaaaatcgtataaaatctggattttttttttttttttgggctcatttccacttttgtaacccagaactttctatgtactacaaaccgggtttttaaaagggaactatgtggctatgaattaaactggtgtcgggctgataggacagacgggattttccatatttcttataaaaatttctggccatttagaagaagagaactacttccagggttgggaagagataaccctgaaaagaagaggggcttatcttcactttatcgataagtcagttaattggttccactggtgtacattctaatattctcctttggacattataacngtgggctttctaatctngtaaattatntctattttcaccaagggttttaatatnctttnttatgacaacttagatcaactattttagctgggaaattttctaaacacacttgtttttcgccgaggaacaaggtgtttcaaaattttgtgcgctctgacaaaaatacgttgtttntcatctcgtatggggccagagttagattcactctggctttttaaacaaaccctgattgggcatacaatggggtcagttgcacagaacttttggaaatcattaaactttcaaatctcccatccggtttggggagaaaataaaaggctcttaaagtgaatttatccgcatttaaccattctctctgggatcggctctccaaaaaatgcttaaaag

SEQ ID NO: 586043 - DNA, 125 bp, Homo sapiens
tagcactcagcaccatacacaggtaccaggcgacttgagaaacagaatctgccgctctaaacaactgaatggatcattcacctgagaggacgggagcgatgtgcggcatcatgagcagggaccga

SEQ ID NO: 586044 - DNA, 157 bp, Homo sapiens
ttggggggggatttttccccttttaagtggggaaataggagttacctgtgccaagaataattttggaaaaatttctattaaaatccactctgaagccaattggactaatctgagattgggtttgttcctaataaaagtgaagtggatttgaaaaaaa

SEQ ID NO: 586045 - DNA, 395 bp, Homo sapiens
cccagctgttctctaccatacaattgaagaatatattaaaatcttggaagaagaggaagttgaattgtagtctagttgtgcctgttccatagtgtgcagatagtgatcctgccaacattgttcatgactttaacaagaaacttacagcctatttagatctttgcctggattagtgctatgtgatccctctgaacacttccatttgtttatgccagctcagaaaccgactgtagttacttattaacatctaggctggaatcctatttgcctcagtcctatcttattcatgagcacatagtttttactgatcgccttgaatccattgatcacctgggtaactgtatctatcgactgtgtcatgacgtggaaacttacaatctggaatgcagataaac

SEQ ID NO: 586046 - DNA, 347 bp, Homo sapiens
aaagcttatagtgcaggcctatgatgagaggacttccatgaaggtctctgacacgcctagagacatttcctcatgtctggcgattaatattcagctcctctttacttacgcacatttctgcagccagcttgaattcctccccagaaaattgtttgtttgtttgttttctaccatgtgatcaggctgcaaattttccaaattttatgctctgcttaccttttaaatctaagttccggtttcaggtcatctctttgctcatgcttaacaaaagcaatctttgctccagttcccaataagttcctcatctccctccgagtctacctcagcctggacttcattgtccatat

SEQ ID NO: 586047 - DNA, 126 bp, Homo sapiens
  misc_feature (16)..(16): n is a, c, g, or t
  misc_feature (23)..(23): n is a, c, g, or t
tcagctgatacgcccnggagtantgatatcgtcgatccacggcgctcctgcttgaagaggggagggcgcctagtggaattccgcaccttgtcatgtaccatcaataaatgtaccctgtgctcaacc

SEQ ID NO: 586048 - DNA, 128 bp, Homo sapiens
gctcctagttccagacgccattggttcattttcacagaggagggacaagagctactttcacaagccttgttgggcaagggtaattgttggagattcttgaggggaaacccttggaaggctccttggtt

SEQ ID NO: 586049 - DNA, 1006 bp, Homo sapiens
  misc_feature (287)..(287): n is a, c, g, or t
gaagcctccgtccaggggattttccttgcgtcaaggtgtgcgcatcggacggcacagtatgtcgaggtgctggagaggcccactggagttgtaggcatgtttggaagacggggaatttctggtggatcacctacaggtggtaaatagagtttgtgtgtccgaggtgtgagtgagaaatggcggcgatgtttggtgttagctgctgtgtattctccagtgaacaagcctaatgattcgcttgagccatcatcagaacaactttctatttgaatggttcctattgcganggaaaaggggcaatatcgtcactaatagaatgtctccaatagctggattagatgctggagtatcaacacctcttcccttctaggttttctgagagacttcctcgttggctcccaggaggagggattccactgaccttatgacgacagcatgtgccacccgtgtgggcacttataaagaccttgtagtggtagtagataatacaccaaattatgcttgtgttatgtcctcattcttccctttaccatctgttcagcatagacttgaactgcccttatagcccagacatctgttgagacctgacccctagtcaattggttagccagtgtgtcaggcaatactcggagctttcctcagtcgagtgccattgagattgggcacctgtgcataagacgaggcaatcggttgcgcatattcctagattgtgggattcttgcagataaattctttgctcattttcatttcacttcctgatagtcagggtcggcttgtgagaagttgttaaacaacatgctaaatgtgaaatgtcaaccctcactctaaactttccctgttcagagcatcagactgaagacttcatatgggttttatagtgggctttctgattgtttggtagtccaattgaagaagggagtttgaaagttgttgatactgtaacgttgtacgccctgtcctgcctgaataccctactgctgtatgaccacatcttataagtgactgc

SEQ ID NO: 586050 - DNA, 211 bp, Homo sapiens
atatgacatatcatcagtaaatcaacgttatagagaataaagtctcttcaacttagtactgcttctctatccaggatgatgagtcaacaggtttcactaataaatgtcatgctgtagcatgtgtaagacttgtaaatgatgaaattcaaagaaaactttttctatggctaggagcctgccagaacaaaggccaatatataatgttgtgaca

SEQ ID NO: 586051 - DNA, 479 bp, Homo sapiens
gggaatgtgatacacttgttaggtaaaacagattttttaaccttctttagacatgatttgtgactgtggaagtgaaatattttatgtgaaaagttaaaaaaaaaaaacaaaaaaaaacacaatcagatgaggtctgctcattctagcccaggtgcagagttttctaaagtgggtgtatgagtgccacacggggttttcagtgtctcttgtaaaaatgacagtgctgtcagtgctttggagttgtggcacccacagcacaaccctgatgtccctgctcctcttgactcgtggttgattagtttggaaaatgtaagatgatgactcagggctttgtgcacctcagccacagtctggttatcctctgagtcctctgggttttttgaggaccatagaactgaaccttctcctgcccttgcctgcctcaccatcccatggtgctattgggattgttagaatgaaaaaatttatgtttagaccta

SEQ ID NO: 586052 - DNA, 519 bp, Homo sapiens
  misc_feature (288)..(288): n is a, c, g, or t
caaaatgttgaagttggaacgcacaataaagaccatcatcaacaccttccaccaatattttgtgaagttggggcacccaaacaccctgaaccagggggaattcaaagagctggtgcgaaaagatttgcaaaattttttcaagaaggagaataagaatgaaaaggtcatagaacacatcatggaggacctggacacaaatgcagacaagcagttgagcttcgaggagttcatcatgttgatggggaggcaaacctgggccttcccacaaaaaaaatgcacaagggtgangagggccttggccccccccataagccaggccttggggagggccccccctaagaccacagtggccaaaatcacagtggccacggccacggccacattcatggtggccacggccacagccactaatcaggaggccaggcccccctgcctttacccaaccagggccccggggcctgttatgtcaaacttttttggctgtggggttaggggctggggccaaaaaaagttttttcc

SEQ ID NO: 586053 - DNA, 315 bp, Homo sapiens
gaattcccccccccccccccccccctgtgtggaagatgatttcaggaaagatcccagatccctggaaagggaccattaagagaggattcatgaagatcagaacactagggaatgtgtccatcagtgacctcctaagtcagattgaaagggttaagtctgtggtagggttacagagaaatgctggcccatgaaagcctctgatcatgtgtaaaatatgtggtcctggaacggggagaaatctttatctgacagaacattgtcctcctgcggatgtgggattcttggctctcccttaaaagtgcaccactgactgat

SEQ ID NO: 586054 - DNA, 341 bp, Homo sapiens
ttatttttttttaagggacaggtctgctctgtcgcctaggctggagtgcaatggtgcgatcttgactcactgcaacctccgcctccagggttcaagcgattcttgtgcctcagcctccccagtagctgggattacaggcaccagccaccatgcctggctattgccttggctattcaggctcttttggagttccatatgaattttaaaatagacttttctaattctgtaaaggatgtcaatgctagtttaatgggaatagcattgaatccacaaatttcctttgggaagtataatcattttcacgataggatcccttcctatccatgagctttggaatcctt

SEQ ID NO: 586055 - DNA, 370 bp, Homo sapiens
gaactcctgacctcaggtaatccactggcctcagcctcccaaagtgctggaattataggcgtgagcacccacaccaggcctatttatttatttatttattttgagatgatgtctcaatcttttgcccaggctggagtgcagtggcatgatcttgtctcactacaacctctgcctcccaggttcaagcgattctcctgcctcagcctcctgagtagctgggactacaggcatgcacccccgttcctggctaatttttgtgtttttaggagagactacgttggccaagctggcctcgaactcctgaactcaatgatcaaccaccttggcttcctaagtgtttgggattacagatgttagtaccccgccccga

SEQ ID NO: 586056 - DNA, 753 bp, Homo sapiens
  misc_feature (400)..(400): n is a, c, g, or t
agcggcttgggttttttcggccatctttggtcttcccgtgaagttgtcgccatgaaggtcaagctgtgcagtttaaccgggtacaagaatctaccccggacacggaaggtcgtctacgtccaaggaccgtagcggtgcaaggtttccccagtttctcgtaatagtaggcgaaaaattgcgagatcgagcgtatctccttttcacaagaaggataatccttcgtgctagaattaacacgtgtgacggtgtccttcttacatgacatggaacgcgcagagaagacggcgacgagctgcggtaaagaaatattcagacaagaaagagagaaaccgcgcgcgaagccgagctgcaaattctccagaaggtgcacataacggtgggtggcatctctggccgtgantattaagtggtccaagaaggcaattcaggaaaccgtgaaagtttagaaagagggctcaagcggagtaaacagagcctactcaggggcttgcttagaggagagcaaaagaaggctaaccaatgcttctacaaaggactgtgcacagtggcttgcgtgcttataggccaccttacaagaggcagagaccataggcaaacggatgggtgacgccgtggtgaaagtttacagcttcccgcgaagttgggtgtggaaaaggctaaaacgggcgcgaattgtagagtttgtaaactaacgaatggcgcatatagtgagcccaaataaagaaaacaagaaacctctcctcagggccccgt

SEQ ID NO: 586057 - DNA, 582 bp, Homo sapiens
caggatcaaggtgaaaaggataacccatgcaggaattttgcatctgcaggctccgcttcaacatctgtttaggagaaagtggagacagactgacctgagtaactaaggtcttggaacagcttacaggtcagaaccaggtgttttccaaagctagatatactgttagcgcctttggcaacagaagaaatgaaaagactgttgtctgctgcacagttcgaggggccaaggcagacgaaatcctggagaatgatctaaaggtgcaggagtgtgagttaagaaaaaataacttctcagatactggaaactttggttttgggacccaggaacacattgatctgggtatcagatatgacccaagcattgatgtctacagcctggacttctatgtggtgctggaaaagccaggtttcatcattgcaggtaagaagtgcgggacaggcttcattggtgccaaatagaatcagcaaagaggaggccatgcgctggttccagcagaagtatgatgggatcatccttcctggcaaataaattctcatttctacccaaaagggtaataaaaagttttcagtgaaatgtttaaaa

SEQ ID NO: 586058 - DNA, 237 bp, Homo sapiens
gggcccgagatgtaacctttttttgtaggcatccccatgaccaaagatatattttttatttatttattatatgggcccttcaagaagtccctgtcagaaaaataaagaattgttttaaatgtcatgattggaaatgtcctttgcattgcttggaaggggtgtccctaaacccaaggaaattggttttggtttggaaaaattttgctgttattatagtaaacatccaaaggggtgtca

SEQ ID NO: 586059 - DNA, 1774 bp, Homo sapiens
  misc_feature (208)..(208): n is a, c, g, or t
  misc_feature (1563)..(1563): n is a, c, g, or t
cgttctgtactctctctccctgctcttctctctctcctatcgcgtctccgttctctttcttcctcctccctctcttcttctcttcttttctttcttctcttctttctttcttgctatctcctttgactacctctgtctttttctactctctactctcttctttcacgtcctcgttctttcttcatcttatttccttcctctctttctntctctccttgtatctttgtcttttctcctcttccttcatcgttctgctcgtctcttcgcctcttctctctctctccctgcctttttcttcttttttctctttttatctcttctttttctttattttctccttgtcgtcgtttgtctttcagttcctttcctttcttttagcttcttctctcttcttcttcttctccttctcttttttcttccttctctatcttcttttgtcttcttgtttttctatcttcttgagttctttcttcctttctcctctcctttcttctctccttttcttttttctgttctctcctatccttctttgctttcttcctccttatctcctttgtttttctctgttcttctcccttctctttttcgttcctttttcgtcttttcgtcctgtttttcgcttttctttcttcctcttttacttcatattctgtggtgcgcttctgagattttatcttgttctctttcctttctttctttcgcttttctctgcgtctgtcttggtcgttggtcttcttcttgtgtgtttaccttcttctctcgccctttctttctcttctccttttcccttttctttctttttttttttttttcttttgcactttccctcctctccttcattctcgctctttcatttcgttttcttctgcctctcactctttctgccacctcttctttctctttttctctttcttctttcctctccttctttctttcttttctcccctctctctccttcctctttccttctctcctccctctctttttctcttttctctttcttctcttctctcctctctcttttcgcgctcctttcttctttctcctctctcttcccgctctcttctgcacggctctgctctctctgttgtgctctgtgcgccttttcccttctcccgcgcgttttcttcttctcttctctttctcctctcgctccttctctctcttatcttcttcttcttcctctacattctcctctcttctttgtctctctctttctctcctctccgcgctcgccgtgtttttgcctcgctctctctctctctctctctctcactctcgtgtgtctctctcttctcttctctctctctctctctctctctcctcgctctttcttttctctttctgtgttctcttctttatgtgtctccttctgctcgttctctctctctctctctctctcttctttgtttgtctgtgtgtgtgtttttttctctctctcgttcgcctttttgtttcgctctcttcgcgctcttgtgtgtatgttgtctctgttcgctctctctctctctctctctctctctctcttgtttgtctttctttttgttgtgtgtgtgcggtganggtgtgtatattatatgtgttgtttattgtttgttgtttgttgttgttataagagataggctgcgactgcattataataataaaaataataataaaataaaaaaataataataaaataaaataataaaaataataaaaataatatataatataatatataatataataatataataaatataaataatataataataaatatataggagcc

SEQ ID NO: 586060 - DNA, 244 bp, Homo sapiens
  misc_feature (8)..(8): n is a, c, g, or t
cactgtantatgtaacgatagactccaaacttaatatggagactctccacagtatacacgccgtgtgtcagatatagggtcctaagttccatgtaggctgtgctcgtggatgtgtcttgtggtcaaggtgactctgtcctggaatttcttgtgcatactctgtgtgaccattgtaaggggcttgatccatccccatcactcaatgcctttgtcaggggcgggtaccctgagctcgaaattcgta

SEQ ID NO: 586061 - DNA, 341 bp, Homo sapiens
tggatcagagtggcttgtacttccctgcctgaacagtccacagccaatggcactccagtccttgtcacatggttccactcttaggatgtaaattaggaggtaccagcttgagaggcagaggcaaaggtaaggttaagatgcagctgtgaggctgggcacagtggctcacgcctataatcccagcattttgggaggccgaggcgggcggatcacttgaggtcaggagttcaagaccagcctaaacaatatggcgaaacctcgtctctaccgaaaaaatacaaagattagctgggcgtggtgtctcatgcctgtagtcccagctacctatggggctgaggcag

SEQ ID NO: 586062 - DNA, 171 bp, Homo sapiens
ggggaccaaagaatagggcggtgacacactctatttaatacgaccaaattgctcactcatcaccagggggatggcccaagccattcatgaggaatctgcccccctgatccaatcaactcccaccagacccctcctgcaatgctggggatcacattgcaacacggtctctca

SEQ ID NO: 586063 - DNA, 129 bp, Homo sapiens
  misc_feature (128)..(129): n is a, c, g, or t
tcctctcctttctgctagcctggctaaatctgctcattatttcagagggggtaacatagcagtctaatgagtgactacagggccctactactctggccttttttacggcttagagcacagaatacggnn

SEQ ID NO: 586064 - DNA, 1142 bp, Homo sapiens
gggagtcgtgtctctctgtcaaccaggagatcatggcagctcacctggtcaacgcgatgtacgtgtgcgtcctggatgataagctgttcgtcagggccccttccatggtctccagattgtgccgatcatgatgatctttgcactgggatagacaccaatgaagaacatactgacattgcctgcaggacattcatcaggccagtgtattccaatgctcgactaggtctcctatgaactggacgacgtggatggacgcaagggaagcagagccgcttcgttacatccccataacagtgagcagtaatgcaatggtggtatcacggtgcgatccaagaaagggccacgaaggtgcacaccaggatagcgtcccatgtggtaggctcacatgtgagatgggaccgagagtcttacgcgacaccctttgggcaccgagctatactcggaaggcgagtccataagcgatcactctgatcgcgggacgtcatcagtcactgggcctagtcgtggagcaaagaccagtgaagcattaagaggatttagactccactgacaggaattgaccccacgtgtgtcatttcaacctttcatcatgatctgccgtgcaagcagagtgcaggaattgtgcctcgcggtcgtggaccagtggtttaccctgctctgcgagaaagtctgcacctgtggaagtgccgctgatagttgactgctgggaaatcatccgaccaaaggaaccgtccagaggacaggctgcatgatcgaggatgggaagcaaggacaggtccgggctgagacgcattgccgtgacaggcttcagacggtatcgaagctagcctgggccctttccgtgagccaagagtgtccattggtgcccagaccccttctcacaagagagacagacactcagcatggacgctggcttggcttgaagactgctcaatccacacctgggaacaagggcgttgtgaacagaaagatttgagagcattccccagtagcatttagagtgaaccggtcaatggatgaaaggtggggacaactcctcggaagccaattaaatggaaaccgcctggtaagcaccaacgtggcctgggagattagagtggagcacctttgggccccgaatgcagctggcggaaagggtgctg

SEQ ID NO: 586065 - DNA, 345 bp, Homo sapiens
caagcccaaaccgtattataagactagtattattctaggtctgcagcatcacagaatatttcctaatagagatttgccacatcacatatggcaccatatccaccactattctatgtctagcaaatattcctcatagtctttgcttatgtcttttctctgtaagacactgtataaaagcattatacacggcacagaaatatgtcaccatcgaaaaggcactgtctacagctgcaggcagtcacaaacaataaatacacgcacatcccattctgtagggggaaaaataccaaagtaaatgggtcaatttctctaaaacgcagagaaatattacaactctaccgtggg

SEQ ID NO: 586066 - DNA, 228 bp, Homo sapiens
tagatatagtatccgcaggggaaagatgagagagagattataaccaagcatcatatagcaaggactaacccctataccttctgcatatgaatgtactagaattaactttgcaaggagagcgaaagctaatacccccgtaaaccagacgagctacctaagatactgcttagagagcagacccgtctatgttggacaatagtgtgaagattctataggtagaggcgacga

SEQ ID NO: 586067 - DNA, 930 bp, Homo sapiens
agactgctcatgtctctagaggtagttactaaataattacatatgatattgtacctgataaatatgtatctagattctacaaggtcaagcatttatgtggaagtccggaggtcgagctcctgagcgggataacttctgtgttttggcgtcagctcgttcccctgcttcctcttgttttgttatcttgtgtttcttctgtctggcgcagggggggtctaggctcctgtgtggctccggggctgtgcagagcagggggtgccgccatgctcggcccgggtgggttctctgcggccctccaggggtcagggtgaacttgctcgtggtcctgagcttcccaaaggtactgagggattaacggggcatgcatggcccacaagtgaccgggggcctaaatttctgggatatcttatagccataaagagcgggggttggcacaattgctggcgcaaggcgtggttctttgaagctctatgacctcggtgatgcaacacccgccaggggggccccacaagaggggcggggaataccgggttatgggaccaacggaaactgggcggctcccgagaggccctctcaagaaaatacaatgggggaaggggggcccacactgctatggaacaaagagagataagaaacttgacactaagaacagtggaaacagggaacccgggtgccaaaggctccacaagggccgggaagaaagacgcgcacatcgcgacagaccctgttaggaaccacgtcatcccagcgaaagggccccatatggaggggaaaaacccaatggtcgcgagggccaaatggggggtgaacattgaagaggaaagtttcttgcagaccttaagcaaaattggaaaacaagcaaacgacaaagagtgcctccttcctatccgtggcattttccctcttcttcaagtgaaagaaagagaagaa

SEQ ID NO: 586068 - DNA, 386 bp, Homo sapiens
aggcgtttacatgtttcctccacccacatttgggcttccactgatctgcccgagggcattcctggctgcaccacgcggcttttaccctcattgtaccatactgtattcagcactcactagaaacagggtataggtgatagtatccaccgcaatagcactacaggtaaatgatcaacaaaaccacccagaaacaaatccaatcccacaatctccaagttcgcctggactggaacttctcttgcaactctttcaaaataaatgacaacagcaacaacaaacagacctctagggtgtttaaaaagatgaagtggcgctgcagagctgggctctgctcaaagattgcagtgccatcttgtacacacccacctccattataaccggcttcc

SEQ ID NO: 586069 - DNA, 128 bp, Homo sapiens
actctagaggtatccccgcggaaggacttgatggaccacacaatctcgtcctgttctcgcgggacccacttaacgctccccaccgtcgtgtcgtgtgaatctatggcgtgcagatcaggtatccagtt

SEQ ID NO: 586070 - DNA, 536 bp, Homo sapiens
  misc_feature (444)..(444): n is a, c, g, or t
aaaacgcggcctttttcgactgggggacgattaagatagagagcccgggcatagaccagacgaggagcgggttccccggcgtggcaaggatgaagacagaggccctagacggggacctgaggaagatagggtctctcgacgaggggcagacgatgaccggccctcctggcgtaacacagatgatgacaggcctcccagacgaaatgccgatgaagacaggggaaactggcgtcatgcggatgatgacagaccacctagacgaggactggaagaggacagaggaagctggccaacagccgatgaggacagaggaccaagacgtggggatggatgatgaccgggggccgaggcgaggaggcgctgatgatgagcgacaacctgacgtaatgcagaagaagacccggggcccaggccagggatggacgaagaacggggacccaggcnaggcatggaagaagaccggagcccaaggcgaggcatggatgaagaccggggacccaagctagggaacggaggatgaccaggggcccaactaa

SEQ ID NO: 586071 - DNA, 597 bp, Homo sapiens
aaaggcgctgccaggagggcgctgaggggaagacgcgcatctcgaccgggtgggaggcggcgcggggcgggcagcgcggcgggtccctcgcgtctgtgcctggagcccgggctctcgcggacgccgtcgtgacctccgggacgccggggccggaggcgcgccctggggggacccgcactcctccggtgtctccacgggcgtggcaggcctccggccgcgtctcgggcgccgaagaggacggcgaggagcctcggcctgctcggcagcgaccccgcagggaggccggggcgggaggccgagcgtcggggcggcgtacctgggtgatggagtccccgaagagcaacaagcgaggcagagcagggcactcccgcagcccgcggtcctcgacacagtgcaatggatgcagccgggcggggcgtggcgggggcgccagacacgagaggcgcctgcgcaagtggccagccgtgggttgcgggagccgggtcgtgggcaaccccacggcagtcactttggtgacgcgcgaaggtccgttgcccccttggagtccgtttggaagaaggctcggctccgcgcttgttaccccaagcaaggtgcccc

SEQ ID NO: 586072 - DNA, 160 bp, Homo sapiens
agggagaagaaggcttatgcacaaggaggcactggcgaactctaaccaggctatgggcactagggggcgcactggggacctgggcagcggccttcacggaagagaaacggcgcctggcaaggggacggactgaggcttcaggagggcaggcgccctgttg

SEQ ID NO: 586073 - DNA, 392 bp, Homo sapiens
ggacttaaacttatacagtaaaagtatgggaatagtactaaatttagaatagtggttactctaggataacaaggagagaaggaaatggaatctcaggggccagtcgaggtggctcatgcctataatcccagcactttgggaggccaaggcgggaggatcgcttgagtccaggagatggagactaacctggggagcgtagtgagactgtctctacaaaaagaaaattaaaaattagccaggggtagtggtgcaagcctgtagtcccagcactcagcaggctgaggcaggtggactgctggagcccaggaattcaaggttgcggcgagctatgatcacaccactgcacctcagcctggatacagagggaaaccctgtctcaaaaaaactaagtt

SEQ ID NO: 586074 - DNA, 99 bp, Homo sapiens
ggatttgctggtgcagtacaactaggcttaatagggacatgtgtcatggctatgagggaaaaaaaacgttagaagcttgaattcgagcagtagtagtag

SEQ ID NO: 586075 - DNA, 989 bp, Homo sapiens
gccgtctccctcctgtcgctagtcctcctctctcagtcggaaccacagcggtgggtgccgggcgtggtgtccggtgggtgtggtggttgttgtctcaccgatggtgtccgtgccgttcagttgcccgtcatggtgacctggatccgttcggcgcccctgccggtgccccttgacgatcccgcgctgcgtaacacggagtggccggtgccgagtgaaagaagatccggccgagttcctttcttggcgcaacaagggagagctagattgctggtgaatcgaagaacgacaatggccttccgactatcctggacggcgacgcccccggtgctcaagaccgcacgtgaaaaacggcgtcgaggtcctgaatgctggttgggatcggtaggtcaatgaaagtggagtaataatgtgagccgaccgtaaccatgttcatgggctcctgatcatacgacgaggcatcgcaaccgttgattgttcccactgaaggtggtggcatacgaatacgttgcgtcatggagaccgtgtcccacacgaacatacccggatcagaaggggtaacagcacatgaacccgatgtgaaactgctttgttgcatgtccccctctggaatgcatcaccttgctccccgccaaaacaataacactcgaagaacatagtcaagttactgggaataagaacagactagccgaaccatgtagggacgcactcgtaggaataacaacctgtatcgtaaatttgatagatgataaaagcagaacgccacgaggcaagttgagtggccgaacgtgagtagtgcgctgggattagatgttaacatatttaactctcctaaagtctaactcagagcgatgcccaaaagaaggttcactcgaggaatagccgctacagtgcgatatttgccaacaaagaaagccactggagccttgcaatggaaaaacccgacacttgttacaatcactagcgtatggaaaaatccttaggacgtagta

SEQ ID NO: 586076 - DNA, 140 bp, Homo sapiens
aggagaggatatcatcagagcctgactctgaagtcagtcttgtgacttggtggttgctgtgtgaccttttacaaactcctttgcttttctcgagcatctgcttatccgctttcaaatgaagaacatagagattcaaaaga

SEQ ID NO: 586077 - DNA, 246 bp, Homo sapiens
gaggatctggcagctatcggtcatgaacataacatataccatcaatactcatccattataatcataatggctatagcagtaaaactaggaatagcccctttcacttctgagtccagaggttaccaaggcaccctctgtaatccgcgctgcttctttctcacatgacaaaaactcagccctatctcaatcatatacccgatctctccctcactaaacgtaagccttctcctcactctctcaatcttg

SEQ ID NO: 586078 - DNA, 848 bp, Homo sapiens
  misc_feature (210)..(210): n is a, c, g, or t
  misc_feature (830)..(830): n is a, c, g, or t
tttcccaagttcagcaatcagtgcagcgtggtgagtccagaatatgagaaaggatttacatgggtataatgtgaagtcagatattacagtgttgggatacagcatgtgaattagccagtgggcaggtcgctttccaggcacatgcatagaactcagatgctgttacagaaactgaaagcgtctctttatagcccatgtgatatcagtatnttccctcaaatcagaatccagaatgaaaaattcccagtcaggtgtagatctgggactggagaacgtgtgtggttccaggtgacttcacaccagtaaatagtgcccgattacacacaccatcctcaaaaatttctctctgccttccttaagctgggtcacagctcttgttgggcaacaaaggatcctgagaaagagaccatcagcaagcagtttatggtcccatgttttcttcaaacagatgaaagaagcaagcaggattcaatacttccaatgtggcctctgttataaaggccatcaatatatggctccaggggttaccttggattgagcaagaatgtgatttcctgatgaaaaagaatcattatggatctagggctgcaatcatttatgtctatatatggacactttctgcgttatttctgattcaggtacaataccgaatatctgaaactcggtgcgccgggcaatcattttaaacctcgtcaagggcacgtgaggcctgttgcgaggctagaaggacatgatacatcgagggaatggatacagggacctaatcaaaaggggcataaatgcgggggcaaaagaaactcatccttgaacaaagaacacaggggggttcncccattcaccctcctacc

SEQ ID NO: 586079 - DNA, 1049 bp, Homo sapiens
  misc_feature (41)..(41): n is a, c, g, or t
  misc_feature (44)..(44): n is a, c, g, or t
ggaggctgaggcaggagaatggcgtgaacccgggagcgggnttncagtgagcggagactgcgccactgcactccagcctgggcaacagagtgagactccgtcaaaaaaaaagctctcctccccagatttgtgaaccttgtgactgttcagtggacacctcacatattgctggtgggaaggtcacgtggagacagctgggcaaagccttggggcgttaaacacagagtcactcatgacccagcacttcctctcctatgcaccttgtacaccccagatcaatgaaacctacatccacacagaaacgtacacaaatctctcagcagcactgttcacagtagccaaaaactagaaaccacatgtccgtcagctgatgaatggagaataaaacgtgggaaatccacaccaggagagaaaaaggagtgaggcaccagcataggcaccccgtggatgaacccggaacctgacgctaactgaaggaaggctccggctatagggagtgtcccaggcacagccagagattgaagggtgccggggccgggagttggtgggggttggggctggggacacagtggccagtgtgtgggtttgttttggggatgatgaaaatgttcttaggttgtgtgtggtgatggctgctcacctctataaaccttttactaaaaaccatggactgggtggatacagtgtgtgaattctctcagtccagtgctttgtttgaaacaaggtggatgatgccaacatcactaaccgccagggagacgcaggccacggccacacccggctcactggagttgtgaggatggaaacaccagcccaccccactcagttcagacctcagcttagatgcaaagaatgtctgggatggggactggcagctgattagagatgcaaccactgaacctgtggactgtgttcaaacaaatgccagcagaacacaaaaggcgactgttacaggaggccgaggcaggtggatcacaaggtcaggagatagagaccatcattgctaacatggtgaaaccccgtctctactaaaaatacaaaaaaaaaaa

SEQ ID NO: 586080 - DNA, 1127 bp, Homo sapiens
  misc_feature (41)..(41): n is a, c, g, or t
  misc_feature (44)..(44): n is a, c, g, or t
ggaggctgaggcaggagaatggcgtgaacccgggagcgggnttncagtgagcggagactgcgccactgcactccagcctgggcaacagagtgagactccgtcaaaaaaaaagctctcctccccagatttgtgaaccttgtgactgttcagtggacacctcacatattgctggtgggaaggtcacgtggagacagctgggcaaagccttggggcgttaaacacagagtcactcatgacccagcacttcctctcctatgcaccttgtacaccccagatcaatgaaacctacatccacacagaaacgtacacaaatctctcagcagcactgttcacagtagccaaaaactagaaaccacatgtccgtcagctgatgaatggagaataaaacgtgggaaatccacaccaggagagaaaaaggagtgaggcaccagcataggcaccccgtggatgaacccggaacctgacgctaactgaaggaaggctccggctatagggagtgtcccaggcacagccagagattgaagggtgccggggccgggagttggtgggggttggggctggggacacagtggccagtgtgtgggtttgttttggggatgatgaaaatgttcttaggttgtgtgtggtgatggctgctcacctctataaaccttttactaaaaaccaaaaaaaaaaaattgaaaaaaaaaaaaaaaaaaaaaaaaaaaaaaattttttgggccccccggagcccccgggaaaaatctttactaaaaaccctctgccgtggggccgcacgcgggcccccccggtaggaggtttaaagcagcacgaggtggcccacacgacggtgtgcccaagggaagaaccgcggggaccgtagacactagggcgcgcgggagattttccccccactctatatataaaaaaaaaaacgcccccgcgggggggacaccaccgcagagattcgttctttcggggaacacacatctccccccagagtgaggagagatttcccaggggagggacaatttaagcggggcgacttctataccacaacgagcgggggagtctcccccaagggcgagaaattgcgcccgaatattatccagaattagagagcccccgcaggtggtacgggagaatga

SEQ ID NO: 586081 - DNA, 288 bp, Homo sapiens
tgatcttccgtgccccatgatctgaatgagaaatttaacagataacataaacaagaaacagaaattgtagaactgaagaattcaactaatgaaataaaagcaataattgaggtggtcatggtggctcatgcctgtaatcaatcccagcattttgggagaccaaggcgggaggatcgcttgaacccaggagtttgagatcagcctgggcaacatggtgagacccctgtctcttgaactgtgatcatgccactgcactccagtctgggcaacagagtgagaacctgtttc

SEQ ID NO: 586082 - DNA, 145 bp, Homo sapiens
tctagaggatccgatcctcctcctcctacccacagctgtgccagatctgcaaaagctgcatctgcagttggtctctaactcttcccagccatctcccggtattttttgggtaccttgattccttgactcttaataaggccaagcc

SEQ ID NO: 586083 - DNA, 205 bp, Homo sapiens
tcatcttgaacaaagaaaagggccaggtgtgatgtttcccctcctggccctcatcttgaacaaagaaaagggccaggtgtgatgtttcccctcctggacctcatcttgaacaaagaaagggccaggaggggaaaatacactgactaacctgtctggaggtagatggatctgtgaggctcttttgtccatctctacctgctcctga

SEQ ID NO: 586084 - DNA, 156 bp, Homo sapiens
taatcagctcttacctctacctcgcgggtcctgtagccccatgctaatttgaggctgaggtgggagaatggcgttaaccccaggaggtgcagcttgcagtgaactgagattgcaccactgcactccagcctgggcgacagagcgagactgcgtctc

SEQ ID NO: 586085 - DNA, 988 bp, Homo sapiens
  misc_feature (350)..(350): n is a, c, g, or t
gctctatcgtcatgctgatgatggcgtcttcggggggacgctgcaggtcacccaagacaagatgatctgcctgccttgtaagtgggtcaccaaggactcctgcaatgattcgttccggggctgggcagcccctggcccggagcccacctaccccaactccaccattctgccgacccctgacacgggccccacaggcatcaagtatgacctggaccggcaccagtacaactacgtggacgctgtgtgctatgagaaccgactgcactggtttgccaagtacttcccctacctggtgcttctgcacacgctcatcttcctggcctgcagcaacttctggttcaaattcccgngcaccagctcgaagctggagcactttgtgtctatcctgctgaagtgcttcgactcgccctggaccacgagggccctgtcggagacagtggtgtgatgtgatgatgctgaccccgaatgctctggccttatcacgtcaacgtattgaacttgtggtcctatgtgagcaagagaatgttcatctgactctgttcatgttgattggaccgattgtgatgtgccatcgctgttgcgccagtgcgttgcatgctgtgaccaatggtcagctgtgcagcttctgagggcatgtggttactctggttgtgatcctgcctcatgatgcacctgtgtgccctgtttgcctttgtgcacccactacgaaaaccgtgaatgctggggttgtgggaaccgcaccataaattggcctaacatgcgcacgcgctcgtctctggagcgaagcgtgtgacacgacatgttctctcctgttgacccctctaatattgcttggcggaatggcggacctgctgttgtggtggacccaaccttcattgattggcttaagcccccttggcgccaattccgattttaacctaagtttttggccctggggtggccgattggcaaacacccggaaatattttcccagaagtttccaacaaag

SEQ ID NO: 586086 - DNA, 625 bp, Homo sapiens
tattttttttcgccgtatcacgccggttccggggggaaacgcggtttcccggccctttacggcggtttaacgcccgcgcgccctgtgttttgttaataccgacccccctaatattggcgcgcttttcctttcctcccactcggaagagctcgatgcgcccccggaagtctcctgtgccgagggtaccggcgcccgccaatactttttggttttagccatacccttaataccgagtttactccctctgccggtgaccccgaacaataatccccccgggaatctgtgccccctttcgggcccgggtaattgtctttctcttaaggaaggtgctttattatacaatggcaaaaatggttaacacacaagtgcgtgccacatattcttcggcgatgtatatcaacccctcatccaataataatgtggttcgtgctcgttcaatccaccccccacctacccccgggctttataacaacaatggggagtgatattcactttctgaggctcttctaacatgattattgatgatctgagattatattatgtggcaaggagagcaccgtctttttttaaaaaaaacattccatttgggttttttaaaaaaaaaaccctttaacccccaaaaaaa

SEQ ID NO: 586087 - DNA, 749 bp, Homo sapiens
  misc_feature (19)..(19): n is a, c, g, or t
  misc_feature (70)..(70): n is a, c, g, or t
  misc_feature (109)..(109): n is a, c, g, or t
  misc_feature (119)..(119): n is a, c, g, or t
  misc_feature (130)..(130): n is a, c, g, or t
  misc_feature (133)..(133): n is a, c, g, or t
  misc_feature (149)..(149): n is a, c, g, or t
  misc_feature (178)..(178): n is a, c, g, or t
  misc_feature (187)..(187): n is a, c, g, or t
  misc_feature (195)..(195): n is a, c, g, or t
  misc_feature (201)..(201): n is a, c, g, or t
  misc_feature (204)..(204): n is a, c, g, or t
  misc_feature (217)..(217): n is a, c, g, or t
  misc_feature (219)..(219): n is a, c, g, or t
  misc_feature (221)..(221): n is a, c, g, or t
  misc_feature (225)..(225): n is a, c, g, or t
  misc_feature (227)..(228): n is a, c, g, or t
  misc_feature (235)..(235): n is a, c, g, or t
  misc_feature (237)..(237): n is a, c, g, or t
  misc_feature (242)..(242): n is a, c, g, or t
  misc_feature (249)..(249): n is a, c, g, or t
  misc_feature (257)..(257): n is a, c, g, or t
  misc_feature (263)..(267): n is a, c, g, or t
  misc_feature (269)..(269): n is a, c, g, or t
  misc_feature (281)..(282): n is a, c, g, or t
  misc_feature (284)..(284): n is a, c, g, or t
  misc_feature (290)..(290): n is a, c, g, or t
  misc_feature (292)..(292): n is a, c, g, or t
  misc_feature (313)..(313): n is a, c, g, or t
  misc_feature (323)..(323): n is a, c, g, or t
  misc_feature (327)..(328): n is a, c, g, or t
  misc_feature (330)..(331): n is a, c, g, or t
  misc_feature (334)..(334): n is a, c, g, or t
  misc_feature (338)..(338): n is a, c, g, or t
  misc_feature (353)..(353): n is a, c, g, or t
  misc_feature (362)..(363): n is a, c, g, or t
  misc_feature (365)..(365): n is a, c, g, or t
  misc_feature (379)..(379): n is a, c, g, or t
  misc_feature (381)..(381): n is a, c, g, or t
  misc_feature (383)..(383): n is a, c, g, or t
  misc_feature (389)..(390): n is a, c, g, or t
  misc_feature (435)..(436): n is a, c, g, or t
  misc_feature (465)..(465): n is a, c, g, or t
  misc_feature (476)..(476): n is a, c, g, or t
  misc_feature (488)..(488): n is a, c, g, or t
  misc_feature (503)..(503): n is a, c, g, or t
  misc_feature (508)..(508): n is a, c, g, or t
  misc_feature (510)..(510): n is a, c, g, or t
  misc_feature (588)..(588): n is a, c, g, or t
  misc_feature (743)..(743): n is a, c, g, or t
aacaaaaaaacaggctggntaccggtccggtaaatacccgggtaaataagaacatactatccatttaaanagcaaaaaaatcttaatgcaataaaaaaaatgtgtacanacattcatangcaatttaganaanagcagtaataacaaanaaggatgtacgaaaacgtcggcaggttcnaaaaaaacnagtaaaantaatanaanaggagtataaaanananaaananncaataananaattngtagaangtataaangtaaannnnnantttaaaggggcnnanaaaaancngagggaatgtaaataagtacntgtaaataantacnncnnggnggcntgtattgaggatttnattgaaaanncncgtatctacaaatntnanaatatnngtagcatccaccagtatataagcattaacatgtaggcagaaaaanngaacatgaatacagaagaagcagaaaggnggattgtaaanatgattagaaangcaagaatggatgcnaagantnaatctaaataaggtaatgtggttatgggtaacaatgcagtatcacccaataagcaagtaaataaaaagaccaaaagcntttactttagaagcaagaagtaggccatgaatatagagaagaaactaaatcagaatagcaggtcagaggctcctaactgggcaactcaagattctggcttctactgaagaaccataaagaaaagatgaaaaaaaaaactatcaaagaaagatganataata

SEQ ID NO: 586088 - DNA, 619 bp, Homo sapiens
  misc_feature (350)..(350): n is a, c, g, or t
gctctatcgtcatgctgatgatggcgtcttcggggggacgctgcaggtcacccaagacaagatgatctgcctgccttgtaagtgggtcaccaaggactcctgcaatgattcgttccggggctgggcagcccctggcccggagcccacctaccccaactccaccattctgccgacccctgacacgggccccacaggcatcaagtatgacctggaccggcaccagtacaactacgtggacgctgtgtgctatgagaaccgactgcactggtttgccaagtacttcccctacctggtgcttctgcacacgctcatcttcctggcctgcagcaacttctggttcaaattcccgngcaccagctcgaagctggagcactttgtgtctatcctgctgaagtgcttcgactcgccctggaccacgagggccctgtcggagacagtggtggaggagagcgagcccgagccggccttcagcaagatgaatgggtccatggacaaaaagtcatcgaccgtcagtgaggacgtggaggccaccgtgcccatgctgcagcggaccaagtcacggatcgagcagggtatcgtggaccgctcagagacgggcgtgctggacaagaaggagggg

SEQ ID NO: 586089 - DNA, 1958 bp, Homo sapiens
cgatctgaatccacacagagtctgaggtatcttggaaaccctctccttccctcttggatgtgtggactgtcagacattgtgaagaggagaagaggaagaggaaagacgctgcccccagtatgcagacagagagcaccccgttccagagaggccagcgctccaggagtgacagctgctaatgcccttcttccttcagtctccctgccccagctaccctctccctccctcctctccctccttccctttcttcccgcagcaaaacacacggagcccagtgatctgcaggcacagtgccgggccctagcgctccatgggcacaagtgacagctgtggccgaggtcggggagggtgctggactggaagccttgggaggctctgagcacacaggatttggggctgatactattgagggtcagaggctgctggactgggttgtaaagcatctgaggctttgaagaccatttggataattgggtgttgcaggctcagggtgagtttggggcttcctggagactttggggtacagagtagccccttcccaggccggctctctgcctgcctttggacctgggatgtttctgctgggaagcaagtggactggtgccttggagaggatgcctgtggggaggggctggactgctcacagggcctcctgatcctcgtttctcagtgtcactgatgttcaattctgaaagttctgcctttagagttatctcaacagcccaatgtgcctccttcctggcatggttgtccaggggcagacacccttctggggttggcctgtttgggagaagcctgagatctgcagagaagtctgccaggcggcctgggactaaaagctgcagaaggtggggcatgaggaagcagtgggcaggcagaaggagtgggcaggtggtctgctgctgcctcggggatgcagcttgagctggactttctgcctggctccgtcttgtcaccgagttcgcagcataaacgtcatccctcagagacgctgactcgatctctaataaaagctatcagcctgtccccctttactacgagacccctcttagctctgcagagcatccatcacagttaggcatttttgcctttttttccatccacccacgcttcccaccccaccaggacgtgagcttggacttcatcttgtcatcccagcagcaaggagtcgattttgcaggatggatggaaaacacagagaggaccagctgtttcatttctaggcacctcacttctaacctggaaccggttccgagaggaaggaccaggaagacccatgtgtcgggaatggtggacagaaggagtgtgctcagctgccgccgagaagaccacacgctgggtgctgaaaagagggggggacctgctaggaaccatggccctgggctaagtcggggatgaaggcgggagctgctgtgctggactgcagctcagcacagagacagtgagcctagattgcagagctgcccagggagggatgtcaccttgggggatggaggctgcaggtgctcctcagaccttagggaaacatttgggagggagcttgttgaggagatacaggcacctcagggtggctgggctggatggactttgatgacccttccttttttgagacctgatggttctctaatttgggaatcatttccaaagatgggtctaaaaatccttgtttcattggaaataatgagtttgctatgatgcttaagaccaagcatgtcaccatttgttattactgcacttttccctgccgttttcctttccttttatttttaatggatgatgttaggttgcaatgacattttgtttctatataaatatttaaaggtcttcataaacatataaatgtcttcatacatttttgtttgcttctagaacaatgtgtatcctactattgtatttttgctacagtatatgaacgtggaggtgtgcataagacagtaaaacactattcaccaaaagat

SEQ ID NO: 586090 - DNA, 632 bp, Homo sapiens
tacactgctcagcaacctagaagataccaagaagaagaaggaggatgccctaaatgagaccaggaatcagagacaaagctgaaggagctcccaggagatgtgcaatgatgatcatgcatggctctctgggaagagtgtgagccctgcctgtaaacagactgctgaagttactacgcacgcgtctggcgtaagtgggtcttagtgcctggttggctgccagcttgaggagttcctgaagcagagctctgcccttctacttctggatgaatggtgagcgcatcagactccctgctggagaacgatcggcagcagacgcacatgctggatgtcatgcaggaccagttcagccgcgcgtccaagcatcatagacgagctcttccaggaccaggttcttcacccgggagccccaggataacctaccaatacctgacccttcatgaactgcacgcaccggaggtccacaattcttctgtcccaagattctgaatcgtccgcaggttgcatgccctatctcatcggtacgagccacctgaacttgcaggcatgttgtgagcacctttcccttgagatgatacacgatggctacaggaagtgacatgtaaatacaacattacaaaagaaccgtacaataa

SEQ ID NO: 586091 - DNA, 233 bp, Homo sapiens
gtaggtctacaagacgctacttcccctatcatagaaagagcttatcacctttcatgatcacgccctcaataatcatttaccttaatctgctacctatgtcctgtaatgcccttattcctaaaacctcacaacacaaactatactattactaacaatctcagcacgctcatggaaatagaaacctgtctgaactattcctgcccgccaatcatacctatgtcctcatctgccct

SEQ ID NO: 586092 - DNA, 746 bp, Homo sapiens
ccgatggcgcatgcctgaattaggagagattggacataatctagcaattaccggcatcaagatggactgcttggtcaaggacatgatgagcaagatactcttggagctctgtagctggtcactgactaagaaggaattagcgaccattgctagcattatagaagactctataaaacttgcgcgactattgatactgcgagagcagacatagacacgagtctttaggttgaatgagatcataatatcacgttgatagaggcgtcaacagtgtacacgtgctactaggtgacaaaggatgagagaggagttcgtatactttgctagagatgaacatggtcatggtgtactattgttttggacgcaaagacatcttcagattacatgagtcgccgttcctcacatgaggacatttgagcgtagtcaggacctcatctgtatctgtagatgtacggaattaagaatgtaataaatagtagtagactattcgtttctacaattagggcttacaatagctaatcatagctgtcatgctacaggagcttcaggattgaccttatcgactactagggaagtgatcatgaagtttaaatatgtcatggtcatactaggaagacttgccaataagtctactttacaccctaggttttgtctagcaactcgatgacatcagtgtcgactactaggttgatgaacgacattcttttagaccgcaaccaagggcctcgtcagttgcggaccacaagctc

SEQ ID NO: 586093 - DNA, 681 bp, Homo sapiens
tcggatccgagcgcggggaggcagaccgactgtgaggctgcttgtccccatcctgcggcgtcctggggacacagagccctccgtggtgcccggggatggattggagccaggactcacttcctcctctgtcccctgcccctggcccctcccagcacctggagcacacgctgcaggccgcccgcatggtctggcgcctgggtggcgatgtgcgtccagagtgggggtcccctacatatggcctgagagtccagatgctgcacatatggacgtccatggaggagcagtcacttactgaatggacgcggtctgcgacggacatgcacaaccaacatcgatcacacgacgaagagagagatagccaaaacaggagaggagtaatagcgatcctgccccccagaaacaacatgaagcggggtcgcaagctgggcagatggacggaacacccaacaaactccgcgggactagaccaaccaaaggagcgaacatcacattaggccaaagggacaccatgagagatgcacaatataggaaagcacgggaacagcaggaacggacaagaagagaagacagaaccagagaagggaaaagccggcagggagcaacacaaaaagcacaaacagggagactgaagaaacaaacaggaaccgggaaacgaatacaaagaaccaacgggaacaatgc

SEQ ID NO: 586094 - DNA, 930 bp, Homo sapiens
tgcgttgtgtgtgggtgagcgtgattactcctgtgcgttacatctgtttgttccttgctgttgtgtgcctctctctgcgtccttggaccccgtgtttacccataggttcccccttccgtcgctctttgtgggacccccatttttttcaccctataggttcgttccgcccgcacatatccggggttcccccttccccgcgaactcggggcccccgcgcgccacgcaaagtggctttcaatctgccccttcttgtgtcttctccgcgacagctgtggccaacgccgcatgcggcgtgcccgggacacccttggttacaggtggcttttacgtgtcctgtgcgccctcgggcattccccgtcctcccccccgacggggtgttcacccgggcagccgcctcggtcttttctaattacgggcctgcccgccccaacatgctcgggtagcttctcgccccggccctgtccctttccgttagatatcttttttattgatcgcggtgtgaacagtccgtcaaaaacccacaaggggtgggcaaccatctttagaaatgcgttgccgtggcccccgctggcctccccagagaggttttgtcgcaccaccgggcaggctctcctcgccactcttccagccaacatattaatcaatcttcacgccggtcacggcgaagtaacaagacttgccctctctctggtacgaaaaaatcggggggtgagaacaataggaggggtgtggtcccgccctctacatattcttaggtcagacccgcacctgtggccgccacagtgtccgcactccccgagcccatatcgccgctttttacagcagcatgccccctttgtttttgtctccaacgaggtgtttaacgagtacgaaaacgccccctcttttttaaaaaagccaaaacaaaagagtttaacaacccacaaaaca

SEQ ID NO: 586095 - DNA, 164 bp, Homo sapiens
gaaatcagtggtgaccggatggcaaaatgcattgatccaagctgatagctcctgtgtctggggaaccacacccagcgacccgaatgttaactggatctggagaccgtgcgttgtacaggtggcctcttgttgacactgtacatgcagatatgtcttcggacaga

SEQ ID NO: 586096 - DNA, 205 bp, Homo sapiens
ccggttggggaggggggttggcccccccccccacccaaaaaaggctttttccttttcccggggtaattgggggggggggggggaagccccccccccccgggttttttcggttgcccggggggttttggggggggcccccttttttttttttcccgggcccccgggtgggattttaggcccccccccttccttggggcccccccca

SEQ ID NO: 586097 - DNA, 469 bp, Homo sapiens
  misc_feature (218)..(218): n is a, c, g, or t
  misc_feature (382)..(382): n is a, c, g, or t
gttatcccgattttactaatgaggaaactgaggttcagtggcaataaccaataaggagaaggtgctaaggagagtgtcctaaggcaggccctctaattccatgtctcctgacctgtccgccacctcctaggccttctctaggctttgccgtctctgcatgcccctgcctaggctgagtctccaatgtctgttccagctctgccaacagctggctgcantggccttagctacatcccacgttctctctgggcctcagtttcttcatttgcaaatggtgatattaggttgatgcaaaagtaattgtgggtttttgcccattaaagtaggggcaaaaaccgcaattacttttgcatcaacctatatatctatataggtgccctcntatcaactgatgggaagaatcaaatggctttgcagattctgacatgctctaccaattcttgggggctgccaggtattaccttcacaa

SEQ ID NO: 586098 - DNA, 401 bp, Homo sapiens
  misc_feature (401)..(401): n is a, c, g, or t
ctcgtgtgcacatggagtcaatggggctcttctactcgagtgcacgatacattctgctatcctagtcatgtcctttacccgcattgattacgacaagggcgtgaacacctgtctttccgaaggaagagcatatgaaggctaatatgccattgaggctatcaagcttgaatctacagccaaggcgattgacacatcagaggcattacgagtacttgacatgaggagactaactttctgactgcctgaaccgagaagcattgagacaatcgtataccatgatgatgacatatgttgagcacttagactgctcaatgctgaagctgataatttactagtctgagcccgagtgcagacacagccactgacttaccgacattgggacacagacagtggacgtgccn

SEQ ID NO: 586099 - DNA, 339 bp, Homo sapiens
  misc_feature (188)..(188): n is a, c, g, or t
  misc_feature (197)..(197): n is a, c, g, or t
  misc_feature (256)..(256): n is a, c, g, or t
  misc_feature (308)..(308): n is a, c, g, or t
ggtgaagtcaagatgaagaaccatttgcttttctggggagtcctggcggtttttattaaggctgttcatgtgaaagcccaagaaggtgaaaggattgttcttgttgacaacaaatgtaaggttgccccgattacttccaggatcatccgttctttccgaagatcctaatgaggacattgtggagaganacatacgcnattattgttcctctgtaacaacagggagaatatctctgatcccacctcaccatttaganccagattttgtgtaccatttgtcttaccctgtaaaaaatgttatcctacagnaggggggctggagtatcagaagtttctgtta

SEQ ID NO: 586100 - DNA, 544 bp, Homo sapiens
  misc_feature (277)..(277): n is a, c, g, or t
  misc_feature (338)..(338): n is a, c, g, or t
  misc_feature (426)..(426): n is a, c, g, or t
ggatatgatttagggcaagttgcttgacgctctttgggcctctgttttcacgtctgtatgatagaggtggtattgtttgacttgtatttgtgaagtttcaatgagattgataattgtcgattttatgttaatccctagtacatggcctgctgtcaacacccaggacacccaggatatggtctttgctgtttgattttcctcatccccagtctcaaggggaagccaggacaatgagaacagccacttcccatcaggagtcactgcaaggcccccaggntgggatggtggggagataagaaccgtgagagaagttggcacaaaggagttatgggacaaanggtccaagataggcagaaaagaaaatgttgccagttgatggggaagaaaggaagtcggagggctcagacactgagggggacagaacanctccatgtgcagtctcatctcttatagtcagcaacaggtatacacggggagggccctacatcatctgctacccttaatgatctggaggtcggaagctctgagcggaggttcagttaac

SEQ ID NO: 586101 - DNA, 259 bp, Homo sapiens
  misc_feature (20)..(20): n is a, c, g, or t
  misc_feature (28)..(28): n is a, c, g, or t
  misc_feature (31)..(31): n is a, c, g, or t
  misc_feature (40)..(41): n is a, c, g, or t
  misc_feature (46)..(46): n is a, c, g, or t
  misc_feature (65)..(65): n is a, c, g, or t
  misc_feature (86)..(86): n is a, c, g, or t
  misc_feature (91)..(91): n is a, c, g, or t
  misc_feature (106)..(106): n is a, c, g, or t
  misc_feature (108)..(108): n is a, c, g, or t
  misc_feature (111)..(111): n is a, c, g, or t
  misc_feature (123)..(123): n is a, c, g, or t
  misc_feature (128)..(128): n is a, c, g, or t
  misc_feature (136)..(136): n is a, c, g, or t
  misc_feature (150)..(150): n is a, c, g, or t
  misc_feature (177)..(178): n is a, c, g, or t
  misc_feature (190)..(190): n is a, c, g, or t
  misc_feature (202)..(202): n is a, c, g, or t
  misc_feature (217)..(217): n is a, c, g, or t
  misc_feature (242)..(243): n is a, c, g, or t
  misc_feature (249)..(249): n is a, c, g, or t
ttttccagccctagctcttntttagttnagntaagtacannacagntcttttcacaagtgttttnttttagcagcagcagtagagncttanttgagcccatagtgngncanctagcagagctnatagncagcatantaagtagtgggagncccagctttttttcctctcccacaaannccaggtagtgangttatattaccngttacagcaaaagantttgtgtttcacaagcaacaataanngtagantctttatact

SEQ ID NO: 586102 - DNA, 422 bp, Homo sapiens
  misc_feature (57)..(57): n is a, c, g, or t
cctgcgacagagatgggcttgaaccagaaggagcagccggctttctttttttcctgncgattggggagcagctcactgaacggctgttgttctctccaccagcacggccacaaagtcaggccagggggttgcaaatgtgggtactttccgtgagaactcataagggtagttgggatttcctgatctgatgaagtgggaaaagtactgcatgattttcagcgacaggctcttctcctccagagaaaactgcccctcgtaggctgggtagaagggaagccccaaggcaaactgaacatccgccagcagctccaggctgccatggccgtagttttcaggagcatggtacatgaagacgtttcctcgggccctctttgcccaggcactggccatgtcgattatagggcagatgataaagtagtccc

SEQ ID NO: 586103 - DNA, 1216 bp, Homo sapiens
tgccccgacccgccctccacctgtctgtggttggttattaatccgctcttgttgaccaccccgagctgtgtgttcgccccgcctttgtttatgatatactatatcatactatatataaaaagtgggttagaaagccgcctggggggcccacggccttaatgttatgggagtactatgcgccacccccattatgatgtgggtgtcgcccacacagtgttgtttgtgaagtcttttatgatatctaatatatgtggcgccctttacactcttgtgttttttctaaagatggatgattatatattcttttggtttaatgaggtttagatcgtcccaccaacgcccacggcggtgttgtttttaggaagaaagtttgagagaaaattggtgtttggtatgaacccaacgtgtgtttccaccccccacggttggggttttggggggagtatttccctctggggtccactttataaaggggcttgtgtgtggttaaattttttatagaaggtccccccgctgtggggctttttttttttcttcctgagaccttgagcacacctcgtgggtgttctcacacatatggttatggtataaagagattggcctatattgggcggcgcacatgtttatttagcgccccgtctggcgcacaaaaaaggtccctccacgtttgctagaccagcacacatgggttatacaccgctctctatgcctgagatataatccacacacacacctcataactcgggggagatttttatatttatataaaggggcgttctatagagaaaaacagcgagagtttatattcaccacccacgcactcacttcttataactaaccactctctcgaaactaagttaagtggcacgctttttcactttgtggttgttgtgggttgggttcttcacaaaactaaggttggaagtttttctcctctgctgagggagaaccacgtatccgaaagttcttttttcttgtggcacatttgtaattaatataaaaacttggtgtgggggagaggaggcacccaaaactccacgcccacctgaacctctgcccacttaagatggtgttgggttaggttacactctgggtactgtcctggggaaatcactttttaattgagatggccttcccagtggttttaaaatttactgaagtttttaggtccattatgtatgttgactaaatttaccaaataaacttgtttatccca

SEQ ID NO: 586104 - DNA, 1034 bp, Homo sapiens
ttgctcttttctgttcttcctgtgttcgtgtctccctctcttcgttattttcttccttcttcgtgtttcctctcgtctgcttggctgtcgtcttttgttttgtgcatctcctcccacggtgttcggctgtgttgctgtgcagtccgctttgtgtctcttcgccttcgtcaccctcgcctgtactttgttctgtgccccagtgccagttgcgcgggggcacgtgcaccttgacttgggtccggggttcctggttcacccccatcccagtgccttggctgggcttcgttcgccagttcggtgccgcgatgggtcgtgtcatagggcatttcctgtctcggcgtgggcgtggtctgacctggaagcgcggccggtgtgggtttcatttccctttgcccggccccgcttcactcctggtcgtcggccgtcaggcctgcgcctaccttggcacctcccagccgtgcgcagtcccatccctttgtgtcggcctctcgtgagctctcccgcggccacccagcaggtggcggacttccagaggcatgggaggaggcgttgctctgacaagttaatgtgctctacatgactcggatccagtaggaacgatttggctctacccaggagtacgaagcttgctttggtcagcctcatcctcactccccacatcatgacccgggccacagaagaatatggtggtgattgcacccgatgcccccgtgtcaacgacgataagcgtggaagtggatctcggatccccgcgcagcctacttccgaccaggctgagatcggctatgtacatccgcactggctctgttagccaccgtgctgggccgtctctagcggctctggcttcctcagcctcttctctttaggccctgctgactgggccaaggaatgcccgtggtcctcctatcgggggcagcacacttagatattcctggacatccagatagctcacatgtgctgtaccacaccattcaggctcgtggacctggagctctctggcatgggggtggggcctcagatgctgggcccagtcg

SEQ ID NO: 586105 - DNA, 411 bp, Homo sapiens
ccccctggggcccccccccttttcaagggggttttcaaggggccgtttccccccccgttcttttgggggggccctaaaaggaaagaaagggtttttccccccaggccaaaggtccttttggggggggggggtggccccggccaaaattaaggatgggccggggtttcttttaaaacccccccaaaattgttcccccccccttttttggggtcccggaggcccctataacattttgtggggggggggtggtggcccccacttttttgggcctttggggttccccttcccaataaaccggtagggcccttcgggccgggggttgatttttcccggttttgtttggcccctgttttgccccccctcccgcttgggggcaggagggcgggggcccattaaatttttttggcttga

SEQ ID NO: 586106 - DNA, 387 bp, Homo sapiens
  misc_feature (308)..(308): n is a, c, g, or t
  misc_feature (311)..(311): n is a, c, g, or t
cgccagcacagcagcgggatgtcttttgatttgcttctgttatttgcatgtctctcttgtgatgtctgtgaaatgtttagaatgacaaagtttttaaaagacctgctgactccgcctgaaaaatgtgaaaaacctcccatttagagacctattatgtccagctagcctgcattttctatatctttttctttattttttattaatgcaaacatttgcatgaagacagaacctttgtttcttaaagagttcatctgctcctgctgcttactgccctgccatgcaagagcacaacagaacctttgttaggnttnagcaaagctgtttatgaacggtggcttactgaggactgcttcctgtgctgtgtgcttccattttgtctaaaaagga

SEQ ID NO: 586107 - DNA, 1308 bp, Homo sapiens
  misc_feature (635)..(635): n is a, c, g, or t
cagctacttgggaggcaaagtgggaggattgcttgagcctgagagattgaggcttcagtgcagtttgagccactgcacacactccagcctgggtgacagtgagaccctgtcttaaaaaaataagagtatgacatgagcatgtgagagcaaaagaaaacaaggaagtctgcgaccatgaagcgaatgcttagtctctgatatcacaggcttaaagaaaatgataaagacctaaaaagaaaagaaatatcccagcatgctgaaggaaagaaaagttccccaatacccttcctgcttatttttccaatatattacacagctgggtccaccttaccacgtcctgtttgattccagcgttaccaacttttctattggagccaaataagacatactgcaatcagtgatgaactgtctatatgccaagtgtatcccttgtgtaactgtgtaatggctgaaactgagaaattggggcgaagtatcaagtggcttaaaggattgccaaggatccaaaatttgaacgattaccaaattaccacgcacaggaaggaatctatgcagatgactgcttagcacagagagttactcagcataagtgttgtagccacgaacctgggaccttaaaagaagaatcctaagantcttggagttctatcatgtacatttctaaccatagatacaacatgggaactgatgtcagatgattatggagccccttggttctaattcttgcccaagttcctctgcctttcttccaccaactttctcttgttgccagttcattaaacatggaatagaatgttattctgttcaattcatttgccctgttatcagctgaatatggttaaacacactcaatttttcatgctgttttgaaattgatattttgttgcatttaaaaaatttaaatgatggtcaaagggtacaaaatctccgacaggaagaatccattttataatttttttgaggtctgttgcacagtgtggtgaatatagttagtagagtattatacatttcaaaattgctaagagtaaatttcaaatgttctcactacaaaatgctaagtatttgaagtgatggatatgttaactagctcgatttaattattctacattgtatccacagattatgacatcattttgtaacccataaatttatacaattataaattgtcatttacagtaagaaataatttgttgcatctttttagaaaaataaaataattttttacatctgtgtacgtcacggttacaaaacattttttcatttttacataattccctcacaaaaagggggggcaaatcccgaggccgt

SEQ ID NO: 586108 - DNA, 658 bp, Homo sapiens
gccgaataggaacagctccggtctacagctcccagcgtgagcgacgcagaagacgggtgatttctgcatttccatctgagaccagtgaccttttctatttcatagtaaacaaacttcagtgagtactgtgccggagtctagggatagcgaagtgcacatacaaaaatcaagagccaaagggttgatgacggcgtggtggcatgcatgtgaaaattatacagacccatagttactggatgtcagaagaaaaccagaacaccgagtcatcacgcctgaacacccattggggcaagctaacgaattcacagaaggcctttattcctgggagtataccaaatacctggcttacgcagccactttttcatattgacgatactttctgtgtcttttcacgaccaggggacacatcctcggactcgggggaatcccaacacacaggttgtgactacttaagccgtggactaatgtgtccttcttcatacaaagagcgtgtccttccccaatcattcactttgggtaggcccagtattttgtgaacaccaatgtggggtgaagggggcctttcagcctttccattttccaagcctggctaaaggtccccgtgccccaaagcaaggttcttgttggtaacccacgcaacattataccaattccttca

SEQ ID NO: 586109 - DNA, 284 bp, Homo sapiens
cccgtacggtgggatatgcaggcacccacagttagcagaggggtcaggctcgctgacagcaatggaacaagaaaaaggccatggaggacctaactgggataacaaacaggaagggaggacagaggtggcactgcacccccaacaagcctgctgctgcccacgccacatggatcagtgaaccacggcccgaagggaacccagagccacactaactgctcagcgtttgaagtgcagtagttcagatgggctctaagcatgaaagactcaccaggtttcaaatctta

SEQ ID NO: 586110 - DNA, 630 bp, Homo sapiens
  misc_feature (18)..(18): n is a, c, g, or t
  misc_feature (104)..(104): n is a, c, g, or t
  misc_feature (130)..(130): n is a, c, g, or t
  misc_feature (151)..(152): n is a, c, g, or t
  misc_feature (156)..(156): n is a, c, g, or t
  misc_feature (178)..(178): n is a, c, g, or t
  misc_feature (194)..(194): n is a, c, g, or t
  misc_feature (201)..(201): n is a, c, g, or t
  misc_feature (203)..(204): n is a, c, g, or t
  misc_feature (206)..(206): n is a, c, g, or t
  misc_feature (208)..(210): n is a, c, g, or t
  misc_feature (283)..(283): n is a, c, g, or t
  misc_feature (335)..(335): n is a, c, g, or t
  misc_feature (344)..(344): n is a, c, g, or t
  misc_feature (347)..(347): n is a, c, g, or t
  misc_feature (353)..(353): n is a, c, g, or t
  misc_feature (414)..(414): n is a, c, g, or t
  misc_feature (437)..(437): n is a, c, g, or t
  misc_feature (459)..(459): n is a, c, g, or t
  misc_feature (565)..(565): n is a, c, g, or t
  misc_feature (583)..(583): n is a, c, g, or t
acctagcgagctgctgtncaaagagtccctatgctattaacaagtgggaattacatcatttaaaaagcctgattattccaggcttctgaatctttcgatataanactgcctttgttttgctgctttgttnaactgagaggcccaggaaagnngggngggtccctgattagggtcaggnggccacctcagaagcncaggccnannantnnncaagcacatgtcagggctcagaacaaggccttaaccaagaggcgttgatggcctccagtcaagaaactgtggntcatggtagtagagctctctcttcttccagcaggcgccatgcaagggcaggntaaaagacntcnagtgtntcaacatccatctatgagagagaaaaggggcactgaagcagctatgtctgccaggggctangggctccttccagacagcaatgntacaataaaggacacagaaatnggggaggtgggggagccctatttttataacaaagtcaaacagatctgtgcgttcattcccccagacacacaagtagaaaaaaaccaatgctgtggtttctgccaanatggaatattcctcctcntagttccacacatggcgtttgcaatgctcgaaaagcattgcactggg

SEQ ID NO: 586111 - DNA, 350 bp, Homo sapiens
  misc_feature (16)..(16): n is a, c, g, or t
catagaggatccccgntctagacgctgaactatgtgctatgcttttcatctgccttccatacaacagtgcaagacaaaccccagctccccgaccctgaaattttacaatttctagtttttcacacagttataaggctttactgtaatcatataaaatgtgtagtccccagtctaacaaagtgacctcctatagggacactttaagagagacaacagaagtacacgggagaataactactcagttgcacaaactcttacaatcacgtggcactagtaagaaaccatgttcttagcaaaatcaagcttttcttcaggctgagtgtgtgcacacacatagttcagcgtctgac

SEQ ID NO: 586112 - DNA, 1157 bp, Homo sapiens
  misc_feature (635)..(635): n is a, c, g, or t
cagctacttgggaggcaaagtgggaggattgcttgagcctgagagattgaggcttcagtgcagtttgagccactgcacacactccagcctgggtgacagtgagaccctgtcttaaaaaaataagagtatgacatgagcatgtgagagcaaaagaaaacaaggaagtctgcgaccatgaagcgaatgcttagtctctgatatcacaggcttaaagaaaatgataaagacctaaaaagaaaagaaatatcccagcatgctgaaggaaagaaaagttccccaatacccttcctgcttatttttccaatatattacacagctgggtccaccttaccacgtcctgtttgattccagcgttaccaacttttctattggagccaaataagacatactgcaatcagtgatgaactgtctatatgccaagtgtatcccttgtgtaactgtgtaatggctgaaactgagaaattggggcgaagtatcaagtggcttaaaggattgccaaggatccaaaatttgaacgattaccaaattaccacgcacaggaaggaatctatgcagatgactgcttagcacagagagttactcagcataagtgttgtagccacgaacctgggaccttaaaagaagaatcctaagantcttggagttctatcatgtacatttctaaccatagatacaacatgggaactgatgtcagatgattatggagccccttggttctaattcttgcccaagttcctctgcctttcttccaccaactttctcttgttgccagttcattaaacatggaatagaatgttattctgttcaattcatttgccctgttatcagctgaatatggttaaacacactcaatttaaggcgcgttaaaattggattttgtggctttaaaaaattaatgtagggcagaggtcccaaaattcgcacggaaaatctctttatactttttagaggtgttgacaagtggggaaataagtgggtaggttatccctcaaaaatgctatagtaaattcaaaggtctacttcaaaagtaggatttgaagggatggtttctaactagctcgcttattatttaactggttccacgatttgcatcattggaaccaaaattatccaatttaaaggctttcacgagaataattgtggtctttttaaaaaaa

SEQ ID NO: 586113 - DNA, 274 bp, Homo sapiens
  misc_feature (238)..(238): n is a, c, g, or t
  misc_feature (248)..(248): n is a, c, g, or t
atgcctgcagccaccgtgcagacccccatcaagcctggaagaggctgcaccctgtcctcaggacctcacagtgtgagtggggtctcctctgtccctgacccctcgctgttctcaggacttcacagtgtgggtggggtctcccctgtccctgacctctcactgtcagcaagtccttgcaatatcaggtgaggccttttgtgtcacttgaccattccttgtccactggaacttcaaaacnaacatgatanacaagtagtaaggatttaggaacttt

SEQ ID NO: 586114 - DNA, 1255 bp, Homo sapiens
cagctacttgggaggcaaagtgggaggattgcttgagcctgagagattgaggcttcagtgcagtttgagccactgcacacactccagcctgggtgacagtgagaccctgtcttaaaaaaataagagtatgacatgagcatgtgagagcaaaagaaaacaaggaagtctgcgaccatgaagcgaatgcttagtctctgatatcacaggcttaaagaaaatgataaagacctaaaaagaaaagaaatatcccagcatgctgaaggaaagaaaagttccccaatacccttcctgcttatttttccaatatattacacagctgggtccaccttaccacgtcctgtttgattccagcgttaccaacttttctattggagccaaataagacatactgcaatcagtgatgaactgtctatatgccaagtgtatcccttgtgtaactgtgtaatggctgaaactgagaaattggggcgaagtatcaagtggcttaaaggattgccaaggatccaaaatttgaacgattaccaaattaccacgcacaggaaggaatctatgcagatgactgcttagcacagagagttactcagcataagtgttgtagccacgaacctgggaccttgatacaacatgggaactgatgtcagatgattatggagccccttggttctaattcttgcccaagttcctctgcctttcttccaccaactttctcttgttgccagttcattaaacatggaatagaatgttattctgttcaattcatttgccctgttatcagctgaatatggttaaacacactcaatttttcatgctgttttgaaattgatattttgttgcatttaaaaaatttaaatgatggtcaaagggtacaaaatctccgacaggaagaatccattttataatttttttgaggtctgttgcacagtgtggtgaatatagttagtagagtattatacatttcaaaattgctaagagtaaatttcaaatgttctcactacaaaatgctaagtatttgaagtgatggatatgttaactagctcgatttaattattctacattgtatccacagattatgacatcattttgtaacccataaatttatacaattataaattgtcatttacagtaagaaataatttgttgcatctttttagaaaaataaaataattttttacatctgtgtacgtcacggttacaaaacattttttcatttttacataattccctcacaaaaagggggggcaaatcccgaggccgt

SEQ ID NO: 586115 - DNA, 339 bp, Homo sapiens
atatcatggcgttattttatcttattagaagttagtattttgttatactaacttggatgcaaaggtttagtttcctttaacaatacactatgtgataggtttatgctaggtgttgaccagaaaataaatcatggtacttgctctcaaaagaacttgagccctgacatggtggtggctcatgcctgtaatcccagcactttgggaggccaaggcgggcggattacttgaggtcaggagttcgaaaccagcctggacaacatggtgaaacccccatctctactaaaaatacaaaaattagccgggcgtagtgacacatgtctataatcccagctatttggg

SEQ ID NO: 586116 - DNA, 132 bp, Homo sapiens
ctgtgctgtaattataatacgagtggcggcttcactcgggagtcctactcgatggtacaacgtcaaggagtcgcaggtcgcctggtactaagaataatgggggaagtaagtaggagttgaagattagcccga

SEQ ID NO: 586117 - DNA, 190 bp, Homo sapiens
catgcatcaccacgcctggctagtctttgtatttttagtaaagatggcgtttctccatgttggccaggctagtttcaaactcctggcctcaagtgatctgcttgccttgactcccaaagtgctgggattacaggcgtgagccactgcgcccagcctccaccaaaccatccttgaaaaatcccagctattc

SEQ ID NO: 586118 - DNA, 190 bp, Homo sapiens
  misc_feature (118)..(118): n is a, c, g, or t
tcgtactgtggtgtaccgtgtcttttttccataacgatctctgcacaatcactgggtcctgtaacttgacccccacactttccctaaactgtggaaccttcctttcatagtccttgcnacaggttcccaccatagaccctcaccacagagtcccaccatgaccctacgtaagactcacttttcctggcag

SEQ ID NO: 586119 - DNA, 113 bp, Homo sapiens
cactgttgctctgtggagacatgggtgtacctctaaacgcactgcgttgtaagcaaaggaatgacctgatttaatctgatcttttaaaagtcattctaggccaggccgagtgg

SEQ ID NO: 586120 - DNA, 106 bp, Homo sapiens
ggatctactgcgcagaagaagttggtccaccaacaacctggtcagaagaaggtcaataggttgtctttccttaaggcagcctcctgcctggcccgtggcccttgag

SEQ ID NO: 586121 - DNA, 954 bp, Homo sapiens
atcaaatggttcacacccgtgtttgacacgccgataccggttcgcctgttagtggcctcctaaagtgtgcgcccctcttgtggtcgcgggaccccgttttgaaccccgggcccctctttagacgcggccgtgctgtccggtcccccgcgcgttgccacttttttggggccacccccgggtacacctcatgggtcggttgacaacgcttggcgccgcctgttggccgactcgtgcacgtgtgtgtcaggccgccgcgtgggcgctctcattggggctgcttttgggcacaaatcctgttgaacagttgtggtagggacgttacaaacacggggggttcccgtgggggaatgattgaagtttctccgccgcccgaccccggtgtcctgtagtgaaagcagcgttattccggggcatatcattctctgccgcgaaagtagattagaacctgtctcatggcaaaatacgagtaggtctatacactctgttcgtgcacaagacatctgtgagaaatatccagtacgcttttgaggaaaatgattctctgccccccccccaggggtcccccccaacaacgaaattgcctttctctgaagcctccttattgggtcctgataggaccattgtgtcttattctctcgttcacgcacacgccggtcgtccttcttgggttctctgccttttccccgccaacccctgggggatttactcctgcgcccgactcacttcgctcaaaaaacccccgacttgggctctccgacggccgagaccccgcagaagacggaggaagtacgttgtattcctccacgcaggtgcgtcgtttaatacccgtttgactccacagagggagaacttacacaaaatgggtgggcccaaatatacgctgggaggacccaaagaggagtagccactgtgcggccccggaaaaattttttttcccaacccacaacaaaaaca

SEQ ID NO: 586122 - DNA, 138 bp, Homo sapiens
caaaacttccccaaaacttagtaacaaagaactgataaccacagaaaagtgttcgtgtcagacctttatgcttgatgatgttaaggtcagtttaccactgctcaaggccctctggctacacagttgcctagtttgtat

SEQ ID NO: 586123 - DNA, 256 bp, Homo sapiens
aagagacaagccaagaaacagaagacaaggcggacttgaggaggaaggggacagttgcagtctcacttgggacaggccacagccaggggtccggccactacccgcccgtgggataaaagccaaaagcatgcgttagtaaccttcagccttgtcttgcttggcccgaccccatgtcccttgtactgtggatcctgaccatcctacccctccgtagagccctcgtgcatgaatgaatggaccctcgtgtaattttgtg

SEQ ID NO: 586124 - DNA, 237 bp, Homo sapiens
  misc_feature (19)..(19): n is a, c, g, or t
  misc_feature (201)..(201): n is a, c, g, or t
  misc_feature (203)..(205): n is a, c, g, or t
  misc_feature (207)..(207): n is a, c, g, or t
cttgtgctagtttttgtgnggtgtttagaaacatgggcatttgtctggatcctaattacaaataagtaccctagaattctcttcagatagtgcactaacagcaatgaatctattctaaatttcaaatatccaaattaaaatgacttgtattagcataagtactgaaatggataatacaataaatgtattaatggaattganannntncatgatacagaaataaatgatagtaacgaa

SEQ ID NO: 586125 - DNA, 532 bp, Homo sapiens
ggtcggcatgtacccgatgtcgtccccgctgcacctcatcgtagcggtggcacagcgaaatagaattcgctgaaatacctgatactccgcttatcttgtggcgacgttttctagccgtatagcagtgtaacctcaggaaaggtactgcagaggactctatcagcacgtatgcggcgaacgagagcgggagaggtctccagattctttgtcaatgaggagaacactacctccaatagaagggactcttggcctttctgcttgtatactccccaattcagtctttccacgatgtactgagagacacctccaagagagtgtcttatctgaacaggcactcatgcagccagaggaaccaagattattggctagatgaaatgaccaaagacgcagcgctcgatacttcttcaactgtagaaagccttggagaaactacctgatatcttaaacatgacacacatcatgagcctgaattccactgccacgtcctttacacattatcaccagttcagacacaacaagaaacaacaaacaa

SEQ ID NO: 586126 - DNA, 467 bp, Homo sapiens
cgaggaaacaggcttcggctcaggcacccgggcctggagcaagccctggagaagacgaaagccaacctcatccaggcagtgacacgacgattctccaccgagtatgagctgcagcagtggttcacagaaaacagcaaatagtccccagcccttgaagtcacccggcccccatgcaaggtgcccacatgtgtccatcccagcggctggtgcagggcctccattcctggagcccgaggcaccagtgtcctcccctcaaggacaaagtctccaagcccacgttctctctgcctgtgagccaagtctagttcctgatgacccaggctgcctgagcacctcccagcccctgcccctcatgccaaccccgccctaggcctggcatggcacctgtcgcccagtgccctggggctggatctcagggaagcccagctccagggccagatgagcagaagctctcgatggacaatgaa

SEQ ID NO: 586127 - DNA, 1735 bp, Homo sapiens
  misc_feature (1310)..(1310): n is a, c, g, or t
  misc_feature (1547)..(1547): n is a, c, g, or t
gtacccctagaagccacaatgggaaaggagaagactcatgatcgaacattgtcgtcattgggacacgtgagattcgggcaaggtgctaccactactggccatctgatcgtagtaacagtgcggtggggatcgacgaaacagaaccagttgaaaagattcgagaaggaggtctgctgatgatgggaaagggcgtccttcgaagtatgcctggggtcgttggagtgagaatcgtcgaaaggctgaggcggtgaagccgtggtagtcacctattggatatcgtccttgtgccggaagagttctgagacctagcgaaagtactagtgtggacttatcaattttgatcgcgcccatggatcaccacgaaggacctcttcattccaaaataacaattgagtttaccaggggaaacaatgctactagggctcgtacctggtcgcccttgatgccctggaatttgtctgtcttagcctgggctcgattcagggttcgagaattctccgagacggccataggtggttagtccatattcgcacatggagatgggggcgaccaggtaccccgccgtatggcaggaccactaggcccgcattctactggagatcttaatcaccacgtccatctttgcgagttcgctagcgagagaatcacaaccgttacaccttggggctaccgcggcctggttctagaactcgaggaccattacttgcggggaattttgtcccctttcgttggagacgccgcctccacacagcgccttgagaaacacggagaccccaacggcagaggcgcaaagtcacttcaactttggacacggggggagaacagtatgggttattaaaaccgtggagaacaacggtctttccgagaaggcgagcatatccaccggagttttaataagagggggaccacaccaacattcaggggggcttttaacagagaaacacgggcgcccgagataaccacacgacacagcgtttcagctcaccaagctgtctgtaggagaatggtccctcgaaacagtctctgcacctgcggaaataacgcggtacaaaatgttgaggagtttgggccacccaaaacacacatgtcggccatggtgagccagtgaccagccagataagggatgagagcattatcaaccaactgtgcccccatatcagtaggaccatatcccagacagagggagggaactctggggcacaaacacatgtttgtccacgacacaccccgttgtcaaaaggtccgcacagttgatgtgcacaaaagacgccccgaagtgtgtggcacacaaccagcaacggactgtggcncctaggggaagaggcagccacatgacgcagaagaatgggcacattccacgataaacactagagccaaagaggtcggaactaccacagagggcaggaccgtacaaagcgaaacacgttcgggacgggacaaatggccccgcatgtgcacaccagagcggaaggtggcaccaaaccacacaacgaagcgaggtagggagtagcaatgcgggatgacacgagcgactacacccaggcgantggtgacgcgaacaactggtgacacgcacactgagggaggaggtgcctacaccaaataacgactcgcggacgaacgcgtgatgcaaggccacacacacgtggcggacatccgcgagcgaaaagagagagaagaacaagcgcgagaaggattaagaagacacggacgccgcaacgactgggcaccaagc

SEQ ID NO: 586128 - DNA, 727 bp, Homo sapiens
gaacccattctaatcgcaatggcatacctaatgcttagcggagcgaaaaattctaggctatatacaactacgcaaaggccccaagcgttgtagagcccctacgggctactacaacgcctgcgctggacgccagtaaagactcttcagccaaatgagccccgtaaaagcgccgctcgagcagtctagccaatcaccacctcgtacgatcagccggccccggagccattagtctctgcgaccactgcgcatcttctcactatgcaatcccctccttcccctgtactcctaactcgccgcgtgcgtcatacccttctagaaccatgaagtgccgtaccttgattatatatgcgttagccaacacatcgtgaggccttcagcactgactagcgtcaatactctcttcctggaatacaaggggcgtggtgcctactcaaagacttccaaaactgaacgaccgcatgaagacacggcgggggaacattggcagaaagccgagggtgaagagcggcgctataaagcccatggtgcgtcacatgattgcaagggtttcacgcctgagcgcaatcgaatgtgctaactaactcaactaggtaggtacctaaagatgcgcgccgtttaagcctctctgaccccgttatcgacagaggtgaaggagaccaccctctggatggacgtcctgactcagtcgatgcagccatcgcgggccatgacgtatggcaatggtatc

SEQ ID NO: 586129 - DNA, 387 bp, Homo sapiens
gatccacctatgagacaaagcaagacagagcgcgggccgcccgacgcatcatgtccacacatagttggctcacagggtgggttctgcatgtggaggaggctgacctggcatcagctggaactgtgtggcggcaaggctgtcctctaggaagcccaggaggttgccgatactgcccttctgcactgcaatggcacgagctgacaggctgtccccctgagccaggtaggacagcagtaccacagccatctcccggcacaccgggttctttcggtcactgaggaagcgcaccatagtgctatacaacttctccaggcggctgcaggggggtgtggccagaatcaggtccacattgttgtcctggatgctgagttcgctgcgggtttccaa

SEQ ID NO: 586130 - DNA, 845 bp, Homo sapiens
ggctgtacctcggttaacgggatcgtggacacgctggtggctgttctggagcgcgacacactgggcatacgtgaggtgcggcgtgttcaatgcctgttgtccgctgtgtcctgaggcctgagtgtcagcgtgcagcagctgcaggtgacgccagagaacaggcggaaggttctggtgcaaggccctggtgcctcattcgcattccctgctcatgaccatcgaggagttcgctgcagtgtccctgcacagtacgggacatcctggtggaccgcagaggtggtcagcctcttcctgcacttcaccgtcaaccccaagccacagagtggagttcatatgacctggccccgactgctgacctgcgatgggaatggagtgcaagcaatcaacctgcattccacgcacggttgtgaagacgtccgcatggtgtgcatacatgactgtggaccatggtgacctgcatcagggtatctacaggatcagacaacgcagcatcattcagctggatggcgactttgcggctcgtaatggcatccattcacactggtgacccaaccgacctaccaacgttgaacattccaagattacattcaacacccgatatgcaagcaaccgttctatggcgcccatgacaacgacgaactgaggcatatcaagacatcgcgggacacgagcatcgacgatcaaggcaacactaatccctgcagattcagtgttccacaaggtcggcctgcgtttggtatcgttgcttagtcccgaacacagcccacctaacacatgggccgattgatgcacaatagctcaaacgtggcacccaaggagactccaccactacctggaccccatga

SEQ ID NO: 586131 - DNA, 1112 bp, Homo sapiens
tttgttggttttgctccttcttttatctgttccgcttttgtcatgtgtggcgtgcttgtgtcgtcattctgggaatctgtgctgtgtcgggtgtgtgtgttaggcgtttttctctggttgtttcgtgtgttggttgttttgttctggtctttagcgtctgctttgtgtggtgtgctagctgcgtctgattgggatcgtttggtctgttgctagtcgttcgttgacttggtctgggcttcaatgtgtcatgtctcagttataagtgatgttggcacgggtgtcttctgtatcattgtcgttgtccatctatggattctaatttctatacaatggttctagcacaggtgtccccgtgaagtgatgctcttctatttgtttggtgatgtctggctttctcgctcgttgcctttccatagtatgatggtagaatgttttctgtccttatattggtttgtacttttgtctacattcactattgactatgctttatacctagttcctctttattctctgtagttactggttactctaactgtgttgatatgtattgtaagtttggagtttgggtcgacccgttgcctacgtacatcttcttaacggcgatgctatcactacgctcggggagtgtttgattgttgtacagcacactcgtagtccaaggtatgttgatggattttgatctctcatgcgactatgattatggtgcattatcatccttctaatgtgtagcagcagctgcttcctgcttgtctcagtaaggttctaggacataggtaatatggtaacttaaagctagcagtattatcactaggatacactagagaatgaagtattggaagtcattgcagcacatggctcaatgaatgtggtgataagtattatgcaaacttaatctaaattcatcgccatcaagaataagtatgcaagctagcaaatctcctgtaagatcagcatgatccctcagctgaactcaaaagccgtcaaagaccgtgcctccccactgataggaaggtcctaggctgccgtggtcccctggggatgtgtgcttcattgtgccctttttcttattggtttagaactcttgattttgtacatagtcctctgggtctagt

SEQ ID NO: 586132 - DNA, 124 bp, Homo sapiens
cgatggaacactacctcagcctcccaagttgctgggactatcatggtgtgcaacaccaggcacagttaattttgtatttatagtagaaaaggggtttcactatgttgcccaggccaccctcgaa

SEQ ID NO: 586133 - DNA, 273 bp, Homo sapiens
acaaaggcttggaaaaatgcgcaactccttcccgcccacatcaccacgccgatgtgaagacagtaggtgcatgaatggaaagtgtgtaggcatccttaatctccttgagtaaaggaaagttttagcttgagaggacatgactgaaaagtaaccaaaggctttataacaaacgttaattagctgtatagtaccttaaccctgacctggttaccagtttcataaagtttctacaaccaaaccaatgatgttatctgtgggccaagaggtaggaca

SEQ ID NO: 586134 - DNA, 172 bp, Homo sapiens
ttggccctaacactcactgaacagacactgtaattcacaatagggaatgttattaagtacagactacctattaagaagtaccaaggtaagctgggcagtggtgtgctcacacctataatcccagcgtttttgagctgattcagggcggatcaccttgaggtcagggagttcg

SEQ ID NO: 586135 - DNA, 121 bp, Homo sapiens
accatcactggacaagtagcatccgtactatacttcgcaagcaatcctaatccgtaataccaactatctccctaacttgaacaccaagatagctcaaatgagcctaagaagaacagaagaa

SEQ ID NO: 586136 - DNA, 119 bp, Homo sapiens
gagaagacgacgatgcattattcacagctccttggacatcgctttggactccccagctgacgggtcccatacacctccatcccctctgcgtccacacaggaacgaaggggctgggcagt

SEQ ID NO: 586137 - DNA, 408 bp, Homo sapiens
atagctgacctcttgagcataaaactaatgccatgacccacctactttttgataaggttgttacttgaacataaaacgcttactgtaatgcttaaccaatgtcacctgatacctgggggcggtgaagatttcccagatgttctctagcccaatcgtaattaaactgaagccctttttagagccccccctgctttgaacaatatcaaatatatatttgccattttgccagaaagtgtcttcatttgtgcagtaaatgagctcatgagtaaattgaggagcaaatagactcatttttctcctctttcccatcttcccatagatgcaagcctcccctatccagccccattctagaactgcattcagaggacacacttcagatgggcaagtatcaagctaatgcaaaatgga

SEQ ID NO: 586138 - DNA, 1512 bp, Homo sapiens
tggcttaaaaaaaacccatgagggctcccccacaatccatctcccctgccccatcttggttatttattcctatttatatttgggtatgtcaaaaggccctgtctaacaatattatttcctctggagtcctccttttttctttaccccgggttctctcccggtttgtgacccgagacgccggtcggtccggcccgcgccggccggccggcctgccggccgcgctcgcactgcccgtgccccggcacgccccacacattgtcctccgccggcaaccgcaaagggaacaaccccaaacacatctattaaacgccacaaacgggagacatatctcttccgccccgaaagccctcttatttgacagacccccatatctctttcacagagatatggtgtgacacaccaagaacaccccagcggccccccgatgtggcgacaccctccaagacaggcggcggatatcactgtgacacctctcctctcacacctttgtgtgagagacaaaagtgtgcctcagagagaattgacacacctctcccacacagtgtgcgagggagcacacattctctgttatactatgcttctacaactcgggccacccccacccacacacgcggtcacaccacaagtaggtgacacaaagtggtgacacaacgctccctccgttgtactttttacacacacaaagcagctgtgtggcgacacacttaaaagaccaccactgtattttcaccctgtttctacccacccaaaaatctgcgcgaacaaagtttaataaaaacacacaggaacttctcccaaatatcctccccgcgaatggtgacgagaagagtgttgtgaagcccacacttccccagaggggtactcaacagcacgcccagaatacacaaagccacatcttgacacccgacaacttgtcgagccttaatcatcatcctaacaggcggtcatccaatctgctattacaacgaagcgaaaaatttttggtcgccccaccacaaacacccagagggtgacacaacctgcctctaattaacacgacaacaatattaaaaacactccctttcccagtgaccacacctgttggcgatacggcggaggacgtcacccctcttcacctacacatcgctcacaccccacactgattcgagaatgaccatgtgatgccaccaacaataccgttgcagacgacgcccctcttcattataaagataattcaccccactcagcaagaatgccacacatgtaggagggaaactattgcaacgtgcttcgcactccaacaaaaattattattgtgccccccccccccgagtacgcgaacggcatatacatcttgcagccacacaaagaaactatgtagacagcccccactagcacagtaggcgcctctaaacatcaccttatttgttcacaaccagaagtctatcgtaacacaaaaacacacagcgccactaatatcaccaacacacaggtgatgacaacatgtaggaataccacccacatgatcgaaca

SEQ ID NO: 586139 - DNA, 152 bp, Homo sapiens
tacgacggaaagtagctagggtaaacttctcttgagtcaaggagtttatctactttagaggagtatttctcaacctcagcactaagtgacattgggggctggataattcttggttgtgggagtagtcccagtgcatggttaggatgttgagc

SEQ ID NO: 586140 - DNA, 447 bp, Homo sapiens
ccagtttagctcaggtagaataaagtgcaagaaaacattgaaccttttctgtgggtcaggaagccattgtactaaagatcatgaaccctttcatcttcccctcacaaaataataaacaagggactgcaactttgagggaaatctagaaaggtaggagactggactttggagatgtcagattaggactggtgaaaagcagatattctaggctcctaaaataacgtgggaacaagcccagaacaaccttggacatggtgtgtttgtgcatgggatgcttttcttttgagacggaaggttgatgtgttgaagtcatggaaagtgttcaaaatattgtgagaattaccgaaatgtgacacagaaacatgaagtgagcacatgctgttggaaaaaaatggtgctgatctacttgcttaatgcagaggtgccaaaaaccttcagttgtaaaac

SEQ ID NO: 586141 - DNA, 274 bp, Homo sapiens
gggtggtaccaatcgtgtgtttattgaatatgtctggcacccagtgactgattgattgaccctcaagaaagctataggtgtaccccccttttcagtgaaaacccaccccttcccacacccaaccatatagtgagaaaaggcacaggccatacacacaacaccgcaggcggcacagggtcactataaatcacatgtagagagtagggagaggcgcagagagagaaagagcgcaggtggggtccaagcacaccacagggatcacattacagcgtgc

SEQ ID NO: 586142 - DNA, 165 bp, Homo sapiens
ggacaaaaggaaaaagaataaaaaagaattaagcatgcctacaggatccacaaaataacctccaaagggaaaatctaagagttattggccttaaagaggagagaggggggcaagaggagagagaggggaagaggagagagagagggtttcagaggagagaggtcg

SEQ ID NO: 586143 - DNA, 674 bp, Homo sapiens
  misc_feature (188)..(188): n is a, c, g, or t
  misc_feature (252)..(252): n is a, c, g, or t
  misc_feature (302)..(302): n is a, c, g, or t
  misc_feature (306)..(306): n is a, c, g, or t
  misc_feature (308)..(308): n is a, c, g, or t
  misc_feature (337)..(337): n is a, c, g, or t
  misc_feature (342)..(342): n is a, c, g, or t
  misc_feature (348)..(348): n is a, c, g, or t
  misc_feature (354)..(354): n is a, c, g, or t
  misc_feature (361)..(361): n is a, c, g, or t
  misc_feature (365)..(365): n is a, c, g, or t
  misc_feature (367)..(368): n is a, c, g, or t
  misc_feature (384)..(384): n is a, c, g, or t
  misc_feature (390)..(390): n is a, c, g, or t
  misc_feature (393)..(393): n is a, c, g, or t
  misc_feature (466)..(466): n is a, c, g, or t
  misc_feature (473)..(473): n is a, c, g, or t
  misc_feature (477)..(477): n is a, c, g, or t
  misc_feature (494)..(494): n is a, c, g, or t
  misc_feature (539)..(539): n is a, c, g, or t
  misc_feature (545)..(545): n is a, c, g, or t
  misc_feature (554)..(554): n is a, c, g, or t
  misc_feature (559)..(559): n is a, c, g, or t
  misc_feature (577)..(577): n is a, c, g, or t
  misc_feature (591)..(591): n is a, c, g, or t
  misc_feature (601)..(601): n is a, c, g, or t
  misc_feature (621)..(621): n is a, c, g, or t
tccctagatactttaggccgtcgcatcgattatagagattgaggtggaacccggggcctgggaactggacgcacgcggagggcgaagatggaagcctggcgctgtgtgaggaagggctacggccactgtgtggtgggaagaggccggtgtgataaagcggaattgggaatatatatgtagccatgatnaaagaaaaaacgaagatctctaggagacaaaaatgttgatccccaaattgttgaatgacacgtngagaacaagtttgacttttcagtgatgtcctataatatactttcacaagntttnancggaagataacttcttcaccttttattangacanttgaanggacgnaaagtanttananntgggaggttttaaggnttcccnaantattcctgaaagaaaattaaacaattattgaatgcaagacagtacattctgtcttgcaaagaaagttcaaagnaagatcnattnatgggagccagagatcnaggccaaagttttggaatcactggggttattcactgttgaatatnaagatngcggaacanggaanggaaaccttgattggctngtgctaattttgcnttcaatacanttccaaaaattttcacctcntctgtcaagtgaacccaagttggaaattccttcccgcccctgaatattttctc

SEQ ID NO: 586144 - DNA, 391 bp, Homo sapiens
agataacattcacaatatgtgttaattgatgtttaagttatcagtcagtcttctggtcaacagcagactatcagtaattaagttttggaggagttaaaagttacacataggctgggcatggtggctcacacttgtaatcccagcactttgggtggccaaggcaggtgtatcacaaggtcaggagatcgagaccatcctagccaacatggtgaaaccctgtctctgctaaaaatacaaaaattagctgggtgtggtagcacatgccggtagtcccagctacccggcaagctgaggcaggagaatcacttgaacccaggaggcggacattgcagtgagccaagatcatgccactgcactccagcctggcaacagaacgagactccatctcaaa

SEQ ID NO: 586145 - DNA, 411 bp, Homo sapiens
aaccccataatttaattgagcaccctactataaataatccaggcgctgttttaagcacttcctgatatgctggtaaaaaaaaacagatgcaaatacctgcctttgttacgcctgacattcctagaggacatttaaagagatctagttcccatgtggatagagcaaaatgaaagggaaagttatactttagcacaaatgtcaatttcagaatggtttatttttaaaatgccagactctgccatcctgagattgactaactattgtctcaccatctctttgtcctggttaagttcagagaatacaatgtgcccagagtgcagccctgtttgaaaaggacggcttgcagagttgcagcaaaagtcatttctgggcagacgataatactaaacggaagctgatgaaaaaaaaaga

SEQ ID NO: 586146 - DNA, 1002 bp, Homo sapiens
tcagaaacatccgagtgaagcttgtggacgaatatgcaggagctcgctaggggacagatacgcagggggttcgtgtcttctacctagagttgacacatcgtacggttgtggtacgaaggatgatcgtggctactcggaggctaaagtcgtctccaggagtgcattcataatgacagggagggcgcagcagcgccagacacgttgagaggaacctgctggatgtgtaccatgtttccacagaaggcgagttagaccttaatcagcctctagtttctcggccgttgattccttccagaggtgtcctgaggcgaaacgttcgacactatacgtgacatggcctgtaaaccacgttccactgtggtttaactggtttcaccaaggccggtttgtcatccttgaatccttgcctggcaacaattgaggttgtccttaaaaaacaccagcttggaaggaacaattgtctctaacgttccgaattttgtcgggtataggtcaaactttacaagcgtgtgggacttttcacaccgggctcattcaaggcatcacttgtctaccaatgcggcttgcggcttcgaatgtcccaacgtgggggaattcccaacacagtgtacacacgttcgccccgcggaaatttgtctaaaataactagcacatacgcggttctactctcggaatccgaccgagttggggcccacctagtaatcctaaagtgacccactcccaaaggaaagttctgtgggcgacaccatcttcggcggctcagacagtcgggaaccattttcccccaggcggtggggcgcgccgcctatatcccccgttacccaaccacaatattcgtggcccacagcgggcactttccacccttaccgttctccgatggggacctgtgtggcaaccctttcccacaagcgcagacaccatttaaacctttgtcgccctatatgcaattgcttctgcttcaacggaaaacctttcagcactctgagggacactttaccttga

SEQ ID NO: 586147 - DNA, 884 bp, Homo sapiens
atatgcgtagtcggtcgttggggctagaacaccagcgccttgtggctgggcgcgcccattgctgaaggaggcccccgccccctggtttgttgggacgtctgctcgctcctttggtgggacacgtcttggatggaggaccccccattgtggggggcaaacctttggctgccctccctcctcctgtagggttgggggaaagaataaccttccgctctcgctttttgtggaacggggagacaactgtctccccccgcctcggggttctccggcgcttgacactcgcagatgcccgccctgtcactcgccacgtgcgcagcgtgtacggcctcccccgaaagcacacacgtcccggccgggggggaggcacaatgcgaccggtactgcataacgcagaacacccaaggattggagagcccccccgtcttgcccccacgcgggagcgtcaatgacaaaaaggcagcgcccagcatggcccggggagtgtgtccccccaccgtcgtgatctctcggcgagagctgggagagacacccgccaccgccgcctgcataaaaaaaaagtgtggggtgagtccctccccccgcgcccacaagcccccttcgggtgtggttgagatgacatcccgctggcgtccgttctccccattgcctccctgcccggctccactctcacataccgaactcgcaggggttagaagctgcccctacaaggagcccttctcgtcgccaatatggggagtttttcttcggaagccttgtgggagcgctttgccttgctctcggcacccgcccttgtttctcctggtagaggagttccccccctcatcgtggagatcgagggagattagacatgtccccttttttgtctagggcccacaaacaaaaca

SEQ ID NO: 586148 - DNA, 739 bp, Homo sapiens
  misc_feature (14)..(14): n is a, c, g, or t
catgataccctacnagcctaggatgacatgaccatgattacgccaaccttggcactaggcctacatcgtgctgactggggaagctttgtgacggcaaggggaggggatggttaatgtgggaatacccagtgatattcgaattaggtacgagctactggcgagtttgagcctcagctacataaatctgactgagtgtgcctacaagtggccctactgctctcagtccatgtactatggaggaatgccgacagttgataatgttaccatcctaaacggaatgggagtcacacgaagaattgtatataagcctgaactgcagccctatttgccgcataagagagacaatatttaagttgccttcgactacttcgaggtcttatggccttggtcaggctacctgtgtatcttcattgatgtgaccaagaaagcggcttcctgggaaggcattgtttaaggccatgtaatgatcactgtggcgaccacacatacacagagttaaaaaatggtgcggtacacacttcaacatgggaatgtccccgataaggtgaacatgattgctactccccagctaatcaagagaatgttctggggataggactccaacctgcgttatacacatgggtattttcccagggataatttaaggatgacataattaccctttagaatggaatggagatgacttctactgccaattttaaggtttttttcccaccttttgagaaagaatggggcttta

SEQ ID NO: 586149 - DNA, 473 bp, Homo sapiens
  misc_feature (62)..(62): n is a, c, g, or t
  misc_feature (116)..(116): n is a, c, g, or t
  misc_feature (267)..(267): n is a, c, g, or t
ccaggtggttgtccccggcggggggcatgggcatggtgccagtggtcctgttaatgtccccnataattttgagcgcctccttcagggggtggggcatgtgcagcatcttgtcatgntgctgggcctgctctgccaactcctccatcagggtgttttggttcccccatggggacatattggccagcggctcccaaattattaactccggggttttagagtgggcaaacagggaaaaaggttgggacctggggcctgttcccccctggntccccttttgggcccttttggggatgtgcctgggacttggagccccttggagtatggcttttcccccggggttttataccgctttgactggaagatccccctcccccctgccttttttccctcagatgggggccccggggtccaaaggaaaaaacccctgtcaaatgtcccagatttgggggggggcttaagccttttcttgccca

SEQ ID NO: 586150 - DNA, 240 bp, Homo sapiens
  misc_feature (2)..(2): n is a, c, g, or t
  misc_feature (34)..(34): n is a, c, g, or t
  misc_feature (72)..(72): n is a, c, g, or t
  misc_feature (91)..(91): n is a, c, g, or t
  misc_feature (166)..(166): n is a, c, g, or t
  misc_feature (227)..(227): n is a, c, g, or t
anttcggcacaggcctgaaagagctggttctacntggtgcagacacagctgccaacaaacaaaatcggcacnagtttgtcgatgcttatcnggattacatattcaatacatcagtggcttccttattccgatgcttttcatgcgggctttcataaggtctgtggangaaaagtccttctgctctttcagcctaatgaactacaagcaatggtcattggaaatacaanttatgattggaag

SEQ ID NO: 586151 - DNA, 1342 bp, Homo sapiens
  misc_feature (164)..(164): n is a, c, g, or t
agcgtgaggtgacatgaaatgctaccatcatcgttacatgaaaatacccgtaaatacttgctgttctctggtgtcgcatgtcctgacctcagcggcgcatcgatgattctcctctatcgggcagcatgataagcacgtggcgagtctaacttgttgacacgctntctatcatcgaaggctcccttcgccctgacggccccgtatcaggaaagctattagctcaagcggggtccttactatctgatttacgcttgctacacgcatagctacagacgcttgtaatgatagcgatggtcgtcgaaaggacctccactatggccacgttcacttcgtccgtgcgcaggtttgtgaatggtgcattggcaaacagtgacgatatcttacttgggagggacccaatggtgtcttgcgaagagataatatggacccaatttccaattggttgccatcctgtcagtaggtgctcgtgacttaactgtgaaagacaaaatggggaatgtcctccaaggcggtgcttcgaaatcggaaaagtcattgatggagccctcttttggccaaaaaaactatgtgtgtactagtattttttcgtaaatagtagtagattcccgaattgatcgagcttcgataacgtcactttgggtttattgataggtctaccttatcgataggtctaaatctttcctagttccgggaattttgtcctcttgattaggcaaaaaacaattttccgcttaaccaaatagaaagtcttctcccatatatgggtgttctccaacttgtaggaatctctgcaaaatacacttcgggggtgtggaagagcctaatccctcttatttatttagccctccccaaaatttatattattaactaacctctggtctgtctctccgttctccacccactttggcttccggttatagggttggacattatatagggccgagtagggtttaaactatcttcaactaggggttatagagaataaacacccaattccctttgggcgggctcggggaaacttttttctggaacacatttcggatttacacttatatcattgttacagggagaggttgtgcgcttttttagccacaagcccttgtttagtggttgtgcaaatccaaaggcccatttgttggctttagtaagaatttcaacaggagcgtaaatcgggtgggtgtcccaaaagcgttccttaaccaagcttctctaaacgttggtgaatcactcggggaaagaaacccgttcttttttattgttaaaaggcggttttgaagattaggccgaaagggggttccccagcggtttaacttaactacatttctttaaaattgtgcgccac

SEQ ID NO: 586152 - DNA, 683 bp, Homo sapiens
  misc_feature (253)..(253): n is a, c, g, or t
  misc_feature (337)..(337): n is a, c, g, or t
  misc_feature (388)..(388): n is a, c, g, or t
tgtgctgccagcagacagcctctcagctcttagccccctttgaggatgacctcagctgacaaaagctgcctaacctagcctacacactcttcataggtagccttcattcaatgactgatgaacatgtggttataaaagcctggccacttcaccccaattcaggacagctggtgttggcccccaaaatacttcctaataaatctcctgcatgaaatcaccatctcaaagtgtaccttctggagaatacagtgtntggaaagcagtaagtcatggctaaatacagcaatatgctctggagttcacttggatacttccctaggcaaaaggcaagtccaanttatggataaacatggctagactacgagctcaacatcaagaaaagccattntcacctatgtaaccaactacctagataccaagcctaattatagagttttcattcaaagagccactttgtgcttggtaaacactaatagttgaagcaaggcagcaagtgggtctcacagccagtccctcaaagacgtatcaaaagcaggaacttcttaaaacactagaaactgaactattactttacaatcccatcagacaaactagagacggggaagaccatcacaaagattattcagcttaatcaagaacatgggaccagctcagcagctcatcaccacagaagatagatgaag

SEQ ID NO: 586153 - DNA, 360 bp, Homo sapiens
cgcatcgccagggcgaccaggaggtccggatcattggaatccacggcccgcttcatgatctccgcggagatcatcgatgagagggaccgcagttgcgctagggacgtggtgcggacccattccggatcgggctgagtcatgtcaggatcaactccgagccctgctccaggctgttggtgaccttgatctcctggggcagcgcatcgatgacggtgcggtcatgggtgatgacccagatggagtccacgatgccggtgttcatcgccacccggaggacctcgatgaatgcggggatgagcgctcatcgagggaccgaggggctcatcgaggaacagtgtcgtcactcaccaaccaaggatg

SEQ ID NO: 586154 - DNA, 340 bp, Homo sapiens
agcgggagtcagattcccggcgggcacggccccagccctgtccgggtctccatgtcccgctccgcccccgccgcgcccgcccaacactgtctgtggtgctgacggctccgttgcggtggagggcagggctcaccgaaggcccggcgccgccgccagctccacgcaaaccaggcttcagagaacgctcgcttggctcatcggtggtcgtcggggacggtcgtcgcgatctagcctccacaccgccagggaacagcggcgccggccggcgccacgcacacggccgccgggctcccgcgcttcacaccgcgtccaccccccaccccgacttcgaccccacgcc

SEQ ID NO: 586155 - DNA, 169 bp, Homo sapiens
tcaggctgagtgcaggggacaatctcatcgactcggctctcgggtcaaacaaaatctccggtctcagcctcccaagtagtggggattacaggcatgcgccaccatgcccagctaattttcgtatctttagtagagacagtgtctcacctttgggggccagtctggaggt

SEQ ID NO: 586156 - DNA, 501 bp, Homo sapiens
gagaagcccctcccctgtgccaggaggatgagaagaaactgttccgtggtggttcccacgtggctaaattgccatggtgggtttctgagagcttgggtcggtagttgcagacatctcttctccgttgtcgggtgccgtctctgctcccttgtggttatttgctcaagcccctggcgatcccccagggtgaattgtgcagcaagtcgacggtacgactgggacggacatttcttggtcagggaacttggcatcccattcagcatctcaggactcacaggccaacatgtgttccatggctgggaattgcctaccaccacatcagcttctgtttaaccttttggcatcaaactaatgaacagttgtttggaaatctttctacaggcaattacctccccaagagaagcttccttattttggagtacggtcctaagatacgctcggatgaatccggaaaacatgtgccctctaggtattattaatataagcaggaagggatctaca

SEQ ID NO: 586157 - DNA, 505 bp, Homo sapiens
  misc_feature (423)..(423): n is a, c, g, or t
accggagcggaagccagcataattatttattgaaagaatgaagaggctttttgcagtggctcatgcctgtaatcccagcactgtgggaggccaacacgggtggatcatctgaggtcaggaattcaagaccagcttgttcaacatggtgaaattctgtctctactaaaaatacaaaaaattagccgcgtgtggtggtgcgcacctgtaatcccagctactcaggaggctgaggcaggagaatcgcttgaacccgagaagtggagcctgcagtgagccaacatcatgccactgaactccaccctgtgtgacagagcaagactctgtctcaataaaaaataaaatgaaataaaattaactggtctctttgttgcaccttgaatagatcttttatctatgcatgatttttgtcacatcatgaattgngaatttggacaatatccatgactaagttatatagatattacagttgttgatgcatagtataatatcatattctcacatgtta

SEQ ID NO: 586158 - DNA, 725 bp, Homo sapiens
ccccattggcactttcacttattgggggagcttcagggctgttttcacctactcccagaagatccctagttgtggatcaaggtaactcgagtggagggtaacctggggcccctcgacatcaccgtcattgatggacctgaaccctgtgctcctcgccgatctgttgttgttacttccctcccagaggctggaaaagggctccgagcttctgaccaggaaccagagggtgaccccatttcaggaggtgcccggtacccagcctgactaggtaccaaggccagcttgtgtgggccccaccaggccccttggtagagctggtgcccagatgtgggctccagatcctgggcccatgatgggcccgagcccacctcggatcccactgattggccagccgagcgagaacccggctgctgcatggcactgaccgccgcttccagcttcctctgagccgccgggcctgctacgcgggcacagcgtgctgcctctcttctgtgtcgttttgttgcccaggcagaatgaaaagtccttaaccgtggactcttcctttatcccctcctttaccccccatatgccatgacttttaattttcacttttgtagtttaatcctttgtattaccacatgaatatagttgcatatatggaccccgacttgggaggaccggtcctgaatgtcccttctcccgtgtaacatgttttactcccccaataaaattctttccagcca

SEQ ID NO: 586159 - DNA, 138 bp, Homo sapiens
cgcttggggtatgaacactgcatatcttaactataatccagccattagcatgatcagagcaattcccataagttatactgcgccacaatgagccggcactaatgagccacacaacgcgccactcgaagagccacacaa

SEQ ID NO: 586160 - DNA, 102 bp, Homo sapiens
gccggcctatccgttggaaaaaaacaaaaaaaacacaagtactttcatttaaaaagatacggcagcggggaagcacggtggctcatgcctgtaatcccagaa

SEQ ID NO: 586161 - DNA, 255 bp, Homo sapiens
gcgacagtcagccgcatcttcttttgcagtcgccagccgagccacaatcgctaagaaaccatggggaaggtaagggtcggagtaaccggatttggtcgtattgggcgcctggccaccaggcttgcttttacctctggtaaagtggaaatttttgccatcaaatacccctcaattacctcaactcaatggttacatgttccaatatattcccccatggcaaattccatggcaccccaaggcttagaacgggagctt

SEQ ID NO: 586162 - DNA, 490 bp, Homo sapiens
cagctgtgctgtatgtcttaatcttctacgactccaacacagtgaagcagaaacatctgagcttcactcctcctgagaaagatggcttcccttctggaacaccagcacagaatgccaagggaacataagcacccgtagtagtgacagaggaggaggatgattgataaagagactgctcctctcgtaattgccccgcgaacggttcatacgaaatcaatttacacacggtctgtaattgaccctgttcctgcaccagttggggattcacatgttgatggtgctgccaagtctttagacaaacagaaaaagaagactaagatgacagatgaagagattatggagaaattaagaactatcgtgagcataggtgaccctaagaaaaaatatacaagatatgaaacaattggcccaggggcttctggtacagttgtcactgctactgatgttgcactgtgacgggtggttgctatccaacaaattaatttacagt

SEQ ID NO: 586163 - DNA, 731 bp, Homo sapiens
agtctgaaggaacatatctgaatagtgtgattgaaagccacacagagttcatatttactcgatgcataaatggctcctcttgaaaccgatatccatgtttactccatctggataaacgtctcttcattcaaagaaatacatatcactagttgactgggagtctgaacgtggacatagttacagctcaccagagggatcttcccggttctctggtcctgcattgtgtctatgtgtcatgtcttatccattggttgcaaattgggagtgaacaaggtggagtatgctccctgtgattactccaattatggtgacaagtaaggttggagcccttttaaagctgaagagtgtggtcgactagtcgattttgggtgtgataacatagtactagagctgggatgtcttccatgatgacaacagaaatacataaacacaaggtgacttagtgagtcttagtggatatacaactttgtgtgacctacaggatcggaatccctctctgatcaacagttactagtactcttctttgtcagtattatcaagctaacagctccgtgcatatgcaaaggcaggaagagtgttaaagtggggacagtgggcctctccgtgttgaataaccagcttggcatgaatgtgggtcaaccgactaaggtcttcggtatggaagcaagtcaagggggtttggcttgcggagcgggaaagcgaaggtcgttctgaatgagacccgaagctgg

SEQ ID NO: 586164 - DNA, 611 bp, Homo sapiens
ttctcagatgtggttcacaaatgttaaaactgaatctcaatagctaatgcacaagaaacgcttttgaactttgtaacttgttttgtgcagaaaaatgtgcttctggattgcttgtcacgagtgcttaagaactagaattcactttgaaatcaaacgtgcgcgtctcacacaatctattaccaaccaacaaggactgacttcaggtcaggcaataaaatggagagtaccttgatttgagtcaggttctataacaaaattaacatatgtagagtttctattaagtctttcaatgtaaaagccattgttttgacatggcaaaaattactgtaagagtctccagattaagtatctttttgtacttaactgcacagcttttgctcaaggagtctttgtgccagtcactttataagtttattagtttacaaacgattgcaacatcccgttaataaaatggaaacgtaagatgacttagtattttaaataacttgaagctctgtactgtggctcttgttcataagaaacactgaaccaacaagcagcagattcagcccagccaagactctgatgccccagtgcaatcactactcacagccttattgataaggttacac

SEQ ID NO: 586165 - DNA, 365 bp, Homo sapiens
gatggagtatagatcactgtctttctgtaaaggtatagacaaaccacgacgacggccaaaacgacgctgacactggaacggtacgtacgacaatgacgataattatcttcttaacaaataatagttgtatatacaaggaggctagtcaaccagattttatttgttgagggcgagcagtctacagcaaccagacctaggccttgtttgacgagatgtagagtcgagtcatgtaatcacaaatgggcctagagcgagacagggatataaacaaactatttccaaggtttaacccggtgcattcattcgagttgcctcaggatagctgggcttttcacttggactgggacgtcaagactgagttttgt

SEQ ID NO: 586166 - DNA, 172 bp, Homo sapiens
catgtggcgtagtgtcgcgaactgagcagacggtgatctcaatccggcacagcagcgatctctgctgaagattggtacgccgccatcgattacctgattcccaacgaaagcgacgctcggctttagttggcgtgctgttgaatccattggacagcgccaaggtcgatgcaag

SEQ ID NO: 586167 - DNA, 197 bp, Homo sapiens
gaataaaggattctatcaacacggctatggtattcaagccagtgcgataaaaaagggggggacaggaactagtgccgggtcccccactactaaagggcctctctccactaccccgactatcccggcacataaactccgttttttttttttttttttttttttttttttttttttttttttttttttttttttttttc

SEQ ID NO: 586168 - DNA, 105 bp, Homo sapiens
caggatctcgtcatcaaccctgctcggttgtgggaaaaacattaatttgtgcagtccaacacttacatactttcttgacggaaggcaatcctgagggttcgatga

SEQ ID NO: 586169 - DNA, 137 bp, Homo sapiens
gaatcatcgtgtcctccctccttcccctttctaatggcccagtgtctgttgttaccatctttgtgtcatgagtacccagtgtttagctcccacttgtaagtgacagtatttggttttgctacttatgagatgcggta

SEQ ID NO: 586170 - DNA, 110 bp, Homo sapiens
gcacatgcaccaatctgaaactggatcagaactcatttggatataaagtattgcagagtgcttagcagccatccgacatgcccgctggtcgaggaaaatgctctagtcca

SEQ ID NO: 586171 - DNA, 169 bp, Homo sapiens
caaagactggaaactattcttagctccgtcactgactccaagttcatccctctcgtctttcaagtttggttgagatatagggtattcttccaaatcagtcttgaagggtataacaactgcctaatgtgtggggacctcactgtgtatgaagtattaatttggggtaatt

SEQ ID NO: 586172 - DNA, 404 bp, Homo sapiens
  misc_feature (1)..(1): n is a, c, g, or t
ntgccaaatacttccagtcagctgatcttgacaagcaaacaaaaacataagtggggaaaggacacccttttcaaaaaatggtgctgggataattggctagccacatgtaggagaatgaaactggatccttatctctcatcttatacaaaaatcaactcaagatggattaagagcttaaacctaaaacctgaaactataaaaattctaaaagaaacattggaaaaacccttctagacaatggcttaggcaaggatttcatgaccaagaacccgaaagcaaatgtaataaaaacaaaggtaaatagctgggacctaattaaactaaagagcttttgcatggcaaaaggaacagtcagcagagtaaacagacaacccacagaatgggagaaaatcttcacaatctat

SEQ ID NO: 586173 - DNA, 299 bp, Homo sapiens
tactaatctctctggtccatgatctgtgagtacagctggagaatcgtgactgatagcatcactgggtggatagcgttgtcatagaaaactgtgtcaggtaggatgagtaccgctatcgaatgtaccagactcaggtctcagacgcagggctagtacgcgctgcatggtgacagcctggtcacctgtcagtggccgcctttgctgagaagcagcgaccagtctctccgatcctattgagatagacttccaaacctcaggtcctaatatttaatgcttctgtgcattcagacacaccatca

SEQ ID NO: 586174 - DNA, 384 bp, Homo sapiens
attttaccagccctgattcctgctaaggaatcctgggtgtgagggatgggaacatggatgagtacctatgtacatacacacagtaaatacacaaacacatattcctcacccacatatctgtctaggatttttttttacatgcattctccttaatcaaatgacatgactatcagtccaatcccagcattcgctaggcccaggaagagaaaatgatgtgtttgaagctaacgaatcatccaactaggttcattcctgcaagtctaatcaccaccaccccagagagtaacatggttaccttcttacagaaaggaaacagggactgtccgcatttctgtgaagattgaaatgatatctttgggtatgaacgactctctcgcgaatatc

SEQ ID NO: 586175 - DNA, 321 bp, Homo sapiens
tatgtcaaacttacaatatcagttcttggtatagctcttggtcgagaatccatctcacattgagtctgtagcaatgtacaacatggcatggaccagtagtcataacaggtcatgattgggcacggcttgacgaaaagcagaataactgccccaaattgaaattatttattcagcttaaactaatgccacaaccatcccacttggaatcactccaccctgacacttctgaaacccactctttctttctttcatctctgacatgtcccctacgactgagaggcatttcactcaataaaccaaggaagatgacagatgttatct

SEQ ID NO: 586176 - DNA, 343 bp, Homo sapiens
cctctgtactggccacgcgtgtgttgctcgagcctcatgacatcaccccggtcaacgtgctgggcattgtgttgctgtcgttggtgctgttcagcgagcggatcgaagccttcttcgaccgcgatcgctgagtgcaccgctctgctatctgactcaaggaaaccaaggatgaacagaagcctcatcgtcttgctcgccgccctcttcacccagggcgcctgggcagaaacccacagtatcaaggcgttcctcgccgacccggtgacagtgctggacgagcagggcaagcaacaacgtgagctggcgaaaaaggacgcgcccacccagcccctgccggtattgc

SEQ ID NO: 586177 - DNA, 306 bp, Homo sapiens
gtaccccccatcacctgcacatgggacagaccggggtggagggtgcccttggctgtgtacgtcccagcaaaaaagttttggcccgcatctcgctgtgccctgaagggggatgaagggcgatgcctcgcccgaggttttgggctgctgcactgcatggtgggactgttcctactttttgtcccccccctcccccagctgtggtccggctttgggagagtggtgaattgcgctgcccgaactcggagcggagcagggtagggcccgtgtacagcttgataccccttaataaaaagggagtttgcccag

SEQ ID NO: 586178 - DNA, 178 bp, Homo sapiens
gcgtatctggcgctgtacagagaggggcagcctcccgtgctagacgaccctagaaacaggatagacgggcgggtagacccgtagccccgtaacccacgacgttagggtcccctagaggcatctctccaggcctctagcctgtaaggaagaaaaagagcaaagacaaggtagagccgag

SEQ ID NO: 586179 - DNA, 106 bp, Homo sapiens
cgagaactcacggcacctccacatggagctcattttctttccagaagtctagaggatgccttaaaacttactgaacaaccagaattagcatatagagtagacatgg

SEQ ID NO: 586180 - DNA, 245 bp, Homo sapiens
  misc_feature (72)..(72): n is a, c, g, or t
tggtcctcactgaactctctgcccttgaactgggcaagcaccctctccctggacttcattcttaggcttttntctttcacacacctgtaaactatgacttgcccccaagatgttggcatcattcaatgtgaaccaaagacccccttccaaaaatcagctgactacaaagaaaaatattctttccttagtgttcttaacacagaaacttctccactttatatgattccaccccaaaacgtagacgc

SEQ ID NO: 586181 - DNA, 113 bp, Homo sapiens
cggtcaggtgtagagtaggtatattatagcatcatcatccatccatcatccatcgcttcatctactcatctatccatccacccatctggtatcacccccaagttatccatcta

SEQ ID NO: 586182 - DNA, 929 bp, Homo sapiens
ccccccgtggttcttaagaaaacccaaggaattttccggatgacatttaaggaaaggaaacccccccccacaaaaaaggctcggtggaacccccccccgggcgcccggttttttaaagggagaaaaaaaaaaaagggggaaattcccaagaaccccaattccccccggggaaaattaacagagtttccccccctcaattcctaaacccgcccctttgatttccgctttgggtccccaccaggcaaagcgggcatgggcccctctctattcctcctctcgcaagagtccaagttccccatgaaaacttctgcgaccccctctgcacacccactgccagtcaggccactccctcattctgcgttgggattctgaagaagactctcccttccttcccttgccccgatgcgtgggggttggaaagccaaaggcggatgtttgccccaaaccgctcccaagaaaggatgagacctgcttagtccctcctccccctgtggacagggacggggagagtgataattcagaccgtgttcctgtgcccagttttcaaaattccttcagccaagctatggaagcacccttcatgaacctggaccccccggcaccttcagatcccctctctgaaggaaaggggggaaagaaagaaaaaaaccagaaacagaagctccttttcagccccccagtcctccacaccaagtgaaaatactgggccaggctaccctctccaattgggttttggttttgtttttttttcccccaagcctttggttggccgccgtaatttttaagtaattgagtttgaacaaattagctctggggggggggggtttccccaatgtgagggggaaccaagaaaattttaaatacagtgtattttcccgcttcctgtctttacaccaaaataaagtattgaccccagagaaaaaaaaaaa

SEQ ID NO: 586183 - DNA, 218 bp, Homo sapiens
  misc_feature (1)..(1): n is a, c, g, or t
  misc_feature (34)..(34): n is a, c, g, or t
  misc_feature (62)..(62): n is a, c, g, or t
  misc_feature (64)..(64): n is a, c, g, or t
  misc_feature (89)..(92): n is a, c, g, or t
  misc_feature (99)..(99): n is a, c, g, or t
  misc_feature (102)..(102): n is a, c, g, or t
  misc_feature (104)..(104): n is a, c, g, or t
  misc_feature (139)..(140): n is a, c, g, or t
  misc_feature (164)..(164): n is a, c, g, or t
  misc_feature (198)..(198): n is a, c, g, or t
  misc_feature (214)..(214): n is a, c, g, or t
ntcatctggggccgcagcatgcctatggttccgnttccggccgggagccctgaacacgggtntncagactcaccctaaagggcggcccnnnncccacgntanangttcttgtcgtagtaccgtaagtcagtcatgttgnngtgtcctctcctgtgtgtagttgngtgtgtgtttgttgtttttccccacagttgtgtncttcagtcatgtcgtncccc

SEQ ID NO: 586184 - DNA, 111 bp, Homo sapiens
cggacatcgccattctgtggatccgaggaggcggacaagttcacggggtcactgcaggccaatgcgcagagtctgaaggagtaccgctccatactcatcctcttccccagg

SEQ ID NO: 586185 - DNA, 477 bp, Homo sapiens
  misc_feature (88)..(88): n is a, c, g, or t
acatggtgagattttttaaatgtgtctttttaaagtgtacagtgaaaagtctccctcatgccctcaatttcccagccactgttccttntggactcttctacaaatagtccctgtttctacaaatgtattggaggtaggcaggctattttgatttctacccttaacagcttcaaaaaaaagagaaaaagaggctcccaactgccacatattttgccattaggaaaagcctgcattcctgttttcagttatgaacattcacttatttaaccggcagacttaaaatatgcctcaaaccacaatgaacctgctacataccttccatggcaacccacgttcctgtgtccctatgcacacccaacatctgtgcctcgttcacaacagactttgacatctccaatttttaacattttaaagagaatgaattcatgtgttactgggaaatcccaccgaataataaaagtgtcattttccaggaaa

SEQ ID NO: 586186 - DNA, 3754 bp, Homo sapiens
agcggattcccagagccggggctggggctctaggctgccgcggcggctctaggctgggctgctgggcgcgaggccaggcgggccgggagaggctgcgccggcggcggatcgcgcagagggcggtggcctgggctggccgaaccatggcggccccggagccggcgccgaggcgggcccgggaacgggagcgggagcgggaggacgagagcgaggacgagagcgacatcctggaggaaagcccgtgtggtcgctggcaaaagcgacgggagcaggtaaaccaagggaacatgccagggcttcagagcaccttcctagccatggacacggaggagggggtagaggtggtgtggaacgagctccacttcggagacaggaaggccttcgcggcgcacgaggagaagatccagaccgtgttcgagcagctggtgctggtggaccacccgaacatcgtgaagttgcacaagtactggctggatacctctgaggcctgcgcgagggtcatcttcatcacagagtacgtgtcatcaggcagcctcaagcaattcctcaaaaagaccaagaagaaccacaaggccatgaacgcccgggtatggggagcgggctggggcagccacggggacaggacggggttggggcagcctcggggactgggatggtgagggggtgcccggcggcctcggacaggggctgggcgaggatgcggggcgggctccgcaggcccagccgcctctcctgcgcccacccgaccgacggagtcgtgcgtccgccgccaggcctggaagcgctggtgcacgcagatcctgtctgcgctcagcttcctgcacgcctgcagccccccaatcatccacgggaacctgaccagcgacaccatcttcattcagcacaacggcctcatcaagatcggctccgtgtggcaccgaatcttctccaatgcacttccagatgatctccgaagccccatccgcgctgagcgagaggaacttcggaacctgcacttcttccccccagagtatggagaggtggccgatgggaccgctgtggacatcttctcctttgggatgtgtgcgctggagatggctgtactggaaatccagaccaatggggacacccgggtcacagaggaggccattgctcgcgccaggcactcgctgagtgaccccaacatgcgggagttcatcctttgctgcctggcccgggaccctgcccgccggccctctgcccacagcctcctcttccaccgcgtgctcttcgaggtgcactcgctgaagctcctggcagcccactgcttcatccagcaccagtacctcatgcctgagaatgtggtggaggagaagaccaaggccatggacctgcacgcggtcttggcggagcttccccggccccgcaggcccccgctgcagtggcggtactcggaagtctccttcatggagctggacaaattcctggaggatgtcaggaatggaatctacccactgatgaactttgcagccactcgacccctggggctgccccgtgtgctggccccacccccggaggaggtccaaaaggccaagaccccgacgccagagccctttgactctgagaccagaaaggtcatccagatgcagtgcaacctggagagaagcgaggacaaggcgcgctggcatctcactctgcttctggtgctggaagaccggctgcaccggcagctgacctacgacctgctcccaacggacagcgcccaggacctcgcctcggagctcgtgcactatggcttcctccacgaggacgaccggatgaagctggccgccttcctggagagcaccttcctcaagtaccgtgggacccaggcctgacccggagccccagccccaggggaccatgccggggtgctgcctgggcaggccatgttggggagactccagcaccgtggggctgccctcctccatgcgcctgggagcacaaaggccccggtagtgaaggaaccccccgtctcctgagagtggggctgaccctgccttgggcgccgaggggttggggggtgggtgtgggggagccgttaggcctcccaggtccttaggatcagggttgcccccagaaccccttcccatatcctccattctccgccctgagttcctacccaggctgcctggccggggccactgcctcctcagcatgcaggaggctgccctgtagggaaccccagctctggggcttgggggtgagggtcagccctggacagacctctgcccagggaactgctccatggggtctgggagagcagccatcccctgctggcaccatagacccacacaaggagcctgcacagcaagccagcggtgacacacctgcaggtgtcaggcatggcactgggcacaacagggacctggcaggagaaacagaccacagagaggtctggagttgaggctgttgtcagcaaagcccctggtcccacacagctctgccctagagccacctctttgaccctttacccaccctgagaccagaacttgcagcccctctgcagatctcctctggccactgcagcccctccaatgggctttttctctcatgcattccctggcctggaggcgtcagggaccccacatcctccctgctcctcagactcacagcccctccatgttacctcccgcacctcctccctggggcagctgctccctgggcctctgaggatgtcagctcctggctccctgcctctctcccactccactcctggctcagtcttagagatttctatgccctcatggattctacccctgccttcctggcctcttgattcttggcttgcctctcctccaattccaaacttagtgaaatggccttaagcattttaaactgtatgtatacattagcgcattcatgcctttctaaacgcatttcaaatgtcaaccaggaaggcacaccactgtattagttttatactgccgctgtaaaatttaccacaaacttagtgacttaacacaaatttattgcaattctgtaggctggaagtctgactatgggtctcactggactagaatcaaggctggcaggctgccttccttcctggaggttctaggggagactctgtctcctgctccttcaggctgctggcagaatccacatcctttcggtggcagggccaaggtccccactttcttgctgactgtaaactaaggccacttccagcttgtagaggctgcctacattccttggctcttggccccctcctccatcttcagagctagcaggttcagtctgtgtcacgaaccatttctctggttccctgcagacaggaaaggttgtccctaaggactcatgagattaggttgggcccagccagataatacatgataatctccctcctcaaggtttttaatattaaacacatctgcaggacacattttgccatgtaaactaacattcactggttccagggattaaggaatgaacctcttttgttggggaagggtggcattctgctgaccacagcactccaaccaaaagccaaaaaccaaagcaagacttactaacgcatatcaaataaattaaaggtacaaaatcgtgaatctcagttatcttaaatattccaatactatttacaaaattattcaaattctcacgccttccaactcaaaattagcaatctaaagtaatttccatatcctagatggaaaccctcatgctaaactgtctgattatgcatggttctaaatggtttcagtggcaaatacataacattgtactactgattaaactgaacttaaaagcatca

SEQ ID NO: 586187 - DNA, 703 bp, Homo sapiens
agcggggtagacttcttgtttcctggcagagcggggtcccggcaccgcggcgctcggtgctgttttgggggcccgggtggagggcccgggtgccggggcccaaggtgcggcctcgctagcgggagagggagcgggagtcaccggcccggagagagctctcagggccagaagcggggcaggaggatgcttttcctcgagcgcccgaccagtggagctgcgcgtgtgggcggattgcatgttcagcttctcgctttgattcacgggaatctaacccacgtggagaacggtggaatctttgtccagttgatggggaaggggtaggaggtggggcgtcagccctgaccagtggcattgcctcttcccctgactactgaattccacgtgtggacccgaccagactgtgctgaaacggaattgtgacgaatgggaacaggtcatggttctacgttcagcgtccggggaggaatgccaggaaaactcaatcaagatcaacattatgaacatgaacgagcagagcaagctgtattcccagggtcatggtgccctctttgtgcgcacgagatgccgcacgccggccacgctggtgaacgctatacgagagcggcccgagctttgagatgacagagacgcagttgtgttatcctttgttcatcgtgttcggtggagggccgtggggccaccaccgttcttcgcttctgatacc

SEQ ID NO: 586188 - DNA, 382 bp, Homo sapiens
atggttgcgcagattgaatattatgccgcttgtagtggggattgtccggacctggagcccaagaatcaagaacttggcgagaagctcagcaaagacccaaatatcggcatagccaagagggatgccacatgtcaatgatgcagcctcttttcatatgaagtcagagtttgttctaccatatacttgttttcagccaacaagaagctaaatccaaagaaatatgaaggtggccgtgcattgagtgattctattatgctatctacaaagagaatctacaaacacctctttaattcaagaaaaataaacccattaatgacatattcaaacatattgcatgtataaagaatacttgtgaggagaagagacatcattccaaatgctt

SEQ ID NO: 586189 - DNA, 4121 bp, Homo sapiens
aagggcggacggggggcggattaggattggggcacttacgcggcggtatagtggtgcgctgggcgggagagggtgtggggtcgacgggtggaccagcgggatcatggagcgcggcggaaggaggggggaagagaaaataagagaggggggggaggggggggaaggtaaaggagagggaggtggggggggggggataagagggggaacctcggtcaaggttagcgggcagggggctacaaaaaaaagagcgaggggggcggggggagggggtatttcacacataaccctttattcacccccaggtaaaccaagggaacatgccagggcttcagagcaccttcctagccatggacacggaggagggggtagaggtggtgtggaacgagctccacttcggagacaggaaggccttcgcggcgcacgaggtgagaccgctgccccctcctcatcctgcttgggtgaccacctgctgaccacccagcgaccaccctccctccccaggagaagatccagaccgtgttcgagcagctggtgctggtggaccacccgaacatcgtgaagttgcacaagtactggctggatacctctgaggcctgcgcgagggtgagcacgggcaaggccccgggcaggcagagaccacagctaggtggggcgggcatggggacgaacccgcagctggtggaaatcctgagctcgcaccgtgcaggtcatcttcatcacagagtacgtgtcatcaggcagcctcaagcaattcctcaaaaagaccaagaagaaccacaaggccatgaacgcccgggtatggggagcgggctggggcagccacggggacaggacggggttggggcagcctcggggactgggatggtgagggggtgcccggcggcctcggacaggggctgggcgaggatgcggggcgggctccgcaggcccagccgcctctcctgcgcccacccgaccgacggagtcgtgcgtccgccgccaggcctggaagcgctggtgcacgcagatcctgtctgcgctcagcttcctgcacgcctgcagccccccaatcatccacgggaacctgaccagcgacaccatcttcattcagcacaacggcctcatcaagatcggctccgtgtggcaccgaatcttctccaatgcacttccagatgatctccgaagccccatccgcgctgagcgagaggaacttcggaacctgcacttcttccccccagagtatggagaggtggccgatgggaccgctgtggacatcttctcctttgggatgtgtgcgctggagatggctgtactggaaatccagaccaatggggacacccgggtcacagaggaggccattgctcgcgccaggcactcgctgagtgaccccaacatgcgggagttcatcctttgctgcctggcccgggaccctgcccgccggccctctgcccacagcctcctcttccaccgcgtgctcttcgaggtgcactcgctgaagctcctggcagcccactgcttcatccagcaccagtacctcatgcctgagaatgtggtggaggagaagaccaaggccatggacctgcacgcggtcttggcggagcttccccggccccgcaggcccccgctgcagtggcggtactcggaagtctccttcatggagctggacaaattcctggaggatgtcaggaatggaatctacccactgatgaactttgcagccactcgacccctggggctgccccgtgtgctggccccacccccggaggaggtccaaaaggccaagaccccgacgccagagccctttgactctgagaccagaaaggtcatccagatgcagtgcaacctggagagaagcgaggacaaggcgcgctggcatctcactctgcttctggtgctggaagaccggctgcaccggcagctgacctacgacctgctcccaacggacagcgcccaggacctcgcctcggagctcgtgcactatggcttcctccacgaggacgaccggatgaagctggccgccttcctggagagcaccttcctcaagtaccgtgggacccaggcctgacccggagccccagccccaggggaccatgccggggtgctgcctgggcaggccatgttggggagactccagcaccgtggggctgccctcctccatgcgcctgggagcacaaaggccccggtagtgaaggaaccccccgtctcctgagagtggggctgaccctgccttgggcgccgaggggttggggggtgggtgtgggggagccgttaggcctcccaggtccttaggatcagggttgcccccagaaccccttcccatatcctccattctccgccctgagttcctacccaggctgcctggccggggccactgcctcctcagcatgcaggaggctgccctgtagggaaccccagctctggggcttgggggtgagggtcagccctggacagacctctgcccagggaactgctccatggggtctgggagagcagccatcccctgctggcaccatagacccacacaaggagcctgcacagcaagccagcggtgacacacctgcaggtgtcaggcatggcactgggcacaacagggacctggcaggagaaacagaccacagagaggtctggagttgaggctgttgtcagcaaagcccctggtcccacacagctctgccctagagccacctctttgaccctttacccaccctgagaccagaacttgcagcccctctgcagatctcctctggccactgcagcccctccaatgggctttttctctcatgcattccctggcctggaggcgtcagggaccccacatcctccctgctcctcagactcacagcccctccatgttacctcccgcacctcctccctggggcagctgctccctgggcctctgaggatgtcagctcctggctccctgcctctctcccactccactcctggctcagtcttagagatttctatgccctcatggattctacccctgccttcctggcctcttgattcttggcttgcctctcctccaattccaaacttagtgaaatggccttaagcattttaaactgtatgtatacattagcgcattcatgcctttctaaacgcatttcaaatgtcaaccaggaaggcacaccactgtattagttttatactgccgctgtaaaatttaccacaaacttagtgacttaacacaaatttattgcaattctgtaggctggaagtctgactatgggtctcactggactagaatcaaggctggcaggctgccttccttcctggaggttctaggggagactctgtctcctgctccttcaggctgctggcagaatccacatcctttcggtggcagggccaaggtccccactttcttgctgactgtaaactaaggccacttccagcttgtagaggctgcctacattccttggctcttggccccctcctccatcttcagagctagcaggttcagtctgtgtcacgaaccatttctctggttccctgcagacaggaaaggttgtccctaaggactcatgagattaggttgggcccagccagataatacatgataatctccctcctcaaggtttttaatattaaacacatctgcaggacacattttgccatgtaaactaacattcactggttccagggattaaggaatgaacctcttttgttggggaagggtggcattctgctgaccacagcactccaaccaaaagccaaaaaccaaagcaagacttactaacgcatatcaaataaattaaaggtacaaaatcgtgaatctcagttatcttaaatattccaatactatttacaaaattattcaaattctcacgccttccaactcaaaattagcaatctaaagtaatttccatatcctagatggaaaccctcatgctaaactgtctgattatgcatggttctaaatggtttcagtggcaaatacataacattgtactactgattaaactgaacttaaaagcatcaataccaccattgctgcacttaatcatgtctctgttgaatttttccttttaaattttatcttttcagaattatatatgtattgtttttaaagtagaatagttttttttttgaggccaataataaataataaatgcaggctcctactctgatcctctcca

SEQ ID NO: 586190 - DNA, 3766 bp, Homo sapiens
gagcgcggcggctggaaacctctccgcggcccctcgcggcccgcgaatcagccacccctggacccctttggcctggcgctcgccctgggactccctgagggccagtctcctcccaggaccacctccccatgcctctggactcagccgctagcttcctggggatccccctcgaccccctgaaacctgctccaaatccccttagcccagcccttggataggagcccttggctcctgggggcagctaccctccaagccccaccttcccgcagagtggctcagggcctgcagcccacgcttgggcccactggacaggtaaaccaagggaacatgccagggcttcagagcaccttcctagccatggacacggaggagggggtagaggtggtgtggaacgagctccacttcggagacaggaaggccttcgcggcgcacgaggagaagatccagaccgtgttcgagcagctggtgctggtggaccacccgaacatcgtgaagttgcacaagtactggctggatacctctgaggcctgcgcgagggtcatcttcatcacagagtacgtgtcatcaggcagcctcaagcaattcctcaaaaagaccaagaagaaccacaaggccatgaacgcccgggcctggaagcgctggtgcacgcagatcctgtctgcgctcagcttcctgcacgcctgcagccccccaatcatccacgggaacctgaccagcgacaccatcttcattcagcacaacggcctcatcaagatcggctccgtgtggcaccgaatcttctccaatgcacttccagatgatctccgaagccccatccgcgctgagcgagaggaacttcggaacctgcacttcttccccccagagtatggagaggtggccgatgggaccgctgtggacatcttctcctttgggatgtgtgcgctggagatggctgtactggaaatccagaccaatggggacacccgggtcacagaggaggccattgctcgcgccaggcactcgctgagtgaccccaacatgcgggagttcatcctttgctgcctggcccgggaccctgcccgccggccctctgcccacagcctcctcttccaccgcgtgctcttcgaggtgcactcgctgaagctcctggcagcccactgcttcatccagcaccagtacctcatgcctgagaatgtggtggaggagaagaccaaggccatggacctgcacgcggtcttggcggagcttccccggccccgcaggcccccgctgcagtggcggtactcggaagtctccttcatggagctggacaaattcctggaggatgtcaggaatggaatctacccactgatgaactttgcagccactcgacccctggggctgccccgtgtgctggccccacccccggaggaggtccaaaaggccaagaccccgacgccagagccctttgactctgagaccagaaaggtcatccagatgcagtgcaacctggagagaagcgaggacaaggcgcgctggcatctcactctgcttctggtgctggaagaccggctgcaccggcagctgacctacgacctgctcccaacggacagcgcccaggacctcgcctcggagctcgtgcactatggcttcctccacgaggacgaccggatgaagctggccgccttcctggagagcaccttcctcaagtaccgtgggacccaggcctgacccggagccccagccccaggggaccatgccggggtgctgcctgggcaggccatgttggggagactccagcaccgtggggctgccctcctccatgcgcctgggagcacaaaggccccggtagtgaaggaaccccccgtctcctgagagtggggctgaccctgccttgggcgccgaggggttggggggtgggtgtgggggagccgttaggcctcccaggtccttaggatcagggttgcccccagaaccccttcccatatcctccattctccgccctgagttcctacccaggctgcctggccggggccactgcctcctcagcatgcaggaggctgccctgtagggaaccccagctctggggcttgggggtgagggtcagccctggacagacctctgcccagggaactgctccatggggtctgggagagcagccatcccctgctggcaccatagacccacacaaggagcctgcacagcaagccagcggtgacacacctgcaggtgtcaggcatggcactgggcacaacagggacctggcaggagaaacagaccacagagaggtctggagttgaggctgttgtcagcaaagcccctggtcccacacagctctgccctagagccacctctttgaccctttacccaccctgagaccagaacttgcagcccctctgcagatctcctctggccactgcagcccctccaatgggctttttctctcatgcattccctggcctggaggcgtcagggaccccacatcctccctgctcctcagactcacagcccctccatgttacctcccgcacctcctccctggggcagctgctccctgggcctctgaggatgtcagctcctggctccctgcctctctcccactccactcctggctcagtcttagagatttctatgccctcatggattctacccctgccttcctggcctcttgattcttggcttgcctctcctccaattccaaacttagtgaaatggccttaagcattttaaactgtatgtatacattagcgcattcatgcctttctaaacgcatttcaaatgtcaaccaggaaggcacaccactgtattagttttatactgccgctgtaaaatttaccacaaacttagtgacttaacacaaatttattgcaattctgtaggctggaagtctgactatgggtctcactggactagaatcaaggctggcaggctgccttccttcctggaggttctaggggagactctgtctcctgctccttcaggctgctggcagaatccacatcctttcggtggcagggccaaggtccccactttcttgctgactgtaaactaaggccacttccagcttgtagaggctgcctacattccttggctcttggccccctcctccatcttcagagctagcaggttcagtctgtgtcacgaaccatttctctggttccctgcagacaggaaaggttgtccctaaggactcatgagattaggttgggcccagccagataatacatgataatctccctcctcaaggtttttaatattaaacacatctgcaggacacattttgccatgtaaactaacattcactggttccagggattaaggaatgaacctcttttgttggggaagggtggcattctgctgaccacagcactccaaccaaaagccaaaaaccaaagcaagacttactaacgcatatcaaataaattaaaggtacaaaatcgtgaatctcagttatcttaaatattccaatactatttacaaaattattcaaattctcacgccttccaactcaaaattagcaatctaaagtaatttccatatcctagatggaaaccctcatgctaaactgtctgattatgcatggttctaaatggtttcagtggcaaatacataacattgtactactgattaaactgaacttaaaagcatcaataccaccattgctgcacttaatcatgtctctgttgaatttttccttttaaattttatcttttcagaattatatatgtattgtttttaaagtagaatagttttttttttgaggccaataataaataataaatgcaggctcctactctgatcctctcca

SEQ ID NO: 586191 - DNA, 482 bp, Homo sapiens
tggctttcagtcaatgaacacgtgtccctccaacaaatgtttgaatgtagccattgcagagaacaggctgattatcacattacgaaacagaaaaagtagtttccagaaaaacaaataagtattttttgtaataaaatatatgtaagctagtacaaagaagaaagaatctcgaaaaatacgtgtaattccaaggatgagaatttaaatttttattctatacaaatctgccatgtttacactttacccaacattttcatgtattaattatgagatttaaaatttaatttgtggaataaacacattaattcaagacaggaagttccaaaatgtaatatcatattattaattcgctagtgtcattcaaaaacttgataatgtttctcatatatcagctcttttatccacttgtagcttgtttttaggacatttgttctatttttaaaaaatgtatgaataaatacgatacaatgtttaaaaattgc

SEQ ID NO: 586192 - DNA, 641 bp, Homo sapiens
ccacatcagttgactcttcctttcacaagagatttctctgtagcatgcaatcctgtttgatagcatttacccacagtagaacttctttcaaaattggagtcaatcctatcaaactctaccactgcttactctactaagtacctataatattctgaatcccgtgttgtgatttcaacaatattcatggcatcttcaccagaaatagattccatcccaagaaaccactttctttgcttatccgtaagaaccagctcctcagccatctacattttgtcgtgagattgcagcaattcagtcccatcttccagctccacttctagttctcttgctatttccaccacatctgcagttccttcctctgatgcagtcttgaacccttccacgtcatccatgagagttggaatcaacttcttccagactcctgttaatgtagatattttgacctcctcccatgaatcacaaatattcttaatggcatctaaaatggtgcatcctttacagaaggttttcagttaactttgccgagatccatcagaggaatcactatccatggcagctatagcttacatgtatttcttaataataagctttgaagtcagttaccccgatccatgggctgcttgatgttggttagcaggctg

SEQ ID NO: 586193 - DNA, 2359 bp, Homo sapiens
  misc_feature (16)..(16): n is a, c, g, or t
  misc_feature (19)..(19): n is a, c, g, or t
  misc_feature (127)..(127): n is a, c, g, or t
  misc_feature (129)..(129): n is a, c, g, or t
tgactcagaggatgcnttngcgggcttttcccctctctcccactccactcctggctcagtcttagagatttctatgccctcatggattctacccctgccttcctggcctcttgattctgggcttgcntntcctccaattccaaacttagtgaaatggccttaagcattttaaactgtatgtatacattagcgcattcatgcctttctaaacgcatttcaaatgtcaaccaggaaggcacaccactgtattagttttatactgccgctgtaaaatttaccacaaacttagtgacttaacacaaatttattgcaattctgtaggctggaagtctgactatgggtctcactggactagaatcaaggctggcaggctgccttccttcctggaggttctaggggagactctgtctcctgctccttcaggctgctggcagaatccacatcctttcggtggcaggggttggggggtgggtgtgggggagccgttaggcctcccaggtccttaggatcagggttgcccccagaaccccttcccatatcctccattctccgccctgagttcctacccaggctgcctggccggggccactgcctcctcagcatgcaggaggctgccctgtagggaaccccagctctggggcttgggggtgagggtcagccctggacagacctctgcccagggaactgctccatggggtctgggagagcagccatcccctgctggcaccatagacccacacaaggagcctgcacagcaagccagcggtgacacacctgcaggtgtcaggcatggcactgggcacaacagggacctggcaggagaaacagaccacagagaggtctggagttgaggctgttgtcagcaaagcccctggtcccacacagctctgccctagagccacctctttgaccctttacccaccctgagaccagaacttgcagcccctctgcagatctcctctggccactgcagcccctccaatgggctttttctctcatgcattccctggcctggaggcgtcagggaccccacatcctccctgctcctcagactcacagcccctccatgttacctcccgcacctcctccctggggcagctgctccctgggcctctgaggatgtcagctcctggctccctgcctctctcccactccactcctggctcagtcttagagatttctatgccctcatggattctacccctgccttcctggcctcttgattcttggcttgcctctcctccaattccaaacttagtgaaatggccttaagcattttaaactgtatgtatacattagcgcattcatgcctttctaaacgcatttcaaatgtcaaccaggaaggcacaccactgtattagttttatactgccgctgtaaaatttaccacaaacttagtgacttaacacaaatttattgcaattctgtaggctggaagtctgactatgggtctcactggactagaatcaaggctggcaggctgccttccttcctggaggttctaggggagactctgtctcctgctccttcaggctgctggcagaatccacatcctttcggtggcagggccaaggtccccactttcttgctgactgtaaactaaggccacttccagcttgtagaggctgcctacattccttggctcttggccccctcctccatcttcagagctagcaggttcagtctgtgtcacgaaccatttctctggttccctgcagacaggaaaggttgtccctaaggactcatgagattaggttgggcccagccagataatacatgataatctccctcctcaaggtttttaatattaaacacatctgcaggacacattttgccatgtaaactaacattcactggttccagggattaaggaatgaacctcttttgttggggaagggtggcattctgctgaccacagcactccaaccaaaagccaaaaaccaaagcaagacttactaacgcatatcaaataaattaaaggtacaaaatcgtgaatctcagttatcttaaatattccaatactatttacaaaattattcaaattctcacgccttccaactcaaaattagcaatctaaagtaatttccatatcctagatggaaaccctcatgctaaactgtctgattatgcatggttctaaatggtttcagtggcaaatacataacattgtactactgattaaactgaacttaaaagcatcaataccaccattgctgcacttaatcatgtctctgttgaatttttccttttaaattttatcttttcagaattatatatgtattgtttttaaagtagaatagttttttttttgaggccaataataaataataaatgcaggctcctactctgatcctctcca

SEQ ID NO: 586194 - DNA, 393 bp, Homo sapiens
  misc_feature (35)..(35): n is a, c, g, or t
  misc_feature (135)..(135): n is a, c, g, or t
  misc_feature (167)..(167): n is a, c, g, or t
acaattaccaatactttttatacagttcatatttnggtacatcaacactattttatttacactctatttatgtacattaacatctttctaaagtcagtgcattgtcaacaagttttatacagtaatttacaaggngaatgtagttaatagttaatttaataaatttnctgctagttcatgccttcccaaaattaaccaccatcaccacccaccacacagctcaccaccccttagtagactcccctacctgcttccataaaacatctgtaaagacaattatttaaaatcttccactttttaatgggaatggacagattttatatactgaaaatcttgaacctataaagtatgcatttggtctgactttattacattagacaatttaggccagtc

SEQ ID NO: 586195 - DNA, 319 bp, Homo sapiens
  misc_feature (9)..(9): n is a, c, g, or t
  misc_feature (80)..(80): n is a, c, g, or t
  misc_feature (107)..(107): n is a, c, g, or t
  misc_feature (132)..(132): n is a, c, g, or t
  misc_feature (187)..(187): n is a, c, g, or t
  misc_feature (193)..(193): n is a, c, g, or t
  misc_feature (303)..(303): n is a, c, g, or t
gaattcggnacgaggatctctcttggtgcctcttttataagggcactaatcccatttatgaggacactgcccttattttnttaatcaccttccaaaggccccacgcntcctcgtgccgaattcggaggaagnagtctcgaggagggggactacaggtgcatgccaccacgcccggctaatttttggnattttnagtagagacggggtttcaccctgttagccaggatggtctcgatatcctgacctcatgatctgcccatctcagcctcccaaagtgctagattacaaggtgtgagccaccgngcccagccaagcatca

SEQ ID NO: 586196 - DNA, 4067 bp, Homo sapiens
aagggcggacggggggcggattaggattggggcacttacgcggcggtatagtggtgcgctgggcgggagagggtgtggggtcgacgggtggaccagcgggatcatggagcgcggcggaaggaggggggaagagaaaataagagaggggggggaggggggggaaggtaaaggagagggaggtggggggggggggataagagggggaacctcggtcaaggttagcgggcagggggctacaaaaaaaagagcgaggggggcggggggagggggtatttcacacataaccctttattcacccccaggtaaaccaagggaacatgccagggcttcagagcaccttcctagccatggacacggaggagggggtagaggtggtgtggaacgagctccacttcggagacaggaaggccttcgcggcgcacgaggtgagaccgctgccccctcctcatcctgcttgggtgaccacctgctgaccacccagcgaccaccctccctccccaggagaagatccagaccgtgttcgagcagctggtgctggtggaccacccgaacatcgtgaagttgcacaagtactggctggatacctctgaggcctgcgcgagggtgagcacgggcaaggccccgggcaggcagagaccacagctaggtggggcgggcatggggacgaacccgcagctggtggaaatcctgagctcgcaccgtgcaggtcatcttcatcacagagtacgtgtcatcaggcagcctcaagcaattcctcaaaaagaccaagaagaaccacaaggccatgaacgcccgggtatggggagcgggctggggcagccacggggacaggacggggttggggcagcctcggggactgggatggtgagggggtgcccggcggcctcggacaggggctgggcgaggatgcggggcgggctccgcaggcccagccgcctctcctgcgcccacccgaccgacggagtcgtgcgtccgccgccaggcctggaagcgctggtgcacgcagatcctgtctgcgctcagcttcctgcacgcctgcagccccccaatcatccacgggaacctgaccagcgacaccatcttcattcagcacaacggcctcatcaagatcggctccgtgtggcaccgaatcttctccaatgcacttccagatgatctccgaagccccatccgcgctgagcgagaggaacttcggaacctgcacttcttccccccagagtatggagaggtggccgatgggaccgctgtggacatcttctcctttgggatgtgtgcgctggagatggctgtactggaaatccagaccaatggggacacccgggtcacagaggaggccattgctcgcgccaggcactcgctgagtgaccccaacatgcgggagttcatcctttgctgcctggcccgggaccctgcccgccggccctctgcccacagcctcctcttccaccgcgtgctcttcgaggtgcactcgctgaagctcctggcagcccactgcttcatccagcaccagtacctcatgcctgagaatgtggtggaggagaagaccaaggccatggacctgcacgcggtcttggcggagcttccccggccccgcaggcccccgctgcagtggcggtactcggaagtctccttcatggagctggacaaattcctggaggatgtcaggaatggaatctacccactgatgaactttgcagccactcgacccctggggctgccccgtgtgctggccccacccccggaggaggtccaaaaggccaagaccccgacgccagagccctttgactctgagaccagaaaggtcatccagatgcagtgcaacctggagagaagcgaggacaaggcgcgctggcatctcactctgcttctggtgctggaagaccggctgcaccggcagctgacctacgacctgctcccaacggacagcgcccaggacctcgcctcggagctcgtgcactatggcttcctccacgaggacgaccggatgaagctggccgccttcctggagagcaccttcctcaagtaccgtgggacccaggcctgacccggagccccagccccaggggaccatgccggggtgctgcctgggcaggccatgttggggagactccagcaccgtggggctgccctcctccatgcgcctgggagcacaaaggccccggtagtgaaggaaccccccgtctcctgagagtggggctgaccctgccttgggcgccgaggggttggggggtgggtgtgggggagccgttaggcctcccaggtccttaggatcagggttgcccccagaaccccttcccatatcctccattctccgccctgagttcctacccaggctgcctggccggggccactgcctcctcagcatgcaggaggctgccctgtagggaaccccagctctggggcttgggggtgagggtcagccctggacagacctctgcccagggaactgctccatggggtctgggagagcagccatcccctgctggcaccatagacccacacaaggagcctgcacagcaagccagcggtgacacacctgcaggtgtcaggcatggcactgggcacaacagggacctggcaggagaaacagaccacagagaggtctggagttgaggctgttgtcagcaaagcccctggtcccacacagctctgccctagagccacctctttgaccctttacccaccctgagaccagaacttgcagcccctctgcagatctcctctggccactgcagcccctccaatgggctttttctctcatgcattccctggcctggaggcgtcagggaccccacatcctccctgctcctcagactcacagcccctccatgttacctcccgcacctcctccctggggcagctgctccctgggcctctgaggatgtcagctcctggctccctgcctctctcccactccactcctggctcagtcttagagatttctatgccctcatggattctacccctgccttcctggcctcttgattcttggcttgcctctcctccaattccaaacttagtgaaatggccttaagcattttaaactgtatgtatacattagcgcattcatgcctttctaaacgcatttcaaatgtcaaccaggaaggcacaccactgtattagttttatactgccgctgttggaagtctgactatgggtctcactggactagaatcaaggctggcaggctgccttccttcctggaggttctaggggagactctgtctcctgctccttcaggctgctggcagaatccacatcctttcggtggcagggccaaggtccccactttcttgctgactgtaaactaaggccacttccagcttgtagaggctgcctacattccttggctcttggccccctcctccatcttcagagctagcaggttcagtctgtgtcacgaaccatttctctggttccctgcagacaggaaaggttgtccctaaggactcatgagattaggttgggcccagccagataatacatgataatctccctcctcaaggtttttaatattaaacacatctgcaggacacattttgccatgtaaactaacattcactggttccagggattaaggaatgaacctcttttgttggggaagggtggcattctgctgaccacagcactccaaccaaaagccaaaaaccaaagcaagacttactaacgcatatcaaataaattaaaggtacaaaatcgtgaatctcagttatcttaaatattccaatactatttacaaaattattcaaattctcacgccttccaactcaaaattagcaatctaaagtaatttccatatcctagatggaaaccctcatgctaaactgtctgattatgcatggttctaaatggtttcagtggcaaatacataacattgtactactgattaaactgaacttaaaagcatcaataccaccattgctgcacttaatcatgtctctgttgaatttttccttttaaattttatcttttcagaattatatatgtattgtttttaaagtagaatagttttttttttgaggccaataataaataataaatgcaggctcctactctgatcctctcca

SEQ ID NO: 586197 - DNA, 3992 bp, Homo sapiens
  misc_feature (3940)..(3940): n is a, c, g, or t
aagggcggacggggggcggattaggattggggcacttacgcggcggtatagtggtgcgctgggcgggagagggtgtggggtcgacgggtggaccagcgggatcatggagcgcggcggaaggaggggggaagagaaaataagagaggggggggaggggggggaaggtaaaggagagggaggtggggggggggggataagagggggaacctcggtcaaggttagcgggcagggggctacaaaaaaaagagcgaggggggcggggggagggggtatttcacacataaccctttattcacccccaggtaaaccaagggaacatgccagggcttcagagcaccttcctagccatggacacggaggagggggtagaggtggtgtggaacgagctccacttcggagacaggaaggccttcgcggcgcacgaggtgagaccgctgccccctcctcatcctgcttgggtgaccacctgctgaccacccagcgaccaccctccctccccaggagaagatccagaccgtgttcgagcagctggtgctggtggaccacccgaacatcgtgaagttgcacaagtactggctggatacctctgaggcctgcgcgagggtgagcacgggcaaggccccgggcaggcagagaccacagctaggtggggcgggcatggggacgaacccgcagctggtggaaatcctgagctcgcaccgtgcaggtcatcttcatcacagagtacgtgtcatcaggcagcctcaagcaattcctcaaaaagaccaagaagaaccacaaggccatgaacgcccgggtatggggagcgggctggggcagccacggggacaggacggggttggggcagcctcggggactgggatggtgagggggtgcccggcggcctcggacaggggctgggcgaggatgcggggcgggctccgcaggcccagccgcctctcctgcgcccacccgaccgacggagtcgtgcgtccgccgccaggcctggaagcgctggtgcacgcagatcctgtctgcgctcagcttcctgcacgcctgcagccccccaatcatccacgggaacctgaccagcgacaccatcttcattcagcacaacggcctcatcaagatcggctccgtgtggcaccgaatcttctccaatgcacttccagatgatctccgaagccccatccgcgctgagcgagaggaacttcggaacctgcacttcttccccccagagtatggagaggtggccgatgggaccgctgtggacatcttctcctttgggatgtgtgcgctggagatggctgtactggaaatccagaccaatggggacacccgggtcacagaggaggccattgctcgcgccaggcactcgctgagtgaccccaacatgcgggagttcatcctttgctgcctggcccgggaccctgcccgccggccctctgcccacagcctcctcttccaccgcgtgctcttcgaggtgcactcgctgaagctcctggcagcccactgcttcatccagcaccagtacctcatgcctgagaatgtggtggaggagaagaccaaggccatggacctgcacgcggtcttggcggagcttccccggccccgcaggcccccgctgcagtggcggtactcggaagtctccttcatggagctggacaaattcctggaggatgtcaggaatggaatctacccactgatgaactttgcagccactcgacccctggggctgccccgtgtgctggccccacccccggaggaggtccaaaaggccaagaccccgacgccagagccctttgactctgagaccagaaaggtcatccagatgcagtgcaacctggagagaagcgaggacaaggcgcgctggcatctcactctgcttctggtgctggaagaccggctgcaccggcagctgacctacgacctgctcccaacggacagcgcccaggacctcgcctcggagctcgtgcactatggcttcctccacgaggacgaccggatgaagctggccgccttcctggagagcaccttcctcaagtaccgtgggacccaggcctgacccggagccccagccccaggggaccatgccggggtgctgcctgggcaggccatgttggggagactccagcaccgtggggctgccctcctccatgcgcctgggagcacaaaggccccggtagtgaaggaaccccccgtctcctgagagtggggctgaccctgccttgggcgccgaggggttggggggtgggtgtgggggagccgttaggcctcccaggtccttaggatcagggttgcccccagaaccccttcccatatcctccattctccgccctgagttcctacccaggctgcctggccggggccactgcctcctcagcatgcaggaggctgccctgtagggaaccccagctctggggcttgggggtgagggtcagccctggacagacctctgcccagggaactgctccatggggtctgggagagcagccatcccctgctggcaccatagacccacacaaggagcctgcacagcaagccagcggtgacacacctgcaggtgtcaggcatggcactgggcacaacagggacctggcaggagaaacagaccacagagaggtctggagttgaggctgttgtcagcaaagcccctggtcccacacagctctgccctagagccacctctttgaccctttacccaccctgagaccagaacttgcagcccctctgcagatctcctctggccactgcagcccctccaatgggctttttctctcatgcattccctggcctggaggcgtcagggaccccacatcctccctgctcctcagactcacagcccctccatgttacctcccgcacctcctccctggggcagctgctccctgggcctctgaggatgtcagctcctggctccctgcctctctcccactccactcctggctcagtcttagagatttctatgccctcatggattctacccctgccttcctggcctcttgattcttggcttgcctctcctccaattccaaacttagtgaaatggccttaagcattttaaactgtatgtatacattagcgcattcatgcctttctaaacgcatttcaaatgtcaaccaggaaggcacaccactgtattagttttatactgccgctgtaaaatttaccacaaacttagtgacttaacacaaatttattgcaattctgtaggctggaagtctgactatgggtctcactggactagaatcaaggctggcaggctgccttccttcctggaggttctaggggagactctgtctcctgctccttcaggctgctggcagaatccacatcctttcggtggcagggccaaggtccccactttcttgctgactgtaaactaaggccacttccagcttgtagaggctgcctacattccttggctcttggccccctcctccatcttcagagctagcaggttcagtctgtgtcacgaaccatttctctggttccctgcagacaggaaaggttgtccctaaggactcatgagattaggttgggcccagccagataatacatgataatctccctcctcaaggtttttaatattaaacacatctgcaggacacattttgccatgtaaactaacattcactggttccagggattaaggaatgaacctcttttgttggggaagggtggcattctgctgaccacagcactccaaccaaaagccaaaaaccaaagcaagacttactaacgcatatcaaataaattaaaggtacaaaatcgtgaatctcagttatcttaaatattccaatactatttacaaaattattcaaattctcacgccttccaactcaaaattagcaatctaaagtaatttccatatcctagatggaaaccctcatgctaaactgtctgattatgcatggttctaaatggtttcccgtggcccaatgcatatcccattgtattntctccttttatttgattcttaaattgtatcaaaaccaccattgatgcactta

SEQ ID NO: 586198 - DNA, 354 bp, Homo sapiens
caaagagaaacttgggacatgtgctcaaattggtgacatgttcaaaaatgttcactgcaaatattcacctagttgggcaggtgtggcagctcacacctgtaatccccacactttgggaggctgaggtgcgaggattgcttgagcccaggagctgagaccagcctgcgcaataaggcaagaccctgtctgcagacacatcaacaaaattagccaggcatgctagcacacctgtagtcccacgctacttgggacggctggggcgcgacgactgcttcagcttgggcgcgtccagcctgccgtaagccacgctcccccgctcgggcaacacactgacgaccctgtctcaaaaaacac

SEQ ID NO: 586199 - DNA, 3956 bp, Homo sapiens
aagggcggacggggggcggattaggattggggcacttacgcggcggtatagtggtgcgctgggcgggagagggtgtggggtcgacgggtggaccagcgggatcatggagcgcggcggaaggaggggggaagagaaaataagagaggggggggaggggggggaaggtaaaggagagggaggtggggggggggggataagagggggaacctcggtcaaggttagcgggcagggggctacaaaaaaaagagcgaggggggcggggggagggggtatttcacacataaccctttattcacccccaggtaaaccaagggaacatgccagggcttcagagcaccttcctagccatggacacggaggagggggtagaggtggtgtggaacgagctccacttcggagacaggaaggccttcgcggcgcacgaggtgagaccgctgccccctcctcatcctgcttgggtgaccacctgctgaccacccagcgaccaccctccctccccaggagaagatccagaccgtgttcgagcagctggtgctggtggaccacccgaacatcgtgaagttgcacaagtactggctggatacctctgaggcctgcgcgagggtgagcacgggcaaggccccgggcaggcagagaccacagctaggtggggcgggcatggggacgaacccgcagctggtggaaatcctgagctcgcaccgtgcaggtcatcttcatcacagagtacgtgtcatcaggcagcctcaagcaattcctcaaaaagaccaagaagaaccacaaggccatgaacgcccgggtatggggagcgggctggggcagccacggggacaggacggggttggggcagcctcggggactgggatggtgagggggtgcccggcggcctcggacaggggctgggcgaggatgcggggcgggctccgcaggcccagccgcctctcctgcgcccacccgaccgacggagtcgtgcgtccgccgccaggcctggaagcgctggtgcacgcagatcctgtctgcgctcagcttcctgcacgcctgcagccccccaatcatccacgggaacctgaccagcgacaccatcttcattcagcacaacggcctcatcaagatcggctccgtgtggcaccgaatcttctccaatgcacttccagatgatctccgaagccccatccgcgctgagcgagaggaacttcggaacctgcacttcttccccccagagtatggagaggtggccgatgggaccgctgtggacatcttctcctttgggatgtgtgcgctggagatggctgtactggaaatccagaccaatggggacacccgggtcacagaggaggccattgctcgcgccaggcactcgctgagtgaccccaacatgcgggagttcatcctttgctgcctggcccgggaccctgcccgccggccctctgcccacagcctcctcttccaccgcgtgctcttcgaggtgcactcgctgaagctcctggcagcccactgcttcatccagcaccagtacctcatgcctgagaatgtggtggaggagaagaccaaggccatggacctgcacgcggtcttggcggagcttccccggccccgcaggcccccgctgcagtggcggtactcggaagtctccttcatggagctggacaaattcctggaggatgtcaggaatggaatctacccactgatgaactttgcagccactcgacccctggggctgccccgtgtgctggccccacccccggaggaggtccaaaaggccaagaccccgacgccagagccctttgactctgagaccagaaaggtcatccagatgcagtgcaacctggagagaagcgaggacaaggcgcgctggcatctcactctgcttctggtgctggaagaccggctgcaccggcagctgacctacgacctgctcccaacggacagcgcccaggacctcgcctcggagctcgtgcactatggcttcctccacgaggacgaccggatgaagctggccgccttcctggagagcaccttcctcaagtaccgtgggacccaggcctgacccggagccccagccccaggggaccatgccggggtgctgcctgggcaggccatgttggggagactccagcaccgtggggctgccctcctccatgcgcctgggagcacaaaggccccggtagtgaaggaaccccccgtctcctgagagtggggctgaccctgccttgggcgccgaggggttggggggtgggtgtgggggagccgttaggcctcccaggtccttaggatcagggttgcccccagaaccccttcccatatcctccattctccgccctgagttcctacccaggctgcctggccggggccactgcctcctcagcatgcaggaggctgccctgtagggaaccccagctctggggcttgggggtgagggtcagccctggacagacctctgcccagggaactgctccatggggtctgggagagcagccatcccctgctggcaccatagacccacacaaggagcctgcacagcaagccagcggtgacacacctgcaggtgtcaggcatggcactgggcacaacagggacctggcaggagaaacagaccacagagaggtctggagttgaggctgttgtcagcaaagcccctggtcccacacagctctgccctagagccacctctttgaccctttacccaccctgagaccagaacttgcagcccctctgcagatctcctctggccactgcagcccctccaatgggctttttctctcatgcattccctggcctggaggcgtcagggaccccacatcctccctgctcctcagactcacagcccctccatgttacctcccgcacctcctccctggggcagctgctccctgggcctctgaggatgtcagctcctggctccctgcctctctcccactccactcctggctcagtcttagagatttctatgccctcatggattctacccctgccttcctggcctcttgattcttggcttgcctctcctccaattccaaacttagtgaaatggccttaagcattttaaactgtatgtatacattagcgcattcatgcctttctaaacgcatttcaaatgtcaaccaggaaggcacaccactgtattagttttatactgccgctgtaaaatttaccacaaacttagtgacttaacacaaatttattgcaattctgtaggctggaagtctgactatgggtctcactggactagaatcaaggctggcaggctgccttccttcctggaggttctaggggagactctgtctcctgctccttcaggctgctggcagaatccacatcctttcggtggcagggccaaggtccccactttcttgctgactgtaaactaaggccacttccagcttgtagaggctgcctacattccttggctcttggccccctcctccatcttcagagctagcaggttcagtctgtgtcacgaaccatttctctggttccctgcagacaggaaaggttgtccctaaggactcatgagattaggttgggcccagccagataatacatgataatctccctcctcaaggtttttaatattaaacacatctgcaggacacattttgccatgtaaactaacattcactggttccagggattaaggaatgaacctcttttgttggggaagggtggcattctgctgaccacagcactccaaccaaaagccaaaaaccaaagcaagacttactaacgcatatcaaataaattaaaggtacctggctggcatcctctgggaggagggcggtcacctgcctcagtctcctggcggcatcattccagtgttacgggcatcatagctgcatgggtgttattacagcttcattaccacacgtctcaggagagaacacggtgttctaggatggcatttcttgcacaactttttgttttccctggagttaataattgccttttttttggtttgccta

SEQ ID NO: 586200 - DNA, 1250 bp, Homo sapiens
  misc_feature (16)..(16): n is a, c, g, or t
  misc_feature (19)..(19): n is a, c, g, or t
  misc_feature (127)..(127): n is a, c, g, or t
  misc_feature (129)..(129): n is a, c, g, or t
tgactcagaggatgcnttngcgggcttttcccctctctcccactccactcctggctcagtcttagagatttctatgccctcatggattctacccctgccttcctggcctcttgattctgggcttgcntntcctccaattccaaacttagtgaaatggccttaagcattttaaactgtatgtatacattagcgcattcatgcctttctaaacgcatttcaaatgtcaaccaggaaggcacaccactgtattagttttatactgccgctgtaaaatttaccacaaacttagtgacttaacacaaatttattgcaattctgtaggctggaagtctgactatgggtctcactggactagaatcaaggctggcaggctgccttccttcctggaggttctaggggagactctgtctcctgctccttcaggctgctggcagaatccacatcctttcggtggcagggccaaggtccccactttcttgctgactgtaaactaaggccacttccagcttgtagaggctgcctacattccttggctcttggccccctcctccatcttcagagctagcaggttcagtctgtgtcacgaaccatttctctggttccctgcagacaggaaaggttgtccctaaggactcatgagattaggttgggcccagccagataatacatgataatctccctcctcaaggtttttaatattaaacacatctgcaggacacattttgccatgtaaactaacattcactggttccagggattaaggaatgaacctcttttgttggggaagggtggcattctgctgaccacagcactccaaccaaaagccaaaaaccaaagcaagacttactaacgcatatcaaataaattaaaggtacaaaatcgtgaatctcagttatcttaaatattccaatactatttacaaaattattcaaattctcacgccttccaactcaaaattagcaatctaaagtaatttccatatcctagatggaaaccctcatgctaaactgtctgattatgcatggttctaaatggtttcagtggcaaatacataacattgtactactgattaaactgaacttaaaagcatcaataccaccattgctgcacttaatcatgtctctgttgaatttttccttttaaattttatcttttcagaattatatatgtattgtttttaaagtagaatagttttttttttgaggccaataataaataataaatgcaggctcctactctgatcctctcca

SEQ ID NO: 586201 - DNA, 737 bp, Homo sapiens
gagggggcaagagccaaggaatgtaggcagctctacaagctggaagtgagcttagtttcagtctgtgtcacgaaccatttctctggttccctgcagacaggaaaggttgtccctaaggactcatgagattaggttgggcccagccagataatacatgataatctccctcctcaaggtttttaatattaaacacatctgcaggacacattttgccatgtaaactaacattcactggttccagggattaaggaatgaacctcttttgttggggaagggtggcattctgctgaccacagcactccaaccaaaagccaaaaaccaaagcaagacttactaacgcatatcaaataaattaaaggtacaaaatcgtgaatctcagttatcttaaatattccaatactatttacaaaattattcaaattctcacgccttccaactcaaaattagcaatctaaagtaatttccatatcctagatggaaaccctcatgctaaactgtctgattatgcatggttctaaatggtttcagtggcaaatacataacattgtactactgattaaactgaacttaaaagcatcaataccaccattgctgcacttaatcatgtctctgttgaatttttccttttaaattttatcttttcagaattatatatgtattgtttttaaagtagaatagttttttttttgaggccaataataaataataaatgcaggctcctactctgatcctctcca

SEQ ID NO: 586202 - DNA, 248 bp, Homo sapiens
  misc_feature (183)..(183): n is a, c, g, or t
  misc_feature (188)..(188): n is a, c, g, or t
tcaaaggagattgttctggagctttaagatgtaatataatcccagcagttagaaagcccaatgcaatagggtcacatgcgcccaggagttcaagaccttcctgggcaacatagggagaccctgtctctgtgaaaagtaaaacaaattcgcctgccttgttccccccccctttttcccttctcnccttnaatccctgaggtaggagggtcagtagggtccaggagattgaggctgcagtgagccatgac

SEQ ID NO: 586203 - DNA, 3465 bp, Homo sapiens
aagggcggacggggggcggattaggattggggcacttacgcggcggtatagtggtgcgctgggcgggagagggtgtggggtcgacgggtggaccagcgggatcatggagcgcggcggaaggaggggggaagagaaaataagagaggggggggaggggggggaaggtaaaggagagggaggtggggggggggggataagagggggaacctcggtcaaggttagcgggcagggggctacaaaaaaaagagcgaggggggcggggggagggggtatttcacacataaccctttattcacccccaggtaaaccaagggaacatgccagggcttcagagcaccttcctagccatggacacggaggagggggtagaggtggtgtggaacgagctccacttcggagacaggaaggccttcgcggcgcacgaggtgagaccgctgccccctcctcatcctgcttgggtgaccacctgctgaccacccagcgaccaccctccctccccaggagaagatccagaccgtgttcgagcagctggtgctggtggaccacccgaacatcgtgaagttgcacaagtactggctggatacctctgaggcctgcgcgagggtgagcacgggcaaggccccgggcaggcagagaccacagctaggtggggcgggcatggggacgaacccgcagctggtggaaatcctgagctcgcaccgtgcaggtcatcttcatcacagagtacgtgtcatcaggcagcctcaagcaattcctcaaaaagaccaagaagaaccacaaggccatgaacgcccgggtatggggagcgggctggggcagccacggggacaggacggggttggggcagcctcggggactgggatggtgagggggtgcccggcggcctcggacaggggctgggcgaggatgcggggcgggctccgcaggcccagccgcctctcctgcgcccacccgaccgacggagtcgtgcgtccgccgccaggcctggaagcgctggtgcacgcagatcctgtctgcgctcagcttcctgcacgcctgcagccccccaatcatccacgggaacctgaccagcgacaccatcttcattcagcacaacggcctcatcaagatcggctccgtgtggcaccgaatcttctccaatgcacttccagatgatctccgaagccccatccgcgctgagcgagaggaacttcggaacctgcacttcttccccccagagtatggagaggtggccgatgggaccgctgtggacatcttctcctttgggatgtgtgcgctggagatggctgtactggaaatccagaccaatggggacacccgggtcacagaggaggccattgctcgcgccaggcactcgctgagtgaccccaacatgcgggagttcatcctttgctgcctggcccgggaccctgcccgccggccctctgcccacagcctcctcttccaccgcgtgctcttcgaggtgcactcgctgaagctcctggcagcccactgcttcatccagcaccagtacctcatgcctgagaatgtggtggaggagaagaccaaggccatggacctgcacgcggtcttggcggagcttccccggccccgcaggcccccgctgcagtggcggtactcggaagtctccttcatggagctggacaaattcctggaggatgtcaggaatggaatctacccactgatgaactttgcagccactcgacccctggggctgccccgtgtgctggccccacccccggaggaggtccaaaaggccaagaccccgacgccagagccctttgactctgagaccagaaaggtcatccagatgcagtgcaacctggagagaagcgaggacaaggcgcgctggcatctcactctgcttctggtgctggaagaccggctgcaccggcagctgacctacgacctgctcccaacggacagcgcccaggacctcgcctcggagctcgtgcactatggcttcctccacgaggacgaccggatgaagctggccgccttcctggagagcaccttcctcaagtaccgtgggacccaggcctgacccggagccccagccccaggggaccatgccggggtgctgcctgggcaggccatgttggggagactccagcaccgtggggctgccctcctccatgcgcctgggagcacaaaggccccggtagtgaaggaaccccccgtctcctgagagtggggctgaccctgccttgggcgccgaggggttggggggtgggtgtgggggagccgttaggcctcccaggtccttaggatcagggttgcccccagaaccccttcccatatcctccattctccgccctgagttcctacccaggctgcctggccggggccactgcctcctcagcatgcaggaggctgccctgtagggaaccccagctctggggcttgggggtgagggtcagccctggacagacctctgcccagggaactgctccatggggtctgggagagcagccatcccctgctggcaccatagacccacacaaggagcctgcacagcaagccagcggtgacacacctgcaggtgtcaggcatggcactgggcacaacagggacctggcaggagaaacagaccacagagaggtctggagttgaggctgttgtcagcaaagcccctggtcccacacagctctgccctagagccacctctttgaccctttacccaccctgagaccagaacttgcagcccctctgcagatctcctctggccactgcagcccctccaatgggctttttctctcatgcattccctggcctggaggcgtcagggaccccacatcctccctgctcctcagactcacagcccctccatgttacctcccgcacctcctccctggggcagctgctccctgggcctctgaggatgtcagctcctggctccctgcctctctcccactccactcctggctcagtcttagagatttctatgccctcatggattctacccctgccttcctggcctcttgattcttggcttgcctctcctccaattccaaacttagtgaaatggccttaagcattttaaactgtatgtatacattagcgcattcatgcctttctaaacgcatttcaaaaatcgtgaatctcagttatcttaaatattccaatactatttacaaaattattcaaattctcacgccttccaactcaaaattagcaatctaaagtaatttccatatcctagatggaaaccctcatgctaaactgtctgattatgcatggttctaaatggtttcagtggcaaatacataacattgtactactgattaaactgaacttaaaagcatcaataccaccattgctgcacttaatcatgtctctgttgaatttttccttttaaattttatcttttcagaattatatatgtattgtttttaaagtagaatagttttttttttgaggccaataataaataataaatgcaggctcctactctgatcctctcca

SEQ ID NO: 586204 - DNA, 110 bp, Homo sapiens
tgtttgcgcctcagcatggaggaggcgtgacaggcgtcacggagtctgggagtagtacaaccacgtcagggtaggttagtacctggttaggctttgtgtactagtgttcc

SEQ ID NO: 586205 - DNA, 107 bp, Homo sapiens
atattatcacctggcatattcaaaagggacttatcttttcctttgatctgcaatcctctcttttcccccaacttttttcaatcttattccacaaaatataccgggat

SEQ ID NO: 586206 - DNA, 162 bp, Homo sapiens
tctagaggatctcatttggcgaggcagtctcgtgcacaatccttaaaggtgtcgtcctgtacgctgctactcctgggtcaaagactgaacggcctggatctatgtctcagagtcgatttccatggtattgctgggtttccctactttgaactacttgtattc

SEQ ID NO: 586207 - DNA, 1042 bp, Homo sapiens
cccaagcgttcgatagaattatacagcagatagttatccaggaatgacacaggacaggaccctgagtccacaccttaggaaaacaatagattattaaggaattgtcggtacgaagtgttggttaatgaaaatgaagttaagcagtggaaagaacaggcggaagaagcatgagagaagagcacaatgagctacagcagaaactggaaaagagtagaacgagaatgtgatgctaagactcaagagataggaagcacgtatgatgcagaccgttaaataaacatgaaagagaaacttgcaagaggcagactcactgagcatcaagcaagtcgaagcagctaggtggcggacctcacagaactagctccaatgagctcagctaggaggtgccagtctgtagcttcgaatcccaggtggaccctcgacctagggagccaccaggaagggccctgttgccttgccatctgtgcctgagcaattcttcgtcccgtaatcacatccccacccaaggatcaccgacacacgatcccaccgcgaaaccaacagagcgtcgaaggccaacacccccccgcgcgtacaagatacatgacacacacaaaacgaacaaagaacaaaccgatcagaaccgcgacccgaccgcacaacgaactagctacaaagcaaaagggtgaagacaaaaggagtaacgggtaggtccagccagtcaccagatggacagaacagaggagacgcccagatgcgcgaaggtgaacatagacaccagccagggagcccccctgccaccaccaccgacccagcccaacggcacacccaccacacaatagatctgcgcgacgacgacccagccggcgagaagagcggcgcgacggaccatgaggcggaaccggcgaacatcaccacaacgatgggggcacagaggcacgagacgcagcgggagcgacccgcggaacaacataggcgaccgacgtccagccgaccggccggacataccagcctcaggagggagagcggcgcgacagacagagagcgggatcagcccaggacc

SEQ ID NO: 586208 - DNA, 242 bp, Homo sapiens
  misc_feature (32)..(33): n is a, c, g, or t
ggaacttagttttggtttaagtcatttttganngcttttttccaatggaaaatgtaaaaaccaggttttagcaaaaagcccccctttggctctttttgggaaatgttctttatattttaatgtgaggaaaaaccctaagaaccaactaaattgtgatttatgatcttcctttattttaatgggaaaggttttaaaaaatgttcccgattggccatattgtaaaaaaaacatgtttttttcca

SEQ ID NO: 586209 - DNA, 214 bp, Homo sapiens
ggtatctacacggatccccgagtgggtctgcatcaggagaagctcgtgacaggtgtcagttgctgcgccgagggacgagctcggtttgcgcattcagacctaaccagttgaagctagagtctacagccactaaatttgcttcaggccaccattagtttctcacaacttagtaccttacttgctcttgaggtccactactaaaggggaggtaggt

SEQ ID NO: 586210 - DNA, 126 bp, Homo sapiens
gttttaaaaaaaaaaaaaattttaaccccccctgtggtaagggtttttttttccctggaggggaaaatttttcctttccccaaatccccctttttaggtctttcctttattaatttttccggggga

SEQ ID NO: 586211 - DNA, 874 bp, Homo sapiens
caagacacataacgagttggtacagctctttaactttttgtgtcaaaattatgtctcatagtaccgtaatatctggaccattaaaatgatgtgactgtgcacttcaaccttgtttcccagtgaccagtcaacccactttagggttccaaactggaaagggccccatgttaacaccggccaagatggccgtgccaaaacatatacggtgccgacacgaaatgtttttcatagaaaagcgcctaatgccagagtcccaagtggcacagaaacccctgggacaagccaccaatcctttcaacgtttgaaatctgtattgaacatagcggtccccaagaggtttaatgctgtaacacttctgccttcgccggcgcggagtatatccgccaccttcttgtgagtgaagggggccccatccatgagccccaccgcaaacttttgtggagacgtctgctggaaacaacaacgcccacggcgctcccacaatggagcccccttgtaaacagtgtatttgaatgagtttcgccagccatttgtagaagaaatggcccacaacgcctgaccactattaaggagacctctccttttcccgagaggaaggggttaaaaaaaactgtgtggctgcaaaattctcaagcctgctcgctagaggcgtgtatttaacacactccagctttcaccagtcttcctcgccctcccctagagaattatagagaaaaaaatttatagagtccaaaaccttattctatatggttcttcttttttttggttggggttaaacgccaacaccccccgtctttagaaacaaaaaattttttaacatttcccctttttttttggttccaataaaaaaaaaaggggaaaaacccaaaaaaaa

SEQ ID NO: 586212 - DNA, 508 bp, Homo sapiens
ggagcacctagatgttgggtagctaatctggctttgctgttttggtgaaaaaagtcccatgtgttgtgggaacttggagctttctacatccctgcttagttttgtcaagtctgctggccagtaatcctgaaaaacatttgatgcgttgactgcccgcacagttgtcaatttggccagagtcagaaacatgaatttcactccttaaccttttcaagagatcttgacaaaaaaaaaaaaaaaaaaaaaaaaaaaaaaaagcaaactttggagttcattttgttaacacttacgtttactggttttctagagacccggtttggggtatgtgtgtgtggcgggggtgtggagagaatgcttgtgtttaaaaaagggaaaactgttttcacagggaggagtttactggtgggttggcttatttggttggctctcagcctttgaatgaggcctgtctttcaatacaaggctttccatcaacatgatgtgtatcctgctgaaaaagtaggatgct

SEQ ID NO: 586213 - DNA, 415 bp, Homo sapiens
ccgcaatttttttaccggtggaaacccccccctttggggggtttcctcggagaacccccccttgtttttcccgggtttttaaaaaaaaaagggggattaaagggtgtcccctttttggggggatttttattttagatttttttaatcccgggcccaaaggatttttttttttgtttttttttttttttttggttattttttttttttttttttttttttttttttttttttttttttttttttttttttttttttttttttttttttttttttttttttttttttttttttttttttttttttatataaagaccatattttttttttacttatatagattcatataaagagcacacacacacacacacacacacgtgtcttaatatactctctatagagtagagtttctcgtggc

SEQ ID NO: 586214 - DNA, 423 bp, Homo sapiens
  misc_feature (282)..(282): n is a, c, g, or t
  misc_feature (374)..(374): n is a, c, g, or t
  misc_feature (398)..(398): n is a, c, g, or t
  misc_feature (418)..(418): n is a, c, g, or t
tttttttcttgagacagggcctcatcctgtcacccaggctggagtgcagtggcatgaacctggttcactgcagccttgacctcctgtgctcaagcagtcctcctgcctcggcctcctgcagtagctgggaccataggtgcatgctgccacgcctggctaatttttaaatttttttgtagagacgagatctcactttgttgcccagcctggtctcaaactccaggtcttaagtgatcctccagcttggcctcccaaagtgctgggattacaggcatgagcctntgtgtctggctctaattttcttttgatcattggaattcagggactttttttccaaccagggtatgccttggttttgtgtttgtataacattnaaccctgccttttagtccatgccntttttcagtgttcaggtttnaagta

SEQ ID NO: 586215 - DNA, 206 bp, Homo sapiens
ggatgctggaggggatggagaatgtagaggtgctgagagcgaggagagaggaaaaatcaaattaaagtagatcttgtagatgagaatgttacagaattaagaggagaaatagcaggactccagacacaccatatgaaggaggaagataccaactagagataaaaataccagaaacatacccatttaatccccctaaggtccggttt

SEQ ID NO: 586216 - DNA, 358 bp, Homo sapiens
gaggaaagccacgaatgtgaaagagagaggtgaaaacaatcagaaaaaaggaattccagggaaatggagacatggggccaggcacggtggctcacgcctgtaatcccagcactttgggaggccaaggtgggcggatcacgaggtcaggagttcaagaccagcctggctaacatggtgaaaccctgtctctactaaaaatacaaaaaattagctggatgtggtggcacatgcctgtaatcccagctacttgggaggctgaggcaggagaatcgcttgaacccgggaggtggaggttgcagtgagccaagatcgcagcattgcactccagcctgggtgacagagcaagacgctgtcttga

SEQ ID NO: 586217 - DNA, 1195 bp, Homo sapiens
ggttagcatcatgtgacctccttgtagcaaaagacttgtggatagcagcaaagacctgatctttatgtcccggcacatctcatgagtgccacctactcatgtagaggacaacgctgctgatgacattgaaaaaccactctcatacacgagcgcagtgacaggtagtcacgcatgtttggactgttgagagagagagtgcatagctgcgacaggaacgcagatgacatcttatgggtgaaggaggtgaacaagcaagataacgatgttgattaatgatagaattaaggtacagcatgttgagagaattctggctaaagtaatgcgatcatatagtgcaaaatcaataattggtaagggcctgcctttgggtaatgcaaaagtgcgagagcacatgaagaagacgcgtgtagccagatagagatactcgcgccttcaccgtttctcaatgtatctaacttggttttgcatcggagtgggctcattccagcatggggcacgttaccacgattcgtgttcacatttaacgcaaacgtggcgttttctcctggttttccttaggggcgggtataacaacacttggggataccggaccacagaacaacttgtgagcacgagttttttaaactttttacaactcagggtccgctcatgtgctgctgctgctcaagagctgggacccatcacgggtggggtgtcatctggtcctctggaggtccaggagattctaaatggacttttccagggttggggacagcatccggaagttttccctatgacttcatataggggataatgtcacagtgttagggcagggcccaaatagcatagcccacaaggttggggtaatggggggataaaatttctaccaaacccagaacttgggacgccttgggagaaagcccgtatatgtgtggtgtcttcaccctaattaaggttgtagcgacacaaacggcggaacgggaagcaaccaataacgggcgccaacaggtaagcaccctcggtactccagggggggatctcctgagggaccactgtgcagcagattatacgtacagaaccccaattgttcgcaagggcccagtacttgttgctacaaccacttgtgcgtttaatcaaacagcacaagtcggctctttgtgaaaaatgagtagctgtgttcgccccttaagaagcccagtataatcacgatgcgcaa

SEQ ID NO: 586218 - DNA, 236 bp, Homo sapiens
aggcccccagccccccccccgggggggtccggggggccctggaattaataaaggggggggcccgtccgctgggccccccaacccgccccccttgatggcccccaaaagggggtttttaacccccctggggggggttaaagggggggggggggtttggatttttagttatttttttttccgttttaaaaaactttttttttaaaaaacaaaaaaccccttttcccccggggaaggga

SEQ ID NO: 586219 - DNA, 880 bp, Homo sapiens
gacggcccgtttgcagccgccggaagctactgcaagggcaaaagcctggagtggaacggtgtctatgtgaaactggctgctctttcaccttctcacggctgtcacctgagagctcagcactccagtgcttgacacctctgtacccatttgggcacagaactggaaggctgattgcatctagtgagacatgctataccaagacgtacattggaagccatcagactggctttcaggagctaaccgaaacctggtgtgcacagcaacatactggcgatttctggccacattcacaccacaaccttggcattccagtcagtgcgcattgcaaggcactgcacaactgtgggaacaccggcctatctaccagcaaacctcaccgcacttcccagggcaccttaagggcacataggactcaacacctgccatgcacaccccacggacaatgggcgctttcctctcaacagtgcacactggggggcacaactacccaggaaggaacaacttccccctatagttgaacaacagcacgcaccttttatagctacataggacagggttccaacgggcagacgagggcaccaccatggtaggcattatggccaacttttctcttacccacggatgcacctgcccacgcactttcccagggttgttacccgcctactttaacgaacccagggaccgaattctgggcgccacattaaatttggtcccaagacgacaaaccacccgttcgtaaggcacctcacaaatattagtggcaacgcctgtaattggtggtcacaacacggcaccctttccctatgggtagaccgagcacggtgcgtattccagacgctcatttcccccagaaatatgccaagtggctaacaagcgactg

SEQ ID NO: 586220 - DNA, 247 bp, Homo sapiens
tatccggttcaatattcaaaatgcgatctagagccgggagtggtagctcatgcctgcaatcccagaactttgggaggccaaggcgggtaaatcacttgaagtcaggagttcgggcccagcctggccaacatggtgaaatctcgcctctattacaaatacaaaaattagccaggtgtggtggcagacgcttgtaatcccagctacttggaaggctgaggcacaagaatcgattgaaccggatagcttg

SEQ ID NO: 586221 - DNA, 411 bp, Homo sapiens
atctctatcatcatcttagtgactgcatagtattctattcccgtgttgacatattataatttatctaaacagtttgctattgaatctaatttatatgatttttaacatttttacatgcgtaaacaatgccgtgatgaacatcacttgcttaaacccgttattaaattactgactgcaaaaaaatttctataatatgtaaaagcttaaatctgataaaaaatatgtgcacatcatattgatatatgtatcaaaattttggaatactttcaagatatattctgcatttagattgacaaatggaaaactaaaaacgaatattatttttcatttttctgagccaacttgctttacattattgtgattattaacatatatgaaaactatgaaactacaaataaaatttaaaatgtt

SEQ ID NO: 586222 - DNA, 226 bp, Homo sapiens
tggtgactagggctcacaaatgcttcccactccatcatactagcaaaataatttgatccagtgaataactaatcaaagaaaatctaagaagagaggaagtggaaggagggaagccctttcactgcacacttgggatgaacagatgcttttaaagtgaatagcacaaaaacatcttttcacgatgaagttgggatacaagcagtcaactgacatctctcagcagcat

SEQ ID NO: 586223 - DNA, 890 bp, Homo sapiens
  misc_feature (98)..(98): n is a, c, g, or t
agcggagcgggcgaagctagcgagcgagaggcatccgctgccgcgctcgtccgctccctgcctctgtatgccagctcctcttcccgggcgcggccgtncgcgctggatcactaggcagtccaggatgccaacccgaccgcttcgtcggtatgattgttggtttgtggcctgggaggacttgacgtgatggccgcgccaagaattgactcgacagttccaatgttcccagggaaagatcgacgaatcctgggtctagcggtctgtgggattgaatattctatctttcctcagacatagctccatagatattacatggttatattgctatgtgtagttgcttgttaacatcagatctaaaatgttttgaatgtgatttaagaggttatctcagtggcatagatttgtcggagtatggtggtgggaaagtactaaatacgcgtattattgtaagggttgggaagataatgaaaggaccttgcatattggaaaagggtgaatcagctatatgaacgaaggagacaacggctttgcgcagaatcctttgggaagtagccaagatttattctgcggcaaatccttcgttggttaaacgcaacaatccagacattgcctcgtgcgcatgtttatccgcataccgtgaataatcttattgggatggcaggaaacaaaagtgggacaggggccagactttcctagaggcgaatgtcggtcgattgcctctggtgatcgtagattcatcgggtgcaaaagcggcgtgaggtaaacctggggaatgatgatgcttaccgtgcacagcaagctaaattggccggttcttcctttgaaggataagacttgatgcatatccttttggcttcatgtcaaccctgtaacgtattccattggggtcg

SEQ ID NO: 586224 - DNA, 726 bp, Homo sapiens
gacaagaatctatcattgtaatattaacagtgcaaggtgtcatgtgcttggacatagtgaaagataattggagtccagcactagccatttctaaagtcctcctttctatctgctcacttcttacagacgtgtaatcctgccgaccccttggtgggaagtatgccactcagtatatgaccaacagagcagaacatgacagaatgggcagacagtggaccaagagatacgctacataaatggggtctcacaattcgttacattatttgtctgtcacagaagagagcgtcttatgatttgaaggggtcagggagggtgggagtcggaaagagtaggggattctatggacagatattatgccagtctgatttcctaagattgcgtgtaacttaaggtatctgtgcgacagtagacagaatcggtgaatagcaagttaagaatgtcatgagttctggaatatgagctgaaatgtagtacagaagaagaatgtacgtttagacattcgggttcagtgcctgtaggctgtaaactgtaccacagccttactttggtacaggttacggcatatgggcatttatgtaaagtcgctctaagactacatacgtttagtttcacaacccaacgcatggaatcggtgtgcccttctgggaagggaccttgatattcaccagcagtccagacagtgccactcctatatataacacgggcccgggcataaaccccttcaca

SEQ ID NO: 586225 - DNA, 922 bp, Homo sapiens
ggtttcaaaacttttgggcacagataacttgggtttccagtcactccggacacattttcctaaaaataggctttttaaacctaattttgggaaaacgctgttttcttctggagcacccttgatttcggaaatgtccatcgcgaccggggccccgacctcttctaaagtcccggagcttaaatttaggggcccgtttaaagtgttaacttatttgaacttgaaattttcttgcccaatttcggtttagatcccaggggtttaaccacagggtaaacttgggggaatggaagtgtataccgccaacgtttctttcacggacgcctttttaaggaaccttattgggcacgcctcttaagaaaggctgtttctttgttttttaagcccaaagggaggagacccccccgccacgcgtttttggaataactatgaaaaaaagtccactcttggcttgtacactaattggccactctttatgaaaagcttctgaatgtgaaaatcacaaatgtttgacctcctcggtaacttaaaagcccaccacacttttaaagcgcacgtaagttttatactcggccactttaaagcttctttgtgaccacagtggtgcacaatttgtaaaaaaagaaaaaacgagaaaaaaattctccacattaaaccactgaggaataaccacttttaaagacttcccaaatcacagaagaaagtgcttcacaaattaattttgtttggagattaaatttttaaaaatgtaaagcactaatacttgttgcttagttattttgtttattattttcactgtttgagtttctgtgccatatttttctattatgtccgcttgataggaccacgtgaccacaatttcgtaagtgaataacttaatttataaagtgttaacattaaagctccataaaccaatttcctgcca

SEQ ID NO: 586226 - DNA, 116 bp, Homo sapiens
cctggaaagaagcaggagatgaatctgtatctcgagagaaccgagcagcataggcatataggtcgatgagccccgtgtgccatccgctgcagcagaaacggtgcatcgaccatcct

SEQ ID NO: 586227 - DNA, 693 bp, Homo sapiens
gtcgggtctgctttccaacgtataggacatttgaagaactggtatgctactcacgtggctgaaggacagtcaggtgcaaggactgtaagcccacacaagctcttcttatctctactagaattaaaatgttaagtcaaaaacggctccttttttgcgcctcctagtgaaacttaaccagctagaccactttgagtaccagcatttagttacaaacgtcaaaggcttccggtgctgcttaccttccttttttgttaatgtgcttttatttattaacacaaaacaattacaatgcaagatgcctgttatgtctctactgtgtactctgatcgtatctttccaaagtgcagactcttgctgaagttttcttaaattgttcactttaacagacaaatgacgtaccaacaactgactttggcttcttatattactgtaacgcatgcccataactgttaactgtgcgatgtagctgcttttacctttacagacttgacttggacataagattattgcatatgaatttacccacaggacctctgactcactgttacccaactcccctcacaatgttgtccacttagctgagttgcattgatctatccgttaccaaactgactgttgactaattacatatcttccttgattatactgatttcttatttcggctcactattacttaaatctctgtcaactatt

SEQ ID NO: 586228 - DNA, 299 bp, Homo sapiens
ggggcccgcttattcaatatgtactcagatagtacgccgggacaggacgtaaggagtcaatgacctagcttaatcccatcactgatgctagcagactcctttgcacaactgattagctatcgtaactaccacaggtattcttagctgctagatcattctgtgcatgggattaagctaggtcttgaactcattaactccagttccttggctcctacagagtacatactgaataaggcaaaatcgactcacctctttggtatcgctcccctgtggtagaattctaggggtacagaccgtcg

SEQ ID NO: 586229 - DNA, 339 bp, Homo sapiens
ggggaggcccccagtgatgccagcccttaggttccaagagcccccaaccgggacccaaccctgcctccttgggttaggttttggcctgggcactcaccccctggtttagaccccttttcaagggttggccttcagggacccctggtgggtttgcctgcttgggccacccttcctgcttgggcctccccttggcctacttgggccagcccccaccacttggcatgccctcttggggccaaaagtgggcctgcaacccacccacttgcctgcccacccaatttttgggggctccccattttgcccaggccttgagtgtccacattaaatgggtttccccca

SEQ ID NO: 586230 - DNA, 341 bp, Homo sapiens
  misc_feature (104)..(104): n is a, c, g, or t
atgcacacgtctgactcccaaagtgccgggattataggcacgagccaccatgcctggcctcatttattagttctaacgtgtgtgtgtgcacacacgccctttcngcatttctacttataagatcctatctgcaaatagagataattttacttctttcttttcaattttgatgccttttatttccttttcttgcctaagtgtgccggttagaacttctagcactgtgttgcatagaagtaatgaatgcagacatccttgtcttgttcctaattttagaggaaaagctttcagttttcaccattgagtgtgatgtggctttttcatatatgacttttattatg

SEQ ID NO: 586231 - DNA, 104 bp, Homo sapiens
cagcgtgcagcccatgtggtgtttggttttttgttcttgtgctcactttgctgcgcccgcatggtctcccagcttccattccatgtctctcacacacaggcacc

SEQ ID NO: 586232 - DNA, 312 bp, Homo sapiens
agccgcagatttagataccttacattctcgctttaagagagagaatgtaagggctggtgcggtggctcacacgtgtaatccagcactttgggcggccgaggagggtagatcacctgaggtcaggagttcgagaccagcctggccaacatggtgacaacccgtctctgctcagaatacaaaaattagccgggcgtggtggcgcactgcctgtaatcccagcaacttgggacggctgaggtaggagacactgcttgaacccaggaggcagaggttgcagtgagccgagatggtagccattgcactcctgcccaa

SEQ ID NO: 586233 - DNA, 126 bp, Homo sapiens
cagagaactctgacgggtatgttgcctttgaacttgaagtagcttctccaatctccctgcccaccctaagctctccatgacatccactgtaattccctaaatgcaggtgcagcttccggaagagga

SEQ ID NO: 586234 - DNA, 264 bp, Homo sapiens
tacggtccatgaggatgggcgagctcagtgtgactggattacttaactgtagaatttccagtagcacattgcaggcaggaaggaacttggtaagaaaaattctgccactgccggtatgcttcacagtgcaggaaagagcagacaggagagttacgaagcgacctgaattaatattctgtttttattagtcacccaggttcgaaaatagcctccaatttaatcttactttctgccgtaagatctctttgtgtatcagtatcccat

SEQ ID NO: 586235 - DNA, 509 bp, Homo sapiens
gcacgagctcgtgccggtctttgttcagtgttaccactcaccggggttgaaaagcctcaccctctctttcccttgcctttgcttaggttgtgacacacatatatatatatttttttaattcttgggtacaacagcagtgttaaccgcagacactaggcatttggattactatttttcttaatggctatttaatccttccatcccacgaaaaacagctgctgagtccaagggagcagcagaacgtggtccggcagggcctgttgtggaccttgccacccccctaaccggaccgactgacctgtctttggaaccagaacatcccaagggaacttcttcaaactggcgtggagtgggacccccgggtccaggctggcccaaggcgggcaccctaagggctgggccccgctgaagtgctacgtgggaggcagaacaaacgccaaggtggccccaaaaaccccaatggttttttggtggggggaccaagggctaggggagcttggcccaacttt

SEQ ID NO: 586236 - DNA, 880 bp, Homo sapiens
attctgtcttgttctctattccatcacgttgtaaatggttagcatatgtttattgaatgaatgagaatcacctcagtgccagtggcaagagggtggtctgactggcataagaggatgaactgggactaaaagtgggtagcagttgagaacagccacaattactaggatgaggggcttaataaaaattaatttccaaggtgggaaatgatataatacacattttcttagaaagtaattctagaagtatagaatttaaataggaggtaactatttagaaaggttcttaagggtttagaccccaattgtaagcacatatctgaagaaggcattctctgtttatgggcaacttaaaatctagcaagaagaggtaattacctaaaaccaagatgcataattaggaagaggttctgtgtatattttgaagttgtagattttttggtgaatatgagttcagggaaaaggacctgtgtgttttaggcactgaaataggtctcttcaaaaaggccaagaatcactgaaatgtaggttcagtttttgctgtagaactcttagattcttagagtccttaatttctttttaggggttatttttataatgtaattcctttagtaaacctgcttaacatttgcaccatcagtgacattttgccttttttttcccccgatttcaaaacatttgtgtggtatatgtcagaaagtgttctattcttaccaataaaaccaagcctggcacggtggcgcgttgcctgttaattccagctactccaggaggttgacggtgcggacggacatggcggttgagcccggcctgggcaaaattagtgagattccatctaacaaagaagtttggctgggccccggtgcccacgccttggggtcca

SEQ ID NO: 586237 - DNA, 342 bp, Homo sapiens
tataaaatatgatattaagtcagttactaatagttttagtccatatatgttaatagaaaaggccaggtgcggtggctcaccctgcaatcccagccctttgggaggccaaggcaggtggatccctgaggtcaggagttcaagaccagcctggccaacatggtgaagccccgtctttactaaaaatacggaaaagttgccaggtgtggtggtgggtgcctgtggttccggctactcgggaggctgaggcaggagaatggcgtggacccgggagatggagcttgcagtgggctgagattgcgcccctgtactccagcctgggagacagagtgggactccgtctca

SEQ ID NO: 586238 - DNA, 179 bp, Homo sapiens
gtgtggtgttatgattccatcacactcacaagtacagattctaatcagaaccacaaattgatctgtcgggttaaggagttattcttaatcggagcacaactaaatgtcggagtaatggcttatactgacggttatagcctaataccgtcggtgttactcactaataccgacggtattag

SEQ ID NO: 586239 - DNA, 459 bp, Homo sapiens
acttcatacagatacaaacactactatacacagatactctcgtctctctctagagttaccctccatagtgtgtgagttccacatccatggattcaaccaaccacacatcaaaaataattggaaaaaaaggatggttgtgtccgtatcgaacatgtaccaacttcatttcttgtgattattccctaaagtatacagtgtaacaactactgacatagtatttacattgtattaggtataaataatctagagatgggaccaggtgtggtggctcacccctgtaatccctgcactttgggaggcgaagatgggtggatcacttgagctcaggacttcaagaccagcttggggaacatggtgaaaccccatccctaaaaaaaaagagctacaaaaattatctgggcatagtggcacacacccgtcgtcccagctacttgggaggatgaggtgggaggattgctt

SEQ ID NO: 586240 - DNA, 990 bp, Homo sapiens
aacgcagtccatggctcgtggtcccaagaagcatctgaagcgggtggcagctccaaagcattggatgctggataaattgaccggtgtgttagctcctcgatccatccgaaccggtccccacaagtagagagagtgtctccccctacagtacatttgccttgaggaacaacacttaaagtatgctcctgatccggagcatgaagtaaagaaccattatgcatgcagcaggtgtcattcacataggagtctgactgcgtggaaggatccgaagctgatagtaacgctaccctgactggtattcactggtatgtcatcgaggctattgacatacgacgggagagaatttccgtctgatctatgatcatcctaaagggtctgcgtttgctgtacatcgtaattacacctgaggaggccaacgtactagagttgtgcaaagtgagaaagatctttgtgggcacaaaaggaatccctcatctggtgactcatgatgcccgaatcatccggtaccccgatcccctcatcaaggtgaatgataccatttcagatcgatttagagactggcaagattactgatctcgtcaaatggttcgacactggtaacctgtgtatggtgactggaggtgctgacctaggacgaattggtgtgatcaccaacagagagaggtcctgggatcttttgacgtggtgcacggtgaaaagatgcgcaatggcaacagctttgccaatcgacgttccacactttgtgttgattggcgaggcaactgaccatggatttccttcccgagggaaggggttccggcgcctccatggtggagaaaagggaacaaagagtggggccaccaacagggacaagggcccggggagagtggcacttgcggcgtggaaatgtggggggcaacaacacgggggcgaaaacacacgggggaagcccctgtgaaggccagagtctaaaaagcgcggcccagaagcggtggagactggggcacacct

SEQ ID NO: 586241 - DNA, 120 bp, Homo sapiens
cccccggggccccgggggggggaacccccccttttttgggggggggggggttttcccccgggggggggtccccccccaaaaaaaccccccctttttttaattgggtttttttttttttta

SEQ ID NO: 586242 - DNA, 237 bp, Homo sapiens
atttttccccccttttttgcaaactaggagtttcccgttcattcctttatcaaagaaaagtatttacttcctttttagaataagggtactagctttccccctttgccctttacttgaacgggagttttgattcttttttggcctaatcagagaaggaatttggactccccatcccccccccaggataaaagtcctgccctttgtttttttgagggaataaaagcttgtttttcctta

SEQ ID NO: 586243 - DNA, 760 bp, Homo sapiens
  misc_feature (45)..(45): n is a, c, g, or t
gtcaatttcctataagaatattattctgaagacctggaggaggangtagcagcagcgctgaaaaatgggaatgacttctaatagtttacaatatcatgaaggaagggctgttgaattgtagcacaaacctgaacctggtcactgactgcatggaacatgctctgacatcggtgcatccgcgaactcgatattcagctggctgggatgctaaatttttcttcatccctctatcttatttacctacatcactggcagactacattttgactagatcttggcccaaaccagcccaggcagtctaaagaaaactgggttggtgcttcttggaatgaaggcaaaaatctgaaattgttagtgtctcagtaatcctgatttagaacccaggctttttgtaacaatgtgttttcttgcctaaattcatttatctggcatcatcagagtactaacatgtttatatttcagatatccaaagcttaccactttaggtgatgaatctttactattttagcccttttttgatgagactatttgtctaaagtgaatcatttgttcttgccttattaaacagagtagatggaaaacaatttaacctattttgaagtcatttctttatgaatatgaataattgttctatgctttaataatctattgtgaggaaactactaagaaatatgttggtgtgtttgtccttacttgaaatgggtctgtattatggtacttttaataaatatttgatttttctttctcttaaaaaaaaaaa

SEQ ID NO: 586244 - DNA, 144 bp, Homo sapiens
accacgcgtcgcttttgagaccaaaaaagttatgggtttttttattgttcaaataaagagtgcactgcattacatctgaaatataaaaaaacccataactttttgagaccaaaaaagaaaatagaaacaagaaaaaaaaaagac

SEQ ID NO: 586245 - DNA, 393 bp, Homo sapiens
  misc_feature (207)..(207): n is a, c, g, or t
aggtgttgtattcctgtttggtaacctcagtttcctgtaagacctcctaccacatggggagtatacaccaatcaggagagggtagctgcctgcataggagcctggcttccgattattcccttcccaatattattcatccagatttagccccagggcacaaaagcaaacctgttagagaggcagtgaacaccacagtttctccccagntaggtgccttttacatggggtttgttctccttccatggtgtgttgctgacattgtcactgagtcccatgtgaggggctggtgagtattccctttcatttgtgccatgctttagacccttgcccttgatagttccccccctttgagggatccctgttttaaataaaaacgattccctttaaagccta

SEQ ID NO: 586246 - DNA, 784 bp, Homo sapiens
  misc_feature (12)..(12): n is a, c, g, or t
  misc_feature (29)..(29): n is a, c, g, or t
  misc_feature (31)..(31): n is a, c, g, or t
  misc_feature (47)..(47): n is a, c, g, or t
cgaacgggaatngcaacatgacccagtcntntagagcgatgaagcanagttggaaagaagcccccaagcatattaaggagacctatggacagcagtattttgatgccctttacaatatcatgaaggaagggctgttgaattgtagcacaaacctgaacctggtcactgactgcatggaacatgctctgacatcggtgcatccgcgaactcgatattcagctggctgggatgctaaatttttcttcatccctctatcttatttacctacatcactggcagactacattttgactagatcttggcccaaaccagcccaggcagtctaaagaaaactgggttggtgcttcttggaatgaaggcaaaaatctgaaattgttagtgtctcagtaatcctgatttagaacccaggctttttgtaacaatgtgttttcttgcctaaattcatttatctggcatcatcagagtactaacatgtttatatttcagatatccaaagcttaccactttaggtgatgaatctttactattttagcccttttttgatgagactatttgtctaaagtgaatcatttgttcttgccttattaaacagagtagatggaaaacaatttaacctattttgaagtcatttctttatgaatatgaataattgttctatgctttaataatctattgtgaggaaactactaagaaatatgttggtgtgtttgtccttacttgaaatgggtctgtattatggtacttttaataaatatttgatttttctttctcttaaaaaaaaaaa

SEQ ID NO: 586247 - DNA, 730 bp, Homo sapiens
  misc_feature (12)..(12): n is a, c, g, or t
  misc_feature (29)..(29): n is a, c, g, or t
  misc_feature (31)..(31): n is a, c, g, or t
  misc_feature (47)..(47): n is a, c, g, or t
cgaacgggaatngcaacatgacccagtcntntagagcgatgaagcanagttggaaagaagcccccaagcatattaaggagacctatggacagcagtattttgatgccctttacaatatcatgaaggaagggctgttgaattgtagcacaaacctgaacctggtcactgactgcatggaacatgctctgacatcggtgcatccgcgaactcgatattcagctggctgggatgctaaatttttcttcatccctctatcttatttacctacatcactggcagactacattttgactagatcttggcccaaaccagcccaggcagtctaaagaaaactgggttggtgcttcttggaatgaaggcagtaacaatgtgttttcttgcctaaattcatttatctggcatcatcagagtactaacatgtttatatttcagatatccaaagcttaccactttaggtgatgaatctttactattttagcccttttttgatgagactatttgtctaaagtgaatcatttgttcttgccttattaaacagagtagatggaaaacaatttaacctattttgaagtcatttctttatgaatatgaataattgttctatgctttaataatctattgtgaggaaactactaagaaatatgttggtgtgtttgtccttacttgaaatgggtctgtattatggtacttttaataaatatttgatttttctttctcttaaaaaaaaaaa

SEQ ID NO: 586248 - DNA, 189 bp, Homo sapiens
aggaacaagaggaagaagaagatgaagaaagtgaagaagaggaggaagaggagggagaaagtgaaggcagtgacaggtgatgaggaagatgaaaaggtgtcagatgacgaaggattcagggacagacattagactaaaaacgccaagtacaagaaatgaggctcacgattctgaactatgacctctgag

SEQ ID NO: 586249 - DNA, 431 bp, Homo sapiens
atatcatattccctattcacagcagcgaaagctgcagttcagatttgagatcagtctccattcacttccacgtggcatcacagatagagtgaccggaggcagagagctcttattgggtcagctttctaataagcagtgtcacgtgatatagaaccctcttgtagtacactgatttagtttgtccgatggtatttaacgagttaccgaagctctgtgctccttttttgtgctgctgcgtcctttttctcctctttctttccttcactctttcccttatcttgatctttctccctttcctctttcctatcctttgttgctctcttcttactcctgcccctctttcttctctgcatcccggttggctatcttgttgttgatgaggttgtgcagggcgaccacggaacggatcagcgaggccaagtacactacca

SEQ ID NO: 586250 - DNA, 1116 bp, Homo sapiens
cctgggtcctgctcttccaagtgcccaaggcatggcatggtggcagatgtgccccacgaccagtgctttggagcacagatgactctgggggcagaggtgggctcatgtttatgtgatgggcagtgagaccacccagccaaattgcttctcaaccactatgcacaacagcctatatgagtcaatgaggtgatggtgctgtatagttgggcagcccttctgggtttcagagaccggttggctctagactggtctcatctccatagccttaatgccaggtggcccaggagtacccatgcacacgccagctgtggggtgtgggcatcttcagagtggtgtactggataaaatcgttagaatagctgtatgaaggaaaccagtgggaggaaatgaagttaacaggatggtgggatgtgatatagacagtgcacatgctgttagaggctgtcactagggagtgagcttcatggagggtggtaacagcagctcaagtccagacaaaatgtatagaaacactcagtctctggtcccagaggatgagttctcagaggaatgacaaagtaaaagtgtcaccttcctgaaagatgaatgagacagctgacacattctcaagactcatctgcctagggcgggtcaagacggcaggatgtaggacacaatgtgtgcactacttgcacacgttcatgaaaacatggaggccagacgcgccatggacacatcaagggacaaaaggcccacgagcagacatggacacagacaggacagcgaccaagacaggaccacaatgactgaggaaccacaacacgcacacagacagacaagtggaccagcaggcaagcccactcacccccgcactgcacaggcaccacggcacgcgaccaccgtcacacccccggaggaacgaggcacacaaaaaacatacctcaccggacaccccacaaagaagagaaaaaaacaacaacacaggagaacatagggagccacgacgtcgcacaggggcgcaagaggagcgccgccaggactacagagagcgccggcgacgagagagagtgcccgggcgatgagagacacaaaagggacggcgcggaacgggacgaccccagggcgccgcagagagct

SEQ ID NO: 586251 - DNA, 218 bp, Homo sapiens
  misc_feature (37)..(37): n is a, c, g, or t
  misc_feature (103)..(103): n is a, c, g, or t
  misc_feature (139)..(139): n is a, c, g, or t
  misc_feature (145)..(145): n is a, c, g, or t
  misc_feature (170)..(170): n is a, c, g, or t
  misc_feature (186)..(186): n is a, c, g, or t
  misc_feature (211)..(211): n is a, c, g, or t
cggcagaggaccatcaagtttgggaaaccgctagatnccgcactgtggctgtcattggtggcatctccagagaagacccaggggctttcaggctgcgatgggnttgtgaagattgtgattgctacccctggggcgtttnatttangtgctggagaaccgctaacctggtnctgagccgctgtaccnatgtggttctggatgaggcagatanggtgatt

SEQ ID NO: 586252 - DNA, 696 bp, Homo sapiens
  misc_feature (426)..(426): n is a, c, g, or t
gcacaagacaattgttccctaagcaaccaactctagctcataactacaatcaaatttcacgtagacaaaacacagagaacagacaacgtcgcgaaaatctaactacactaataaacaaaataacttatacaacggattattaccctagacttttctatatgggccatattcattaaaaaccccaaaacgctaccttagccttaacccttcaataatacaggaactatccttaaacatgcatcactccgctatataaccaaaaattccactccaaaacaacccgagataataggatatatagtaccacaccacctaacacactaaatgcataacaaactctaccctcaccaaataatataaccacacatcaaatcaatggtcctggtatcaaagataacccacataacatccttacacaactactantactccaaaacgctaactctacaaactaacgacacaacattctaaggaggcacaaactgctcaaatacttgacgacattattaacataactatccatactatctacatcattcaccaactaccattacacaatgcaaccaaacaatactttacactttacacccgccaaatcacactccacttccaacagatgtgtaaccacaattaccaccacaaactattcctaaatacggcctaaaccaatcaaccttactaccagacaacctaacc

SEQ ID NO: 586253 - DNA, 156 bp, Homo sapiens
ctgaggatccccactaacaaaggcaagttagctcttctctttttttttctcctgcatttctagtcttcaagcctctactaatgtatgtattctttgttagatccttgtagatttatcactttgatttcagcacttctaactccagtgtggagagag

SEQ ID NO: 586254 - DNA, 682 bp, Homo sapiens
  misc_feature (10)..(10): n is a, c, g, or t
  misc_feature (18)..(18): n is a, c, g, or t
  misc_feature (21)..(21): n is a, c, g, or t
  misc_feature (28)..(28): n is a, c, g, or t
  misc_feature (33)..(33): n is a, c, g, or t
  misc_feature (38)..(38): n is a, c, g, or t
  misc_feature (41)..(41): n is a, c, g, or t
  misc_feature (50)..(50): n is a, c, g, or t
  misc_feature (59)..(59): n is a, c, g, or t
  misc_feature (64)..(64): n is a, c, g, or t
  misc_feature (70)..(71): n is a, c, g, or t
  misc_feature (81)..(81): n is a, c, g, or t
  misc_feature (83)..(83): n is a, c, g, or t
  misc_feature (94)..(95): n is a, c, g, or t
  misc_feature (106)..(106): n is a, c, g, or t
  misc_feature (546)..(546): n is a, c, g, or t
  misc_feature (548)..(548): n is a, c, g, or t
  misc_feature (565)..(565): n is a, c, g, or t
  misc_feature (591)..(591): n is a, c, g, or t
aacgtttgtngtgggagnacnccaaagnactantcgantcncggttgatntacagacgnttagntcctanntgcaagtgantngcacaaccagnngtcttagaggncaacttagacttgttagagacagacttggtagaacgacgaggcttcgaagcaggagtctgctttttagtccctccttaggttgctgcaggcaactcagcactggagtaataccagttcctacctggcctttattgcgccggcatagccccagataaggtaagcctctcggcactctaagctagcttgaaagcagtgcagttggttttgtaagtacgccgaacaggatttttgcaggttgtaggcccatttaacaagttgacaggagtagcagcctaagaagtataggaaccaggcttgccctagagagaagtgtgcaacactgtcatacctccaaagggacgcaaagcagaacgagtatagtgtctgtctgaagcggagggagactactttgctgaggtcttgttggcagcaggtgcaggcttggactccttgacagccntntttgcactgttggcatntagttataatacccattatcagcctnccctcacaattactgaggaggttgtccggacactgtttcagaaagaacttaacggctatttttaaatttcattttgtaggaatagtatcct

SEQ ID NO: 586255 - DNA, 766 bp, Homo sapiens
  misc_feature (10)..(10): n is a, c, g, or t
  misc_feature (18)..(18): n is a, c, g, or t
  misc_feature (21)..(21): n is a, c, g, or t
  misc_feature (28)..(28): n is a, c, g, or t
  misc_feature (33)..(33): n is a, c, g, or t
  misc_feature (38)..(38): n is a, c, g, or t
  misc_feature (41)..(41): n is a, c, g, or t
  misc_feature (50)..(50): n is a, c, g, or t
  misc_feature (59)..(59): n is a, c, g, or t
  misc_feature (64)..(64): n is a, c, g, or t
  misc_feature (70)..(71): n is a, c, g, or t
  misc_feature (81)..(81): n is a, c, g, or t
  misc_feature (83)..(83): n is a, c, g, or t
  misc_feature (94)..(95): n is a, c, g, or t
  misc_feature (106)..(106): n is a, c, g, or t
aacgtttgtngtgggagnacnccaaagnactantcgantcncggttgatntacagacgnttagntcctanntgcaagtgantngcacaaccagnngtcttagaggncaacttagacttgttagagacagacttggtagaacgacgaggcttcgaagcaggagtctgctttttagtccctccttaggttgctgcaggcaactcagcactggagtaataccagttcctacctggcctttattgcgccggcatagccccagataaggtaagcctctcggcactctaagctagcttgaaagcagtgcagttggttttgtaagtacgccgaacaggatttttgcaggttgtaggcccatttaacaagttgacaggagtagcagcctaagaagtataggaaccaggcttgccctagagagaagtgtgcgacctagagcatatctccgccgcgtgaggtatctgcatcgtctttgtaatcgataacgtgcacggtccgcatgcttgtggtggggctgtttcgttctaggttgcatgactttgtgcaccctgtccggcctcgtagtgctcctgggagaagctaatattatagagacagagctaactgtagaaacagtggtaaaggatgacgagctgatataaatatcagaggatcggagcggtctagctggtgaatgatcagcttgtgatgcagctgattcagtgcctaagacagagaagtagagaatgcgttctcagaggagtctagacacgagatctaggggtaccacagta

SEQ ID NO: 586256 - DNA, 256 bp, Homo sapiens
  misc_feature (16)..(17): n is a, c, g, or t
  misc_feature (79)..(79): n is a, c, g, or t
  misc_feature (201)..(201): n is a, c, g, or t
aatgagtctaagcagnncgcagaagacgcgattttggtgattggctcgggcgcttttcggatgggggatgcggcatctngtggttatgcgacgacaattacgctgtcagagttacgccggttgcagtatccaaccattattatgaataataatcctagtgacgcgacgttgttaccacatttagcagataagcagtatttngaaccattggaaatttctgatgtgatgcaggttgttgaattagaacagccaaagc

SEQ ID NO: 586257 - DNA, 228 bp, Homo sapiens
atggtaaaaagatattcccaaaaattagtcctcaaaggcctccaagaaaggacatggagtgagctgtatttaaaatatagagctcatcctccaattctatatgtaaagagcgtttttctttgaaaacatgtatatggataataataactccttctttctaaaatgtttgaaatatcagacatagaaatcagagcatctattaaaacaactttgcctttacaaaaaaaa

SEQ ID NO: 586258 - DNA, 1128 bp, Homo sapiens
  misc_feature (441)..(441): n is a, c, g, or t
  misc_feature (471)..(471): n is a, c, g, or t
  misc_feature (573)..(573): n is a, c, g, or t
  misc_feature (684)..(684): n is a, c, g, or t
tgcagtggctcacgcatgtaatcctagcactttgggaggccgaggcaggcagatcacctgaggtcaggagttcaagaccagcctggctaacatggtgaaaccccgtttctactaaaaatacaaaaaaattggccaggcatggcggctcacgcctgtaatcccagcactttgggaggcagaggcagacgtatcacaaggtcaggggttcgagaccagcctgaccaacatggtgaaaacccgtctctaataaaaatacaaaaaactagccgggtgcagtggctcacgcctgtaatcccagcacttcaggagcccaaggtgggtggattgcttgagttcaggagtttgggaccatcctggatgacatgacaaaaccccgtctttacagaaaatacaaaaattagccaggcgcggttgcacgtgcctgtggtcccagctacttgngaggctaaggtggaaggattgcttgagccntggaggttaaggctgcagtgagccatgattgcactgctgcacttcagcctgggtgacagagtgagaccctgtctcaaaaaaccccccaaaaaaaaaaaaaanaaaagccgaattcgagctattgccaattggcctatatgagtcgattacaatcaatgcccgcgtttacacgggggactggaaaaccctgcgtaaccacttatcgccttgagnaaatcccttttccagatgcggaatacgaaaaggccgaacgttgcctttccacagtggcaaccttatggccatggaatttacgggtaaaattggtaaaatcgggaaaatttggtaaacgctatttttaaaaaagcccaatggcaaacctttaatcaaagaaaacccctaaagcttggggggtctcttgcaaaaggccttttaaaaggggctccccatgggggaaaacctttttggagggcccccttggaaacctccaaaattttttgggccggaaaacattaagccccataggcccctttaatttggaaaagctcccctgcgggaacaataagggtcttggcctaacaaacgtccatggacacacccgctaaccctcgcctctgaattttcccaggggttcccagactctgtcacttccacttttattggcctctcccccctgct

SEQ ID NO: 586259 - DNA, 726 bp, Homo sapiens
cgtccggggcgagcgctcagcctgagcctgcccgcgcctccggagccctcccccccgtgctccatgcgcgcgggtgggtcatgagcacagcgccctcgtttctgccctaagaagcagtaagcacagtggtgggggtgggggggggaggggggtgaaccctgctggacagcgcgctctctggaaatagctccggcccggccaggttcgtccccggccggcagcaccaagcctttatgtgcacgctgtgcccccctctgacccgcctgggccaggccaaacgccttgcaatcaaaggtgctgacatatgctgacgggcacgaactggccatattttgcaccccgagtacctgcaggccctgtgacctttccaccgtccgggtcaggcgcccaatcggagcgtcggatgccaagaaagagccccggttggacgcgtgtagggcgcaaacagtgtgggcaggatcgggaagcccggaacccctcggcccgtcctccaagactcgtcctcgagttgcctccaactggggtgcggccgcgggcggttgcccgccggcggttgctgccgggcgacaaggaccacaaaatcggggcccccctgaagctagagcggacatcgggttgacgcgacaagtcggagtacaaggccgtactcaaaaccgggctcggatagaagggccggaagcgccggtgcacgggtgcgaagccggggccgcggaagggaggaccgca

SEQ ID NO: 586260 - DNA, 134 bp, Homo sapiens
acactcatctatatgccagtaaccaaaacggacacactgcagagtccatcatgatgccacacacgggaatccaccatctggccatcatgccaggggaggcatctatctctctggaggtctcagctcatggtctc

SEQ ID NO: 586261 - DNA, 182 bp, Homo sapiens
ggaaggcgggggacccgggggcaagggtggcaggccaccaaggcagggcccaacggtggttcttccaacggtcttttccatgtttgaacaaggccagatacaggggttcaaaggaggcttcagctgtatcggccagaatcgtgatggcatcatctgcaaggcaggcctgagggagacctact

SEQ ID NO: 586262 - DNA, 364 bp, Homo sapiens
cgcaggagatcagcacacctaacccctgcattgctcgagtcaactgtattataaaagtagccttaataacttgatcgttgatgcggcatacatgtttccacttgtcataactatatagtatgcaaacgctgttgagtctattttgcatcctaactatgtctatacatagtcagtaagatcacggcaagtcagcttccctctcacactgaaccaacacacatccacgtgtcgactactgtcccatgtacgtctgtagcttgcacgtatggcacacccagagccattaatgtgcagggttgattgttctttcagtgcaaggcagtacttatgttacccctttaagtccgtgcataaattgtaagtg

SEQ ID NO: 586263 - DNA, 316 bp, Homo sapiens
cccccttagccttctcctgcttctcttttctccgtagcacttttcatcttgacatatttatttattcatgccactgcactccagcctgggcgacagagggagactgtatcttgaaaaaaaaaagaaaagaaaagaaaagaagagatgcggagacagacacatgtggagggaagatcatctgaagacaaaagagaagacagctgtctgcaagccaaggagaggagcctcagaagaaaccaaccctgctgacaccttgatcttagacattcagccttcagaattgtgagaaaataaatttctgttgtctaagccaaaa

SEQ ID NO: 586264 - DNA, 544 bp, Homo sapiens
agatcccgttaaaatgcttccctgaaatcaaaactcaatgcctggagaatttactgtttgttccagccaaaacttgatgataggcagataggtccctgaaccccttcttagagcagtcactttagaaagcttgtttctctacccttggtgatgtaagtctaccacccaacacagtttcctcaaagacttgggagccatctctttgaaatgcaaatattcagaaagataactcaccctagctcctagtccctgtacaagaccggtaccttgctttagctagcaccactgcctcctatcataaagatagaagtttgtttctcctctggataagagccagttaacaaacccaaatggcctaatcacatcaatcaacaaaccaccgtgcccccctgccaccccccaaaacttaagatccttttgtgcctttcctttttgcataccacagccttttgtttcagggaagtgtgggattagtttgtattacactcttttccctattggactagcatcactgaataaagtctgtccttactgctttaaaaaa

SEQ ID NO: 586265 - DNA, 357 bp, Homo sapiens
tggtttttccgaaaggccttccttgtcccagcctacacagaacaaagccaaatcaaaggctatgtttggcgctcagctgtgggcttccttttttgggtgatagtgctcacctcctggatcaccattttccagatttaccggccccgctggggtgcccttggggactacctctccttccccatacccctgggcaccccctgacaacttttgcacatactggggccctgcttattttcccaggacaggctccttaaagcaaaggagcctgtcctgggagccccttttcaaactcctaagacttgttttcatgtcccacgttttttgctgacatcccccaataaaggaccctaactttca

SEQ ID NO: 586266 - DNA, 573 bp, Homo sapiens
  misc_feature (98)..(98): n is a, c, g, or t
  misc_feature (242)..(242): n is a, c, g, or t
  misc_feature (271)..(271): n is a, c, g, or t
  misc_feature (282)..(282): n is a, c, g, or t
  misc_feature (305)..(305): n is a, c, g, or t
  misc_feature (307)..(307): n is a, c, g, or t
  misc_feature (329)..(329): n is a, c, g, or t
  misc_feature (370)..(370): n is a, c, g, or t
  misc_feature (407)..(407): n is a, c, g, or t
aatgtatataatacaggtcctctgtctaattggagttatggcaggaccacaaggcaggagaaaggggttgtcaactggcatccagcagtctatcaggnttggttgggaaaatttccagctatagttgtttcagcaatgcttctcaggagctggtttctgcttgattacaggaaaacttatggcacaacattgggaccaacccctcatcctgctagccatgagattttctttttttttttcantttctcatgttagcctagccatagggttnccatctggtcngtctgtctgtgggggtatatttnancagagatatgacttaatagccnggcagatgtcagtgcaccaaagctgggaagagggaaaattnaggttggtaactcataacaagccggttaaaatgagtncaaagttgaagatgagaagccaagacagaagacattattaccccaatgagaaggcacctgcaacagctttctatcaggtgtgaatgagaaagaagcaagtaattagctctgctccctccctgaacagtgatcatttttcttccatctccaaccccgaacacggata

SEQ ID NO: 586267 - DNA, 342 bp, Homo sapiens
gggtccgccatcactgttgtcccggagatttgatggagctctgaatgttgatctgacagagattccagaccaacctggtgcgctacccgcgcatccacttcccttctgggcagcatatgccgcctgtcatctctgttgagaaagccttatcatgaacagatttcggtagcagagatcacaatgcttgctttagagccaaggcaatgagaatggtgaactgtgcacctcgtcccaggtaaatacatggcttgctgcctgttgtcaccgtggtgacgtggttcccaaagatgtcaatgctggcatggccaccatcaaaaccaagcgcaggatccagtttgtgga

SEQ ID NO: 586268 - DNA, 340 bp, Homo sapiens
ggtaggaatttttaaattaccatttccatcttggtacttggtataaggtcctgttccagggcatttaattcttactgatttacagctaggaggtttggatttttcccaggaatttatcatctcttctaggttttctagtttatgtacctaaaggtgttcatagtaacctagaatgatcttttgtatttcagtggtgtcagttgtagtatctcctgttttgattcttagttatgttatttggattttctcccttcttttcttggtaatctgctaatggctattaattgtatttactattgaaaggaccagctttttgatcatttatctttgtatagttttc

SEQ ID NO: 586269 - DNA, 149 bp, Homo sapiens
gcgggcctgtgggaggggtgagtcctttgccaccctggcgccccccaggctctacaatgcgtctagatggtcggagtcgcagggcagcgatgctgtcgcaggggtgggtgctgcacgagggagcgtcctgagactctcaggccctcgcc

SEQ ID NO: 586270 - DNA, 966 bp, Homo sapiens
gctcgtgtgttttcctctcggtgtgtgctgggttttgatccttttgtgggtcttcatttcgccctttcctcattgggggtcttcttgctctcccgggccccttgggccccatttgctcccgggcccgtctcttttaaggaaagtgtgctttatccatatctcagggcgcggggaagttttcgtgcaatcggccatggtgtcgccttgaacccccctgaggtcaggtatatcccccggtttctgcccgaggcctttgctgaagtttgctgctgcccctggacccctccatttgctgccgccttcactcctggaccttccctaccagatcccgcccccttccgggagcccgccttcttgtggttactgacccccgggctgacccccagcctttcccggagccatcttatgttaacctaccgacccttgccctgtgtaaccccgattctcctctgccctatgtggaccttgccatcccctgcaaccacccagggagctcccctcccgtgggtttgatttggtggattctggctccgggaatttcctgcccactgcgtggccccctttcccgtgaacaccccctgggaggtcactccctgatctgtacttctacccgagatcctgaagagattgaaaaagaagacccggctgctgctgagaagcccgtgaccccaggaggaatttccgggtgaatggactgctccccgctcctgagttccctgctactccagcctgaggttcccagactggtctgaaggtgtcccggtgccctctgtcgcctattcacgccattccctactgaagactggagcgctcagcctgccccggaagactggtctcgccagctccccctgctcaggcccctgaatgggtaggacgccacccctgactggtcttaagctgttcttgcataggctctttaacccgccctggaaaaatggttgatggaaaattaacctccgtttttta

SEQ ID NO: 586271 - DNA, 1903 bp, Homo sapiens
  misc_feature (414)..(414): n is a, c, g, or t
  misc_feature (720)..(720): n is a, c, g, or t
  misc_feature (908)..(908): n is a, c, g, or t
  misc_feature (1877)..(1877): n is a, c, g, or t
gcagaggggtccatacggcgtatgttcttggattccccgtcgtaacttagatgggaaactcttcacaactgtccggatcccttgatgctccgtgcagatagaaaggacgcgaggaatagtcctgtaaagtttgccttggcaagcattgaagcccaacttagagtaggctacacacactcttgagcttaccatggatggacacatgtatactctgattgacaaggaacaagtgatcgcgacactctcataattacagtagagattctacaaggtaggcgcatcctggcgagtaaagctctacttgtctaggccagggtccgctggcaaatctggtctatgaccaattgtaacataccccctggctgtatagtctaggtgctaactaatgctctcaccaaggcaagtaacttgtgnaccacagaagagcgacatgattagccgtagaaaggatcttggtctgggctcgccgcaggctgggaagacccaacatgcgcaatgtattggcgtagagcccgcgtttacagcttccctgtgaaaaaccattacaccatacacatgcatagaatttccagaggcaagcgactttcccagggaggaaggccccaaacgcgactcttcctttggttggggtataacttagaacaccccctacggggacttttgagcgcagactaggatacctgcctaccaaccgagacagtgcgataacttccatatgtntagaaagctctgaaccctgtactctaatttagggccgctgggtacgtttagacaaatacagggaatatctatcccgtgctgagtccgccctttaatagctttgggacaacttattctttggccaccagtggcgccacaattggtgccaaaacgaaaacctagaggggagcaaagtccttcaaacttcnaagctagggcggatattatgacttggtcggggctgacaagtggacttagggctatccaggggcaaagggtttgccatggctgccaattggacgggttggagacaagcggcaatgtcttcacgcgtttgaaaaaacaatcgcgctagtgggagagacgttgtccaatgtgcccttcgaaattccttgcgtaacctgtatcgttacacataacaggaatttcgcctggaaacggaacgcagttggacatagcggggaatgcaacgcaatgggcctccgctttgcgcttcgctaaaaggtgcttagtgtgacaccaacatgagtcgggcacatattccacacgggattgaaagtctgcggaaccggcgtaacacccggaaatccttgggcaagttcaacactcgtcgtagacttcaaaacttgcacaagtgtggtcgcagacaactgggtccctgtgaacgtgtctggataccatggcttgtggcacccttttgtgtgtgcaccaatttttcacgataagattccacttaaatgtgaaaacgacagtgtgagcgcggtgacactgtttcagggatagaacggtgacagcagagagacacccacaaggtgccagaggcacacgtctaatgggtatggatagcaacccagtagacggggtactcagaagcgagaaactagcgacaaaagcgcacctaagacgagaggagacaaagtcggatgagtgcagaaaaaacaaagactcgctcaatctgacgacacgaacccagaatcagaccaagacgacgctgactatacgtcgtacggatatgagataagaagtaacgatcatctaatcaccagcaacaatgacaatgagagaatagcacacatcatgagctatcacaactacatcagatcagcatcgacatgaacacgaacgtaatcgatcgagactgcatatgactcaaactacgaaatcatgactgacagacnacaagacaagcagacggcagaacgat

SEQ ID NO: 586272 - DNA, 551 bp, Homo sapiens
gatgacggtacgtaccagatgtgtacagttgtaacatgcaaatgactcacgagaatgaagtcttttgacaaactatattagagatcacaccaccgttgattcgttgtatcgaagagatattcaaggagaaagatctgactctccaaactgcatctgagattgccactttaaacagacctcatttcaaacatgctacaacgccactggtaataaagctttggaatgggtgctcattctattatttcactacaaacagcatagaaagcaagagaagtcgggaatttattctaaaatagaatggaggttgtcatctacagcagcactcctcactcctctgttgccatttttagcaagtactccttgtcgatcttgaacagtctccaaccctcttcactggacagatcagaagcacctcttcttttatagaagttgatggttggttcattccattctgctaccaagaagtgcatgctgctgcagagacacctcattgcaacctggcttagattcttcagaatttctgatcctatgccaaagcctctataatcact

SEQ ID NO: 586273 - DNA, 210 bp, Homo sapiens
cgtgtacatctatgcccaacaaagttccaaattttatacctttctttaccacttatgaagtatggcgtaactgttacactttaaggagttcttaaaaagaaatgtgaaatttaacgttttactttgtgaaccgtgttgtgatcagaacgagtattaaatatcacataccacagtgagttaaacacaagagaagtgaaattaaaaaacaaa

SEQ ID NO: 586274 - DNA, 329 bp, Homo sapiens
  misc_feature (2)..(2): n is a, c, g, or t
  misc_feature (54)..(54): n is a, c, g, or t
  misc_feature (83)..(83): n is a, c, g, or t
  misc_feature (153)..(153): n is a, c, g, or t
  misc_feature (167)..(167): n is a, c, g, or t
  misc_feature (238)..(238): n is a, c, g, or t
  misc_feature (255)..(255): n is a, c, g, or t
  misc_feature (276)..(276): n is a, c, g, or t
  misc_feature (315)..(315): n is a, c, g, or t
anttcggcatgaggactcggcgggcgctgttgaagggagtcgggccgcgactcntggtctttttataccttcccgcgcggacncggcgctgccaacggaagggcgggtagggcggctctgctgcaatgaaggtgaagattaagtgctggaacngcgtggccacttgnctctgggtggcaacgatgagaactgtggcatctgcaggatggcatttaacggatgctgccctgactgcaangtgccggcgacgactgnccgctggtgtggggccagtgntcccactgcttccacatgcattgatcctcaaagtggctncacgcacaacaagg

SEQ ID NO: 586275 - DNA, 117 bp, Homo sapiens
atacatatacaagacctacaaaagcactttgtacaacgtaaagcacattacagagaataggagactaaaaaaattacaatacaaacaaaaactaaaagttatatacctagatatata

SEQ ID NO: 586276 - DNA, 249 bp, Homo sapiens
cgttatgtatgacacatctctccaatcatcttcagctgatgaatgtagtatgagagcccttctccaaagcagaggtagaatgtacaggtttcaccatggattttctacttataatcgtttttggaatcagcttgacagattcacaggtccctgtttgtatatatgctttattctattttgcttttttaaaaagataattttgtttcatatttaaagcacttgtatagtcaatgttgcttgttccgctgt

SEQ ID NO: 586277 - DNA, 389 bp, Homo sapiens
  misc_feature (47)..(47): n is a, c, g, or t
  misc_feature (122)..(122): n is a, c, g, or t
  misc_feature (136)..(136): n is a, c, g, or t
  misc_feature (356)..(356): n is a, c, g, or t
  misc_feature (381)..(381): n is a, c, g, or t
ttgcagacagagtctcactctgtcacccaggctggagtgcggtggcnaatcatggctcactacatcctctacctccccaggctcaggtgatcctctcatctcagtttcctaagtagctaggnctacaggtgcgcancaggcctggctaatttttgtattttttgtagagatggggttttgccatgttgctcaggctggtctccaactgctggactcaagcaatcacttgccttggcctcccatagtgctgggattacgcacatgagccactgcacctgggtctgacatgttaataatgacattaactttatgtttctagggaacgtattcacggcacctccattttctttcaggtnttgattttatattcttcaacaaaantctatcca

SEQ ID NO: 586278 - DNA, 1481 bp, Homo sapiens
gatgggacactttaacctgattgacaggtgatgttcggtcttgcagggggacgccttgatcatcgactccgactactttgcgcaagcgtacacttgggaagcatggttgaccgtgtaccatagactggtggacttgctcaatgtagcctttctcatgctattgcaaaactgtctgggcagtcttcaattacaggaactcgaagcgtacgtacaagcgagctcgcactcttacaagtcgtagattccataggcaggtagcagattacccacattgagctgtgcatttgaatagagtgaatctcgcgctcttactatggaaaagactcccttaacttagcaagacgtcgatgaggcgggagttcgcataattctgtggatgtgtcgcatgtaccccagacatagacttgggtactttaccttgaggacctatggggattcgggactctacctacgctaaagtgcaatagctcggaccctagtatgttaccgcgttgtcctaagcccaaagttcgtagttgccaaaaagtatgttcgtaatgttggccagctcttttgatgttttaacatgtgtggttcccttggtccaagctttaagggggcagttaactgttctatagcggaggaaaattttcgcgcaaacaacatgggccagagcctaggggaaagtgagtgaacgagctggggtgttaacccagaaattatgaataggatgttccagtaatagcaatttttatctgcgtcaaacactgtagggagaaataggtagggtgctagttggttgagtagggaaaggcgaataaataccctggggacaaacaaaagcctgttagctagtatgggaatggctataatttcctaggttcttcgaaggggacttagggttgggagagccgcttgatgtttcctgggagacctttttggtggaagataggtgtgattggatggatggacgattgattctagggggataggtcgagaggaagttgggggttgcggggaaggataggttaggtgtctggtgggaccgaaaggtagtatcgaaaggcggggagtggaaacgaggggcgaattgctttgtctaaggctgtgggggttgccagaggaaaatttctttgcgcaattggaatggaatttggggtggaaagtatggagagaaaaggtggggcgtttgcattgaacctcggtttagactaccgactattgaggctagacccattggagcacgaggtcgcattgtacagaagggggaggttataatgaatccatccaatcttaccttggggaagttggcgtcgcaatggaacaacccccttttcgttgtgtgggcagattccaggaaaagttttctggaaacgctcgcttgttgggagaaaaagacgaccgcttgtgattatagttgggtggaccccggggcgaaacaagcgatggcaatggtggacaattaggacgggcgaagacaggggataatattactcacaaag

SEQ ID NO: 586279 - DNA, 402 bp, Homo sapiens
  misc_feature (11)..(11): n is a, c, g, or t
gggccttcacncttaaaaataatcagtctaggttgggcatggtggctcacacctataatccccagcactctgggaggccgagacaggaagattgcttgatgcccaggagttcaagaccagcttgggaaacatagcaagaccctgactctacaaaaaaaaatttgctggtgtagtggtgtgcacctatagtcctggctagttgggaggcggaggtgggacgatcacttgagcccagggattcaaagctacagtgagctatgatcacaccactgcactccagcctctctataaataagtaagtaaataaataaagtcagttagttacaaacctttttaaagacaatttacagttaggtctgacctttaaaggtgctggttaaaaataattatggccaaagaaat

SEQ ID NO: 586280 - DNA, 281 bp, Homo sapiens
gctcgacctttgggaggccgaggtggatggaatgcctgaggcagaagttcaagatcagcctgggcaacagggcaaaaacccatctctgcaaaaaaactacaaaaaattagctgtatgcagtggcacacacctgtagtcccagctactggtgaggctgaggtgggaggttgaggccacagtaagctgacattgtgctattgcactccagcctgggcaatggagactctgtctcaaaaaaaaaggtcaggcaaggacacacatgtgtgatggcatttttgtcg

SEQ ID NO: 586281 - DNA, 578 bp, Homo sapiens
tttttcctagcagcagtgatgatatcaacttacaaggtctggctttcaggatttcagaagctggcattcaaggacaacaggcagtttgtcagagctgaatgagaatcagcctggacaaatcaagtgctttaacaagggcatcttccgtgctgggagataatccagtcgcttaatactagttgtgcgagcttgaacataatgagttttggtgaaagtgtcgtttttctgggctgcagcccccgttttgaagtaaggccgttgtaattttaaatggtctggaaagatcttcgatgctttctgtaaggtgtagatcaccaagaagccagaacttttgggtgaaaacagagatttataaaatgagaactgagaccttcgtcctttcttacaaagataaagagtcctgtcagactccagtctcagagccacctttgcccatttgtgattcagacttgcagagtgaggagagaactgcttcagccttactgtcttgtagagagatttggtgaaaatcatgttcactgttagacccagtagttttcaggagcgcaacaggatgcggggcacctgggcttcccggg

SEQ ID NO: 586282 - DNA, 301 bp, Homo sapiens
aactgcgaacggactgatcaggaggtcaggaattcgagaccagcctgaccaacgtggtggaaccccgtctctactgaaaatacaaaaaaatgttagccatgcgtggtggcacacgcctgtaatcccagctactcagaaggccgaggcagaagaatctattgagcctcggaggcggaggttgcggtgagccgagattgcgccgttgcactccagtctgggcaacagagtgagacgccatctcaagaaaaaaaaaatagccacatgtctagcacataggaagagatcagtccgttcgcatgtt

SEQ ID NO: 586283 - DNA, 323 bp, Homo sapiens
agaaagaaagactgaagtctatgcaaaagagtgcagggtacggaccgggcgcggtggctcatgcctgtaatgccagcactttggaaggctgaggcaggcggatcacctgaggtcaggagttcaagcccagcatgaccaacatggaaaaaccccgtctctactaaaaatacaaaattagccaggcgtggtgttgggcgcctgtaatcccagatactcgggaggctgaggcaggagaatcgcttgaaccgaggaggcagaggttgcggtgagctgagatcgtgccattgaactccagcctgggcaacaagagcgaaactccatct

SEQ ID NO: 586284 - DNA, 313 bp, Homo sapiens
tgaattcgagccgaaattgtgccactgtactccagcctgcaacagagtgagacactgtcacacaaaaaagaaagaaatatcacaatatgtcacaataggccgggcgcagtggctcacacctgcagtcccagcactttgggaggccaaggcagatggatcacctgaggtcaggagtttgagaccagcctggccaacgtgacaaaacccagtctactaaaaatacaaaaattagccaggcgtgatggtgggcacctgtaatcccagctactcaggaggctgagacatgagaatcgcttgaacccaggaggtggag

SEQ ID NO: 586285 - DNA, 119 bp, Homo sapiens
  misc_feature (85)..(85): n is a, c, g, or t
  misc_feature (94)..(94): n is a, c, g, or t
  misc_feature (96)..(96): n is a, c, g, or t
aagagggctcagactaacagcagattttttcattagttaacactgaggcaggagaattgcttgaatccgggaggtggaggttgtngtgagccgngntcacaccactgcattccagcctg

SEQ ID NO: 586286 - DNA, 738 bp, Homo sapiens
gccgacgccgtcctgtggaaccagaggaagcgggcagaggagcccacgttcggctggtcacctcgaaatatctccagtccgtcgcagtcccgcaagagtgtaaggatgttcgcactgacgccgaaggcatcgactgtgcgagccccgctcatctgatccagagtcttggatccaggagttgcatacaggaaccgaatttcgttgcaatcgagagttaatcctcgaccagaggctaataggactggagagggctctacggtatttaattggggcccatgaatggtgtgtctcagctaatccaaaggggagtttcagaccagtgcaatcagcagagacattgagtactgctgccaaatttatcgcgtgcaggtgctgtcaactaggtaggacgtggctggttctggtgctggtattggaagcacgtctttggcagccttatcagttggttatgccataatacccttcgctgaagcaggcagctgtcctcatatgctatcctggcgcatttgccttgtctgaacgcgtagtggggtctctctggtttgatggttgctttcttgattattgttatgccatgtaacagattactgcttgacatgttggcatttcatacttagttacgggatgtagtactgtgtatcttactgtgactccgaaaactgtagtattgggtgtctgggcactgtacgttatttcccaagccctttcttacagatgaaactttgagaaaggcaaagt

SEQ ID NO: 586287 - DNA, 146 bp, Homo sapiens
ggcaagatctgtcaggagcatgtgggacacaggttagctgaacaaaggcccaccctactttaggcctctctcaacagtgtatgtgtgcacgaggataggctatcattagccatcagtaaactcatactgtcatttgatacctttcc

SEQ ID NO: 586288 - DNA, 851 bp, Homo sapiens
tgatgggctacgctgtggctgtgcctgcatgccatatgtgttgctttgtgtgcctgctgtgtgtgtgctgctgtgtgtgtgtgttgctgctgaatgttgacctttgctgtgtgtgctgtgtggctggtgagagaatgttgctgcctggtgacctggccctagacacttgagcctgctgtgtgtgtgatccccacctggctctgctgatgtgccctgctgatgctgccagtggatgtgctgccactgaggtgatgcctgtgtgcatgcctgctggtgccactttcaagtggtggtgccctgcctcgcctgccctgggctggtcgagagatccttgtgtgggcacatctctggggtgctggtgaccctgccctgggctgcatttcaggggtgtctgtgtgtgcgcaattgccatgggtgacatcttggatggccctggcccttgcttcttgtctgggctccatgtggtacccccctgtggattgtgcttgcagcttgttgccccctctgcctgtggccctgccctgtggggccgcctgggcaaaggcggtgcttgaggttcagccctggggattcgcctgtgtgccgcctggccctttagccgaccactggctgacattgcttctgtgcttgccctgtggttcaggctgtgacacaccttgtgagcggcgatttgggtcccgcctgttgtccgcctactgtgcctgcctgctgcttgcttgccctctatgttctacgttggcctgttcttcgtcaattgtgctgatcctgtactacgccttcctcatggaggtacatcgtcctcaacgttgggcctcgtcttcctgcccgagggacttgaccaaggcgctcta

SEQ ID NO: 586289 - DNA, 440 bp, Homo sapiens
  misc_feature (340)..(340): n is a, c, g, or t
  misc_feature (375)..(375): n is a, c, g, or t
taatattttcttagctctgatttatatatttggcattctctcttttttcttagcgtggctaaaggtttgttgatttcgtttttattttccaaaaacaagtttttattttgtattttctctcaatttcatttatttctgctctgatctttagtgtttcttttctttgactagttttgggtttagcctgctcttacttttctagttctttaagatgcagttttaggttttttgttgctgctgttgttgttattgttgttttttatacggagccttgctctgtcactgggctggagtgcagtggtatgttcttgggctcactgcaacctccgcctcctgggancacgtgaattctcctgcctcagcctcccgagtagntggggactacgggcaagcaccaccacacccagctaaattggttgtattttccagtagatacaggg

SEQ ID NO: 586290 - DNA, 129 bp, Homo sapiens
ccgctgaagcggaggcgaaggtgagacgtgacgcaggcgatgacccgcgcgaagcgcgccgagcgcgcgacggcgcaaagacggccagcaggcgggacgccagtaaaggcgcgccacgccacgacgaaa

SEQ ID NO: 586291 - DNA, 689 bp, Homo sapiens
agcggaggggagaggagatgcgccgagggatggaggtgtatgtcaccgaggaggctgctgcgctcctgccccacgccctgggcccttgaagcctggagagtcaccgccgagggatgaggacgcgccagcccgggggaacgcgccagctgctttcgcggcccccaagcgcgcagtgcccagcaagccgcagccgagacctgacacgctgatcctcatcccctcgcgcacagggctctgcgagtgaccccaggcgggcggagctccgtgctagcaatggaacgggctgcaagacaggccaagaatggacaagtcaggatgctgggctagcaaagggaccctggcatgccagtcacccaaaaggaccaagggccatccgtgggacatcaggaagcaggcccagaccctcattcgatcatacgaagcgctcaaagtatcaacattatagttcccagtctcttggaaacaacggtgggaagaccatgcacataccgcaaagacccgcggaaagccagctccgacgtggaaccaaccgcgaagagtcgccaaaagtcccaccgacacagacagataaacacaaaaggaggagtgtaggagccgagaacaaaccagaggcgacactcgggaagaacaatcctcatacaagcgacccaccgaggacacgcacaaagaaagcacgaggaggaaggcca

SEQ ID NO: 586292 - DNA, 649 bp, Homo sapiens
taagcagccttgtttgctcacacaaaactgtttggtggtctcttcacagcaacgcgaatgaaattggtgccatcactcggatcagggacctcccttgggagatcaatcccctgtcctcctgctctttgctccatgagaaagatccacctacgatctctgctcctcagaccaaccagcccaaggaacatctcaccaattttaaatcggatcttctcagcttagcggctgaagactgatgctgccagatgactttggaagccccctggaccatcacagatgcccagctttggataactcttacagtggaggacaggaatatcaggtctctgagcccaagctaagccatcatatcccctgtgacctgcatgtatgcatccagatggcctgaagtaactgaagaatcacaaaagaagtgaaaatggcgcgtgcctgccttaactgatgacattaccttgtgaaattccttctcctggctcatcctggctcaaaagctcccccactgagcaccttgtgacccccactcctgcctaacagagaacaatcccctttgactgtaatttcccactacctacccaaatcctataaaagggcccaccctatctccattcactgactctttttggactcagccactgcacccaggtgaaaa

SEQ ID NO: 586293 - DNA, 128 bp, Homo sapiens
tagagagggtcaagggcgtgcaccaagtcggtctttcctctctttaaaagggggttggattggccataaaagacacacattggacattttggaagaatacattctcttctctatttttttggagctca

SEQ ID NO: 586294 - DNA, 720 bp, Homo sapiens
atgttaggcagctgagtatgggagccaggagcctgccatgaggttagagaacagagatgctgttcagagctggaagcagcatgtcagccaagagaagccgatgcagcctcagtgttccttgccttgggggtactgagtggtggggtgtaagcagatcctgccaggcacccagaaggaaactcatcaggactccctcagaaagcaggcccatgaagacgtcctgtgacgtatcatctaaagtaggtcatgagacccctgagcattaaaacggagtgatcgcgattggagaagataaggagacatgacgtgccatgccctggggtggggactaaacattcgtgccagtccacgtgaaagggggaggcatgactccacgagttatactgccaacaacagagccggggaaaggaggacgcaggaaagacgcgacgtataaaccaagccacaggtagatggtacaacatatcgaaaccaacgggacccgcctgtgcaaaagactacttcaatgagggtgtcaatcacaaaaaacgctacccagcaaggaaattaaataaagcagtccggagagcaagcaggacgccgacacacaggctgataccactaccgatactagaacatacactgaaagacaatgataagcgaggaacaagctggcgatgcacggatcaagcggtgcaggacacatgcctctcacggaaataaggctggctaggagacacc

SEQ ID NO: 586295 - DNA, 243 bp, Homo sapiens
gtggatccagacaactatcagaccggtgtcgtcataaacagacaggactgattcacatccatcctcactgctggctgactgttcctgaagtcttcgagggccagtcggccagtatcccactaaggaatattggcttccagggcctttttgtggattttgggcgataactgagagcagcgcctgaggtaatccaaggccgggaggcaaaaggtctgtggcaccgggaataccggggtagctggg

SEQ ID NO: 586296 - DNA, 315 bp, Homo sapiens
ttatagcacaactagggtcagttttgcaggtgataagccatttaccaagatagttgtaggtaaagaagggcagatttattagagaaatgtgaaaatatgttgcagtgggcagctcagcagagaaggggctgcctgcaaagaggcaagggctggaggaaagttttatagggtcctgctgaagggtgctacgtgtggaatgaggtcattgtgcccgcaggttgtttgtgattagctgtctctaacaattgttcatacaataattgttcattattgttctcaacttggggctctccccaacctggggacccttcctta

SEQ ID NO: 586297 - DNA, 975 bp, Homo sapiens
aaattgggtaaagccatttagcataagtatagaatagatatgccgatactatcgtagaaggtatgtggcgatctatttggataaaattctcaatatcgagagtaaatcatcgtgatgtttctatagatcatctttgccagctcaaatagaaatagaataccctatgtagttgtggaacgttttatgctaatattgtgtaactgatgattgaaaccctaaagggttctgccgtaccactgttggtatatcagtatgattttagagcgagactgtagaatcttagaaaagaaagatagtcagtgcgattactctatgcacatagaattgctcttagatatcgttcaatgttggccgtcatgacattacaagtgtttggaatttgtactgcaactgtctgtcggcatagtatagacaatccttttgtatttccagtgtgaagattcttcgaaatcaagtataggaagtagaattgttagaaaagcgagttgagtgttaagcgagaatcattatcagatctgctccgacaagatgataatatcgtagctttattgtcccatgatggctacaattgttgacaaaatatttatcgaatatccttctatgggctcattttgtgcgagttgagagaatgtcttaaaagcaacattatagcgtaggtccatgtaggtgtattcgtgtgtaaactacttcgagaatttttgaaaatcaatgctttgactggttgggagacccgatggggaaatacacattcaaacattagagtcagagaccaccaatcatgcgaagaagcggaatagggcgcgccgtgggtagggtcaacgagaatctctatatgccaatgtttgcccctctctaaaaatgtgggggagcacccaacgctgtgggctacattgggtgtgtgtaaatcccctcaaacatgccatttctgtgggcacacactcaattgcggagttcacactggacaaggagtgatgg

SEQ ID NO: 586298 - DNA, 445 bp, Homo sapiens
  misc_feature (285)..(285): n is a, c, g, or t
tttatacccatctactcctgccttttttccccaaatgcaactggagaaacttgtgtgtatgctagcatctagtcaatattagtcacactctgtggtgctagatgctatcaaattactatattagtagtagtgacatagcaactactataattagaaaaagatgaatggcagattttatgtaggcccaagggcattatatagtctaggttagtgttgtagatcatagataaagccccatccatcccagcagtccctcatgtgggaactcggtacgagatcgtaccnttgccccacttctctataactccaacataaccagtttccctctagagttggaacagattatagtttagtagctcaccaaataaagtacgtagcttgtatttaccagctatggtatataaaaatatgaatcattaaatgctagtataaagcagttagtctt

SEQ ID NO: 586299 - DNA, 916 bp, Homo sapiens
taatgatggagtatcgctcttgttcccagactgtagtgcagtgtgcccagatcttgggtgattgtgactctacctcccgagttcaagtgcattctcgtgtgtccgcctccacagaggtaggcgtcgggattaggtcatgagccacgacgactcgtggcttaaatggtttatagtatgtttgagtagagatgtggcgttacacctatgtgtgcgccaggctgggtctcagaaaactctctggaccttgcaatgtgatccagtgcttgtcctcaaggcgtcctgagtgttgtcttgttcgcattcacatggtgttggacgccccaatttgtgactccgagagttcctcacctttcgttttgtgtgtactaaccctccaatttttgggttcactggccatgggtttggccagaaaattaataaaaatacacatacacactgaggcacacagcatgagacaacacttatttgtgtcgggggggcagtgggttatgagcatggccccgtgttagaaattacacgtgtttttttactaagcagaccattatccgtgtgtatagtgggtggagccgggcgggggaggccctaatttgaagaggacggacatgaatgtcaaaccttttgggcgttgcaatgatgcatggttatgatcatatgagaagtaagagaaccgtgaggatttcagtgaaaataaagtggtgatcgcgagtatgtgtcttttgacggatgtagtgaataattcgcgcctcacggggagtgctggaaaacatcgagaaaggtttttgttgagacaagaacatcctcacattcgtgtggatcatttgtgatggaagcgatactaaggagagaaaacactaaataagaccatggggggaagtcacaacacgagaagattgtagaatgtttagaaaaatttgat

SEQ ID NO: 586300 - DNA, 266 bp, Homo sapiens
cgtaagtgtctcacaatgaaacatgaggctccccgacccaggcactcctgatctaaaggtggacagtttgagtgaaattaacattgctccccgtgattctcaccaagtttcactggagtaatgccacctcagttcaaaaaggatttggatccctatcttaaaacactctagtgtacttcaagacacttctgatatcttttaacaaagtcaggcgctgatcacagcggtccagctcgttcaggcagcttatgacatcatactgaaac

SEQ ID NO: 586301 - DNA, 161 bp, Homo sapiens
  misc_feature (4)..(4): n is a, c, g, or t
  misc_feature (42)..(42): n is a, c, g, or t
  misc_feature (54)..(54): n is a, c, g, or t
  misc_feature (141)..(141): n is a, c, g, or t
  misc_feature (150)..(150): n is a, c, g, or t
atgncatacatacagaggacatccagatccttcataggtggntttttcagcggnaactggagaggcaccacagaggagggatggagagcaatcttgccccagggcgcctgggattccaggctcaagctctggctcttagcntgggaactngggcaagtaat

SEQ ID NO: 586302 - DNA, 323 bp, Homo sapiens
  misc_feature (54)..(54): n is a, c, g, or t
  misc_feature (71)..(71): n is a, c, g, or t
  misc_feature (108)..(108): n is a, c, g, or t
  misc_feature (116)..(116): n is a, c, g, or t
  misc_feature (129)..(129): n is a, c, g, or t
  misc_feature (138)..(138): n is a, c, g, or t
  misc_feature (165)..(165): n is a, c, g, or t
  misc_feature (198)..(198): n is a, c, g, or t
  misc_feature (314)..(314): n is a, c, g, or t
  misc_feature (319)..(319): n is a, c, g, or t
gtcatgatgttcgttggcttcctgggctgctacggggccatccaggaatcccantccctgctggggacgtncttcacctgcctggccatcctgtttccctgtcaggtngccgccgnatctggggctttntcaacaagntcccagatcgccaaggatgtgaagcanttctatgaccaggccctacagcaggccgtggtngatgatgacgccaacaacgccaaggctgtggtgaagaccttccaagagacgtttgattgctgtggctccagcacaatgactgctttgaccaactcattgctcaagatcactttgtnttccntcgg

SEQ ID NO: 586303 - DNA, 160 bp, Homo sapiens
gtgtctgtccatgcgctgcagtatttgcggttcccagaggagttggcaggaggtgagctggggcctgcgggaggtgagatggaggtggtgaggaatttgtctgggctggaggctggactgaggcggagagcaggcggtactctggcgagctaccccgctc

SEQ ID NO: 586304 - DNA, 127 bp, Homo sapiens
ggcgagttattataccatgaaatgattgaatctggtgttatcaacttaaaagatgccaccagattcaatcatttcatggtataaatcattgccttcacgggtcctctcaccaacaccagcaaacaca

SEQ ID NO: 586305 - DNA, 189 bp, Homo sapiens
tgatcgtcgctagctccacgagcttgtaccgctggtcgtaataccgtccttcaccactgtcgctcaccaacttgacgttgaccggcgcattgccaaccgcctgcacgctgcggatggtttgtacatcgaactgattgccgcgaaaggcctgggggcaacccgtcaattccagggtcgagccgccagaag

SEQ ID NO: 586306 - DNA, 325 bp, Homo sapiens
attattacccagtcttgagtagttcttaatagcaatgtgagaacagcactaatacaatggtctatgtattgaactagtgttttagtaggtggccaataattatctttggtttctatgtttagcactcccttaaggacctcctttaaggcaggtctggtgataacaaattcccttagcatttgcttttctgaaaagaaatttatttcttcttagtcttacgaagtttagtttggctggatacaaaaattctatggctggaatttctattctttatgactgctgaatataggctcccaatctcttactggcttgtaagggtttctgt

SEQ ID NO: 586307 - DNA, 856 bp, Homo sapiens
  misc_feature (102)..(103): n is a, c, g, or t
  misc_feature (134)..(134): n is a, c, g, or t
  misc_feature (164)..(164): n is a, c, g, or t
  misc_feature (182)..(182): n is a, c, g, or t
  misc_feature (184)..(184): n is a, c, g, or t
  misc_feature (202)..(202): n is a, c, g, or t
  misc_feature (212)..(213): n is a, c, g, or t
  misc_feature (256)..(256): n is a, c, g, or t
  misc_feature (258)..(259): n is a, c, g, or t
  misc_feature (264)..(264): n is a, c, g, or t
  misc_feature (272)..(272): n is a, c, g, or t
  misc_feature (281)..(281): n is a, c, g, or t
  misc_feature (305)..(305): n is a, c, g, or t
  misc_feature (311)..(312): n is a, c, g, or t
  misc_feature (345)..(346): n is a, c, g, or t
  misc_feature (394)..(394): n is a, c, g, or t
  misc_feature (398)..(399): n is a, c, g, or t
  misc_feature (404)..(404): n is a, c, g, or t
  misc_feature (406)..(406): n is a, c, g, or t
  misc_feature (421)..(421): n is a, c, g, or t
ctcactcctcagctgcaggagccagacgtgtggagtcccaggcagaggcaactgtgtctcttcatctccctgggaaaggtgcccccgaggtgaaagagatgnnctggtggaaatcctggattgaacaggagggngtcacagtgaagagcagctcccacttcaanccagaccctgatgcaganancctctacaaagccatganggggatcggnnaccaacgagcaggctatcatcgatgtgctcaccaagagaagcnannacgcngcggcagnagatcgccnagtccttcaaggctcagttcggcnaggacnntcactgataccttgaagtctgagctcagtggtnnagtttgagaggctcattgtggcccttatgtacccggcatacagatacnagannccaangnagctgcatgacgccnatgaagggcttagcgaatccaatggaccggtgtctatcgatatgacgatcctggcactctcgtgaccaagaagccagctgcgggacataatgaaggcgctactgagtgaacgactactgggtccacgcctggaggatggacatcctaactcagacacaatgtggcctaaccttggggagcaggatcctgtggtgtgcgctccgtgtcaccggccaagcgacgtggtccttgattgcttgaagccaaggccttgggtcggcacgcccagtgccttgcgtccccttccccaagtagtgccccaggatctggtcattccgtgccgtgctgaagacagcaacccgtcggcgacccctgcctctgacttcacattttcctcaccgctcctgatgcccgcccccgtgtcccctcacctgtgcctccagtgttttgcgcccc

SEQ ID NO: 586308 - DNA, 778 bp, Homo sapiens
  misc_feature (44)..(44): n is a, c, g, or t
  misc_feature (76)..(77): n is a, c, g, or t
  misc_feature (79)..(79): n is a, c, g, or t
  misc_feature (104)..(104): n is a, c, g, or t
  misc_feature (122)..(122): n is a, c, g, or t
  misc_feature (145)..(145): n is a, c, g, or t
  misc_feature (193)..(193): n is a, c, g, or t
  misc_feature (228)..(228): n is a, c, g, or t
  misc_feature (251)..(251): n is a, c, g, or t
  misc_feature (270)..(270): n is a, c, g, or t
  misc_feature (285)..(285): n is a, c, g, or t
  misc_feature (334)..(336): n is a, c, g, or t
  misc_feature (338)..(338): n is a, c, g, or t
  misc_feature (347)..(347): n is a, c, g, or t
  misc_feature (404)..(404): n is a, c, g, or t
  misc_feature (489)..(489): n is a, c, g, or t
  misc_feature (698)..(698): n is a, c, g, or t
  misc_feature (771)..(771): n is a, c, g, or t
ctcattagtttactggctcactttacccctgtctgacttcagantgctgttatgacatattgttaaagggccaagnntngggtttccataaaggtattgggggngtctgggggtactttggngcctatgggggtggctgggtctnggttgggcccgtgggttgggtgggtgggtccggaggggtccacctganaggcgatagctgaggttgcctgtgggaaaccagtnatgtggacgtgtcagcttacccnggggggcaacggggtttgngcaattgggctcgcngggggggagcttcaggtactttcttggacttagctccatttacaatttnnnanatgcgaaanatactcactatacatagggttgatgtttctttggagagtgagggtgaggtgattgancatgagctaatggactgctaacagagaaaccaccaggtacaagtgcacacacatgcttggtgcctggccagccttccacctagtnggggaggagctgtttctcttcctggccgccagggggcagttagctcatggctgagaagtctctcaagggttcagttaaacaagcttccaaatcaaactcatcctccacttgactgtccatgtgtctcaccttggtgggtgtgcagagtacacatcaaagtcatcctgagagctggtctggggctcggagctgctttctgcagattcaangtctacagggtgtatttcttggcaatcacatccttcttccgctggaggatcccaaaatgcagagcaccttccngagtttg

SEQ ID NO: 586309 - DNA, 792 bp, Homo sapiens
  misc_feature (102)..(103): n is a, c, g, or t
  misc_feature (134)..(134): n is a, c, g, or t
  misc_feature (164)..(164): n is a, c, g, or t
  misc_feature (182)..(182): n is a, c, g, or t
  misc_feature (184)..(184): n is a, c, g, or t
  misc_feature (202)..(202): n is a, c, g, or t
  misc_feature (212)..(213): n is a, c, g, or t
  misc_feature (256)..(256): n is a, c, g, or t
  misc_feature (258)..(259): n is a, c, g, or t
  misc_feature (264)..(264): n is a, c, g, or t
  misc_feature (272)..(272): n is a, c, g, or t
  misc_feature (281)..(281): n is a, c, g, or t
  misc_feature (305)..(305): n is a, c, g, or t
  misc_feature (311)..(312): n is a, c, g, or t
  misc_feature (345)..(346): n is a, c, g, or t
  misc_feature (394)..(394): n is a, c, g, or t
  misc_feature (398)..(399): n is a, c, g, or t
  misc_feature (404)..(404): n is a, c, g, or t
  misc_feature (406)..(406): n is a, c, g, or t
  misc_feature (421)..(421): n is a, c, g, or t
ctcactcctcagctgcaggagccagacgtgtggagtcccaggcagaggcaactgtgtctcttcatctccctgggaaaggtgcccccgaggtgaaagagatgnnctggtggaaatcctggattgaacaggagggngtcacagtgaagagcagctcccacttcaanccagaccctgatgcaganancctctacaaagccatganggggatcggnnaccaacgagcaggctatcatcgatgtgctcaccaagagaagcnannacgcngcggcagnagatcgccnagtccttcaaggctcagttcggcnaggacnntcactgataccttgaagtctgagctcagtggtnnagtttgagaggctcattgtggcccttatgtacccggcatacagatacnagannccaangnagctgcatgacgccnatgaaggggccttcacggagaccaaggcaggggtgtcatcattgaagatcctggtctctcggcaccaggaaccatggctgcgggcacgatgctgaaggcgtatgaggaagactatgggtccagcctgtgaggaggacttccaaggcggacacaagtggctacactggagaggatcctggtgtgcctcctgcagggctgctgggcttgtgtgagctgtttctgtggcccctggggtgtgcctctaagacgcgctgggctctgtatgcggcaggtgagacgcttcgtgggactgatgcgctgaggttcatcacgcatcctgtgcacgcgcaggggcgttcggcctgtgcgagtgttctgacgagttgatggat

SEQ ID NO: 586310 - DNA, 880 bp, Homo sapiens
cagcagtcactaagcttgtaaccaacgtcagtcatggttctacaacccagaagccaccagtggtataactgcttcacagtcctctctggtcagtaatagcagcagtggcagcagcagttctaccaccatcacctattcctaatacagtgtgcagtaacagctgtggtgtcctctacaccatctgtggtcatgtcaacagtagcacaaggtgttatctacatcagcaatcaaaatggcatcaaccagattccttcccccaaaagcttagttgagtgcccccaatcagattctgtgcaagttccctaaaaaatcaaagtctcctaagcagcagttatatcagtgcacccaggacacagcaacaagtggcccagccttctccagtatctcatcagaaaagctcagaagttctccttgtgccaccgtgtattaaactaccatccaaatcaaacaggagtcagggtgtcaaaaatcatcaccacaacaggttcacccaaagtaaaaatcttacccaaaccagtgacagaactctacccaccagtagcaattcccctatttatggtggttagcaggtaagtggtgcaattatgacaataaacgtgctaacccacttctagttggacacaaagcaactatatctgtgcaaaagtgagccatccattgtcgatggttgaaccctggagctggcccttttgtgaactcacgcgtgggagctcttacacgtgcccaatcatacgacctgggggaaagaataagagaaaagtctcgggcgactgacattgaaggtgcggtcttgggggacacacaatctggggtattgcactcgtcgacacatggcccttgcgaaacgaggcaccacacacgggagacctcgcgagcaacg

SEQ ID NO: 586311 - DNA, 243 bp, Homo sapiens
tgctgggattacaggcatgagccagacctcatgagaactatcagaaggacagcaacaaggggatggtactaaaactttcttgagaaagccacccccatcatccaatcacctcccactaggctccacctccaatactggagattactacaattccacatgagacttcaaggggaagggacaaatatacaagctagatgagtaagtataaattatttggggatcccagaggttgggacaacatct

SEQ ID NO: 586312 - DNA, 1534 bp, Homo sapiens
ccttttggggaaattaatcataaatggtgggttatgggcttgccctagtagcatcatattaggttagttatgctaccaagctttggtgtgcctatattcgcagtatacagggagagtatttaatatccgcgtggtggtgtgggcgacctctcacccctcccgaacatatgttgtgtgctcacacacgtttatatgtggacaactatagaatgcccgttgtatgataatcactcccatccgttggggacgcacaaatatagtgtggttttccaacaccgccttctcacgcggtgattgagcccccacctatattattgttgtcctgttccgcccgttgttgttgctgctccccccacacccgggggcgtggtgcccgcgcaagggtgtattgtttttagtgcgcgtgggaaatttctggcgcccaaccaatacatgctcccaccctggggagatccgccctagattatttggggacattcgatgatcttggctgtcgcaccaaagtgggcgttcttgggagaccccctctttatggggagatttctaatccgctgttgtcagtctgtgtttgtccacccccccgttattagtggttgtggcgcccttgcagcactggggcccaattttggtgtatattcttagtgcccacacatcctttcaactgtcaccctttttggaagccatctttcgggtatacttatacactcggagaccacacggcggatatgtatccccccttggtagatgagcctgaccaaaagggtgcccacccatatatgttgtcgcctctgtccacacatatcgggggagctctcggtaaattttggccccactctcactatagggagcggtctttccacatttgtccgccctgggattttttcccccctaatatttttctcccacggggctaatacacccccctcattagagccccaccaaaccctattactgtccacaagattgtcccactctgttcacgctatgtgcactaatgttcacacgcgcggcgtataaaatttctagacactttgttcttgcccgcccccaccacactctttttctccgcggctctatctctccgggagaaatgcgcccctctcgcagcacgctgtattctctcgcgagtgctatctctctcctgcagtgggcacatatacaccccaacactcgtgaaacaattctctatttcactttctcgttatgtggctccaattacactcttttctcttctaccacgcgcacgctataatatattataatatatatattttcacatgagatttgcacgacacaccactctccgcctttcgagaagacgcaaaaagttcctctacttcgttgcagagacccctcccacttaacctcggaggtgactatatggagtgccccccaccccttgccaccaccactttcgcacgaaccccgtaataacactataaattctagaccccacaaaggagagaggagattctgaacccccccaagactaggtttcaagccaacaccacatggcctccatgacatttttcca

SEQ ID NO: 586313 - DNA, 218 bp, Homo sapiens
attaggtttgtgtttttgtttttgtttttgttttttaaatctccttgagagacagtgtctcattctattgctcaggctggagtgccatggcagtcttggctcactgcagcctttgcctcctgggtttaagcaattgttgtgcctcagcctcccaagtagctgggattacaggtgtgcaccaccacacctggctaatttttgtatttttagtagagaca

SEQ ID NO: 586314 - DNA, 1261 bp, Homo sapiens
ggcattacttgaggccaggagttatgagaccagcctggcaaacatggcaacaatcctgtctgtacaacaacatacaaaaattcagctgggcatgcatggcaccatgcctcataacccccagctactccggcaggcttaggccaacgagaatcgcttgaacgcaggcaggccagcaggcttgccagctgcagccgcagattgccatccacctgcgactcccagacctagggtccaaacacgcagcgagcactctggtcctcccaacaacacaacagcagcacacagcaccagcacacatcagccttccagcctaaccgatcatcttccaatcaccatgcggccacgacacctcgcgcccagcgcagccctgccggccacacgccaaaacggcctccaggggcacaatccaagaacccgatcatcatgcccagcgagatcaacctaccacggcctccacatgatcacgccacagaacgaactaaccgtggcactagtataacaacgagcccagcttgacgacccaaacattggccagacccgacggaccacgcagattccttccccaaatacatatattgtaaaacaacttatggaggctccaaagcgtttccaagccaacccgcatgtccaccacacaggcttacatccaatcccccgttccctacaacacgccaataagcggcacggccagtcacagataagaaccccccgggggacaaacgagcatcgctcgaaacaatacatggggcacaatcacccgtataccagaactcaacccaggcccccctgggcccacgaacagccagcaaccaacaaggcggcacccactcaccacacggggcgaatacacttccacacacaccccacccgcgcacaacacacacgccagcgcgcgcacaaggctccacacaaacgtcgcgcgctcccaccccctggacgtatccggcccaaccacacgccccgaacagcacatagccaccatacaggccacactacgatcgccttcagcaacaccacaacaccacccccaaatctgcactcactctcccgtcccactacaaccataacaccgctccatccgcactctaaaaacgccacctgcgcgtataccagcccacacacaccataccccccggcgcacacaacatctatttcacaggagaacatttcaccaacacccagatacaacacatgggataccacaacaaacaacattcccacaaccgcacaacattcaccattacacactcaccgcacacta

SEQ ID NO: 586315 - DNA, 717 bp, Homo sapiens
  misc_feature (99)..(99): n is a, c, g, or t
tgtaggtgcggccatgcatgaacgctaatgtcaaatctttgagtcatgaacactaagtctcggttgacattgttagccttaccatcatgcagaagttcntccaagtttggccacagtcaagtatgctttaccacaagttcggcatcatcttgttaagcaagcgtgaacctttaagcaaagtccagtagtacgtgatcctaatagtacggatgtagtccggcattctcatataagtagtcttcaaattaagtctagtcagtgtcatgaatacaagtgcacatcacatcatcctcaggtctcgctctcaggttcatgtccttgcgcagcagccagtgcatttcaccataggtttcacagatagtcgccactgcgcataatctgtgtccagcaacagtatgaagcgaccggtcacaatgaccagctgcctcatgagagacacatgctcgcgcgcattcagcacagtcattcacttattctccatgatctacgaatggtcactactgatgacagtgaacgacggcgtatccacaaccaggctcttcactcttctgctccctaagctttacaaccatgaccaccctcactaatgcgtacatcccgtcttaacacacccctggaatcagtcgagctagagaggagctgcaagtatatatatggttctcacttcagtgttcataatgcgtctctgctcgacactacacatgagctaggccgtcc

SEQ ID NO: 586316 - DNA, 241 bp, Homo sapiens
  misc_feature (116)..(116): n is a, c, g, or t
tttgtattaatttgtaatagctctgctttagaaaaaatcaaagaccatgattctcatgaaactaatgtgacataatttcccagtgcacttgttgcatgtggaaatccagacacggncaccttccagtttttgtactcattcggctttgaatccaagccaggctccaaatctagtgggaacagtcagtttaactttttaacagatctctatttttttattttgagtgccactattaatgtaa

SEQ ID NO: 586317 - DNA, 314 bp, Homo sapiens
cgtcccggctggtcatgtatacaatatattctataagtcttcagataattatctagtcagacatgctgatggtcggcctcaatcacatatattgatgcactgggatttctattatgtccaatataaaagggtggagtacctccacattcaacaatgttctcttgagacgagtgctaaagtcatttgtcaaggaagagaggagggggttccagctattacacaaatgagttcaagaattcctagagaatcaacttgctacataatctctgtccttgaagggcttttgcctatacccttggaaattatctttctag

SEQ ID NO: 586318 - DNA, 329 bp, Homo sapiens
ctagcctgggcaaaaagagtgacactccatttcccccaaaaaaaaaaaaaaaaaagaggggagtgtgaaacgcacgcctgtaatcccagcacttgctgaggcaggtggatcacctgaggtcaggagtttaagaccagcctgaccaacatagtgaaaccccatctctactaaatattcaaaaattagccaggcatggtgattgagtgcctgtgattccaactattagggaggctgaggcaggagaatggcttgaataaggaggtggaggttgcagtgaaccgagatcatgccattgattccagcctgggtgcagagcgaaggctgccaaa

SEQ ID NO: 586319 - DNA, 1302 bp, Homo sapiens
gtgctcggtccttccgatggaatgctaatggctgcgttgggagtgaggtcctcacttcatccggcgaccgtagcaccagatccggcagcagcctagtggcgctagcactcgacccgacgccactggtctgctgtctccgggagctcagactgctactctaactcgagccactcacttctagctacgatccgatgaaggtcgaactagttcactgggagcgactcaatgatccaacctcgcgcgctcgattagatagcacgccgtgtagtaagacttgttgagcgcgtttaagaggactgtggtttgtaaaggtcaaaggccacattgagtccattacagtaccagacatatgttgggagcctgcaattacatgtcacataggtaggtggggacctggagtagtgatgctgctcacaggacgagacttgttgtgcgtgtcacccgaatgcaatgtgaaggtgccgtgattgcaactcctcacctgactaggtcatgctctcaagctttgatgggagcaagcaagctgtgggaaaagacaatgcgaatacagaaagatataccgccaggtaggtcctgaatgacttagacatggtggctcgggacttgttttttggatcgtaaaaaccccttcctatgtaattaggcactggtttcggttcaaaaccaatagcgtgccactttgctattccagcattgcaatttagccggggttgggcccgggacttaagatttaatcccccacgattgaggggttccgccatccaagtatgcaggacgattacaccagggatatcacgtcgtttacctgatggatcccccaccaatggggagatcttgaaaaggttaacgtctcaggtcccgaggcccttccttgttgaccccacacgcccgcgggcccggggcaacaccttgctcgagccgaaggcggaactcctttagaatagggcacccctcttcctcctcgttgtggcgtccatatcttggcaaccttgcgaacacacaatttaaaggcttaacgctgcgtgttaacacatcgacgcggcacttcggttgaagccaccacgtttgccggcggtggaaccatgctaacggaaggggcaaatgacaatttaccggacggagcaacaaccgagcccccgttccaacacgagcgccgtgtcagcgtccaccggcgccatagacaaccggtaaacgccggcagactccacatgtctcaccagcgcacacgacgagtatccatcactaactactccgctcagaccaacacctattccacacacagactgatgcatcgattccaag

SEQ ID NO: 586320 - DNA, 1358 bp, Homo sapiens
  misc_feature (1135)..(1135): n is a, c, g, or t
gcccatggctgttctaggctctgctgtgtgcatagcgcaatggcagagtggaacccatgcctccatgccagcgatctggcgggcaaggaacggctggcatcatccgagtgaggaggctggcgcatgttggagaggctggctggctgcgacagacgccgtgaggggaggagaggggctgcatgtgcagggcgtgtggagtacggagctggctcccctgagcagccatgcagggcgtcgtgcagcccaggcctctggccaaccaggcgtcttgtgacccagtctcgtttggatcaggtgtgctgagcaccgtggcgacgaatgggggggccgagcgaagggccgtagggtcgccatcacagtaccgtgtcgtctaagcaagttctgggaaagagctgctgggccgtggtgccggctggcctcacgtcgctggtaaagtcaccaaggcagctctttggcgaaggccacaggggcgactgggacaggaatcgctgggatggcccaaggtacgggtccaacggatccaacgctcaatggcgggcaagcactgactgatgacccttggtcgtcctgccaacgacacaaagttttgtctgtagaaccctaatttactggccttggaccgatggtaatgcggcaacggccttgattgagattccccaaggcattggctagcgctgcaatgggcctcgaaagctacgggacgcgactctagtcttaattggcctttggcgggacggtgcttctggacgtcggcttggcacgctctggacggttccatgttgcgaactttggtactctcgcaccatttgactcacttcaccctcaaggacgccgtcagatgtgtatgcacctcaccggaccggcccatgacatgcaacgcccgccttgcgatccatctgccagagaaccgacacgtcgaatgctcagacacgcactccgttcggtgcgatgactccagaacaggtccgatacaccgtcacatttggagcgtttgggtaccaaaggcgttccttcaccattcgcgcgactattgcacacgtgtctccgctcagactgccctcacgagtgcacactcgccggccgtcgcatactagtcatctcgctggggacaggtcgagacttcccagtttcgccncactaggtacttcggcggtgccttcccggcatggaacgcatcgggctctactgcttcagaagcaagttcccctgacacatccctagtctccgctcgtgcccgcactagattgggcatatccctcatcatccaatcggcgctactatatccatatccatcttggaacgctgaacaccactgtgtctcgtgccgctcccatggcagcgcacttacgacatgtctc

SEQ ID NO: 586321 - DNA, 121 bp, Homo sapiens
tatgcatgtctcggctgggatagtctgccagtcagtgtgcagagactgtgtagagaagatttacagtgaaactatgcatggcccacccctttcaggagggaaaaagaattacagttgtgga

SEQ ID NO: 586322 - DNA, 476 bp, Homo sapiens
  misc_feature (35)..(35): n is a, c, g, or t
  misc_feature (94)..(94): n is a, c, g, or t
taatatgatttctaaagcttgacttaatacattgnaatttaacatttagaaattattttgaattgagaaattctagtttattaaaataaaattnccaagaaaaaaagtagagaagtagaatgtctgctccaagacagaaagcaaaaaaatatttttagccattgtaatataaaagagtagcttctgtgtataggagcttctgcttttctatcttttacaaaatagtatcaagtatattaataagcgattataatagctaatgttgattgctcactatgtactaggcactgttctaagtactttatatttactaatttaatatttttggcataattctgttttacttatttacttttaattgacaaataaaaattgtgtgtgtgtatatatatatatggtatacaacatgatgttttaaaaatgtgtaaattgtagaatggctaaatcaagttaattaaaatatccattaccttaaa

SEQ ID NO: 586323 - DNA, 238 bp, Homo sapiens
aacacaagaaatgatatgatgacggataccctaaataccctgactggggcattacacagtctatgattgtctcaacacatcacacgataccccaatcagtccatgcaacatactaagttatcaactttttaaactttcataccattttactacacgtgttacccttggtacgcagggatttttatttttattataacccttgaaaatagcgacatcctacctcattttggtagcattt

SEQ ID NO: 586324 - DNA, 283 bp, Homo sapiens
ttgagcatcggggtggtgacctaaaggatagtgcttttaacggtctgaaaagaaaggctggcgtagaacaggtattgactatcgacggtctttccacacagaagttggagctattacgcaaggctgatccgatggtaaagctcagctagggagggtgctcacgggggtcaactgagttgtgtaatgaagttcatggccatcaacatccgaaggaaagggaaaaccagacccagcctggctgagcctttagtaaaaaaatgtgtggttaaggatcagtcatggg

SEQ ID NO: 586325 - DNA, 599 bp, Homo sapiens
  misc_feature (373)..(373): n is a, c, g, or t
tcgcgaacgtgttatcccaataattgcaaacgaatacattacaagattataagaggtgatagaaagcaccagcacattgatacaaaatataaatatcataaaagtaaattcaacgtcagaaggtccccattcaggcaaatactttgtaaagatatggcctgtatgtaaatatgtgctaaatcaaggactttttagcagaaaattgctctgttcttttatctaaggcttgaatttgtaaagtgaaggcattaaagttatcaaacattaagtaactcttaaatatggcacacaggttttacagctattgtgttttccttcctaactctctgaatttttcccatggcctttgtagatcaactatttcaaacgtatnttacaccatgcaactctcaacatacttgtctttgcagatatgtcatcagtcatgtctaacaggcaaatagcaaaataacagatttataacaatccttaactagctaacaggacatttactttggattctgcataactgccaactggaatattttgtaaagctaaaaatcagttttaatacatgattaacagaaactctcatcatgctcatttatttaactattggc

SEQ ID NO: 586326 - DNA, 1135 bp, Homo sapiens
tgctggactgcgcagagcgggctggcctcgtgtccccgtgttgggggccggtattcacagttactgccgaaatccggatcgaggacccgcgtcgggcccgtggtgctacgtcagtggcgaggccggcgtccctgatgaaaacggcctttgcgagtgcacctggcgctgtccagagaccacctcccagtgccctgtccatgccttcacgtacagaaagtccagtgaagtcgttctgaagggcctaggtgccaacggtatgagcgtgcacgccgtgttcgacatcctgaccaatcgcccgtgacccgcgtcgtaaggtgagggcggcaggctgatgcggcgcaggtgatctggcgatcagccgagcgggttgcgtgattaactccataggagagaacggcacctgggaactctgggctacgatgctgggcgttatcattgatggtcgatcgatctagtgccatcggtagcttggcatcatcttcgggctagtcctacaagcagggggcaatggagtctgataacgcacccacgtcattgcactcacgtaacacgtacttgtgacgaagggagattgcagcgagattctacctcttgcccctttgtctgcctttcacctaagctccaggcttgttgacactttgtgtgcttgaggaagaccttgttctgtggtccatcggcctagccagagcgtccagttgtatcctcaggaggggctagtaaacccgcccttattggtgccatggcccgggactcctgtgggccttgagcccccccagtgggccgtgatccctatgcctgtagactggtgcgggacttgcccgaaccttcattacggctagggagggaacttacgcaacttgggggtgcgtgggttaaaacccgtaactaataccgcgccctattcttgggcgaaatcctaagttaggagttgacacgaaaggccgcgtggccccctgttgggccttggaggggtacgggctaggggtaaggggcccttaacgaggggctccgttgaccgtccccatttggaagccgaacttctggcatcgggagattgacgaacaggttgggagtccccacaggggatgcgtgtcgtagggcgtaccagattgcttggaggccgtgaacgtggacc

SEQ ID NO: 586327 - DNA, 311 bp, Homo sapiens
gacccaacatgagggatacgttctgttgagaatccatgggacagctgtgcgccgcggctcacgcctgtaatcccagcactgtgggaggccgaggcgggtagatcatctgagggcaagagtttgagaccagcctggccaacatggcgaaactctgtctctactaaaaatacaataattagccgagcgtggtggcacacgcctgtagtcccagctactcaggaggctgagtcaggagaatcacttggattgtagtgagccaagatcgcaccagtgcactccagcctgggcgacagagcgaaactccatctcaa

SEQ ID NO: 586328 - DNA, 1106 bp, Homo sapiens
gagctgcgtcgggctgcaggagaagatgtgctggtctccacaggagttaacagttcctcgtaattttcgcttgtaggaagaaccttgaagaatggacaaaacatggacgctacggcgaacaggtacatgatttagactgagggccttgcaacgatgatgaagatatgacacttacaaggctggacaggcatgattattgggccaccaaggacaacttatgaaaacagaatatatagcctgaaacgtagactgtggacctaaatacccagaagctcctccgtacagtctagatttgtaaccaaaaattcaatatgaacggaataaatacattccagtgggaatgcgtcggatgcccggagccataccacgtgttcagcacaaactggcaaaattcatatagcattcacagttgtacattcaacgagctaagcacgtctactgactgtccaaagaccacatactgacagcttcacacagccacccagcaagggaccaaacccatacagacacaattcaattcacctggatctcaaacttgactaaaactcaacaacccttactactccatgttcattgtacttgcttaacactactcccattgcaaaatacacaataaggtaacaagaattccactgcttataaacattgactggcacacatcgtacgaattatattacaaccatttggttcccccccaacactagtgttctacaggtgtaaacagggaaggacaacacaagcccggccaaaacaatagccatcgcgcatgtgaaacaggccacgtggtaacttcaacccacattaacacagtgacgtaacctgaaacaacaagtacagggatacgaacgaaacaaaggatgtggacaagaatcaaggtcaaatgaaaaacataaatatatattaaatataacaattacaaaaaacgcaacagctaattatccctacttaccattaatcctcaacctaacaacaatgctcaacaaacaacaaaataacctctcccaagattacaaaataacaaaatttgccaaagactataacaatgacttacttatctttaatacatatgcacaaatataaaaactttataacatacagactcttat

SEQ ID NO: 586329 - DNA, 286 bp, Homo sapiens
  misc_feature (141)..(141): n is a, c, g, or t
gtatgtatcgcccaacacaagaaagcagtcacatgaatgtttttggtttcccaatgcatataaaagttatgtttacactatactgtagaccagcaagagtgcaatagcattgtctaataaaacaatatacatacctaaatntaaaaatactttattgctaaaaaatgctgattatcaatctgagccttcggtgagtcgtactctttttgctggtggagggtcttgcctcgaggttgatggttgctgactggtcagggtggtggctgctgagtgtaggggataaata

SEQ ID NO: 586330 - DNA, 212 bp, Homo sapiens
cccccccccccttttttttcccccctaaaaaaaccccggggcggttccacccccgggtttttaccttgggcccggggggggttaccatttttccccgggaacaacttttgccctttggccctttttgggggcccctttaaaccagttttttccaaaaaaccgggtggggccgggtcgggatttcccgggtttttttccccccccgggtccca

SEQ ID NO: 586331 - DNA, 521 bp, Homo sapiens
tctagaggatcccagcaagtctacctccaggatctctagggtgcttttttaattcagacgaatatttcaaaacctagtgagaagaatattactgattacattcttatccttagggattaagcaatggagaagagctttgaagtagtaagacacaaaaatagaggtagggatgaggtttcaaaaaaccaggcccttaaacttcagctagacaaccaatatgctgtgcttgaaaatcagaaaagcagccactcacaatacaattaaggaatgggcttcgataacccttctgaggtaactagactgcagctaaccaccaccaacagccattcatcatctgatctctgctggatctacagacaccgatgcagaccactcgatttcatgaccggccctattgcactatggaagttaaagtgtcacgactgctctatgcatattggatttaggggaattctcatagttacctacatgtgtgacctagtttcaacagtgttcttacatattacctctgacaatacaaa

SEQ ID NO: 586332 - DNA, 284 bp, Homo sapiens
tcttggactgttgccagaagacagttcttgaccaaacacctttatttgcatagataaaatgcttcttgtgctagacatggtggctcacacctgtaatcgcagcactttgggaagccaaggtgggtggctcatttgaggtcaggtgtatgagatcagcctgaccaacatggtgaaaccctgactctactaaaaatgcaaacaattagctgggtgtgatgtgcgggcaacctatggtcccaagctactcgggaggcagaggcagggagaatcccttgaaccccagg

SEQ ID NO: 586333 - DNA, 122 bp, Homo sapiens
tattaaacttaattttttaaactaaactaatgtgaccagtagggaaacaagggccccaaagcataagtttttttgccctgttgcccttccttaaaacaaaaaaatgttttttaaagctttta

SEQ ID NO: 586334 - DNA, 978 bp, Homo sapiens
  misc_feature (674)..(674): n is a, c, g, or t
gcctgtagatggtgtggtagattgacggccccgcgctagcgcttcagagttcctggttcatccttgagactcatctgctctgagccatcctcatggatgaacttcaggatgttcaactcacagagatcaaaccgcttctaaatgataagaatggcacacgaaacttccaggactttgactgtcaggaacatgacattgaaacaccgcatggtatggtccacgtcaccataagaggcttaccaaaaggaaacagacctgttatcctgacataccacgacattgggctcaaccataagtcctgcttcaacacattcttcaactttgaggatatgcaagagatcacccagcactttgctgtctgtcacgtggacgctcctggccaacaagaagcagcaccctccttccccacagggtaccagtaccccaccatggatgagctagctgagatgctgcctcctgttctcacacacttaagtatgaagagcatcattggtattggggttggagcaggagcctacattctcagcagatttgcactgaatcatccagagctggtggaaggtcttgtgctcattaacattgacccgtgtgctaagggctggattgactgggcagcttccaaactctcaggttttaccaccaacatgtggacataattctggtcatcaattggncaggacgagttgaggcccattggactcattcaaactaacgaacggacatgtcaagatatcaacgagaaaactcagactcgggtactatagggcaaaccgggatcgaagcgtaatggcaaatgaaaagattggaaggcaaggttcactaaggcgggggaaacacgcgaaacaaggaggagataaccgacctaaaagtagagacggggaggccagacacggaaaagacgaaaatgggagaagacgaaccaaacacaacacgaccaaaggagataggaaaaccagtgcgctggaacacatagaaggg

SEQ ID NO: 586335 - DNA, 156 bp, Homo sapiens
tgtgtctgtgctggtgagactcaccttcaaagaactggacttggtgtggtgagaagtctgtgagctccttggccctgctgaagcctgcccagtgtcatggtgatgggcttcccacctgcagcttctggagcacttccttgggaaggagcacaagaa

SEQ ID NO: 586336 - DNA, 236 bp, Homo sapiens
taaggtaaaagcctttttcggagtttattgggggtcaactggggttttttaacaactcaggcgagttttagctttattggggggggggaaacataaaacactctttacgccggtttttattgacttgggtaaaccgggggaccgcgggggcttgcacgaaattgaccaaccctggggttagtatagcttagttaaactttcgtttatggctaaaggttaaccactgctgttccccg

SEQ ID NO: 586337 - DNA, 263 bp, Homo sapiens
  misc_feature (256)..(256): n is a, c, g, or t
gttgctgctgcggtcgatctaaggatcccggtgctagctggatagtgaacgctctcatagactcagtctcatctgctcttcctagttgcttcttccatcagatctttgcttttttttttttttttttggtttttggtcttttggtggttggtgtgtggtggtggctttttctggtggccgccgtccatttattggccgttacccgccaggggcaggggatcagacacctggcggttcatttattggccggctagcngcggtgt

SEQ ID NO: 586338 - DNA, 508 bp, Homo sapiens
gggatcgcggggagtgagggacccctctcccggcacgctcgtgagttggccctcccatcgaggctctccgtgggcggggttgcgggcttggagtcgcgcggcgcagagtcggagccgcgggcctcggacctgggggccccccggacgtgttacagcggggcggcggcaggggccccggacatccgtcggcgcacataccccgtgcccagacgcagagagaccaccccaggaaaaagcccgggtggacagagagtcatagggtgaccgcgtgccttaaaaagccttgtgccacacagagcctctcctatctgggggggcccccacgattgcagacgctttcagacgccagaagacctgtggctgggaagacccctgtgaaaggagggccctgtgtgcggggcccccagagcgaagctaacaggcgacgcacgacgagcaaacacgtggaagaactgggggattggggacctgggccagttgaccaagatgcctctcccgtgacaagact

SEQ ID NO: 586339 - DNA, 218 bp, Homo sapiens
attgcattgaaaccacaaatccggtaatgcctcagtacgttctgtggacaaaacttagcaaatccatcagacagggatctgtgcccctctgttggctgagataggaatattgtgtgtgtctacacgggataatcccattacttattgttctgctcagtgattaaatgggtgcatttcctcgtgagccctcggtgatatttatgctgcaggtgggatcc

SEQ ID NO: 586340 - DNA, 828 bp, Homo sapiens
atctcacttctagtgaatactagtatatcgctcacacctcatgtggtccctaggatgcctagaaggaataatactatcgcttgttcacttatagctactctcataaccctcaaacatgccactccgccgtcttagccagatattgcttcgctctatttgtccatactcacgtcttccgcccgccttgtcggaaggcaggcgcgttggccttgagcccgtacatatatcgtgcaattgctccgagagcgacgagtaataggcacgtaggagctagcggtatcagtagacgctagagagacatagcgtccatatgtgctaccacacctacacttcgtcgcccaaccacactaatagtgtactagcgccactgatctatgaagtggtccaatataaagcgacagtagagtgttgaattcaaaccacaaacccatctcctctaccgagtcgctaacttatttaggccctcaattctcctctacgtacccctttaaaccacatactctaaccaatcatacctattgtgagctgttcccccaacgcttttccctcctgatctccctaacaagtgccccctcctcactactaagctacctgaggtacctagcgcctcacaggtcatgggcaagtccaatggggcgacttatcgcagctgaaccacgtgagtcacgaaaaaaacgtctaccgtctctatactaaatctccctacagaagtctcccttacattatgacatgcacagcacaggaagtagtcatatcatatcttcttcgaaagcacattatcccacctgggtattatgacccgatgaggggacgccgaaggctaagcag

SEQ ID NO: 586341 - DNA, 269 bp, Homo sapiens
tgctgtcggtcgatctacaggatcccccgccatttcactatctcgtctacccacagtgacctcacatagaggccctcctgccacccatgctcctttggtgtccccaccgtccacttgtttgatgtcacttactgtctactttattttttttcttgatattttctaccctcactagaatgtagactccatgaaggcacagacttttcttattctcttctctatcccttgagtaagaccaacttgaaccttgcagatagttgtaaattgcg

SEQ ID NO: 586342 - DNA, 124 bp, Homo sapiens
gcgctggttccagcagaaggtatgatgggatcgatccttcctggcaaagtaaattcccgtgtctatccaacaagagcgaataacaagtttctcatgtgcaatacaataataacagaaaacatga
